United States Patent Application Publication US 2019/0224279 A1 - sequence listing, part 5

SEQ ID NO: 54408 - protein, 27 aa, Artificial Sequence
  Cyclic GFR-binding peptide
  MOD_RES (1), (2): Xaa is C or S
XXAPTQLEPLPVVYYDDSSNVIEQLSN

SEQ ID NO: 54409 - protein, 40 aa, Artificial Sequence; identical to SEQ ID NO: 12609
  Cyclic GFR-binding peptide
  MOD_RES (5), (6), (37), (39): Xaa is C or S

SEQ ID NO: 54410 - protein, 39 aa, Artificial Sequence; identical to SEQ ID NO: 12610
  Cyclic GFR-binding peptide
  MOD_RES (4), (5), (36), (38): Xaa is C or S

SEQ ID NO: 54411 - protein, 30 aa, Artificial Sequence; identical to SEQ ID NO: 1053
  Cyclic GFR-binding peptide

SEQ ID NO: 54412 - protein, 35 aa, Artificial Sequence
  Cyclic GFR-binding peptide
  MOD_RES (6), (7): Xaa is C or S
ASAAPXXVPQALEPLTILYYVGRKPKVEQLSNMIV

SEQ ID NO: 54413 - protein, 29 aa, Artificial Sequence
  Cyclic GFR-binding peptide
  MOD_RES (1), (2): Xaa is C or S
XXVSQDLEPLPIVYYIGKTPKIEQLSNMI

SEQ ID NO: 54414 - protein, 37 aa, Artificial Sequence; identical to SEQ ID NO: 12617
  Cyclic GFR-binding peptide
  MOD_RES (6), (7): Xaa is C or S

SEQ ID NO: 54415 - protein, 25 aa, Artificial Sequence
  Cyclic GFR-binding peptide
RLEPLPIVYYDSANNVVEQLSNDMV

SEQ ID NO: 54416 - protein, 35 aa, Artificial Sequence
  Cyclic GFR-binding peptide
  MOD_RES (6), (7): Xaa is C or S
STPPTXXVPTRLSAISILYLDSANNVVLKNYQDMV

SEQ ID NO: 54417 - protein, 27 aa, Artificial Sequence
  Cyclic GFR-binding peptide
  MOD_RES (27), (27): Xaa is C or S
EPLPMVYYDENEKVVEQLSNDMVVEGX

SEQ ID NO: 54418 - protein, 32 aa, Artificial Sequence
  Cyclic GFR-binding peptide
  MOD_RES (3), (4): Xaa is C or S
KPXXAPTKLEPLPVVYYDDSSNVIEQLSNNMV

SEQ ID NO: 54419 - protein, 38 aa, Artificial Sequence; identical to SEQ ID NO: 12620
  Cyclic GFR-binding peptide
  MOD_RES (2), (3), (35), (37): Xaa is C or S

SEQ ID NO: 54420 - protein, 35 aa, Artificial Sequence; identical to SEQ ID NO: 12622
  Cyclic GFR-binding peptide
  MOD_RES (2), (3), (35): Xaa is C or S

SEQ ID NO: 54421 - protein, 34 aa, Artificial Sequence; identical to SEQ ID NO: 12623
  Cyclic GFR-binding peptide
  MOD_RES (1), (33): Xaa is C or S

SEQ ID NO: 54422 - protein, 34 aa, Artificial Sequence; identical to SEQ ID NO: 12625
  Cyclic GFR-binding peptide
  MOD_RES (2), (3): Xaa is C or S

SEQ ID NO: 54423 - protein, 37 aa, Artificial Sequence; identical to SEQ ID NO: 12627
  Cyclic GFR-binding peptide
  MOD_RES (1), (2), (34), (36): Xaa is C or S

SEQ ID NO: 54424 - protein, 29 aa, Artificial Sequence
  Cyclic GFR-binding peptide
  MOD_RES (3), (4): Xaa is C or S
PTXXVPTRLNAISILYFDSANNVVLKKYR

SEQ ID NO: 54425 - protein, 32 aa, Artificial Sequence
  Cyclic GFR-binding peptide
  MOD_RES (4), (4): Xaa is C or S
KPTXAPTKLEPLPVVYYDDSSNVIEQLSNNMV

SEQ ID NO: 54426 - protein, 30 aa, Artificial Sequence; identical to SEQ ID NO: 12632
  Cyclic GFR-binding peptide

SEQ ID NO: 54427 - protein, 31 aa, Artificial Sequence; identical to SEQ ID NO: 12633
  Cyclic GFR-binding peptide
  MOD_RES (31), (31): Xaa is C or S

SEQ ID NO: 54428 - protein, 35 aa, Artificial Sequence; identical to SEQ ID NO: 12634
  Cyclic GFR-binding peptide
  MOD_RES (1), (2), (34): Xaa is C or S

SEQ ID NO: 54429 - protein, 35 aa, Artificial Sequence; identical to SEQ ID NO: 12635
  Cyclic GFR-binding peptide
  MOD_RES (1), (2), (34): Xaa is C or S

SEQ ID NO: 54430 - protein, 29 aa, Artificial Sequence
  Cyclic GFR-binding peptide
  MOD_RES (1), (2): Xaa is C or S
XXVPTELEPLPMVYYDENEKVVEQLSNDM

SEQ ID NO: 54431 - protein, 39 aa, Artificial Sequence; identical to SEQ ID NO: 12636
  Cyclic GFR-binding peptide
  MOD_RES (7), (39): Xaa is C or S

SEQ ID NO: 54432 - protein, 32 aa, Artificial Sequence
  Cyclic GFR-binding peptide
  MOD_RES (31), (31): Xaa is C or S
PTRLNAISILYFDSANNVVLKKYRDMVVESXG

SEQ ID NO: 54433 - protein, 22 aa, Artificial Sequence
  Cyclic GFR-binding peptide
SPISILFIIGKTPKIYKQYEMI

SEQ ID NO: 54434 - protein, 34 aa, Artificial Sequence; identical to SEQ ID NO: 12637
  Cyclic GFR-binding peptide
  MOD_RES (1), (2), (33): Xaa is C or S

SEQ ID NO: 54435 - protein, 32 aa, Artificial Sequence
  Cyclic GFR-binding peptide
  MOD_RES (31), (31): Xaa is C or S
PTELEPLTMLYYDENEKVVEQLSNDMVVEGXG

SEQ ID NO: 54436 - protein, 32 aa, Artificial Sequence; identical to SEQ ID NO: 12639
  Cyclic GFR-binding peptide
  MOD_RES (32), (32): Xaa is C or S

SEQ ID NO: 54437 - protein, 31 aa, Artificial Sequence
  Cyclic GFR-binding peptide
  MOD_RES (4), (4): Xaa is C or S
KPTXAPTKLEPLTVLYYDDSSNVIEQLSNNM

SEQ ID NO: 54438 - protein, 27 aa, Artificial Sequence
  Cyclic GFR-binding peptide
  MOD_RES (1), (1): Xaa is C or S
XVSQDLSPISILFIIGKTPKIYKQYEM

SEQ ID NO: 54439 - protein, 34 aa, Artificial Sequence; identical to SEQ ID NO: 12641
  Cyclic GFR-binding peptide
  MOD_RES (1), (2), (34): Xaa is C or S

SEQ ID NO: 54440 - protein, 22 aa, Artificial Sequence
  Cyclic GFR-binding peptide
RLEPLPIVYYDSANNVVEQLSN

SEQ ID NO: 54441 - protein, 34 aa, Artificial Sequence
  Cyclic GFR-binding peptide
  MOD_RES (6), (7): Xaa is C or S
KIPKAXXVPTELEPLTMLYYDENEKVVEQLSNDM

SEQ ID NO: 54442 - protein, 37 aa, Artificial Sequence; identical to SEQ ID NO: 12644
  Cyclic GFR-binding peptide
  MOD_RES (2), (3), (35), (37): Xaa is C or S

SEQ ID NO: 54443 - protein, 22 aa, Artificial Sequence
  Cyclic GFR-binding peptide
ELSPISMLFIDEYDKVVYKQYE

SEQ ID NO: 54444 - protein, 34 aa, Artificial Sequence; identical to SEQ ID NO: 12648
  Cyclic GFR-binding peptide
  MOD_RES (2), (34): Xaa is C or S

SEQ ID NO: 54445 - protein, 32 aa, Artificial Sequence
  Cyclic GFR-binding peptide
  MOD_RES (3), (4): Xaa is C or S
KPXXAPTQLEPLTVLYYDDSSNVIEQLSNNMV

SEQ ID NO: 54446 - protein, 34 aa, Artificial Sequence
  Cyclic GFR-binding peptide
  MOD_RES (5), (6): Xaa is C or S
VPKPXXAPTQLSPISVLFIDDSSNVIYKQYENMV

SEQ ID NO: 54447 - protein, 31 aa, Artificial Sequence
  Cyclic GFR-binding peptide
  MOD_RES (28), (30): Xaa is C or S
LEPLTVLYYDDSSNVIEQLSNNMVVRSXGXH

SEQ ID NO: 54448 - protein, 29 aa, Artificial Sequence
  Cyclic GFR-binding peptide
  MOD_RES (29), (29): Xaa is C or S
QALEPLTILYYVGRKPKVEQLSNMIVRSX

SEQ ID NO: 54449 - protein, 27 aa, Artificial Sequence
  Cyclic GFR-binding peptide
APTQLEPLTVLYYDDSSNVIEQLSNNM

SEQ ID NO: 54450 - protein, 32 aa, Artificial Sequence
  Cyclic GFR-binding peptide
  MOD_RES (30), (32): Xaa is C or S
TKLSPISVLFIDDSSNVIYKQYENMVVRSXGX

SEQ ID NO: 54451 - protein, 26 aa, Artificial Sequence
  Cyclic GFR-binding peptide
KLEPLPVVYYDDSSNVIEQLSNNMVV

SEQ ID NO: 54452 - protein, 32 aa, Artificial Sequence; identical to SEQ ID NO: 12655
  Cyclic GFR-binding peptide
  MOD_RES (1), (2): Xaa is C or S

SEQ ID NO: 54453 - protein, 31 aa, Artificial Sequence
  Cyclic GFR-binding peptide
  MOD_RES (5), (6): Xaa is C or S
TPPTXXVPTRLNAISILYFDSANNVVLKKYR

SEQ ID NO: 54454 - protein, 30 aa, Artificial Sequence
  Cyclic GFR-binding peptide
  MOD_RES (4), (5): Xaa is C or S
ASPXXVPQDLEPLPIVYYVGRTPKVEQLSN

SEQ ID NO: 54455 - protein, 38 aa, Artificial Sequence; identical to SEQ ID NO: 12660
  Cyclic GFR-binding peptide
  MOD_RES (3), (4), (36), (38): Xaa is C or S

SEQ ID NO: 54456 - protein, 39 aa, Artificial Sequence; identical to SEQ ID NO: 12661
  Cyclic GFR-binding peptide
  MOD_RES (4), (5), (37), (39): Xaa is C or S

SEQ ID NO: 54457 - protein, 26 aa, Artificial Sequence
  Cyclic GFR-binding peptide
VSQDLEPLPIVYYIGKTPKIEQLSNM

SEQ ID NO: 54458 - protein, 32 aa, Artificial Sequence; identical to SEQ ID NO: 12662
  Cyclic GFR-binding peptide
  MOD_RES (1), (1): Xaa is C or S

SEQ ID NO: 54459 - protein, 40 aa, Artificial Sequence; identical to SEQ ID NO: 12663
  Cyclic GFR-binding peptide
  MOD_RES (6), (7), (39): Xaa is C or S

SEQ ID NO: 54460 - protein, 26 aa, Artificial Sequence
  Cyclic GFR-binding peptide
QLEPLPVVYYDDSSNVIEQLSNNMVV

SEQ ID NO: 54461 - protein, 35 aa, Artificial Sequence
  Cyclic GFR-binding peptide
  MOD_RES (5), (6): Xaa is C or S
SAAPXXVPQALSPISILFIVGRKPKVYKQYEMIVR

SEQ ID NO: 54462 - protein, 31 aa, Artificial Sequence
  Cyclic GFR-binding peptide
  MOD_RES (31), (31): Xaa is C or S
PTELSPISMLFIDENEKVVYKQYEDMVVEGX

SEQ ID NO: 54463 - protein, 32 aa, Artificial Sequence
  Cyclic GFR-binding peptide
  MOD_RES (29), (31): Xaa is C or S
QLEPLTVLYYDDSSNVIEQLSNNMVVRAXGXH

SEQ ID NO: 54464 - protein, 33 aa, Artificial Sequence; identical to SEQ ID NO: 12668
  Cyclic GFR-binding peptide
  MOD_RES (2), (3): Xaa is C or S

SEQ ID NO: 54465 - protein, 31 aa, Artificial Sequence
  Cyclic GFR-binding peptide
  MOD_RES (4), (5): Xaa is C or S
PKPXXAPTQLEPLTVLYYDDSSNVIEQLSNN

SEQ ID NO: 54466 - protein, 26 aa, Artificial Sequence
  Cyclic GFR-binding peptide
QALSPISILFIVGRKPKVYKQYEMIV

SEQ ID NO: 54467 - protein, 37 aa, Artificial Sequence; identical to SEQ ID NO: 12670
  Cyclic GFR-binding peptide
  MOD_RES (2), (3), (35), (37): Xaa is C or S

SEQ ID NO: 54468 - protein, 28 aa, Artificial Sequence
  Cyclic GFR-binding peptide
  MOD_RES (1), (2): Xaa is C or S
XXAPTKLEPLTVLYYDDSSNVIEQLSNN

SEQ ID NO: 54469 - protein, 39 aa, Artificial Sequence; identical to SEQ ID NO: 12671
  Cyclic GFR-binding peptide
  MOD_RES (5), (6), (38): Xaa is C or S

SEQ ID NO: 54470 - protein, 31 aa, Artificial Sequence
  Cyclic GFR-binding peptide
  MOD_RES (2), (3): Xaa is C or S
PXXAPTQLEPLTVLYYDDSSNVIEQLSNNMV

SEQ ID NO: 54471 - protein, 29 aa, Artificial Sequence
  Cyclic GFR-binding peptide
  MOD_RES (26), (28): Xaa is C or S
EPLPIVYYIGKTPKIEQLSNMIVKSXKXS

SEQ ID NO: 54472 - protein, 32 aa, Artificial Sequence
  Cyclic GFR-binding peptide
  MOD_RES (2), (3): Xaa is C or S
PXXVSQDLSPISILFIIGKTPKIYKQYEMIVK

SEQ ID NO: 54473 - protein, 24 aa, Artificial Sequence
  Cyclic GFR-binding peptide
QALEPLTILYYVGRKPKVEQLSNM

SEQ ID NO: 54474 - protein, 28 aa, Artificial Sequence
  Cyclic GFR-binding peptide
  MOD_RES (1), (2): Xaa is C or S
XXVPTELEPLTMLYYDEYDKVVEQLSNE

SEQ ID NO: 54475 - protein, 33 aa, Artificial Sequence
  Cyclic GFR-binding peptide
  MOD_RES (4), (5): Xaa is C or S
AAPXXVPQALSPISILFIVGRKPKVYKQYEMIV

SEQ ID NO: 54476 - protein, 38 aa, Artificial Sequence; identical to SEQ ID NO: 12673
  Cyclic GFR-binding peptide
  MOD_RES (2), (3), (35), (37): Xaa is C or S

SEQ ID NO: 54477 - protein, 29 aa, Artificial Sequence
  Cyclic GFR-binding peptide
  MOD_RES (3), (3): Xaa is C or S
PTXAPTKLEPLTVLYYDDSSNVIEQLSNN

SEQ ID NO: 54478 - protein, 33 aa, Artificial Sequence
  Cyclic GFR-binding peptide
  MOD_RES (3), (4): Xaa is C or S
KPXXAPTKLEPLTVLYYDDSSNVIEQLSNNMVV

SEQ ID NO: 54479 - protein, 27 aa, Artificial Sequence
  Cyclic GFR-binding peptide
ALSPISILFIVGRKPKVYKQYEMIVRS

SEQ ID NO: 54480 - protein, 31 aa, Artificial Sequence
  Cyclic GFR-binding peptide
  MOD_RES (28), (30): Xaa is C or S
LEPLTMLYYDENEKVVEQLSNDMVVEGXGXR

SEQ ID NO: 54481 - protein, 33 aa, Artificial Sequence
  Cyclic GFR-binding peptide
  MOD_RES (31), (33): Xaa is C or S
PTKLEPLTVLYYDDSSNVIEQLSNNMVVRSXGX

SEQ ID NO: 54482 - protein, 38 aa, Artificial Sequence; identical to SEQ ID NO: 12679
  Cyclic GFR-binding peptide
  MOD_RES (5), (37): Xaa is C or S

SEQ ID NO: 54483 - protein, 32 aa, Artificial Sequence
  Cyclic GFR-binding peptide
  MOD_RES (6), (7): Xaa is C or S
TVPKPXXAPTQLEPLPVVYYDDSSNVIEQLSN

SEQ ID NO: 54484 - protein, 23 aa, Artificial Sequence
  Cyclic GFR-binding peptide
TRLSAISILYLDSANNVVLKNYQ

SEQ ID NO: 54485 - protein, 28 aa, Artificial Sequence
  Cyclic GFR-binding peptide
  MOD_RES (1), (2): Xaa is C or S
XXVPTELEPLPMVYYDEYDKVVEQLSNE

SEQ ID NO: 54486 - protein, 29 aa, Artificial Sequence
  Cyclic GFR-binding peptide
PTELEPLTMLYYDENEKVVEQLSNDMVVE

SEQ ID NO: 54487 - protein, 29 aa, Artificial Sequence
  Cyclic GFR-binding peptide
  MOD_RES (28), (28): Xaa is C or S
LNAISILYFDSANNVVLKKYRDMVVESXG

SEQ ID NO: 54488 - protein, 33 aa, Artificial Sequence; identical to SEQ ID NO: 12681
  Cyclic GFR-binding peptide
  MOD_RES (32), (32): Xaa is C or S

SEQ ID NO: 54489 - protein, 33 aa, Artificial Sequence
  Cyclic GFR-binding peptide
  MOD_RES (4), (5): Xaa is C or S
PPTXXVPTRLEPLPIVYYDSANNVVEQLSNDMV

SEQ ID NO: 54490 - protein, 32 aa, Artificial Sequence; identical to SEQ ID NO: 12682
  Cyclic GFR-binding peptide
  MOD_RES (32), (32): Xaa is C or S

SEQ ID NO: 54491 - protein, 35 aa, Artificial Sequence
  Cyclic GFR-binding peptide
  MOD_RES (5), (6): Xaa is C or S
TPPTXXVPTRLEPLTILYYDSANNVVEQLSNDMVV

SEQ ID NO: 54492 - protein, 38 aa, Artificial Sequence; identical to SEQ ID NO: 12684
  Cyclic GFR-binding peptide
  MOD_RES (4), (5), (37): Xaa is C or S

SEQ ID NO: 54493 - protein, 35 aa, Artificial Sequence; identical to SEQ ID NO: 12686
  Cyclic GFR-binding peptide
  MOD_RES (3), (35): Xaa is C or S

SEQ ID NO: 54494 - protein, 30 aa, Artificial Sequence
  Cyclic GFR-binding peptide
PTELEPLPMVYYDEYDKVVEQLSNEMVVEG

SEQ ID NO: 54495 - protein, 33 aa, Artificial Sequence; identical to SEQ ID NO: 12687
  Cyclic GFR-binding peptide
  MOD_RES (2), (3): Xaa is C or S

SEQ ID NO: 54496 - protein, 32 aa, Artificial Sequence
  Cyclic GFR-binding peptide
  MOD_RES (30), (32): Xaa is C or S
TRLNAISILYFDSANNVVLKKYRDMVVESXGX

SEQ ID NO: 54497 - protein, 27 aa, Artificial Sequence
  Cyclic GFR-binding peptide
LEPLPIVYYDSANNVVEQLSNDMVVES

SEQ ID NO: 54498 - protein, 30 aa, Artificial Sequence
  Cyclic GFR-binding peptide
  MOD_RES (3), (4): Xaa is C or S
APXXVPQALSPISILFIVGRKPKVYKQYEM

SEQ ID NO: 54499 - protein, 38 aa, Artificial Sequence; identical to SEQ ID NO: 12689
  Cyclic GFR-binding peptide
  MOD_RES (7), (7): Xaa is C or S

SEQ ID NO: 54500 - protein, 31 aa, Artificial Sequence
  Cyclic GFR-binding peptide
  MOD_RES (4), (5): Xaa is C or S
AAPXXVPQALSPISILFIVGRKPKVYKQYEM

SEQ ID NO: 54501 - protein, 31 aa, Artificial Sequence
  Cyclic GFR-binding peptide
  MOD_RES (31), (31): Xaa is C or S
PTQLSPISVLFIDDSSNVIYKQYENMVVRAX

SEQ ID NO: 54502 - protein, 40 aa, Artificial Sequence; identical to SEQ ID NO: 12690
  Cyclic GFR-binding peptide
  MOD_RES (5), (6), (38), (40): Xaa is C or S

SEQ ID NO: 54503 - protein, 35 aa, Artificial Sequence; identical to SEQ ID NO: 12691
  Cyclic GFR-binding peptide
  MOD_RES (3), (4): Xaa is C or S

SEQ ID NO: 54504 - protein, 35 aa, Artificial Sequence; identical to SEQ ID NO: 12694
  Cyclic GFR-binding peptide
  MOD_RES (4), (5): Xaa is C or S

SEQ ID NO: 54505 - protein, 27 aa, Artificial Sequence
  Cyclic GFR-binding peptide
TELSPISMLFIDEYDKVVYKQYEEMVV

SEQ ID NO: 54506 - protein, 35 aa, Artificial Sequence; identical to SEQ ID NO: 12695
  Cyclic GFR-binding peptide
  MOD_RES (2), (3), (34): Xaa is C or S

SEQ ID NO: 54507 - protein, 31 aa, Artificial Sequence
  Cyclic GFR-binding peptide
  MOD_RES (28), (30): Xaa is C or S
LSPISVLFIDDSSNVIYKQYENMVVRSXGXH

SEQ ID NO: 54508 - protein, 31 aa, Artificial Sequence
  Cyclic GFR-binding peptide
  MOD_RES (4), (5): Xaa is C or S
PKPXXAPTQLEPLPVVYYDDSSNVIEQLSNN

SEQ ID NO: 54509 - protein, 27 aa, Artificial Sequence
  Cyclic GFR-binding peptide
ELEPLPMVYYDEYDKVVEQLSNEMVVE

SEQ ID NO: 54510 - protein, 40 aa, Artificial Sequence; identical to SEQ ID NO: 12697
  Cyclic GFR-binding peptide
  MOD_RES (4), (5), (37), (39): Xaa is C or S

SEQ ID NO: 54511 - protein, 36 aa, Artificial Sequence; identical to SEQ ID NO: 12698
  Cyclic GFR-binding peptide
  MOD_RES (4), (5): Xaa is C or S

SEQ ID NO: 54512 - protein, 31 aa, Artificial Sequence
  Cyclic GFR-binding peptide
  MOD_RES (30), (30): Xaa is C or S
TQLSPISVLFIDDSSNVIYKQYENMVVRAXG

SEQ ID NO: 54513 - protein, 26 aa, Artificial Sequence
  Cyclic GFR-binding peptide
  MOD_RES (1), (1): Xaa is C or S
XVSQDLEPLPIVYYIGKTPKIEQLSN

SEQ ID NO: 54514 - protein, 35 aa, Artificial Sequence; identical to SEQ ID NO: 12701
  Cyclic GFR-binding peptide
  MOD_RES (2), (3), (34): Xaa is C or S

SEQ ID NO: 54515 - protein, 36 aa, Artificial Sequence; identical to SEQ ID NO: 12703
  Cyclic GFR-binding peptide
  MOD_RES (6), (6): Xaa is C or S

SEQ ID NO: 54516 - protein, 36 aa, Artificial Sequence; identical to SEQ ID NO: 12702
  Cyclic GFR-binding peptide
  MOD_RES (4), (5): Xaa is C or S

SEQ ID NO: 54517 - protein, 31 aa, Artificial Sequence; identical to SEQ ID NO: 12705
  Cyclic GFR-binding peptide
  MOD_RES (1), (1): Xaa is C or S

SEQ ID NO: 54518 - protein, 37 aa, Artificial Sequence; identical to SEQ ID NO: 12706
  Cyclic GFR-binding peptide
  MOD_RES (6), (7): Xaa is C or S

SEQ ID NO: 54519 - protein, 32 aa, Artificial Sequence
  Cyclic GFR-binding peptide
  MOD_RES (6), (7): Xaa is C or S
SIPKAXXVPTELSPISMLFIDEYDKVVYKQYE

SEQ ID NO: 54520 - protein, 33 aa, Artificial Sequence
  Cyclic GFR-binding peptide
  MOD_RES (5), (6): Xaa is C or S
SAAPXXVPQALSPISILFIVGRKPKVYKQYEMI

SEQ ID NO: 54521 - protein, 28 aa, Artificial Sequence
  Cyclic GFR-binding peptide
  MOD_RES (27), (27): Xaa is C or S
LSPISILFIVGRKPKVYKQYEMIVRSXK

SEQ ID NO: 54522 - protein, 34 aa, Artificial Sequence; identical to SEQ ID NO: 12708
  Cyclic GFR-binding peptide
  MOD_RES (1), (2), (34): Xaa is C or S

SEQ ID NO: 54523 - protein, 31 aa, Artificial Sequence
  Cyclic GFR-binding peptide
  MOD_RES (29), (31): Xaa is C or S
RLSAISILYLDSANNVVLKNYQDMVVESXGX

SEQ ID NO: 54524 - protein, 26 aa, Artificial Sequence
  Cyclic GFR-binding peptide
VSQDLSPISILFIIGKTPKIYKQYEM

SEQ ID NO: 54525 - protein, 28 aa, Artificial Sequence
  Cyclic GFR-binding peptide
TQLEPLPVVYYDDSSNVIEQLSNNMVVR

SEQ ID NO: 54526 - protein, 33 aa, Artificial Sequence; identical to SEQ ID NO: 12710
  Cyclic GFR-binding peptide
  MOD_RES (1), (33): Xaa is C or S

SEQ ID NO: 54527 - protein, 32 aa, Artificial Sequence; identical to SEQ ID NO: 12712
  Cyclic GFR-binding peptide
  MOD_RES (1), (32): Xaa is C or S

SEQ ID NO: 54528 - protein, 22 aa, Artificial Sequence
  Cyclic GFR-binding peptide
SAISILYLDSANNVVLKNYQDM

SEQ ID NO: 54529 - protein, 37 aa, Artificial Sequence; identical to SEQ ID NO: 12716
  Cyclic GFR-binding peptide
  MOD_RES (4), (5), (37): Xaa is C or S

SEQ ID NO: 54530 - protein, 39 aa, Artificial Sequence; identical to SEQ ID NO: 12717
  Cyclic GFR-binding peptide
  MOD_RES (5), (6), (38): Xaa is C or S

SEQ ID NO: 54531 - protein, 31 aa, Artificial Sequence
  Cyclic GFR-binding peptide
  MOD_RES (31), (31): Xaa is C or S
PTELSPISMLFIDEYDKVVYKQYEEMVVEGX

SEQ ID NO: 54532 - protein, 27 aa, Artificial Sequence
  Cyclic GFR-binding peptide
PTQLEPLTVLYYDDSSNVIEQLSNNMV

SEQ ID NO: 54533 - protein, 24 aa, Artificial Sequence
  Cyclic GFR-binding peptide
KLSPISVLFIDDSSNVIYKQYENM

SEQ ID NO: 54534 - protein, 36 aa, Artificial Sequence; identical to SEQ ID NO: 12719
  Cyclic GFR-binding peptide
  MOD_RES (5), (6): Xaa is C or S

SEQ ID NO: 54535 - protein, 24 aa, Artificial Sequence
  Cyclic GFR-binding peptide
EPLPIVYYVGRTPKVEQLSNMVVK

SEQ ID NO: 54536 - protein, 37 aa, Artificial Sequence; identical to SEQ ID NO: 12720
  Cyclic GFR-binding peptide
  MOD_RES (6), (7): Xaa is C or S

SEQ ID NO: 54537 - protein, 34 aa, Artificial Sequence; identical to SEQ ID NO: 12722
  Cyclic GFR-binding peptide
  MOD_RES (1), (33): Xaa is C or S

SEQ ID NO: 54538 - protein, 22 aa, Artificial Sequence
  Cyclic GFR-binding peptide
ELEPLPMVYYDENEKVVEQLSN

SEQ ID NO: 54539 - protein, 32 aa, Artificial Sequence
  Cyclic GFR-binding peptide
  MOD_RES (5), (6): Xaa is C or S
SASPXXVSQDLEPLPIVYYIGKTPKIEQLSNM

SEQ ID NO: 54540 - protein, 36 aa, Artificial Sequence; identical to SEQ ID NO: 12724
  Cyclic GFR-binding peptide
  MOD_RES (4), (5): Xaa is C or S

SEQ ID NO: 54541 - protein, 36 aa, Artificial Sequence; identical to SEQ ID NO: 12725
  Cyclic GFR-binding peptide
  MOD_RES (4), (5): Xaa is C or S

SEQ ID NO: 54542 - protein, 31 aa, Artificial Sequence
  Cyclic GFR-binding peptide
  MOD_RES (28), (30): Xaa is C or S
ALSPISILFIVGRKPKVYKQYEMIVRSXKXS

SEQ ID NO: 54543 - protein, 27 aa, Artificial Sequence
  Cyclic GFR-binding peptide
  MOD_RES (27), (27): Xaa is C or S
EPLTVLYYDDSSNVIEQLSNNMVVRAX

SEQ ID NO: 54544 - protein, 30 aa, Artificial Sequence
  Cyclic GFR-binding peptide
  MOD_RES (28), (30): Xaa is C or S
DLEPLPIVYYIGKTPKIEQLSNMIVKSXKX

SEQ ID NO: 54545 - protein, 35 aa, Artificial Sequence
  Cyclic GFR-binding peptide
  MOD_RES (6), (7): Xaa is C or S
SIPKAXXVPTELEPLTMLYYDEYDKVVEQLSNEMV

SEQ ID NO: 54546 - protein, 22 aa, Artificial Sequence
  Cyclic GFR-binding peptide
LSPISILFIVGRTPKVYKQYEM

SEQ ID NO: 54547 - protein, 29 aa, Artificial Sequence
  Cyclic GFR-binding peptide
  MOD_RES (27), (29): Xaa is C or S
SPISMLFIDENEKVVYKQYEDMVVEGXGX

SEQ ID NO: 54548 - protein, 25 aa, Artificial Sequence
  Cyclic GFR-binding peptide
APTKLEPLPVVYYDDSSNVIEQLSN

SEQ ID NO: 54549 - protein, 27 aa, Artificial Sequence
  Cyclic GFR-binding peptide
  MOD_RES (1), (1): Xaa is C or S
XAPTKLEPLTVLYYDDSSNVIEQLSNN

SEQ ID NO: 54550 - protein, 29 aa, Artificial Sequence
  Cyclic GFR-binding peptide
  MOD_RES (3), (3): Xaa is C or S
PTXAPTKLSPISVLFIDDSSNVIYKQYEN

SEQ ID NO: 54551 - protein, 27 aa, Artificial Sequence
  Cyclic GFR-binding peptide
  MOD_RES (1), (1): Xaa is C or S
XVSQDLEPLPIVYYIGKTPKIEQLSNM

SEQ ID NO: 54552 - protein, 29 aa, Artificial Sequence
  Cyclic GFR-binding peptide
  MOD_RES (2), (3): Xaa is C or S
PXXVPQDLEPLPIVYYVGRTPKVEQLSNM

SEQ ID NO: 54553 - protein, 31 aa, Artificial Sequence; identical to SEQ ID NO: 12731
  Cyclic GFR-binding peptide
  MOD_RES (1), (1): Xaa is C or S

SEQ ID NO: 54554 - protein, 34 aa, Artificial Sequence; identical to SEQ ID NO: 12732
  Cyclic GFR-binding peptide
  MOD_RES (3), (4): Xaa is C or S

SEQ ID NO: 54555 - protein, 40 aa, Artificial Sequence; identical to SEQ ID NO: 12733
  Cyclic GFR-binding peptide
  MOD_RES (5), (6), (38), (40): Xaa is C or S

SEQ ID NO: 54556 - protein, 29 aa, Artificial Sequence
  Cyclic GFR-binding peptide
APTKLEPLPVVYYDDSSNVIEQLSNNMVV

SEQ ID NO: 54557 - protein, 28 aa, Artificial Sequence
  Cyclic GFR-binding peptide
VPTELEPLTMLYYDENEKVVEQLSNDMV

SEQ ID NO: 54558 - protein, 34 aa, Artificial Sequence; identical to SEQ ID NO: 12734
  Cyclic GFR-binding peptide
  MOD_RES (1), (33): Xaa is C or S

SEQ ID NO: 54559 - protein, 33 aa, Artificial Sequence; identical to SEQ ID NO: 12735
  Cyclic GFR-binding peptide
  MOD_RES (1), (33): Xaa is C or S

SEQ ID NO: 54560 - protein, 29 aa, Artificial Sequence
  Cyclic GFR-binding peptide
  MOD_RES (27), (29): Xaa is C or S
EPLPMVYYDENEKVVEQLSNDMVVEGXGX

SEQ ID NO: 54561 - protein, 39 aa, Artificial Sequence; identical to SEQ ID NO: 12737
  Cyclic GFR-binding peptide
  MOD_RES (5), (6), (38): Xaa is C or S

SEQ ID NO: 54562 - protein, 26 aa, Artificial Sequence
  Cyclic GFR-binding peptide
PQALEPLTILYYVGRKPKVEQLSNMI

SEQ ID NO: 54563 - protein, 25 aa, Artificial Sequence
  Cyclic GFR-binding peptide
VPTELSPISMLFIDEYDKVVYKQYE

SEQ ID NO: 54564 - protein, 30 aa, Artificial Sequence
  Cyclic GFR-binding peptide
  MOD_RES (1), (2): Xaa is C or S
XXVPTELSPISMLFIDENEKVVYKQYEDMV

SEQ ID NO: 54565 - protein, 25 aa, Artificial Sequence
  Cyclic GFR-binding peptide
PTKLEPLTVLYYDDSSNVIEQLSNN

SEQ ID NO: 54566 - protein, 38 aa, Artificial Sequence; identical to SEQ ID NO: 12738
  Cyclic GFR-binding peptide
  MOD_RES (4), (5), (37): Xaa is C or S

SEQ ID NO: 54567 - protein, 26 aa, Artificial Sequence
  Cyclic GFR-binding peptide
LEPLPIVYYVGRTPKVEQLSNMVVKS

SEQ ID NO: 54568 - protein, 31 aa, Artificial Sequence; identical to SEQ ID NO: 12743
  Cyclic GFR-binding peptide
  MOD_RES (31), (31): Xaa is C or S

SEQ ID NO: 54569 - protein, 30 aa, Artificial Sequence
  Cyclic GFR-binding peptide
  MOD_RES (1), (1): Xaa is C or S
XAPTKLEPLPVVYYDDSSNVIEQLSNNMVV

SEQ ID NO: 54570 - protein, 29 aa, Artificial Sequence
  Cyclic GFR-binding peptide
EPLPMVYYDENEKVVEQLSNAAAAAAAAA

SEQ ID NO: 54571 - protein, 35 aa, Artificial Sequence; identical to SEQ ID NO: 12745
  Cyclic GFR-binding peptide
  MOD_RES (1), (33), (35): Xaa is C or S

SEQ ID NO: 54572 - protein, 30 aa, Artificial Sequence
  Cyclic GFR-binding peptide
  MOD_RES (29), (29): Xaa is C or S
ELEPLPMVYYDENEKVVEQLSNDMVVEGXG

SEQ ID NO: 54573 - protein, 38 aa, Artificial Sequence; identical to SEQ ID NO: 12747
  Cyclic GFR-binding peptide
  MOD_RES (5), (6), (38): Xaa is C or S

SEQ ID NO: 54574 - protein, 37 aa, Artificial Sequence; identical to SEQ ID NO: 12749
  Cyclic GFR-binding peptide
  MOD_RES (1), (2), (34), (36): Xaa is C or S

SEQ ID NO: 54575 - protein, 32 aa, Artificial Sequence; identical to SEQ ID NO: 12751
  Cyclic GFR-binding peptide
  MOD_RES (1), (32): Xaa is C or S

SEQ ID NO: 54576 - protein, 30 aa, Artificial Sequence
  Cyclic GFR-binding peptide
  MOD_RES (27), (29): Xaa is C or S
EPLPVVYYDDSSNVIEQLSNNMVVRSXGXH

SEQ ID NO: 54577 - protein, 29 aa, Artificial Sequence
  Cyclic GFR-binding peptide
  MOD_RES (2), (3): Xaa is C or S
PXXVPQDLSPISILFIVGRTPKVYKQYEM

SEQ ID NO: 54578 - protein, 27 aa, Artificial Sequence
  Cyclic GFR-binding peptide
ELEPLTMLYYDENEKVVEQLSNDMVVE

SEQ ID NO: 54579 - protein, 35 aa, Artificial Sequence
  Cyclic GFR-binding peptide
  MOD_RES (5), (6): Xaa is C or S
VPKPXXAPTKLSPISVLFIDDSSNVIYKQYENMVV

SEQ ID NO: 54580 - protein, 23 aa, Artificial Sequence
  Cyclic GFR-binding peptide
ALEPLTILYYVGRKPKVEQLSNM

SEQ ID NO: 54581 - protein, 29 aa, Artificial Sequence
  Cyclic GFR-binding peptide
  MOD_RES (1), (2): Xaa is C or S
XXAPTQLEPLTVLYYDDSSNVIEQLSNNM

SEQ ID NO: 54582 - protein, 31 aa, Artificial Sequence
  Cyclic GFR-binding peptide
  MOD_RES (29), (31): Xaa is C or S
RLEPLTILYYDSANNVVEQLSNDMVVESXGX

SEQ ID NO: 54583 - protein, 39 aa, Artificial Sequence; identical to SEQ ID NO: 12754
  Cyclic GFR-binding peptide
  MOD_RES (6), (7), (39): Xaa is C or S

SEQ ID NO: 54584 - protein, 31 aa, Artificial Sequence
  Cyclic GFR-binding peptide
  MOD_RES (30), (30): Xaa is C or S
TKLEPLTVLYYDDSSNVIEQLSNNMVVRSXG

SEQ ID NO: 54585 - protein, 29 aa, Artificial Sequence
  Cyclic GFR-binding peptide
SPISMLFIDEYDKVVYKQYEAAAAAAAAA

SEQ ID NO: 54586 - protein, 28 aa, Artificial Sequence
  Cyclic GFR-binding peptide
PTELSPISMLFIDENEKVVYKQYEDMVV

SEQ ID NO: 54587 - protein, 35 aa, Artificial Sequence; identical to SEQ ID NO: 12756
  Cyclic GFR-binding peptide
  MOD_RES (2), (3), (35): Xaa is C or S

SEQ ID NO: 54588 - protein, 28 aa, Artificial Sequence
  Cyclic GFR-binding peptide
  MOD_RES (27), (27): Xaa is C or S
LSPISILFIVGRTPKVYKQYEMVVKSXK

SEQ ID NO: 54589 - protein, 34 aa, Artificial Sequence; identical to SEQ ID NO: 12757
  Cyclic GFR-binding peptide
  MOD_RES (1), (2), (34): Xaa is C or S

SEQ ID NO: 54590 - protein, 29 aa, Artificial Sequence
  Cyclic GFR-binding peptide
TELEPLTMLYYDENEKVVEQLSNDMVVEG

SEQ ID NO: 54591 - protein, 30 aa, Artificial Sequence
  Cyclic GFR-binding peptide
  MOD_RES (30), (30): Xaa is C or S
TELEPLTMLYYDENEKVVEQLSNDMVVEGX

SEQ ID NO: 54592 - protein, 29 aa, Artificial Sequence
  Cyclic GFR-binding peptide
  MOD_RES (2), (3): Xaa is C or S
TXXVPTRLSAISILYLDSANNVVLKNYQD

SEQ ID NO: 54593 - protein, 26 aa, Artificial Sequence
  Cyclic GFR-binding peptide
EPLPVVYYDDSSNVIEQLSNNMVVRS

SEQ ID NO: 54594 - protein, 41 aa, Artificial Sequence; identical to SEQ ID NO: 12759
  Cyclic GFR-binding peptide
  MOD_RES (6), (7), (38), (40): Xaa is C or S

SEQ ID NO: 54595 - protein, 28 aa, Artificial Sequence
  Cyclic GFR-binding peptide
  MOD_RES (1), (2): Xaa is C or S
XXVPTELSPISMLFIDEYDKVVYKQYEE

SEQ ID NO: 54596 - protein, 31 aa, Artificial Sequence; identical to SEQ ID NO: 12761
  Cyclic GFR-binding peptide
  MOD_RES (1), (1): Xaa is C or S

SEQ ID NO: 54597 - protein, 28 aa, Artificial Sequence
  Cyclic GFR-binding peptide
  MOD_RES (2), (3): Xaa is C or S
PXXVPQALEPLTILYYVGRKPKVEQLSN

SEQ ID NO: 54598 - protein, 38 aa, Artificial Sequence; identical to SEQ ID NO: 12763
  Cyclic GFR-binding peptide
  MOD_RES (5), (6), (38): Xaa is C or S

SEQ ID NO: 54599 - protein, 34 aa, Artificial Sequence
  Cyclic GFR-binding peptide
  MOD_RES (4), (5): Xaa is C or S
PKPXXAPTKLEPLTVLYYDDSSNVIEQLSNNMVV

SEQ ID NO: 54600 - protein, 29 aa, Artificial Sequence
  Cyclic GFR-binding peptide
  MOD_RES (3), (3): Xaa is C or S
PTXAPTKLEPLPVVYYDDSSNVIEQLSNN

SEQ ID NO: 54601 - protein, 34 aa, Artificial Sequence
  Cyclic GFR-binding peptide
  MOD_RES (5), (6): Xaa is C or S
IPKAXXVPTELEPLTMLYYDENEKVVEQLSNDMV

SEQ ID NO: 54602 - protein, 30 aa, Artificial Sequence
  Cyclic GFR-binding peptide
  MOD_RES (27), (29): Xaa is C or S
LSPISILFIVGRKPKVYKQYEMIVRSXKXS

SEQ ID NO: 54603 - protein, 33 aa, Artificial Sequence; identical to SEQ ID NO: 12765
  Cyclic GFR-binding peptide
  MOD_RES (2), (3): Xaa is C or S

SEQ ID NO: 54604 - protein, 35 aa, Artificial Sequence; identical to SEQ ID NO: 12766
  Cyclic GFR-binding peptide
  MOD_RES (2), (3), (34): Xaa is C or S

SEQ ID NO: 54605 - protein, 22 aa, Artificial Sequence
  Cyclic GFR-binding peptide
RLNAISILYFDSANNVVLKKYR

SEQ ID NO: 54606 - protein, 24 aa, Artificial Sequence
  Cyclic GFR-binding peptide
PTELEPLPMVYYDEYDKVVEQLSN

SEQ ID NO: 54607 - protein, 38 aa, Artificial Sequence; identical to SEQ ID NO: 12767
  Cyclic GFR-binding peptide
  MOD_RES (4), (36), (38): Xaa is C or S

SEQ ID NO: 54608 - protein, 31 aa, Artificial Sequence
  Cyclic GFR-binding peptide
  MOD_RES (3), (4): Xaa is C or S
PTXXVPTRLSAISILYLDSANNVVLKNYQDM

SEQ ID NO: 54609 - protein, 23 aa, Artificial Sequence
  Cyclic GFR-binding peptide
LSPISVLFIDDSSNVIYKQYENM

SEQ ID NO: 54610 - protein, 33 aa, Artificial Sequence
  Cyclic GFR-binding peptide
  MOD_RES (30), (32): Xaa is C or S
TRLSAISILYLDSANNVVLKNYQDMVVESXGXR

SEQ ID NO: 54611 - protein, 35 aa, Artificial Sequence; identical to SEQ ID NO: 12769
  Cyclic GFR-binding peptide
  MOD_RES (3), (4): Xaa is C or S

SEQ ID NO: 54612 - protein, 32 aa, Artificial Sequence
  Cyclic GFR-binding peptide
  MOD_RES (3), (4): Xaa is C or S
KAXXVPTELEPLPMVYYDEYDKVVEQLSNEMV

SEQ ID NO: 54613 - protein, 27 aa, Artificial Sequence
  Cyclic GFR-binding peptide
APTKLSPISVLFIDDSSNVIYKQYENM

SEQ ID NO: 54614 - protein, 29 aa, Artificial Sequence
  Cyclic GFR-binding peptide
TELEPLTMLYYDEYDKVVEQLSNEMVVEG

SEQ ID NO: 54615 - protein, 36 aa, Artificial Sequence; identical to SEQ ID NO: 12770
  Cyclic GFR-binding peptide
  MOD_RES (3), (4), (35): Xaa is C or S

SEQ ID NO: 54616 - protein, 30 aa, Artificial Sequence
  Cyclic GFR-binding peptide
  MOD_RES (30), (30): Xaa is C or S
TELEPLTMLYYDEYDKVVEQLSNEMVVEGX

SEQ ID NO: 54617 - protein, 25 aa, Artificial Sequence
  Cyclic GFR-binding peptide
SPISILFIIGKTPKIYKQYEMIVKS

SEQ ID NO: 54618 - protein, 24 aa, Artificial Sequence
  Cyclic GFR-binding peptide
QALSPISILFIVGRKPKVYKQYEM

SEQ ID NO: 54619 - protein, 25 aa, Artificial Sequence
  Cyclic GFR-binding peptide
VPTELEPLTMLYYDENEKVVEQLSN

SEQ ID NO: 54620 - protein, 33 aa, Artificial Sequence; identical to SEQ ID NO: 12773
  Cyclic GFR-binding peptide
  MOD_RES (1), (33): Xaa is C or S

SEQ ID NO: 54621 - protein, 36 aa, Artificial Sequence; identical to SEQ ID NO: 12774
  Cyclic GFR-binding peptide
  MOD_RES (3), (4), (36): Xaa is C or S

SEQ ID NO: 54622 - protein, 28 aa, Artificial Sequence
  Cyclic GFR-binding peptide
VPTRLSAISILYLDSANNVVLKNYQDMV

SEQ ID NO: 54623 - protein, 33 aa, Artificial Sequence; identical to SEQ ID NO: 12775
  Cyclic GFR-binding peptide
  MOD_RES (1), (32): Xaa is C or S

SEQ ID NO: 54624 - protein, 36 aa, Artificial Sequence
  Cyclic GFR-binding peptide
  MOD_RES (7), (7): Xaa is C or S
HVTKPTXAPTKLEPLTVLYYDDSSNVIEQLSNNMVV

SEQ ID NO: 54625 - protein, 31 aa, Artificial Sequence
  Cyclic GFR-binding peptide
  MOD_RES (5), (6): Xaa is C or S
IPKAXXVPTELSPISMLFIDENEKVVYKQYE

SEQ ID NO: 54626 - protein, 26 aa, Artificial Sequence
  Cyclic GFR-binding peptide
EPLPVVYYDDSSNVIEQLSNNMVVRA

SEQ ID NO: 54627 - protein, 34 aa, Artificial Sequence; identical to SEQ ID NO: 12777
  Cyclic GFR-binding peptide
  MOD_RES (2), (3): Xaa is C or S

SEQ ID NO: 54628 - protein, 27 aa, Artificial Sequence
  Cyclic GFR-binding peptide
  MOD_RES (1), (2): Xaa is C or S
XXVPQDLSPISILFIVGRTPKVYKQYE

SEQ ID NO: 54629 - protein, 24 aa, Artificial Sequence
  Cyclic GFR-binding peptide
TKLEPLTVLYYDDSSNVIEQLSNN

SEQ ID NO: 54630 - protein, 26 aa, Artificial Sequence
  Cyclic GFR-binding peptide
TQLSPISVLFIDDSSNVIYKQYENMV

SEQ ID NO: 54631 - protein, 35 aa, Artificial Sequence; identical to SEQ ID NO: 12778
  Cyclic GFR-binding peptide
  MOD_RES (4), (5): Xaa is C or S

SEQ ID NO: 54632 - protein, 28 aa, Artificial Sequence
  Cyclic GFR-binding peptide
TELEPLTMLYYDENEKVVEQLSNDMVVE

SEQ ID NO: 54633 - protein, 25 aa, Artificial Sequence
  Cyclic GFR-binding peptide
VSQDLSPISILFIIGKTPKIYKQYE

SEQ ID NO: 54634 - protein, 26 aa, Artificial Sequence
  Cyclic GFR-binding peptide
PTQLEPLTVLYYDDSSNVIEQLSNNM

SEQ ID NO: 54635 - protein, 23 aa, Artificial Sequence
  Cyclic GFR-binding peptide
EPLPIVYYVGRTPKVEQLSNMVV

SEQ ID NO: 54636 - protein, 30 aa, Artificial Sequence
  Cyclic GFR-binding peptide
  MOD_RES (5), (5): Xaa is C or S
TKPTXAPTKLSPISVLFIDDSSNVIYKQYE

SEQ ID NO: 54637 - protein, 30 aa, Artificial Sequence
  Cyclic GFR-binding peptide
  MOD_RES (30), (30): Xaa is C or S
TQLEPLTVLYYDDSSNVIEQLSNNMVVRAX

SEQ ID NO: 54638 - protein, 41 aa, Artificial Sequence; identical to SEQ ID NO: 12783
  Cyclic GFR-binding peptide
  MOD_RES (6), (7), (39), (41): Xaa is C or S

SEQ ID NO: 54639 - protein, 39 aa, Artificial Sequence; identical to SEQ ID NO: 12784
  Cyclic GFR-binding peptide
  MOD_RES (3), (4), (36), (38): Xaa is C or S

SEQ ID NO: 54640 - protein, 39 aa, Artificial Sequence; identical to SEQ ID NO: 12785
  Cyclic GFR-binding peptide
  MOD_RES (6), (7), (39): Xaa is C or S

SEQ ID NO: 54641 - protein, 30 aa, Artificial Sequence
  Cyclic GFR-binding peptide
  MOD_RES (4), (5): Xaa is C or S
PKPXXAPTQLEPLPVVYYDDSSNVIEQLSN

SEQ ID NO: 54642 - protein, 30 aa, Artificial Sequence
  Cyclic GFR-binding peptide
  MOD_RES (29), (29): Xaa is C or S
QDLEPLPIVYYIGKTPKIEQLSNMIVKSXK

SEQ ID NO: 54643 - protein, 34 aa, Artificial Sequence; identical to SEQ ID NO: 12787
  Cyclic GFR-binding peptide
  MOD_RES (31), (33): Xaa is C or S

SEQ ID NO: 54644 - protein, 30 aa, Artificial Sequence
  Cyclic GFR-binding peptide
  MOD_RES (1), (1): Xaa is C or S
XVPTELEPLPMVYYDENEKVVEQLSNDMVV

SEQ ID NO: 54645 - protein, 30 aa, Artificial Sequence
  Cyclic GFR-binding peptide
  MOD_RES (29), (29): Xaa is C or S
ELEPLTMLYYDENEKVVEQLSNDMVVEGXG

SEQ ID NO: 54646 - protein, 40 aa, Artificial Sequence; identical to SEQ ID NO: 12790
  Cyclic GFR-binding peptide
  MOD_RES (4), (5), (37), (39): Xaa is C or S

SEQ ID NO: 54647 - protein, 37 aa, Artificial Sequence; identical to SEQ ID NO: 12791
  Cyclic GFR-binding peptide
  MOD_RES (4), (5), (37): Xaa is C or S

SEQ ID NO: 54648 - protein, 34 aa, Artificial Sequence; identical to SEQ ID NO: 12793
  Cyclic GFR-binding peptide
  MOD_RES (1), (2), (34): Xaa is C or S

SEQ ID NO: 54649 - protein, 36 aa, Artificial Sequence; identical to SEQ ID NO: 12798
  Cyclic GFR-binding peptide
  MOD_RES (4), (5), (36): Xaa is C or S

SEQ ID NO: 54650 - protein, 30 aa, Artificial Sequence
  Cyclic GFR-binding peptide
  MOD_RES (2), (3): Xaa is C or S
PXXVSQDLSPISILFIIGKTPKIYKQYEMI

SEQ ID NO: 54651 - protein, 32 aa, Artificial Sequence; identical to SEQ ID NO: 12800
  Cyclic GFR-binding peptide
  MOD_RES (1), (2): Xaa is C or S

SEQ ID NO: 54652 - protein, 29 aa, Artificial Sequence
  Cyclic GFR-binding peptide
  MOD_RES (4), (4): Xaa is C or S
KPTXAPTKLSPISVLFIDDSSNVIYKQYE

SEQ ID NO: 54653 - protein, 21 aa, Artificial Sequence
  Cyclic GFR-binding peptide
EPLPMVYYDENEKVVEQLSND

SEQ ID NO: 54654 - protein, 24 aa, Artificial Sequence
  Cyclic GFR-binding peptide
TQLSPISVLFIDDSSNVIYKQYEN

SEQ ID NO: 54655 - protein, 31 aa, Artificial Sequence
  Cyclic GFR-binding peptide
  MOD_RES (28), (30): Xaa is C or S
DLEPLPIVYYVGRTPKVEQLSNMVVKSXKXS

SEQ ID NO: 54656 - protein, 29 aa, Artificial Sequence
  Cyclic GFR-binding peptide
PQALEPLTILYYVGRKPKVEQLSNMIVRS

SEQ ID NO: 54657 - protein, 28 aa, Artificial Sequence
  Cyclic GFR-binding peptide
  MOD_RES (28), (28): Xaa is C or S
LSPISMLFIDEYDKVVYKQYEEMVVEGX

SEQ ID NO: 54658 - protein, 31 aa, Artificial Sequence; identical to SEQ ID NO: 12804
  Cyclic GFR-binding peptide

SEQ ID NO: 54659 - protein, 34 aa, Artificial Sequence; identical to SEQ ID NO: 12805
  Cyclic GFR-binding peptide
  MOD_RES (32), (34): Xaa is C or S

SEQ ID NO: 54660 - protein, 35 aa, Artificial Sequence
  Cyclic GFR-binding peptide
  MOD_RES (5), (6): Xaa is C or S
IPKAXXVPTELSPISMLFIDEYDKVVYKQYEEMVV

SEQ ID NO: 54661 - protein, 37 aa, Artificial Sequence; identical to SEQ ID NO: 12806
  Cyclic GFR-binding peptide
  MOD_RES (2), (3), (35), (37): Xaa is C or S

SEQ ID NO: 54662 - protein, 30 aa, Artificial Sequence
  Cyclic GFR-binding peptide
  MOD_RES (1), (1): Xaa is C or S
XAPTKLEPLTVLYYDDSSNVIEQLSNNMVV

SEQ ID NO: 54663 - protein, 28 aa, Artificial Sequence
  Cyclic GFR-binding peptide
  MOD_RES (26), (28): Xaa is C or S
EPLTILYYVGRKPKVEQLSNMIVRSXKX

SEQ ID NO: 54664 - protein, 24 aa, Artificial Sequence
  Cyclic GFR-binding peptide
ELEPLPMVYYDEYDKVVEQLSNEM

SEQ ID NO: 54665 - protein, 35 aa, Artificial Sequence
  Cyclic GFR-binding peptide
  MOD_RES (6), (7): Xaa is C or S
STPPTXXVPTRLEPLPIVYYDSANNVVEQLSNDMV

SEQ ID NO: 54666 - protein, 24 aa, Artificial Sequence
  Cyclic GFR-binding peptide
PTRLEPLPIVYYDSANNVVEQLSN

SEQ ID NO: 54667 - protein, 34 aa, Artificial Sequence
  Cyclic GFR-binding peptide
  MOD_RES (31), (33): Xaa is C or S
PTRLEPLPIVYYDSANNVVEQLSNDMVVESXGXR

SEQ ID NO: 54668 - protein, 28 aa, Artificial Sequence
  Cyclic GFR-binding peptide
  MOD_RES (2), (2): Xaa is C or S
TXAPTKLEPLPVVYYDDSSNVIEQLSNN

SEQ ID NO: 54669 - protein, 38 aa, Artificial Sequence; identical to SEQ ID NO: 12807
  Cyclic GFR-binding peptide
  MOD_RES (7), (7): Xaa is C or S

SEQ ID NO: 54670 - protein, 21 aa, Artificial Sequence
  Cyclic GFR-binding peptide
LEPLPMVYYDENEKVVEQLSN

SEQ ID NO: 54671 - protein, 28 aa, Artificial Sequence
  Cyclic GFR-binding peptide
  MOD_RES (2), (3): Xaa is C or S
PXXAPTQLEPLTVLYYDDSSNVIEQLSN

SEQ ID NO: 54672 - protein, 25 aa, Artificial Sequence
  Cyclic GFR-binding peptide
PQALSPISILFIVGRKPKVYKQYEM

SEQ ID NO: 54673 - protein, 27 aa, Artificial Sequence
  Cyclic GFR-binding peptide
  MOD_RES (27), (27): Xaa is C or S
LEPLTILYYVGRKPKVEQLSNMIVRSX

SEQ ID NO: 54674 - protein, 33 aa, Artificial Sequence; identical to SEQ ID NO: 12811
  Cyclic GFR-binding peptide
  MOD_RES (32), (32): Xaa is C or S

SEQ ID NO: 54675 - protein, 24 aa, Artificial Sequence
  Cyclic GFR-binding peptide
EPLTVLYYDDSSNVIEQLSNNMVV

SEQ ID NO: 54676 - protein, 33 aa, Artificial Sequence; identical to SEQ ID NO: 12813
  Cyclic GFR-binding peptide
  MOD_RES (1), (33): Xaa is C or S

SEQ ID NO: 54677 - protein, 33 aa, Artificial Sequence; identical to SEQ ID NO: 12814
  Cyclic GFR-binding peptide
  MOD_RES (31), (33): Xaa is C or S

SEQ ID NO: 54678 - protein, 35 aa, Artificial Sequence
  Cyclic GFR-binding peptide
  MOD_RES (5), (6): Xaa is C or S
TPPTXXVPTRLEPLPIVYYDSANNVVEQLSNDMVV

SEQ ID NO: 54679 - protein, 25 aa, Artificial Sequence
  Cyclic GFR-binding peptide
SQDLSPISILFIIGKTPKIYKQYEM

SEQ ID NO: 54680 - protein, 28 aa, Artificial Sequence
  Cyclic GFR-binding peptide
PTELEPLPMVYYDEYDKVVEQLSNEMVV

SEQ ID NO: 54681 - protein, 33 aa, Artificial Sequence; identical to SEQ ID NO: 12816
  Cyclic GFR-binding peptide
  MOD_RES (2), (3): Xaa is C or S

SEQ ID NO: 54682 - protein, 33 aa, Artificial Sequence; identical to SEQ ID NO: 12818
  Cyclic GFR-binding peptide
  MOD_RES (32), (32): Xaa is C or S

SEQ ID NO: 54683 - protein, 28 aa, Artificial Sequence
  Cyclic GFR-binding peptide
  MOD_RES (27), (27): Xaa is C or S
EPLTVLYYDDSSNVIEQLSNNMVVRSXG

SEQ ID NO: 54684 - protein, 36 aa, Artificial Sequence; identical to SEQ ID NO: 12821
  Cyclic GFR-binding peptide
  MOD_RES (4), (5): Xaa is C or S

SEQ ID NO: 54685 - protein, 27 aa, Artificial Sequence
  Cyclic GFR-binding peptide
QLEPLPVVYYDDSSNVIEQLSNNMVVR

SEQ ID NO: 54686 - protein, 35 aa, Artificial Sequence; identical to SEQ ID NO: 12822
  Cyclic GFR-binding peptide
  MOD_RES (3), (35): Xaa is C or S

SEQ ID NO: 54687 - protein, 42 aa, Artificial Sequence; identical to SEQ ID NO: 12823
  Cyclic GFR-binding peptide
  MOD_RES (6), (7), (39), (41): Xaa is C or S

SEQ ID NO: 54688 - protein, 38 aa, Artificial Sequence; identical to SEQ ID NO: 12824
  Cyclic GFR-binding peptide
  MOD_RES (6), (7): Xaa is C or S

SEQ ID NO: 54689 - protein, 29 aa, Artificial Sequence
  Cyclic GFR-binding peptide
  MOD_RES (1), (1): Xaa is C or S
XVPTRLSAISILYLDSANNVVLKNYQDMV

SEQ ID NO: 54690 - protein, 26 aa, Artificial Sequence
  Cyclic GFR-binding peptide
DLEPLPIVYYVGRTPKVEQLSNMVVK

SEQ ID NO: 54691 - protein, 27 aa, Artificial Sequence
  Cyclic GFR-binding peptide
  MOD_RES (1), (1): Xaa is C or S
XVPTRLEPLPIVYYDSANNVVEQLSND

SEQ ID NO: 54692 - protein, 26 aa, Artificial Sequence
  Cyclic GFR-binding peptide
TELEPLPMVYYDEYDKVVEQLSNEMV

SEQ ID NO: 54693 - protein, 24 aa, Artificial Sequence
  Cyclic GFR-binding peptide
QDLSPISILFIVGRTPKVYKQYEM

SEQ ID NO: 54694 - protein, 29 aa, Artificial Sequence
  Cyclic GFR-binding peptide
  MOD_RES (28), (28): Xaa is C or S
LEPLPMVYYDENEKVVEQLSNDMVVEGXG

SEQ ID NO: 54695 - protein, 31 aa, Artificial Sequence
  Cyclic GFR-binding peptide
  MOD_RES (4), (5): Xaa is C or S
PPTXXVPTRLEPLTILYYDSANNVVEQLSND

SEQ ID NO: 54696 - protein, 39 aa, Artificial Sequence; identical to SEQ ID NO: 12827
  Cyclic GFR-binding peptide
  MOD_RES (3), (4), (36), (38): Xaa is C or S

SEQ ID NO: 54697 - protein, 34 aa, Artificial Sequence; identical to SEQ ID NO: 12828
  Cyclic GFR-binding peptide
  MOD_RES (1), (2), (34): Xaa is C or S

SEQ ID NO: 54698 - protein, 27 aa, Artificial Sequence
  Cyclic GFR-binding peptide
PTRLNAISILYFDSANNVVLKKYRDMV

SEQ ID NO: 54699 - protein, 38 aa, Artificial Sequence; identical to SEQ ID NO: 12830
  Cyclic GFR-binding peptide
  MOD_RES (6), (7), (38): Xaa is C or S

SEQ ID NO: 54700 - protein, 29 aa, Artificial Sequence
  Cyclic GFR-binding peptide
  MOD_RES (28), (28): Xaa is C or S
LEPLTVLYYDDSSNVIEQLSNNMVVRAXG

SEQ ID NO: 54701 - protein, 30 aa, Artificial Sequence
  Cyclic GFR-binding peptide
  MOD_RES (28), (30): Xaa is C or S
LSPISMLFIDEYDKVVYKQYEEMVVEGXGX

SEQ ID NO: 54702 - protein, 27 aa, Artificial Sequence
  Cyclic GFR-binding peptide
TQLSPISVLFIDDSSNVIYKQYENMVV

SEQ ID NO: 54703 - protein, 33 aa, Artificial Sequence
  Cyclic GFR-binding peptide
  MOD_RES (4), (4): Xaa is C or S
KPTXAPTKLEPLTVLYYDDSSNVIEQLSNNMVV

SEQ ID NO: 54704 - protein, 29 aa, Artificial Sequence
  Cyclic GFR-binding peptide
TRLEPLPIVYYDSANNVVEQLSNDMVVES

SEQ ID NO: 54705 - protein, 33 aa, Artificial Sequence
  Cyclic GFR-binding peptide
  MOD_RES (6), (7): Xaa is C or S
KIPKAXXVPTELSPISMLFIDENEKVVYKQYED

SEQ ID NO: 54706 - protein, 26 aa, Artificial Sequence
  Cyclic GFR-binding peptide
TKLSPISVLFIDDSSNVIYKQYENMV

SEQ ID NO: 54707 - protein, 40 aa, Artificial Sequence; identical to SEQ ID NO: 12831
  Cyclic GFR-binding peptide
  MOD_RES (5), (37), (39): Xaa is C or S

SEQ ID NO: 54708 - protein, 30 aa, Artificial Sequence; identical to SEQ ID NO: 12832
  Cyclic GFR-binding peptide

SEQ ID NO: 54709 - protein, 37 aa, Artificial Sequence; identical to SEQ ID NO: 12833
  Cyclic GFR-binding peptide
  MOD_RES (6), (7): Xaa is C or S

SEQ ID NO: 54710 - protein, 27 aa, Artificial Sequence
  Cyclic GFR-binding peptide
  MOD_RES (1), (2): Xaa is C or S
XXVPTELEPLTMLYYDENEKVVEQLSN

SEQ ID NO: 54711 - protein, 31 aa, Artificial Sequence
  Cyclic GFR-binding peptide
  MOD_RES (28), (30): Xaa is C or S
LEPLPVVYYDDSSNVIEQLSNNMVVRSXGXH

SEQ ID NO: 54712 - protein, 41 aa, Artificial Sequence; identical to SEQ ID NO: 12835
  Cyclic GFR-binding peptide
  MOD_RES (6), (7), (39), (41): Xaa is C or S

SEQ ID NO: 54713 - protein, 32 aa, Artificial Sequence
  Cyclic GFR-binding peptide
  MOD_RES (3), (4): Xaa is C or S
KAXXVPTELEPLTMLYYDEYDKVVEQLSNEMV

SEQ ID NO: 54714 - protein, 34 aa, Artificial Sequence; identical to SEQ ID NO: 12836
  Cyclic GFR-binding peptide
  MOD_RES (1), (33): Xaa is C or S

SEQ ID NO: 54715 - protein, 26 aa, Artificial Sequence
  Cyclic GFR-binding peptide
  MOD_RES (26), (26): Xaa is C or S
EPLPIVYYIGKTPKIEQLSNMIVKSX

SEQ ID NO: 54716 - protein, 22 aa, Artificial Sequence
  Cyclic GFR-binding peptide
RLSAISILYLDSANNVVLKNYQ

SEQ ID NO: 54717 - protein, 41 aa, Artificial Sequence; identical to SEQ ID NO: 12838
  Cyclic GFR-binding peptide
  MOD_RES (6), (7), (39), (41): Xaa is C or S

SEQ ID NO: 54718 - protein, 30 aa, Artificial Sequence
  Cyclic GFR-binding peptide
  MOD_RES (28), (30): Xaa is C or S
LEPLTMLYYDEYDKVVEQLSNEMVVEGXGX

SEQ ID NO: 54719 - protein, 31 aa, Artificial Sequence
  Cyclic GFR-binding peptide
  MOD_RES (31), (31): Xaa is C or S
PTRLNAISILYFDSANNVVLKKYRDMVVESX

SEQ ID NO: 54720 - protein, 24 aa, Artificial Sequence
  Cyclic GFR-binding peptide
QLSPISVLFIDDSSNVIYKQYENM

SEQ ID NO: 54721 - protein, 33 aa, Artificial Sequence; identical to SEQ ID NO: 12843
  Cyclic GFR-binding peptide
  MOD_RES (2), (3): Xaa is C or S

SEQ ID NO: 54722 - protein, 23 aa, Artificial Sequence
  Cyclic GFR-binding peptide
RLEPLTILYYDSANNVVEQLSND

SEQ ID NO: 54723 - protein, 22 aa, Artificial Sequence
  Cyclic GFR-binding peptide
ELSPISMLFIDENEKVVYKQYE

SEQ ID NO: 54724 - protein, 34 aa, Artificial Sequence
  Cyclic GFR-binding peptide
  MOD_RES (5), (5): Xaa is C or S
TKPTXAPTKLEPLPVVYYDDSSNVIEQLSNNMVV

SEQ ID NO: 54725 - protein, 30 aa, Artificial Sequence; identical to SEQ ID NO: 12844
  Cyclic GFR-binding peptide

SEQ ID NO: 54726 - protein, 32 aa, Artificial Sequence
  Cyclic GFR-binding peptide
  MOD_RES (6), (7): Xaa is C or S
ASASPXXVSQDLSPISILFIIGKTPKIYKQYE

SEQ ID NO: 54727 - protein, 39 aa, Artificial Sequence; identical to SEQ ID NO: 12845
  Cyclic GFR-binding peptide
  MOD_RES (5), (6), (37), (39): Xaa is C or S

SEQ ID NO: 54728 - protein, 32 aa, Artificial Sequence
  Cyclic GFR-binding peptide
  MOD_RES (29), (31): Xaa is C or S
QALEPLTILYYVGRKPKVEQLSNMIVRSXKXS

SEQ ID NO: 54729 - protein, 23 aa, Artificial Sequence
  Cyclic GFR-binding peptide
LEPLPVVYYDDSSNVIEQLSNNM

SEQ ID NO: 54730 - protein, 28 aa, Artificial Sequence
  Cyclic GFR-binding peptide
  MOD_RES (1), (1): Xaa is C or S
XVPTELEPLTMLYYDEYDKVVEQLSNEM

SEQ ID NO: 54731 - protein, 41 aa, Artificial Sequence; identical to SEQ ID NO: 12849
  Cyclic GFR-binding peptide
  MOD_RES (6), (7), (39), (41): Xaa is C or S

SEQ ID NO: 54732 - protein, 30 aa, Artificial Sequence
  Cyclic GFR-binding peptide
  MOD_RES (2), (3): Xaa is C or S
AXXVPTELEPLTMLYYDEYDKVVEQLSNEM

SEQ ID NO: 54733 - protein, 32 aa, Artificial Sequence
  Cyclic GFR-binding peptide
  MOD_RES (5), (6): Xaa is C or S
IPKAXXVPTELSPISMLFIDEYDKVVYKQYEE

SEQ ID NO: 54734 - protein, 32 aa, Artificial Sequence
  Cyclic GFR-binding peptide
  MOD_RES (31), (31): Xaa is C or S
PTELSPISMLFIDEYDKVVYKQYEEMVVEGXG

SEQ ID NO: 54735 - protein, 24 aa, Artificial Sequence
  Cyclic GFR-binding peptide
NAISILYFDSANNVVLKKYRDMVV

SEQ ID NO: 54736 - protein, 21 aa, Artificial Sequence
  Cyclic GFR-binding peptide
NAISILYFDSANNVVLKKYRD

SEQ ID NO: 54737 - protein, 37 aa, Artificial Sequence; identical to SEQ ID NO: 12851
  Cyclic GFR-binding peptide
  MOD_RES (6), (7): Xaa is C or S

SEQ ID NO: 54738 - protein, 33 aa, Artificial Sequence; identical to SEQ ID NO: 12852
  Cyclic GFR-binding peptide
  MOD_RES (1), (2): Xaa is C or S

SEQ ID NO: 54739 - protein, 30 aa, Artificial Sequence
  Cyclic GFR-binding peptide
  MOD_RES (2), (3): Xaa is C or S
PXXAPTQLEPLTVLYYDDSSNVIEQLSNNM

SEQ ID NO: 54740 - protein, 34 aa, Artificial Sequence
  Cyclic GFR-binding peptide
  MOD_RES (5), (6): Xaa is C or S
SAAPXXVPQALSPISILFIVGRKPKVYKQYEMIV

SEQ ID NO: 54741 - protein, 35 aa, Artificial Sequence; identical to SEQ ID NO: 12854
  Cyclic GFR-binding peptide
  MOD_RES (1), (2), (33), (35): Xaa is C or S

SEQ ID NO: 54742 - protein, 30 aa, Artificial Sequence
  Cyclic GFR-binding peptide
PTELEPLPMVYYDENEKVVEQLSNDMVVEG

SEQ ID NO: 54743 - protein, 29 aa, Artificial Sequence
  Cyclic GFR-binding peptide
  MOD_RES (1), (1): Xaa is C or S
XVPTELEPLPMVYYDENEKVVEQLSNDMV

SEQ ID NO: 54744 - protein, 35 aa, Artificial Sequence; identical to SEQ ID NO: 12858
  Cyclic GFR-binding peptide
  MOD_RES (2), (3), (34): Xaa is C or S

SEQ ID NO: 54745 - protein, 31 aa, Artificial Sequence; identical to SEQ ID NO: 12859
  Cyclic GFR-binding peptide

SEQ ID NO: 54746 - protein, 36 aa, Artificial Sequence; identical to SEQ ID NO: 12860
  Cyclic GFR-binding peptide
  MOD_RES (1), (2), (33), (35): Xaa is C or S

SEQ ID NO: 54747 - protein, 33 aa, Artificial Sequence; identical to SEQ ID NO: 12862
  Cyclic GFR-binding peptide
  MOD_RES (1), (33): Xaa is C or S

SEQ ID NO: 54748 - protein, 39 aa, Artificial Sequence; identical to SEQ ID NO: 12863
  Cyclic GFR-binding peptide
  MOD_RES (7), (39): Xaa is C or S

SEQ ID NO: 54749 - protein, 36 aa, Artificial Sequence; identical to SEQ ID NO: 12866
  Cyclic GFR-binding peptide
  MOD_RES (5), (6): Xaa is C or S

SEQ ID NO: 54750 - protein, 34 aa, Artificial Sequence
  Cyclic GFR-binding peptide
  MOD_RES (4), (5): Xaa is C or S
PKPXXAPTQLSPISVLFIDDSSNVIYKQYENMVV

SEQ ID NO: 54751 - protein, 36 aa, Artificial Sequence
  Cyclic GFR-binding peptide
  MOD_RES (6), (7): Xaa is C or S
ASASPXXVPQDLEPLPIVYYVGRTPKVEQLSNMVVK

SEQ ID NO: 54752 - protein, 37 aa, Artificial Sequence; identical to SEQ ID NO: 12867
  Cyclic GFR-binding peptide
  MOD_RES (5), (6): Xaa is C or S

SEQ ID NO: 54753 - protein, 29 aa, Artificial Sequence
  Cyclic GFR-binding peptide
  MOD_RES (29), (29): Xaa is C or S
QDLSPISILFIVGRTPKVYKQYEMVVKSX

SEQ ID NO: 54754 - protein, 26 aa, Artificial Sequence
  Cyclic GFR-binding peptide
TELSPISMLFIDEYDKVVYKQYEEMV

SEQ ID NO: 54755 - protein, 38 aa, Artificial Sequence; identical to SEQ ID NO: 12869
  Cyclic GFR-binding peptide
  MOD_RES (6), (7): Xaa is C or S

SEQ ID NO: 54756 - protein, 32 aa, Artificial Sequence
  Cyclic GFR-binding peptide
  MOD_RES (2), (3): Xaa is C or S
AXXVPTELEPLPMVYYDEYDKVVEQLSNEMVV

SEQ ID NO: 54757 - protein, 37 aa, Artificial Sequence; identical to SEQ ID NO: 12870
  Cyclic GFR-binding peptide
  MOD_RES (3), (4), (36): Xaa is C or S

SEQ ID NO: 54758 - protein, 37 aa, Artificial Sequence; identical to SEQ ID NO: 12871
  Cyclic GFR-binding peptide
  MOD_RES (4), (5), (37): Xaa is C or S

SEQ ID NO: 54759 - protein, 23 aa, Artificial Sequence
  Cyclic GFR-binding peptide
TELSPISMLFIDENEKVVYKQYE

SEQ ID NO: 54760 - protein, 34 aa, Artificial Sequence
  Cyclic GFR-binding peptide
  MOD_RES (6), (7): Xaa is C or S
ASASPXXVPQDLSPISILFIVGRTPKVYKQYEMV

SEQ ID NO: 54761 - protein, 29 aa, Artificial Sequence
  Cyclic GFR-binding peptide
TQLSPISVLFIDDSSNVIYKQYENMVVRA

SEQ ID NO: 54762 - protein, 27 aa, Artificial Sequence
  Cyclic GFR-binding peptide
  MOD_RES (27), (27): Xaa is C or S
EPLPMVYYDEYDKVVEQLSNEMVVEGX

SEQ ID NO: 54763 - protein, 37 aa, Artificial Sequence; identical to SEQ ID NO: 12873
  Cyclic GFR-binding peptide
  MOD_RES (3), (4), (35), (37): Xaa is C or S

SEQ ID NO: 54764 - protein, 30 aa, Artificial Sequence
  Cyclic GFR-binding peptide
  MOD_RES (29), (29): Xaa is C or S
ELSPISMLFIDEYDKVVYKQYEEMVVEGXG

SEQ ID NO: 54765 - protein, 33 aa, Artificial Sequence
  Cyclic GFR-binding peptide
  MOD_RES (4), (5): Xaa is C or S
ASPXXVPQDLEPLPIVYYVGRTPKVEQLSNMVV

SEQ ID NO: 54766 - protein, 28 aa, Artificial Sequence
  Cyclic GFR-binding peptide
PTELEPLPMVYYDENEKVVEQLSNDMVV

SEQ ID NO: 54767 - protein, 26 aa, Artificial Sequence
  Cyclic GFR-binding peptide
VPTELEPLTMLYYDENEKVVEQLSND

SEQ ID NO: 54768 - protein, 28 aa, Artificial Sequence
  Cyclic GFR-binding peptide
TELSPISMLFIDENEKVVYKQYEDMVVE

SEQ ID NO: 54769 - protein, 35 aa, Artificial Sequence
  Cyclic GFR-binding peptide
  MOD_RES (6), (7): Xaa is C or S
STPPTXXVPTRLNAISILYFDSANNVVLKKYRDMV

SEQ ID NO: 54770 - protein, 25 aa, Artificial Sequence
  Cyclic GFR-binding peptide
PQDLSPISILFIVGRTPKVYKQYEM

SEQ ID NO: 54771 - protein, 30 aa, Artificial Sequence
  Cyclic GFR-binding peptide
  MOD_RES (2), (2): Xaa is C or S
TXAPTKLEPLTVLYYDDSSNVIEQLSNNMV

SEQ ID NO: 54772 - protein, 39 aa, Artificial Sequence; identical to SEQ ID NO: 12878
  Cyclic GFR-binding peptide
  MOD_RES (4), (36), (38): Xaa is C or S

SEQ ID NO: 54773 - protein, 30 aa, Artificial Sequence
  Cyclic GFR-binding peptide
  MOD_RES (3), (4): Xaa is C or S
KAXXVPTELEPLTMLYYDENEKVVEQLSND

SEQ ID NO: 54774 - protein, 36 aa, Artificial Sequence; identical to SEQ ID NO: 12880
  Cyclic GFR-binding peptide
  MOD_RES (5), (6): Xaa is C or S

SEQ ID NO: 54775 - protein, 22 aa, Artificial Sequence
  Cyclic GFR-binding peptide
EPLTILYYDSANNVVEQLSNDM

SEQ ID NO: 54776 - protein, 29 aa, Artificial Sequence
  Cyclic GFR-binding peptide
  MOD_RES (1), (1): Xaa is C or S
XVPQALEPLTILYYVGRKPKVEQLSNMIV

SEQ ID NO: 54777 - protein, 27 aa, Artificial Sequence
  Cyclic GFR-binding peptide
TELEPLTMLYYDEYDKVVEQLSNEMVV

SEQ ID NO: 54778 - protein, 39 aa, Artificial Sequence; identical to SEQ ID NO: 12882
  Cyclic GFR-binding peptide
  MOD_RES (4), (5), (36), (38): Xaa is C or S

SEQ ID NO: 54779 - protein, 33 aa, Artificial Sequence
  Cyclic GFR-binding peptide
  MOD_RES (4), (5): Xaa is C or S
PKPXXAPTKLEPLPVVYYDDSSNVIEQLSNNMV

SEQ ID NO: 54780 - protein, 29 aa, Artificial Sequence
  Cyclic GFR-binding peptide
APTKLEPLTVLYYDDSSNVIEQLSNNMVV

SEQ ID NO: 54781 - protein, 32 aa, Artificial Sequence; identical to SEQ ID NO: 12885
  Cyclic GFR-binding peptide
  MOD_RES (1), (2): Xaa is C or S

SEQ ID NO: 54782 - protein, 23 aa, Artificial Sequence
  Cyclic GFR-binding peptide
TELEPLPMVYYDEYDKVVEQLSN

SEQ ID NO: 54783 - protein, 39 aa, Artificial Sequence; identical to SEQ ID NO: 12887
  Cyclic GFR-binding peptide
  MOD_RES (3), (4), (36), (38): Xaa is C or S

SEQ ID NO: 54784 - protein, 35 aa, Artificial Sequence; identical to SEQ ID NO: 12888
  Cyclic GFR-binding peptide
  MOD_RES (32), (34): Xaa is C or S

SEQ ID NO: 54785 - protein, 34 aa, Artificial Sequence
  Cyclic GFR-binding peptide
  MOD_RES (7), (7): Xaa is C or S
HVTKPTXAPTKLEPLTVLYYDDSSNVIEQLSNNM

SEQ ID NO: 54786 - protein, 28 aa, Artificial Sequence
  Cyclic GFR-binding peptide
  MOD_RES (1), (2): Xaa is C or S
XXVSQDLEPLPIVYYIGKTPKIEQLSNM

SEQ ID NO: 54787 - protein, 42 aa, Artificial Sequence; identical to SEQ ID NO: 12891
  Cyclic GFR-binding peptide
  MOD_RES (6), (7), (39), (41): Xaa is C or S

SEQ ID NO: 54788 - protein, 36 aa, Artificial Sequence; identical to SEQ ID NO: 12892
  Cyclic GFR-binding peptide
  MOD_RES (1), (33), (35): Xaa is C or S

SEQ ID NO: 54789 - protein, 30 aa, Artificial Sequence
  Cyclic GFR-binding peptide
  MOD_RES (29), (29): Xaa is C or S
ELEPLPMVYYDEYDKVVEQLSNEMVVEGXG

SEQ ID NO: 54790 - protein, 34 aa, Artificial Sequence
  Cyclic GFR-binding peptide
  MOD_RES (5), (6): Xaa is C or S
VPKPXXAPTKLSPISVLFIDDSSNVIYKQYENMV

SEQ ID NO: 54791 - protein, 37 aa, Artificial Sequence; identical to SEQ ID NO: 12893
  Cyclic GFR-binding peptide
  MOD_RES (5), (6), (37): Xaa is C or S

SEQ ID NO: 54792 - protein, 29 aa, Artificial Sequence
  Cyclic GFR-binding peptide
  MOD_RES (3), (4): Xaa is C or S
PTXXVPTRLEPLTILYYDSANNVVEQLSN

SEQ ID NO: 54793 - protein, 29 aa, Artificial Sequence
  Cyclic GFR-binding peptide
  MOD_RES (29), (29): Xaa is C or S
ELEPLTMLYYDEYDKVVEQLSNEMVVEGX

SEQ ID NO: 54794 - protein, 31 aa, Artificial Sequence; identical to SEQ ID NO: 12894
  Cyclic GFR-binding peptide
  MOD_RES (1), (1): Xaa is C or S

SEQ ID NO: 54795 - protein, 39 aa, Artificial Sequence; identical to SEQ ID NO: 12896
  Cyclic GFR-binding peptide
  MOD_RES (5), (6), (38): Xaa is C or S

SEQ ID NO: 54796 - protein, 35 aa, Artificial Sequence; identical to SEQ ID NO: 12898
  Cyclic GFR-binding peptide
  MOD_RES (32), (34): Xaa is C or S

SEQ ID NO: 54797 - protein, 28 aa, Artificial Sequence
  Cyclic GFR-binding peptide
  MOD_RES (28), (28): Xaa is C or S
LEPLTMLYYDENEKVVEQLSNDMVVEGX

SEQ ID NO: 54798 - protein, 32 aa, Artificial Sequence; identical to SEQ ID NO: 12900
  Cyclic GFR-binding peptide
  MOD_RES (1), (2): Xaa is C or S

SEQ ID NO: 54799 - protein, 34 aa, Artificial Sequence
  Cyclic GFR-binding peptide
  MOD_RES (5), (6): Xaa is C or S
TPPTXXVPTRLEPLTILYYDSANNVVEQLSNDMV

SEQ ID NO: 54800 - protein, 31 aa, Artificial Sequence
  Cyclic GFR-binding peptide
  MOD_RES (1), (2): Xaa is C or S
XXVPTELEPLTMLYYDENEKVVEQLSNDMVV

SEQ ID NO: 54801 - protein, 29 aa, Artificial Sequence
  Cyclic GFR-binding peptide
VPTELEPLPMVYYDENEKVVEQLSNDMVV

SEQ ID NO: 54802 - protein, 32 aa, Artificial Sequence; identical to SEQ ID NO: 12901
  Cyclic GFR-binding peptide
  MOD_RES (32), (32): Xaa is C or S

SEQ ID NO: 54803 - protein, 24 aa, Artificial Sequence
  Cyclic GFR-binding peptide
SPISMLFIDENEKVVYKQYEDMVV

SEQ ID NO: 54804 - protein, 39 aa, Artificial Sequence; identical to SEQ ID NO: 12903
  Cyclic GFR-binding peptide
  MOD_RES (4), (5), (37), (39): Xaa is C or S

SEQ ID NO: 54805 - protein, 36 aa, Artificial Sequence; identical to SEQ ID NO: 12904
  Cyclic GFR-binding peptide
  MOD_RES (5), (5): Xaa is C or S

SEQ ID NO: 54806 - protein, 33 aa, Artificial Sequence
  Cyclic GFR-binding peptide
  MOD_RES (3), (4): Xaa is C or S
SPXXVPQDLEPLPIVYYVGRTPKVEQLSNMVVK

SEQ ID NO: 54807 - protein, 30 aa, Artificial Sequence
  Cyclic GFR-binding peptide
  MOD_RES (29), (29): Xaa is C or S
RLEPLPIVYYDSANNVVEQLSNDMVVESXG

SEQ ID NO: 54808 - protein, 22 aa, Artificial Sequence
  Cyclic GFR-binding peptide
SPISVLFIDDSSNVIYKQYENM

SEQ ID NO: 54809 - protein, 32 aa, Artificial Sequence
  Cyclic GFR-binding peptide
  MOD_RES (29), (31): Xaa is C or S
QDLEPLPIVYYIGKTPKIEQLSNMIVKSXKXS

SEQ ID NO: 54810 - protein, 33 aa, Artificial Sequence
  Cyclic GFR-binding peptide
  MOD_RES (5), (6): Xaa is C or S
IPKAXXVPTELEPLTMLYYDEYDKVVEQLSNEM

SEQ ID NO: 54811 - protein, 34 aa, Artificial Sequence; identical to SEQ ID NO: 12905
  Cyclic GFR-binding peptide
  MOD_RES (2), (34): Xaa is C or S

SEQ ID NO: 54812 - protein, 35 aa, Artificial Sequence; identical to SEQ ID NO: 12906
  Cyclic GFR-binding peptide
  MOD_RES (4), (5): Xaa is C or S

SEQ ID NO: 54813 - protein, 29 aa, Artificial Sequence
  Cyclic GFR-binding peptide
  MOD_RES (2), (2): Xaa is C or S
TXAPTKLSPISVLFIDDSSNVIYKQYENM

SEQ ID NO: 54814 - protein, 29 aa, Artificial Sequence
  Cyclic GFR-binding peptide
SAISILYLDSANNVVLKNYQAAAAAAAAA

SEQ ID NO: 54815 - protein, 24 aa, Artificial Sequence
  Cyclic GFR-binding peptide
PTQLEPLPVVYYDDSSNVIEQLSN

SEQ ID NO: 54816 - protein, 30 aa, Artificial Sequence
  Cyclic GFR-binding peptide
  MOD_RES (30), (30): Xaa is C or S
TELEPLPMVYYDENEKVVEQLSNDMVVEGX

SEQ ID NO: 54817 - protein, 22 aa, Artificial Sequence
  Cyclic GFR-binding peptide
EPLPIVYYVGRTPKVEQLSNMV

SEQ ID NO: 54818 - protein, 22 aa, Artificial Sequence
  Cyclic GFR-binding peptide
LSAISILYLDSANNVVLKNYQD

SEQ ID NO: 54819 - protein, 22 aa, Artificial Sequence
  Cyclic GFR-binding peptide
LEPLPIVYYDSANNVVEQLSND

SEQ ID NO: 54820 - protein, 37 aa, Artificial Sequence; identical to SEQ ID NO: 12910
  Cyclic GFR-binding peptide
  MOD_RES (2), (3), (34), (36): Xaa is C or S

SEQ ID NO: 54821 - protein, 39 aa, Artificial Sequence; identical to SEQ ID NO: 12911
  Cyclic GFR-binding peptide
  MOD_RES (4), (5), (37), (39): Xaa is C or S

SEQ ID NO: 54822 - protein, 29 aa, Artificial Sequence
  Cyclic GFR-binding peptide
  MOD_RES (2), (3): Xaa is C or S
AXXVPTELEPLTMLYYDENEKVVEQLSND

SEQ ID NO: 54823 - protein, 32 aa, Artificial Sequence
  Cyclic GFR-binding peptide
  MOD_RES (2), (3): Xaa is C or S
PXXVPQDLEPLPIVYYVGRTPKVEQLSNMVVK

SEQ ID NO: 54824 - protein, 32 aa, Artificial Sequence
  Cyclic GFR-binding peptide
  MOD_RES (29), (31): Xaa is C or S
RLSAISILYLDSANNVVLKNYQDMVVESXGXR

SEQ ID NO: 54825 - protein, 31 aa, Artificial Sequence; identical to SEQ ID NO: 12915
  Cyclic GFR-binding peptide
  MOD_RES (1), (1): Xaa is C or S

SEQ ID NO: 54826 - protein, 36 aa, Artificial Sequence; identical to SEQ ID NO: 12917
  Cyclic GFR-binding peptide
  MOD_RES (5), (6): Xaa is C or S

SEQ ID NO: 54827 - protein, 33 aa, Artificial Sequence; identical to SEQ ID NO: 12919
  Cyclic GFR-binding peptide
  MOD_RES (2), (2): Xaa is C or S

SEQ ID NO: 54828 - protein, 35 aa, Artificial Sequence
  Cyclic GFR-binding peptide
  MOD_RES (6), (6): Xaa is C or S
VTKPTXAPTKLEPLTVLYYDDSSNVIEQLSNNMVV

SEQ ID NO: 54829 - protein, 28 aa, Artificial Sequence
  Cyclic GFR-binding peptide
SQDLSPISILFIIGKTPKIYKQYEMIVK

SEQ ID NO: 54830 - protein, 27 aa, Artificial Sequence
  Cyclic GFR-binding peptide
  MOD_RES (1), (2): Xaa is C or S
XXVPTELEPLTMLYYDEYDKVVEQLSN

SEQ ID NO: 54831 - protein, 36 aa, Artificial Sequence; identical to SEQ ID NO: 12920
  Cyclic GFR-binding peptide
  MOD_RES (4), (36): Xaa is C or S

SEQ ID NO: 54832 - protein, 30 aa, Artificial Sequence
  Cyclic GFR-binding peptide
  MOD_RES (4), (5): Xaa is C or S
AAPXXVPQALEPLTILYYVGRKPKVEQLSN

SEQ ID NO: 54833 - protein, 26 aa, Artificial Sequence
  Cyclic GFR-binding peptide
PTKLEPLPVVYYDDSSNVIEQLSNNM

SEQ ID NO: 54834 - protein, 28 aa, Artificial Sequence
  Cyclic GFR-binding peptide
  MOD_RES (1), (2): Xaa is C or S
XXVSQDLSPISILFIIGKTPKIYKQYEM

SEQ ID NO: 54835 - protein, 38 aa, Artificial Sequence; identical to SEQ ID NO: 12923
  Cyclic GFR-binding peptide
  MOD_RES (5), (37): Xaa is C or S

SEQ ID NO: 54836 - protein, 31 aa, Artificial Sequence
  Cyclic GFR-binding peptide
  MOD_RES (5), (6): Xaa is C or S
TPPTXXVPTRLEPLTILYYDSANNVVEQLSN

SEQ ID NO: 54837 - protein, 33 aa, Artificial Sequence; identical to SEQ ID NO: 12924
  Cyclic GFR-binding peptide
  MOD_RES (2), (3): Xaa is C or S

SEQ ID NO: 54838 - protein, 25 aa, Artificial Sequence
  Cyclic GFR-binding peptide
PTQLEPLPVVYYDDSSNVIEQLSNN

SEQ ID NO: 54839 - protein, 32 aa, Artificial Sequence
  Cyclic GFR-binding peptide
  MOD_RES (6), (7): Xaa is C or S
KIPKAXXVPTELEPLPMVYYDENEKVVEQLSN

SEQ ID NO: 54840 - protein, 31 aa, Artificial Sequence
  Cyclic GFR-binding peptide
  MOD_RES (2), (3): Xaa is C or S
TXXVPTRLSAISILYLDSANNVVLKNYQDMV

SEQ ID NO: 54841 - protein, 28 aa, Artificial Sequence
  Cyclic GFR-binding peptide
  MOD_RES (27), (27): Xaa is C or S
SPISMLFIDENEKVVYKQYEDMVVEGXG

SEQ ID NO: 54842 - protein, 26 aa, Artificial Sequence
  Cyclic GFR-binding peptide
ELEPLPMVYYDENEKVVEQLSNDMVV

SEQ ID NO: 54843 - protein, 40 aa, Artificial Sequence; identical to SEQ ID NO: 12925
  Cyclic GFR-binding peptide
  MOD_RES (5), (6), (38), (40): Xaa is C or S

SEQ ID NO: 54844 - protein, 32 aa, Artificial Sequence; identical to SEQ ID NO: 12926
  Cyclic GFR-binding peptide
  MOD_RES (1), (1): Xaa is C or S

SEQ ID NO: 54845 - protein, 29 aa, Artificial Sequence
  Cyclic GFR-binding peptide
  MOD_RES (1), (2): Xaa is C or S
XXVPTELEPLTMLYYDEYDKVVEQLSNEM

SEQ ID NO: 54846 - protein, 25 aa, Artificial Sequence
  Cyclic GFR-binding peptide
VPQDLEPLPIVYYVGRTPKVEQLSN

SEQ ID NO: 54847 - protein, 26 aa, Artificial Sequence
  Cyclic GFR-binding peptide
TRLEPLPIVYYDSANNVVEQLSNDMV

SEQ ID NO: 54848 - protein, 31 aa, Artificial Sequence
  Cyclic GFR-binding peptide
  MOD_RES (30), (30): Xaa is C or S
SQDLEPLPIVYYIGKTPKIEQLSNMIVKSXK

SEQ ID NO: 54849 - protein, 30 aa, Artificial Sequence
  Cyclic GFR-binding peptide
  MOD_RES (1), (1): Xaa is C or S
XVPTELEPLPMVYYDEYDKVVEQLSNEMVV

SEQ ID NO: 54850 - protein, 35 aa, Artificial Sequence; identical to SEQ ID NO: 12929
  Cyclic GFR-binding peptide
  MOD_RES (3), (4), (35): Xaa is C or S

SEQ ID NO: 54851 - protein, 38 aa, Artificial Sequence; identical to SEQ ID NO: 12930
  Cyclic GFR-binding peptide
  MOD_RES (4), (5), (36), (38): Xaa is C or S

SEQ ID NO: 54852 - protein, 35 aa, Artificial Sequence; identical to SEQ ID NO: 12931
  Cyclic GFR-binding peptide
  MOD_RES (3), (4): Xaa is C or S

SEQ ID NO: 54853 - protein, 31 aa, Artificial Sequence
  Cyclic GFR-binding peptide
  MOD_RES (1), (2): Xaa is C or S
XXAPTKLSPISVLFIDDSSNVIYKQYENMVV

SEQ ID NO: 54854 - protein, 37 aa, Artificial Sequence; identical to SEQ ID NO: 12933
  Cyclic GFR-binding peptide
  MOD_RES (4), (5), (37): Xaa is C or S

SEQ ID NO: 54855 - protein, 27 aa, Artificial Sequence
  Cyclic GFR-binding peptide
QLSPISVLFIDDSSNVIYKQYENMVVR

SEQ ID NO: 54856 - protein, 35 aa, Artificial Sequence; identical to SEQ ID NO: 12936
  Cyclic GFR-binding peptide
  MOD_RES (3), (35): Xaa is C or S

SEQ ID NO: 54857 - protein, 27 aa, Artificial Sequence
  Cyclic GFR-binding peptide
  MOD_RES (1), (1): Xaa is C or S
XVPTELEPLTMLYYDENEKVVEQLSND

SEQ ID NO: 54858 - protein, 30 aa, Artificial Sequence
  Cyclic GFR-binding peptide
  MOD_RES (30), (30): Xaa is C or S
TRLSAISILYLDSANNVVLKNYQDMVVESX

SEQ ID NO: 54859 - protein, 29 aa, Artificial Sequence
  Cyclic GFR-binding peptide
  MOD_RES (27), (29): Xaa is C or S
EPLPVVYYDDSSNVIEQLSNNMVVRSXGX

SEQ ID NO: 54860 - protein, 40 aa, Artificial Sequence; identical to SEQ ID NO: 12939
  Cyclic GFR-binding peptide
  MOD_RES (5), (6), (38), (40): Xaa is C or S

SEQ ID NO: 54861 - protein, 38 aa, Artificial Sequence; identical to SEQ ID NO: 12940
  Cyclic GFR-binding peptide
  MOD_RES (6), (7): Xaa is C or S

SEQ ID NO: 54862 - protein, 32 aa, Artificial Sequence
  Cyclic GFR-binding peptide
  MOD_RES (30), (32): Xaa is C or S
SQDLSPISILFIIGKTPKIYKQYEMIVKSXKX

SEQ ID NO: 54863 - protein, 26 aa, Artificial Sequence
  Cyclic GFR-binding peptide
VPTRLEPLTILYYDSANNVVEQLSND

SEQ ID NO: 54864 - protein, 30 aa, Artificial Sequence
  Cyclic GFR-binding peptide
  MOD_RES (27), (29): Xaa is C or S
EPLTMLYYDENEKVVEQLSNDMVVEGXGXR

SEQ ID NO: 54865 - protein, 26 aa, Artificial Sequence
  Cyclic GFR-binding peptide
APTKLEPLTVLYYDDSSNVIEQLSNN

SEQ ID NO: 54866 - protein, 31 aa, Artificial Sequence
  Cyclic GFR-binding peptide
  MOD_RES (5), (6): Xaa is C or S
VPKPXXAPTKLSPISVLFIDDSSNVIYKQYE

SEQ ID NO: 54867 - protein, 30 aa, Artificial Sequence
  Cyclic GFR-binding peptide
PTKLEPLTVLYYDDSSNVIEQLSNNMVVRS

SEQ ID NO: 54868 - protein, 31 aa, Artificial Sequence; identical to SEQ ID NO: 12946
  Cyclic GFR-binding peptide

SEQ ID NO: 54869 - protein, 37 aa, Artificial Sequence; identical to SEQ ID NO: 12945
  Cyclic GFR-binding peptide
  MOD_RES (4), (5), (37): Xaa is C or S

SEQ ID NO: 54870 - protein, 31 aa, Artificial Sequence
  Cyclic GFR-binding peptide
  MOD_RES (29), (31): Xaa is C or S
ELEPLPMVYYDENEKVVEQLSNDMVVEGXGX

SEQ ID NO: 54871 - protein, 38 aa, Artificial Sequence; identical to SEQ ID NO: 12947
  Cyclic GFR-binding peptide
  MOD_RES (5), (6), (38): Xaa is C or S

SEQ ID NO: 54872 - protein, 42 aa, Artificial Sequence; identical to SEQ ID NO: 12948
  Cyclic GFR-binding peptide
  MOD_RES (6), (7), (39), (41): Xaa is C or S

SEQ ID NO: 54873 - protein, 35 aa, Artificial Sequence; identical to SEQ ID NO: 12949
  Cyclic GFR-binding peptide
  MOD_RES (4), (5): Xaa is C or S

SEQ ID NO: 54874 - protein, 33 aa, Artificial Sequence; identical to SEQ ID NO: 12950
  Cyclic GFR-binding peptide
  MOD_RES (2), (3): Xaa is C or S

SEQ ID NO: 54875 - protein, 36 aa, Artificial Sequence; identical to SEQ ID NO: 12951
  Cyclic GFR-binding peptide
  MOD_RES (2), (3), (35): Xaa is C or S

SEQ ID NO: 54876 - protein, 36 aa, Artificial Sequence
  Cyclic GFR-binding peptide
  MOD_RES (6), (7): Xaa is C or S
TVPKPXXAPTQLEPLPVVYYDDSSNVIEQLSNNMVV

SEQ ID NO: 54877 - protein, 30 aa, Artificial Sequence
  Cyclic GFR-binding peptide
  MOD_RES (30), (30): Xaa is C or S
SQDLSPISILFIIGKTPKIYKQYEMIVKSX

SEQ ID NO: 54878 - protein, 23 aa, Artificial Sequence
  Cyclic GFR-binding peptide
TELEPLTMLYYDENEKVVEQLSN

SEQ ID NO: 54879 - protein, 32 aa, Artificial Sequence
  Cyclic GFR-binding peptide
  MOD_RES (2), (3): Xaa is C or S
AXXVPTELEPLPMVYYDENEKVVEQLSNDMVV

SEQ ID NO: 54880 - protein, 36 aa, Artificial Sequence; identical to SEQ ID NO: 12955
  Cyclic GFR-binding peptide
  MOD_RES (2), (3), (35): Xaa is C or S

SEQ ID NO: 54881 - protein, 29 aa, Artificial Sequence
  Cyclic GFR-binding peptide
PTELEPLTMLYYDEYDKVVEQLSNEMVVE

SEQ ID NO: 54882 - protein, 36 aa, Artificial Sequence; identical to SEQ ID NO: 12957
  Cyclic GFR-binding peptide
  MOD_RES (5), (5): Xaa is C or S

SEQ ID NO: 54883 - protein, 40 aa, Artificial Sequence; identical to SEQ ID NO: 12958
  Cyclic GFR-binding peptide
  MOD_RES (5), (6), (37), (39): Xaa is C or S

SEQ ID NO: 54884 - protein, 22 aa, Artificial Sequence
  Cyclic GFR-binding peptide
KLEPLTVLYYDDSSNVIEQLSN

SEQ ID NO: 54885 - protein, 30 aa, Artificial Sequence
  Cyclic GFR-binding peptide
  MOD_RES (4), (5): Xaa is C or S
PPTXXVPTRLSAISILYLDSANNVVLKNYQ

SEQ ID NO: 54886 - protein, 40 aa, Artificial Sequence; identical to SEQ ID NO: 12959
  Cyclic GFR-binding peptide
  MOD_RES (6), (7), (39): Xaa is C or S

SEQ ID NO: 54887 - protein, 28 aa, Artificial Sequence
  Cyclic GFR-binding peptide
QLEPLPVVYYDDSSNVIEQLSNNMVVRA

SEQ ID NO: 54888 - protein, 29 aa, Artificial Sequence
  Cyclic GFR-binding peptide
  MOD_RES (2), (3): Xaa is C or S
PXXVSQDLSPISILFIIGKTPKIYKQYEM

SEQ ID NO: 54889 - protein, 34 aa, Artificial Sequence; identical to SEQ ID NO: 12961
  Cyclic GFR-binding peptide
  MOD_RES (2), (3): Xaa is C or S

SEQ ID NO: 54890 - protein, 38 aa, Artificial Sequence; identical to SEQ ID NO: 12962
  Cyclic GFR-binding peptide
  MOD_RES (4), (5), (37): Xaa is C or S

SEQ ID NO: 54891 - protein, 33 aa, Artificial Sequence
  Cyclic GFR-binding peptide
  MOD_RES (6), (7): Xaa is C or S
YVPKPXXAPTKLEPLTVLYYDDSSNVIEQLSNN

SEQ ID NO: 54892 - protein, 32 aa, Artificial Sequence
  Cyclic GFR-binding peptide
  MOD_RES (4), (4): Xaa is C or S
KPTXAPTKLEPLTVLYYDDSSNVIEQLSNNMV

SEQ ID NO: 54893 - protein, 33 aa, Artificial Sequence
  Cyclic GFR-binding peptide
  MOD_RES (6), (7): Xaa is C or S
ASAAPXXVPQALSPISILFIVGRKPKVYKQYEM

SEQ ID NO: 54894 - protein, 37 aa, Artificial Sequence; identical to SEQ ID NO: 12963
  Cyclic GFR-binding peptide
  MOD_RES (1), (2), (34), (36): Xaa is C or S

SEQ ID NO: 54895 - protein, 31 aa, Artificial Sequence; identical to SEQ ID NO: 12964
  Cyclic GFR-binding peptide

SEQ ID NO: 54896 - protein, 36 aa, Artificial Sequence
  Cyclic GFR-binding peptide
  MOD_RES (6), (7): Xaa is C or S
YVPKPXXAPTKLEPLPVVYYDDSSNVIEQLSNNMVV

SEQ ID NO: 54897 - protein, 25 aa, Artificial Sequence
  Cyclic GFR-binding peptide
PTQLSPISVLFIDDSSNVIYKQYEN

SEQ ID NO: 54898 - protein, 30 aa, Artificial Sequence
  Cyclic GFR-binding peptide
  MOD_RES (3), (4): Xaa is C or S
KPXXAPTQLEPLPVVYYDDSSNVIEQLSNN

SEQ ID NO: 54899 - protein, 29 aa, Artificial Sequence
  Cyclic GFR-binding peptide
  MOD_RES (29), (29): Xaa is C or S
QDLEPLPIVYYIGKTPKIEQLSNMIVKSX

SEQ ID NO: 54900 - protein, 30 aa, Artificial Sequence
  Cyclic GFR-binding peptide
  MOD_RES (28), (30): Xaa is C or S
LEPLPVVYYDDSSNVIEQLSNNMVVRAXGX

SEQ ID NO: 54901 - protein, 27 aa, Artificial Sequence
  Cyclic GFR-binding peptide
VPTELEPLPMVYYDENEKVVEQLSNDM

SEQ ID NO: 54902 - protein, 34 aa, Artificial Sequence; identical to SEQ ID NO: 12968
  Cyclic GFR-binding peptide
  MOD_RES (3), (4): Xaa is C or S

SEQ ID NO: 54903 - protein, 37 aa, Artificial Sequence; identical to SEQ ID NO: 12969
  Cyclic GFR-binding peptide
  MOD_RES (5), (6): Xaa is C or S

SEQ ID NO: 54904 - protein, 27 aa, Artificial Sequence
  Cyclic GFR-binding peptide
VPTELSPISMLFIDEYDKVVYKQYEEM

SEQ ID NO: 54905 - protein, 25 aa, Artificial Sequence
  Cyclic GFR-binding peptide
PQDLEPLPIVYYVGRTPKVEQLSNM

SEQ ID NO: 54906 - protein, 31 aa, Artificial Sequence; identical to SEQ ID NO: 12970
  Cyclic GFR-binding peptide
  MOD_RES (1), (1): Xaa is C or S

SEQ ID NO: 54907 - protein, 26 aa, Artificial Sequence
  Cyclic GFR-binding peptide
DLEPLPIVYYIGKTPKIEQLSNMIVK

SEQ ID NO: 54908 - protein, 36 aa, Artificial Sequence; identical to SEQ ID NO: 12972
  Cyclic GFR-binding peptide
  MOD_RES (1), (2), (34), (36): Xaa is C or S

SEQ ID NO: 54909 - protein, 28 aa, Artificial Sequence
  Cyclic GFR-binding peptide
  MOD_RES (26), (28): Xaa is C or S
SPISILFIVGRKPKVYKQYEMIVRSXKX

SEQ ID NO: 54910 - protein, 26 aa, Artificial Sequence
  Cyclic GFR-binding peptide
PTELEPLPMVYYDENEKVVEQLSNDM

SEQ ID NO: 54911 - protein, 33 aa, Artificial Sequence
  Cyclic GFR-binding peptide
  MOD_RES (4), (5): Xaa is C or S
PKPXXAPTKLSPISVLFIDDSSNVIYKQYENMV

SEQ ID NO: 54912 - protein, 34 aa, Artificial Sequence
  Cyclic GFR-binding peptide
  MOD_RES (6), (7): Xaa is C or S
ASASPXXVSQDLSPISILFIIGKTPKIYKQYEMI

SEQ ID NO: 54913 - protein, 32 aa, Artificial Sequence
  Cyclic GFR-binding peptide
  MOD_RES (31), (31): Xaa is C or S
PTRLSAISILYLDSANNVVLKNYQDMVVESXG

SEQ ID NO: 54914 - protein, 27 aa, Artificial Sequence
  Cyclic GFR-binding peptide
  MOD_RES (1), (2): Xaa is C or S
XXVPTRLEPLPIVYYDSANNVVEQLSN

SEQ ID NO: 54915 - protein, 23 aa, Artificial Sequence
  Cyclic GFR-binding peptide
LEPLPMVYYDENEKVVEQLSNDM

SEQ ID NO: 54916 - protein, 32 aa, Artificial Sequence
  Cyclic GFR-binding peptide
  MOD_RES (29), (31): Xaa is C or S
QALSPISILFIVGRKPKVYKQYEMIVRSXKXS

SEQ ID NO: 54917 - protein, 29 aa, Artificial Sequence
  Cyclic GFR-binding peptide
  MOD_RES (1), (1): Xaa is C or S
XVPQDLEPLPIVYYVGRTPKVEQLSNMVV

SEQ ID NO: 54918 - protein, 34 aa, Artificial Sequence; identical to SEQ ID NO: 12974
  Cyclic GFR-binding peptide
  MOD_RES (2), (3), (34): Xaa is C or S

SEQ ID NO: 54919 - protein, 37 aa, Artificial Sequence; identical to SEQ ID NO: 12976
  Cyclic GFR-binding peptide
  MOD_RES (6), (7): Xaa is C or S

SEQ ID NO: 54920 - protein, 32 aa, Artificial Sequence
  Cyclic GFR-binding peptide
  MOD_RES (30), (32): Xaa is C or S
TELSPISMLFIDEYDKVVYKQYEEMVVEGXGX

SEQ ID NO: 54921 - protein, 22 aa, Artificial Sequence
  Cyclic GFR-binding peptide
EPLPMVYYDEYDKVVEQLSNEM

SEQ ID NO: 54922 - protein, 37 aa, Artificial Sequence; identical to SEQ ID NO: 12981
  Cyclic GFR-binding peptide
  MOD_RES (1), (2), (34), (36): Xaa is C or S

SEQ ID NO: 54923 - protein, 29 aa, Artificial Sequence
  Cyclic GFR-binding peptide
  MOD_RES (28), (28): Xaa is C or S
LSPISMLFIDENEKVVYKQYEDMVVEGXG

SEQ ID NO: 54924 - protein, 27 aa, Artificial Sequence
  Cyclic GFR-binding peptide
  MOD_RES (1), (1): Xaa is C or S
XVPTELEPLPMVYYDENEKVVEQLSND

SEQ ID NO: 54925 - protein, 36 aa, Artificial Sequence; identical to SEQ ID NO: 12982
  Cyclic GFR-binding peptide
  MOD_RES (1), (2), (34), (36): Xaa is C or S

SEQ ID NO: 54926 - protein, 26 aa, Artificial Sequence
  Cyclic GFR-binding peptide
EPLTMLYYDENEKVVEQLSNDMVVEG

SEQ ID NO: 54927 - protein, 38 aa, Artificial Sequence; identical to SEQ ID NO: 12984
  Cyclic GFR-binding peptide
  MOD_RES (5), (6), (37): Xaa is C or S

SEQ ID NO: 54928 - protein, 38 aa, Artificial Sequence; identical to SEQ ID NO: 12985
  Cyclic GFR-binding peptide
  MOD_RES (5), (6), (38): Xaa is C or S

SEQ ID NO: 54929 - protein, 34 aa, Artificial Sequence; identical to SEQ ID NO: 12987
  Cyclic GFR-binding peptide
  MOD_RES (1), (33): Xaa is C or S

SEQ ID NO: 54930 - protein, 37 aa, Artificial Sequence; identical to SEQ ID NO: 12988
  Cyclic GFR-binding peptide
  MOD_RES (5), (6), (37): Xaa is C or S

SEQ ID NO: 54931 - protein, 29 aa, Artificial Sequence
  Cyclic GFR-binding peptide
VPTELEPLPMVYYDEYDKVVEQLSNEMVV

SEQ ID NO: 54932 - protein, 34 aa, Artificial Sequence; identical to SEQ ID NO: 12991
  Cyclic GFR-binding peptide
  MOD_RES (3), (4): Xaa is C or S

SEQ ID NO: 54933 - protein, 28 aa, Artificial Sequence
  Cyclic GFR-binding peptide
TRLEPLPIVYYDSANNVVEQLSNDMVVE

SEQ ID NO: 54934 - protein, 29 aa, Artificial Sequence
  Cyclic GFR-binding peptide
  MOD_RES (1), (1): Xaa is C or S
XVSQDLEPLPIVYYIGKTPKIEQLSNMIV

SEQ ID NO: 54935 - protein, 39 aa, Artificial Sequence; identical to SEQ ID NO: 12998
  Cyclic GFR-binding peptide
  MOD_RES (5), (6), (38): Xaa is C or S

SEQ ID NO: 54936 - protein, 31 aa, Artificial Sequence
  Cyclic GFR-binding peptide
  MOD_RES (31), (31): Xaa is C or S
PTELEPLTMLYYDEYDKVVEQLSNEMVVEGX

SEQ ID NO: 54937 - protein, 21 aa, Artificial Sequence
  Cyclic GFR-binding peptide
SPISMLFIDENEKVVYKQYED

SEQ ID NO: 54938 - protein, 38 aa, Artificial Sequence; identical to SEQ ID NO: 13000
  Cyclic GFR-binding peptide
  MOD_RES (4), (5), (37): Xaa is C or S

SEQ ID NO: 54939 - protein, 31 aa, Artificial Sequence
  Cyclic GFR-binding peptide
  MOD_RES (4), (5): Xaa is C or S
PKPXXAPTKLEPLTVLYYDDSSNVIEQLSNN

SEQ ID NO: 54940 - protein, 30 aa, Artificial Sequence
  Cyclic GFR-binding peptide
  MOD_RES (28), (30): Xaa is C or S
LSPISMLFIDENEKVVYKQYEDMVVEGXGX

SEQ ID NO: 54941 - protein, 30 aa, Artificial Sequence
  Cyclic GFR-binding peptide
  MOD_RES (27), (29): Xaa is C or S
LEPLPIVYYVGRTPKVEQLSNMVVKSXKXS

SEQ ID NO: 54942 - protein, 34 aa, Artificial Sequence; identical to SEQ ID NO: 13003
  Cyclic GFR-binding peptide
  MOD_RES (1), (33): Xaa is C or S

SEQ ID NO: 54943 - protein, 35 aa, Artificial Sequence; identical to SEQ ID NO: 13006
  Cyclic GFR-binding peptide
  MOD_RES (3), (4): Xaa is C or S

SEQ ID NO: 54944 - protein, 32 aa, Artificial Sequence
  Cyclic GFR-binding peptide
  MOD_RES (5), (6): Xaa is C or S
VPKPXXAPTQLEPLTVLYYDDSSNVIEQLSNN

SEQ ID NO: 54945 - protein, 32 aa, Artificial Sequence
  Cyclic GFR-binding peptide
  MOD_RES (2), (3): Xaa is C or S
AXXVPTELSPISMLFIDENEKVVYKQYEDMVV

SEQ ID NO: 54946 - protein, 35 aa, Artificial Sequence
  Cyclic GFR-binding peptide
  MOD_RES (5), (6): Xaa is C or S
SASPXXVPQDLEPLPIVYYVGRTPKVEQLSNMVVK

SEQ ID NO: 54947 - protein, 34 aa, Artificial Sequence; identical to SEQ ID NO: 13011
  Cyclic GFR-binding peptide
  MOD_RES (1), (2), (34): Xaa is C or S

SEQ ID NO: 54948 - protein, 25 aa, Artificial Sequence
  Cyclic GFR-binding peptide
TELSPISMLFIDENEKVVYKQYEDM

SEQ ID NO: 54949 - protein, 24 aa, Artificial Sequence
  Cyclic GFR-binding peptide
TQLEPLPVVYYDDSSNVIEQLSNN

SEQ ID NO: 54950 - protein, 31 aa, Artificial Sequence
  Cyclic GFR-binding peptide
  MOD_RES (5), (6): Xaa is C or S
SAAPXXVPQALSPISILFIVGRKPKVYKQYE

SEQ ID NO: 54951 - protein, 41 aa, Artificial Sequence; identical to SEQ ID NO: 13015
  Cyclic GFR-binding peptide
  MOD_RES (6), (7), (39), (41): Xaa is C or S

SEQ ID NO: 54952 - protein, 30 aa, Artificial Sequence
  Cyclic GFR-binding peptide
  MOD_RES (28), (30): Xaa is C or S
ALEPLTILYYVGRKPKVEQLSNMIVRSXKX

SEQ ID NO: 54953 - protein, 32 aa, Artificial Sequence; identical to SEQ ID NO: 13016
  Cyclic GFR-binding peptide
  MOD_RES (1), (2): Xaa is C or S

SEQ ID NO: 54954 - protein, 29 aa, Artificial Sequence
  Cyclic GFR-binding peptide
  MOD_RES (28), (28): Xaa is C or S
DLEPLPIVYYIGKTPKIEQLSNMIVKSXK

SEQ ID NO: 54955 - protein, 38 aa, Artificial Sequence; identical to SEQ ID NO: 13017
  Cyclic GFR-binding peptide
  MOD_RES (6), (38): Xaa is C or S

SEQ ID NO: 54956 - protein, 35 aa, Artificial Sequence; identical to SEQ ID NO: 13018
  Cyclic GFR-binding peptide
  MOD_RES (2), (3), (35): Xaa is C or S

SEQ ID NO: 54957 - protein, 20 aa, Artificial Sequence
  Cyclic GFR-binding peptide
EPLTMLYYDEYDKVVEQLSN

SEQ ID NO: 54958 - protein, 36 aa, Artificial Sequence; identical to SEQ ID NO: 13019
  Cyclic GFR-binding peptide
  MOD_RES (5), (6): Xaa is C or S

SEQ ID NO: 54959 - protein, 31 aa, Artificial Sequence
  Cyclic GFR-binding peptide
  MOD_RES (30), (30): Xaa is C or S
TELEPLPMVYYDENEKVVEQLSNDMVVEGXG

SEQ ID NO: 54960 - protein, 30 aa, Artificial Sequence
  Cyclic GFR-binding peptide
  MOD_RES (2), (2): Xaa is C or S
TXAPTKLSPISVLFIDDSSNVIYKQYENMV

SEQ ID NO: 54961 - protein, 27 aa, Artificial Sequence
  Cyclic GFR-binding peptide
PTKLEPLPVVYYDDSSNVIEQLSNNMV

SEQ ID NO: 54962 - protein, 28 aa, Artificial Sequence
  Cyclic GFR-binding peptide
  MOD_RES (27), (27): Xaa is C or S
LEPLPIVYYVGRTPKVEQLSNMVVKSXK

SEQ ID NO: 54963 - protein, 38 aa, Artificial Sequence; identical to SEQ ID NO: 13021
  Cyclic GFR-binding peptide
  MOD_RES (2), (3), (35), (37): Xaa is C or S

SEQ ID NO: 54964 - protein, 21 aa, Artificial Sequence
  Cyclic GFR-binding peptide
EPLPVVYYDDSSNVIEQLSNN

SEQ ID NO: 54965 - protein, 36 aa, Artificial Sequence; identical to SEQ ID NO: 13022
  Cyclic GFR-binding peptide
  MOD_RES (3), (4), (36): Xaa is C or S

SEQ ID NO: 54966 - protein, 30 aa, Artificial Sequence; identical to SEQ ID NO: 13023
  Cyclic GFR-binding peptide

SEQ ID NO: 54967 - protein, 32 aa, Artificial Sequence
  Cyclic GFR-binding peptide
  MOD_RES (3), (4): Xaa is C or S
SPXXVPQDLSPISILFIVGRTPKVYKQYEMVV

SEQ ID NO: 54968 - protein, 26 aa, Artificial Sequence
  Cyclic GFR-binding peptide
  MOD_RES (1), (1): Xaa is C or S
XAPTKLEPLTVLYYDDSSNVIEQLSN

SEQ ID NO: 54969 - protein, 34 aa, Artificial Sequence
  Cyclic GFR-binding peptide
  MOD_RES (31), (33): Xaa is C or S
PTELSPISMLFIDENEKVVYKQYEDMVVEGXGXR

SEQ ID NO: 54970 - protein, 37 aa, Artificial Sequence; identical to SEQ ID NO: 13028
  Cyclic GFR-binding peptide
  MOD_RES (1), (2), (34), (36): Xaa is C or S

SEQ ID NO: 54971 - protein, 36 aa, Artificial Sequence
  Cyclic GFR-binding peptide
  MOD_RES (6), (7): Xaa is C or S
KIPKAXXVPTELEPLTMLYYDENEKVVEQLSNDMVV

SEQ ID NO: 54972 - protein, 27 aa, Artificial Sequence
  Cyclic GFR-binding peptide
PQALSPISILFIVGRKPKVYKQYEMIV

SEQ ID NO: 54973 - protein, 33 aa, Artificial Sequence; identical to SEQ ID NO: 13029
  Cyclic GFR-binding peptide
  MOD_RES (1), (33): Xaa is C or S

SEQ ID NO: 54974 - protein, 36 aa, Artificial Sequence; identical to SEQ ID NO: 13030
  Cyclic GFR-binding peptide
  MOD_RES (1), (2), (34), (36): Xaa is C or S

SEQ ID NO: 54975 - protein, 38 aa, Artificial Sequence; identical to SEQ ID NO: 13031
  Cyclic GFR-binding peptide
  MOD_RES (6), (7), (38): Xaa is C or S

SEQ ID NO: 54976 - protein, 33 aa, Artificial Sequence; identical to SEQ ID NO: 13032
  Cyclic GFR-binding peptide
  MOD_RES (31), (33): Xaa is C or S

SEQ ID NO: 54977 - protein, 24 aa, Artificial Sequence
  Cyclic GFR-binding peptide
ELEPLTMLYYDENEKVVEQLSNDM

SEQ ID NO: 54978 - protein, 30 aa, Artificial Sequence
  Cyclic GFR-binding peptide
  MOD_RES (28), (30): Xaa is C or S
LEPLTMLYYDENEKVVEQLSNDMVVEGXGX

SEQ ID NO: 54979 - protein, 31 aa, Artificial Sequence; identical to SEQ ID NO: 13033
  Cyclic GFR-binding peptide

SEQ ID NO: 54980 - protein, 30 aa, Artificial Sequence
  Cyclic GFR-binding peptide
  MOD_RES (4), (4): Xaa is C or S
KPTXAPTKLEPLTVLYYDDSSNVIEQLSNN

SEQ ID NO: 54981 - protein, 25 aa, Artificial Sequence
  Cyclic GFR-binding peptide
TKLSPISVLFIDDSSNVIYKQYENM

SEQ ID NO: 54982 - protein, 37 aa, Artificial Sequence; identical to SEQ ID NO: 13035
  Cyclic GFR-binding peptide
  MOD_RES (2), (3), (34), (36): Xaa is C or S

SEQ ID NO: 54983 - protein, 35 aa, Artificial Sequence; identical to SEQ ID NO: 13038
  Cyclic GFR-binding peptide
  MOD_RES (4), (5): Xaa is C or S

SEQ ID NO: 54984 - protein, 40 aa, Artificial Sequence; identical to SEQ ID NO: 13039
  Cyclic GFR-binding peptide
  MOD_RES (4), (5), (37), (39): Xaa is C or S

SEQ ID NO: 54985 - protein, 29 aa, Artificial Sequence
  Cyclic GFR-binding peptide
  MOD_RES (27), (29): Xaa is C or S
NAISILYFDSANNVVLKKYRDMVVESXGX

SEQ ID NO: 54986 - protein, 26 aa, Artificial Sequence
  Cyclic GFR-binding peptide
EPLPMVYYDENEKVVEQLSNDMVVEG

SEQ ID NO: 54987 - protein, 30 aa, Artificial Sequence
  Cyclic GFR-binding peptide
  MOD_RES (3), (3): Xaa is C or S
PTXAPTKLEPLTVLYYDDSSNVIEQLSNNM

SEQ ID NO: 54988 - protein, 29 aa, Artificial Sequence
  Cyclic GFR-binding peptide
  MOD_RES (3), (4): Xaa is C or S
KAXXVPTELEPLPMVYYDENEKVVEQLSN

SEQ ID NO: 54989 - protein, 37 aa, Artificial Sequence; identical to SEQ ID NO: 13043
  Cyclic GFR-binding peptide
  MOD_RES (4), (5), (36): Xaa is C or S

SEQ ID NO: 54990 - protein, 31 aa, Artificial Sequence; identical to SEQ ID NO: 13044
  Cyclic GFR-binding peptide
  MOD_RES (1), (1): Xaa is C or S

SEQ ID NO: 54991 - protein, 35 aa, Artificial Sequence; identical to SEQ ID NO: 13045
  Cyclic GFR-binding peptide
  MOD_RES (32), (34): Xaa is C or S

SEQ ID NO: 54992 - protein, 34 aa, Artificial Sequence; identical to SEQ ID NO: 13046
  Cyclic GFR-binding peptide
  MOD_RES (2), (3): Xaa is C or S

SEQ ID NO: 54993 - protein, 40 aa, Artificial Sequence; identical to SEQ ID NO: 13047
  Cyclic GFR-binding peptide
  MOD_RES (5), (6), (38), (40): Xaa is C or S

SEQ ID NO: 54994 - protein, 40 aa, Artificial Sequence; identical to SEQ ID NO: 13049
  Cyclic GFR-binding peptide
  MOD_RES (5), (6), (38), (40): Xaa is C or S

SEQ ID NO: 54995 - protein, 34 aa, Artificial Sequence; identical to SEQ ID NO: 13050
  Cyclic GFR-binding peptide
  MOD_RES (1), (2), (33): Xaa is C or S

SEQ ID NO: 54996 - protein, 29 aa, Artificial Sequence
  Cyclic GFR-binding peptide
  MOD_RES (27), (29): Xaa is C or S
EPLTILYYDSANNVVEQLSNDMVVESXGX

SEQ ID NO: 54997 - protein, 23 aa, Artificial Sequence
  Cyclic GFR-binding peptide
SPISILFIVGRKPKVYKQYEMIV

SEQ ID NO: 54998 - protein, 37 aa, Artificial Sequence; identical to SEQ ID NO: 13056
  Cyclic GFR-binding peptide
  MOD_RES (5), (6): Xaa is C or S

SEQ ID NO: 54999 - protein, 34 aa, Artificial Sequence; identical to SEQ ID NO: 13057
  Cyclic GFR-binding peptide
  MOD_RES (1), (2), (34): Xaa is C or S

SEQ ID NO: 55000 - protein, 41 aa, Artificial Sequence; identical to SEQ ID NO: 13058
  Cyclic GFR-binding peptide
  MOD_RES (6), (38), (40): Xaa is C or S

SEQ ID NO: 55001 - protein, 39 aa, Artificial Sequence; identical to SEQ ID NO: 13059
  Cyclic GFR-binding peptide
  MOD_RES (5), (6), (38): Xaa is C or S

SEQ ID NO: 55002 - protein, 31 aa, Artificial Sequence
  Cyclic GFR-binding peptide
  MOD_RES (3), (4): Xaa is C or S
PTXXVPTRLEPLPIVYYDSANNVVEQLSNDM

SEQ ID NO: 55003 - protein, 39 aa, Artificial Sequence; identical to SEQ ID NO: 13061
  Cyclic GFR-binding peptide
  MOD_RES (5), (6), (38): Xaa is C or S

SEQ ID NO: 55004 - protein, 38 aa, Artificial Sequence; identical to SEQ ID NO: 13062
  Cyclic GFR-binding peptide
  MOD_RES (2), (3), (35), (37): Xaa is C or S

SEQ ID NO: 55005 - protein, 36 aa, Artificial Sequence
  Cyclic GFR-binding peptide
  MOD_RES (6), (7): Xaa is C or S
STPPTXXVPTRLSAISILYLDSANNVVLKNYQDMVV

SEQ ID NO: 55006 - protein, 30 aa, Artificial Sequence
  Cyclic GFR-binding peptide
  MOD_RES (2), (3): Xaa is C or S
PXXAPTKLEPLTVLYYDDSSNVIEQLSNNM

SEQ ID NO: 55007 - protein, 36 aa, Artificial Sequence; identical to SEQ ID NO: 13065
  Cyclic GFR-binding peptide
  MOD_RES (5), (6): Xaa is C or S

SEQ ID NO: 55008 - protein, 28 aa, Artificial Sequence
  Cyclic GFR-binding peptide
ELSPISMLFIDENEKVVYKQYEDMVVEG

SEQ ID NO: 55009 - protein, 36 aa, Artificial Sequence; identical to SEQ ID NO: 13067
  Cyclic GFR-binding peptide
  MOD_RES (1), (2), (34), (36): Xaa is C or S

SEQ ID NO: 55010 - protein, 30 aa, Artificial Sequence
  Cyclic GFR-binding peptide
  MOD_RES (1), (2): Xaa is C or S
XXAPTKLSPISVLFIDDSSNVIYKQYENMV

SEQ ID NO: 55011 - protein, 33 aa, Artificial Sequence
  Cyclic GFR-binding peptide
  MOD_RES (30), (32): Xaa is C or S
TQLEPLTVLYYDDSSNVIEQLSNNMVVRAXGXH

SEQ ID NO: 55012 - protein, 35 aa, Artificial Sequence; identical to SEQ ID NO: 13071
  Cyclic GFR-binding peptide
  MOD_RES (32), (34): Xaa is C or S

SEQ ID NO: 55013 - protein, 33 aa, Artificial Sequence
  Cyclic GFR-binding peptide
  MOD_RES (3), (4): Xaa is C or S
PTXXVPTRLEPLTILYYDSANNVVEQLSNDMVV

SEQ ID NO: 55014 - protein, 34 aa, Artificial Sequence
  Cyclic GFR-binding peptide
  MOD_RES (5), (6): Xaa is C or S
IPKAXXVPTELSPISMLFIDEYDKVVYKQYEEMV

SEQ ID NO: 55015 - protein, 25 aa, Artificial Sequence
  Cyclic GFR-binding peptide
SPISILFIVGRTPKVYKQYEMVVKS

SEQ ID NO: 55016 - protein, 32 aa, Artificial Sequence; identical to SEQ ID NO: 13074
  Cyclic GFR-binding peptide
  MOD_RES (32), (32): Xaa is C or S

SEQ ID NO: 55017 - protein, 28 aa, Artificial Sequence
  Cyclic GFR-binding peptide
  MOD_RES (27), (27): Xaa is C or S
SPISVLFIDDSSNVIYKQYENMVVRSXG

SEQ ID NO: 55018 - protein, 28 aa, Artificial Sequence
  Cyclic GFR-binding peptide
  MOD_RES (28), (28): Xaa is C or S
LSPISVLFIDDSSNVIYKQYENMVVRAX

SEQ ID NO: 55019 - protein, 24 aa, Artificial Sequence
  Cyclic GFR-binding peptide
TRLNAISILYFDSANNVVLKKYRD

SEQ ID NO: 55020 - protein, 36 aa, Artificial Sequence
  Cyclic GFR-binding peptide
  MOD_RES (6), (7): Xaa is C or S
STPPTXXVPTRLEPLTILYYDSANNVVEQLSNDMVV

SEQ ID NO: 55021 - protein, 24 aa, Artificial Sequence
  Cyclic GFR-binding peptide
EPLPMVYYDENEKVVEQLSNDMVV

SEQ ID NO: 55022 - protein, 21 aa, Artificial Sequence
  Cyclic GFR-binding peptide
LEPLTMLYYDEYDKVVEQLSN

SEQ ID NO: 55023 - protein, 34 aa, Artificial Sequence
  Cyclic GFR-binding peptide
  MOD_RES (5), (6): Xaa is C or S
IPKAXXVPTELSPISMLFIDENEKVVYKQYEDMV

SEQ ID NO: 55024 - protein, 25 aa, Artificial Sequence
  Cyclic GFR-binding peptide
PTELEPLPMVYYDEYDKVVEQLSNE

SEQ ID NO: 55025 - protein, 33 aa, Artificial Sequence
  Cyclic GFR-binding peptide
  MOD_RES (5), (6): Xaa is C or S
SASPXXVPQDLEPLPIVYYVGRTPKVEQLSNMV

SEQ ID NO: 55026 - protein, 37 aa, Artificial Sequence; identical to SEQ ID NO: 13077
  Cyclic GFR-binding peptide
  MOD_RES (6), (7): Xaa is C or S

SEQ ID NO: 55027 - protein, 35 aa, Artificial Sequence
  Cyclic GFR-binding peptide
  MOD_RES (6), (7): Xaa is C or S
KIPKAXXVPTELEPLTMLYYDENEKVVEQLSNDMV

SEQ ID NO: 55028 - protein, 21 aa, Artificial Sequence
  Cyclic GFR-binding peptide
EPLTVLYYDDSSNVIEQLSNN

SEQ ID NO: 55029 - protein, 29 aa, Artificial Sequence
  Cyclic GFR-binding peptide
  MOD_RES (2), (3): Xaa is C or S
AXXVPTELEPLPMVYYDENEKVVEQLSND

SEQ ID NO: 55030 - protein, 31 aa, Artificial Sequence
  Cyclic GFR-binding peptide
  MOD_RES (4), (5): Xaa is C or S
PPTXXVPTRLSAISILYLDSANNVVLKNYQD

SEQ ID NO: 55031 - protein, 41 aa, Artificial Sequence; identical to SEQ ID NO: 13081
  Cyclic GFR-binding peptide
  MOD_RES (6), (7), (39), (41): Xaa is C or S

SEQ ID NO: 55032 - protein, 31 aa, Artificial Sequence
  Cyclic GFR-binding peptide
  MOD_RES (2), (3): Xaa is C or S
PXXVSQDLSPISILFIIGKTPKIYKQYEMIV

SEQ ID NO: 55033 - protein, 40 aa, Artificial Sequence; identical to SEQ ID NO: 13083
  Cyclic GFR-binding peptide
  MOD_RES (5), (6), (38), (40): Xaa is C or S

SEQ ID NO: 55034 - protein, 23 aa, Artificial Sequence
  Cyclic GFR-binding peptide
RLEPLPIVYYDSANNVVEQLSND

SEQ ID NO: 55035 - protein, 39 aa, Artificial Sequence; identical to SEQ ID NO: 13084
  Cyclic GFR-binding peptide
  MOD_RES (3), (4), (36), (38): Xaa is C or S

SEQ ID NO: 55036 - protein, 30 aa, Artificial Sequence
  Cyclic GFR-binding peptide
  MOD_RES (2), (3): Xaa is C or S
PXXAPTKLSPISVLFIDDSSNVIYKQYENM

SEQ ID NO: 55037 - protein, 31 aa, Artificial Sequence
  Cyclic GFR-binding peptide
  MOD_RES (1), (2): Xaa is C or S
XXVSQDLEPLPIVYYIGKTPKIEQLSNMIVK

SEQ ID NO: 55038 - protein, 32 aa, Artificial Sequence
  Cyclic GFR-binding peptide
  MOD_RES (30), (32): Xaa is C or S
TELSPISMLFIDENEKVVYKQYEDMVVEGXGX

SEQ ID NO: 55039 - protein, 33 aa, Artificial Sequence; identical to SEQ ID NO: 13085
  Cyclic GFR-binding peptide
  MOD_RES (2), (3): Xaa is C or S

SEQ ID NO: 55040 - protein, 24 aa, Artificial Sequence
  Cyclic GFR-binding peptide
DLEPLPIVYYVGRTPKVEQLSNMV

SEQ ID NO: 55041 - protein, 32 aa, Artificial Sequence
  Cyclic GFR-binding peptide
  MOD_RES (29), (31): Xaa is C or S
KLEPLPVVYYDDSSNVIEQLSNNMVVRSXGXH

SEQ ID NO: 55042 - protein, 27 aa, Artificial Sequence
  Cyclic GFR-binding peptide
KLEPLPVVYYDDSSNVIEQLSNNMVVR

SEQ ID NO: 55043 - protein, 30 aa, Artificial Sequence
  Cyclic GFR-binding peptide
  MOD_RES (5), (5): Xaa is C or S
TKPTXAPTKLEPLPVVYYDDSSNVIEQLSN

SEQ ID NO: 55044 - protein, 34 aa, Artificial Sequence
  Cyclic GFR-binding peptide
  MOD_RES (4), (5): Xaa is C or S
PPTXXVPTRLEPLPIVYYDSANNVVEQLSNDMVV

SEQ ID NO: 55045 - protein, 24 aa, Artificial Sequence
  Cyclic GFR-binding peptide
QDLEPLPIVYYVGRTPKVEQLSNM

SEQ ID NO: 55046 - protein, 31 aa, Artificial Sequence
  Cyclic GFR-binding peptide
  MOD_RES (3), (3): Xaa is C or S
PTXAPTKLSPISVLFIDDSSNVIYKQYENMV

SEQ ID NO: 55047 - protein, 40 aa, Artificial Sequence; identical to SEQ ID NO: 13086
  Cyclic GFR-binding peptide
  MOD_RES (5), (6), (38), (40): Xaa is C or S

SEQ ID NO: 55048 - protein, 39 aa, Artificial Sequence; identical to SEQ ID NO: 13087
  Cyclic GFR-binding peptide
  MOD_RES (6), (7), (39): Xaa is C or S

SEQ ID NO: 55049 - protein, 31 aa, Artificial Sequence
  Cyclic GFR-binding peptide
  MOD_RES (1), (2): Xaa is C or S
XXAPTQLEPLPVVYYDDSSNVIEQLSNNMVV

SEQ ID NO: 55050 - protein, 39 aa, Artificial Sequence; identical to SEQ ID NO: 13088
  Cyclic GFR-binding peptide
  MOD_RES (5), (6), (38): Xaa is C or S

SEQ ID NO: 55051 - protein, 28 aa, Artificial Sequence
  Cyclic GFR-binding peptide
ELEPLTMLYYDENEKVVEQLSNDMVVEG

SEQ ID NO: 55052 - protein, 36 aa, Artificial Sequence; identical to SEQ ID NO: 13089
  Cyclic GFR-binding peptide
  MOD_RES (1), (2), (33), (35): Xaa is C or S

SEQ ID NO: 55053 - protein, 36 aa, Artificial Sequence; identical to SEQ ID NO: 13090
  Cyclic GFR-binding peptide
  MOD_RES (1), (33), (35): Xaa is C or S

SEQ ID NO: 55054 - protein, 36 aa, Artificial Sequence; identical to SEQ ID NO: 13092
  Cyclic GFR-binding peptide
  MOD_RES (1), (2), (33), (35): Xaa is C or S

SEQ ID NO: 55055 - protein, 30 aa, Artificial Sequence
  Cyclic GFR-binding peptide
  MOD_RES (29), (29): Xaa is C or S
RLNAISILYFDSANNVVLKKYRDMVVESXG

SEQ ID NO: 55056 - protein, 32 aa, Artificial Sequence
  Cyclic GFR-binding peptide
  MOD_RES (2), (3): Xaa is C or S
PXXVSQDLEPLPIVYYIGKTPKIEQLSNMIVK

SEQ ID NO: 55057 - protein, 38 aa, Artificial Sequence; identical to SEQ ID NO: 13093
  Cyclic GFR-binding peptide
  MOD_RES (3), (4), (36), (38): Xaa is C or S

SEQ ID NO: 55058 - protein, 30 aa, Artificial Sequence
  Cyclic GFR-binding peptide
PTELEPLTMLYYDENEKVVEQLSNDMVVEG

SEQ ID NO: 55059 - protein, 39 aa, Artificial Sequence; identical to SEQ ID NO: 13095
  Cyclic GFR-binding peptide
  MOD_RES (4), (5), (37), (39): Xaa is C or S

SEQ ID NO: 55060 - protein, 35 aa, Artificial Sequence
  Cyclic GFR-binding peptide
  MOD_RES (6), (7): Xaa is C or S
YVPKPXXAPTKLSPISVLFIDDSSNVIYKQYENMV

SEQ ID NO: 55061 - protein, 23 aa, Artificial Sequence
  Cyclic GFR-binding peptide
LNAISILYFDSANNVVLKKYRDM

SEQ ID NO: 55062 - protein, 35 aa, Artificial Sequence
  Cyclic GFR-binding peptide
  MOD_RES (5), (6): Xaa is C or S
SASPXXVSQDLSPISILFIIGKTPKIYKQYEMIVK

SEQ ID NO: 55063 - protein, 33 aa, Artificial Sequence; identical to SEQ ID NO: 13098
  Cyclic GFR-binding peptide
  MOD_RES (32), (32): Xaa is C or S

SEQ ID NO: 55064 - protein, 25 aa, Artificial Sequence
  Cyclic GFR-binding peptide
APTQLEPLPVVYYDDSSNVIEQLSN

SEQ ID NO: 55065 - protein, 28 aa, Artificial Sequence
  Cyclic GFR-binding peptide
VPQALSPISILFIVGRKPKVYKQYEMIV

SEQ ID NO: 55066 - protein, 32 aa, Artificial Sequence
  Cyclic GFR-binding peptide
  MOD_RES (31), (31): Xaa is C or S
PTELEPLTMLYYDEYDKVVEQLSNEMVVEGXG

SEQ ID NO: 55067 - protein, 33 aa, Artificial Sequence; identical to SEQ ID NO: 13103
  Cyclic GFR-binding peptide
  MOD_RES (1), (2), (33): Xaa is C or S

SEQ ID NO: 55068 - protein, 33 aa, Artificial Sequence; identical to SEQ ID NO: 13102
  Cyclic GFR-binding peptide
  MOD_RES (1), (2): Xaa is C or S

SEQ ID NO: 55069 - protein, 27 aa, Artificial Sequence
  Cyclic GFR-binding peptide
  MOD_RES (26), (26): Xaa is C or S
EPLPIVYYVGRTPKVEQLSNMVVKSXK

SEQ ID NO: 55070 - protein, 35 aa, Artificial Sequence; identical to SEQ ID NO: 13104
  Cyclic GFR-binding peptide
  MOD_RES (3), (4), (35): Xaa is C or S

SEQ ID NO: 55071 - protein, 41 aa, Artificial Sequence; identical to SEQ ID NO: 13105
  Cyclic GFR-binding peptide
  MOD_RES (5), (6), (38), (40): Xaa is C or S

SEQ ID NO: 55072 - protein, 32 aa, Artificial Sequence
  Cyclic GFR-binding peptide
  MOD_RES (30), (32): Xaa is C or S
TELEPLTMLYYDEYDKVVEQLSNEMVVEGXGX

SEQ ID NO: 55073 - protein, 32 aa, Artificial Sequence
  Cyclic GFR-binding peptide
  MOD_RES (30), (32): Xaa is C or S
PQDLSPISILFIVGRTPKVYKQYEMVVKSXKX

SEQ ID NO: 55074 - protein, 33 aa, Artificial Sequence
  Cyclic GFR-binding peptide
  MOD_RES (30), (32): Xaa is C or S
TELEPLTMLYYDEYDKVVEQLSNEMVVEGXGXR

SEQ ID NO: 55075 - protein, 25 aa, Artificial Sequence
  Cyclic GFR-binding peptide
TRLNAISILYFDSANNVVLKKYRDM

SEQ ID NO: 55076 - protein, 31 aa, Artificial Sequence
  Cyclic GFR-binding peptide
  MOD_RES (30), (30): Xaa is C or S
PQDLEPLPIVYYVGRTPKVEQLSNMVVKSXK

SEQ ID NO: 55077 - protein, 32 aa, Artificial Sequence; identical to SEQ ID NO: 13108
  Cyclic GFR-binding peptide
  MOD_RES (1), (2): Xaa is C or S

SEQ ID NO: 55078 - protein, 29 aa, Artificial Sequence
  Cyclic GFR-binding peptide
  MOD_RES (27), (29): Xaa is C or S
LSPISILFIVGRKPKVYKQYEMIVRSXKX

SEQ ID NO: 55079 - protein, 29 aa, Artificial Sequence
  Cyclic GFR-binding peptide
  MOD_RES (4), (4): Xaa is C or S
KPTXAPTKLEPLTVLYYDDSSNVIEQLSN

SEQ ID NO: 55080 - protein, 40 aa, Artificial Sequence; identical to SEQ ID NO: 13110
  Cyclic GFR-binding peptide
  MOD_RES (5), (6), (38), (40): Xaa is C or S

SEQ ID NO: 55081 - protein, 22 aa, Artificial Sequence
  Cyclic GFR-binding peptide
EPLTVLYYDDSSNVIEQLSNNM

SEQ ID NO: 55082 - protein, 33 aa, Artificial Sequence; identical to SEQ ID NO: 13112
  Cyclic GFR-binding peptide
  MOD_RES (2), (3): Xaa is C or S

SEQ ID NO: 55083 - protein, 39 aa, Artificial Sequence; identical to SEQ ID NO: 13113
  Cyclic GFR-binding peptide
  MOD_RES (6), (7), (39): Xaa is C or S

SEQ ID NO: 55084 - protein, 33 aa, Artificial Sequence
  Cyclic GFR-binding peptide
  MOD_RES (4), (5): Xaa is C or S
PKPXXAPTQLEPLPVVYYDDSSNVIEQLSNNMV

SEQ ID NO: 55085 - protein, 24 aa, Artificial Sequence
  Cyclic GFR-binding peptide
LSAISILYLDSANNVVLKNYQDMV

SEQ ID NO: 55086 - protein, 26 aa, Artificial Sequence
  Cyclic GFR-binding peptide
  MOD_RES (1), (1): Xaa is C or S
XVPTELSPISMLFIDEYDKVVYKQYE

SEQ ID NO: 55087 - protein, 33 aa, Artificial Sequence; identical to SEQ ID NO: 13115
  Cyclic GFR-binding peptide
  MOD_RES (1), (33): Xaa is C or S

SEQ ID NO: 55088 - protein, 23 aa, Artificial Sequence
  Cyclic GFR-binding peptide
RLSAISILYLDSANNVVLKNYQD

SEQ ID NO: 55089 - protein, 29 aa, Artificial Sequence
  Cyclic GFR-binding peptide
EPLTILYYIGKTPKIEQLSNAAAAAAAAA

SEQ ID NO: 55090 - protein, 37 aa, Artificial Sequence; identical to SEQ ID NO: 13116
  Cyclic GFR-binding peptide
  MOD_RES (2), (3), (35), (37): Xaa is C or S

SEQ ID NO: 55091 - protein, 30 aa, Artificial Sequence
  Cyclic GFR-binding peptide
  MOD_RES (2), (3): Xaa is C or S
AXXVPTELSPISMLFIDENEKVVYKQYEDM

SEQ ID NO: 55092 - protein, 29 aa, Artificial Sequence
  Cyclic GFR-binding peptide
  MOD_RES (1), (1): Xaa is C or S
XAPTKLEPLPVVYYDDSSNVIEQLSNNMV

SEQ ID NO: 55093 - protein, 30 aa, Artificial Sequence
  Cyclic GFR-binding peptide
  MOD_RES (29), (29): Xaa is C or S
ELSPISMLFIDENEKVVYKQYEDMVVEGXG

SEQ ID NO: 55094 - protein, 29 aa, Artificial Sequence
  Cyclic GFR-binding peptide
PTKLSPISVLFIDDSSNVIYKQYENMVVR

SEQ ID NO: 55095 - protein, 40 aa, Artificial Sequence; identical to SEQ ID NO: 13119
  Cyclic GFR-binding peptide
  MOD_RES (4), (5), (37), (39): Xaa is C or S

SEQ ID NO: 55096 - protein, 35 aa, Artificial Sequence; identical to SEQ ID NO: 13121
  Cyclic GFR-binding peptide
  MOD_RES (3), (4): Xaa is C or S

SEQ ID NO: 55097 - protein, 32 aa, Artificial Sequence
  Cyclic GFR-binding peptide
  MOD_RES (4), (5): Xaa is C or S
PKAXXVPTELSPISMLFIDEYDKVVYKQYEEM

SEQ ID NO: 55098 - protein, 27 aa, Artificial Sequence
  Cyclic GFR-binding peptide
QALSPISILFIVGRKPKVYKQYEMIVR

SEQ ID NO: 55099 - protein, 33 aa, Artificial Sequence; identical to SEQ ID NO: 13122
  Cyclic GFR-binding peptide
  MOD_RES (32), (32): Xaa is C or S

SEQ ID NO: 55100 - protein, 42 aa, Artificial Sequence; identical to SEQ ID NO: 13124
  Cyclic GFR-binding peptide
  MOD_RES (6), (7), (39), (41): Xaa is C or S

SEQ ID NO: 55101 - protein, 41 aa, Artificial Sequence; identical to SEQ ID NO: 13125
  Cyclic GFR-binding peptide
  MOD_RES (5), (6), (38), (40): Xaa is C or S

SEQ ID NO: 55102 - protein, 23 aa, Artificial Sequence
  Cyclic GFR-binding peptide
EPLPMVYYDEYDKVVEQLSNEMV

SEQ ID NO: 55103 - protein, 40 aa, Artificial Sequence; identical to SEQ ID NO: 13128
  Cyclic GFR-binding peptide
  MOD_RES (6), (7), (39): Xaa is C or S

SEQ ID NO: 55104 - protein, 25 aa, Artificial Sequence
  Cyclic GFR-binding peptide
TQLSPISVLFIDDSSNVIYKQYENM

SEQ ID NO: 55105 - protein, 36 aa, Artificial Sequence
  Cyclic GFR-binding peptide
  MOD_RES (6), (7): Xaa is C or S
SIPKAXXVPTELEPLPMVYYDEYDKVVEQLSNEMVV

SEQ ID NO: 55106 - protein, 25 aa, Artificial Sequence
  Cyclic GFR-binding peptide
DLEPLPIVYYIGKTPKIEQLSNMIV

SEQ ID NO: 55107 - protein, 25 aa, Artificial Sequence
  Cyclic GFR-binding peptide
EPLPMVYYDENEKVVEQLSNDMVVE

SEQ ID NO: 55108 - protein, 27 aa, Artificial Sequence
  Cyclic GFR-binding peptide
LSPISMLFIDENEKVVYKQYEDMVVEG

SEQ ID NO: 55109 - protein, 33 aa, Artificial Sequence
  Cyclic GFR-binding peptide
  MOD_RES (5), (6): Xaa is C or S
TPPTXXVPTRLEPLTILYYDSANNVVEQLSNDM

SEQ ID NO: 55110 - protein, 31 aa, Artificial Sequence
  Cyclic GFR-binding peptide
  MOD_RES (3), (4): Xaa is C or S
APXXVPQALSPISILFIVGRKPKVYKQYEMI

SEQ ID NO: 55111 - protein, 32 aa, Artificial Sequence; identical to SEQ ID NO: 13132
  Cyclic GFR-binding peptide
  MOD_RES (32), (32): Xaa is C or S

SEQ ID NO: 55112 - protein, 27 aa, Artificial Sequence
  Cyclic GFR-binding peptide
  MOD_RES (26), (26): Xaa is C or S
SPISILFIVGRKPKVYKQYEMIVRSXK

SEQ ID NO: 55113 - protein, 37 aa, Artificial Sequence; identical to SEQ ID NO: 13134
  Cyclic GFR-binding peptide
  MOD_RES (3), (35), (37): Xaa is C or S

SEQ ID NO: 55114 - protein, 26 aa, Artificial Sequence
  Cyclic GFR-binding peptide
PTQLEPLPVVYYDDSSNVIEQLSNNM

SEQ ID NO: 55115 - protein, 28 aa, Artificial Sequence
  Cyclic GFR-binding peptide
TQLEPLTVLYYDDSSNVIEQLSNNMVVR

SEQ ID NO: 55116 - protein, 26 aa, Artificial Sequence
  Cyclic GFR-binding peptide
TQLEPLPVVYYDDSSNVIEQLSNNMV

SEQ ID NO: 55117 - protein, 21 aa, Artificial Sequence
  Cyclic GFR-binding peptide
EPLTILYYVGRKPKVEQLSNM

SEQ ID NO: 55118 - protein, 34 aa, Artificial Sequence; identical to SEQ ID NO: 13135
  Cyclic GFR-binding peptide
  MOD_RES (1), (2), (34): Xaa is C or S

SEQ ID NO: 55119 - protein, 33 aa, Artificial Sequence
  Cyclic GFR-binding peptide
  MOD_RES (3), (4): Xaa is C or S
SPXXVSQDLSPISILFIIGKTPKIYKQYEMIVK

SEQ ID NO: 55120 - protein, 27 aa, Artificial Sequence
  Cyclic GFR-binding peptide
PTELEPLPMVYYDEYDKVVEQLSNEMV

SEQ ID NO: 55121 - protein, 29 aa, Artificial Sequence
  Cyclic GFR-binding peptide
  MOD_RES (1), (1): Xaa is C or S
XVPTRLNAISILYFDSANNVVLKKYRDMV

SEQ ID NO: 55122 - protein, 33 aa, Artificial Sequence
  Cyclic GFR-binding peptide
  MOD_RES (4), (5): Xaa is C or S
PKAXXVPTELSPISMLFIDEYDKVVYKQYEEMV

SEQ ID NO: 55123 - protein, 41 aa, Artificial Sequence; identical to SEQ ID NO: 13137
  Cyclic GFR-binding peptide
  MOD_RES (7), (39), (41): Xaa is C or S

SEQ ID NO: 55124 - protein, 28 aa, Artificial Sequence
  Cyclic GFR-binding peptide
  MOD_RES (2), (3): Xaa is C or S
AXXVPTELSPISMLFIDEYDKVVYKQYE

SEQ ID NO: 55125 - protein, 25 aa, Artificial Sequence
  Cyclic GFR-binding peptide
VPQDLSPISILFIVGRTPKVYKQYE

SEQ ID NO: 55126 - protein, 31 aa, Artificial Sequence; identical to SEQ ID NO: 13140
  Cyclic GFR-binding peptide

SEQ ID NO: 55127 - protein, 38 aa, Artificial Sequence; identical to SEQ ID NO: 13141
  Cyclic GFR-binding peptide
  MOD_RES (6), (7): Xaa is C or S

SEQ ID NO: 55128 - protein, 31 aa, Artificial Sequence
  Cyclic GFR-binding peptide
  MOD_RES (28), (30): Xaa is C or S
LEPLPVVYYDDSSNVIEQLSNNMVVRAXGXH

SEQ ID NO: 55129 - protein, 25 aa, Artificial Sequence
  Cyclic GFR-binding peptide
QDLSPISILFIVGRTPKVYKQYEMV

SEQ ID NO: 55130 - protein, 41 aa, Artificial Sequence; identical to SEQ ID NO: 13144
  Cyclic GFR-binding peptide
  MOD_RES (6), (7), (39), (41): Xaa is C or S

SEQ ID NO: 55131 - protein, 22 aa, Artificial Sequence
  Cyclic GFR-binding peptide
LEPLPMVYYDEYDKVVEQLSNE

SEQ ID NO: 55132 - protein, 31 aa, Artificial Sequence
  Cyclic GFR-binding peptide
  MOD_RES (2), (3): Xaa is C or S
AXXVPTELEPLTMLYYDENEKVVEQLSNDMV

SEQ ID NO: 55133 - protein, 33 aa, Artificial Sequence
  Cyclic GFR-binding peptide
  MOD_RES (6), (6): Xaa is C or S
VTKPTXAPTKLEPLTVLYYDDSSNVIEQLSNNM

SEQ ID NO: 55134 - protein, 37 aa, Artificial Sequence; identical to SEQ ID NO: 13145
  Cyclic GFR-binding peptide
  MOD_RES (1), (2), (34), (36): Xaa is C or S

SEQ ID NO: 55135 - protein, 35 aa, Artificial Sequence
  Cyclic GFR-binding peptide
  MOD_RES (5), (6): Xaa is C or S
IPKAXXVPTELEPLTMLYYDENEKVVEQLSNDMVV

SEQ ID NO: 55136 - protein, 34 aa, Artificial Sequence
  Cyclic GFR-binding peptide
  MOD_RES (6), (7): Xaa is C or S
KIPKAXXVPTELEPLPMVYYDENEKVVEQLSNDM

SEQ ID NO: 55137 - protein, 26 aa, Artificial Sequence
  Cyclic GFR-binding peptide
  MOD_RES (1), (1): Xaa is C or S
XVPQDLEPLPIVYYVGRTPKVEQLSN

SEQ ID NO: 55138 - protein, 26 aa, Artificial Sequence
  Cyclic GFR-binding peptide
VPTRLEPLPIVYYDSANNVVEQLSND

SEQ ID NO: 55139 - protein, 36 aa, Artificial Sequence; identical to SEQ ID NO: 13147
  Cyclic GFR-binding peptide
  MOD_RES (2), (3), (35): Xaa is C or S

SEQ ID NO: 55140 - protein, 35 aa, Artificial Sequence; identical to SEQ ID NO: 13148
  Cyclic GFR-binding peptide
  MOD_RES (32), (34): Xaa is C or S

SEQ ID NO: 55141 - protein, 31 aa, Artificial Sequence
  Cyclic GFR-binding peptide
  MOD_RES (5), (6): Xaa is C or S
VPKPXXAPTQLEPLTVLYYDDSSNVIEQLSN

SEQ ID NO: 55142 - protein, 31 aa, Artificial Sequence; identical to SEQ ID NO: 13150
  Cyclic GFR-binding peptide
  MOD_RES (1), (1): Xaa is C or S

SEQ ID NO: 55143 - protein, 28 aa, Artificial Sequence
  Cyclic GFR-binding peptide
VPTRLEPLPIVYYDSANNVVEQLSNDMV

SEQ ID NO: 55144 - protein, 30 aa, Artificial Sequence
  Cyclic GFR-binding peptide
  MOD_RES (30), (30): Xaa is C or S
PQDLSPISILFIVGRTPKVYKQYEMVVKSX

SEQ ID NO: 55145 - protein, 33 aa, Artificial Sequence; identical to SEQ ID NO: 13152
  Cyclic GFR-binding peptide
  MOD_RES (32), (32): Xaa is C or S

SEQ ID NO: 55146 - protein, 38 aa, Artificial Sequence; identical to SEQ ID NO: 13153
  Cyclic GFR-binding peptide
  MOD_RES (3), (4), (35), (37): Xaa is C or S

SEQ ID NO: 55147 - protein, 38 aa, Artificial Sequence; identical to SEQ ID NO: 13155
  Cyclic GFR-binding peptide
  MOD_RES (5), (6), (37): Xaa is C or S

SEQ ID NO: 55148 - protein, 36 aa, Artificial Sequence; identical to SEQ ID NO: 13156
  Cyclic GFR-binding peptide
  MOD_RES (1), (33), (35): Xaa is C or S

SEQ ID NO: 55149 - protein, 41 aa, Artificial Sequence; identical to SEQ ID NO: 13157
  Cyclic GFR-binding peptide
  MOD_RES (5), (6), (38), (40): Xaa is C or S

SEQ ID NO: 55150 - protein, 24 aa, Artificial Sequence
  Cyclic GFR-binding peptide
PTELEPLTMLYYDENEKVVEQLSN

SEQ ID NO: 55151 - protein, 25 aa, Artificial Sequence
  Cyclic GFR-binding peptide
PTRLNAISILYFDSANNVVLKKYRD

SEQ ID NO: 55152 - protein, 34 aa, Artificial Sequence; identical to SEQ ID NO: 13160
  Cyclic GFR-binding peptide
  MOD_RES (3), (4): Xaa is C or S

SEQ ID NO: 55153 - protein, 33 aa, Artificial Sequence; identical to SEQ ID NO: 13162
  Cyclic GFR-binding peptide
  MOD_RES (1), (33): Xaa is C or S

SEQ ID NO: 55154 - protein, 27 aa, Artificial Sequence
  Cyclic GFR-binding peptide
LEPLPMVYYDENEKVVEQLSNDMVVEG

SEQ ID NO: 55155 - protein, 32 aa, Artificial Sequence
  Cyclic GFR-binding peptide
  MOD_RES (6), (7): Xaa is C or S
ASASPXXVPQDLSPISILFIVGRTPKVYKQYE

SEQ ID NO: 55156 - protein, 39 aa, Artificial Sequence; identical to SEQ ID NO: 13163
  Cyclic GFR-binding peptide
  MOD_RES (6), (7), (39): Xaa is C or S

SEQ ID NO: 55157 - protein, 29 aa, Artificial Sequence
  Cyclic GFR-binding peptide
PTRLNAISILYFDSANNVVLKKYRDMVVE

SEQ ID NO: 55158 - protein, 27 aa, Artificial Sequence
  Cyclic GFR-binding peptide
RLSAISILYLDSANNVVLKNYQDMVVE

SEQ ID NO: 55159 - protein, 21 aa, Artificial Sequence
  Cyclic GFR-binding peptide
LEPLPVVYYDDSSNVIEQLSN

SEQ ID NO: 55160 - protein, 40 aa, Artificial Sequence; identical to SEQ ID NO: 13165
  Cyclic GFR-binding peptide
  MOD_RES (6), (38), (40): Xaa is C or S

SEQ ID NO: 55161 - protein, 26 aa, Artificial Sequence
  Cyclic GFR-binding peptide
QDLSPISILFIVGRTPKVYKQYEMVV

SEQ ID NO: 55162 - protein, 34 aa, Artificial Sequence; identical to SEQ ID NO: 13167
  Cyclic GFR-binding peptide
  MOD_RES (1), (33): Xaa is C or S

SEQ ID NO: 55163 - protein, 29 aa, Artificial Sequence
  Cyclic GFR-binding peptide
  MOD_RES (28), (28): Xaa is C or S
LEPLPMVYYDEYDKVVEQLSNEMVVEGXG

SEQ ID NO: 55164 - protein, 29 aa, Artificial Sequence
  Cyclic GFR-binding peptide
SQDLEPLPIVYYIGKTPKIEQLSNMIVKS

SEQ ID NO: 55165 - protein, 26 aa, Artificial Sequence
  Cyclic GFR-binding peptide
LEPLTVLYYDDSSNVIEQLSNNMVVR

SEQ ID NO: 55166 - protein, 40 aa, Artificial Sequence; identical to SEQ ID NO: 13170
  Cyclic GFR-binding peptide
  MOD_RES (5), (37), (39): Xaa is C or S

SEQ ID NO: 55167 - protein, 30 aa, Artificial Sequence; identical to SEQ ID NO: 13172
  Cyclic GFR-binding peptide

SEQ ID NO: 55168 - protein, 31 aa, Artificial Sequence
  Cyclic GFR-binding peptide
  MOD_RES (2), (2): Xaa is C or S
TXAPTKLEPLPVVYYDDSSNVIEQLSNNMVV

SEQ ID NO: 55169 - protein, 23 aa, Artificial Sequence
  Cyclic GFR-binding peptide
LEPLPIVYYIGKTPKIEQLSNMI

SEQ ID NO: 55170 - protein, 26 aa, Artificial Sequence
  Cyclic GFR-binding peptide
TELEPLPMVYYDENEKVVEQLSNDMV

SEQ ID NO: 55171 - protein, 24 aa, Artificial Sequence
  Cyclic GFR-binding peptide
SAISILYLDSANNVVLKNYQDMVV

SEQ ID NO: 55172 - protein, 35 aa, Artificial Sequence; identical to SEQ ID NO: 13173
  Cyclic GFR-binding peptide
  MOD_RES (32), (34): Xaa is C or S

SEQ ID NO: 55173 - protein, 25 aa, Artificial Sequence
  Cyclic GFR-binding peptide
LEPLTVLYYDDSSNVIEQLSNNMVV

SEQ ID NO: 55174 - protein, 34 aa, Artificial Sequence; identical to SEQ ID NO: 13174
  Cyclic GFR-binding peptide
  MOD_RES (32), (34): Xaa is C or S

SEQ ID NO: 55175 - protein, 30 aa, Artificial Sequence
  Cyclic GFR-binding peptide
  MOD_RES (30), (30): Xaa is C or S
TELSPISMLFIDEYDKVVYKQYEEMVVEGX

SEQ ID NO: 55176 - protein, 27 aa, Artificial Sequence
  Cyclic GFR-binding peptide
TRLEPLTILYYDSANNVVEQLSNDMVV

SEQ ID NO: 55177 - protein, 30 aa, Artificial Sequence; identical to SEQ ID NO: 991
  Cyclic GFR-binding peptide

SEQ ID NO: 55178 - protein, 27 aa, Artificial Sequence
  Cyclic GFR-binding peptide
  MOD_RES (1), (2): Xaa is C or S
XXVPTELSPISMLFIDEYDKVVYKQYE

SEQ ID NO: 55179 - protein, 32 aa, Artificial Sequence
  Cyclic GFR-binding peptide
  MOD_RES (6), (7): Xaa is C or S
STPPTXXVPTRLEPLTILYYDSANNVVEQLSN

SEQ ID NO: 55180 - protein, 33 aa, Artificial Sequence
  Cyclic GFR-binding peptide
  MOD_RES (30), (32): Xaa is C or S
SQDLEPLPIVYYIGKTPKIEQLSNMIVKSXKXS

SEQ ID NO: 55181 - protein, 38 aa, Artificial Sequence; identical to SEQ ID NO: 13178
  Cyclic GFR-binding peptide
  MOD_RES (5), (37): Xaa is C or S

SEQ ID NO: 55182 - protein, 24 aa, Artificial Sequence
  Cyclic GFR-binding peptide
EPLTILYYDSANNVVEQLSNDMVV

SEQ ID NO: 55183 - protein, 23 aa, Artificial Sequence
  Cyclic GFR-binding peptide
LSAISILYLDSANNVVLKNYQDM

SEQ ID NO: 55184 - protein, 34 aa, Artificial Sequence; identical to SEQ ID NO: 13179
  Cyclic GFR-binding peptide
  MOD_RES (3), (4): Xaa is C or S

SEQ ID NO: 55185 - protein, 26 aa, Artificial Sequence
  Cyclic GFR-binding peptide
ELEPLPMVYYDEYDKVVEQLSNEMVV

SEQ ID NO: 55186 - protein, 30 aa, Artificial Sequence
  Cyclic GFR-binding peptide
  MOD_RES (4), (5): Xaa is C or S
AAPXXVPQALSPISILFIVGRKPKVYKQYE

SEQ ID NO: 55187 - protein, 29 aa, Artificial Sequence
  Cyclic GFR-binding peptide
SPISILFIVGRKPKVYKQYEAAAAAAAAA

SEQ ID NO: 55188 - protein, 27 aa, Artificial Sequence
  Cyclic GFR-binding peptide
KLSPISVLFIDDSSNVIYKQYENMVVR

SEQ ID NO: 55189 - protein, 41 aa, Artificial Sequence; identical to SEQ ID NO: 13181
  Cyclic GFR-binding peptide
  MOD_RES (7), (39), (41): Xaa is C or S

SEQ ID NO: 55190 - protein, 32 aa, Artificial Sequence
  Cyclic GFR-binding peptide
  MOD_RES (29), (31): Xaa is C or S
RLEPLTILYYDSANNVVEQLSNDMVVESXGXR

SEQ ID NO: 55191 - protein, 31 aa, Artificial Sequence
  Cyclic GFR-binding peptide
  MOD_RES (2), (3): Xaa is C or S
PXXAPTKLEPLTVLYYDDSSNVIEQLSNNMV

SEQ ID NO: 55192 - protein, 30 aa, Artificial Sequence
  Cyclic GFR-binding peptide
  MOD_RES (30), (30): Xaa is C or S
TKLEPLTVLYYDDSSNVIEQLSNNMVVRSX

SEQ ID NO: 55193 - protein, 30 aa, Artificial Sequence; identical to SEQ ID NO: 1056
  Cyclic GFR-binding peptide

SEQ ID NO: 55194 - protein, 25 aa, Artificial Sequence
  Cyclic GFR-binding peptide
TELEPLPMVYYDEYDKVVEQLSNEM

SEQ ID NO: 55195 - protein, 33 aa, Artificial Sequence
  Cyclic GFR-binding peptide
  MOD_RES (30), (32): Xaa is C or S
PQDLSPISILFIVGRTPKVYKQYEMVVKSXKXS

SEQ ID NO: 55196 - protein, 32 aa, Artificial Sequence; identical to SEQ ID NO: 13185
  Cyclic GFR-binding peptide
  MOD_RES (1), (1): Xaa is C or S

SEQ ID NO: 55197 - protein, 40 aa, Artificial Sequence; identical to SEQ ID NO: 13186
  Cyclic GFR-binding peptide
  MOD_RES (5), (6), (38), (40): Xaa is C or S

SEQ ID NO: 55198 - protein, 36 aa, Artificial Sequence
  Cyclic GFR-binding peptide
  MOD_RES (6), (7): Xaa is C or S
ASASPXXVSQDLSPISILFIIGKTPKIYKQYEMIVK

SEQ ID NO: 55199 - protein, 30 aa, Artificial Sequence
  Cyclic GFR-binding peptide
  MOD_RES (3), (4): Xaa is C or S
KAXXVPTELEPLPMVYYDENEKVVEQLSND

SEQ ID NO: 55200 - protein, 35 aa, Artificial Sequence; identical to SEQ ID NO: 13189
  Cyclic GFR-binding peptide
  MOD_RES (32), (34): Xaa is C or S

SEQ ID NO: 55201 - protein, 33 aa, Artificial Sequence
  Cyclic GFR-binding peptide
  MOD_RES (3), (4): Xaa is C or S
KAXXVPTELEPLTMLYYDENEKVVEQLSNDMVV

SEQ ID NO: 55202 - protein, 25 aa, Artificial Sequence
  Cyclic GFR-binding peptide
EPLPIVYYVGRTPKVEQLSNMVVKS

SEQ ID NO: 55203 - protein, 33 aa, Artificial Sequence; identical to SEQ ID NO: 13190
  Cyclic GFR-binding peptide
  MOD_RES (1), (33): Xaa is C or S

SEQ ID NO: 55204 - protein, 34 aa, Artificial Sequence; identical to SEQ ID NO: 13191
  Cyclic GFR-binding peptide
  MOD_RES (2), (3): Xaa is C or S

SEQ ID NO: 55205 - protein, 30 aa, Artificial Sequence
  Cyclic GFR-binding peptide
  MOD_RES (27), (29): Xaa is C or S
SPISMLFIDENEKVVYKQYEDMVVEGXGXR

SEQ ID NO: 55206 - protein, 35 aa, Artificial Sequence; identical to SEQ ID NO: 13193
  Cyclic GFR-binding peptide
  MOD_RES (3), (4): Xaa is C or S

SEQ ID NO: 55207 - protein, 34 aa, Artificial Sequence
  Cyclic GFR-binding peptide
  MOD_RES (31), (33): Xaa is C or S
PTKLEPLPVVYYDDSSNVIEQLSNNMVVRSXGXH

SEQ ID NO: 55208 - protein, 37 aa, Artificial Sequence; identical to SEQ ID NO: 13195
  Cyclic GFR-binding peptide
  MOD_RES (2), (3), (34), (36): Xaa is C or S

SEQ ID NO: 55209 - protein, 26 aa, Artificial Sequence
  Cyclic GFR-binding peptide
TRLSAISILYLDSANNVVLKNYQDMV

SEQ ID NO: 55210 - protein, 26 aa, Artificial Sequence
  Cyclic GFR-binding peptide
  MOD_RES (1), (1): Xaa is C or S
XVPTELEPLTMLYYDENEKVVEQLSN

SEQ ID NO: 55211 - protein, 26 aa, Artificial Sequence
  Cyclic GFR-binding peptide
  MOD_RES (1), (1): Xaa is C or S
XVPTRLEPLPIVYYDSANNVVEQLSN

SEQ ID NO: 55212 - protein, 33 aa, Artificial Sequence; identical to SEQ ID NO: 13197
  Cyclic GFR-binding peptide
  MOD_RES (1), (2): Xaa is C or S

SEQ ID NO: 55213 - protein, 28 aa, Artificial Sequence
  Cyclic GFR-binding peptide
  MOD_RES (27), (27): Xaa is C or S
EPLTMLYYDEYDKVVEQLSNEMVVEGXG

SEQ ID NO: 55214 - protein, 26 aa, Artificial Sequence
  Cyclic GFR-binding peptide
PQDLEPLPIVYYVGRTPKVEQLSNMV

SEQ ID NO: 55215 - protein, 32 aa, Artificial Sequence
  Cyclic GFR-binding peptide
  MOD_RES (6), (7): Xaa is C or S
STPPTXXVPTRLNAISILYFDSANNVVLKKYR

SEQ ID NO: 55216 - protein, 29 aa, Artificial Sequence
  Cyclic GFR-binding peptide
TQLEPLTVLYYDDSSNVIEQLSNNMVVRA

SEQ ID NO: 55217 - protein, 38 aa, Artificial Sequence; identical to SEQ ID NO: 13198
  Cyclic GFR-binding peptide
  MOD_RES (6), (7): Xaa is C or S

SEQ ID NO: 55218 - protein, 37 aa, Artificial Sequence; identical to SEQ ID NO: 13199
  Cyclic GFR-binding peptide
  MOD_RES (6), (7): Xaa is C or S

SEQ ID NO: 55219 - protein, 25 aa, Artificial Sequence
  Cyclic GFR-binding peptide
TRLSAISILYLDSANNVVLKNYQDM

SEQ ID NO: 55220 - protein, 25 aa, Artificial Sequence
  Cyclic GFR-binding peptide
SQDLEPLPIVYYIGKTPKIEQLSNM

SEQ ID NO: 55221 - protein, 37 aa, Artificial Sequence; identical to SEQ ID NO: 13202
  Cyclic GFR-binding peptide
  MOD_RES (5), (37): Xaa is C or S

SEQ ID NO: 55222 - protein, 31 aa, Artificial Sequence
  Cyclic GFR-binding peptide
  MOD_RES (29), (31): Xaa is C or S
KLSPISVLFIDDSSNVIYKQYENMVVRSXGX

SEQ ID NO: 55223 - protein, 35 aa, Artificial Sequence; identical to SEQ ID NO: 13203
  Cyclic GFR-binding peptide
  MOD_RES (5), (5): Xaa is C or S

SEQ ID NO: 55224 - protein, 36 aa, Artificial Sequence; identical to SEQ ID NO: 13204
  Cyclic GFR-binding peptide
  MOD_RES (3), (4), (36): Xaa is C or S

SEQ ID NO: 55225 - protein, 33 aa, Artificial Sequence
  Cyclic GFR-binding peptide
  MOD_RES (5), (6): Xaa is C or S
VPKPXXAPTQLEPLPVVYYDDSSNVIEQLSNNM

SEQ ID NO: 55226 - protein, 34 aa, Artificial Sequence
  Cyclic GFR-binding peptide
  MOD_RES (5), (6): Xaa is C or S
VPKPXXAPTQLEPLPVVYYDDSSNVIEQLSNNMV

SEQ ID NO: 55227 - protein, 24 aa, Artificial Sequence
  Cyclic GFR-binding peptide
TELSPISMLFIDEYDKVVYKQYEE

SEQ ID NO: 55228 - protein, 39 aa, Artificial Sequence; identical to SEQ ID NO: 13208
  Cyclic GFR-binding peptide
  MOD_RES (5), (6), (38): Xaa is C or S

SEQ ID NO: 55229 - protein, 33 aa, Artificial Sequence
  Cyclic GFR-binding peptide
  MOD_RES (3), (4): Xaa is C or S
KAXXVPTELEPLTMLYYDEYDKVVEQLSNEMVV

SEQ ID NO: 55230 - protein, 33 aa, Artificial Sequence
  Cyclic GFR-binding peptide
  MOD_RES (6), (7): Xaa is C or S
SIPKAXXVPTELEPLTMLYYDEYDKVVEQLSNE

SEQ ID NO: 55231 - protein, 35 aa, Artificial Sequence; identical to SEQ ID NO: 13209
  Cyclic GFR-binding peptide
  MOD_RES (1), (2), (34): Xaa is C or S

SEQ ID NO: 55232 - protein, 37 aa, Artificial Sequence; identical to SEQ ID NO: 13212
  Cyclic GFR-binding peptide
  MOD_RES (5), (6): Xaa is C or S

SEQ ID NO: 55233 - protein, 37 aa, Artificial Sequence; identical to SEQ ID NO: 13213
  Cyclic GFR-binding peptide
  MOD_RES (6), (7): Xaa is C or S

SEQ ID NO: 55234 - protein, 33 aa, Artificial Sequence
  Cyclic GFR-binding peptide
  MOD_RES (4), (5): Xaa is C or S
PPTXXVPTRLEPLTILYYDSANNVVEQLSNDMV

SEQ ID NO: 55235 - protein, 29 aa, Artificial Sequence
  Cyclic GFR-binding peptide
  MOD_RES (2), (2): Xaa is C or S
TXAPTKLEPLTVLYYDDSSNVIEQLSNNM

SEQ ID NO: 55236 - protein, 33 aa, Artificial Sequence; identical to SEQ ID NO: 13214
  Cyclic GFR-binding peptide
  MOD_RES (1), (33): Xaa is C or S

SEQ ID NO: 55237 - protein, 33 aa, Artificial Sequence; identical to SEQ ID NO: 13215
  Cyclic GFR-binding peptide
  MOD_RES (1), (2), (33): Xaa is C or S

SEQ ID NO: 55238 - protein, 41 aa, Artificial Sequence; identical to SEQ ID NO: 13217
  Cyclic GFR-binding peptide
  MOD_RES (6), (7), (39), (41): Xaa is C or S

SEQ ID NO: 55239 - protein, 34 aa, Artificial Sequence
  Cyclic GFR-binding peptide
  MOD_RES (5), (6): Xaa is C or S
SASPXXVPQDLSPISILFIVGRTPKVYKQYEMVV

SEQ ID NO: 55240 - protein, 26 aa, Artificial Sequence
  Cyclic GFR-binding peptide
SPISMLFIDENEKVVYKQYEDMVVEG

SEQ ID NO: 55241 - protein, 31 aa, Artificial Sequence
  Cyclic GFR-binding peptide
  MOD_RES (29), (31): Xaa is C or S
QLEPLTVLYYDDSSNVIEQLSNNMVVRAXGX

SEQ ID NO: 55242 - protein, 36 aa, Artificial Sequence; identical to SEQ ID NO: 13219
  Cyclic GFR-binding peptide
  MOD_RES (1), (2), (34), (36): Xaa is C or S

SEQ ID NO: 55243 - protein, 26 aa, Artificial Sequence
  Cyclic GFR-binding peptide
LEPLTILYYVGRKPKVEQLSNMIVRS

SEQ ID NO: 55244 - protein, 24 aa, Artificial Sequence
  Cyclic GFR-binding peptide
TELEPLTMLYYDEYDKVVEQLSNE

SEQ ID NO: 55245 - protein, 31 aa, Artificial Sequence; identical to SEQ ID NO: 13220
  Cyclic GFR-binding peptide
  MOD_RES (1), (1): Xaa is C or S

SEQ ID NO: 55246 - protein, 26 aa, Artificial Sequence
  Cyclic GFR-binding peptide
QDLEPLPIVYYIGKTPKIEQLSNMIV

SEQ ID NO: 55247 - protein, 33 aa, Artificial Sequence
  Cyclic GFR-binding peptide
  MOD_RES (6), (7): Xaa is C or S
SIPKAXXVPTELSPISMLFIDEYDKVVYKQYEE

SEQ ID NO: 55248 - protein, 30 aa, Artificial Sequence; identical to SEQ ID NO: 992
  Cyclic GFR-binding peptide

SEQ ID NO: 55249 - protein, 22 aa, Artificial Sequence
  Cyclic GFR-binding peptide
LEPLTMLYYDEYDKVVEQLSNE

SEQ ID NO: 55250 - protein, 38 aa, Artificial Sequence; identical to SEQ ID NO: 13222
  Cyclic GFR-binding peptide
  MOD_RES (5), (6), (38): Xaa is C or S

SEQ ID NO: 55251 - protein, 38 aa, Artificial Sequence; identical to SEQ ID NO: 13223
  Cyclic GFR-binding peptide
  MOD_RES (3), (4), (36), (38): Xaa is C or S

SEQ ID NO: 55252 - protein, 38 aa, Artificial Sequence; identical to SEQ ID NO: 13224
  Cyclic GFR-binding peptide
  MOD_RES (6), (38): Xaa is C or S

SEQ ID NO: 55253 - protein, 33 aa, Artificial Sequence
  Cyclic GFR-binding peptide
  MOD_RES (30), (32): Xaa is C or S
TRLNAISILYFDSANNVVLKKYRDMVVESXGXR

SEQ ID NO: 55254 - protein, 34 aa, Artificial Sequence
  Cyclic GFR-binding peptide
  MOD_RES (5), (6): Xaa is C or S
SASPXXVSQDLEPLPIVYYIGKTPKIEQLSNMIV

SEQ ID NO: 55255 - protein, 32 aa, Artificial Sequence
  Cyclic GFR-binding peptide
  MOD_RES (30), (32): Xaa is C or S
TRLEPLPIVYYDSANNVVEQLSNDMVVESXGX

SEQ ID NO: 55256 - protein, 37 aa, Artificial Sequence; identical to SEQ ID NO: 13227
  Cyclic GFR-binding peptide
  MOD_RES (5), (6): Xaa is C or S

SEQ ID NO: 55257 - protein, 27 aa, Artificial Sequence
  Cyclic GFR-binding peptide
TRLSAISILYLDSANNVVLKNYQDMVV

SEQ ID NO: 55258 - protein, 28 aa, Artificial Sequence
  Cyclic GFR-binding peptide
PTQLEPLTVLYYDDSSNVIEQLSNNMVV

SEQ ID NO: 55259 - protein, 38 aa, Artificial Sequence; identical to SEQ ID NO: 13231
  Cyclic GFR-binding peptide
  MOD_RES (3), (4), (35), (37): Xaa is C or S

SEQ ID NO: 55260 - protein, 32 aa, Artificial Sequence
  Cyclic GFR-binding peptide
  MOD_RES (30), (32): Xaa is C or S
PQALSPISILFIVGRKPKVYKQYEMIVRSXKX

SEQ ID NO: 55261 - protein, 23 aa, Artificial Sequence
  Cyclic GFR-binding peptide
SPISILFIIGKTPKIYKQYEMIV

SEQ ID NO: 55262 - protein, 30 aa, Artificial Sequence
  Cyclic GFR-binding peptide
  MOD_RES (27), (29): Xaa is C or S
EPLPMVYYDEYDKVVEQLSNEMVVEGXGXR

SEQ ID NO: 55263 - protein, 23 aa, Artificial Sequence
  Cyclic GFR-binding peptide
ELEPLPMVYYDENEKVVEQLSND

SEQ ID NO: 55264 - protein, 37 aa, Artificial Sequence; identical to SEQ ID NO: 13234
  Cyclic GFR-binding peptide
  MOD_RES (2), (3), (35), (37): Xaa is C or S

SEQ ID NO: 55265 - protein, 37 aa, Artificial Sequence; identical to SEQ ID NO: 13235
  Cyclic GFR-binding peptide
  MOD_RES (2), (3), (35), (37): Xaa is C or S

SEQ ID NO: 55266 - protein, 33 aa, Artificial Sequence; identical to SEQ ID NO: 13236
  Cyclic GFR-binding peptide
  MOD_RES (32), (32): Xaa is C or S

SEQ ID NO: 55267 - protein, 28 aa, Artificial Sequence
  Cyclic GFR-binding peptide
  MOD_RES (28), (28): Xaa is C or S
DLSPISILFIVGRTPKVYKQYEMVVKSX

SEQ ID NO: 55268 - protein, 32 aa, Artificial Sequence
  Cyclic GFR-binding peptide
  MOD_RES (29), (31): Xaa is C or S
ELEPLTMLYYDENEKVVEQLSNDMVVEGXGXR

SEQ ID NO: 55269 - protein, 37 aa, Artificial Sequence; identical to SEQ ID NO: 13238
  Cyclic GFR-binding peptide
  MOD_RES (4), (36): Xaa is C or S

SEQ ID NO: 55270 - protein, 32 aa, Artificial Sequence
  Cyclic GFR-binding peptide
  MOD_RES (29), (31): Xaa is C or S
QDLEPLPIVYYVGRTPKVEQLSNMVVKSXKXS

SEQ ID NO: 55271 - protein, 38 aa, Artificial Sequence; identical to SEQ ID NO: 13241
  Cyclic GFR-binding peptide
  MOD_RES (5), (6), (38): Xaa is C or S

SEQ ID NO: 55272 - protein, 32 aa, Artificial Sequence
  Cyclic GFR-binding peptide
  MOD_RES (3), (3): Xaa is C or S
PTXAPTKLEPLTVLYYDDSSNVIEQLSNNMVV

SEQ ID NO: 55273 - protein, 32 aa, Artificial Sequence
  Cyclic GFR-binding peptide
  MOD_RES (31), (31): Xaa is C or S
PTRLEPLPIVYYDSANNVVEQLSNDMVVESXG

SEQ ID NO: 55274 - protein, 33 aa, Artificial Sequence
  Cyclic GFR-binding peptide
  MOD_RES (5), (6): Xaa is C or S
IPKAXXVPTELSPISMLFIDEYDKVVYKQYEEM

SEQ ID NO: 55275 - protein, 42 aa, Artificial Sequence; identical to SEQ ID NO: 13242
  Cyclic GFR-binding peptide
  MOD_RES (7), (39), (41): Xaa is C or S

SEQ ID NO: 55276 - protein, 29 aa, Artificial Sequence
  Cyclic GFR-binding peptide
NAISILYFDSANNVVLKKYRAAAAAAAAA

SEQ ID NO: 55277 - protein, 32 aa, Artificial Sequence
  Cyclic GFR-binding peptide
  MOD_RES (3), (4): Xaa is C or S
KPXXAPTKLEPLTVLYYDDSSNVIEQLSNNMV

SEQ ID NO: 55278 - protein, 28 aa, Artificial Sequence
  Cyclic GFR-binding peptide
  MOD_RES (27), (27): Xaa is C or S
NAISILYFDSANNVVLKKYRDMVVESXG

SEQ ID NO: 55279 - protein, 31 aa, Artificial Sequence
  Cyclic GFR-binding peptide
  MOD_RES (29), (31): Xaa is C or S
KLEPLTVLYYDDSSNVIEQLSNNMVVRSXGX

SEQ ID NO: 55280 - protein, 39 aa, Artificial Sequence; identical to SEQ ID NO: 13247
  Cyclic GFR-binding peptide
  MOD_RES (4), (5), (37), (39): Xaa is C or S

SEQ ID NO: 55281 - protein, 37 aa, Artificial Sequence; identical to SEQ ID NO: 13248
  Cyclic GFR-binding peptide
  MOD_RES (6), (7): Xaa is C or S

SEQ ID NO: 55282 - protein, 25 aa, Artificial Sequence
  Cyclic GFR-binding peptide
DLSPISILFIVGRTPKVYKQYEMVV

SEQ ID NO: 55283 - protein, 38 aa, Artificial Sequence; identical to SEQ ID NO: 13249
  Cyclic GFR-binding peptide
  MOD_RES (3), (4), (36), (38): Xaa is C or S

SEQ ID NO: 55284 - protein, 29 aa, Artificial Sequence
  Cyclic GFR-binding peptide
  MOD_RES (27), (29): Xaa is C or S
EPLPVVYYDDSSNVIEQLSNNMVVRAXGX

SEQ ID NO: 55285 - protein, 37 aa, Artificial Sequence; identical to SEQ ID NO: 13252
  Cyclic GFR-binding peptide
  MOD_RES (2), (3), (35), (37): Xaa is C or S

SEQ ID NO: 55286 - protein, 24 aa, Artificial Sequence
  Cyclic GFR-binding peptide
EPLPMVYYDEYDKVVEQLSNEMVV

SEQ ID NO: 55287 - protein, 33 aa, Artificial Sequence
  Cyclic GFR-binding peptide
  MOD_RES (30), (32): Xaa is C or S
TKLEPLTVLYYDDSSNVIEQLSNNMVVRSXGXH

SEQ ID NO: 55288 - protein, 25 aa, Artificial Sequence
  Cyclic GFR-binding peptide
VSQDLEPLPIVYYIGKTPKIEQLSN

SEQ ID NO: 55289 - protein, 35 aa, Artificial Sequence
  Cyclic GFR-binding peptide
  MOD_RES (5), (6): Xaa is C or S
TPPTXXVPTRLNAISILYFDSANNVVLKKYRDMVV

SEQ ID NO: 55290 - protein, 36 aa, Artificial Sequence; identical to SEQ ID NO: 13254
  Cyclic GFR-binding peptide
  MOD_RES (1), (2), (34), (36): Xaa is C or S

SEQ ID NO: 55291 - protein, 22 aa, Artificial Sequence
  Cyclic GFR-binding peptide
LSPISMLFIDEYDKVVYKQYEE

SEQ ID NO: 55292 - protein, 30 aa, Artificial Sequence
  Cyclic GFR-binding peptide
  MOD_RES (28), (30): Xaa is C or S
LEPLTILYYDSANNVVEQLSNDMVVESXGX

SEQ ID NO: 55293 - protein, 29 aa, Artificial Sequence
  Cyclic GFR-binding peptide
  MOD_RES (3), (4): Xaa is C or S
SPXXVSQDLSPISILFIIGKTPKIYKQYE

SEQ ID NO: 55294 - protein, 36 aa, Artificial Sequence; identical to SEQ ID NO: 13255
  Cyclic GFR-binding peptide
  MOD_RES (4), (36): Xaa is C or S

SEQ ID NO: 55295 - protein, 24 aa, Artificial Sequence
  Cyclic GFR-binding peptide
TELEPLPMVYYDEYDKVVEQLSNE

SEQ ID NO: 55296 - protein, 23 aa, Artificial Sequence
  Cyclic GFR-binding peptide
EPLPMVYYDENEKVVEQLSNDMV

SEQ ID NO: 55297 - protein, 24 aa, Artificial Sequence
  Cyclic GFR-binding peptide
ELSPISMLFIDENEKVVYKQYEDM

SEQ ID NO: 55298 - protein, 37 aa, Artificial Sequence; identical to SEQ ID NO: 13258
  Cyclic GFR-binding peptide
  MOD_RES (6), (7): Xaa is C or S

SEQ ID NO: 55299 - protein, 31 aa, Artificial Sequence
  Cyclic GFR-binding peptide
  MOD_RES (2), (3): Xaa is C or S
PXXAPTQLSPISVLFIDDSSNVIYKQYENMV

SEQ ID NO: 55300 - protein, 30 aa, Artificial Sequence
  Cyclic GFR-binding peptide
  MOD_RES (28), (30): Xaa is C or S
LEPLPVVYYDDSSNVIEQLSNNMVVRSXGX

SEQ ID NO: 55301 - protein, 27 aa, Artificial Sequence
  Cyclic GFR-binding peptide
PTRLEPLPIVYYDSANNVVEQLSNDMV

SEQ ID NO: 55302 - protein, 37 aa, Artificial Sequence; identical to SEQ ID NO: 13259
  Cyclic GFR-binding peptide
  MOD_RES (4), (5), (37): Xaa is C or S

SEQ ID NO: 55303 - protein, 37 aa, Artificial Sequence; identical to SEQ ID NO: 13261
  Cyclic GFR-binding peptide
  MOD_RES (3), (4), (35), (37): Xaa is C or S

SEQ ID NO: 55304 - protein, 34 aa, Artificial Sequence; identical to SEQ ID NO: 13262
  Cyclic GFR-binding peptide
  MOD_RES (31), (33): Xaa is C or S

SEQ ID NO: 55305 - protein, 25 aa, Artificial Sequence
  Cyclic GFR-binding peptide
SPISMLFIDENEKVVYKQYEDMVVE

SEQ ID NO: 55306 - protein, 29 aa, Artificial Sequence
  Cyclic GFR-binding peptide
VPQDLSPISILFIVGRTPKVYKQYEMVVK

SEQ ID NO: 55307 - protein, 33 aa, Artificial Sequence
  Cyclic GFR-binding peptide
  MOD_RES (30), (32): Xaa is C or S
TKLSPISVLFIDDSSNVIYKQYENMVVRSXGXH

SEQ ID NO: 55308 - protein, 23 aa, Artificial Sequence
  Cyclic GFR-binding peptide
ELEPLTMLYYDENEKVVEQLSND

SEQ ID NO: 55309 - protein, 33 aa, Artificial Sequence
  Cyclic GFR-binding peptide
  MOD_RES (5), (6): Xaa is C or S
SASPXXVSQDLEPLPIVYYIGKTPKIEQLSNMI

SEQ ID NO: 55310 - protein, 30 aa, Artificial Sequence
  Cyclic GFR-binding peptide
  MOD_RES (1), (2): Xaa is C or S
XXVSQDLEPLPIVYYIGKTPKIEQLSNMIV

SEQ ID NO: 55311 - protein, 30 aa, Artificial Sequence
  Cyclic GFR-binding peptide
  MOD_RES (3), (3): Xaa is C or S
PTXAPTKLSPISVLFIDDSSNVIYKQYENM

SEQ ID NO: 55312 - protein, 32 aa, Artificial Sequence
  Cyclic GFR-binding peptide
  MOD_RES (3), (4): Xaa is C or S
KAXXVPTELEPLTMLYYDENEKVVEQLSNDMV

SEQ ID NO: 55313 - protein, 35 aa, Artificial Sequence; identical to SEQ ID NO: 13269
  Cyclic GFR-binding peptide
  MOD_RES (1), (2), (34): Xaa is C or S

SEQ ID NO: 55314 - protein, 28 aa, Artificial Sequence
  Cyclic GFR-binding peptide
  MOD_RES (2), (2): Xaa is C or S
TXAPTKLEPLTVLYYDDSSNVIEQLSNN

SEQ ID NO: 55315 - protein, 29 aa, Artificial Sequence
  Cyclic GFR-binding peptide
  MOD_RES (29), (29): Xaa is C or S
ELSPISMLFIDENEKVVYKQYEDMVVEGX

SEQ ID NO: 55316 - protein, 28 aa, Artificial Sequence
  Cyclic GFR-binding peptide
  MOD_RES (2), (2): Xaa is C or S
TXAPTKLSPISVLFIDDSSNVIYKQYEN

SEQ ID NO: 55317 - protein, 27 aa, Artificial Sequence
  Cyclic GFR-binding peptide
  MOD_RES (27), (27): Xaa is C or S
SAISILYLDSANNVVLKNYQDMVVESX

SEQ ID NO: 55318 - protein, 30 aa, Artificial Sequence
  Cyclic GFR-binding peptide
  MOD_RES (1), (2): Xaa is C or S
XXVPQDLSPISILFIVGRTPKVYKQYEMVV

SEQ ID NO: 55319 - protein, 23 aa, Artificial Sequence
  Cyclic GFR-binding peptide
LEPLPIVYYVGRTPKVEQLSNMV

SEQ ID NO: 55320 - protein, 34 aa, Artificial Sequence; identical to SEQ ID NO: 13272
  Cyclic GFR-binding peptide
  MOD_RES (2), (3): Xaa is C or S

SEQ ID NO: 55321 - protein, 24 aa, Artificial Sequence
  Cyclic GFR-binding peptide
LEPLTVLYYDDSSNVIEQLSNNMV

SEQ ID NO: 55322 - protein, 31 aa, Artificial Sequence; identical to SEQ ID NO: 13274
  Cyclic GFR-binding peptide

SEQ ID NO: 55323 - protein, 34 aa, Artificial Sequence
  Cyclic GFR-binding peptide
  MOD_RES (31), (33): Xaa is C or S
PTELEPLPMVYYDEYDKVVEQLSNEMVVEGXGXR

SEQ ID NO: 55324 - protein, 29 aa, Artificial Sequence
  Cyclic GFR-binding peptide
TELEPLPMVYYDEYDKVVEQLSNEMVVEG

SEQ ID NO: 55325 - protein, 22 aa, Artificial Sequence
  Cyclic GFR-binding peptide
DLEPLPIVYYVGRTPKVEQLSN

SEQ ID NO: 55326 - protein, 33 aa, Artificial Sequence
  Cyclic GFR-binding peptide
  MOD_RES (6), (7): Xaa is C or S
STPPTXXVPTRLNAISILYFDSANNVVLKKYRD

SEQ ID NO: 55327 - protein, 29 aa, Artificial Sequence
  Cyclic GFR-binding peptide
  MOD_RES (1), (1): Xaa is C or S
XVPTELEPLPMVYYDEYDKVVEQLSNEMV

SEQ ID NO: 55328 - protein, 31 aa, Artificial Sequence
  Cyclic GFR-binding peptide
  MOD_RES (5), (6): Xaa is C or S
IPKAXXVPTELEPLPMVYYDENEKVVEQLSN

SEQ ID NO: 55329 - protein, 29 aa, Artificial Sequence
  Cyclic GFR-binding peptide
  MOD_RES (28), (28): Xaa is C or S
DLEPLPIVYYVGRTPKVEQLSNMVVKSXK

SEQ ID NO: 55330 - protein, 28 aa, Artificial Sequence
  Cyclic GFR-binding peptide
  MOD_RES (26), (28): Xaa is C or S
SPISILFIVGRTPKVYKQYEMVVKSXKX

SEQ ID NO: 55331 - protein, 38 aa, Artificial Sequence; identical to SEQ ID NO: 13279
  Cyclic GFR-binding peptide
  MOD_RES (7), (7): Xaa is C or S

SEQ ID NO: 55332 - protein, 27 aa, Artificial Sequence
  Cyclic GFR-binding peptide
  MOD_RES (1), (2): Xaa is C or S
XXVPQDLEPLPIVYYVGRTPKVEQLSN

SEQ ID NO: 55333 - protein, 35 aa, Artificial Sequence; identical to SEQ ID NO: 13280
  Cyclic GFR-binding peptide
  MOD_RES (1), (2), (34): Xaa is C or S

SEQ ID NO: 55334 - protein, 30 aa, Artificial Sequence
  Cyclic GFR-binding peptide
  MOD_RES (1), (2): Xaa is C or S
XXVPQALEPLTILYYVGRKPKVEQLSNMIV

SEQ ID NO: 55335 - protein, 25 aa, Artificial Sequence
  Cyclic GFR-binding peptide
PTELEPLTMLYYDEYDKVVEQLSNE

SEQ ID NO: 55336 - protein, 27 aa, Artificial Sequence
  Cyclic GFR-binding peptide
  MOD_RES (27), (27): Xaa is C or S
LSPISILFIIGKTPKIYKQYEMIVKSX

SEQ ID NO: 55337 - protein, 32 aa, Artificial Sequence; identical to SEQ ID NO: 13281
  Cyclic GFR-binding peptide
  MOD_RES (1), (1): Xaa is C or S

SEQ ID NO: 55338 - protein, 33 aa, Artificial Sequence
  Cyclic GFR-binding peptide
  MOD_RES (6), (7): Xaa is C or S
SIPKAXXVPTELEPLPMVYYDEYDKVVEQLSNE

SEQ ID NO: 55339 - protein, 39 aa, Artificial Sequence; identical to SEQ ID NO: 13285
  Cyclic GFR-binding peptide
  MOD_RES (6), (7), (39): Xaa is C or S

SEQ ID NO: 55340 - protein, 30 aa, Artificial Sequence
  Cyclic GFR-binding peptide
  MOD_RES (3), (4): Xaa is C or S
SPXXVSQDLSPISILFIIGKTPKIYKQYEM

SEQ ID NO: 55341 - protein, 30 aa, Artificial Sequence
  Cyclic GFR-binding peptide
  MOD_RES (3), (4): Xaa is C or S
PTXXVPTRLNAISILYFDSANNVVLKKYRD

SEQ ID NO: 55342 - protein, 27 aa, Artificial Sequence
  Cyclic GFR-binding peptide
TELEPLTMLYYDENEKVVEQLSNDMVV

SEQ ID NO: 55343 - protein, 29 aa, Artificial Sequence
  Cyclic GFR-binding peptide
  MOD_RES (28), (28): Xaa is C or S
LEPLPVVYYDDSSNVIEQLSNNMVVRSXG

SEQ ID NO: 55344 - protein, 34 aa, Artificial Sequence; identical to SEQ ID NO: 13287
  Cyclic GFR-binding peptide
  MOD_RES (1), (2), (34): Xaa is C or S

SEQ ID NO: 55345 - protein, 30 aa, Artificial Sequence
  Cyclic GFR-binding peptide
  MOD_RES (4), (5): Xaa is C or S
PKAXXVPTELEPLPMVYYDENEKVVEQLSN

SEQ ID NO: 55346 - protein, 26 aa, Artificial Sequence
  Cyclic GFR-binding peptide
QALEPLTILYYVGRKPKVEQLSNMIV

SEQ ID NO: 55347 - protein, 38 aa, Artificial Sequence; identical to SEQ ID NO: 13288
  Cyclic GFR-binding peptide
  MOD_RES (3), (4), (35), (37): Xaa is C or S

SEQ ID NO: 55348 - protein, 31 aa, Artificial Sequence
  Cyclic GFR-binding peptide
  MOD_RES (4), (5): Xaa is C or S
PKAXXVPTELEPLPMVYYDEYDKVVEQLSNE

SEQ ID NO: 55349 - protein, 39 aa, Artificial Sequence; identical to SEQ ID NO: 13291
  Cyclic GFR-binding peptide
  MOD_RES (6), (7), (39): Xaa is C or S

SEQ ID NO: 55350 - protein, 36 aa, Artificial Sequence; identical to SEQ ID NO: 13292
  Cyclic GFR-binding peptide
  MOD_RES (1), (2), (34), (36): Xaa is C or S

SEQ ID NO: 55351 - protein, 28 aa, Artificial Sequence
  Cyclic GFR-binding peptide
  MOD_RES (27), (27): Xaa is C or S
LEPLPIVYYIGKTPKIEQLSNMIVKSXK

SEQ ID NO: 55352 - protein, 28 aa, Artificial Sequence
  Cyclic GFR-binding peptide
VPTRLNAISILYFDSANNVVLKKYRDMV

SEQ ID NO: 55353 - protein, 27 aa, Artificial Sequence
  Cyclic GFR-binding peptide
RLNAISILYFDSANNVVLKKYRDMVVE

SEQ ID NO: 55354 - protein, 29 aa, Artificial Sequence
  Cyclic GFR-binding peptide
  MOD_RES (29), (29): Xaa is C or S
QLSPISVLFIDDSSNVIYKQYENMVVRAX

SEQ ID NO: 55355 - protein, 37 aa, Artificial Sequence; identical to SEQ ID NO: 13296
  Cyclic GFR-binding peptide
  MOD_RES (5), (6): Xaa is C or S

SEQ ID NO: 55356 - protein, 34 aa, Artificial Sequence; identical to SEQ ID NO: 13297
  Cyclic GFR-binding peptide
  MOD_RES (32), (34): Xaa is C or S

SEQ ID NO: 55357 - protein, 25 aa, Artificial Sequence
  Cyclic GFR-binding peptide
VPTELEPLTMLYYDEYDKVVEQLSN

SEQ ID NO: 55358 - protein, 24 aa, Artificial Sequence
  Cyclic GFR-binding peptide
LEPLTILYYVGRKPKVEQLSNMIV

SEQ ID NO: 55359 - protein, 25 aa, Artificial Sequence
  Cyclic GFR-binding peptide
RLSAISILYLDSANNVVLKNYQDMV

SEQ ID NO: 55360 - protein, 25 aa, Artificial Sequence
  Cyclic GFR-binding peptide
KLSPISVLFIDDSSNVIYKQYENMV

SEQ ID NO: 55361 - protein, 37 aa, Artificial Sequence; identical to SEQ ID NO: 13299
  Cyclic GFR-binding peptide
  MOD_RES (2), (34), (36): Xaa is C or S

SEQ ID NO: 55362 - protein, 25 aa, Artificial Sequence
  Cyclic GFR-binding peptide
TELEPLTMLYYDENEKVVEQLSNDM

SEQ ID NO: 55363 - protein, 37 aa, Artificial Sequence; identical to SEQ ID NO: 13301
  Cyclic GFR-binding peptide
  MOD_RES (4), (36): Xaa is C or S

SEQ ID NO: 55364 - protein, 39 aa, Artificial Sequence; identical to SEQ ID NO: 13302
  Cyclic GFR-binding peptide
  MOD_RES (6), (7), (38): Xaa is C or S

SEQ ID NO: 55365 - protein, 29 aa, Artificial Sequence
  Cyclic GFR-binding peptide
SQDLSPISILFIIGKTPKIYKQYEMIVKS

SEQ ID NO: 55366 - protein, 28 aa, Artificial Sequence
  Cyclic GFR-binding peptide
TELEPLPMVYYDENEKVVEQLSNDMVVE

SEQ ID NO: 55367 - protein, 24 aa, Artificial Sequence
  Cyclic GFR-binding peptide
RLEPLTILYYDSANNVVEQLSNDM

SEQ ID NO: 55368 - protein, 35 aa, Artificial Sequence
  Cyclic GFR-binding peptide
  MOD_RES (7), (7): Xaa is C or S
HVTKPTXAPTKLSPISVLFIDDSSNVIYKQYENMV

SEQ ID NO: 55369 - protein, 22 aa, Artificial Sequence
  Cyclic GFR-binding peptide
ELEPLPMVYYDEYDKVVEQLSN

SEQ ID NO: 55370 - protein, 31 aa, Artificial Sequence
  Cyclic GFR-binding peptide
  MOD_RES (2), (3): Xaa is C or S
AXXVPTELEPLTMLYYDEYDKVVEQLSNEMV

SEQ ID NO: 55371 - protein, 30 aa, Artificial Sequence
  Cyclic GFR-binding peptide
  MOD_RES (30), (30): Xaa is C or S
TKLEPLPVVYYDDSSNVIEQLSNNMVVRSX

SEQ ID NO: 55372 - protein, 37 aa, Artificial Sequence; identical to SEQ ID NO: 13306
  Cyclic GFR-binding peptide
  MOD_RES (1), (2), (34), (36): Xaa is C or S

SEQ ID NO: 55373 - protein, 28 aa, Artificial Sequence
  Cyclic GFR-binding peptide
  MOD_RES (28), (28): Xaa is C or S
LNAISILYFDSANNVVLKKYRDMVVESX

SEQ ID NO: 55374 - protein, 35 aa, Artificial Sequence
  Cyclic GFR-binding peptide
  MOD_RES (5), (6): Xaa is C or S
VPKPXXAPTKLEPLTVLYYDDSSNVIEQLSNNMVV

SEQ ID NO: 55375 - protein, 35 aa, Artificial Sequence; identical to SEQ ID NO: 13308
  Cyclic GFR-binding peptide
  MOD_RES (1), (2), (34): Xaa is C or S

SEQ ID NO: 55376 - protein, 38 aa, Artificial Sequence; identical to SEQ ID NO: 13309
  Cyclic GFR-binding peptide
  MOD_RES (3), (4), (36), (38): Xaa is C or S

SEQ ID NO: 55377 - protein, 31 aa, Artificial Sequence
  Cyclic GFR-binding peptide
  MOD_RES (28), (30): Xaa is C or S
LEPLTMLYYDEYDKVVEQLSNEMVVEGXGXR

SEQ ID NO: 55378 - protein, 22 aa, Artificial Sequence
  Cyclic GFR-binding peptide
EPLTILYYVGRKPKVEQLSNMI

SEQ ID NO: 55379 - protein, 31 aa, Artificial Sequence
  Cyclic GFR-binding peptide
  MOD_RES (1), (2): Xaa is C or S
XXVPQALSPISILFIVGRKPKVYKQYEMIVR

SEQ ID NO: 55380 - protein, 31 aa, Artificial Sequence
  Cyclic GFR-binding peptide
  MOD_RES (3), (4): Xaa is C or S
APXXVPQALEPLTILYYVGRKPKVEQLSNMI

SEQ ID NO: 55381 - protein, 29 aa, Artificial Sequence
  Cyclic GFR-binding peptide
EPLTVLYYDDSSNVIEQLSNAAAAAAAAA

SEQ ID NO: 55382 - protein, 32 aa, Artificial Sequence
  Cyclic GFR-binding peptide
  MOD_RES (29), (31): Xaa is C or S
ELSPISMLFIDENEKVVYKQYEDMVVEGXGXR

SEQ ID NO: 55383 - protein, 30 aa, Artificial Sequence
  Cyclic GFR-binding peptide
  MOD_RES (1), (1): Xaa is C or S
XVPQDLSPISILFIVGRTPKVYKQYEMVVK

SEQ ID NO: 55384 - protein, 32 aa, Artificial Sequence
  Cyclic GFR-binding peptide
  MOD_RES (2), (3): Xaa is C or S
PXXAPTKLSPISVLFIDDSSNVIYKQYENMVV

SEQ ID NO: 55385 - protein, 28 aa, Artificial Sequence
  Cyclic GFR-binding peptide
APTKLEPLPVVYYDDSSNVIEQLSNNMV

SEQ ID NO: 55386 - protein, 39 aa, Artificial Sequence; identical to SEQ ID NO: 13319
  Cyclic GFR-binding peptide
  MOD_RES (6), (7), (39): Xaa is C or S

SEQ ID NO: 55387 - protein, 25 aa, Artificial Sequence
  Cyclic GFR-binding peptide
PTELSPISMLFIDEYDKVVYKQYEE

SEQ ID NO: 55388 - protein, 28 aa, Artificial Sequence
  Cyclic GFR-binding peptide
  MOD_RES (28), (28): Xaa is C or S
LSPISVLFIDDSSNVIYKQYENMVVRSX

SEQ ID NO: 55389 - protein, 36 aa, Artificial Sequence; identical to SEQ ID NO: 13320
  Cyclic GFR-binding peptide
  MOD_RES (1), (2), (33), (35): Xaa is C or S

SEQ ID NO: 55390 - protein, 29 aa, Artificial Sequence
  Cyclic GFR-binding peptide
  MOD_RES (1), (1): Xaa is C or S
XVPTRLEPLPIVYYDSANNVVEQLSNDMV

SEQ ID NO: 55391 - protein, 32 aa, Artificial Sequence
  Cyclic GFR-binding peptide
  MOD_RES (3), (4): Xaa is C or S
PTXXVPTRLSAISILYLDSANNVVLKNYQDMV

SEQ ID NO: 55392 - protein, 23 aa, Artificial Sequence
  Cyclic GFR-binding peptide
ELSPISMLFIDENEKVVYKQYED

SEQ ID NO: 55393 - protein, 31 aa, Artificial Sequence
  Cyclic GFR-binding peptide
  MOD_RES (31), (31): Xaa is C or S
PTRLSAISILYLDSANNVVLKNYQDMVVESX

SEQ ID NO: 55394 - protein, 28 aa, Artificial Sequence
  Cyclic GFR-binding peptide
QALSPISILFIVGRKPKVYKQYEMIVRS

SEQ ID NO: 55395 - protein, 32 aa, Artificial Sequence; identical to SEQ ID NO: 13322
  Cyclic GFR-binding peptide
  MOD_RES (1), (1): Xaa is C or S

SEQ ID NO: 55396 - protein, 25 aa, Artificial Sequence
  Cyclic GFR-binding peptide
EPLPIVYYDSANNVVEQLSNDMVVE

SEQ ID NO: 55397 - protein, 21 aa, Artificial Sequence
  Cyclic GFR-binding peptide
SPISILFIVGRKPKVYKQYEM

SEQ ID NO: 55398 - protein, 30 aa, Artificial Sequence
  Cyclic GFR-binding peptide
  MOD_RES (1), (2): Xaa is C or S
XXAPTQLEPLPVVYYDDSSNVIEQLSNNMV

SEQ ID NO: 55399 - protein, 33 aa, Artificial Sequence; identical to SEQ ID NO: 13325
  Cyclic GFR-binding peptide
  MOD_RES (1), (2): Xaa is C or S

SEQ ID NO: 55400 - protein, 34 aa, Artificial Sequence; identical to SEQ ID NO: 13326
  Cyclic GFR-binding peptide
  MOD_RES (3), (4): Xaa is C or S

SEQ ID NO: 55401 - protein, 37 aa, Artificial Sequence; identical to SEQ ID NO: 13327
  Cyclic GFR-binding peptide
  MOD_RES (1), (2), (34), (36): Xaa is C or S

SEQ ID NO: 55402 - protein, 31 aa, Artificial Sequence
  Cyclic GFR-binding peptide
  MOD_RES (4), (5): Xaa is C or S
PKAXXVPTELSPISMLFIDEYDKVVYKQYEE

SEQ ID NO: 55403 - protein, 30 aa, Artificial Sequence
  Cyclic GFR-binding peptide
  MOD_RES (2), (3): Xaa is C or S
PXXAPTQLSPISVLFIDDSSNVIYKQYENM

SEQ ID NO: 55404 - protein, 31 aa, Artificial Sequence
  Cyclic GFR-binding peptide
  MOD_RES (1), (2): Xaa is C or S
XXVPTELEPLTMLYYDEYDKVVEQLSNEMVV

SEQ ID NO: 55405 - protein, 30 aa, Artificial Sequence; identical to SEQ ID NO: 1055
  Cyclic GFR-binding peptide

SEQ ID NO: 55406 - protein, 38 aa, Artificial Sequence; identical to SEQ ID NO: 13330
  Cyclic GFR-binding peptide
  MOD_RES (3), (4), (36), (38): Xaa is C or S

SEQ ID NO: 55407 - protein, 37 aa, Artificial Sequence
  Cyclic GFR-binding peptide
  MOD_RES (33), (33): Xaa is C or S
ELRSMEGLLKPKKRVYEMIQVTINSHHVRSPQXKVSS

SEQ ID NO: 55408 - protein, 29 aa, Artificial Sequence
  Cyclic GFR-binding peptide
HEELRVTAKKLKPKKRVYEIKRVQVPRHH

SEQ ID NO: 55409 - protein, 23 aa, Artificial Sequence
  Cyclic GFR-binding peptide
RVTAKKLKPKKRVYEIKRVQVPR

SEQ ID NO: 55410 - protein, 31 aa, Artificial Sequence
  Cyclic GFR-binding peptide
  MOD_RES (30), (30): Xaa is C or S
SMEGILKPKKRVYEMIQVTINSHHVRSPQXK

SEQ ID NO: 55411 - protein, 29 aa, Artificial Sequence
  Cyclic GFR-binding peptide
ELRSMEGLLKPKKRVYEMIQVTINSHHVR

SEQ ID NO: 55412 - protein, 36 aa, Artificial Sequence; identical to SEQ ID NO: 13333
  Cyclic GFR-binding peptide
  MOD_RES (1), (3): Xaa is C or S

SEQ ID NO: 55413 - protein, 34 aa, Artificial Sequence
  Cyclic GFR-binding peptide
  MOD_RES (34), (34): Xaa is C or S
EELRSMEGILKPKKRVYEMIQVTINSHHVRSPQX

SEQ ID NO: 55414 - protein, 43 aa, Artificial Sequence; identical to SEQ ID NO: 13334
  Cyclic GFR-binding peptide
  MOD_RES (1), (3), (37): Xaa is C or S

SEQ ID NO: 55415 - protein, 35 aa, Artificial Sequence; identical to SEQ ID NO: 13335
  Cyclic GFR-binding peptide
  MOD_RES (1), (35): Xaa is C or S

SEQ ID NO: 55416 - protein, 26 aa, Artificial Sequence
  Cyclic GFR-binding peptide
LFVQVEKHQGQHPKIRVKAMKVSREE

SEQ ID NO: 55417 - protein, 31 aa, Artificial Sequence
  Cyclic GFR-binding peptide
NHQLFSMEGLHQGQHPKIRMIQMTINSEETP

SEQ ID NO: 55418 - protein, 36 aa, Artificial Sequence
  Cyclic GFR-binding peptide
  MOD_RES (30), (30): Xaa is C or S
ELVTAKKHQGQHPKIRIKRMQVPRQGTPVXELGEDN

SEQ ID NO: 55419 - protein, 30 aa, Artificial Sequence
  Cyclic GFR-binding peptide
DELTVQVEKFIPKKRVIEVKAVKVSRLQVQ

SEQ ID NO: 55420 - protein, 32 aa, Artificial Sequence; identical to SEQ ID NO: 13340
  Cyclic GFR-binding peptide

SEQ ID NO: 55421 - protein, 34 aa, Artificial Sequence
  Cyclic GFR-binding peptide
  MOD_RES (34), (34): Xaa is C or S
EELRSMEGLLKPKKRVYEMIQVTINSHHVRSPQX

SEQ ID NO: 55422 - protein, 42 aa, Artificial Sequence; identical to SEQ ID NO: 13341
  Cyclic GFR-binding peptide
  MOD_RES (1), (38): Xaa is C or S

SEQ ID NO: 55423 - protein, 27 aa, Artificial Sequence
  Cyclic GFR-binding peptide
LVTAKKHQGQHPKIRIKRMQVPRQGTP

SEQ ID NO: 55424 - protein, 26 aa, Artificial Sequence
  Cyclic GFR-binding peptide
ELRSMEGILKPKKRVYEMIQVTINSH

SEQ ID NO: 55425 - protein, 31 aa, Artificial Sequence
  Cyclic GFR-binding peptide
  MOD_RES (2), (2): Xaa is C or S
KXALHDELTSMEGIFIPKKRVIEMIQVTINS

SEQ ID NO: 55426 - protein, 32 aa, Artificial Sequence
  Cyclic GFR-binding peptide
  MOD_RES (31), (31): Xaa is C or S
RSMEGILKPKKRVYEMIQVTINSHHVRSPQXK

SEQ ID NO: 55427 - protein, 31 aa, Artificial Sequence
  Cyclic GFR-binding peptide
  MOD_RES (31), (31): Xaa is C or S
TVQVEKFIPKKRVIEVKAVKVSRLQVQTPRX

SEQ ID NO: 55428 - protein, 31 aa, Artificial Sequence
  Cyclic GFR-binding peptide
  MOD_RES (30), (30): Xaa is C or S
VQVEKFIPKKRVIEVKAVKVSRLQVQTPRXQ

SEQ ID NO: 55429 - protein, 24 aa, Artificial Sequence
  Cyclic GFR-binding peptide
LRSMEGLLKPKKRVYEMIQVTINS

SEQ ID NO: 55430 - protein, 26 aa, Artificial Sequence
  Cyclic GFR-binding peptide
VQVEKFIPKKRVIEVKAVKVSRLQVQ

SEQ ID NO: 55431 - protein, 35 aa, Artificial Sequence; identical to SEQ ID NO: 13349
  Cyclic GFR-binding peptide
  MOD_RES (2), (2): Xaa is C or S

SEQ ID NO: 55432 - protein, 29 aa, Artificial Sequence
  Cyclic GFR-binding peptide
  MOD_RES (29), (29): Xaa is C or S
FSMEGLHQGQHPKIRMIQMTINSEETPVX

SEQ ID NO: 55433 - protein, 36 aa, Artificial Sequence
  Cyclic GFR-binding peptide
  MOD_RES (1), (3): Xaa is C or S
XKXALHDELTSMEGLFIPKKRVIEMIQVTINSLQVQ

SEQ ID NO: 55434 - protein, 39 aa, Artificial Sequence; identical to SEQ ID NO: 13350
  Cyclic GFR-binding peptide
  MOD_RES (1), (38): Xaa is C or S

SEQ ID NO: 55435 - protein, 36 aa, Artificial Sequence; identical to SEQ ID NO: 13351
  Cyclic GFR-binding peptide
  MOD_RES (1), (3): Xaa is C or S

SEQ ID NO: 55436 - protein, 35 aa, Artificial Sequence
  Cyclic GFR-binding peptide
  MOD_RES (31), (31): Xaa is C or S
RVTAKKLKPKKRVYEIKRVQVPRHHVRSPQXKVSS

SEQ ID NO: 55437 - protein, 37 aa, Artificial Sequence; identical to SEQ ID NO: 13355
  Cyclic GFR-binding peptide
  MOD_RES (37), (37): Xaa is C or S

SEQ ID NO: 55438 - protein, 36 aa, Artificial Sequence; identical to SEQ ID NO: 13358
  Cyclic GFR-binding peptide
  MOD_RES (36), (36): Xaa is C or S

SEQ ID NO: 55439 - protein, 45 aa, Artificial Sequence; identical to SEQ ID NO: 13359
  Cyclic GFR-binding peptide
  MOD_RES (2), (4), (41): Xaa is C or S

SEQ ID NO: 55440 - protein, 31 aa, Artificial Sequence
  Cyclic GFR-binding peptide
  MOD_RES (1), (1): Xaa is C or S
XALHDELTVQVEKFIPKKRVIEVKAVKVSRL

SEQ ID NO: 55441 - protein, 34 aa, Artificial Sequence; identical to SEQ ID NO: 13360
  Cyclic GFR-binding peptide

SEQ ID NO: 55442 - protein, 29 aa, Artificial Sequence
  Cyclic GFR-binding peptide
EELRSMEGILKPKKRVYEMIQVTINSHHV

SEQ ID NO: 55443 - protein, 37 aa, Artificial Sequence; identical to SEQ ID NO: 13361
  Cyclic GFR-binding peptide
  MOD_RES (2), (4): Xaa is C or S

SEQ ID NO: 55444 - protein, 35 aa, Artificial Sequence; identical to SEQ ID NO: 13362
  Cyclic GFR-binding peptide
  MOD_RES (35), (35): Xaa is C or S

SEQ ID NO: 55445 - protein, 34 aa, Artificial Sequence
  Cyclic GFR-binding peptide
  MOD_RES (2), (2): Xaa is C or S
KXALHDELTVQVEKFIPKKRVIEVKAVKVSRLQV

SEQ ID NO: 55446 - protein, 34 aa, Artificial Sequence
  Cyclic GFR-binding peptide
  MOD_RES (34), (34): Xaa is C or S
DELTVQVEKFIPKKRVIEVKAVKVSRLQVQTPRX

SEQ ID NO: 55447 - protein, 33 aa, Artificial Sequence; identical to SEQ ID NO: 13364
  Cyclic GFR-binding peptide

SEQ ID NO: 55448 - protein, 44 aa, Artificial Sequence; identical to SEQ ID NO: 13365
  Cyclic GFR-binding peptide
  MOD_RES (2), (4), (41): Xaa is C or S

SEQ ID NO: 55449 - protein, 34 aa, Artificial Sequence
  Cyclic GFR-binding peptide
  MOD_RES (1), (3): Xaa is C or S
XEXKNHQLFVQVEKHQGQHPKIRVKAMKVSREET

SEQ ID NO: 55450 - protein, 32 aa, Artificial Sequence
  Cyclic GFR-binding peptide
  MOD_RES (32), (32): Xaa is C or S
HQLFVQVEKHQGQHPKIRVKAMKVSREETPVX

SEQ ID NO: 55451 - protein, 30 aa, Artificial Sequence
  Cyclic GFR-binding peptide
ALHDELTVQVEKFIPKKRVIEVKAVKVSRL

SEQ ID NO: 55452 - protein, 38 aa, Artificial Sequence; identical to SEQ ID NO: 13372
  Cyclic GFR-binding peptide
  MOD_RES (2), (2): Xaa is C or S

SEQ ID NO: 55453 - protein, 38 aa, Artificial Sequence; identical to SEQ ID NO: 13371
  Cyclic GFR-binding peptide
  MOD_RES (2), (36): Xaa is C or S

SEQ ID NO: 55454 - protein, 28 aa, Artificial Sequence
  Cyclic GFR-binding peptide
LRVTAKKLKPKKRVYEIKRVQVPRHHVR

SEQ ID NO: 55455 - protein, 40 aa, Artificial Sequence; identical to SEQ ID NO: 13373
  Cyclic GFR-binding peptide
  MOD_RES (1), (35): Xaa is C or S

SEQ ID NO: 55456 - protein, 28 aa, Artificial Sequence
  Cyclic GFR-binding peptide
RSMEGLLKPKKRVYEMIQVTINSHHVRS

SEQ ID NO: 55457 - protein, 27 aa, Artificial Sequence
  Cyclic GFR-binding peptide
RSMEGLLKPKKRVYEMIQVTINSHHVR

SEQ ID NO: 55458 - protein, 37 aa, Artificial Sequence; identical to SEQ ID NO: 13376
  Cyclic GFR-binding peptide
  MOD_RES (35), (35): Xaa is C or S

SEQ ID NO: 55459 - protein, 33 aa, Artificial Sequence
  Cyclic GFR-binding peptide
  MOD_RES (32), (32): Xaa is C or S
LRVTAKKLKPKKRVYEIKRVQVPRHHVRSPQXK

SEQ ID NO: 55460 - protein, 42 aa, Artificial Sequence; identical to SEQ ID NO: 13377
  Cyclic GFR-binding peptide
  MOD_RES (1), (3), (37): Xaa is C or S

SEQ ID NO: 55461 - protein, 41 aa, Artificial Sequence; identical to SEQ ID NO: 13378
  Cyclic GFR-binding peptide
  MOD_RES (1), (38): Xaa is C or S

SEQ ID NO: 55462 - protein, 38 aa, Artificial Sequence; identical to SEQ ID NO: 13380
  Cyclic GFR-binding peptide
  MOD_RES (35), (35): Xaa is C or S

SEQ ID NO: 55463 - protein, 37 aa, Artificial Sequence; identical to SEQ ID NO: 13381
  Cyclic GFR-binding peptide
  MOD_RES (33), (33): Xaa is C or S

SEQ ID NO: 55464 - protein, 38 aa, Artificial Sequence; identical to SEQ ID NO: 13382
  Cyclic GFR-binding peptide
  MOD_RES (2), (4), (38): Xaa is C or S

SEQ ID NO: 55465 - protein, 29 aa, Artificial Sequence
  Cyclic GFR-binding peptide
LRSMEGLLKPKKRVYEMIQVTINSHHVRS

SEQ ID NO: 55466 - protein, 30 aa, Artificial Sequence
  Cyclic GFR-binding peptide
  MOD_RES (29), (29): Xaa is C or S
FVQVEKHQGQHPKIRVKAMKVSREETPVXE

SEQ ID NO: 55467 - protein, 28 aa, Artificial Sequence
  Cyclic GFR-binding peptide
ELSMEGIHQGQHPKIRMIQMTINSQGTP

SEQ ID NO: 55468 - protein, 35 aa, Artificial Sequence; identical to SEQ ID NO: 13384
  Cyclic GFR-binding peptide
  MOD_RES (35), (35): Xaa is C or S

SEQ ID NO: 55469 - protein, 39 aa, Artificial Sequence; identical to SEQ ID NO: 13385
  Cyclic GFR-binding peptide
  MOD_RES (2), (4), (38): Xaa is C or S

SEQ ID NO: 55470 - protein, 36 aa, Artificial Sequence
  Cyclic GFR-binding peptide
  MOD_RES (34), (34): Xaa is C or S
DELTVQVEKFIPKKRVIEVKAVKVSRLQVQTPRXQV

SEQ ID NO: 55471 - protein, 26 aa, Artificial Sequence
  Cyclic GFR-binding peptide
LSMEGIHQGQHPKIRMIQMTINSQGT

SEQ ID NO: 55472 - protein, 35 aa, Artificial Sequence; identical to SEQ ID NO: 13386
  Cyclic GFR-binding peptide
  MOD_RES (33), (33): Xaa is C or S

SEQ ID NO: 55473 - protein, 32 aa, Artificial Sequence
  Cyclic GFR-binding peptide
ELTSMEGIFIPKKRVIEMIQVTINSLQVQTPR

SEQ ID NO: 55474 - protein, 40 aa, Artificial Sequence; identical to SEQ ID NO: 13388
  Cyclic GFR-binding peptide
  MOD_RES (37), (37): Xaa is C or S

SEQ ID NO: 55475 - protein, 38 aa, Artificial Sequence; identical to SEQ ID NO: 13389
  Cyclic GFR-binding peptide
  MOD_RES (2), (4), (38): Xaa is C or S

SEQ ID NO: 55476 - protein, 37 aa, Artificial Sequence
  Cyclic GFR-binding peptide
  MOD_RES (31), (31): Xaa is C or S
QLFSMEGLHQGQHPKIRMIQMTINSEETPVXELGEDN

SEQ ID NO: 55477 - protein, 34 aa, Artificial Sequence
  Cyclic GFR-binding peptide
  MOD_RES (1), (3): Xaa is C or S
XEXQSHEELSMEGIHQGQHPKIRMIQMTINSQGT

SEQ ID NO: 55478 - protein, 31 aa, Artificial Sequence
  Cyclic GFR-binding peptide
LHEELRVTAKKLKPKKRVYEIKRVQVPRHHV

SEQ ID NO: 55479 - protein, 34 aa, Artificial Sequence
  Cyclic GFR-binding peptide
  MOD_RES (1), (1): Xaa is C or S
XELHEELRVTAKKLKPKKRVYEIKRVQVPRHHVR

SEQ ID NO: 55480 - protein, 29 aa, Artificial Sequence
  Cyclic GFR-binding peptide
EELRSMEGLLKPKKRVYEMIQVTINSHHV

SEQ ID NO: 55481 - protein, 26 aa, Artificial Sequence
  Cyclic GFR-binding peptide
SMEGIFIPKKRVIEMIQVTINSLQVQ

SEQ ID NO: 55482 - protein, 25 aa, Artificial Sequence
  Cyclic GFR-binding peptide
EELVTAKKHQGQHPKIRIKRMQVPR

SEQ ID NO: 55483 - protein, 31 aa, Artificial Sequence
  Cyclic GFR-binding peptide
  MOD_RES (30), (30): Xaa is C or S
SMEGIFIPKKRVIEMIQVTINSLQVQTPRXQ

SEQ ID NO: 55484 - protein, 45 aa, Artificial Sequence; identical to SEQ ID NO: 13391
  Cyclic GFR-binding peptide
  MOD_RES (2), (4), (41): Xaa is C or S

SEQ ID NO: 55485 - protein, 34 aa, Artificial Sequence
  Cyclic GFR-binding peptide
  MOD_RES (30), (30): Xaa is C or S
SMEGLLKPKKRVYEMIQVTINSHHVRSPQXKVSS

SEQ ID NO: 55486 - protein, 39 aa, Artificial Sequence; identical to SEQ ID NO: 13393
  Cyclic GFR-binding peptide
  MOD_RES (1), (35): Xaa is C or S

SEQ ID NO: 55487 - protein, 29 aa, Artificial Sequence
  Cyclic GFR-binding peptide
ALHDELTVQVEKFIPKKRVIEVKAVKVSR

SEQ ID NO: 55488 - protein, 42 aa, Artificial Sequence; identical to SEQ ID NO: 13394
  Cyclic GFR-binding peptide
  MOD_RES (1), (38): Xaa is C or S

SEQ ID NO: 55489 - protein, 31 aa, Artificial Sequence
  Cyclic GFR-binding peptide
  MOD_RES (30), (30): Xaa is C or S
LFVQVEKHQGQHPKIRVKAMKVSREETPVXE

SEQ ID NO: 55490 - protein, 38 aa, Artificial Sequence
  Cyclic GFR-binding peptide
  MOD_RES (34), (34): Xaa is C or S
EELRSMEGILKPKKRVYEMIQVTINSHHVRSPQXKVSS

SEQ ID NO: 55491 - protein, 27 aa, Artificial Sequence
  Cyclic GFR-binding peptide
EELVQVEKHQGQHPKIRVKAMKVSRQG

SEQ ID NO: 55492 - protein, 31 aa, Artificial Sequence
  Cyclic GFR-binding peptide
HDELTSMEGIFIPKKRVIEMIQVTINSLQVQ

SEQ ID NO: 55493 - protein, 29 aa, Artificial Sequence
  Cyclic GFR-binding peptide
SHEELVQVEKHQGQHPKIRVKAMKVSRQG

SEQ ID NO: 55494 - protein, 31 aa, Artificial Sequence
  Cyclic GFR-binding peptide
  MOD_RES (1), (1): Xaa is C or S
XALHDELTSMEGLFIPKKRVIEMIQVTINSL

SEQ ID NO: 55495 - protein, 32 aa, Artificial Sequence
  Cyclic GFR-binding peptide
  MOD_RES (1), (3): Xaa is C or S
XEXKNHQLFVTAKKHQGQHPKIRIKRMQVPRE

SEQ ID NO: 55496 - protein, 27 aa, Artificial Sequence
  Cyclic GFR-binding peptide
SMEGIFIPKKRVIEMIQVTINSLQVQT

SEQ ID NO: 55497 - protein, 33 aa, Artificial Sequence; identical to SEQ ID NO: 13400
  Cyclic GFR-binding peptide

SEQ ID NO: 55498 - protein, 34 aa, Artificial Sequence
  Cyclic GFR-binding peptide
  MOD_RES (33), (33): Xaa is C or S
ELRSMEGLLKPKKRVYEMIQVTINSHHVRSPQXK

SEQ ID NO: 55499 - protein, 36 aa, Artificial Sequence
  Cyclic GFR-binding peptide
  MOD_RES (32), (32): Xaa is C or S
LTVQVEKFIPKKRVIEVKAVKVSRLQVQTPRXQVNR

SEQ ID NO: 55500 - protein, 40 aa, Artificial Sequence; identical to SEQ ID NO: 13402
  Cyclic GFR-binding peptide
  MOD_RES (36), (36): Xaa is C or S

SEQ ID NO: 55501 - protein, 35 aa, Artificial Sequence; identical to SEQ ID NO: 13403
  Cyclic GFR-binding peptide

SEQ ID NO: 55502 - protein, 39 aa, Artificial Sequence; identical to SEQ ID NO: 13404
  Cyclic GFR-binding peptide
  MOD_RES (1), (3), (37): Xaa is C or S

SEQ ID NO: 55503 - protein, 41 aa, Artificial Sequence; identical to SEQ ID NO: 13405
  Cyclic GFR-binding peptide
  MOD_RES (37), (37): Xaa is C or S

SEQ ID NO: 55504 - protein, 26 aa, Artificial Sequence
  Cyclic GFR-binding peptide
SMEGILKPKKRVYEMIQVTINSHHVR

SEQ ID NO: 55505 - protein, 35 aa, Artificial Sequence; identical to SEQ ID NO: 13406
  Cyclic GFR-binding peptide
  MOD_RES (2), (2): Xaa is C or S

SEQ ID NO: 55506 - protein, 32 aa, Artificial Sequence
  Cyclic GFR-binding peptide
  MOD_RES (31), (31): Xaa is C or S
QLFSMEGLHQGQHPKIRMIQMTINSEETPVXE

SEQ ID NO: 55507 - protein, 35 aa, Artificial Sequence
  Cyclic GFR-binding peptide
  MOD_RES (33), (33): Xaa is C or S
ELTSMEGLFIPKKRVIEMIQVTINSLQVQTPRXQV

SEQ ID NO: 55508 - protein, 27 aa, Artificial Sequence
  Cyclic GFR-binding peptide
LFVQVEKHQGQHPKIRVKAMKVSREET

SEQ ID NO: 55509 - protein, 29 aa, Artificial Sequence
  Cyclic GFR-binding peptide
  MOD_RES (28), (28): Xaa is C or S
VQVEKHQGQHPKIRVKAMKVSRQGTPVXE

SEQ ID NO: 55510 - protein, 27 aa, Artificial Sequence
  Cyclic GFR-binding peptide
NHQLFVTAKKHQGQHPKIRIKRMQVPR

SEQ ID NO: 55511 - protein, 32 aa, Artificial Sequence
  Cyclic GFR-binding peptide
LHDELTVQVEKFIPKKRVIEVKAVKVSRLQVQ

SEQ ID NO: 55512 - protein, 38 aa, Artificial Sequence
  Cyclic GFR-binding peptide
  MOD_RES (34), (34): Xaa is C or S
EELRSMEGLLKPKKRVYEMIQVTINSHHVRSPQXKVSS

SEQ ID NO: 55513 - protein, 24 aa, Artificial Sequence
  Cyclic GFR-binding peptide
LVTAKKHQGQHPKIRIKRMQVPRQ

SEQ ID NO: 55514 - protein, 32 aa, Artificial Sequence
  Cyclic GFR-binding peptide
  MOD_RES (28), (28): Xaa is C or S
VQVEKHQGQHPKIRVKAMKVSRQGTPVXELGE

SEQ ID NO: 55515 - protein, 29 aa, Artificial Sequence
  Cyclic GFR-binding peptide
ELHEELRSMEGILKPKKRVYEMIQVTINS

SEQ ID NO: 55516 - protein, 41 aa, Artificial Sequence; identical to SEQ ID NO: 13412
  Cyclic GFR-binding peptide
  MOD_RES (1), (38): Xaa is C or S

SEQ ID NO: 55517 - protein, 34 aa, Artificial Sequence
  Cyclic GFR-binding peptide
  MOD_RES (31), (31): Xaa is C or S
EELVTAKKHQGQHPKIRIKRMQVPRQGTPVXELG

SEQ ID NO: 55518 - protein, 32 aa, Artificial Sequence
  Cyclic GFR-binding peptide
  MOD_RES (31), (31): Xaa is C or S
QLFVTAKKHQGQHPKIRIKRMQVPREETPVXE

SEQ ID NO: 55519 - protein, 32 aa, Artificial Sequence
  Cyclic GFR-binding peptide
  MOD_RES (32), (32): Xaa is C or S
HEELSMEGIHQGQHPKIRMIQMTINSQGTPVX

SEQ ID NO: 55520 - protein, 36 aa, Artificial Sequence; identical to SEQ ID NO: 13416
  Cyclic GFR-binding peptide
  MOD_RES (1), (35): Xaa is C or S

SEQ ID NO: 55521 - protein, 37 aa, Artificial Sequence
  Cyclic GFR-binding peptide
  MOD_RES (33), (33): Xaa is C or S
ELRSMEGILKPKKRVYEMIQVTINSHHVRSPQXKVSS

SEQ ID NO: 55522 - protein, 37 aa, Artificial Sequence; identical to SEQ ID NO: 13417
  Cyclic GFR-binding peptide
  MOD_RES (37), (37): Xaa is C or S

SEQ ID NO: 55523 - protein, 40 aa, Artificial Sequence; identical to SEQ ID NO: 13418
  Cyclic GFR-binding peptide
  MOD_RES (1), (38): Xaa is C or S

SEQ ID NO: 55524 - protein, 43 aa, Artificial Sequence; identical to SEQ ID NO: 13420
  Cyclic GFR-binding peptide
  MOD_RES (2), (4), (38): Xaa is C or S

SEQ ID NO: 55525 - protein, 27 aa, Artificial Sequence
  Cyclic GFR-binding peptide
SHEELVTAKKHQGQHPKIRIKRMQVPR

SEQ ID NO: 55526 - protein, 40 aa, Artificial Sequence; identical to SEQ ID NO: 13423
  Cyclic GFR-binding peptide
  MOD_RES (2), (39): Xaa is C or S

SEQ ID NO: 55527 - protein, 35 aa, Artificial Sequence; identical to SEQ ID NO: 13424
  Cyclic GFR-binding peptide
  MOD_RES (34), (34): Xaa is C or S

SEQ ID NO: 55528 - protein, 25 aa, Artificial Sequence
  Cyclic GFR-binding peptide
SMEGLFIPKKRVIEMIQVTINSLQV

SEQ ID NO: 55529 - protein, 37 aa, Artificial Sequence; identical to SEQ ID NO: 13425
  Cyclic GFR-binding peptide
  MOD_RES (37), (37): Xaa is C or S

SEQ ID NO: 55530 - protein, 34 aa, Artificial Sequence
  Cyclic GFR-binding peptide
  MOD_RES (28), (28): Xaa is C or S
VTAKKHQGQHPKIRIKRMQVPREETPVXELGEDN

SEQ ID NO: 55531 - protein, 36 aa, Artificial Sequence
  Cyclic GFR-binding peptide
  MOD_RES (1), (3): Xaa is C or S
XAXELHEELRSMEGLLKPKKRVYEMIQVTINSHHVR

SEQ ID NO: 55532 - protein, 31 aa, Artificial Sequence
  Cyclic GFR-binding peptide
LHDELTVQVEKFIPKKRVIEVKAVKVSRLQV

SEQ ID NO: 55533 - protein, 35 aa, Artificial Sequence; identical to SEQ ID NO: 13427
  Cyclic GFR-binding peptide

SEQ ID NO: 55534 - protein, 36 aa, Artificial Sequence; identical to SEQ ID NO: 13428
  Cyclic GFR-binding peptide
  MOD_RES (1), (35): Xaa is C or S

SEQ ID NO: 55535 - protein, 35 aa, Artificial Sequence
  Cyclic GFR-binding peptide
  MOD_RES (2), (4): Xaa is C or S
RXEXQSHEELVQVEKHQGQHPKIRVKAMKVSRQGT

SEQ ID NO: 55536 - protein, 27 aa, Artificial Sequence
  Cyclic GFR-binding peptide
SHEELSMEGIHQGQHPKIRMIQMTINS

SEQ ID NO: 55537 - protein, 29 aa, Artificial Sequence
  Cyclic GFR-binding peptide
ELRVTAKKLKPKKRVYEIKRVQVPRHHVR

SEQ ID NO: 55538 - protein, 30 aa, Artificial Sequence
  Cyclic GFR-binding peptide
KNHQLFSMEGLHQGQHPKIRMIQMTINSEE

SEQ ID NO: 55539 - protein, 24 aa, Artificial Sequence
  Cyclic GFR-binding peptide
LRVTAKKLKPKKRVYEIKRVQVPR

SEQ ID NO: 55540 - protein, 26 aa, Artificial Sequence
  Cyclic GFR-binding peptide
VTAKKHQGQHPKIRIKRMQVPREETP

SEQ ID NO: 55541 - protein, 33 aa, Artificial Sequence
  Cyclic GFR-binding peptide
  MOD_RES (1), (3): Xaa is C or S
XAXELHEELRVTAKKLKPKKRVYEIKRVQVPRH

SEQ ID NO: 55542 - protein, 29 aa, Artificial Sequence
  Cyclic GFR-binding peptide
QSHEELVQVEKHQGQHPKIRVKAMKVSRQ

SEQ ID NO: 55543 - protein, 44 aa, Artificial Sequence; identical to SEQ ID NO: 13432
  Cyclic GFR-binding peptide
  MOD_RES (2), (4), (41): Xaa is C or S

SEQ ID NO: 55544 - protein, 27 aa, Artificial Sequence
  Cyclic GFR-binding peptide
ELTVQVEKFIPKKRVIEVKAVKVSRLQ

SEQ ID NO: 55545 - protein, 43 aa, Artificial Sequence; identical to SEQ ID NO: 13433
  Cyclic GFR-binding peptide
  MOD_RES (2), (39): Xaa is C or S

SEQ ID NO: 55546 - protein, 30 aa, Artificial Sequence
  Cyclic GFR-binding peptide
TSMEGLFIPKKRVIEMIQVTINSLQVQTPR

SEQ ID NO: 55547 - protein, 35 aa, Artificial Sequence
  Cyclic GFR-binding peptide
  MOD_RES (32), (32): Xaa is C or S
HEELVTAKKHQGQHPKIRIKRMQVPRQGTPVXELG

SEQ ID NO: 55548 - protein, 38 aa, Artificial Sequence; identical to SEQ ID NO: 13435
  Cyclic GFR-binding peptide
  MOD_RES (34), (34): Xaa is C or S

SEQ ID NO: 55549 - protein, 25 aa, Artificial Sequence
  Cyclic GFR-binding peptide
EELSMEGIHQGQHPKIRMIQMTINS

SEQ ID NO: 55550 - protein, 31 aa, Artificial Sequence
  Cyclic GFR-binding peptide
LTVQVEKFIPKKRVIEVKAVKVSRLQVQTPR

SEQ ID NO: 55551 - protein, 31 aa, Artificial Sequence
  Cyclic GFR-binding peptide
  MOD_RES (1), (1): Xaa is C or S
XKNHQLFVQVEKHQGQHPKIRVKAMKVSREE

SEQ ID NO: 55552 - protein, 29 aa, Artificial Sequence
  Cyclic GFR-binding peptide
LTVQVEKFIPKKRVIEVKAVKVSRLQVQT

SEQ ID NO: 55553 - protein, 35 aa, Artificial Sequence; identical to SEQ ID NO: 13436
  Cyclic GFR-binding peptide

SEQ ID NO: 55554 - protein, 32 aa, Artificial Sequence
  Cyclic GFR-binding peptide
  MOD_RES (32), (32): Xaa is C or S
LTSMEGLFIPKKRVIEMIQVTINSLQVQTPRX

SEQ ID NO: 55555 - protein, 28 aa, Artificial Sequence
  Cyclic GFR-binding peptide
HEELRSMEGLLKPKKRVYEMIQVTINSH

SEQ ID NO: 55556 - protein, 31 aa, Artificial Sequence
  Cyclic GFR-binding peptide
  MOD_RES (2), (2): Xaa is C or S
AXELHEELRVTAKKLKPKKRVYEIKRVQVPR

SEQ ID NO: 55557 - protein, 35 aa, Artificial Sequence
  Cyclic GFR-binding peptide
  MOD_RES (30), (30): Xaa is C or S
LFVTAKKHQGQHPKIRIKRMQVPREETPVXELGED

SEQ ID NO: 55558 - protein, 31 aa, Artificial Sequence
  Cyclic GFR-binding peptide
  MOD_RES (2), (2): Xaa is C or S
KXALHDELTSMEGLFIPKKRVIEMIQVTINS

SEQ ID NO: 55559 - protein, 32 aa, Artificial Sequence
  Cyclic GFR-binding peptide
  MOD_RES (32), (32): Xaa is C or S
LRSMEGILKPKKRVYEMIQVTINSHHVRSPQX

SEQ ID NO: 55560 - protein, 38 aa, Artificial Sequence; identical to SEQ ID NO: 13437
  Cyclic GFR-binding peptide
  MOD_RES (1), (35): Xaa is C or S

SEQ ID NO: 55561 - protein, 26 aa, Artificial Sequence
  Cyclic GFR-binding peptide
EELRSMEGLLKPKKRVYEMIQVTINS

SEQ ID NO: 55562 - protein, 37 aa, Artificial Sequence; identical to SEQ ID NO: 13438
  Cyclic GFR-binding peptide
  MOD_RES (35), (35): Xaa is C or S

SEQ ID NO: 55563 - protein, 26 aa, Artificial Sequence
  Cyclic GFR-binding peptide
RSMEGLLKPKKRVYEMIQVTINSHHV

SEQ ID NO: 55564 - protein, 33 aa, Artificial Sequence
  Cyclic GFR-binding peptide
  MOD_RES (31), (31): Xaa is C or S
EELVQVEKHQGQHPKIRVKAMKVSRQGTPVXEL

SEQ ID NO: 55565 - protein, 29 aa, Artificial Sequence
  Cyclic GFR-binding peptide
  MOD_RES (28), (28): Xaa is C or S
SMEGIHQGQHPKIRMIQMTINSQGTPVXE

SEQ ID NO: 55566 - protein, 30 aa, Artificial Sequence
  Cyclic GFR-binding peptide
  MOD_RES (2), (2): Xaa is C or S
EXQSHEELSMEGIHQGQHPKIRMIQMTINS

SEQ ID NO: 55567 - protein, 24 aa, Artificial Sequence
  Cyclic GFR-binding peptide
TSMEGIFIPKKRVIEMIQVTINSL

SEQ ID NO: 55568 - protein, 34 aa, Artificial Sequence; identical to SEQ ID NO: 13441
  Cyclic GFR-binding peptide

SEQ ID NO: 55569 - protein, 24 aa, Artificial Sequence
  Cyclic GFR-binding peptide
TVQVEKFIPKKRVIEVKAVKVSRL

SEQ ID NO: 55570 - protein, 23 aa, Artificial Sequence
  Cyclic GFR-binding peptide
FSMEGLHQGQHPKIRMIQMTINS

SEQ ID NO: 55571 - protein, 29 aa, Artificial Sequence
  Cyclic GFR-binding peptide
  MOD_RES (1), (1): Xaa is C or S
XQSHEELSMEGIHQGQHPKIRMIQMTINS

SEQ ID NO: 55572 - protein, 30 aa, Artificial Sequence
  Cyclic GFR-binding peptide
  MOD_RES (1), (1): Xaa is C or S
XKNHQLFVQVEKHQGQHPKIRVKAMKVSRE

SEQ ID NO: 55573 - protein, 39 aa, Artificial Sequence; identical to SEQ ID NO: 13443
  Cyclic GFR-binding peptide
  MOD_RES (2), (36): Xaa is C or S

SEQ ID NO: 55574 - protein, 31 aa, Artificial Sequence
  Cyclic GFR-binding peptide
AAAAAAAAAVTAKKLKPKKRVYEIKRVQVPR

SEQ ID NO: 55575 - protein, 31 aa, Artificial Sequence
  Cyclic GFR-binding peptide
  MOD_RES (31), (31): Xaa is C or S
QLFSMEGLHQGQHPKIRMIQMTINSEETPVX

SEQ ID NO: 55576 - protein, 32 aa, Artificial Sequence
  Cyclic GFR-binding peptide
  MOD_RES (28), (28): Xaa is C or S
SMEGIHQGQHPKIRMIQMTINSQGTPVXELGE

SEQ ID NO: 55577 - protein, 36 aa, Artificial Sequence
  Cyclic GFR-binding peptide
  MOD_RES (32), (32): Xaa is C or S
HEELSMEGIHQGQHPKIRMIQMTINSQGTPVXELGE

SEQ ID NO: 55578 - protein, 40 aa, Artificial Sequence; identical to SEQ ID NO: 13447
  Cyclic GFR-binding peptide
  MOD_RES (34), (34): Xaa is C or S

SEQ ID NO: 55579 - protein, 34 aa, Artificial Sequence
  Cyclic GFR-binding peptide
  MOD_RES (2), (2): Xaa is C or S
EXQSHEELSMEGIHQGQHPKIRMIQMTINSQGTP

SEQ ID NO: 55580 - protein, 30 aa, Artificial Sequence
  Cyclic GFR-binding peptide
LHDELTVQVEKFIPKKRVIEVKAVKVSRLQ

SEQ ID NO: 55581 - protein, 43 aa, Artificial Sequence; identical to SEQ ID NO: 13451
  Cyclic GFR-binding peptide
  MOD_RES (2), (39): Xaa is C or S

SEQ ID NO: 55582 - protein, 27 aa, Artificial Sequence
  Cyclic GFR-binding peptide
HEELSMEGIHQGQHPKIRMIQMTINSQ

SEQ ID NO: 55583 - protein, 39 aa, Artificial Sequence; identical to SEQ ID NO: 13452
  Cyclic GFR-binding peptide
  MOD_RES (1), (35): Xaa is C or S

SEQ ID NO: 55584 - protein, 22 aa, Artificial Sequence
  Cyclic GFR-binding peptide
VTAKKLKPKKRVYEIKRVQVPR

SEQ ID NO: 55585 - protein, 34 aa, Artificial Sequence
  Cyclic GFR-binding peptide
  MOD_RES (32), (32): Xaa is C or S
LTSMEGIFIPKKRVIEMIQVTINSLQVQTPRXQV

SEQ ID NO: 55586 - protein, 38 aa, Artificial Sequence; identical to SEQ ID NO: 13454
  Cyclic GFR-binding peptide
  MOD_RES (1), (38): Xaa is C or S

SEQ ID NO: 55587 - protein, 32 aa, Artificial Sequence
  Cyclic GFR-binding peptide
  MOD_RES (2), (2): Xaa is C or S
AXELHEELRSMEGLLKPKKRVYEMIQVTINSH

SEQ ID NO: 55588 - protein, 37 aa, Artificial Sequence; identical to SEQ ID NO: 13455
  Cyclic GFR-binding peptide
  MOD_RES (34), (34): Xaa is C or S

SEQ ID NO: 55589 - protein, 29 aa, Artificial Sequence
  Cyclic GFR-binding peptide
LRVTAKKLKPKKRVYEIKRVQVPRHHVRS

SEQ ID NO: 55590 - protein, 32 aa, Artificial Sequence
  Cyclic GFR-binding peptide
  MOD_RES (32), (32): Xaa is C or S
HQLFVTAKKHQGQHPKIRIKRMQVPREETPVX

SEQ ID NO: 55591 - protein, 35 aa, Artificial Sequence
  Cyclic GFR-binding peptide
  MOD_RES (1), (3): Xaa is C or S
XAXELHEELRSMEGLLKPKKRVYEMIQVTINSHHV

SEQ ID NO: 55592 - protein, 31 aa, Artificial Sequence
  Cyclic GFR-binding peptide
AAAAAAAAAVQVEKLKPKKRVYEVKAVKVSR

SEQ ID NO: 55593 - protein, 27 aa, Artificial Sequence
  Cyclic GFR-binding peptide
DELTSMEGLFIPKKRVIEMIQVTINSL

SEQ ID NO: 55594 - protein, 35 aa, Artificial Sequence; identical to SEQ ID NO: 13458
  Cyclic GFR-binding peptide
  MOD_RES (1), (1): Xaa is C or S

SEQ ID NO: 55595 - protein, 28 aa, Artificial Sequence
  Cyclic GFR-binding peptide
QSHEELSMEGIHQGQHPKIRMIQMTINS

SEQ ID NO: 55596 - protein, 32 aa, Artificial Sequence
  Cyclic GFR-binding peptide
  MOD_RES (2), (4): Xaa is C or S
RXEXKNHQLFVQVEKHQGQHPKIRVKAMKVSR

SEQ ID NO: 55597 - protein, 32 aa, Artificial Sequence
  Cyclic GFR-binding peptide
ALHDELTSMEGIFIPKKRVIEMIQVTINSLQV

SEQ ID NO: 55598 - protein, 33 aa, Artificial Sequence; identical to SEQ ID NO: 13459
  Cyclic GFR-binding peptide
  MOD_RES (33), (33): Xaa is C or S

SEQ ID NO: 55599 - protein, 36 aa, Artificial Sequence
  Cyclic GFR-binding peptide
  MOD_RES (31), (31): Xaa is C or S
QLFSMEGLHQGQHPKIRMIQMTINSEETPVXELGED

SEQ ID NO: 55600 - protein, 31 aa, Artificial Sequence
  Cyclic GFR-binding peptide
  MOD_RES (29), (29): Xaa is C or S
FSMEGLHQGQHPKIRMIQMTINSEETPVXEL

SEQ ID NO: 55601 - protein, 41 aa, Artificial Sequence; identical to SEQ ID NO: 13461
  Cyclic GFR-binding peptide
  MOD_RES (2), (36): Xaa is C or S

SEQ ID NO: 55602 - protein, 28 aa, Artificial Sequence
  Cyclic GFR-binding peptide
HDELTSMEGLFIPKKRVIEMIQVTINSL

SEQ ID NO: 55603 - protein, 34 aa, Artificial Sequence; identical to SEQ ID NO: 13462
  Cyclic GFR-binding peptide

SEQ ID NO: 55604 - protein, 32 aa, Artificial Sequence
  Cyclic GFR-binding peptide
DELTVQVEKFIPKKRVIEVKAVKVSRLQVQTP

SEQ ID NO: 55605 - protein, 43 aa, Artificial Sequence; identical to SEQ ID NO: 13463
  Cyclic GFR-binding peptide
  MOD_RES (2), (39): Xaa is C or S

SEQ ID NO: 55606 - protein, 42 aa, Artificial Sequence; identical to SEQ ID NO: 13464
  Cyclic GFR-binding peptide
  MOD_RES (2), (36): Xaa is C or S

SEQ ID NO: 55607 - protein, 30 aa, Artificial Sequence
  Cyclic GFR-binding peptide
KNHQLFVTAKKHQGQHPKIRIKRMQVPREE

SEQ ID NO: 55608 - protein, 23 aa, Artificial Sequence
  Cyclic GFR-binding peptide
SMEGLFIPKKRVIEMIQVTINSL

SEQ ID NO: 55609 - protein, 27 aa, Artificial Sequence
  Cyclic GFR-binding peptide
TVQVEKFIPKKRVIEVKAVKVSRLQVQ

SEQ ID NO: 55610 - protein, 31 aa, Artificial Sequence
  Cyclic GFR-binding peptide
  MOD_RES (31), (31): Xaa is C or S
RSMEGLLKPKKRVYEMIQVTINSHHVRSPQX

SEQ ID NO: 55611 - protein, 45 aa, Artificial Sequence; identical to SEQ ID NO: 13467
  Cyclic GFR-binding peptide
  MOD_RES (2), (4), (41): Xaa is C or S

SEQ ID NO: 55612 - protein, 37 aa, Artificial Sequence
  Cyclic GFR-binding peptide
  MOD_RES (31), (31): Xaa is C or S
QLFVTAKKHQGQHPKIRIKRMQVPREETPVXELGEDN

SEQ ID NO: 55613 - protein, 36 aa, Artificial Sequence; identical to SEQ ID NO: 13468
  Cyclic GFR-binding peptide
  MOD_RES (1), (3): Xaa is C or S

SEQ ID NO: 55614 - protein, 38 aa, Artificial Sequence; identical to SEQ ID NO: 13469
  Cyclic GFR-binding peptide
  MOD_RES (37), (37): Xaa is C or S

SEQ ID NO: 55615 - protein, 37 aa, Artificial Sequence; identical to SEQ ID NO: 13470
  Cyclic GFR-binding peptide
  MOD_RES (36), (36): Xaa is C or S

SEQ ID NO: 55616 - protein, 30 aa, Artificial Sequence
  Cyclic GFR-binding peptide
QSHEELVTAKKHQGQHPKIRIKRMQVPRQG

SEQ ID NO: 55617 - protein, 34 aa, Artificial Sequence
  Cyclic GFR-binding peptide
  MOD_RES (1), (3): Xaa is C or S
XEXKNHQLFVTAKKHQGQHPKIRIKRMQVPREET

SEQ ID NO: 55618 - protein, 35 aa, Artificial Sequence
  Cyclic GFR-binding peptide
  MOD_RES (32), (32): Xaa is C or S
LRSMEGILKPKKRVYEMIQVTINSHHVRSPQXKVS

SEQ ID NO: 55619 - protein, 29 aa, Artificial Sequence
  Cyclic GFR-binding peptide
KNHQLFVTAKKHQGQHPKIRIKRMQVPRE

SEQ ID NO: 55620 - protein, 24 aa, Artificial Sequence
  Cyclic GFR-binding peptide
FVQVEKHQGQHPKIRVKAMKVSRE

SEQ ID NO: 55621 - protein, 38 aa, Artificial Sequence; identical to SEQ ID NO: 13475
  Cyclic GFR-binding peptide
  MOD_RES (1), (38): Xaa is C or S

SEQ ID NO: 55622 - protein, 30 aa, Artificial Sequence
  Cyclic GFR-binding peptide
  MOD_RES (1), (1): Xaa is C or S
XKNHQLFVTAKKHQGQHPKIRIKRMQVPRE

SEQ ID NO: 55623 - protein, 33 aa, Artificial Sequence; identical to SEQ ID NO: 13476
  Cyclic GFR-binding peptide

SEQ ID NO: 55624 - protein, 33 aa, Artificial Sequence
  Cyclic GFR-binding peptide
  MOD_RES (1), (3): Xaa is C or S
XEXQSHEELVTAKKHQGQHPKIRIKRMQVPRQG

SEQ ID NO: 55625 - protein, 34 aa, Artificial Sequence
  Cyclic GFR-binding peptide
  MOD_RES (2), (4): Xaa is C or S
EXKXALHDELTSMEGIFIPKKRVIEMIQVTINSL

SEQ ID NO: 55626 - protein, 41 aa, Artificial Sequence; identical to SEQ ID NO: 13477
  Cyclic GFR-binding peptide
  MOD_RES (2), (39): Xaa is C or S

SEQ ID NO: 55627 - protein, 37 aa, Artificial Sequence
  Cyclic GFR-binding peptide
  MOD_RES (2), (4): Xaa is C or S
EXKXALHDELTSMEGIFIPKKRVIEMIQVTINSLQVQ

SEQ ID NO: 55628 - protein, 42 aa, Artificial Sequence; identical to SEQ ID NO: 13481
  Cyclic GFR-binding peptide
  MOD_RES (1), (3), (40): Xaa is C or S

SEQ ID NO: 55629 - protein, 40 aa, Artificial Sequence; identical to SEQ ID NO: 13480
  Cyclic GFR-binding peptide
  MOD_RES (2), (36): Xaa is C or S

SEQ ID NO: 55630 - protein, 40 aa, Artificial Sequence; identical to SEQ ID NO: 13482
  Cyclic GFR-binding peptide
  MOD_RES (2), (4): Xaa is C or S

SEQ ID NO: 55631 - protein, 32 aa, Artificial Sequence
  Cyclic GFR-binding peptide
  MOD_RES (2), (2): Xaa is C or S
AXELHEELRSMEGILKPKKRVYEMIQVTINSH

SEQ ID NO: 55632 - protein, 25 aa, Artificial Sequence
  Cyclic GFR-binding peptide
TSMEGLFIPKKRVIEMIQVTINSLQ

SEQ ID NO: 55633 - protein, 32 aa, Artificial Sequence
  Cyclic GFR-binding peptide
  MOD_RES (32), (32): Xaa is C or S
LRSMEGLLKPKKRVYEMIQVTINSHHVRSPQX

SEQ ID NO: 55634 - protein, 23 aa, Artificial Sequence
  Cyclic GFR-binding peptide
VTAKKHQGQHPKIRIKRMQVPRE

SEQ ID NO: 55635 - protein, 31 aa, Artificial Sequence
  Cyclic GFR-binding peptide
HEELRVTAKKLKPKKRVYEIKRVQVPRHHVR

SEQ ID NO: 55636 - protein, 34 aa, Artificial Sequence
  Cyclic GFR-binding peptide
  MOD_RES (28), (28): Xaa is C or S
SMEGIHQGQHPKIRMIQMTINSQGTPVXELGEDN

SEQ ID NO: 55637 - protein, 39 aa, Artificial Sequence; identical to SEQ ID NO: 13488
  Cyclic GFR-binding peptide
  MOD_RES (36), (36): Xaa is C or S

SEQ ID NO: 55638 - protein, 28 aa, Artificial Sequence
  Cyclic GFR-binding peptide
FVTAKKHQGQHPKIRIKRMQVPREETPV

SEQ ID NO: 55639 - protein, 39 aa, Artificial Sequence; identical to SEQ ID NO: 13487
  Cyclic GFR-binding peptide
  MOD_RES (1), (35): Xaa is C or S

SEQ ID NO: 55640 - protein, 25 aa, Artificial Sequence
  Cyclic GFR-binding peptide
RSMEGLLKPKKRVYEMIQVTINSHH

SEQ ID NO: 55641 - protein, 37 aa, Artificial Sequence; identical to SEQ ID NO: 13490
  Cyclic GFR-binding peptide
  MOD_RES (2), (36): Xaa is C or S

SEQ ID NO: 55642 - protein, 36 aa, Artificial Sequence
  Cyclic GFR-binding peptide
  MOD_RES (33), (33): Xaa is C or S
ELTVQVEKFIPKKRVIEVKAVKVSRLQVQTPRXQVN

SEQ ID NO: 55643 - protein, 30 aa, Artificial Sequence
  Cyclic GFR-binding peptide
HEELVTAKKHQGQHPKIRIKRMQVPRQGTP

SEQ ID NO: 55644 - protein, 37 aa, Artificial Sequence
  Cyclic GFR-binding peptide
  MOD_RES (34), (34): Xaa is C or S
EELRSMEGILKPKKRVYEMIQVTINSHHVRSPQXKVS

SEQ ID NO: 55645 - protein, 36 aa, Artificial Sequence
  Cyclic GFR-binding peptide
  MOD_RES (30), (30): Xaa is C or S
LFSMEGLHQGQHPKIRMIQMTINSEETPVXELGEDN

SEQ ID NO: 55646 - protein, 35 aa, Artificial Sequence; identical to SEQ ID NO: 13494
  Cyclic GFR-binding peptide
  MOD_RES (33), (33): Xaa is C or S

SEQ ID NO: 55647 - protein, 37 aa, Artificial Sequence; identical to SEQ ID NO: 13495
  Cyclic GFR-binding peptide
  MOD_RES (1), (3), (37): Xaa is C or S

SEQ ID NO: 55648 - protein, 32 aa, Artificial Sequence
  Cyclic GFR-binding peptide
  MOD_RES (30), (30): Xaa is C or S
LFSMEGLHQGQHPKIRMIQMTINSEETPVXEL

SEQ ID NO: 55649 - protein, 34 aa, Artificial Sequence; identical to SEQ ID NO: 13498
  Cyclic GFR-binding peptide

SEQ ID NO: 55650 - protein, 30 aa, Artificial Sequence
  Cyclic GFR-binding peptide
EELRSMEGILKPKKRVYEMIQVTINSHHVR

SEQ ID NO: 55651 - protein, 40 aa, Artificial Sequence; identical to SEQ ID NO: 13500
  Cyclic GFR-binding peptide
  MOD_RES (37), (37): Xaa is C or S

SEQ ID NO: 55652 - protein, 35 aa, Artificial Sequence
  Cyclic GFR-binding peptide
  MOD_RES (33), (33): Xaa is C or S
ELRVTAKKLKPKKRVYEIKRVQVPRHHVRSPQXKV

SEQ ID NO: 55653 - protein, 30 aa, Artificial Sequence
  Cyclic GFR-binding peptide
ELTSMEGIFIPKKRVIEMIQVTINSLQVQT

SEQ ID NO: 55654 - protein, 25 aa, Artificial Sequence
  Cyclic GFR-binding peptide
VQVEKHQGQHPKIRVKAMKVSREET

SEQ ID NO: 55655 - protein, 34 aa, Artificial Sequence
  Cyclic GFR-binding peptide
  MOD_RES (32), (32): Xaa is C or S
HQLFSMEGLHQGQHPKIRMIQMTINSEETPVXEL

SEQ ID NO: 55656 - protein, 28 aa, Artificial Sequence
  Cyclic GFR-binding peptide
LTSMEGLFIPKKRVIEMIQVTINSLQVQ

SEQ ID NO: 55657 - protein, 34 aa, Artificial Sequence
  Cyclic GFR-binding peptide
  MOD_RES (1), (3): Xaa is C or S
XKXALHDELTSMEGIFIPKKRVIEMIQVTINSLQ

SEQ ID NO: 55658 - protein, 40 aa, Artificial Sequence; identical to SEQ ID NO: 13503
  Cyclic GFR-binding peptide
  MOD_RES (37), (37): Xaa is C or S

SEQ ID NO: 55659 - protein, 33 aa, Artificial Sequence
  Cyclic GFR-binding peptide
  MOD_RES (29), (29): Xaa is C or S
LSMEGIHQGQHPKIRMIQMTINSQGTPVXELGE

SEQ ID NO: 55660 - protein, 35 aa, Artificial Sequence; identical to SEQ ID NO: 13505
  Cyclic GFR-binding peptide
  MOD_RES (2), (2): Xaa is C or S

SEQ ID NO: 55661 - protein, 33 aa, Artificial Sequence
  Cyclic GFR-binding peptide
  MOD_RES (2), (4): Xaa is C or S
EXKXALHDELTSMEGLFIPKKRVIEMIQVTINS

SEQ ID NO: 55662 - protein, 31 aa, Artificial Sequence
  Cyclic GFR-binding peptide
HEELVQVEKHQGQHPKIRVKAMKVSRQGTPV

SEQ ID NO: 55663 - protein, 22 aa, Artificial Sequence
  Cyclic GFR-binding peptide
SMEGLLKPKKRVYEMIQVTINS

SEQ ID NO: 55664 - protein, 37 aa, Artificial Sequence
  Cyclic GFR-binding peptide
  MOD_RES (32), (32): Xaa is C or S
HQLFVTAKKHQGQHPKIRIKRMQVPREETPVXELGED

SEQ ID NO: 55665 - protein, 38 aa, Artificial Sequence; identical to SEQ ID NO: 13511
  Cyclic GFR-binding peptide
  MOD_RES (2), (4): Xaa is C or S

SEQ ID NO: 55666 - protein, 33 aa, Artificial Sequence
  Cyclic GFR-binding peptide
ELHEELRSMEGILKPKKRVYEMIQVTINSHHVR

SEQ ID NO: 55667 - protein, 42 aa, Artificial Sequence; identical to SEQ ID NO: 13514
  Cyclic GFR-binding peptide
  MOD_RES (2), (4), (38): Xaa is C or S

SEQ ID NO: 55668 - protein, 32 aa, Artificial Sequence
  Cyclic GFR-binding peptide
  MOD_RES (31), (31): Xaa is C or S
TSMEGLFIPKKRVIEMIQVTINSLQVQTPRXQ

SEQ ID NO: 55669 - protein, 33 aa, Artificial Sequence; identical to SEQ ID NO: 13518
  Cyclic GFR-binding peptide
  MOD_RES (33), (33): Xaa is C or S

SEQ ID NO: 55670 - protein, 39 aa, Artificial Sequence; identical to SEQ ID NO: 13519
  Cyclic GFR-binding peptide
  MOD_RES (36), (36): Xaa is C or S

SEQ ID NO: 55671 - protein, 41 aa, Artificial Sequence; identical to SEQ ID NO: 13521
  Cyclic GFR-binding peptide
  MOD_RES (2), (4), (38): Xaa is C or S

SEQ ID NO: 55672 - protein, 37 aa, Artificial Sequence
  Cyclic GFR-binding peptide
  MOD_RES (34), (34): Xaa is C or S
EELRSMEGLLKPKKRVYEMIQVTINSHHVRSPQXKVS

SEQ ID NO: 55673 - protein, 35 aa, Artificial Sequence
  Cyclic GFR-binding peptide
  MOD_RES (2), (2): Xaa is C or S
KXALHDELTVQVEKFIPKKRVIEVKAVKVSRLQVQ

SEQ ID NO: 55674 - protein, 38 aa, Artificial Sequence; identical to SEQ ID NO: 13523
  Cyclic GFR-binding peptide
  MOD_RES (33), (33): Xaa is C or S

SEQ ID NO: 55675 - protein, 32 aa, Artificial Sequence
  Cyclic GFR-binding peptide
LHDELTSMEGLFIPKKRVIEMIQVTINSLQVQ

SEQ ID NO: 55676 - protein, 39 aa, Artificial Sequence; identical to SEQ ID NO: 13524
  Cyclic GFR-binding peptide
  MOD_RES (1), (38): Xaa is C or S

SEQ ID NO: 55677 - protein, 24 aa, Artificial Sequence
  Cyclic GFR-binding peptide
LVQVEKHQGQHPKIRVKAMKVSRQ

SEQ ID NO: 55678 - protein, 35 aa, Artificial Sequence
  Cyclic GFR-binding peptide
  MOD_RES (31), (31): Xaa is C or S
QLFVQVEKHQGQHPKIRVKAMKVSREETPVXELGE

SEQ ID NO: 55679 - protein, 30 aa, Artificial Sequence
  Cyclic GFR-binding peptide
HDELTSMEGIFIPKKRVIEMIQVTINSLQV

SEQ ID NO: 55680 - protein, 39 aa, Artificial Sequence; identical to SEQ ID NO: 13526
  Cyclic GFR-binding peptide
  MOD_RES (36), (36): Xaa is C or S

SEQ ID NO: 55681 - protein, 42 aa, Artificial Sequence; identical to SEQ ID NO: 13529
  Cyclic GFR-binding peptide
  MOD_RES (2), (4), (38): Xaa is C or S

SEQ ID NO: 55682 - protein, 42 aa, Artificial Sequence; identical to SEQ ID NO: 13531
  Cyclic GFR-binding peptide
  MOD_RES (2), (39): Xaa is C or S

SEQ ID NO: 55683 - protein, 34 aa, Artificial Sequence
  Cyclic GFR-binding peptide
  MOD_RES (2), (2): Xaa is C or S
EXKNHQLFSMEGLHQGQHPKIRMIQMTINSEETP

SEQ ID NO: 55684 - protein, 43 aa, Artificial Sequence; identical to SEQ ID NO: 13532
  Cyclic GFR-binding peptide
  MOD_RES (1), (3), (37): Xaa is C or S

SEQ ID NO: 55685 - protein, 30 aa, Artificial Sequence
  Cyclic GFR-binding peptide
EELRSMEGLLKPKKRVYEMIQVTINSHHVR

SEQ ID NO: 55686 - protein, 26 aa, Artificial Sequence
  Cyclic GFR-binding peptide
SMEGLHQGQHPKIRMIQMTINSEETP

SEQ ID NO: 55687 - protein, 31 aa, Artificial Sequence
  Cyclic GFR-binding peptide
  MOD_RES (31), (31): Xaa is C or S
EELVTAKKHQGQHPKIRIKRMQVPRQGTPVX

SEQ ID NO: 55688 - protein, 34 aa, Artificial Sequence; identical to SEQ ID NO: 13534
  Cyclic GFR-binding peptide

SEQ ID NO: 55689 - protein, 38 aa, Artificial Sequence; identical to SEQ ID NO: 13536
  Cyclic GFR-binding peptide
  MOD_RES (36), (36): Xaa is C or S

SEQ ID NO: 55690 - protein, 32 aa, Artificial Sequence
  Cyclic GFR-binding peptide
  MOD_RES (30), (30): Xaa is C or S
ELVQVEKHQGQHPKIRVKAMKVSRQGTPVXEL

SEQ ID NO: 55691 - protein, 34 aa, Artificial Sequence; identical to SEQ ID NO: 13538
  Cyclic GFR-binding peptide

SEQ ID NO: 55692 - protein, 37 aa, Artificial Sequence
  Cyclic GFR-binding peptide
  MOD_RES (31), (31): Xaa is C or S
EELVTAKKHQGQHPKIRIKRMQVPRQGTPVXELGEDN

SEQ ID NO: 55693 - protein, 32 aa, Artificial Sequence
  Cyclic GFR-binding peptide
  MOD_RES (31), (31): Xaa is C or S
TSMEGIFIPKKRVIEMIQVTINSLQVQTPRXQ

SEQ ID NO: 55694 - protein, 34 aa, Artificial Sequence
  Cyclic GFR-binding peptide
  MOD_RES (30), (30): Xaa is C or S
VTAKKLKPKKRVYEIKRVQVPRHHVRSPQXKVSS

SEQ ID NO: 55695 - protein, 33 aa, Artificial Sequence
  Cyclic GFR-binding peptide
EELRVTAKKLKPKKRVYEIKRVQVPRHHVRSPQ

SEQ ID NO: 55696 - protein, 32 aa, Artificial Sequence
  Cyclic GFR-binding peptide
ELTSMEGLFIPKKRVIEMIQVTINSLQVQTPR

SEQ ID NO: 55697 - protein, 24 aa, Artificial Sequence
  Cyclic GFR-binding peptide
SMEGILKPKKRVYEMIQVTINSHH

SEQ ID NO: 55698 - protein, 26 aa, Artificial Sequence
  Cyclic GFR-binding peptide
QLFVTAKKHQGQHPKIRIKRMQVPRE

SEQ ID NO: 55699 - protein, 30 aa, Artificial Sequence
  Cyclic GFR-binding peptide
HEELRVTAKKLKPKKRVYEIKRVQVPRHHV

SEQ ID NO: 55700 - protein, 27 aa, Artificial Sequence
  Cyclic GFR-binding peptide
HQLFVQVEKHQGQHPKIRVKAMKVSRE

SEQ ID NO: 55701 - protein, 29 aa, Artificial Sequence
  Cyclic GFR-binding peptide
SHEELVTAKKHQGQHPKIRIKRMQVPRQG

SEQ ID NO: 55702 - protein, 26 aa, Artificial Sequence
  Cyclic GFR-binding peptide
EELRSMEGILKPKKRVYEMIQVTINS

SEQ ID NO: 55703 - protein, 38 aa, Artificial Sequence; identical to SEQ ID NO: 13542
  Cyclic GFR-binding peptide
  MOD_RES (35), (35): Xaa is C or S

SEQ ID NO: 55704 - protein, 35 aa, Artificial Sequence; identical to SEQ ID NO: 13543
  Cyclic GFR-binding peptide
  MOD_RES (34), (34): Xaa is C or S

SEQ ID NO: 55705 - protein, 26 aa, Artificial Sequence
  Cyclic GFR-binding peptide
LVQVEKHQGQHPKIRVKAMKVSRQGT

SEQ ID NO: 55706 - protein, 25 aa, Artificial Sequence
  Cyclic GFR-binding peptide
LFSMEGLHQGQHPKIRMIQMTINSE

SEQ ID NO: 55707 - protein, 35 aa, Artificial Sequence
  Cyclic GFR-binding peptide
  MOD_RES (32), (32): Xaa is C or S
HEELVQVEKHQGQHPKIRVKAMKVSRQGTPVXELG

SEQ ID NO: 55708 - protein, 37 aa, Artificial Sequence
  Cyclic GFR-binding peptide
  MOD_RES (32), (32): Xaa is C or S
HEELSMEGIHQGQHPKIRMIQMTINSQGTPVXELGED

SEQ ID NO: 55709 - protein, 36 aa, Artificial Sequence
  Cyclic GFR-binding peptide
  MOD_RES (2), (4): Xaa is C or S
RXEXKNHQLFVTAKKHQGQHPKIRIKRMQVPREETP

SEQ ID NO: 55710 - protein, 36 aa, Artificial Sequence; identical to SEQ ID NO: 13546
  Cyclic GFR-binding peptide
  MOD_RES (1), (35): Xaa is C or S

SEQ ID NO: 55711 - protein, 42 aa, Artificial Sequence; identical to SEQ ID NO: 13547
  Cyclic GFR-binding peptide
  MOD_RES (1), (3), (37): Xaa is C or S

SEQ ID NO: 55712 - protein, 38 aa, Artificial Sequence; identical to SEQ ID NO: 13548
  Cyclic GFR-binding peptide
  MOD_RES (2), (36): Xaa is C or S

SEQ ID NO: 55713 - protein, 37 aa, Artificial Sequence; identical to SEQ ID NO: 13549
  Cyclic GFR-binding peptide
  MOD_RES (33), (33): Xaa is C or S

SEQ ID NO: 55714 - protein, 30 aa, Artificial Sequence
  Cyclic GFR-binding peptide
  MOD_RES (29), (29): Xaa is C or S
FVTAKKHQGQHPKIRIKRMQVPREETPVXE

SEQ ID NO: 55715 - protein, 33 aa, Artificial Sequence
  Cyclic GFR-binding peptide
  MOD_RES (1), (3): Xaa is C or S
XEXQSHEELVQVEKHQGQHPKIRVKAMKVSRQG

SEQ ID NO: 55716 - protein, 25 aa, Artificial Sequence
  Cyclic GFR-binding peptide
FVTAKKHQGQHPKIRIKRMQVPREE

SEQ ID NO: 55717 - protein, 29 aa, Artificial Sequence
  Cyclic GFR-binding peptide
HEELVTAKKHQGQHPKIRIKRMQVPRQGT

SEQ ID NO: 55718 - protein, 35 aa, Artificial Sequence; identical to SEQ ID NO: 13552
  Cyclic GFR-binding peptide
  MOD_RES (33), (33): Xaa is C or S

SEQ ID NO: 55719 - protein, 27 aa, Artificial Sequence
  Cyclic GFR-binding peptide
SMEGIHQGQHPKIRMIQMTINSQGTPV

SEQ ID NO: 55720 - protein, 28 aa, Artificial Sequence
  Cyclic GFR-binding peptide
HDELTVQVEKFIPKKRVIEVKAVKVSRL

SEQ ID NO: 55721 - protein, 31 aa, Artificial Sequence
  Cyclic GFR-binding peptide
  MOD_RES (28), (28): Xaa is C or S
SMEGIHQGQHPKIRMIQMTINSQGTPVXELG

SEQ ID NO: 55722 - protein, 38 aa, Artificial Sequence
  Cyclic GFR-binding peptide
  MOD_RES (32), (32): Xaa is C or S
HEELVQVEKHQGQHPKIRVKAMKVSRQGTPVXELGEDN

SEQ ID NO: 55723 - protein, 34 aa, Artificial Sequence
  Cyclic GFR-binding peptide
  MOD_RES (33), (33): Xaa is C or S
ELRSMEGILKPKKRVYEMIQVTINSHHVRSPQXK

SEQ ID NO: 55724 - protein, 27 aa, Artificial Sequence
  Cyclic GFR-binding peptide
LTVQVEKFIPKKRVIEVKAVKVSRLQV

SEQ ID NO: 55725 - protein, 24 aa, Artificial Sequence
  Cyclic GFR-binding peptide
RSMEGILKPKKRVYEMIQVTINSH

SEQ ID NO: 55726 - protein, 34 aa, Artificial Sequence
  Cyclic GFR-binding peptide
  MOD_RES (1), (1): Xaa is C or S
XELHEELRSMEGLLKPKKRVYEMIQVTINSHHVR

SEQ ID NO: 55727 - protein, 29 aa, Artificial Sequence
  Cyclic GFR-binding peptide
  MOD_RES (1), (1): Xaa is C or S
XQSHEELVQVEKHQGQHPKIRVKAMKVSR

SEQ ID NO: 55728 - protein, 33 aa, Artificial Sequence
  Cyclic GFR-binding peptide
  MOD_RES (33), (33): Xaa is C or S
ELTSMEGIFIPKKRVIEMIQVTINSLQVQTPRX

SEQ ID NO: 55729 - protein, 33 aa, Artificial Sequence
  Cyclic GFR-binding peptide
  MOD_RES (2), (2): Xaa is C or S
KXALHDELTVQVEKFIPKKRVIEVKAVKVSRLQ

SEQ ID NO: 55730 - protein, 26 aa, Artificial Sequence
  Cyclic GFR-binding peptide
ELTSMEGIFIPKKRVIEMIQVTINSL

SEQ ID NO: 55731 - protein, 40 aa, Artificial Sequence; identical to SEQ ID NO: 13558
  Cyclic GFR-binding peptide
  MOD_RES (2), (4): Xaa is C or S

SEQ ID NO: 55732 - protein, 37 aa, Artificial Sequence; identical to SEQ ID NO: 13559
  Cyclic GFR-binding peptide
  MOD_RES (2), (2): Xaa is C or S

SEQ ID NO: 55733 - protein, 33 aa, Artificial Sequence
  Cyclic GFR-binding peptide
  MOD_RES (30), (30): Xaa is C or S
ELVQVEKHQGQHPKIRVKAMKVSRQGTPVXELG

SEQ ID NO: 55734 - protein, 38 aa, Artificial Sequence; identical to SEQ ID NO: 13560
  Cyclic GFR-binding peptide
  MOD_RES (37), (37): Xaa is C or S

SEQ ID NO: 55735 - protein, 31 aa, Artificial Sequence
  Cyclic GFR-binding peptide
  MOD_RES (1), (3): Xaa is C or S
XEXKNHQLFVTAKKHQGQHPKIRIKRMQVPR

SEQ ID NO: 55736 - protein, 35 aa, Artificial Sequence; identical to SEQ ID NO: 13563
  Cyclic GFR-binding peptide
  MOD_RES (2), (2): Xaa is C or S

SEQ ID NO: 55737 - protein, 33 aa, Artificial Sequence; identical to SEQ ID NO: 13562
  Cyclic GFR-binding peptide
  MOD_RES (33), (33): Xaa is C or S

SEQ ID NO: 55738 - protein, 39 aa, Artificial Sequence; identical to SEQ ID NO: 13565
  Cyclic GFR-binding peptide
  MOD_RES (35), (35): Xaa is C or S

SEQ ID NO: 55739 - protein, 28 aa, Artificial Sequence
  Cyclic GFR-binding peptide
SHEELSMEGIHQGQHPKIRMIQMTINSQ

SEQ ID NO: 55740 - protein, 42 aa, Artificial Sequence; identical to SEQ ID NO: 13567
  Cyclic GFR-binding peptide
  MOD_RES (2), (39): Xaa is C or S

SEQ ID NO: 55741 - protein, 36 aa, Artificial Sequence
  Cyclic GFR-binding peptide
  MOD_RES (32), (32): Xaa is C or S
HQLFVQVEKHQGQHPKIRVKAMKVSREETPVXELGE

SEQ ID NO: 55742 - protein, 33 aa, Artificial Sequence
  Cyclic GFR-binding peptide
  MOD_RES (32), (32): Xaa is C or S
HEELSMEGIHQGQHPKIRMIQMTINSQGTPVXE

SEQ ID NO: 55743 - protein, 33 aa, Artificial Sequence
  Cyclic GFR-binding peptide
  MOD_RES (32), (32): Xaa is C or S
HQLFSMEGLHQGQHPKIRMIQMTINSEETPVXE

SEQ ID NO: 55744 - protein, 32 aa, Artificial Sequence
  Cyclic GFR-binding peptide
EELRSMEGILKPKKRVYEMIQVTINSHHVRSP

SEQ ID NO: 55745 - protein, 38 aa, Artificial Sequence; identical to SEQ ID NO: 13568
  Cyclic GFR-binding peptide
  MOD_RES (34), (34): Xaa is C or S

SEQ ID NO: 55746 - protein, 32 aa, Artificial Sequence
  Cyclic GFR-binding peptide
  MOD_RES (31), (31): Xaa is C or S
EELVTAKKHQGQHPKIRIKRMQVPRQGTPVXE

SEQ ID NO: 55747 - protein, 30 aa, Artificial Sequence
  Cyclic GFR-binding peptide
RSMEGILKPKKRVYEMIQVTINSHHVRSPQ

SEQ ID NO: 55748 - protein, 27 aa, Artificial Sequence
  Cyclic GFR-binding peptide
NHQLFVQVEKHQGQHPKIRVKAMKVSR

SEQ ID NO: 55749 - protein, 26 aa, Artificial Sequence
  Cyclic GFR-binding peptide
SMEGIHQGQHPKIRMIQMTINSQGTP

SEQ ID NO: 55750 - protein, 29 aa, Artificial Sequence
  Cyclic GFR-binding peptide
HQLFVTAKKHQGQHPKIRIKRMQVPREET

SEQ ID NO: 55751 - protein, 29 aa, Artificial Sequence
  Cyclic GFR-binding peptide
EELSMEGIHQGQHPKIRMIQMTINSQGTP

SEQ ID NO: 55752 - protein, 32 aa, Artificial Sequence
  Cyclic GFR-binding peptide
ELHEELRSMEGLLKPKKRVYEMIQVTINSHHV

SEQ ID NO: 55753 - protein, 22 aa, Artificial Sequence
  Cyclic GFR-binding peptide
SMEGIFIPKKRVIEMIQVTINS

SEQ ID NO: 55754 - protein, 29 aa, Artificial Sequence
  Cyclic GFR-binding peptide
SMEGILKPKKRVYEMIQVTINSHHVRSPQ

SEQ ID NO: 55755 - protein, 28 aa, Artificial Sequence
  Cyclic GFR-binding peptide
FVQVEKHQGQHPKIRVKAMKVSREETPV

SEQ ID NO: 55756 - protein, 29 aa, Artificial Sequence
  Cyclic GFR-binding peptide
  MOD_RES (29), (29): Xaa is C or S
LSMEGIHQGQHPKIRMIQMTINSQGTPVX

SEQ ID NO: 55757 - protein, 39 aa, Artificial Sequence; identical to SEQ ID NO: 13571
  Cyclic GFR-binding peptide
  MOD_RES (1), (3): Xaa is C or S

SEQ ID NO: 55758 - protein, 33 aa, Artificial Sequence
  Cyclic GFR-binding peptide
  MOD_RES (30), (30): Xaa is C or S
SMEGIFIPKKRVIEMIQVTINSLQVQTPRXQVN

SEQ ID NO: 55759 - protein, 29 aa, Artificial Sequence
  Cyclic GFR-binding peptide
HEELSMEGIHQGQHPKIRMIQMTINSQGT

SEQ ID NO: 55760 - protein, 33 aa, Artificial Sequence
  Cyclic GFR-binding peptide
  MOD_RES (2), (2): Xaa is C or S
EXQSHEELVTAKKHQGQHPKIRIKRMQVPRQGT

SEQ ID NO: 55761 - protein, 28 aa, Artificial Sequence
  Cyclic GFR-binding peptide
LFVQVEKHQGQHPKIRVKAMKVSREETP

SEQ ID NO: 55762 - protein, 24 aa, Artificial Sequence
  Cyclic GFR-binding peptide
ELVTAKKHQGQHPKIRIKRMQVPR

SEQ ID NO: 55763 - protein, 24 aa, Artificial Sequence
  Cyclic GFR-binding peptide
VTAKKHQGQHPKIRIKRMQVPRQG

SEQ ID NO: 55764 - protein, 28 aa, Artificial Sequence
  Cyclic GFR-binding peptide
HEELSMEGIHQGQHPKIRMIQMTINSQG

SEQ ID NO: 55765 - protein, 38 aa, Artificial Sequence; identical to SEQ ID NO: 13574
  Cyclic GFR-binding peptide
  MOD_RES (1), (38): Xaa is C or S

SEQ ID NO: 55766 - protein, 39 aa, Artificial Sequence; identical to SEQ ID NO: 13577
  Cyclic GFR-binding peptide
  MOD_RES (1), (3), (37): Xaa is C or S

SEQ ID NO: 55767 - protein, 24 aa, Artificial Sequence
  Cyclic GFR-binding peptide
LTVQVEKFIPKKRVIEVKAVKVSR

SEQ ID NO: 55768 - protein, 30 aa, Artificial Sequence
  Cyclic GFR-binding peptide
LTSMEGIFIPKKRVIEMIQVTINSLQVQTP

SEQ ID NO: 55769 - protein, 34 aa, Artificial Sequence
  Cyclic GFR-binding peptide
  MOD_RES (31), (31): Xaa is C or S
EELSMEGIHQGQHPKIRMIQMTINSQGTPVXELG

SEQ ID NO: 55770 - protein, 28 aa, Artificial Sequence
  Cyclic GFR-binding peptide
EELSMEGIHQGQHPKIRMIQMTINSQGT

SEQ ID NO: 55771 - protein, 36 aa, Artificial Sequence; identical to SEQ ID NO: 13580
  Cyclic GFR-binding peptide

SEQ ID NO: 55772 - protein, 32 aa, Artificial Sequence
  Cyclic GFR-binding peptide
KNHQLFVTAKKHQGQHPKIRIKRMQVPREETP

SEQ ID NO: 55773 - protein, 38 aa, Artificial Sequence
  Cyclic GFR-binding peptide
  MOD_RES (34), (34): Xaa is C or S
DELTSMEGLFIPKKRVIEMIQVTINSLQVQTPRXQVNR

SEQ ID NO: 55774 - protein, 30 aa, Artificial Sequence
  Cyclic GFR-binding peptide
  MOD_RES (28), (28): Xaa is C or S
VQVEKHQGQHPKIRVKAMKVSREETPVXEL

SEQ ID NO: 55775 - protein, 35 aa, Artificial Sequence; identical to SEQ ID NO: 13582
  Cyclic GFR-binding peptide
  MOD_RES (1), (1): Xaa is C or S

SEQ ID NO: 55776 - protein, 29 aa, Artificial Sequence
  Cyclic GFR-binding peptide
ELSMEGIHQGQHPKIRMIQMTINSQGTPV

SEQ ID NO: 55777 - protein, 44 aa, Artificial Sequence; identical to SEQ ID NO: 13584
  Cyclic GFR-binding peptide
  MOD_RES (1), (3), (40): Xaa is C or S

SEQ ID NO: 55778 - protein, 30 aa, Artificial Sequence
  Cyclic GFR-binding peptide
LHEELRVTAKKLKPKKRVYEIKRVQVPRHH

SEQ ID NO: 55779 - protein, 37 aa, Artificial Sequence
  Cyclic GFR-binding peptide
  MOD_RES (32), (32): Xaa is C or S
HQLFSMEGLHQGQHPKIRMIQMTINSEETPVXELGED

SEQ ID NO: 55780 - protein, 37 aa, Artificial Sequence
  Cyclic GFR-binding peptide
  MOD_RES (33), (33): Xaa is C or S
ELTSMEGLFIPKKRVIEMIQVTINSLQVQTPRXQVNR

SEQ ID NO: 55781 - protein, 32 aa, Artificial Sequence
  Cyclic GFR-binding peptide
  MOD_RES (30), (30): Xaa is C or S
SMEGIFIPKKRVIEMIQVTINSLQVQTPRXQV

SEQ ID NO: 55782 - protein, 30 aa, Artificial Sequence
  Cyclic GFR-binding peptide
  MOD_RES (28), (28): Xaa is C or S
VQVEKHQGQHPKIRVKAMKVSRQGTPVXEL

SEQ ID NO: 55783 - protein, 42 aa, Artificial Sequence; identical to SEQ ID NO: 13587
  Cyclic GFR-binding peptide
  MOD_RES (2), (36): Xaa is C or S

SEQ ID NO: 55784 - protein, 36 aa, Artificial Sequence
  Cyclic GFR-binding peptide
  MOD_RES (31), (31): Xaa is C or S
EELVTAKKHQGQHPKIRIKRMQVPRQGTPVXELGED

SEQ ID NO: 55785 - protein, 28 aa, Artificial Sequence
  Cyclic GFR-binding peptide
  MOD_RES (28), (28): Xaa is C or S
VQVEKHQGQHPKIRVKAMKVSREETPVX

SEQ ID NO: 55786 - protein, 29 aa, Artificial Sequence
  Cyclic GFR-binding peptide
VQVEKFIPKKRVIEVKAVKVSRLQVQTPR

SEQ ID NO: 55787 - protein, 34 aa, Artificial Sequence; identical to SEQ ID NO: 13588
  Cyclic GFR-binding peptide

SEQ ID NO: 55788 - protein, 36 aa, Artificial Sequence; identical to SEQ ID NO: 13589
  Cyclic GFR-binding peptide
  MOD_RES (1), (35): Xaa is C or S

SEQ ID NO: 55789 - protein, 35 aa, Artificial Sequence
  Cyclic GFR-binding peptide
  MOD_RES (2), (4): Xaa is C or S
AXAXELHEELRSMEGLLKPKKRVYEMIQVTINSHH

SEQ ID NO: 55790 - protein, 33 aa, Artificial Sequence
  Cyclic GFR-binding peptide
  MOD_RES (2), (4): Xaa is C or S
AXAXELHEELRSMEGLLKPKKRVYEMIQVTINS

SEQ ID NO: 55791 - protein, 31 aa, Artificial Sequence
  Cyclic GFR-binding peptide
  MOD_RES (1), (3): Xaa is C or S
XEXQSHEELVTAKKHQGQHPKIRIKRMQVPR

SEQ ID NO: 55792 - protein, 39 aa, Artificial Sequence; identical to SEQ ID NO: 13590
  Cyclic GFR-binding peptide
  MOD_RES (2), (36): Xaa is C or S

SEQ ID NO: 55793 - protein, 27 aa, Artificial Sequence
  Cyclic GFR-binding peptide
SMEGLHQGQHPKIRMIQMTINSEETPV

SEQ ID NO: 55794 - protein, 31 aa, Artificial Sequence
  Cyclic GFR-binding peptide
  MOD_RES (1), (1): Xaa is C or S
XQSHEELVQVEKHQGQHPKIRVKAMKVSRQG

SEQ ID NO: 55795 - protein, 37 aa, Artificial Sequence
  Cyclic GFR-binding peptide
  MOD_RES (33), (33): Xaa is C or S
ELRVTAKKLKPKKRVYEIKRVQVPRHHVRSPQXKVSS

SEQ ID NO: 55796 - protein, 26 aa, Artificial Sequence
  Cyclic GFR-binding peptide
ELRSMEGLLKPKKRVYEMIQVTINSH

SEQ ID NO: 55797 - protein, 36 aa, Artificial Sequence
  Cyclic GFR-binding peptide
  MOD_RES (2), (4): Xaa is C or S
RXEXKNHQLFSMEGLHQGQHPKIRMIQMTINSEETP

SEQ ID NO: 55798 - protein, 34 aa, Artificial Sequence
  Cyclic GFR-binding peptide
  MOD_RES (30), (30): Xaa is C or S
ELSMEGIHQGQHPKIRMIQMTINSQGTPVXELGE

SEQ ID NO: 55799 - protein, 31 aa, Artificial Sequence
  Cyclic GFR-binding peptide
AAAAAAAAAVQVEKFIPKKRVIEVKAVKVSR

SEQ ID NO: 55800 - protein, 27 aa, Artificial Sequence
  Cyclic GFR-binding peptide
FVQVEKHQGQHPKIRVKAMKVSREETP

SEQ ID NO: 55801 - protein, 33 aa, Artificial Sequence
  Cyclic GFR-binding peptide
  MOD_RES (28), (28): Xaa is C or S
VQVEKHQGQHPKIRVKAMKVSREETPVXELGED

SEQ ID NO: 55802 - protein, 34 aa, Artificial Sequence
  Cyclic GFR-binding peptide
  MOD_RES (33), (33): Xaa is C or S
ELTSMEGIFIPKKRVIEMIQVTINSLQVQTPRXQ

SEQ ID NO: 55803 - protein, 43 aa, Artificial Sequence; identical to SEQ ID NO: 13593
  Cyclic GFR-binding peptide
  MOD_RES (2), (4), (38): Xaa is C or S

SEQ ID NO: 55804 - protein, 40 aa, Artificial Sequence; identical to SEQ ID NO: 13594
  Cyclic GFR-binding peptide
  MOD_RES (1), (38): Xaa is C or S

SEQ ID NO: 55805 - protein, 33 aa, Artificial Sequence
  Cyclic GFR-binding peptide
  MOD_RES (30), (30): Xaa is C or S
LFSMEGLHQGQHPKIRMIQMTINSEETPVXELG

SEQ ID NO: 55806 - protein, 28 aa, Artificial Sequence
  Cyclic GFR-binding peptide
HQLFVTAKKHQGQHPKIRIKRMQVPREE

SEQ ID NO: 55807 - protein, 33 aa, Artificial Sequence; identical to SEQ ID NO: 13595
  Cyclic GFR-binding peptide

SEQ ID NO: 55808 - protein, 36 aa, Artificial Sequence; identical to SEQ ID NO: 13597
  Cyclic GFR-binding peptide
  MOD_RES (2), (2): Xaa is C or S

SEQ ID NO: 55809 - protein, 30 aa, Artificial Sequence
  Cyclic GFR-binding peptide
  MOD_RES (30), (30): Xaa is C or S
VQVEKFIPKKRVIEVKAVKVSRLQVQTPRX

SEQ ID NO: 55810 - protein, 30 aa, Artificial Sequence
  Cyclic GFR-binding peptide
  MOD_RES (29), (29): Xaa is C or S
LVQVEKHQGQHPKIRVKAMKVSRQGTPVXE

SEQ ID NO: 55811 - protein, 27 aa, Artificial Sequence
  Cyclic GFR-binding peptide
SMEGLLKPKKRVYEMIQVTINSHHVRS

SEQ ID NO: 55812 - protein, 40 aa, Artificial Sequence; identical to SEQ ID NO: 13599
  Cyclic GFR-binding peptide
  MOD_RES (1), (3), (37): Xaa is C or S

SEQ ID NO: 55813 - protein, 40 aa, Artificial Sequence; identical to SEQ ID NO: 13600
  Cyclic GFR-binding peptide
  MOD_RES (2), (36): Xaa is C or S

SEQ ID NO: 55814 - protein, 30 aa, Artificial Sequence
  Cyclic GFR-binding peptide
  MOD_RES (1), (1): Xaa is C or S
XALHDELTSMEGIFIPKKRVIEMIQVTINS

SEQ ID NO: 55815 - protein, 24 aa, Artificial Sequence
  Cyclic GFR-binding peptide
SMEGIFIPKKRVIEMIQVTINSLQ

SEQ ID NO: 55816 - protein, 25 aa, Artificial Sequence
  Cyclic GFR-binding peptide
FVQVEKHQGQHPKIRVKAMKVSREE

SEQ ID NO: 55817 - protein, 35 aa, Artificial Sequence
  Cyclic GFR-binding peptide
  MOD_RES (30), (30): Xaa is C or S
ELVQVEKHQGQHPKIRVKAMKVSRQGTPVXELGED

SEQ ID NO: 55818 - protein, 27 aa, Artificial Sequence
  Cyclic GFR-binding peptide
LSMEGIHQGQHPKIRMIQMTINSQGTP

SEQ ID NO: 55819 - protein, 30 aa, Artificial Sequence
  Cyclic GFR-binding peptide
  MOD_RES (1), (1): Xaa is C or S
XQSHEELSMEGIHQGQHPKIRMIQMTINSQ

SEQ ID NO: 55820 - protein, 32 aa, Artificial Sequence
  Cyclic GFR-binding peptide
  MOD_RES (31), (31): Xaa is C or S
RVTAKKLKPKKRVYEIKRVQVPRHHVRSPQXK

SEQ ID NO: 55821 - protein, 31 aa, Artificial Sequence
  Cyclic GFR-binding peptide
ALHDELTVQVEKFIPKKRVIEVKAVKVSRLQ

SEQ ID NO: 55822 - protein, 39 aa, Artificial Sequence; identical to SEQ ID NO: 13603
  Cyclic GFR-binding peptide
  MOD_RES (33), (33): Xaa is C or S

SEQ ID NO: 55823 - protein, 30 aa, Artificial Sequence
  Cyclic GFR-binding peptide
LHEELRSMEGLLKPKKRVYEMIQVTINSHH

SEQ ID NO: 55824 - protein, 33 aa, Artificial Sequence
  Cyclic GFR-binding peptide
  MOD_RES (31), (31): Xaa is C or S
RSMEGLLKPKKRVYEMIQVTINSHHVRSPQXKV

SEQ ID NO: 55825 - protein, 41 aa, Artificial Sequence; identical to SEQ ID NO: 13604
  Cyclic GFR-binding peptide
  MOD_RES (37), (37): Xaa is C or S

SEQ ID NO: 55826 - protein, 37 aa, Artificial Sequence; identical to SEQ ID NO: 13605
  Cyclic GFR-binding peptide
  MOD_RES (2), (36): Xaa is C or S

SEQ ID NO: 55827 - protein, 29 aa, Artificial Sequence
  Cyclic GFR-binding peptide
DELTSMEGIFIPKKRVIEMIQVTINSLQV

SEQ ID NO: 55828 - protein, 39 aa, Artificial Sequence; identical to SEQ ID NO: 13607
  Cyclic GFR-binding peptide
  MOD_RES (33), (33): Xaa is C or S

SEQ ID NO: 55829 - protein, 34 aa, Artificial Sequence
  Cyclic GFR-binding peptide
  MOD_RES (2), (4): Xaa is C or S
RXEXKNHQLFVQVEKHQGQHPKIRVKAMKVSREE

SEQ ID NO: 55830 - protein, 39 aa, Artificial Sequence; identical to SEQ ID NO: 13608
  Cyclic GFR-binding peptide
  MOD_RES (1), (3): Xaa is C or S

SEQ ID NO: 55831 - protein, 31 aa, Artificial Sequence
  Cyclic GFR-binding peptide
  MOD_RES (29), (29): Xaa is C or S
LSMEGIHQGQHPKIRMIQMTINSQGTPVXEL

SEQ ID NO: 55832 - protein, 38 aa, Artificial Sequence; identical to SEQ ID NO: 13610
  Cyclic GFR-binding peptide
  MOD_RES (33), (33): Xaa is C or S

SEQ ID NO: 55833 - protein, 32 aa, Artificial Sequence
  Cyclic GFR-binding peptide
  MOD_RES (2), (2): Xaa is C or S
EXQSHEELVTAKKHQGQHPKIRIKRMQVPRQG

SEQ ID NO: 55834 - protein, 32 aa, Artificial Sequence
  Cyclic GFR-binding peptide
KNHQLFSMEGLHQGQHPKIRMIQMTINSEETP

SEQ ID NO: 55835 - protein, 33 aa, Artificial Sequence
  Cyclic GFR-binding peptide
  MOD_RES (2), (4): Xaa is C or S
AXAXELHEELRVTAKKLKPKKRVYEIKRVQVPR

SEQ ID NO: 55836 - protein, 37 aa, Artificial Sequence; identical to SEQ ID NO: 13614
  Cyclic GFR-binding peptide
  MOD_RES (2), (2): Xaa is C or S

SEQ ID NO: 55837 - protein, 33 aa, Artificial Sequence
  Cyclic GFR-binding peptide
  MOD_RES (2), (2): Xaa is C or S
AXELHEELRVTAKKLKPKKRVYEIKRVQVPRHH

SEQ ID NO: 55838 - protein, 27 aa, Artificial Sequence
  Cyclic GFR-binding peptide
HDELTSMEGLFIPKKRVIEMIQVTINS

SEQ ID NO: 55839 - protein, 30 aa, Artificial Sequence
  Cyclic GFR-binding peptide
NHQLFVQVEKHQGQHPKIRVKAMKVSREET

SEQ ID NO: 55840 - protein, 43 aa, Artificial Sequence; identical to SEQ ID NO: 13619
  Cyclic GFR-binding peptide
  MOD_RES (2), (4), (41): Xaa is C or S

SEQ ID NO: 55841 - protein, 34 aa, Artificial Sequence
  Cyclic GFR-binding peptide
  MOD_RES (2), (2): Xaa is C or S
AXELHEELRVTAKKLKPKKRVYEIKRVQVPRHHV

SEQ ID NO: 55842 - protein, 37 aa, Artificial Sequence; identical to SEQ ID NO: 13620
  Cyclic GFR-binding peptide
  MOD_RES (2), (2): Xaa is C or S

SEQ ID NO: 55843 - protein, 30 aa, Artificial Sequence
  Cyclic GFR-binding peptide
NHQLFVTAKKHQGQHPKIRIKRMQVPREET

SEQ ID NO: 55844 - protein, 35 aa, Artificial Sequence
  Cyclic GFR-binding peptide
  MOD_RES (31), (31): Xaa is C or S
TSMEGIFIPKKRVIEMIQVTINSLQVQTPRXQVNR

SEQ ID NO: 55845 - protein, 33 aa, Artificial Sequence
  Cyclic GFR-binding peptide
  MOD_RES (31), (31): Xaa is C or S
QLFVTAKKHQGQHPKIRIKRMQVPREETPVXEL

SEQ ID NO: 55846 - protein, 25 aa, Artificial Sequence
  Cyclic GFR-binding peptide
VTAKKLKPKKRVYEIKRVQVPRHHV

SEQ ID NO: 55847 - protein, 30 aa, Artificial Sequence
  Cyclic GFR-binding peptide
  MOD_RES (30), (30): Xaa is C or S
SMEGILKPKKRVYEMIQVTINSHHVRSPQX

SEQ ID NO: 55848 - protein, 40 aa, Artificial Sequence; identical to SEQ ID NO: 13621
  Cyclic GFR-binding peptide
  MOD_RES (1), (38): Xaa is C or S

SEQ ID NO: 55849 - protein, 30 aa, Artificial Sequence
  Cyclic GFR-binding peptide
ELRSMEGILKPKKRVYEMIQVTINSHHVRS

SEQ ID NO: 55850 - protein, 30 aa, Artificial Sequence
  Cyclic GFR-binding peptide
  MOD_RES (30), (30): Xaa is C or S
ELSMEGIHQGQHPKIRMIQMTINSQGTPVX

SEQ ID NO: 55851 - protein, 34 aa, Artificial Sequence
  Cyclic GFR-binding peptide
  MOD_RES (1), (3): Xaa is C or S
XEXKNHQLFSMEGLHQGQHPKIRMIQMTINSEET

SEQ ID NO: 55852 - protein, 35 aa, Artificial Sequence
  Cyclic GFR-binding peptide
  MOD_RES (2), (4): Xaa is C or S
AXAXELHEELRVTAKKLKPKKRVYEIKRVQVPRHH

SEQ ID NO: 55853 - protein, 31 aa, Artificial Sequence
  Cyclic GFR-binding peptide
AAAAAAAAAVQVEKHQGQHPKIRVKAMKVSR

SEQ ID NO: 55854 - protein, 39 aa, Artificial Sequence; identical to SEQ ID NO: 13627
  Cyclic GFR-binding peptide
  MOD_RES (35), (35): Xaa is C or S

SEQ ID NO: 55855 - protein, 24 aa, Artificial Sequence
  Cyclic GFR-binding peptide
LFVTAKKHQGQHPKIRIKRMQVPR

SEQ ID NO: 55856 - protein, 41 aa, Artificial Sequence; identical to SEQ ID NO: 13628
  Cyclic GFR-binding peptide
  MOD_RES (2), (36): Xaa is C or S

SEQ ID NO: 55857 - protein, 34 aa, Artificial Sequence
  Cyclic GFR-binding peptide
  MOD_RES (2), (4): Xaa is C or S
AXAXELHEELRSMEGILKPKKRVYEMIQVTINSH

SEQ ID NO: 55858 - protein, 33 aa, Artificial Sequence
  Cyclic GFR-binding peptide
  MOD_RES (32), (32): Xaa is C or S
LTVQVEKFIPKKRVIEVKAVKVSRLQVQTPRXQ

SEQ ID NO: 55859 - protein, 31 aa, Artificial Sequence
  Cyclic GFR-binding peptide
  MOD_RES (1), (1): Xaa is C or S
XELHEELRVTAKKLKPKKRVYEIKRVQVPRH

SEQ ID NO: 55860 - protein, 38 aa, Artificial Sequence; identical to SEQ ID NO: 13629
  Cyclic GFR-binding peptide
  MOD_RES (33), (33): Xaa is C or S

SEQ ID NO: 55861 - protein, 26 aa, Artificial Sequence
  Cyclic GFR-binding peptide
HQLFVQVEKHQGQHPKIRVKAMKVSR

SEQ ID NO: 55862 - protein, 33 aa, Artificial Sequence
  Cyclic GFR-binding peptide
  MOD_RES (32), (32): Xaa is C or S
HQLFVTAKKHQGQHPKIRIKRMQVPREETPVXE

SEQ ID NO: 55863 - protein, 35 aa, Artificial Sequence; identical to SEQ ID NO: 13632
  Cyclic GFR-binding peptide
  MOD_RES (33), (33): Xaa is C or S

SEQ ID NO: 55864 - protein, 30 aa, Artificial Sequence
  Cyclic GFR-binding peptide
KNHQLFVQVEKHQGQHPKIRVKAMKVSREE

SEQ ID NO: 55865 - protein, 39 aa, Artificial Sequence; identical to SEQ ID NO: 13633
  Cyclic GFR-binding peptide
  MOD_RES (1), (35): Xaa is C or S

SEQ ID NO: 55866 - protein, 41 aa, Artificial Sequence; identical to SEQ ID NO: 13634
  Cyclic GFR-binding peptide
  MOD_RES (1), (3), (37): Xaa is C or S

SEQ ID NO: 55867 - protein, 37 aa, Artificial Sequence; identical to SEQ ID NO: 13635
  Cyclic GFR-binding peptide
  MOD_RES (37), (37): Xaa is C or S

SEQ ID NO: 55868 - protein, 29 aa, Artificial Sequence
  Cyclic GFR-binding peptide
LHDELTSMEGIFIPKKRVIEMIQVTINSL

SEQ ID NO: 55869 - protein, 42 aa, Artificial Sequence; identical to SEQ ID NO: 13636
  Cyclic GFR-binding peptide
  MOD_RES (1), (3), (37): Xaa is C or S

SEQ ID NO: 55870 - protein, 38 aa, Artificial Sequence; identical to SEQ ID NO: 13637
  Cyclic GFR-binding peptide
  MOD_RES (35), (35): Xaa is C or S

SEQ ID NO: 55871 - protein, 23 aa, Artificial Sequence
  Cyclic GFR-binding peptide
SMEGIHQGQHPKIRMIQMTINSQ

SEQ ID NO: 55872 - protein, 33 aa, Artificial Sequence
  Cyclic GFR-binding peptide
  MOD_RES (31), (31): Xaa is C or S
TSMEGLFIPKKRVIEMIQVTINSLQVQTPRXQV

SEQ ID NO: 55873 - protein, 38 aa, Artificial Sequence; identical to SEQ ID NO: 13638
  Cyclic GFR-binding peptide
  MOD_RES (1), (3): Xaa is C or S

SEQ ID NO: 55874 - protein, 41 aa, Artificial Sequence; identical to SEQ ID NO: 13639
  Cyclic GFR-binding peptide
  MOD_RES (2), (39): Xaa is C or S

SEQ ID NO: 55875 - protein, 35 aa, Artificial Sequence
  Cyclic GFR-binding peptide
  MOD_RES (32), (32): Xaa is C or S
HQLFVTAKKHQGQHPKIRIKRMQVPREETPVXELG

SEQ ID NO: 55876 - protein, 40 aa, Artificial Sequence; identical to SEQ ID NO: 13640
  Cyclic GFR-binding peptide
  MOD_RES (2), (4): Xaa is C or S

SEQ ID NO: 55877 - protein, 31 aa, Artificial Sequence
  Cyclic GFR-binding peptide
ELHEELRSMEGILKPKKRVYEMIQVTINSHH

SEQ ID NO: 55878 - protein, 30 aa, Artificial Sequence
  Cyclic GFR-binding peptide
ALHDELTSMEGIFIPKKRVIEMIQVTINSL

SEQ ID NO: 55879 - protein, 37 aa, Artificial Sequence; identical to SEQ ID NO: 13641
  Cyclic GFR-binding peptide
  MOD_RES (1), (1): Xaa is C or S

SEQ ID NO: 55880 - protein, 40 aa, Artificial Sequence; identical to SEQ ID NO: 13642
  Cyclic GFR-binding peptide
  MOD_RES (1), (35): Xaa is C or S

SEQ ID NO: 55881 - protein, 33 aa, Artificial Sequence
  Cyclic GFR-binding peptide
  MOD_RES (1), (3): Xaa is C or S
XKXALHDELTSMEGIFIPKKRVIEMIQVTINSL

SEQ ID NO: 55882 - protein, 27 aa, Artificial Sequence
  Cyclic GFR-binding peptide
ELSMEGIHQGQHPKIRMIQMTINSQGT

SEQ ID NO: 55883 - protein, 38 aa, Artificial Sequence; identical to SEQ ID NO: 13644
  Cyclic GFR-binding peptide
  MOD_RES (1), (3), (37): Xaa is C or S

SEQ ID NO: 55884 - protein, 36 aa, Artificial Sequence
  Cyclic GFR-binding peptide
  MOD_RES (2), (4): Xaa is C or S
AXAXELHEELRSMEGILKPKKRVYEMIQVTINSHHV

SEQ ID NO: 55885 - protein, 41 aa, Artificial Sequence; identical to SEQ ID NO: 13646
  Cyclic GFR-binding peptide
  MOD_RES (2), (4), (38): Xaa is C or S

SEQ ID NO: 55886 - protein, 30 aa, Artificial Sequence
  Cyclic GFR-binding peptide
HQLFSMEGLHQGQHPKIRMIQMTINSEETP

SEQ ID NO: 55887 - protein, 42 aa, Artificial Sequence; identical to SEQ ID NO: 13647
  Cyclic GFR-binding peptide
  MOD_RES (1), (3), (40): Xaa is C or S

SEQ ID NO: 55888 - protein, 37 aa, Artificial Sequence
  Cyclic GFR-binding peptide
  MOD_RES (34), (34): Xaa is C or S
DELTSMEGIFIPKKRVIEMIQVTINSLQVQTPRXQVN

SEQ ID NO: 55889 - protein, 37 aa, Artificial Sequence; identical to SEQ ID NO: 13650
  Cyclic GFR-binding peptide
  MOD_RES (1), (3), (37): Xaa is C or S

SEQ ID NO: 55890 - protein, 26 aa, Artificial Sequence
  Cyclic GFR-binding peptide
HQLFVTAKKHQGQHPKIRIKRMQVPR

SEQ ID NO: 55891 - protein, 39 aa, Artificial Sequence; identical to SEQ ID NO: 13651
  Cyclic GFR-binding peptide
  MOD_RES (36), (36): Xaa is C or S

SEQ ID NO: 55892 - protein, 30 aa, Artificial Sequence
  Cyclic GFR-binding peptide
EELVQVEKHQGQHPKIRVKAMKVSRQGTPV

SEQ ID NO: 55893 - protein, 42 aa, Artificial Sequence; identical to SEQ ID NO: 13653
  Cyclic GFR-binding peptide
  MOD_RES (2), (4), (41): Xaa is C or S

SEQ ID NO: 55894 - protein, 29 aa, Artificial Sequence
  Cyclic GFR-binding peptide
  MOD_RES (28), (28): Xaa is C or S
VTAKKHQGQHPKIRIKRMQVPREETPVXE

SEQ ID NO: 55895 - protein, 23 aa, Artificial Sequence
  Cyclic GFR-binding peptide
SMEGILKPKKRVYEMIQVTINSH

SEQ ID NO: 55896 - protein, 23 aa, Artificial Sequence
  Cyclic GFR-binding peptide
TSMEGLFIPKKRVIEMIQVTINS

SEQ ID NO: 55897 - protein, 42 aa, Artificial Sequence; identical to SEQ ID NO: 13656
  Cyclic GFR-binding peptide
  MOD_RES (2), (36): Xaa is C or S

SEQ ID NO: 55898 - protein, 31 aa, Artificial Sequence
  Cyclic GFR-binding peptide
  MOD_RES (30), (30): Xaa is C or S
ELSMEGIHQGQHPKIRMIQMTINSQGTPVXE

SEQ ID NO: 55899 - protein, 31 aa, Artificial Sequence
  Cyclic GFR-binding peptide
AAAAAAAAAVTAKKHQGQHPKIRIKRMQVPR

SEQ ID NO: 55900 - protein, 37 aa, Artificial Sequence; identical to SEQ ID NO: 13657
  Cyclic GFR-binding peptide
  MOD_RES (1), (1): Xaa is C or S

SEQ ID NO: 55901 - protein, 34 aa, Artificial Sequence
  Cyclic GFR-binding peptide
  MOD_RES (31), (31): Xaa is C or S
TVQVEKFIPKKRVIEVKAVKVSRLQVQTPRXQVN

SEQ ID NO: 55902 - protein, 26 aa, Artificial Sequence
  Cyclic GFR-binding peptide
QLFVQVEKHQGQHPKIRVKAMKVSRE

SEQ ID NO: 55903 - protein, 38 aa, Artificial Sequence; identical to SEQ ID NO: 13659
  Cyclic GFR-binding peptide
  MOD_RES (1), (3): Xaa is C or S

SEQ ID NO: 55904 - protein, 31 aa, Artificial Sequence
  Cyclic GFR-binding peptide
  MOD_RES (28), (28): Xaa is C or S
VQVEKHQGQHPKIRVKAMKVSREETPVXELG

SEQ ID NO: 55905 - protein, 38 aa, Artificial Sequence; identical to SEQ ID NO: 13660
  Cyclic GFR-binding peptide
  MOD_RES (33), (33): Xaa is C or S

SEQ ID NO: 55906 - protein, 40 aa, Artificial Sequence; identical to SEQ ID NO: 13662
  Cyclic GFR-binding peptide
  MOD_RES (1), (35): Xaa is C or S

SEQ ID NO: 55907 - protein, 25 aa, Artificial Sequence
  Cyclic GFR-binding peptide
ELTSMEGLFIPKKRVIEMIQVTINS

SEQ ID NO: 55908 - protein, 29 aa, Artificial Sequence
  Cyclic GFR-binding peptide
DELTSMEGLFIPKKRVIEMIQVTINSLQV

SEQ ID NO: 55909 - protein, 39 aa, Artificial Sequence; identical to SEQ ID NO: 13665
  Cyclic GFR-binding peptide
  MOD_RES (2), (4): Xaa is C or S

SEQ ID NO: 55910 - protein, 39 aa, Artificial Sequence; identical to SEQ ID NO: 13666
  Cyclic GFR-binding peptide
  MOD_RES (2), (39): Xaa is C or S

SEQ ID NO: 55911 - protein, 35 aa, Artificial Sequence
  Cyclic GFR-binding peptide
  MOD_RES (30), (30): Xaa is C or S
LFVQVEKHQGQHPKIRVKAMKVSREETPVXELGED

SEQ ID NO: 55912 - protein, 37 aa, Artificial Sequence; identical to SEQ ID NO: 13667
  Cyclic GFR-binding peptide
  MOD_RES (1), (35): Xaa is C or S

SEQ ID NO: 55913 - protein, 43 aa, Artificial Sequence; identical to SEQ ID NO: 13668
  Cyclic GFR-binding peptide
  MOD_RES (2), (4), (41): Xaa is C or S

SEQ ID NO: 55914 - protein, 24 aa, Artificial Sequence
  Cyclic GFR-binding peptide
LSMEGIHQGQHPKIRMIQMTINSQ

SEQ ID NO: 55915 - protein, 39 aa, Artificial Sequence; identical to SEQ ID NO: 13672
  Cyclic GFR-binding peptide
  MOD_RES (1), (35): Xaa is C or S

SEQ ID NO: 55916 - protein, 32 aa, Artificial Sequence
  Cyclic GFR-binding peptide
  MOD_RES (2), (2): Xaa is C or S
KXALHDELTSMEGIFIPKKRVIEMIQVTINSL

SEQ ID NO: 55917 - protein, 32 aa, Artificial Sequence
  Cyclic GFR-binding peptide
  MOD_RES (29), (29): Xaa is C or S
FSMEGLHQGQHPKIRMIQMTINSEETPVXELG

SEQ ID NO: 55918 - protein, 33 aa, Artificial Sequence
  Cyclic GFR-binding peptide
  MOD_RES (31), (31): Xaa is C or S
QLFSMEGLHQGQHPKIRMIQMTINSEETPVXEL

SEQ ID NO: 55919 - protein, 35 aa, Artificial Sequence
  Cyclic GFR-binding peptide
  MOD_RES (30), (30): Xaa is C or S
ELVTAKKHQGQHPKIRIKRMQVPRQGTPVXELGED

SEQ ID NO: 55920 - protein, 39 aa, Artificial Sequence; identical to SEQ ID NO: 13673
  Cyclic GFR-binding peptide
  MOD_RES (36), (36): Xaa is C or S

SEQ ID NO: 55921 - protein, 29 aa, Artificial Sequence
  Cyclic GFR-binding peptide
ALHDELTSMEGIFIPKKRVIEMIQVTINS

SEQ ID NO: 55922 - protein, 27 aa, Artificial Sequence
  Cyclic GFR-binding peptide
DELTVQVEKFIPKKRVIEVKAVKVSRL

SEQ ID NO: 55923 - protein, 38 aa, Artificial Sequence; identical to SEQ ID NO: 13676
  Cyclic GFR-binding peptide
  MOD_RES (1), (3), (37): Xaa is C or S

SEQ ID NO: 55924 - protein, 38 aa, Artificial Sequence; identical to SEQ ID NO: 13677
  Cyclic GFR-binding peptide
  MOD_RES (2), (2): Xaa is C or S

SEQ ID NO: 55925 - protein, 28 aa, Artificial Sequence
  Cyclic GFR-binding peptide
HQLFSMEGLHQGQHPKIRMIQMTINSEE

SEQ ID NO: 55926 - protein, 31 aa, Artificial Sequence
  Cyclic GFR-binding peptide
AAAAAAAAASMEGLLKPKKRVYEMIQVTINS

SEQ ID NO: 55927 - protein, 35 aa, Artificial Sequence
  Cyclic GFR-binding peptide
  MOD_RES (32), (32): Xaa is C or S
HEELSMEGIHQGQHPKIRMIQMTINSQGTPVXELG

SEQ ID NO: 55928 - protein, 37 aa, Artificial Sequence
  Cyclic GFR-binding peptide
  MOD_RES (33), (33): Xaa is C or S
ELTSMEGIFIPKKRVIEMIQVTINSLQVQTPRXQVNR

SEQ ID NO: 55929 - protein, 39 aa, Artificial Sequence; identical to SEQ ID NO: 13678
  Cyclic GFR-binding peptide
  MOD_RES (2), (36): Xaa is C or S

SEQ ID NO: 55930 - protein, 23 aa, Artificial Sequence
  Cyclic GFR-binding peptide
LSMEGIHQGQHPKIRMIQMTINS

SEQ ID NO: 55931 - protein, 36 aa, Artificial Sequence
  Cyclic GFR-binding peptide
  MOD_RES (32), (32): Xaa is C or S
HQLFSMEGLHQGQHPKIRMIQMTINSEETPVXELGE

SEQ ID NO: 55932 - protein, 25 aa, Artificial Sequence
  Cyclic GFR-binding peptide
LVQVEKHQGQHPKIRVKAMKVSRQG

SEQ ID NO: 55933 - protein, 31 aa, Artificial Sequence
  Cyclic GFR-binding peptide
DELTSMEGLFIPKKRVIEMIQVTINSLQVQT

SEQ ID NO: 55934 - protein, 38 aa, Artificial Sequence; identical to SEQ ID NO: 13679
  Cyclic GFR-binding peptide
  MOD_RES (2), (4): Xaa is C or S

SEQ ID NO: 55935 - protein, 35 aa, Artificial Sequence
  Cyclic GFR-binding peptide
  MOD_RES (32), (32): Xaa is C or S
HQLFVQVEKHQGQHPKIRVKAMKVSREETPVXELG

SEQ ID NO: 55936 - protein, 40 aa, Artificial Sequence; identical to SEQ ID NO: 13680
  Cyclic GFR-binding peptide
  MOD_RES (1), (38): Xaa is C or S

SEQ ID NO: 55937 - protein, 29 aa, Artificial Sequence
  Cyclic GFR-binding peptide
HDELTSMEGIFIPKKRVIEMIQVTINSLQ

SEQ ID NO: 55938 - protein, 27 aa, Artificial Sequence
  Cyclic GFR-binding peptide
QLFSMEGLHQGQHPKIRMIQMTINSEE

SEQ ID NO: 55939 - protein, 36 aa, Artificial Sequence
  Cyclic GFR-binding peptide
  MOD_RES (2), (4): Xaa is C or S
AXAXELHEELRSMEGLLKPKKRVYEMIQVTINSHHV

SEQ ID NO: 55940 - protein, 25 aa, Artificial Sequence
  Cyclic GFR-binding peptide
LTSMEGLFIPKKRVIEMIQVTINSL

SEQ ID NO: 55941 - protein, 37 aa, Artificial Sequence; identical to SEQ ID NO: 13681
  Cyclic GFR-binding peptide
  MOD_RES (1), (3), (37): Xaa is C or S

SEQ ID NO: 55942 - protein, 23 aa, Artificial Sequence
  Cyclic GFR-binding peptide
VQVEKHQGQHPKIRVKAMKVSRQ

SEQ ID NO: 55943 - protein, 31 aa, Artificial Sequence
  Cyclic GFR-binding peptide
  MOD_RES (31), (31): Xaa is C or S
EELSMEGIHQGQHPKIRMIQMTINSQGTPVX

SEQ ID NO: 55944 - protein, 39 aa, Artificial Sequence; identical to SEQ ID NO: 13682
  Cyclic GFR-binding peptide
  MOD_RES (34), (34): Xaa is C or S

SEQ ID NO: 55945 - protein, 25 aa, Artificial Sequence
  Cyclic GFR-binding peptide
ELRSMEGILKPKKRVYEMIQVTINS

SEQ ID NO: 55946 - protein, 41 aa, Artificial Sequence; identical to SEQ ID NO: 13684
  Cyclic GFR-binding peptide
  MOD_RES (2), (39): Xaa is C or S

SEQ ID NO: 55947 - protein, 29 aa, Artificial Sequence
  Cyclic GFR-binding peptide
  MOD_RES (1), (1): Xaa is C or S
XKNHQLFSMEGLHQGQHPKIRMIQMTINS

SEQ ID NO: 55948 - protein, 26 aa, Artificial Sequence
  Cyclic GFR-binding peptide
LTSMEGLFIPKKRVIEMIQVTINSLQ

SEQ ID NO: 55949 - protein, 32 aa, Artificial Sequence
  Cyclic GFR-binding peptide
  MOD_RES (1), (1): Xaa is C or S
XALHDELTVQVEKFIPKKRVIEVKAVKVSRLQ

SEQ ID NO: 55950 - protein, 39 aa, Artificial Sequence; identical to SEQ ID NO: 13687
  Cyclic GFR-binding peptide
  MOD_RES (1), (3): Xaa is C or S

SEQ ID NO: 55951 - protein, 33 aa, Artificial Sequence
  Cyclic GFR-binding peptide
  MOD_RES (32), (32): Xaa is C or S
LRSMEGILKPKKRVYEMIQVTINSHHVRSPQXK

SEQ ID NO: 55952 - protein, 43 aa, Artificial Sequence; identical to SEQ ID NO: 13688
  Cyclic GFR-binding peptide
  MOD_RES (1), (3), (40): Xaa is C or S

SEQ ID NO: 55953 - protein, 33 aa, Artificial Sequence; identical to SEQ ID NO: 13689
  Cyclic GFR-binding peptide

SEQ ID NO: 55954 - protein, 44 aa, Artificial Sequence; identical to SEQ ID NO: 13691
  Cyclic GFR-binding peptide
  MOD_RES (1), (3), (40): Xaa is C or S

SEQ ID NO: 55955 - protein, 44 aa, Artificial Sequence; identical to SEQ ID NO: 13692
  Cyclic GFR-binding peptide
  MOD_RES (1), (3), (40): Xaa is C or S

SEQ ID NO: 55956 - protein, 38 aa, Artificial Sequence; identical to SEQ ID NO: 13693
  Cyclic GFR-binding peptide
  MOD_RES (2), (4): Xaa is C or S

SEQ ID NO: 55957 - protein, 33 aa, Artificial Sequence; identical to SEQ ID NO: 13697
  Cyclic GFR-binding peptide

SEQ ID NO: 55958 - protein, 35 aa, Artificial Sequence; identical to SEQ ID NO: 13698
  Cyclic GFR-binding peptide
  MOD_RES (1), (35): Xaa is C or S

SEQ ID NO: 55959 - protein, 34 aa, Artificial Sequence
  Cyclic GFR-binding peptide
  MOD_RES (1), (3): Xaa is C or S
XKXALHDELTVQVEKFIPKKRVIEVKAVKVSRLQ

SEQ ID NO: 55960 - protein, 33 aa, Artificial Sequence
  Cyclic GFR-binding peptide
  MOD_RES (2), (2): Xaa is C or S
KXALHDELTSMEGLFIPKKRVIEMIQVTINSLQ

SEQ ID NO: 55961 - protein, 39 aa, Artificial Sequence; identical to SEQ ID NO: 13700
  Cyclic GFR-binding peptide
  MOD_RES (2), (4): Xaa is C or S

SEQ ID NO: 55962 - protein, 31 aa, Artificial Sequence
  Cyclic GFR-binding peptide
HEELRSMEGLLKPKKRVYEMIQVTINSHHVR

SEQ ID NO: 55963 - protein, 37 aa, Artificial Sequence; identical to SEQ ID NO: 13702
  Cyclic GFR-binding peptide
  MOD_RES (2), (36): Xaa is C or S

SEQ ID NO: 55964 - protein, 27 aa, Artificial Sequence
  Cyclic GFR-binding peptide
HEELVTAKKHQGQHPKIRIKRMQVPRQ

SEQ ID NO: 55965 - protein, 30 aa, Artificial Sequence
  Cyclic GFR-binding peptide
LHEELRSMEGILKPKKRVYEMIQVTINSHH

SEQ ID NO: 55966 - protein, 34 aa, Artificial Sequence; identical to SEQ ID NO: 13705
  Cyclic GFR-binding peptide
  MOD_RES (34), (34): Xaa is C or S

SEQ ID NO: 55967 - protein, 32 aa, Artificial Sequence
  Cyclic GFR-binding peptide
  MOD_RES (32), (32): Xaa is C or S
LTSMEGIFIPKKRVIEMIQVTINSLQVQTPRX

SEQ ID NO: 55968 - protein, 37 aa, Artificial Sequence; identical to SEQ ID NO: 13708
  Cyclic GFR-binding peptide
  MOD_RES (33), (33): Xaa is C or S

SEQ ID NO: 55969 - protein, 33 aa, Artificial Sequence
  Cyclic GFR-binding peptide
  MOD_RES (33), (33): Xaa is C or S
ELTSMEGLFIPKKRVIEMIQVTINSLQVQTPRX

SEQ ID NO: 55970 - protein, 32 aa, Artificial Sequence
  Cyclic GFR-binding peptide
  MOD_RES (1), (1): Xaa is C or S
XQSHEELVTAKKHQGQHPKIRIKRMQVPRQGT

SEQ ID NO: 55971 - protein, 38 aa, Artificial Sequence; identical to SEQ ID NO: 13710
  Cyclic GFR-binding peptide
  MOD_RES (2), (4): Xaa is C or S

SEQ ID NO: 55972 - protein, 30 aa, Artificial Sequence
  Cyclic GFR-binding peptide
  MOD_RES (28), (28): Xaa is C or S
SMEGIHQGQHPKIRMIQMTINSQGTPVXEL

SEQ ID NO: 55973 - protein, 29 aa, Artificial Sequence
  Cyclic GFR-binding peptide
KNHQLFSMEGLHQGQHPKIRMIQMTINSE

SEQ ID NO: 55974 - protein, 32 aa, Artificial Sequence; identical to SEQ ID NO: 2157
  Cyclic GFR-binding peptide

SEQ ID NO: 55975 - protein, 38 aa, Artificial Sequence; identical to SEQ ID NO: 13713
  Cyclic GFR-binding peptide
  MOD_RES (1), (3), (37): Xaa is C or S

SEQ ID NO: 55976 - protein, 35 aa, Artificial Sequence
  Cyclic GFR-binding peptide
  MOD_RES (2), (4): Xaa is C or S
RXEXQSHEELSMEGIHQGQHPKIRMIQMTINSQGT

SEQ ID NO: 55977 - protein, 39 aa, Artificial Sequence; identical to SEQ ID NO: 13714
  Cyclic GFR-binding peptide
  MOD_RES (37), (37): Xaa is C or S

SEQ ID NO: 55978 - protein, 27 aa, Artificial Sequence
  Cyclic GFR-binding peptide
LFVTAKKHQGQHPKIRIKRMQVPREET

SEQ ID NO: 55979 - protein, 36 aa, Artificial Sequence; identical to SEQ ID NO: 13716
  Cyclic GFR-binding peptide
  MOD_RES (33), (33): Xaa is C or S

SEQ ID NO: 55980 - protein, 33 aa, Artificial Sequence
  Cyclic GFR-binding peptide
  MOD_RES (30), (30): Xaa is C or S
ELVTAKKHQGQHPKIRIKRMQVPRQGTPVXELG

SEQ ID NO: 55981 - protein, 25 aa, Artificial Sequence
  Cyclic GFR-binding peptide
TSMEGIFIPKKRVIEMIQVTINSLQ

SEQ ID NO: 55982 - protein, 28 aa, Artificial Sequence
  Cyclic GFR-binding peptide
LVTAKKHQGQHPKIRIKRMQVPRQGTPV

SEQ ID NO: 55983 - protein, 31 aa, Artificial Sequence
  Cyclic GFR-binding peptide
EELRVTAKKLKPKKRVYEIKRVQVPRHHVRS

SEQ ID NO: 55984 - protein, 37 aa, Artificial Sequence; identical to SEQ ID NO: 13718
  Cyclic GFR-binding peptide
  MOD_RES (1), (3), (37): Xaa is C or S

SEQ ID NO: 55985 - protein, 39 aa, Artificial Sequence; identical to SEQ ID NO: 13720
  Cyclic GFR-binding peptide
  MOD_RES (33), (33): Xaa is C or S

SEQ ID NO: 55986 - protein, 36 aa, Artificial Sequence; identical to SEQ ID NO: 13721
  Cyclic GFR-binding peptide
  MOD_RES (2), (36): Xaa is C or S

SEQ ID NO: 55987 - protein, 35 aa, Artificial Sequence
  Cyclic GFR-binding peptide
  MOD_RES (29), (29): Xaa is C or S
LVQVEKHQGQHPKIRVKAMKVSRQGTPVXELGEDN

SEQ ID NO: 55988 - protein, 41 aa, Artificial Sequence; identical to SEQ ID NO: 13722
  Cyclic GFR-binding peptide
  MOD_RES (1), (35): Xaa is C or S

SEQ ID NO: 55989 - protein, 28 aa, Artificial Sequence
  Cyclic GFR-binding peptide
LHDELTSMEGLFIPKKRVIEMIQVTINS

SEQ ID NO: 55990 - protein, 36 aa, Artificial Sequence; identical to SEQ ID NO: 13723
  Cyclic GFR-binding peptide
  MOD_RES (33), (33): Xaa is C or S

SEQ ID NO: 55991 - protein, 33 aa, Artificial Sequence
  Cyclic GFR-binding peptide
  MOD_RES (30), (30): Xaa is C or S
SMEGLLKPKKRVYEMIQVTINSHHVRSPQXKVS

SEQ ID NO: 55992 - protein, 29 aa, Artificial Sequence
  Cyclic GFR-binding peptide
HDELTSMEGLFIPKKRVIEMIQVTINSLQ

SEQ ID NO: 55993 - protein, 35 aa, Artificial Sequence
  Cyclic GFR-binding peptide
  MOD_RES (1), (3): Xaa is C or S
XKXALHDELTSMEGIFIPKKRVIEMIQVTINSLQV

SEQ ID NO: 55994 - protein, 31 aa, Artificial Sequence
  Cyclic GFR-binding peptide
ALHDELTSMEGIFIPKKRVIEMIQVTINSLQ

SEQ ID NO: 55995 - protein, 35 aa, Artificial Sequence
  Cyclic GFR-binding peptide
  MOD_RES (2), (4): Xaa is C or S
EXKXALHDELTSMEGLFIPKKRVIEMIQVTINSLQ

SEQ ID NO: 55996 - protein, 43 aa, Artificial Sequence; identical to SEQ ID NO: 13730
  Cyclic GFR-binding peptide
  MOD_RES (2), (39): Xaa is C or S

SEQ ID NO: 55997 - protein, 30 aa, Artificial Sequence
  Cyclic GFR-binding peptide
ELTSMEGLFIPKKRVIEMIQVTINSLQVQT

SEQ ID NO: 55998 - protein, 35 aa, Artificial Sequence
  Cyclic GFR-binding peptide
  MOD_RES (1), (3): Xaa is C or S
XKXALHDELTSMEGLFIPKKRVIEMIQVTINSLQV

SEQ ID NO: 55999 - protein, 32 aa, Artificial Sequence
  Cyclic GFR-binding peptide
  MOD_RES (2), (4): Xaa is C or S
RXEXQSHEELSMEGIHQGQHPKIRMIQMTINS

SEQ ID NO: 56000 - protein, 37 aa, Artificial Sequence; identical to SEQ ID NO: 13731
  Cyclic GFR-binding peptide
  MOD_RES (34), (34): Xaa is C or S

SEQ ID NO: 56001 - protein, 37 aa, Artificial Sequence; identical to SEQ ID NO: 13732
  Cyclic GFR-binding peptide
  MOD_RES (1), (3), (37): Xaa is C or S

SEQ ID NO: 56002 - protein, 33 aa, Artificial Sequence
  Cyclic GFR-binding peptide
  MOD_RES (1), (1): Xaa is C or S
XQSHEELSMEGIHQGQHPKIRMIQMTINSQGTP

SEQ ID NO: 56003 - protein, 25 aa, Artificial Sequence
  Cyclic GFR-binding peptide
ELVTAKKHQGQHPKIRIKRMQVPRQ

SEQ ID NO: 56004 - protein, 38 aa, Artificial Sequence; identical to SEQ ID NO: 13733
  Cyclic GFR-binding peptide
  MOD_RES (2), (2): Xaa is C or S

SEQ ID NO: 56005 - protein, 41 aa, Artificial Sequence; identical to SEQ ID NO: 13734
  Cyclic GFR-binding peptide
  MOD_RES (2), (4), (41): Xaa is C or S

SEQ ID NO: 56006 - protein, 39 aa, Artificial Sequence; identical to SEQ ID NO: 13735
  Cyclic GFR-binding peptide
  MOD_RES (2), (4): Xaa is C or S

SEQ ID NO: 56007 - protein, 37 aa, Artificial Sequence; identical to SEQ ID NO: 13736
  Cyclic GFR-binding peptide
  MOD_RES (2), (4): Xaa is C or S

SEQ ID NO: 56008 - protein, 28 aa, Artificial Sequence
  Cyclic GFR-binding peptide
VQVEKFIPKKRVIEVKAVKVSRLQVQTP

SEQ ID NO: 56009 - protein, 33 aa, Artificial Sequence
  Cyclic GFR-binding peptide
  MOD_RES (33), (33): Xaa is C or S
ELRSMEGILKPKKRVYEMIQVTINSHHVRSPQX

SEQ ID NO: 56010 - protein, 44 aa, Artificial Sequence; identical to SEQ ID NO: 13738
  Cyclic GFR-binding peptide
  MOD_RES (2), (4), (38): Xaa is C or S

SEQ ID NO: 56011 - protein, 41 aa, Artificial Sequence; identical to SEQ ID NO: 13739
  Cyclic GFR-binding peptide
  MOD_RES (2), (4), (38): Xaa is C or S

SEQ ID NO: 56012 - protein, 29 aa, Artificial Sequence
  Cyclic GFR-binding peptide
LHDELTVQVEKFIPKKRVIEVKAVKVSRL

SEQ ID NO: 56013 - protein, 33 aa, Artificial Sequence
  Cyclic GFR-binding peptide
  MOD_RES (1), (1): Xaa is C or S
XQSHEELVTAKKHQGQHPKIRIKRMQVPRQGTP

SEQ ID NO: 56014 - protein, 35 aa, Artificial Sequence; identical to SEQ ID NO: 13742
  Cyclic GFR-binding peptide
  MOD_RES (1), (35): Xaa is C or S

SEQ ID NO: 56015 - protein, 37 aa, Artificial Sequence; identical to SEQ ID NO: 13743
  Cyclic GFR-binding peptide
  MOD_RES (1), (1): Xaa is C or S

SEQ ID NO: 56016 - protein, 35 aa, Artificial Sequence
  Cyclic GFR-binding peptide
  MOD_RES (32), (32): Xaa is C or S
LRSMEGLLKPKKRVYEMIQVTINSHHVRSPQXKVS

SEQ ID NO: 56017 - protein, 35 aa, Artificial Sequence
  Cyclic GFR-binding peptide
  MOD_RES (34), (34): Xaa is C or S
EELRSMEGILKPKKRVYEMIQVTINSHHVRSPQXK

SEQ ID NO: 56018 - protein, 40 aa, Artificial Sequence; identical to SEQ ID NO: 13745
  Cyclic GFR-binding peptide
  MOD_RES (1), (3), (40): Xaa is C or S

SEQ ID NO: 56019 - protein, 25 aa, Artificial Sequence
  Cyclic GFR-binding peptide
ELTSMEGIFIPKKRVIEMIQVTINS

SEQ ID NO: 56020 - protein, 33 aa, Artificial Sequence
  Cyclic GFR-binding peptide
  MOD_RES (2), (2): Xaa is C or S
KXALHDELTSMEGIFIPKKRVIEMIQVTINSLQ

SEQ ID NO: 56021 - protein, 35 aa, Artificial Sequence
  Cyclic GFR-binding peptide
  MOD_RES (1), (3): Xaa is C or S
XAXELHEELRVTAKKLKPKKRVYEIKRVQVPRHHV

SEQ ID NO: 56022 - protein, 39 aa, Artificial Sequence; identical to SEQ ID NO: 13753
  Cyclic GFR-binding peptide
  MOD_RES (1), (3): Xaa is C or S

SEQ ID NO: 56023 - protein, 32 aa, Artificial Sequence
  Cyclic GFR-binding peptide
  MOD_RES (1), (3): Xaa is C or S
XEXQSHEELVQVEKHQGQHPKIRVKAMKVSRQ

SEQ ID NO: 56024 - protein, 32 aa, Artificial Sequence
  Cyclic GFR-binding peptide
  MOD_RES (2), (2): Xaa is C or S
EXQSHEELSMEGIHQGQHPKIRMIQMTINSQG

SEQ ID NO: 56025 - protein, 38 aa, Artificial Sequence; identical to SEQ ID NO: 13754
  Cyclic GFR-binding peptide
  MOD_RES (35), (35): Xaa is C or S

SEQ ID NO: 56026 - protein, 29 aa, Artificial Sequence
  Cyclic GFR-binding peptide
NHQLFSMEGLHQGQHPKIRMIQMTINSEE

SEQ ID NO: 56027 - protein, 37 aa, Artificial Sequence; identical to SEQ ID NO: 13755
  Cyclic GFR-binding peptide
  MOD_RES (33), (33): Xaa is C or S

SEQ ID NO: 56028 - protein, 40 aa, Artificial Sequence; identical to SEQ ID NO: 13756
  Cyclic GFR-binding peptide
  MOD_RES (2), (4), (38): Xaa is C or S

SEQ ID NO: 56029 - protein, 32 aa, Artificial Sequence
  Cyclic GFR-binding peptide
  MOD_RES (1), (3): Xaa is C or S
XAXELHEELRSMEGILKPKKRVYEMIQVTINS

SEQ ID NO: 56030 - protein, 29 aa, Artificial Sequence
  Cyclic GFR-binding peptide
  MOD_RES (1), (1): Xaa is C or S
XQSHEELVTAKKHQGQHPKIRIKRMQVPR

SEQ ID NO: 56031 - protein, 27 aa, Artificial Sequence
  Cyclic GFR-binding peptide
QLFVTAKKHQGQHPKIRIKRMQVPREE

SEQ ID NO: 56032 - protein, 32 aa, Artificial Sequence
  Cyclic GFR-binding peptide
  MOD_RES (32), (32): Xaa is C or S
LRVTAKKLKPKKRVYEIKRVQVPRHHVRSPQX

SEQ ID NO: 56033 - protein, 33 aa, Artificial Sequence
  Cyclic GFR-binding peptide
  MOD_RES (28), (28): Xaa is C or S
VTAKKHQGQHPKIRIKRMQVPRQGTPVXELGED

SEQ ID NO: 56034 - protein, 33 aa, Artificial Sequence
  Cyclic GFR-binding peptide
ELHEELRSMEGLLKPKKRVYEMIQVTINSHHVR

SEQ ID NO: 56035 - protein, 36 aa, Artificial Sequence; identical to SEQ ID NO: 13759
  Cyclic GFR-binding peptide
  MOD_RES (1), (1): Xaa is C or S

SEQ ID NO: 56036 - protein, 32 aa, Artificial Sequence
  Cyclic GFR-binding peptide
  MOD_RES (29), (29): Xaa is C or S
FVQVEKHQGQHPKIRVKAMKVSREETPVXELG

SEQ ID NO: 56037 - protein, 39 aa, Artificial Sequence; identical to SEQ ID NO: 13761
  Cyclic GFR-binding peptide
  MOD_RES (2), (4): Xaa is C or S

SEQ ID NO: 56038 - protein, 41 aa, Artificial Sequence; identical to SEQ ID NO: 13762
  Cyclic GFR-binding peptide
  MOD_RES (37), (37): Xaa is C or S

SEQ ID NO: 56039 - protein, 42 aa, Artificial Sequence; identical to SEQ ID NO: 13763
  Cyclic GFR-binding peptide
  MOD_RES (2), (4), (38): Xaa is C or S

SEQ ID NO: 56040 - protein, 39 aa, Artificial Sequence; identical to SEQ ID NO: 13764
  Cyclic GFR-binding peptide
  MOD_RES (1), (38): Xaa is C or S

SEQ ID NO: 56041 - protein, 32 aa, Artificial Sequence; identical to SEQ ID NO: 2176
  Cyclic GFR-binding peptide

SEQ ID NO: 56042 - protein, 36 aa, Artificial Sequence; identical to SEQ ID NO: 13766
  Cyclic GFR-binding peptide
  MOD_RES (2), (2): Xaa is C or S

SEQ ID NO: 56043 - protein, 34 aa, Artificial Sequence
  Cyclic GFR-binding peptide
  MOD_RES (32), (32): Xaa is C or S
LRVTAKKLKPKKRVYEIKRVQVPRHHVRSPQXKV

SEQ ID NO: 56044 - protein, 29 aa, Artificial Sequence
  Cyclic GFR-binding peptide
  MOD_RES (29), (29): Xaa is C or S
LVTAKKHQGQHPKIRIKRMQVPRQGTPVX

SEQ ID NO: 56045 - protein, 43 aa, Artificial Sequence; identical to SEQ ID NO: 13769
  Cyclic GFR-binding peptide
  MOD_RES (1), (3), (37): Xaa is C or S

SEQ ID NO: 56046 - protein, 38 aa, Artificial Sequence; identical to SEQ ID NO: 13770
  Cyclic GFR-binding peptide
  MOD_RES (35), (35): Xaa is C or S

SEQ ID NO: 56047 - protein, 32 aa, Artificial Sequence
  Cyclic GFR-binding peptide
  MOD_RES (1), (3): Xaa is C or S
XAXELHEELRVTAKKLKPKKRVYEIKRVQVPR

SEQ ID NO: 56048 - protein, 25 aa, Artificial Sequence
  Cyclic GFR-binding peptide
ELRSMEGLLKPKKRVYEMIQVTINS

SEQ ID NO: 56049 - protein, 34 aa, Artificial Sequence
  Cyclic GFR-binding peptide
  MOD_RES (1), (3): Xaa is C or S
XAXELHEELRSMEGLLKPKKRVYEMIQVTINSHH

SEQ ID NO: 56050 - protein, 34 aa, Artificial Sequence
  Cyclic GFR-binding peptide
  MOD_RES (2), (4): Xaa is C or S
RXEXKNHQLFVTAKKHQGQHPKIRIKRMQVPREE

SEQ ID NO: 56051 - protein, 29 aa, Artificial Sequence
  Cyclic GFR-binding peptide
  MOD_RES (1), (1): Xaa is C or S
XKNHQLFVTAKKHQGQHPKIRIKRMQVPR

SEQ ID NO: 56052 - protein, 32 aa, Artificial Sequence; identical to SEQ ID NO: 13772
  Cyclic GFR-binding peptide

SEQ ID NO: 56053 - protein, 34 aa, Artificial Sequence
  Cyclic GFR-binding peptide
  MOD_RES (29), (29): Xaa is C or S
LSMEGIHQGQHPKIRMIQMTINSQGTPVXELGED

SEQ ID NO: 56054 - protein, 29 aa, Artificial Sequence
  Cyclic GFR-binding peptide
SHEELSMEGIHQGQHPKIRMIQMTINSQG

SEQ ID NO: 56055 - protein, 39 aa, Artificial Sequence; identical to SEQ ID NO: 13774
  Cyclic GFR-binding peptide
  MOD_RES (33), (33): Xaa is C or S

SEQ ID NO: 56056 - protein, 37 aa, Artificial Sequence; identical to SEQ ID NO: 13775
  Cyclic GFR-binding peptide
  MOD_RES (2), (36): Xaa is C or S

SEQ ID NO: 56057 - protein, 32 aa, Artificial Sequence
  Cyclic GFR-binding peptide
LHEELRSMEGILKPKKRVYEMIQVTINSHHVR

SEQ ID NO: 56058 - protein, 31 aa, Artificial Sequence
  Cyclic GFR-binding peptide
HDELTVQVEKFIPKKRVIEVKAVKVSRLQVQ

SEQ ID NO: 56059 - protein, 25 aa, Artificial Sequence
  Cyclic GFR-binding peptide
LFVTAKKHQGQHPKIRIKRMQVPRE

SEQ ID NO: 56060 - protein, 34 aa, Artificial Sequence
  Cyclic GFR-binding peptide
  MOD_RES (32), (32): Xaa is C or S
LTSMEGLFIPKKRVIEMIQVTINSLQVQTPRXQV

SEQ ID NO: 56061 - protein, 26 aa, Artificial Sequence
  Cyclic GFR-binding peptide
FVQVEKHQGQHPKIRVKAMKVSREET

SEQ ID NO: 56062 - protein, 29 aa, Artificial Sequence
  Cyclic GFR-binding peptide
LRSMEGILKPKKRVYEMIQVTINSHHVRS

SEQ ID NO: 56063 - protein, 26 aa, Artificial Sequence
  Cyclic GFR-binding peptide
ELSMEGIHQGQHPKIRMIQMTINSQG

SEQ ID NO: 56064 - protein, 30 aa, Artificial Sequence
  Cyclic GFR-binding peptide
  MOD_RES (2), (2): Xaa is C or S
EXKNHQLFVQVEKHQGQHPKIRVKAMKVSR

SEQ ID NO: 56065 - protein, 28 aa, Artificial Sequence
  Cyclic GFR-binding peptide
ELTVQVEKFIPKKRVIEVKAVKVSRLQV

SEQ ID NO: 56066 - protein, 25 aa, Artificial Sequence
  Cyclic GFR-binding peptide
ELRVTAKKLKPKKRVYEIKRVQVPR

SEQ ID NO: 56067 - protein, 30 aa, Artificial Sequence
  Cyclic GFR-binding peptide
LTVQVEKFIPKKRVIEVKAVKVSRLQVQTP

SEQ ID NO: 56068 - protein, 28 aa, Artificial Sequence
  Cyclic GFR-binding peptide
QSHEELVTAKKHQGQHPKIRIKRMQVPR

SEQ ID NO: 56069 - protein, 41 aa, Artificial Sequence; identical to SEQ ID NO: 13779
  Cyclic GFR-binding peptide
  MOD_RES (1), (3), (40): Xaa is C or S

SEQ ID NO: 56070 - protein, 31 aa, Artificial Sequence
  Cyclic GFR-binding peptide
  MOD_RES (2), (2): Xaa is C or S
EXQSHEELSMEGIHQGQHPKIRMIQMTINSQ

SEQ ID NO: 56071 - protein, 32 aa, Artificial Sequence
  Cyclic GFR-binding peptide
  MOD_RES (28), (28): Xaa is C or S
VTAKKHQGQHPKIRIKRMQVPREETPVXELGE

SEQ ID NO: 56072 - protein, 41 aa, Artificial Sequence; identical to SEQ ID NO: 13782
  Cyclic GFR-binding peptide
  MOD_RES (1), (35): Xaa is C or S

SEQ ID NO: 56073 - protein, 38 aa, Artificial Sequence; identical to SEQ ID NO: 13783
  Cyclic GFR-binding peptide
  MOD_RES (2), (4): Xaa is C or S

SEQ ID NO: 56074 - protein, 32 aa, Artificial Sequence
  Cyclic GFR-binding peptide
  MOD_RES (32), (32): Xaa is C or S
HEELVTAKKHQGQHPKIRIKRMQVPRQGTPVX

SEQ ID NO: 56075 - protein, 37 aa, Artificial Sequence; identical to SEQ ID NO: 13788
  Cyclic GFR-binding peptide
  MOD_RES (1), (3): Xaa is C or S

SEQ ID NO: 56076 - protein, 37 aa, Artificial Sequence; identical to SEQ ID NO: 13789
  Cyclic GFR-binding peptide
  MOD_RES (33), (33): Xaa is C or S

SEQ ID NO: 56077 - protein, 28 aa, Artificial Sequence
  Cyclic GFR-binding peptide
SHEELVQVEKHQGQHPKIRVKAMKVSRQ

SEQ ID NO: 56078 - protein, 30 aa, Artificial Sequence
  Cyclic GFR-binding peptide
ELHEELRSMEGLLKPKKRVYEMIQVTINSH

SEQ ID NO: 56079 - protein, 23 aa, Artificial Sequence
  Cyclic GFR-binding peptide
VTAKKLKPKKRVYEIKRVQVPRH

SEQ ID NO: 56080 - protein, 41 aa, Artificial Sequence; identical to SEQ ID NO: 13791
  Cyclic GFR-binding peptide
  MOD_RES (1), (35): Xaa is C or S

SEQ ID NO: 56081 - protein, 43 aa, Artificial Sequence; identical to SEQ ID NO: 13792
  Cyclic GFR-binding peptide
  MOD_RES (2), (4), (38): Xaa is C or S

SEQ ID NO: 56082 - protein, 36 aa, Artificial Sequence; identical to SEQ ID NO: 13793
  Cyclic GFR-binding peptide
  MOD_RES (2), (2): Xaa is C or S

SEQ ID NO: 56083 - protein, 36 aa, Artificial Sequence; identical to SEQ ID NO: 13794
  Cyclic GFR-binding peptide
  MOD_RES (34), (34): Xaa is C or S

SEQ ID NO: 56084 - protein, 33 aa, Artificial Sequence; identical to SEQ ID NO: 13795
  Cyclic GFR-binding peptide
  MOD_RES (33), (33): Xaa is C or S

SEQ ID NO: 56085 - protein, 30 aa, Artificial Sequence
  Cyclic GFR-binding peptide
ELRSMEGLLKPKKRVYEMIQVTINSHHVRS

SEQ ID NO: 56086 - protein, 35 aa, Artificial Sequence
  Cyclic GFR-binding peptide
  MOD_RES (30), (30): Xaa is C or S
LFSMEGLHQGQHPKIRMIQMTINSEETPVXELGED

SEQ ID NO: 56087 - protein, 32 aa, Artificial Sequence; identical to SEQ ID NO: 13798
  Cyclic GFR-binding peptide

SEQ ID NO: 56088 - protein, 28 aa, Artificial Sequence
  Cyclic GFR-binding peptide
LTVQVEKFIPKKRVIEVKAVKVSRLQVQ

SEQ ID NO: 56089 - protein, 38 aa, Artificial Sequence; identical to SEQ ID NO: 13801
  Cyclic GFR-binding peptide
  MOD_RES (37), (37): Xaa is C or S

SEQ ID NO: 56090 - protein, 36 aa, Artificial Sequence
  Cyclic GFR-binding peptide
  MOD_RES (1), (3): Xaa is C or S
XKXALHDELTVQVEKFIPKKRVIEVKAVKVSRLQVQ

SEQ ID NO: 56091 - protein, 39 aa, Artificial Sequence; identical to SEQ ID NO: 13803
  Cyclic GFR-binding peptide
  MOD_RES (1), (35): Xaa is C or S

SEQ ID NO: 56092 - protein, 33 aa, Artificial Sequence; identical to SEQ ID NO: 13804
  Cyclic GFR-binding peptide
  MOD_RES (33), (33): Xaa is C or S

SEQ ID NO: 56093 - protein, 38 aa, Artificial Sequence
  Cyclic GFR-binding peptide
  MOD_RES (34), (34): Xaa is C or S
DELTSMEGIFIPKKRVIEMIQVTINSLQVQTPRXQVNR

SEQ ID NO: 56094 - protein, 34 aa, Artificial Sequence
  Cyclic GFR-binding peptide
  MOD_RES (30), (30): Xaa is C or S
SMEGIFIPKKRVIEMIQVTINSLQVQTPRXQVNR

SEQ ID NO: 56095 - protein, 33 aa, Artificial Sequence
  Cyclic GFR-binding peptide
  MOD_RES (30), (30): Xaa is C or S
LFVQVEKHQGQHPKIRVKAMKVSREETPVXELG

SEQ ID NO: 56096 - protein, 28 aa, Artificial Sequence
  Cyclic GFR-binding peptide
SHEELVTAKKHQGQHPKIRIKRMQVPRQ

SEQ ID NO: 56097 - protein, 37 aa, Artificial Sequence; identical to SEQ ID NO: 13809
  Cyclic GFR-binding peptide
  MOD_RES (1), (3): Xaa is C or S

SEQ ID NO: 56098 - protein, 35 aa, Artificial Sequence; identical to SEQ ID NO: 13810
  Cyclic GFR-binding peptide
  MOD_RES (2), (2): Xaa is C or S

SEQ ID NO: 56099 - protein, 44 aa, Artificial Sequence; identical to SEQ ID NO: 13811
  Cyclic GFR-binding peptide
  MOD_RES (2), (4), (38): Xaa is C or S

SEQ ID NO: 56100 - protein, 29 aa, Artificial Sequence
  Cyclic GFR-binding peptide
  MOD_RES (28), (28): Xaa is C or S
SMEGLHQGQHPKIRMIQMTINSEETPVXE

SEQ ID NO: 56101 - protein, 35 aa, Artificial Sequence
  Cyclic GFR-binding peptide
  MOD_RES (31), (31): Xaa is C or S
EELSMEGIHQGQHPKIRMIQMTINSQGTPVXELGE

SEQ ID NO: 56102 - protein, 34 aa, Artificial Sequence
  Cyclic GFR-binding peptide
  MOD_RES (31), (31): Xaa is C or S
TSMEGIFIPKKRVIEMIQVTINSLQVQTPRXQVN

SEQ ID NO: 56103 - protein, 35 aa, Artificial Sequence
  Cyclic GFR-binding peptide
  MOD_RES (29), (29): Xaa is C or S
FSMEGLHQGQHPKIRMIQMTINSEETPVXELGEDN

SEQ ID NO: 56104 - protein, 24 aa, Artificial Sequence
  Cyclic GFR-binding peptide
FVTAKKHQGQHPKIRIKRMQVPRE

SEQ ID NO: 56105 - protein, 34 aa, Artificial Sequence
  Cyclic GFR-binding peptide
  MOD_RES (34), (34): Xaa is C or S
DELTSMEGLFIPKKRVIEMIQVTINSLQVQTPRX

SEQ ID NO: 56106 - protein, 31 aa, Artificial Sequence
  Cyclic GFR-binding peptide
LHEELRSMEGLLKPKKRVYEMIQVTINSHHV

SEQ ID NO: 56107 - protein, 32 aa, Artificial Sequence; identical to SEQ ID NO: 13815
  Cyclic GFR-binding peptide

SEQ ID NO: 56108 - protein, 38 aa, Artificial Sequence; identical to SEQ ID NO: 13817
  Cyclic GFR-binding peptide
  MOD_RES (1), (3), (37): Xaa is C or S

SEQ ID NO: 56109 - protein, 41 aa, Artificial Sequence; identical to SEQ ID NO: 13818
  Cyclic GFR-binding peptide
  MOD_RES (2), (4), (41): Xaa is C or S

SEQ ID NO: 56110 - protein, 42 aa, Artificial Sequence; identical to SEQ ID NO: 13819
  Cyclic GFR-binding peptide
  MOD_RES (1), (3), (37): Xaa is C or S

SEQ ID NO: 56111 - protein, 33 aa, Artificial Sequence; identical to SEQ ID NO: 13820
  Cyclic GFR-binding peptide

SEQ ID NO: 56112 - protein, 42 aa, Artificial Sequence; identical to SEQ ID NO: 13821
  Cyclic GFR-binding peptide
  MOD_RES (2), (4), (41): Xaa is C or S

SEQ ID NO: 56113 - protein, 32 aa, Artificial Sequence; identical to SEQ ID NO: 13823
  Cyclic GFR-binding peptide

SEQ ID NO: 56114 - protein, 39 aa, Artificial Sequence; identical to SEQ ID NO: 13824
  Cyclic GFR-binding peptide
  MOD_RES (34), (34): Xaa is C or S

SEQ ID NO: 56115 - protein, 32 aa, Artificial Sequence
  Cyclic GFR-binding peptide
DELTSMEGIFIPKKRVIEMIQVTINSLQVQTP

SEQ ID NO: 56116 - protein, 29 aa, Artificial Sequence
  Cyclic GFR-binding peptide
HQLFVQVEKHQGQHPKIRVKAMKVSREET

SEQ ID NO: 56117 - protein, 31 aa, Artificial Sequence
  Cyclic GFR-binding peptide
  MOD_RES (31), (31): Xaa is C or S
QLFVTAKKHQGQHPKIRIKRMQVPREETPVX

SEQ ID NO: 56118 - protein, 32 aa, Artificial Sequence; identical to SEQ ID NO: 13825
  Cyclic GFR-binding peptide

SEQ ID NO: 56119 - protein, 35 aa, Artificial Sequence; identical to SEQ ID NO: 13827
  Cyclic GFR-binding peptide

SEQ ID NO: 56120 - protein, 32 aa, Artificial Sequence
  Cyclic GFR-binding peptide
  MOD_RES (1), (3): Xaa is C or S
XEXQSHEELVTAKKHQGQHPKIRIKRMQVPRQ

SEQ ID NO: 56121 - protein, 28 aa, Artificial Sequence
  Cyclic GFR-binding peptide
EELRSMEGILKPKKRVYEMIQVTINSHH

SEQ ID NO: 56122 - protein, 33 aa, Artificial Sequence
  Cyclic GFR-binding peptide
  MOD_RES (2), (2): Xaa is C or S
EXQSHEELVQVEKHQGQHPKIRVKAMKVSRQGT

SEQ ID NO: 56123 - protein, 28 aa, Artificial Sequence
  Cyclic GFR-binding peptide
VTAKKLKPKKRVYEIKRVQVPRHHVRSP

SEQ ID NO: 56124 - protein, 40 aa, Artificial Sequence; identical to SEQ ID NO: 13830
  Cyclic GFR-binding peptide
  MOD_RES (2), (39): Xaa is C or S

SEQ ID NO: 56125 - protein, 29 aa, Artificial Sequence
  Cyclic GFR-binding peptide
QSHEELVTAKKHQGQHPKIRIKRMQVPRQ

SEQ ID NO: 56126 - protein, 33 aa, Artificial Sequence
  Cyclic GFR-binding peptide
  MOD_RES (1), (1): Xaa is C or S
XKNHQLFVQVEKHQGQHPKIRVKAMKVSREETP

SEQ ID NO: 56127 - protein, 31 aa, Artificial Sequence
  Cyclic GFR-binding peptide
  MOD_RES (29), (29): Xaa is C or S
LVTAKKHQGQHPKIRIKRMQVPRQGTPVXEL

SEQ ID NO: 56128 - protein, 27 aa, Artificial Sequence
  Cyclic GFR-binding peptide
EELRSMEGILKPKKRVYEMIQVTINSH

SEQ ID NO: 56129 - protein, 37 aa, Artificial Sequence; identical to SEQ ID NO: 13833
  Cyclic GFR-binding peptide
  MOD_RES (2), (4): Xaa is C or S

SEQ ID NO: 56130 - protein, 27 aa, Artificial Sequence
  Cyclic GFR-binding peptide
VTAKKLKPKKRVYEIKRVQVPRHHVRS

SEQ ID NO: 56131 - protein, 34 aa, Artificial Sequence; identical to SEQ ID NO: 13834
  Cyclic GFR-binding peptide
  MOD_RES (34), (34): Xaa is C or S

SEQ ID NO: 56132 - protein, 37 aa, Artificial Sequence
  Cyclic GFR-binding peptide
  MOD_RES (2), (4): Xaa is C or S
EXKXALHDELTVQVEKFIPKKRVIEVKAVKVSRLQVQ

SEQ ID NO: 56133 - protein, 33 aa, Artificial Sequence
  Cyclic GFR-binding peptide
  MOD_RES (1), (1): Xaa is C or S
XALHDELTSMEGIFIPKKRVIEMIQVTINSLQV

SEQ ID NO: 56134 - protein, 22 aa, Artificial Sequence
  Cyclic GFR-binding peptide
VQVEKFIPKKRVIEVKAVKVSR

SEQ ID NO: 56135 - protein, 30 aa, Artificial Sequence
  Cyclic GFR-binding peptide
  MOD_RES (1), (1): Xaa is C or S
XQSHEELVQVEKHQGQHPKIRVKAMKVSRQ

SEQ ID NO: 56136 - protein, 31 aa, Artificial Sequence
  Cyclic GFR-binding peptide
LHDELTSMEGIFIPKKRVIEMIQVTINSLQV

SEQ ID NO: 56137 - protein, 34 aa, Artificial Sequence
  Cyclic GFR-binding peptide
  MOD_RES (2), (4): Xaa is C or S
AXAXELHEELRVTAKKLKPKKRVYEIKRVQVPRH

SEQ ID NO: 56138 - protein, 33 aa, Artificial Sequence; identical to SEQ ID NO: 13838
  Cyclic GFR-binding peptide
  MOD_RES (33), (33): Xaa is C or S

SEQ ID NO: 56139 - protein, 32 aa, Artificial Sequence
  Cyclic GFR-binding peptide
ELRVTAKKLKPKKRVYEIKRVQVPRHHVRSPQ

SEQ ID NO: 56140 - protein, 38 aa, Artificial Sequence
  Cyclic GFR-binding peptide
  MOD_RES (32), (32): Xaa is C or S
HEELVTAKKHQGQHPKIRIKRMQVPRQGTPVXELGEDN

SEQ ID NO: 56141 - protein, 41 aa, Artificial Sequence; identical to SEQ ID NO: 13840
  Cyclic GFR-binding peptide
  MOD_RES (2), (4), (38): Xaa is C or S

SEQ ID NO: 56142 - protein, 31 aa, Artificial Sequence
  Cyclic GFR-binding peptide
HEELVTAKKHQGQHPKIRIKRMQVPRQGTPV

SEQ ID NO: 56143 - protein, 34 aa, Artificial Sequence
  Cyclic GFR-binding peptide
  MOD_RES (28), (28): Xaa is C or S
SMEGLHQGQHPKIRMIQMTINSEETPVXELGEDN

SEQ ID NO: 56144 - protein, 41 aa, Artificial Sequence; identical to SEQ ID NO: 13842
  Cyclic GFR-binding peptide
  MOD_RES (1), (35): Xaa is C or S

SEQ ID NO: 56145 - protein, 36 aa, Artificial Sequence
  Cyclic GFR-binding peptide
  MOD_RES (32), (32): Xaa is C or S
LRSMEGLLKPKKRVYEMIQVTINSHHVRSPQXKVSS

SEQ ID NO: 56146 - protein, 34 aa, Artificial Sequence
  Cyclic GFR-binding peptide
  MOD_RES (30), (30): Xaa is C or S
LFVTAKKHQGQHPKIRIKRMQVPREETPVXELGE

SEQ ID NO: 56147 - protein, 30 aa, Artificial Sequence
  Cyclic GFR-binding peptide
RVTAKKLKPKKRVYEIKRVQVPRHHVRSPQ

SEQ ID NO: 56148 - protein, 35 aa, Artificial Sequence
  Cyclic GFR-binding peptide
  MOD_RES (33), (33): Xaa is C or S
ELTVQVEKFIPKKRVIEVKAVKVSRLQVQTPRXQV

SEQ ID NO: 56149 - protein, 29 aa, Artificial Sequence
  Cyclic GFR-binding peptide
LHEELRSMEGLLKPKKRVYEMIQVTINSH

SEQ ID NO: 56150 - protein, 28 aa, Artificial Sequence
  Cyclic GFR-binding peptide
QSHEELVQVEKHQGQHPKIRVKAMKVSR

SEQ ID NO: 56151 - protein, 39 aa, Artificial Sequence; identical to SEQ ID NO: 13844
  Cyclic GFR-binding peptide
  MOD_RES (2), (4): Xaa is C or S

SEQ ID NO: 56152 - protein, 33 aa, Artificial Sequence
  Cyclic GFR-binding peptide
  MOD_RES (2), (4): Xaa is C or S
AXAXELHEELRSMEGILKPKKRVYEMIQVTINS

SEQ ID NO: 56153 - protein, 34 aa, Artificial Sequence
  Cyclic GFR-binding peptide
  MOD_RES (28), (28): Xaa is C or S
VQVEKHQGQHPKIRVKAMKVSRQGTPVXELGEDN

SEQ ID NO: 56154 - protein, 32 aa, Artificial Sequence
  Cyclic GFR-binding peptide
  MOD_RES (2), (4): Xaa is C or S
RXEXQSHEELVQVEKHQGQHPKIRVKAMKVSR

SEQ ID NO: 56155 - protein, 40 aa, Artificial Sequence; identical to SEQ ID NO: 13846
  Cyclic GFR-binding peptide
  MOD_RES (1), (3), (37): Xaa is C or S

SEQ ID NO: 56156 - protein, 25 aa, Artificial Sequence
  Cyclic GFR-binding peptide
FSMEGLHQGQHPKIRMIQMTINSEE

SEQ ID NO: 56157 - protein, 31 aa, Artificial Sequence
  Cyclic GFR-binding peptide
AAAAAAAAASMEGIFIPKKRVIEMIQVTINS

SEQ ID NO: 56158 - protein, 30 aa, Artificial Sequence
  Cyclic GFR-binding peptide
DELTSMEGLFIPKKRVIEMIQVTINSLQVQ

SEQ ID NO: 56159 - protein, 33 aa, Artificial Sequence
  Cyclic GFR-binding peptide
  MOD_RES (1), (3): Xaa is C or S
XKXALHDELTVQVEKFIPKKRVIEVKAVKVSRL

SEQ ID NO: 56160 - protein, 33 aa, Artificial Sequence
  Cyclic GFR-binding peptide
  MOD_RES (32), (32): Xaa is C or S
LRSMEGLLKPKKRVYEMIQVTINSHHVRSPQXK

SEQ ID NO: 56161 - protein, 32 aa, Artificial Sequence
  Cyclic GFR-binding peptide
  MOD_RES (1), (3): Xaa is C or S
XEXQSHEELSMEGIHQGQHPKIRMIQMTINSQ

SEQ ID NO: 56162 - protein, 34 aa, Artificial Sequence
  Cyclic GFR-binding peptide
  MOD_RES (2), (2): Xaa is C or S
EXQSHEELVQVEKHQGQHPKIRVKAMKVSRQGTP

SEQ ID NO: 56163 - protein, 41 aa, Artificial Sequence; identical to SEQ ID NO: 13852
  Cyclic GFR-binding peptide
  MOD_RES (1), (3), (37): Xaa is C or S

SEQ ID NO: 56164 - protein, 36 aa, Artificial Sequence; identical to SEQ ID NO: 13854
  Cyclic GFR-binding peptide
  MOD_RES (36), (36): Xaa is C or S

SEQ ID NO: 56165 - protein, 34 aa, Artificial Sequence
  Cyclic GFR-binding peptide
  MOD_RES (1), (1): Xaa is C or S
XALHDELTVQVEKFIPKKRVIEVKAVKVSRLQVQ

SEQ ID NO: 56166 - protein, 26 aa, Artificial Sequence
  Cyclic GFR-binding peptide
HEELVTAKKHQGQHPKIRIKRMQVPR

SEQ ID NO: 56167 - protein, 38 aa, Artificial Sequence; identical to SEQ ID NO: 13855
  Cyclic GFR-binding peptide
  MOD_RES (2), (4): Xaa is C or S

SEQ ID NO: 56168 - protein, 30 aa, Artificial Sequence
  Cyclic GFR-binding peptide
  MOD_RES (1), (1): Xaa is C or S
XELHEELRSMEGILKPKKRVYEMIQVTINS

SEQ ID NO: 56169 - protein, 36 aa, Artificial Sequence
  Cyclic GFR-binding peptide
  MOD_RES (34), (34): Xaa is C or S
EELRVTAKKLKPKKRVYEIKRVQVPRHHVRSPQXKV

SEQ ID NO: 56170 - protein, 26 aa, Artificial Sequence
  Cyclic GFR-binding peptide
FSMEGLHQGQHPKIRMIQMTINSEET

SEQ ID NO: 56171 - protein, 33 aa, Artificial Sequence; identical to SEQ ID NO: 13862
  Cyclic GFR-binding peptide

SEQ ID NO: 56172 - protein, 31 aa, Artificial Sequence
  Cyclic GFR-binding peptide
HEELRSMEGILKPKKRVYEMIQVTINSHHVR

SEQ ID NO: 56173 - protein, 29 aa, Artificial Sequence
  Cyclic GFR-binding peptide
  MOD_RES (28), (28): Xaa is C or S
VTAKKHQGQHPKIRIKRMQVPRQGTPVXE

SEQ ID NO: 56174 - protein, 31 aa, Artificial Sequence
  Cyclic GFR-binding peptide
ELRSMEGILKPKKRVYEMIQVTINSHHVRSP

SEQ ID NO: 56175 - protein, 36 aa, Artificial Sequence; identical to SEQ ID NO: 13866
  Cyclic GFR-binding peptide
  MOD_RES (2), (36): Xaa is C or S

SEQ ID NO: 56176 - protein, 35 aa, Artificial Sequence; identical to SEQ ID NO: 13867
  Cyclic GFR-binding peptide

SEQ ID NO: 56177 - protein, 28 aa, Artificial Sequence
  Cyclic GFR-binding peptide
QLFVTAKKHQGQHPKIRIKRMQVPREET

SEQ ID NO: 56178 - protein, 44 aa, Artificial Sequence; identical to SEQ ID NO: 13870
  Cyclic GFR-binding peptide
  MOD_RES (2), (4), (38): Xaa is C or S

SEQ ID NO: 56179 - protein, 36 aa, Artificial Sequence
  Cyclic GFR-binding peptide
  MOD_RES (2), (4): Xaa is C or S
RXEXKNHQLFVQVEKHQGQHPKIRVKAMKVSREETP

SEQ ID NO: 56180 - protein, 26 aa, Artificial Sequence
  Cyclic GFR-binding peptide
DELTVQVEKFIPKKRVIEVKAVKVSR

SEQ ID NO: 56181 - protein, 30 aa, Artificial Sequence
  Cyclic GFR-binding peptide
  MOD_RES (30), (30): Xaa is C or S
LFVQVEKHQGQHPKIRVKAMKVSREETPVX

SEQ ID NO: 56182 - protein, 32 aa, Artificial Sequence
  Cyclic GFR-binding peptide
  MOD_RES (30), (30): Xaa is C or S
SMEGILKPKKRVYEMIQVTINSHHVRSPQXKV

SEQ ID NO: 56183 - protein, 33 aa, Artificial Sequence
  Cyclic GFR-binding peptide
  MOD_RES (30), (30): Xaa is C or S
VTAKKLKPKKRVYEIKRVQVPRHHVRSPQXKVS

SEQ ID NO: 56184 - protein, 31 aa, Artificial Sequence
  Cyclic GFR-binding peptide
  MOD_RES (2), (2): Xaa is C or S
EXQSHEELVTAKKHQGQHPKIRIKRMQVPRQ

SEQ ID NO: 56185 - protein, 34 aa, Artificial Sequence; identical to SEQ ID NO: 13875
  Cyclic GFR-binding peptide

SEQ ID NO: 56186 - protein, 37 aa, Artificial Sequence
  Cyclic GFR-binding peptide
  MOD_RES (32), (32): Xaa is C or S
HQLFVQVEKHQGQHPKIRVKAMKVSREETPVXELGED

SEQ ID NO: 56187 - protein, 36 aa, Artificial Sequence
  Cyclic GFR-binding peptide
  MOD_RES (33), (33): Xaa is C or S
ELRVTAKKLKPKKRVYEIKRVQVPRHHVRSPQXKVS

SEQ ID NO: 56188 - protein, 38 aa, Artificial Sequence; identical to SEQ ID NO: 13876
  Cyclic GFR-binding peptide
  MOD_RES (1), (35): Xaa is C or S

SEQ ID NO: 56189 - protein, 32 aa, Artificial Sequence; identical to SEQ ID NO: 2216
  Cyclic GFR-binding peptide

SEQ ID NO: 56190 - protein, 29 aa, Artificial Sequence
  Cyclic GFR-binding peptide
QSHEELSMEGIHQGQHPKIRMIQMTINSQ

SEQ ID NO: 56191 - protein, 32 aa, Artificial Sequence
  Cyclic GFR-binding peptide
  MOD_RES (2), (4): Xaa is C or S
RXEXQSHEELVTAKKHQGQHPKIRIKRMQVPR

SEQ ID NO: 56192 - protein, 32 aa, Artificial Sequence
  Cyclic GFR-binding peptide
  MOD_RES (31), (31): Xaa is C or S
EELVQVEKHQGQHPKIRVKAMKVSRQGTPVXE

SEQ ID NO: 56193 - protein, 37 aa, Artificial Sequence
  Cyclic GFR-binding peptide
  MOD_RES (34), (34): Xaa is C or S
DELTVQVEKFIPKKRVIEVKAVKVSRLQVQTPRXQVN

SEQ ID NO: 56194 - protein, 36 aa, Artificial Sequence
  Cyclic GFR-binding peptide
  MOD_RES (32), (32): Xaa is C or S
LTSMEGIFIPKKRVIEMIQVTINSLQVQTPRXQVNR

SEQ ID NO: 56195 - protein, 42 aa, Artificial Sequence; identical to SEQ ID NO: 13878
  Cyclic GFR-binding peptide
  MOD_RES (1), (3), (40): Xaa is C or S

SEQ ID NO: 56196 - protein, 42 aa, Artificial Sequence; identical to SEQ ID NO: 13881
  Cyclic GFR-binding peptide
  MOD_RES (1), (3), (37): Xaa is C or S

SEQ ID NO: 56197 - protein, 25 aa, Artificial Sequence
  Cyclic GFR-binding peptide
QLFSMEGLHQGQHPKIRMIQMTINS

SEQ ID NO: 56198 - protein, 41 aa, Artificial Sequence; identical to SEQ ID NO: 13882
  Cyclic GFR-binding peptide
  MOD_RES (37), (37): Xaa is C or S

SEQ ID NO: 56199 - protein, 38 aa, Artificial Sequence; identical to SEQ ID NO: 13883
  Cyclic GFR-binding peptide
  MOD_RES (1), (3): Xaa is C or S

SEQ ID NO: 56200 - protein, 24 aa, Artificial Sequence
  Cyclic GFR-binding peptide
ELSMEGIHQGQHPKIRMIQMTINS

SEQ ID NO: 56201 - protein, 36 aa, Artificial Sequence; identical to SEQ ID NO: 13884
  Cyclic GFR-binding peptide
  MOD_RES (33), (33): Xaa is C or S

SEQ ID NO: 56202 - protein, 32 aa, Artificial Sequence
  Cyclic GFR-binding peptide
  MOD_RES (1), (1): Xaa is C or S
XKNHQLFSMEGLHQGQHPKIRMIQMTINSEET

SEQ ID NO: 56203 - protein, 28 aa, Artificial Sequence
  Cyclic GFR-binding peptide
SMEGLFIPKKRVIEMIQVTINSLQVQTP

SEQ ID NO: 56204 - protein, 37 aa, Artificial Sequence; identical to SEQ ID NO: 13885
  Cyclic GFR-binding peptide
  MOD_RES (36), (36): Xaa is C or S

SEQ ID NO: 56205 - protein, 25 aa, Artificial Sequence
  Cyclic GFR-binding peptide
VQVEKFIPKKRVIEVKAVKVSRLQV

SEQ ID NO: 56206 - protein, 43 aa, Artificial Sequence; identical to SEQ ID NO: 13887
  Cyclic GFR-binding peptide
  MOD_RES (1), (3), (40): Xaa is C or S

SEQ ID NO: 56207 - protein, 28 aa, Artificial Sequence
  Cyclic GFR-binding peptide
  MOD_RES (28), (28): Xaa is C or S
VTAKKHQGQHPKIRIKRMQVPRQGTPVX

SEQ ID NO: 56208 - protein, 25 aa, Artificial Sequence
  Cyclic GFR-binding peptide
VTAKKHQGQHPKIRIKRMQVPREET

SEQ ID NO: 56209 - protein, 23 aa, Artificial Sequence
  Cyclic GFR-binding peptide
TVQVEKFIPKKRVIEVKAVKVSR

SEQ ID NO: 56210 - protein, 32 aa, Artificial Sequence
  Cyclic GFR-binding peptide
  MOD_RES (30), (30): Xaa is C or S
LFVTAKKHQGQHPKIRIKRMQVPREETPVXEL

SEQ ID NO: 56211 - protein, 31 aa, Artificial Sequence
  Cyclic GFR-binding peptide
  MOD_RES (2), (2): Xaa is C or S
EXKNHQLFVTAKKHQGQHPKIRIKRMQVPRE

SEQ ID NO: 56212 - protein, 29 aa, Artificial Sequence
  Cyclic GFR-binding peptide
ELTVQVEKFIPKKRVIEVKAVKVSRLQVQ

SEQ ID NO: 56213 - protein, 39 aa, Artificial Sequence; identical to SEQ ID NO: 13891
  Cyclic GFR-binding peptide
  MOD_RES (37), (37): Xaa is C or S

SEQ ID NO: 56214 - protein, 35 aa, Artificial Sequence
  Cyclic GFR-binding peptide
  MOD_RES (2), (4): Xaa is C or S
RXEXQSHEELVTAKKHQGQHPKIRIKRMQVPRQGT

SEQ ID NO: 56215 - protein, 41 aa, Artificial Sequence; identical to SEQ ID NO: 13892
  Cyclic GFR-binding peptide
  MOD_RES (2), (36): Xaa is C or S

SEQ ID NO: 56216 - protein, 25 aa, Artificial Sequence
  Cyclic GFR-binding peptide
SMEGLLKPKKRVYEMIQVTINSHHV

SEQ ID NO: 56217 - protein, 32 aa, Artificial Sequence
  Cyclic GFR-binding peptide
  MOD_RES (1), (3): Xaa is C or S
XEXKNHQLFVQVEKHQGQHPKIRVKAMKVSRE

SEQ ID NO: 56218 - protein, 36 aa, Artificial Sequence; identical to SEQ ID NO: 13893
  Cyclic GFR-binding peptide
  MOD_RES (33), (33): Xaa is C or S

SEQ ID NO: 56219 - protein, 37 aa, Artificial Sequence
  Cyclic GFR-binding peptide
  MOD_RES (31), (31): Xaa is C or S
EELVQVEKHQGQHPKIRVKAMKVSRQGTPVXELGEDN

SEQ ID NO: 56220 - protein, 30 aa, Artificial Sequence
  Cyclic GFR-binding peptide
QLFSMEGLHQGQHPKIRMIQMTINSEETPV

SEQ ID NO: 56221 - protein, 32 aa, Artificial Sequence
  Cyclic GFR-binding peptide
QSHEELVTAKKHQGQHPKIRIKRMQVPRQGTP

SEQ ID NO: 56222 - protein, 38 aa, Artificial Sequence; identical to SEQ ID NO: 13896
  Cyclic GFR-binding peptide
  MOD_RES (1), (3), (37): Xaa is C or S

SEQ ID NO: 56223 - protein, 29 aa, Artificial Sequence
  Cyclic GFR-binding peptide
ELVTAKKHQGQHPKIRIKRMQVPRQGTPV

SEQ ID NO: 56224 - protein, 32 aa, Artificial Sequence
  Cyclic GFR-binding peptide
  MOD_RES (1), (3): Xaa is C or S
XEXKNHQLFSMEGLHQGQHPKIRMIQMTINSE

SEQ ID NO: 56225 - protein, 33 aa, Artificial Sequence
  Cyclic GFR-binding peptide
  MOD_RES (33), (33): Xaa is C or S
ELRVTAKKLKPKKRVYEIKRVQVPRHHVRSPQX

SEQ ID NO: 56226 - protein, 27 aa, Artificial Sequence
  Cyclic GFR-binding peptide
VQVEKFIPKKRVIEVKAVKVSRLQVQT

SEQ ID NO: 56227 - protein, 34 aa, Artificial Sequence; identical to SEQ ID NO: 13898
  Cyclic GFR-binding peptide
  MOD_RES (1), (1): Xaa is C or S

SEQ ID NO: 56228 - protein, 31 aa, Artificial Sequence
  Cyclic GFR-binding peptide
  MOD_RES (28), (28): Xaa is C or S
VQVEKHQGQHPKIRVKAMKVSRQGTPVXELG

SEQ ID NO: 56229 - protein, 32 aa, Artificial Sequence
  Cyclic GFR-binding peptide
  MOD_RES (31), (31): Xaa is C or S
TVQVEKFIPKKRVIEVKAVKVSRLQVQTPRXQ

SEQ ID NO: 56230 - protein, 37 aa, Artificial Sequence; identical to SEQ ID NO: 13899
  Cyclic GFR-binding peptide
  MOD_RES (36), (36): Xaa is C or S

SEQ ID NO: 56231 - protein, 36 aa, Artificial Sequence; identical to SEQ ID NO: 13900
  Cyclic GFR-binding peptide

SEQ ID NO: 56232 - protein, 44 aa, Artificial Sequence; identical to SEQ ID NO: 13901
  Cyclic GFR-binding peptide
  MOD_RES (2), (4), (41): Xaa is C or S

SEQ ID NO: 56233 - protein, 32 aa, Artificial Sequence
  Cyclic GFR-binding peptide
  MOD_RES (2), (4): Xaa is C or S
RXEXKNHQLFVTAKKHQGQHPKIRIKRMQVPR

SEQ ID NO: 56234 - protein, 28 aa, Artificial Sequence
  Cyclic GFR-binding peptide
HEELVQVEKHQGQHPKIRVKAMKVSRQG

SEQ ID NO: 56235 - protein, 36 aa, Artificial Sequence; identical to SEQ ID NO: 13902
  Cyclic GFR-binding peptide
  MOD_RES (33), (33): Xaa is C or S

SEQ ID NO: 56236 - protein, 33 aa, Artificial Sequence
  Cyclic GFR-binding peptide
DELTSMEGLFIPKKRVIEMIQVTINSLQVQTPR

SEQ ID NO: 56237 - protein, 32 aa, Artificial Sequence
  Cyclic GFR-binding peptide
QSHEELSMEGIHQGQHPKIRMIQMTINSQGTP

SEQ ID NO: 56238 - protein, 30 aa, Artificial Sequence
  Cyclic GFR-binding peptide
  MOD_RES (1), (1): Xaa is C or S
XELHEELRVTAKKLKPKKRVYEIKRVQVPR

SEQ ID NO: 56239 - protein, 34 aa, Artificial Sequence
  Cyclic GFR-binding peptide
  MOD_RES (2), (2): Xaa is C or S
AXELHEELRSMEGILKPKKRVYEMIQVTINSHHV

SEQ ID NO: 56240 - protein, 40 aa, Artificial Sequence; identical to SEQ ID NO: 13903
  Cyclic GFR-binding peptide
  MOD_RES (2), (4), (38): Xaa is C or S

SEQ ID NO: 56241 - protein, 34 aa, Artificial Sequence
  Cyclic GFR-binding peptide
  MOD_RES (32), (32): Xaa is C or S
HEELSMEGIHQGQHPKIRMIQMTINSQGTPVXEL

SEQ ID NO: 56242 - protein, 25 aa, Artificial Sequence
  Cyclic GFR-binding peptide
LRSMEGLLKPKKRVYEMIQVTINSH

SEQ ID NO: 56243 - protein, 24 aa, Artificial Sequence
  Cyclic GFR-binding peptide
LFSMEGLHQGQHPKIRMIQMTINS

SEQ ID NO: 56244 - protein, 37 aa, Artificial Sequence; identical to SEQ ID NO: 13905
  Cyclic GFR-binding peptide
  MOD_RES (36), (36): Xaa is C or S

SEQ ID NO: 56245 - protein, 37 aa, Artificial Sequence; identical to SEQ ID NO: 13906
  Cyclic GFR-binding peptide
  MOD_RES (2), (2): Xaa is C or S

SEQ ID NO: 56246 - protein, 27 aa, Artificial Sequence
  Cyclic GFR-binding peptide
VTAKKHQGQHPKIRIKRMQVPRQGTPV

SEQ ID NO: 56247 - protein, 44 aa, Artificial Sequence; identical to SEQ ID NO: 13908
  Cyclic GFR-binding peptide
  MOD_RES (2), (4), (38): Xaa is C or S

SEQ ID NO: 56248 - protein, 36 aa, Artificial Sequence; identical to SEQ ID NO: 13910
  Cyclic GFR-binding peptide
  MOD_RES (36), (36): Xaa is C or S

SEQ ID NO: 56249 - protein, 35 aa, Artificial Sequence; identical to SEQ ID NO: 13911
  Cyclic GFR-binding peptide
  MOD_RES (35), (35): Xaa is C or S

SEQ ID NO: 56250 - protein, 28 aa, Artificial Sequence
  Cyclic GFR-binding peptide
DELTSMEGIFIPKKRVIEMIQVTINSLQ

SEQ ID NO: 56251 - protein, 36 aa, Artificial Sequence
  Cyclic GFR-binding peptide
  MOD_RES (32), (32): Xaa is C or S
HQLFVTAKKHQGQHPKIRIKRMQVPREETPVXELGE

SEQ ID NO: 56252 - protein, 25 aa, Artificial Sequence
  Cyclic GFR-binding peptide
VTAKKHQGQHPKIRIKRMQVPRQGT

SEQ ID NO: 56253 - protein, 35 aa, Artificial Sequence
  Cyclic GFR-binding peptide
  MOD_RES (2), (4): Xaa is C or S
RXEXKNHQLFSMEGLHQGQHPKIRMIQMTINSEET

SEQ ID NO: 56254 - protein, 37 aa, Artificial Sequence; identical to SEQ ID NO: 13913
  Cyclic GFR-binding peptide
  MOD_RES (1), (1): Xaa is C or S

SEQ ID NO: 56255 - protein, 27 aa, Artificial Sequence
  Cyclic GFR-binding peptide
VTAKKHQGQHPKIRIKRMQVPREETPV

SEQ ID NO: 56256 - protein, 43 aa, Artificial Sequence; identical to SEQ ID NO: 13914
  Cyclic GFR-binding peptide
  MOD_RES (2), (4), (41): Xaa is C or S

SEQ ID NO: 56257 - protein, 34 aa, Artificial Sequence; identical to SEQ ID NO: 13915
  Cyclic GFR-binding peptide

SEQ ID NO: 56258 - protein, 37 aa, Artificial Sequence; identical to SEQ ID NO: 13916
  Cyclic GFR-binding peptide
  MOD_RES (34), (34): Xaa is C or S

SEQ ID NO: 56259 - protein, 34 aa, Artificial Sequence
  Cyclic GFR-binding peptide
  MOD_RES (2), (2): Xaa is C or S
EXKNHQLFVTAKKHQGQHPKIRIKRMQVPREETP

SEQ ID NO: 56260 - protein, 37 aa, Artificial Sequence; identical to SEQ ID NO: 13917
  Cyclic GFR-binding peptide
  MOD_RES (1), (35): Xaa is C or S

SEQ ID NO: 56261 - protein, 25 aa, Artificial Sequence
  Cyclic GFR-binding peptide
LTSMEGIFIPKKRVIEMIQVTINSL

SEQ ID NO: 56262 - protein, 37 aa, Artificial Sequence; identical to SEQ ID NO: 13918
  Cyclic GFR-binding peptide
  MOD_RES (2), (4): Xaa is C or S

SEQ ID NO: 56263 - protein, 42 aa, Artificial Sequence; identical to SEQ ID NO: 13920
  Cyclic GFR-binding peptide
  MOD_RES (1), (3), (37): Xaa is C or S

SEQ ID NO: 56264 - protein, 39 aa, Artificial Sequence; identical to SEQ ID NO: 13921
  Cyclic GFR-binding peptide
  MOD_RES (1), (3): Xaa is C or S

SEQ ID NO: 56265 - protein, 32 aa, Artificial Sequence
  Cyclic GFR-binding peptide
ELHEELRVTAKKLKPKKRVYEIKRVQVPRHHV

SEQ ID NO: 56266 - protein, 36 aa, Artificial Sequence
  Cyclic GFR-binding peptide
  MOD_RES (31), (31): Xaa is C or S
EELVQVEKHQGQHPKIRVKAMKVSRQGTPVXELGED

SEQ ID NO: 56267 - protein, 26 aa, Artificial Sequence
  Cyclic GFR-binding peptide
EELVQVEKHQGQHPKIRVKAMKVSRQ

SEQ ID NO: 56268 - protein, 35 aa, Artificial Sequence; identical to SEQ ID NO: 13922
  Cyclic GFR-binding peptide
  MOD_RES (35), (35): Xaa is C or S

SEQ ID NO: 56269 - protein, 36 aa, Artificial Sequence; identical to SEQ ID NO: 13923
  Cyclic GFR-binding peptide
  MOD_RES (33), (33): Xaa is C or S

SEQ ID NO: 56270 - protein, 36 aa, Artificial Sequence
  Cyclic GFR-binding peptide
  MOD_RES (34), (34): Xaa is C or S
EELRSMEGLLKPKKRVYEMIQVTINSHHVRSPQXKV

SEQ ID NO: 56271 - protein, 38 aa, Artificial Sequence; identical to SEQ ID NO: 13925
  Cyclic GFR-binding peptide
  MOD_RES (2), (4), (38): Xaa is C or S

SEQ ID NO: 56272 - protein, 34 aa, Artificial Sequence
  Cyclic GFR-binding peptide
  MOD_RES (33), (33): Xaa is C or S
ELRVTAKKLKPKKRVYEIKRVQVPRHHVRSPQXK

SEQ ID NO: 56273 - protein, 43 aa, Artificial Sequence; identical to SEQ ID NO: 13927
  Cyclic GFR-binding peptide
  MOD_RES (2), (4), (41): Xaa is C or S

SEQ ID NO: 56274 - protein, 29 aa, Artificial Sequence
  Cyclic GFR-binding peptide
LFVQVEKHQGQHPKIRVKAMKVSREETPV

SEQ ID NO: 56275 - protein, 30 aa, Artificial Sequence
  Cyclic GFR-binding peptide
HEELVQVEKHQGQHPKIRVKAMKVSRQGTP

SEQ ID NO: 56276 - protein, 38 aa, Artificial Sequence; identical to SEQ ID NO: 13928
  Cyclic GFR-binding peptide
  MOD_RES (36), (36): Xaa is C or S

SEQ ID NO: 56277 - protein, 35 aa, Artificial Sequence; identical to SEQ ID NO: 13929
  Cyclic GFR-binding peptide

SEQ ID NO: 56278 - protein, 33 aa, Artificial Sequence
  Cyclic GFR-binding peptide
  MOD_RES (29), (29): Xaa is C or S
LVTAKKHQGQHPKIRIKRMQVPRQGTPVXELGE

SEQ ID NO: 56279 - protein, 42 aa, Artificial Sequence; identical to SEQ ID NO: 13930
  Cyclic GFR-binding peptide
  MOD_RES (2), (39): Xaa is C or S

SEQ ID NO: 56280 - protein, 22 aa, Artificial Sequence
  Cyclic GFR-binding peptide
VTAKKHQGQHPKIRIKRMQVPR

SEQ ID NO: 56281 - protein, 34 aa, Artificial Sequence
  Cyclic GFR-binding peptide
  MOD_RES (31), (31): Xaa is C or S
TSMEGLFIPKKRVIEMIQVTINSLQVQTPRXQVN

SEQ ID NO: 56282 - protein, 39 aa, Artificial Sequence; identical to SEQ ID NO: 13932
  Cyclic GFR-binding peptide
  MOD_RES (2), (39): Xaa is C or S

SEQ ID NO: 56283 - protein, 27 aa, Artificial Sequence
  Cyclic GFR-binding peptide
RSMEGILKPKKRVYEMIQVTINSHHVR

SEQ ID NO: 56284 - protein, 25 aa, Artificial Sequence
  Cyclic GFR-binding peptide
LRSMEGILKPKKRVYEMIQVTINSH

SEQ ID NO: 56285 - protein, 41 aa, Artificial Sequence; identical to SEQ ID NO: 13934
  Cyclic GFR-binding peptide
  MOD_RES (2), (4), (41): Xaa is C or S

SEQ ID NO: 56286 - protein, 39 aa, Artificial Sequence; identical to SEQ ID NO: 13936
  Cyclic GFR-binding peptide
  MOD_RES (2), (39): Xaa is C or S

SEQ ID NO: 56287 - protein, 42 aa, Artificial Sequence; identical to SEQ ID NO: 13937
  Cyclic GFR-binding peptide
  MOD_RES (2), (39): Xaa is C or S

SEQ ID NO: 56288 - protein, 33 aa, Artificial Sequence
  Cyclic GFR-binding peptide
ALHDELTSMEGIFIPKKRVIEMIQVTINSLQVQ

SEQ ID NO: 56289 - protein, 31 aa, Artificial Sequence
  Cyclic GFR-binding peptide
  MOD_RES (1), (1): Xaa is C or S
XQSHEELSMEGIHQGQHPKIRMIQMTINSQG

SEQ ID NO: 56290 - protein, 30 aa, Artificial Sequence
  Cyclic GFR-binding peptide
  MOD_RES (30), (30): Xaa is C or S
ELVTAKKHQGQHPKIRIKRMQVPRQGTPVX

SEQ ID NO: 56291 - protein, 33 aa, Artificial Sequence
  Cyclic GFR-binding peptide
  MOD_RES (2), (2): Xaa is C or S
EXKNHQLFVTAKKHQGQHPKIRIKRMQVPREET

SEQ ID NO: 56292 - protein, 37 aa, Artificial Sequence; identical to SEQ ID NO: 13939
  Cyclic GFR-binding peptide
  MOD_RES (1), (1): Xaa is C or S

SEQ ID NO: 56293 - protein, 36 aa, Artificial Sequence
  Cyclic GFR-binding peptide
  MOD_RES (32), (32): Xaa is C or S
LRSMEGILKPKKRVYEMIQVTINSHHVRSPQXKVSS

SEQ ID NO: 56294 - protein, 32 aa, Artificial Sequence
  Cyclic GFR-binding peptide
  MOD_RES (2), (2): Xaa is C or S
KXALHDELTVQVEKFIPKKRVIEVKAVKVSRL

SEQ ID NO: 56295 - protein, 39 aa, Artificial Sequence; identical to SEQ ID NO: 13941
  Cyclic GFR-binding peptide
  MOD_RES (2), (4), (38): Xaa is C or S

SEQ ID NO: 56296 - protein, 31 aa, Artificial Sequence
  Cyclic GFR-binding peptide
ELTSMEGIFIPKKRVIEMIQVTINSLQVQTP

SEQ ID NO: 56297 - protein, 41 aa, Artificial Sequence; identical to SEQ ID NO: 13942
  Cyclic GFR-binding peptide
  MOD_RES (1), (3), (40): Xaa is C or S

SEQ ID NO: 56298 - protein, 35 aa, Artificial Sequence
  Cyclic GFR-binding peptide
  MOD_RES (31), (31): Xaa is C or S
RSMEGILKPKKRVYEMIQVTINSHHVRSPQXKVSS

SEQ ID NO: 56299 - protein, 34 aa, Artificial Sequence
  Cyclic GFR-binding peptide
  MOD_RES (2), (4): Xaa is C or S
AXAXELHEELRSMEGLLKPKKRVYEMIQVTINSH

SEQ ID NO: 56300 - protein, 31 aa, Artificial Sequence
  Cyclic GFR-binding peptide
LRVTAKKLKPKKRVYEIKRVQVPRHHVRSPQ

SEQ ID NO: 56301 - protein, 33 aa, Artificial Sequence
  Cyclic GFR-binding peptide
  MOD_RES (2), (4): Xaa is C or S
RXEXKNHQLFSMEGLHQGQHPKIRMIQMTINSE

SEQ ID NO: 56302 - protein, 27 aa, Artificial Sequence
  Cyclic GFR-binding peptide
HQLFSMEGLHQGQHPKIRMIQMTINSE

SEQ ID NO: 56303 - protein, 32 aa, Artificial Sequence
  Cyclic GFR-binding peptide
ELTVQVEKFIPKKRVIEVKAVKVSRLQVQTPR

SEQ ID NO: 56304 - protein, 32 aa, Artificial Sequence
  Cyclic GFR-binding peptide
  MOD_RES (30), (30): Xaa is C or S
ELSMEGIHQGQHPKIRMIQMTINSQGTPVXEL

SEQ ID NO: 56305 - protein, 28 aa, Artificial Sequence
  Cyclic GFR-binding peptide
FSMEGLHQGQHPKIRMIQMTINSEETPV

SEQ ID NO: 56306 - protein, 31 aa, Artificial Sequence
  Cyclic GFR-binding peptide
LRSMEGILKPKKRVYEMIQVTINSHHVRSPQ

SEQ ID NO: 56307 - protein, 29 aa, Artificial Sequence
  Cyclic GFR-binding peptide
ELHEELRVTAKKLKPKKRVYEIKRVQVPR

SEQ ID NO: 56308 - protein, 35 aa, Artificial Sequence; identical to SEQ ID NO: 13951
  Cyclic GFR-binding peptide

SEQ ID NO: 56309 - protein, 34 aa, Artificial Sequence
  Cyclic GFR-binding peptide
  MOD_RES (28), (28): Xaa is C or S
VQVEKHQGQHPKIRVKAMKVSREETPVXELGEDN

SEQ ID NO: 56310 - protein, 29 aa, Artificial Sequence
  Cyclic GFR-binding peptide
ELHEELRSMEGLLKPKKRVYEMIQVTINS

SEQ ID NO: 56311 - protein, 22 aa, Artificial Sequence
  Cyclic GFR-binding peptide
SMEGLFIPKKRVIEMIQVTINS

SEQ ID NO: 56312 - protein, 41 aa, Artificial Sequence; identical to SEQ ID NO: 13956
  Cyclic GFR-binding peptide
  MOD_RES (1), (3), (37): Xaa is C or S

SEQ ID NO: 56313 - protein, 25 aa, Artificial Sequence
  Cyclic GFR-binding peptide
LFVQVEKHQGQHPKIRVKAMKVSRE

SEQ ID NO: 56314 - protein, 24 aa, Artificial Sequence
  Cyclic GFR-binding peptide
VQVEKHQGQHPKIRVKAMKVSRQG

SEQ ID NO: 56315 - protein, 32 aa, Artificial Sequence; identical to SEQ ID NO: 13958
  Cyclic GFR-binding peptide

SEQ ID NO: 56316 - protein, 36 aa, Artificial Sequence; identical to SEQ ID NO: 13959
  Cyclic GFR-binding peptide
  MOD_RES (34), (34): Xaa is C or S

SEQ ID NO: 56317 - protein, 36 aa, Artificial Sequence
  Cyclic GFR-binding peptide
  MOD_RES (31), (31): Xaa is C or S
QLFVQVEKHQGQHPKIRVKAMKVSREETPVXELGED

SEQ ID NO: 56318 - protein, 35 aa, Artificial Sequence
  Cyclic GFR-binding peptide
  MOD_RES (34), (34): Xaa is C or S
DELTSMEGLFIPKKRVIEMIQVTINSLQVQTPRXQ

SEQ ID NO: 56319 - protein, 32 aa, Artificial Sequence
  Cyclic GFR-binding peptide
  MOD_RES (30), (30): Xaa is C or S
SMEGLLKPKKRVYEMIQVTINSHHVRSPQXKV

SEQ ID NO: 56320 - protein, 31 aa, Artificial Sequence
  Cyclic GFR-binding peptide
LTSMEGLFIPKKRVIEMIQVTINSLQVQTPR

SEQ ID NO: 56321 - protein, 35 aa, Artificial Sequence; identical to SEQ ID NO: 13960
  Cyclic GFR-binding peptide
  MOD_RES (34), (34): Xaa is C or S

SEQ ID NO: 56322 - protein, 29 aa, Artificial Sequence
  Cyclic GFR-binding peptide
  MOD_RES (1), (1): Xaa is C or S
XKNHQLFVQVEKHQGQHPKIRVKAMKVSR

SEQ ID NO: 56323 - protein, 31 aa, Artificial Sequence
  Cyclic GFR-binding peptide
  MOD_RES (30), (30): Xaa is C or S
ELVTAKKHQGQHPKIRIKRMQVPRQGTPVXE

SEQ ID NO: 56324 - protein, 36 aa, Artificial Sequence
  Cyclic GFR-binding peptide
  MOD_RES (2), (4): Xaa is C or S
EXKXALHDELTVQVEKFIPKKRVIEVKAVKVSRLQV

SEQ ID NO: 56325 - protein, 28 aa, Artificial Sequence
  Cyclic GFR-binding peptide
HEELRSMEGILKPKKRVYEMIQVTINSH

SEQ ID NO: 56326 - protein, 43 aa, Artificial Sequence; identical to SEQ ID NO: 13964
  Cyclic GFR-binding peptide
  MOD_RES (2), (4), (38): Xaa is C or S

SEQ ID NO: 56327 - protein, 33 aa, Artificial Sequence; identical to SEQ ID NO: 13965
  Cyclic GFR-binding peptide

SEQ ID NO: 56328 - protein, 35 aa, Artificial Sequence
  Cyclic GFR-binding peptide
  MOD_RES (31), (31): Xaa is C or S
QLFVTAKKHQGQHPKIRIKRMQVPREETPVXELGE

SEQ ID NO: 56329 - protein, 42 aa, Artificial Sequence; identical to SEQ ID NO: 13966
  Cyclic GFR-binding peptide
  MOD_RES (1), (38): Xaa is C or S

SEQ ID NO: 56330 - protein, 36 aa, Artificial Sequence
  Cyclic GFR-binding peptide
  MOD_RES (34), (34): Xaa is C or S
EELRSMEGILKPKKRVYEMIQVTINSHHVRSPQXKV

SEQ ID NO: 56331 - protein, 40 aa, Artificial Sequence; identical to SEQ ID NO: 13967
  Cyclic GFR-binding peptide
  MOD_RES (36), (36): Xaa is C or S

SEQ ID NO: 56332 - protein, 35 aa, Artificial Sequence
  Cyclic GFR-binding peptide
  MOD_RES (2), (4): Xaa is C or S
AXAXELHEELRSMEGILKPKKRVYEMIQVTINSHH

SEQ ID NO: 56333 - protein, 27 aa, Artificial Sequence
  Cyclic GFR-binding peptide
RVTAKKLKPKKRVYEIKRVQVPRHHVR

SEQ ID NO: 56334 - protein, 36 aa, Artificial Sequence
  Cyclic GFR-binding peptide
  MOD_RES (1), (3): Xaa is C or S
XKXALHDELTSMEGIFIPKKRVIEMIQVTINSLQVQ

SEQ ID NO: 56335 - protein, 35 aa, Artificial Sequence; identical to SEQ ID NO: 13969
  Cyclic GFR-binding peptide

SEQ ID NO: 56336 - protein, 36 aa, Artificial Sequence; identical to SEQ ID NO: 13970
  Cyclic GFR-binding peptide
  MOD_RES (35), (35): Xaa is C or S

SEQ ID NO: 56337 - protein, 30 aa, Artificial Sequence
  Cyclic GFR-binding peptide
SHEELVQVEKHQGQHPKIRVKAMKVSRQGT

SEQ ID NO: 56338 - protein, 34 aa, Artificial Sequence
  Cyclic GFR-binding peptide
  MOD_RES (2), (4): Xaa is C or S
RXEXKNHQLFSMEGLHQGQHPKIRMIQMTINSEE

SEQ ID NO: 56339 - protein, 30 aa, Artificial Sequence
  Cyclic GFR-binding peptide
  MOD_RES (30), (30): Xaa is C or S
LFSMEGLHQGQHPKIRMIQMTINSEETPVX

SEQ ID NO: 56340 - protein, 41 aa, Artificial Sequence; identical to SEQ ID NO: 13972
  Cyclic GFR-binding peptide
  MOD_RES (1), (38): Xaa is C or S

SEQ ID NO: 56341 - protein, 35 aa, Artificial Sequence; identical to SEQ ID NO: 13974
  Cyclic GFR-binding peptide

SEQ ID NO: 56342 - protein, 26 aa, Artificial Sequence
  Cyclic GFR-binding peptide
VQVEKHQGQHPKIRVKAMKVSREETP

SEQ ID NO: 56343 - protein, 39 aa, Artificial Sequence; identical to SEQ ID NO: 13976
  Cyclic GFR-binding peptide
  MOD_RES (1), (3), (37): Xaa is C or S

SEQ ID NO: 56344 - protein, 33 aa, Artificial Sequence; identical to SEQ ID NO: 13977
  Cyclic GFR-binding peptide

SEQ ID NO: 56345 - protein, 37 aa, Artificial Sequence; identical to SEQ ID NO: 13978
  Cyclic GFR-binding peptide
  MOD_RES (1), (3): Xaa is C or S

SEQ ID NO: 56346 - protein, 31 aa, Artificial Sequence
  Cyclic GFR-binding peptide
  MOD_RES (2), (2): Xaa is C or S
EXKNHQLFSMEGLHQGQHPKIRMIQMTINSE

SEQ ID NO: 56347 - protein, 29 aa, Artificial Sequence
  Cyclic GFR-binding peptide
RVTAKKLKPKKRVYEIKRVQVPRHHVRSP

SEQ ID NO: 56348 - protein, 35 aa, Artificial Sequence
  Cyclic GFR-binding peptide
  MOD_RES (34), (34): Xaa is C or S
DELTSMEGIFIPKKRVIEMIQVTINSLQVQTPRXQ

SEQ ID NO: 56349 - protein, 34 aa, Artificial Sequence
  Cyclic GFR-binding peptide
  MOD_RES (29), (29): Xaa is C or S
LVTAKKHQGQHPKIRIKRMQVPRQGTPVXELGED

SEQ ID NO: 56350 - protein, 38 aa, Artificial Sequence; identical to SEQ ID NO: 13982
  Cyclic GFR-binding peptide
  MOD_RES (2), (36): Xaa is C or S

SEQ ID NO: 56351 - protein, 39 aa, Artificial Sequence; identical to SEQ ID NO: 13981
  Cyclic GFR-binding peptide
  MOD_RES (1), (38): Xaa is C or S

SEQ ID NO: 56352 - protein, 22 aa, Artificial Sequence
  Cyclic GFR-binding peptide
SMEGILKPKKRVYEMIQVTINS

SEQ ID NO: 56353 - protein, 37 aa, Artificial Sequence; identical to SEQ ID NO: 13983
  Cyclic GFR-binding peptide
  MOD_RES (1), (3): Xaa is C or S

SEQ ID NO: 56354 - protein, 33 aa, Artificial Sequence
  Cyclic GFR-binding peptide
  MOD_RES (29), (29): Xaa is C or S
FVQVEKHQGQHPKIRVKAMKVSREETPVXELGE

SEQ ID NO: 56355 - protein, 43 aa, Artificial Sequence; identical to SEQ ID NO: 13984
  Cyclic GFR-binding peptide
  MOD_RES (2), (4), (38): Xaa is C or S

SEQ ID NO: 56356 - protein, 37 aa, Artificial Sequence; identical to SEQ ID NO: 13985
  Cyclic GFR-binding peptide
  MOD_RES (37), (37): Xaa is C or S

SEQ ID NO: 56357 - protein, 33 aa, Artificial Sequence
  Cyclic GFR-binding peptide
  MOD_RES (28), (28): Xaa is C or S
VTAKKHQGQHPKIRIKRMQVPREETPVXELGED

SEQ ID NO: 56358 - protein, 35 aa, Artificial Sequence
  Cyclic GFR-binding peptide
  MOD_RES (2), (2): Xaa is C or S
KXALHDELTSMEGLFIPKKRVIEMIQVTINSLQVQ

SEQ ID NO: 56359 - protein, 35 aa, Artificial Sequence
  Cyclic GFR-binding peptide
  MOD_RES (30), (30): Xaa is C or S
ELSMEGIHQGQHPKIRMIQMTINSQGTPVXELGED

SEQ ID NO: 56360 - protein, 30 aa, Artificial Sequence
  Cyclic GFR-binding peptide
TVQVEKFIPKKRVIEVKAVKVSRLQVQTPR

SEQ ID NO: 56361 - protein, 38 aa, Artificial Sequence; identical to SEQ ID NO: 13989
  Cyclic GFR-binding peptide
  MOD_RES (1), (38): Xaa is C or S

SEQ ID NO: 56362 - protein, 31 aa, Artificial Sequence
  Cyclic GFR-binding peptide
QSHEELVTAKKHQGQHPKIRIKRMQVPRQGT

SEQ ID NO: 56363 - protein, 29 aa, Artificial Sequence
  Cyclic GFR-binding peptide
  MOD_RES (29), (29): Xaa is C or S
FVTAKKHQGQHPKIRIKRMQVPREETPVX

SEQ ID NO: 56364 - protein, 43 aa, Artificial Sequence; identical to SEQ ID NO: 13991
  Cyclic GFR-binding peptide
  MOD_RES (2), (39): Xaa is C or S

SEQ ID NO: 56365 - protein, 25 aa, Artificial Sequence
  Cyclic GFR-binding peptide
SMEGIFIPKKRVIEMIQVTINSLQV

SEQ ID NO: 56366 - protein, 38 aa, Artificial Sequence; identical to SEQ ID NO: 13992
  Cyclic GFR-binding peptide
  MOD_RES (36), (36): Xaa is C or S

SEQ ID NO: 56367 - protein, 34 aa, Artificial Sequence; identical to SEQ ID NO: 13994
  Cyclic GFR-binding peptide

SEQ ID NO: 56368 - protein, 26 aa, Artificial Sequence
  Cyclic GFR-binding peptide
LTSMEGIFIPKKRVIEMIQVTINSLQ

SEQ ID NO: 56369 - protein, 26 aa, Artificial Sequence
  Cyclic GFR-binding peptide
VTAKKLKPKKRVYEIKRVQVPRHHVR

SEQ ID NO: 56370 - protein, 28 aa, Artificial Sequence
  Cyclic GFR-binding peptide
  MOD_RES (28), (28): Xaa is C or S
VTAKKHQGQHPKIRIKRMQVPREETPVX

SEQ ID NO: 56371 - protein, 24 aa, Artificial Sequence
  Cyclic GFR-binding peptide
ELVQVEKHQGQHPKIRVKAMKVSR

SEQ ID NO: 56372 - protein, 39 aa, Artificial Sequence; identical to SEQ ID NO: 14001
  Cyclic GFR-binding peptide
  MOD_RES (33), (33): Xaa is C or S

SEQ ID NO: 56373 - protein, 30 aa, Artificial Sequence
  Cyclic GFR-binding peptide
  MOD_RES (30), (30): Xaa is C or S
SMEGLFIPKKRVIEMIQVTINSLQVQTPRX

SEQ ID NO: 56374 - protein, 40 aa, Artificial Sequence; identical to SEQ ID NO: 14004
  Cyclic GFR-binding peptide
  MOD_RES (2), (36): Xaa is C or S

SEQ ID NO: 56375 - protein, 33 aa, Artificial Sequence
  Cyclic GFR-binding peptide
  MOD_RES (32), (32): Xaa is C or S
HEELVQVEKHQGQHPKIRVKAMKVSRQGTPVXE

SEQ ID NO: 56376 - protein, 39 aa, Artificial Sequence; identical to SEQ ID NO: 14005
  Cyclic GFR-binding peptide
  MOD_RES (1), (3), (37): Xaa is C or S

SEQ ID NO: 56377 - protein, 34 aa, Artificial Sequence
  Cyclic GFR-binding peptide
  MOD_RES (2), (2): Xaa is C or S
EXQSHEELVTAKKHQGQHPKIRIKRMQVPRQGTP

SEQ ID NO: 56378 - protein, 28 aa, Artificial Sequence
  Cyclic GFR-binding peptide
NHQLFSMEGLHQGQHPKIRMIQMTINSE

SEQ ID NO: 56379 - protein, 30 aa, Artificial Sequence
  Cyclic GFR-binding peptide
HDELTSMEGLFIPKKRVIEMIQVTINSLQV

SEQ ID NO: 56380 - protein, 34 aa, Artificial Sequence
  Cyclic GFR-binding peptide
  MOD_RES (2), (4): Xaa is C or S
EXKXALHDELTVQVEKFIPKKRVIEVKAVKVSRL

SEQ ID NO: 56381 - protein, 31 aa, Artificial Sequence
  Cyclic GFR-binding peptide
  MOD_RES (30), (30): Xaa is C or S
VTAKKLKPKKRVYEIKRVQVPRHHVRSPQXK

SEQ ID NO: 56382 - protein, 24 aa, Artificial Sequence
  Cyclic GFR-binding peptide
SMEGIHQGQHPKIRMIQMTINSQG

SEQ ID NO: 56383 - protein, 27 aa, Artificial Sequence
  Cyclic GFR-binding peptide
TSMEGLFIPKKRVIEMIQVTINSLQVQ

SEQ ID NO: 56384 - protein, 40 aa, Artificial Sequence; identical to SEQ ID NO: 14012
  Cyclic GFR-binding peptide
  MOD_RES (2), (36): Xaa is C or S

SEQ ID NO: 56385 - protein, 29 aa, Artificial Sequence
  Cyclic GFR-binding peptide
NHQLFVTAKKHQGQHPKIRIKRMQVPREE

SEQ ID NO: 56386 - protein, 39 aa, Artificial Sequence; identical to SEQ ID NO: 14014
  Cyclic GFR-binding peptide
  MOD_RES (1), (3), (37): Xaa is C or S

SEQ ID NO: 56387 - protein, 33 aa, Artificial Sequence
  Cyclic GFR-binding peptide
  MOD_RES (31), (31): Xaa is C or S
EELSMEGIHQGQHPKIRMIQMTINSQGTPVXEL

SEQ ID NO: 56388 - protein, 38 aa, Artificial Sequence; identical to SEQ ID NO: 14015
  Cyclic GFR-binding peptide
  MOD_RES (33), (33): Xaa is C or S

SEQ ID NO: 56389 - protein, 33 aa, Artificial Sequence
  Cyclic GFR-binding peptide
  MOD_RES (1), (1): Xaa is C or S
XKNHQLFVTAKKHQGQHPKIRIKRMQVPREETP

SEQ ID NO: 56390 - protein, 41 aa, Artificial Sequence; identical to SEQ ID NO: 14018
  Cyclic GFR-binding peptide
  MOD_RES (2), (36): Xaa is C or S

SEQ ID NO: 56391 - protein, 23 aa, Artificial Sequence
  Cyclic GFR-binding peptide
RSMEGLLKPKKRVYEMIQVTINS

SEQ ID NO: 56392 - protein, 24 aa, Artificial Sequence
  Cyclic GFR-binding peptide
SMEGLFIPKKRVIEMIQVTINSLQ

SEQ ID NO: 56393 - protein, 26 aa, Artificial Sequence
  Cyclic GFR-binding peptide
EELSMEGIHQGQHPKIRMIQMTINSQ

SEQ ID NO: 56394 - protein, 36 aa, Artificial Sequence; identical to SEQ ID NO: 14021
  Cyclic GFR-binding peptide
  MOD_RES (1), (3): Xaa is C or S

SEQ ID NO: 56395 - protein, 34 aa, Artificial Sequence
  Cyclic GFR-binding peptide
  MOD_RES (32), (32): Xaa is C or S
HQLFVQVEKHQGQHPKIRVKAMKVSREETPVXEL

SEQ ID NO: 56396 - protein, 25 aa, Artificial Sequence
  Cyclic GFR-binding peptide
SMEGLHQGQHPKIRMIQMTINSEET

SEQ ID NO: 56397 - protein, 34 aa, Artificial Sequence
  Cyclic GFR-binding peptide
  MOD_RES (1), (3): Xaa is C or S
XEXQSHEELVQVEKHQGQHPKIRVKAMKVSRQGT

SEQ ID NO: 56398 - protein, 31 aa, Artificial Sequence
  Cyclic GFR-binding peptide
ELRSMEGLLKPKKRVYEMIQVTINSHHVRSP

SEQ ID NO: 56399 - protein, 27 aa, Artificial Sequence
  Cyclic GFR-binding peptide
ELTSMEGLFIPKKRVIEMIQVTINSLQ

SEQ ID NO: 56400 - protein, 27 aa, Artificial Sequence
  Cyclic GFR-binding peptide
ELTSMEGIFIPKKRVIEMIQVTINSLQ

SEQ ID NO: 56401 - protein, 37 aa, Artificial Sequence
  Cyclic GFR-binding peptide
  MOD_RES (32), (32): Xaa is C or S
HEELVQVEKHQGQHPKIRVKAMKVSRQGTPVXELGED

SEQ ID NO: 56402 - protein, 37 aa, Artificial Sequence; identical to SEQ ID NO: 14026
  Cyclic GFR-binding peptide
  MOD_RES (36), (36): Xaa is C or S

SEQ ID NO: 56403 - protein, 31 aa, Artificial Sequence
  Cyclic GFR-binding peptide
  MOD_RES (1), (1): Xaa is C or S
XELHEELRSMEGILKPKKRVYEMIQVTINSH

SEQ ID NO: 56404 - protein, 30 aa, Artificial Sequence
  Cyclic GFR-binding peptide
  MOD_RES (30), (30): Xaa is C or S
LFVTAKKHQGQHPKIRIKRMQVPREETPVX

SEQ ID NO: 56405 - protein, 35 aa, Artificial Sequence
  Cyclic GFR-binding peptide
  MOD_RES (31), (31): Xaa is C or S
QLFSMEGLHQGQHPKIRMIQMTINSEETPVXELGE

SEQ ID NO: 56406 - protein, 38 aa, Artificial Sequence; identical to SEQ ID NO: 14029
  Cyclic GFR-binding peptide
  MOD_RES (37), (37): Xaa is C or S

SEQ ID NO: 56407 - protein, 42 aa, Artificial Sequence; identical to SEQ ID NO: 14030
  Cyclic GFR-binding peptide
  MOD_RES (2), (39): Xaa is C or S

SEQ ID NO: 56408 - protein, 25 aa, Artificial Sequence
  Cyclic GFR-binding peptide
TVQVEKFIPKKRVIEVKAVKVSRLQ

SEQ ID NO: 56409 - protein, 40 aa, Artificial Sequence; identical to SEQ ID NO: 14031
  Cyclic GFR-binding peptide
  MOD_RES (2), (36): Xaa is C or S

SEQ ID NO: 56410 - protein, 27 aa, Artificial Sequence
  Cyclic GFR-binding peptide
LTSMEGIFIPKKRVIEMIQVTINSLQV

SEQ ID NO: 56411 - protein, 36 aa, Artificial Sequence; identical to SEQ ID NO: 14032
  Cyclic GFR-binding peptide
  MOD_RES (1), (1): Xaa is C or S

SEQ ID NO: 56412 - protein, 42 aa, Artificial Sequence; identical to SEQ ID NO: 14033
  Cyclic GFR-binding peptide
  MOD_RES (2), (4), (41): Xaa is C or S

SEQ ID NO: 56413 - protein, 34 aa, Artificial Sequence; identical to SEQ ID NO: 14035
  Cyclic GFR-binding peptide
  MOD_RES (34), (34): Xaa is C or S

SEQ ID NO: 56414 - protein, 35 aa, Artificial Sequence
  Cyclic GFR-binding peptide
  MOD_RES (31), (31): Xaa is C or S
RSMEGLLKPKKRVYEMIQVTINSHHVRSPQXKVSS

SEQ ID NO: 56415 - protein, 44 aa, Artificial Sequence; identical to SEQ ID NO: 14040
  Cyclic GFR-binding peptide
  MOD_RES (1), (3), (40): Xaa is C or S

SEQ ID NO: 56416 - protein, 31 aa, Artificial Sequence
  Cyclic GFR-binding peptide
HDELTSMEGLFIPKKRVIEMIQVTINSLQVQ

SEQ ID NO: 56417 - protein, 31 aa, Artificial Sequence
  Cyclic GFR-binding peptide
KNHQLFSMEGLHQGQHPKIRMIQMTINSEET

SEQ ID NO: 56418 - protein, 30 aa, Artificial Sequence
  Cyclic GFR-binding peptide
  MOD_RES (1), (1): Xaa is C or S
XALHDELTVQVEKFIPKKRVIEVKAVKVSR

SEQ ID NO: 56419 - protein, 33 aa, Artificial Sequence
  Cyclic GFR-binding peptide
  MOD_RES (30), (30): Xaa is C or S
ELSMEGIHQGQHPKIRMIQMTINSQGTPVXELG

SEQ ID NO: 56420 - protein, 41 aa, Artificial Sequence; identical to SEQ ID NO: 14042
  Cyclic GFR-binding peptide
  MOD_RES (37), (37): Xaa is C or S

SEQ ID NO: 56421 - protein, 34 aa, Artificial Sequence; identical to SEQ ID NO: 14043
  Cyclic GFR-binding peptide
  MOD_RES (33), (33): Xaa is C or S

SEQ ID NO: 56422 - protein, 25 aa, Artificial Sequence
  Cyclic GFR-binding peptide
RVTAKKLKPKKRVYEIKRVQVPRHH

SEQ ID NO: 56423 - protein, 39 aa, Artificial Sequence; identical to SEQ ID NO: 14045
  Cyclic GFR-binding peptide
  MOD_RES (35), (35): Xaa is C or S

SEQ ID NO: 56424 - protein, 42 aa, Artificial Sequence; identical to SEQ ID NO: 14046
  Cyclic GFR-binding peptide
  MOD_RES (1), (38): Xaa is C or S

SEQ ID NO: 56425 - protein, 35 aa, Artificial Sequence
  Cyclic GFR-binding peptide
  MOD_RES (29), (29): Xaa is C or S
FVQVEKHQGQHPKIRVKAMKVSREETPVXELGEDN

SEQ ID NO: 56426 - protein, 25 aa, Artificial Sequence
  Cyclic GFR-binding peptide
ELSMEGIHQGQHPKIRMIQMTINSQ

SEQ ID NO: 56427 - protein, 34 aa, Artificial Sequence
  Cyclic GFR-binding peptide
  MOD_RES (1), (1): Xaa is C or S
XALHDELTSMEGLFIPKKRVIEMIQVTINSLQVQ

SEQ ID NO: 56428 - protein, 26 aa, Artificial Sequence
  Cyclic GFR-binding peptide
DELTSMEGIFIPKKRVIEMIQVTINS

SEQ ID NO: 56429 - protein, 29 aa, Artificial Sequence
  Cyclic GFR-binding peptide
LFSMEGLHQGQHPKIRMIQMTINSEETPV

SEQ ID NO: 56430 - protein, 33 aa, Artificial Sequence
  Cyclic GFR-binding peptide
  MOD_RES (2), (4): Xaa is C or S
RXEXQSHEELVQVEKHQGQHPKIRVKAMKVSRQ

SEQ ID NO: 56431 - protein, 37 aa, Artificial Sequence
  Cyclic GFR-binding peptide
  MOD_RES (2), (4): Xaa is C or S
EXKXALHDELTSMEGLFIPKKRVIEMIQVTINSLQVQ

SEQ ID NO: 56432 - protein, 35 aa, Artificial Sequence
  Cyclic GFR-binding peptide
  MOD_RES (32), (32): Xaa is C or S
HQLFSMEGLHQGQHPKIRMIQMTINSEETPVXELG

SEQ ID NO: 56433 - protein, 30 aa, Artificial Sequence
  Cyclic GFR-binding peptide
LRSMEGILKPKKRVYEMIQVTINSHHVRSP

SEQ ID NO: 56434 - protein, 39 aa, Artificial Sequence; identical to SEQ ID NO: 14049
  Cyclic GFR-binding peptide
  MOD_RES (1), (38): Xaa is C or S

SEQ ID NO: 56435 - protein, 32 aa, Artificial Sequence
  Cyclic GFR-binding peptide
  MOD_RES (1), (1): Xaa is C or S
XKNHQLFVTAKKHQGQHPKIRIKRMQVPREET

SEQ ID NO: 56436 - protein, 37 aa, Artificial Sequence
  Cyclic GFR-binding peptide
  MOD_RES (31), (31): Xaa is C or S
QLFVQVEKHQGQHPKIRVKAMKVSREETPVXELGEDN

SEQ ID NO: 56437 - protein, 36 aa, Artificial Sequence
  Cyclic GFR-binding peptide
  MOD_RES (32), (32): Xaa is C or S
HEELVQVEKHQGQHPKIRVKAMKVSRQGTPVXELGE

SEQ ID NO: 56438 - protein, 43 aa, Artificial Sequence; identical to SEQ ID NO: 14050
  Cyclic GFR-binding peptide
  MOD_RES (1), (3), (40): Xaa is C or S

SEQ ID NO: 56439 - protein, 34 aa, Artificial Sequence
  Cyclic GFR-binding peptide
  MOD_RES (30), (30): Xaa is C or S
ELVQVEKHQGQHPKIRVKAMKVSRQGTPVXELGE

SEQ ID NO: 56440 - protein, 34 aa, Artificial Sequence; identical to SEQ ID NO: 14052
  Cyclic GFR-binding peptide
  MOD_RES (1), (1): Xaa is C or S

SEQ ID NO: 56441 - protein, 41 aa, Artificial Sequence; identical to SEQ ID NO: 14055
  Cyclic GFR-binding peptide
  MOD_RES (1), (3), (37): Xaa is C or S

SEQ ID NO: 56442 - protein, 39 aa, Artificial Sequence; identical to SEQ ID NO: 14056
  Cyclic GFR-binding peptide
  MOD_RES (34), (34): Xaa is C or S

SEQ ID NO: 56443 - protein, 26 aa, Artificial Sequence
  Cyclic GFR-binding peptide
HQLFSMEGLHQGQHPKIRMIQMTINS

SEQ ID NO: 56444 - protein, 33 aa, Artificial Sequence
  Cyclic GFR-binding peptide
  MOD_RES (28), (28): Xaa is C or S
SMEGLHQGQHPKIRMIQMTINSEETPVXELGED

SEQ ID NO: 56445 - protein, 39 aa, Artificial Sequence; identical to SEQ ID NO: 14057
  Cyclic GFR-binding peptide
  MOD_RES (34), (34): Xaa is C or S

SEQ ID NO: 56446 - protein, 34 aa, Artificial Sequence
  Cyclic GFR-binding peptide
  MOD_RES (32), (32): Xaa is C or S
HQLFVTAKKHQGQHPKIRIKRMQVPREETPVXEL

SEQ ID NO: 56447 - protein, 33 aa, Artificial Sequence
  Cyclic GFR-binding peptide
DELTVQVEKFIPKKRVIEVKAVKVSRLQVQTPR

SEQ ID NO: 56448 - protein, 36 aa, Artificial Sequence
  Cyclic GFR-binding peptide
  MOD_RES (2), (4): Xaa is C or S
RXEXQSHEELVQVEKHQGQHPKIRVKAMKVSRQGTP

SEQ ID NO: 56449 - protein, 38 aa, Artificial Sequence
  Cyclic GFR-binding peptide
  MOD_RES (32), (32): Xaa is C or S
HEELSMEGIHQGQHPKIRMIQMTINSQGTPVXELGEDN

SEQ ID NO: 56450 - protein, 36 aa, Artificial Sequence
  Cyclic GFR-binding peptide
  MOD_RES (1), (3): Xaa is C or S
XAXELHEELRSMEGILKPKKRVYEMIQVTINSHHVR

SEQ ID NO: 56451 - protein, 33 aa, Artificial Sequence
  Cyclic GFR-binding peptide
  MOD_RES (1), (3): Xaa is C or S
XEXKNHQLFVTAKKHQGQHPKIRIKRMQVPREE

SEQ ID NO: 56452 - protein, 32 aa, Artificial Sequence
  Cyclic GFR-binding peptide
  MOD_RES (2), (2): Xaa is C or S
EXKNHQLFVQVEKHQGQHPKIRVKAMKVSREE

SEQ ID NO: 56453 - protein, 31 aa, Artificial Sequence
  Cyclic GFR-binding peptide
AAAAAAAAASMEGLHQGQHPKIRMIQMTINS

SEQ ID NO: 56454 - protein, 36 aa, Artificial Sequence
  Cyclic GFR-binding peptide
  MOD_RES (2), (4): Xaa is C or S
EXKXALHDELTSMEGLFIPKKRVIEMIQVTINSLQV

SEQ ID NO: 56455 - protein, 27 aa, Artificial Sequence
  Cyclic GFR-binding peptide
VQVEKHQGQHPKIRVKAMKVSREETPV

SEQ ID NO: 56456 - protein, 33 aa, Artificial Sequence
  Cyclic GFR-binding peptide
EELRSMEGILKPKKRVYEMIQVTINSHHVRSPQ

SEQ ID NO: 56457 - protein, 30 aa, Artificial Sequence
  Cyclic GFR-binding peptide
  MOD_RES (1), (1): Xaa is C or S
XALHDELTSMEGLFIPKKRVIEMIQVTINS

SEQ ID NO: 56458 - protein, 24 aa, Artificial Sequence
  Cyclic GFR-binding peptide
SMEGLLKPKKRVYEMIQVTINSHH

SEQ ID NO: 56459 - protein, 28 aa, Artificial Sequence
  Cyclic GFR-binding peptide
EELVQVEKHQGQHPKIRVKAMKVSRQGT

SEQ ID NO: 56460 - protein, 37 aa, Artificial Sequence; identical to SEQ ID NO: 14061
  Cyclic GFR-binding peptide
  MOD_RES (36), (36): Xaa is C or S

SEQ ID NO: 56461 - protein, 32 aa, Artificial Sequence
  Cyclic GFR-binding peptide
  MOD_RES (1), (1): Xaa is C or S
XQSHEELVQVEKHQGQHPKIRVKAMKVSRQGT

SEQ ID NO: 56462 - protein, 41 aa, Artificial Sequence; identical to SEQ ID NO: 14062
  Cyclic GFR-binding peptide
  MOD_RES (1), (35): Xaa is C or S

SEQ ID NO: 56463 - protein, 28 aa, Artificial Sequence
  Cyclic GFR-binding peptide
  MOD_RES (28), (28): Xaa is C or S
SMEGLHQGQHPKIRMIQMTINSEETPVX

SEQ ID NO: 56464 - protein, 29 aa, Artificial Sequence
  Cyclic GFR-binding peptide
VTAKKLKPKKRVYEIKRVQVPRHHVRSPQ

SEQ ID NO: 56465 - protein, 30 aa, Artificial Sequence
  Cyclic GFR-binding peptide
  MOD_RES (28), (28): Xaa is C or S
SMEGLHQGQHPKIRMIQMTINSEETPVXEL

SEQ ID NO: 56466 - protein, 29 aa, Artificial Sequence
  Cyclic GFR-binding peptide
  MOD_RES (29), (29): Xaa is C or S
FVQVEKHQGQHPKIRVKAMKVSREETPVX

SEQ ID NO: 56467 - protein, 33 aa, Artificial Sequence
  Cyclic GFR-binding peptide
  MOD_RES (31), (31): Xaa is C or S
TSMEGIFIPKKRVIEMIQVTINSLQVQTPRXQV

SEQ ID NO: 56468 - protein, 34 aa, Artificial Sequence
  Cyclic GFR-binding peptide
  MOD_RES (33), (33): Xaa is C or S
ELTVQVEKFIPKKRVIEVKAVKVSRLQVQTPRXQ

SEQ ID NO: 56469 - protein, 44 aa, Artificial Sequence; identical to SEQ ID NO: 14063
  Cyclic GFR-binding peptide
  MOD_RES (1), (3), (40): Xaa is C or S

SEQ ID NO: 56470 - protein, 26 aa, Artificial Sequence
  Cyclic GFR-binding peptide
VTAKKHQGQHPKIRIKRMQVPRQGTP

SEQ ID NO: 56471 - protein, 32 aa, Artificial Sequence
  Cyclic GFR-binding peptide
  MOD_RES (31), (31): Xaa is C or S
QLFVQVEKHQGQHPKIRVKAMKVSREETPVXE

SEQ ID NO: 56472 - protein, 38 aa, Artificial Sequence; identical to SEQ ID NO: 14065
  Cyclic GFR-binding peptide
  MOD_RES (36), (36): Xaa is C or S

SEQ ID NO: 56473 - protein, 33 aa, Artificial Sequence
  Cyclic GFR-binding peptide
  MOD_RES (30), (30): Xaa is C or S
SMEGILKPKKRVYEMIQVTINSHHVRSPQXKVS

SEQ ID NO: 56474 - protein, 34 aa, Artificial Sequence; identical to SEQ ID NO: 14068
  Cyclic GFR-binding peptide

SEQ ID NO: 56475 - protein, 32 aa, Artificial Sequence
  Cyclic GFR-binding peptide
LHDELTSMEGIFIPKKRVIEMIQVTINSLQVQ

SEQ ID NO: 56476 - protein, 32 aa, Artificial Sequence
  Cyclic GFR-binding peptide
ALHDELTSMEGLFIPKKRVIEMIQVTINSLQV

SEQ ID NO: 56477 - protein, 37 aa, Artificial Sequence; identical to SEQ ID NO: 14070
  Cyclic GFR-binding peptide
  MOD_RES (2), (4): Xaa is C or S

SEQ ID NO: 56478 - protein, 36 aa, Artificial Sequence
  Cyclic GFR-binding peptide
  MOD_RES (32), (32): Xaa is C or S
LTSMEGLFIPKKRVIEMIQVTINSLQVQTPRXQVNR

SEQ ID NO: 56479 - protein, 25 aa, Artificial Sequence
  Cyclic GFR-binding peptide
SMEGILKPKKRVYEMIQVTINSHHV

SEQ ID NO: 56480 - protein, 29 aa, Artificial Sequence
  Cyclic GFR-binding peptide
QLFVTAKKHQGQHPKIRIKRMQVPREETP

SEQ ID NO: 56481 - protein, 34 aa, Artificial Sequence
  Cyclic GFR-binding peptide
  MOD_RES (32), (32): Xaa is C or S
LRSMEGILKPKKRVYEMIQVTINSHHVRSPQXKV

SEQ ID NO: 56482 - protein, 32 aa, Artificial Sequence
  Cyclic GFR-binding peptide
  MOD_RES (30), (30): Xaa is C or S
VTAKKLKPKKRVYEIKRVQVPRHHVRSPQXKV

SEQ ID NO: 56483 - protein, 31 aa, Artificial Sequence
  Cyclic GFR-binding peptide
DELTVQVEKFIPKKRVIEVKAVKVSRLQVQT

SEQ ID NO: 56484 - protein, 33 aa, Artificial Sequence; identical to SEQ ID NO: 14074
  Cyclic GFR-binding peptide

SEQ ID NO: 56485 - protein, 30 aa, Artificial Sequence
  Cyclic GFR-binding peptide
  MOD_RES (29), (29): Xaa is C or S
FSMEGLHQGQHPKIRMIQMTINSEETPVXE

SEQ ID NO: 56486 - protein, 28 aa, Artificial Sequence
  Cyclic GFR-binding peptide
LFVTAKKHQGQHPKIRIKRMQVPREETP

SEQ ID NO: 56487 - protein, 28 aa, Artificial Sequence
  Cyclic GFR-binding peptide
TSMEGIFIPKKRVIEMIQVTINSLQVQT

SEQ ID NO: 56488 - protein, 26 aa, Artificial Sequence
  Cyclic GFR-binding peptide
TSMEGIFIPKKRVIEMIQVTINSLQV

SEQ ID NO: 56489 - protein, 32 aa, Artificial Sequence
  Cyclic GFR-binding peptide
QSHEELVQVEKHQGQHPKIRVKAMKVSRQGTP

SEQ ID NO: 56490 - protein, 30 aa, Artificial Sequence
  Cyclic GFR-binding peptide
ELTVQVEKFIPKKRVIEVKAVKVSRLQVQT

SEQ ID NO: 56491 - protein, 35 aa, Artificial Sequence
  Cyclic GFR-binding peptide
  MOD_RES (2), (2): Xaa is C or S
AXELHEELRSMEGLLKPKKRVYEMIQVTINSHHVR

SEQ ID NO: 56492 - protein, 40 aa, Artificial Sequence; identical to SEQ ID NO: 14077
  Cyclic GFR-binding peptide
  MOD_RES (2), (4): Xaa is C or S

SEQ ID NO: 56493 - protein, 29 aa, Artificial Sequence
  Cyclic GFR-binding peptide
ELTSMEGIFIPKKRVIEMIQVTINSLQVQ

SEQ ID NO: 56494 - protein, 45 aa, Artificial Sequence; identical to SEQ ID NO: 14079
  Cyclic GFR-binding peptide
  MOD_RES (2), (4), (41): Xaa is C or S

SEQ ID NO: 56495 - protein, 34 aa, Artificial Sequence; identical to SEQ ID NO: 14080
  Cyclic GFR-binding peptide
  MOD_RES (1), (1): Xaa is C or S

SEQ ID NO: 56496 - protein, 29 aa, Artificial Sequence
  Cyclic GFR-binding peptide
SMEGLLKPKKRVYEMIQVTINSHHVRSPQ

SEQ ID NO: 56497 - protein, 38 aa, Artificial Sequence; identical to SEQ ID NO: 14082
  Cyclic GFR-binding peptide
  MOD_RES (2), (36): Xaa is C or S

SEQ ID NO: 56498 - protein, 38 aa, Artificial Sequence; identical to SEQ ID NO: 14083
  Cyclic GFR-binding peptide
  MOD_RES (2), (4), (38): Xaa is C or S

SEQ ID NO: 56499 - protein, 22 aa, Artificial Sequence
  Cyclic GFR-binding peptide
VQVEKHQGQHPKIRVKAMKVSR

SEQ ID NO: 56500 - protein, 33 aa, Artificial Sequence
  Cyclic GFR-binding peptide
  MOD_RES (31), (31): Xaa is C or S
EELVTAKKHQGQHPKIRIKRMQVPRQGTPVXEL

SEQ ID NO: 56501 - protein, 29 aa, Artificial Sequence
  Cyclic GFR-binding peptide
QLFSMEGLHQGQHPKIRMIQMTINSEETP

SEQ ID NO: 56502 - protein, 26 aa, Artificial Sequence
  Cyclic GFR-binding peptide
ELVTAKKHQGQHPKIRIKRMQVPRQG

SEQ ID NO: 56503 - protein, 45 aa, Artificial Sequence; identical to SEQ ID NO: 14084
  Cyclic GFR-binding peptide
  MOD_RES (2), (4), (41): Xaa is C or S

SEQ ID NO: 56504 - protein, 32 aa, Artificial Sequence
  Cyclic GFR-binding peptide
LHEELRVTAKKLKPKKRVYEIKRVQVPRHHVR

SEQ ID NO: 56505 - protein, 36 aa, Artificial Sequence
  Cyclic GFR-binding peptide
  MOD_RES (30), (30): Xaa is C or S
LFVQVEKHQGQHPKIRVKAMKVSREETPVXELGEDN

SEQ ID NO: 56506 - protein, 34 aa, Artificial Sequence
  Cyclic GFR-binding peptide
  MOD_RES (1), (1): Xaa is C or S
XELHEELRSMEGILKPKKRVYEMIQVTINSHHVR

SEQ ID NO: 56507 - protein, 34 aa, Artificial Sequence
  Cyclic GFR-binding peptide
  MOD_RES (2), (4): Xaa is C or S
EXKXALHDELTSMEGLFIPKKRVIEMIQVTINSL

SEQ ID NO: 56508 - protein, 30 aa, Artificial Sequence
  Cyclic GFR-binding peptide
  MOD_RES (2), (2): Xaa is C or S
EXQSHEELVQVEKHQGQHPKIRVKAMKVSR

SEQ ID NO: 56509 - protein, 32 aa, Artificial Sequence
  Cyclic GFR-binding peptide
  MOD_RES (29), (29): Xaa is C or S
LVTAKKHQGQHPKIRIKRMQVPRQGTPVXELG

SEQ ID NO: 56510 - protein, 32 aa, Artificial Sequence
  Cyclic GFR-binding peptide
  MOD_RES (30), (30): Xaa is C or S
SMEGLFIPKKRVIEMIQVTINSLQVQTPRXQV

SEQ ID NO: 56511 - protein, 35 aa, Artificial Sequence; identical to SEQ ID NO: 14086
  Cyclic GFR-binding peptide
  MOD_RES (35), (35): Xaa is C or S

SEQ ID NO: 56512 - protein, 27 aa, Artificial Sequence
  Cyclic GFR-binding peptide
SMEGLFIPKKRVIEMIQVTINSLQVQT

SEQ ID NO: 56513 - protein, 34 aa, Artificial Sequence
  Cyclic GFR-binding peptide
  MOD_RES (29), (29): Xaa is C or S
LVQVEKHQGQHPKIRVKAMKVSRQGTPVXELGED

SEQ ID NO: 56514 - protein, 24 aa, Artificial Sequence
  Cyclic GFR-binding peptide
LTSMEGLFIPKKRVIEMIQVTINS

SEQ ID NO: 56515 - protein, 31 aa, Artificial Sequence
  Cyclic GFR-binding peptide
ELTSMEGLFIPKKRVIEMIQVTINSLQVQTP

SEQ ID NO: 56516 - protein, 26 aa, Artificial Sequence
  Cyclic GFR-binding peptide
LFSMEGLHQGQHPKIRMIQMTINSEE

SEQ ID NO: 56517 - protein, 40 aa, Artificial Sequence; identical to SEQ ID NO: 14087
  Cyclic GFR-binding peptide
  MOD_RES (1), (3), (37): Xaa is C or S

SEQ ID NO: 56518 - protein, 38 aa, Artificial Sequence; identical to SEQ ID NO: 14088
  Cyclic GFR-binding peptide
  MOD_RES (2), (36): Xaa is C or S

SEQ ID NO: 56519 - protein, 34 aa, Artificial Sequence
  Cyclic GFR-binding peptide
  MOD_RES (31), (31): Xaa is C or S
EELVQVEKHQGQHPKIRVKAMKVSRQGTPVXELG

SEQ ID NO: 56520 - protein, 27 aa, Artificial Sequence
  Cyclic GFR-binding peptide
ELRSMEGILKPKKRVYEMIQVTINSHH

SEQ ID NO: 56521 - protein, 33 aa, Artificial Sequence
  Cyclic GFR-binding peptide
  MOD_RES (1), (1): Xaa is C or S
XQSHEELVQVEKHQGQHPKIRVKAMKVSRQGTP

SEQ ID NO: 56522 - protein, 33 aa, Artificial Sequence; identical to SEQ ID NO: 14091
  Cyclic GFR-binding peptide

SEQ ID NO: 56523 - protein, 32 aa, Artificial Sequence
  Cyclic GFR-binding peptide
ELRSMEGILKPKKRVYEMIQVTINSHHVRSPQ

SEQ ID NO: 56524 - protein, 28 aa, Artificial Sequence
  Cyclic GFR-binding peptide
RVTAKKLKPKKRVYEIKRVQVPRHHVRS

SEQ ID NO: 56525 - protein, 39 aa, Artificial Sequence; identical to SEQ ID NO: 14094
  Cyclic GFR-binding peptide
  MOD_RES (2), (4), (38): Xaa is C or S

SEQ ID NO: 56526 - protein, 30 aa, Artificial Sequence
  Cyclic GFR-binding peptide
  MOD_RES (30), (30): Xaa is C or S
VTAKKLKPKKRVYEIKRVQVPRHHVRSPQX

SEQ ID NO: 56527 - protein, 29 aa, Artificial Sequence
  Cyclic GFR-binding peptide
SMEGLFIPKKRVIEMIQVTINSLQVQTPR

SEQ ID NO: 56528 - protein, 40 aa, Artificial Sequence; identical to SEQ ID NO: 14095
  Cyclic GFR-binding peptide
  MOD_RES (2), (39): Xaa is C or S

SEQ ID NO: 56529 - protein, 36 aa, Artificial Sequence; identical to SEQ ID NO: 14096
  Cyclic GFR-binding peptide
  MOD_RES (1), (3): Xaa is C or S

SEQ ID NO: 56530 - protein, 31 aa, Artificial Sequence
  Cyclic GFR-binding peptide
  MOD_RES (31), (31): Xaa is C or S
QLFVQVEKHQGQHPKIRVKAMKVSREETPVX

SEQ ID NO: 56531 - protein, 28 aa, Artificial Sequence
  Cyclic GFR-binding peptide
TVQVEKFIPKKRVIEVKAVKVSRLQVQT

SEQ ID NO: 56532 - protein, 35 aa, Artificial Sequence; identical to SEQ ID NO: 14097
  Cyclic GFR-binding peptide

SEQ ID NO: 56533 - protein, 34 aa, Artificial Sequence
  Cyclic GFR-binding peptide
  MOD_RES (1), (3): Xaa is C or S
XEXQSHEELVTAKKHQGQHPKIRIKRMQVPRQGT

SEQ ID NO: 56534 - protein, 34 aa, Artificial Sequence
  Cyclic GFR-binding peptide
  MOD_RES (2), (2): Xaa is C or S
KXALHDELTSMEGIFIPKKRVIEMIQVTINSLQV

SEQ ID NO: 56535 - protein, 34 aa, Artificial Sequence
  Cyclic GFR-binding peptide
  MOD_RES (1), (3): Xaa is C or S
XAXELHEELRVTAKKLKPKKRVYEIKRVQVPRHH

SEQ ID NO: 56536 - protein, 32 aa, Artificial Sequence; identical to SEQ ID NO: 14104
  Cyclic GFR-binding peptide

SEQ ID NO: 56537 - protein, 44 aa, Artificial Sequence; identical to SEQ ID NO: 14105
  Cyclic GFR-binding peptide
  MOD_RES (2), (4), (41): Xaa is C or S

SEQ ID NO: 56538 - protein, 31 aa, Artificial Sequence
  Cyclic GFR-binding peptide
  MOD_RES (2), (2): Xaa is C or S
EXKNHQLFVQVEKHQGQHPKIRVKAMKVSRE

SEQ ID NO: 56539 - protein, 29 aa, Artificial Sequence
  Cyclic GFR-binding peptide
HDELTVQVEKFIPKKRVIEVKAVKVSRLQ

SEQ ID NO: 56540 - protein, 35 aa, Artificial Sequence
  Cyclic GFR-binding peptide
  MOD_RES (1), (3): Xaa is C or S
XAXELHEELRSMEGILKPKKRVYEMIQVTINSHHV

SEQ ID NO: 56541 - protein, 38 aa, Artificial Sequence; identical to SEQ ID NO: 14110
  Cyclic GFR-binding peptide
  MOD_RES (1), (38): Xaa is C or S

SEQ ID NO: 56542 - protein, 29 aa, Artificial Sequence
  Cyclic GFR-binding peptide
HQLFSMEGLHQGQHPKIRMIQMTINSEET

SEQ ID NO: 56543 - protein, 40 aa, Artificial Sequence; identical to SEQ ID NO: 14112
  Cyclic GFR-binding peptide
  MOD_RES (1), (35): Xaa is C or S

SEQ ID NO: 56544 - protein, 24 aa, Artificial Sequence
  Cyclic GFR-binding peptide
LFVQVEKHQGQHPKIRVKAMKVSR

SEQ ID NO: 56545 - protein, 42 aa, Artificial Sequence; identical to SEQ ID NO: 14111
  Cyclic GFR-binding peptide
  MOD_RES (1), (3), (40): Xaa is C or S

SEQ ID NO: 56546 - protein, 26 aa, Artificial Sequence
  Cyclic GFR-binding peptide
LRVTAKKLKPKKRVYEIKRVQVPRHH

SEQ ID NO: 56547 - protein, 35 aa, Artificial Sequence
  Cyclic GFR-binding peptide
  MOD_RES (2), (2): Xaa is C or S
AXELHEELRSMEGILKPKKRVYEMIQVTINSHHVR

SEQ ID NO: 56548 - protein, 23 aa, Artificial Sequence
  Cyclic GFR-binding peptide
LVTAKKHQGQHPKIRIKRMQVPR

SEQ ID NO: 56549 - protein, 23 aa, Artificial Sequence
  Cyclic GFR-binding peptide
FVTAKKHQGQHPKIRIKRMQVPR

SEQ ID NO: 56550 - protein, 26 aa, Artificial Sequence
  Cyclic GFR-binding peptide
ELTVQVEKFIPKKRVIEVKAVKVSRL

SEQ ID NO: 56551 - protein, 33 aa, Artificial Sequence
  Cyclic GFR-binding peptide
  MOD_RES (2), (2): Xaa is C or S
EXQSHEELSMEGIHQGQHPKIRMIQMTINSQGT

SEQ ID NO: 56552 - protein, 37 aa, Artificial Sequence; identical to SEQ ID NO: 14115
  Cyclic GFR-binding peptide
  MOD_RES (1), (35): Xaa is C or S

SEQ ID NO: 56553 - protein, 31 aa, Artificial Sequence
  Cyclic GFR-binding peptide
EELRSMEGLLKPKKRVYEMIQVTINSHHVRS

SEQ ID NO: 56554 - protein, 30 aa, Artificial Sequence
  Cyclic GFR-binding peptide
  MOD_RES (28), (28): Xaa is C or S
VTAKKHQGQHPKIRIKRMQVPREETPVXEL

SEQ ID NO: 56555 - protein, 28 aa, Artificial Sequence
  Cyclic GFR-binding peptide
KNHQLFVTAKKHQGQHPKIRIKRMQVPR

SEQ ID NO: 56556 - protein, 28 aa, Artificial Sequence
  Cyclic GFR-binding peptide
ELVQVEKHQGQHPKIRVKAMKVSRQGTP

SEQ ID NO: 56557 - protein, 33 aa, Artificial Sequence
  Cyclic GFR-binding peptide
  MOD_RES (2), (4): Xaa is C or S
RXEXKNHQLFVQVEKHQGQHPKIRVKAMKVSRE

SEQ ID NO: 56558 - protein, 28 aa, Artificial Sequence
  Cyclic GFR-binding peptide
QLFSMEGLHQGQHPKIRMIQMTINSEET

SEQ ID NO: 56559 - protein, 41 aa, Artificial Sequence; identical to SEQ ID NO: 14118
  Cyclic GFR-binding peptide
  MOD_RES (1), (38): Xaa is C or S

SEQ ID NO: 56560 - protein, 28 aa, Artificial Sequence
  Cyclic GFR-binding peptide
HDELTSMEGIFIPKKRVIEMIQVTINSL

SEQ ID NO: 56561 - protein, 26 aa, Artificial Sequence
  Cyclic GFR-binding peptide
SMEGLFIPKKRVIEMIQVTINSLQVQ

SEQ ID NO: 56562 - protein, 30 aa, Artificial Sequence
  Cyclic GFR-binding peptide
LTSMEGLFIPKKRVIEMIQVTINSLQVQTP

SEQ ID NO: 56563 - protein, 31 aa, Artificial Sequence
  Cyclic GFR-binding peptide
  MOD_RES (1), (3): Xaa is C or S
XEXKNHQLFSMEGLHQGQHPKIRMIQMTINS

SEQ ID NO: 56564 - protein, 40 aa, Artificial Sequence; identical to SEQ ID NO: 14120
  Cyclic GFR-binding peptide
  MOD_RES (1), (3), (37): Xaa is C or S

SEQ ID NO: 56565 - protein, 30 aa, Artificial Sequence
  Cyclic GFR-binding peptide
QLFVTAKKHQGQHPKIRIKRMQVPREETPV

SEQ ID NO: 56566 - protein, 38 aa, Artificial Sequence
  Cyclic GFR-binding peptide
  MOD_RES (32), (32): Xaa is C or S
HQLFVQVEKHQGQHPKIRVKAMKVSREETPVXELGEDN

SEQ ID NO: 56567 - protein, 28 aa, Artificial Sequence
  Cyclic GFR-binding peptide
HEELVTAKKHQGQHPKIRIKRMQVPRQG

SEQ ID NO: 56568 - protein, 35 aa, Artificial Sequence; identical to SEQ ID NO: 14123
  Cyclic GFR-binding peptide
  MOD_RES (1), (35): Xaa is C or S

SEQ ID NO: 56569 - protein, 38 aa, Artificial Sequence; identical to SEQ ID NO: 14124
  Cyclic GFR-binding peptide
  MOD_RES (2), (2): Xaa is C or S

SEQ ID NO: 56570 - protein, 24 aa, Artificial Sequence
  Cyclic GFR-binding peptide
VTAKKLKPKKRVYEIKRVQVPRHH

SEQ ID NO: 56571 - protein, 34 aa, Artificial Sequence
  Cyclic GFR-binding peptide
  MOD_RES (30), (30): Xaa is C or S
SMEGILKPKKRVYEMIQVTINSHHVRSPQXKVSS

SEQ ID NO: 56572 - protein, 32 aa, Artificial Sequence; identical to SEQ ID NO: 2197
  Cyclic GFR-binding peptide

SEQ ID NO: 56573 - protein, 38 aa, Artificial Sequence; identical to SEQ ID NO: 14128
  Cyclic GFR-binding peptide
  MOD_RES (1), (3): Xaa is C or S

SEQ ID NO: 56574 - protein, 29 aa, Artificial Sequence
  Cyclic GFR-binding peptide
NHQLFVQVEKHQGQHPKIRVKAMKVSREE

SEQ ID NO: 56575 - protein, 30 aa, Artificial Sequence
  Cyclic GFR-binding peptide
SHEELVTAKKHQGQHPKIRIKRMQVPRQGT

SEQ ID NO: 56576 - protein, 34 aa, Artificial Sequence; identical to SEQ ID NO: 14130
  Cyclic GFR-binding peptide
  MOD_RES (33), (33): Xaa is C or S

SEQ ID NO: 56577 - protein, 33 aa, Artificial Sequence
  Cyclic GFR-binding peptide
  MOD_RES (1), (3): Xaa is C or S
XEXQSHEELSMEGIHQGQHPKIRMIQMTINSQG

SEQ ID NO: 56578 - protein, 25 aa, Artificial Sequence
  Cyclic GFR-binding peptide
LSMEGIHQGQHPKIRMIQMTINSQG

SEQ ID NO: 56579 - protein, 30 aa, Artificial Sequence
  Cyclic GFR-binding peptide
  MOD_RES (1), (1): Xaa is C or S
XELHEELRSMEGLLKPKKRVYEMIQVTINS

SEQ ID NO: 56580 - protein, 36 aa, Artificial Sequence; identical to SEQ ID NO: 14133
  Cyclic GFR-binding peptide

SEQ ID NO: 56581 - protein, 36 aa, Artificial Sequence; identical to SEQ ID NO: 14134
  Cyclic GFR-binding peptide
  MOD_RES (1), (1): Xaa is C or S

SEQ ID NO: 56582 - protein, 31 aa, Artificial Sequence
  Cyclic GFR-binding peptide
  MOD_RES (30), (30): Xaa is C or S
SMEGLFIPKKRVIEMIQVTINSLQVQTPRXQ

SEQ ID NO: 56583 - protein, 33 aa, Artificial Sequence; identical to SEQ ID NO: 14136
  Cyclic GFR-binding peptide

SEQ ID NO: 56584 - protein, 35 aa, Artificial Sequence; identical to SEQ ID NO: 14137
  Cyclic GFR-binding peptide
  MOD_RES (33), (33): Xaa is C or S

SEQ ID NO: 56585 - protein, 30 aa, Artificial Sequence
  Cyclic GFR-binding peptide
HDELTVQVEKFIPKKRVIEVKAVKVSRLQV

SEQ ID NO: 56586 - protein, 35 aa, Artificial Sequence
  Cyclic GFR-binding peptide
  MOD_RES (2), (4): Xaa is C or S
RXEXKNHQLFVQVEKHQGQHPKIRVKAMKVSREET

SEQ ID NO: 56587 - protein, 34 aa, Artificial Sequence; identical to SEQ ID NO: 14139
  Cyclic GFR-binding peptide
  MOD_RES (34), (34): Xaa is C or S

SEQ ID NO: 56588 - protein, 36 aa, Artificial Sequence; identical to SEQ ID NO: 14141
  Cyclic GFR-binding peptide

SEQ ID NO: 56589 - protein, 44 aa, Artificial Sequence; identical to SEQ ID NO: 14142
  Cyclic GFR-binding peptide
  MOD_RES (2), (4), (41): Xaa is C or S

SEQ ID NO: 56590 - protein, 25 aa, Artificial Sequence
  Cyclic GFR-binding peptide
QLFVTAKKHQGQHPKIRIKRMQVPR

SEQ ID NO: 56591 - protein, 31 aa, Artificial Sequence
  Cyclic GFR-binding peptide
  MOD_RES (28), (28): Xaa is C or S
SMEGLHQGQHPKIRMIQMTINSEETPVXELG

SEQ ID NO: 56592 - protein, 30 aa, Artificial Sequence
  Cyclic GFR-binding peptide
  MOD_RES (30), (30): Xaa is C or S
SMEGLLKPKKRVYEMIQVTINSHHVRSPQX

SEQ ID NO: 56593 - protein, 27 aa, Artificial Sequence
  Cyclic GFR-binding peptide
EELRSMEGLLKPKKRVYEMIQVTINSH

SEQ ID NO: 56594 - protein, 34 aa, Artificial Sequence
  Cyclic GFR-binding peptide
  MOD_RES (32), (32): Xaa is C or S
LTVQVEKFIPKKRVIEVKAVKVSRLQVQTPRXQV

SEQ ID NO: 56595 - protein, 34 aa, Artificial Sequence
  Cyclic GFR-binding peptide
  MOD_RES (28), (28): Xaa is C or S
VTAKKHQGQHPKIRIKRMQVPRQGTPVXELGEDN

SEQ ID NO: 56596 - protein, 44 aa, Artificial Sequence; identical to SEQ ID NO: 14146
  Cyclic GFR-binding peptide
  MOD_RES (2), (4), (41): Xaa is C or S

SEQ ID NO: 56597 - protein, 40 aa, Artificial Sequence; identical to SEQ ID NO: 14147
  Cyclic GFR-binding peptide
  MOD_RES (37), (37): Xaa is C or S

SEQ ID NO: 56598 - protein, 24 aa, Artificial Sequence
  Cyclic GFR-binding peptide
TSMEGLFIPKKRVIEMIQVTINSL

SEQ ID NO: 56599 - protein, 31 aa, Artificial Sequence
  Cyclic GFR-binding peptide
  MOD_RES (28), (28): Xaa is C or S
VTAKKHQGQHPKIRIKRMQVPRQGTPVXELG

SEQ ID NO: 56600 - protein, 41 aa, Artificial Sequence; identical to SEQ ID NO: 14150
  Cyclic GFR-binding peptide
  MOD_RES (2), (39): Xaa is C or S

SEQ ID NO: 56601 - protein, 36 aa, Artificial Sequence
  Cyclic GFR-binding peptide
  MOD_RES (33), (33): Xaa is C or S
ELRSMEGLLKPKKRVYEMIQVTINSHHVRSPQXKVS

SEQ ID NO: 56602 - protein, 41 aa, Artificial Sequence; identical to SEQ ID NO: 14152
  Cyclic GFR-binding peptide
  MOD_RES (2), (4), (41): Xaa is C or S

SEQ ID NO: 56603 - protein, 38 aa, Artificial Sequence; identical to SEQ ID NO: 14155
  Cyclic GFR-binding peptide
  MOD_RES (33), (33): Xaa is C or S

SEQ ID NO: 56604 - protein, 39 aa, Artificial Sequence; identical to SEQ ID NO: 14156
  Cyclic GFR-binding peptide
  MOD_RES (33), (33): Xaa is C or S

SEQ ID NO: 56605 - protein, 30 aa, Artificial Sequence
  Cyclic GFR-binding peptide
TSMEGIFIPKKRVIEMIQVTINSLQVQTPR

SEQ ID NO: 56606 - protein, 28 aa, Artificial Sequence
  Cyclic GFR-binding peptide
ELRVTAKKLKPKKRVYEIKRVQVPRHHV

SEQ ID NO: 56607 - protein, 34 aa, Artificial Sequence; identical to SEQ ID NO: 14157
  Cyclic GFR-binding peptide
  MOD_RES (33), (33): Xaa is C or S

SEQ ID NO: 56608 - protein, 33 aa, Artificial Sequence
  Cyclic GFR-binding peptide
  MOD_RES (31), (31): Xaa is C or S
RSMEGILKPKKRVYEMIQVTINSHHVRSPQXKV

SEQ ID NO: 56609 - protein, 34 aa, Artificial Sequence
  Cyclic GFR-binding peptide
  MOD_RES (31), (31): Xaa is C or S
RVTAKKLKPKKRVYEIKRVQVPRHHVRSPQXKVS

SEQ ID NO: 56610 - protein, 33 aa, Artificial Sequence
  Cyclic GFR-binding peptide
  MOD_RES (30), (30): Xaa is C or S
SMEGLFIPKKRVIEMIQVTINSLQVQTPRXQVN

SEQ ID NO: 56611 - protein, 25 aa, Artificial Sequence
  Cyclic GFR-binding peptide
EELVQVEKHQGQHPKIRVKAMKVSR

SEQ ID NO: 56612 - protein, 37 aa, Artificial Sequence; identical to SEQ ID NO: 14160
  Cyclic GFR-binding peptide
  MOD_RES (1), (3): Xaa is C or S

SEQ ID NO: 56613 - protein, 26 aa, Artificial Sequence
  Cyclic GFR-binding peptide
LFVTAKKHQGQHPKIRIKRMQVPREE

SEQ ID NO: 56614 - protein, 32 aa, Artificial Sequence
  Cyclic GFR-binding peptide
  MOD_RES (1), (1): Xaa is C or S
XKNHQLFVQVEKHQGQHPKIRVKAMKVSREET

SEQ ID NO: 56615 - protein, 36 aa, Artificial Sequence
  Cyclic GFR-binding peptide
  MOD_RES (30), (30): Xaa is C or S
ELVQVEKHQGQHPKIRVKAMKVSRQGTPVXELGEDN

SEQ ID NO: 56616 - protein, 33 aa, Artificial Sequence
  Cyclic GFR-binding peptide
  MOD_RES (29), (29): Xaa is C or S
FVTAKKHQGQHPKIRIKRMQVPREETPVXELGE

SEQ ID NO: 56617 - protein, 34 aa, Artificial Sequence
  Cyclic GFR-binding peptide
  MOD_RES (31), (31): Xaa is C or S
QLFVQVEKHQGQHPKIRVKAMKVSREETPVXELG

SEQ ID NO: 56618 - protein, 40 aa, Artificial Sequence; identical to SEQ ID NO: 14162
  Cyclic GFR-binding peptide
  MOD_RES (34), (34): Xaa is C or S

SEQ ID NO: 56619 - protein, 37 aa, Artificial Sequence; identical to SEQ ID NO: 14163
  Cyclic GFR-binding peptide
  MOD_RES (33), (33): Xaa is C or S

SEQ ID NO: 56620 - protein, 34 aa, Artificial Sequence
  Cyclic GFR-binding peptide
  MOD_RES (29), (29): Xaa is C or S
FVQVEKHQGQHPKIRVKAMKVSREETPVXELGED

SEQ ID NO: 56621 - protein, 41 aa, Artificial Sequence; identical to SEQ ID NO: 14165
  Cyclic GFR-binding peptide
  MOD_RES (2), (36): Xaa is C or S

SEQ ID NO: 56622 - protein, 41 aa, Artificial Sequence; identical to SEQ ID NO: 14166
  Cyclic GFR-binding peptide
  MOD_RES (1), (38): Xaa is C or S

SEQ ID NO: 56623 - protein, 40 aa, Artificial Sequence; identical to SEQ ID NO: 14164
  Cyclic GFR-binding peptide
  MOD_RES (2), (36): Xaa is C or S

SEQ ID NO: 56624 - protein, 24 aa, Artificial Sequence
  Cyclic GFR-binding peptide
FSMEGLHQGQHPKIRMIQMTINSE

SEQ ID NO: 56625 - protein, 27 aa, Artificial Sequence
  Cyclic GFR-binding peptide
ELRVTAKKLKPKKRVYEIKRVQVPRHH

SEQ ID NO: 56626 - protein, 29 aa, Artificial Sequence
  Cyclic GFR-binding peptide
LTSMEGLFIPKKRVIEMIQVTINSLQVQT

SEQ ID NO: 56627 - protein, 28 aa, Artificial Sequence
  Cyclic GFR-binding peptide
LHEELRSMEGILKPKKRVYEMIQVTINS

SEQ ID NO: 56628 - protein, 27 aa, Artificial Sequence
  Cyclic GFR-binding peptide
SMEGILKPKKRVYEMIQVTINSHHVRS

SEQ ID NO: 56629 - protein, 36 aa, Artificial Sequence
  Cyclic GFR-binding peptide
  MOD_RES (34), (34): Xaa is C or S
DELTSMEGIFIPKKRVIEMIQVTINSLQVQTPRXQV

SEQ ID NO: 56630 - protein, 32 aa, Artificial Sequence
  Cyclic GFR-binding peptide
  MOD_RES (2), (2): Xaa is C or S
EXKNHQLFSMEGLHQGQHPKIRMIQMTINSEE

SEQ ID NO: 56631 - protein, 36 aa, Artificial Sequence; identical to SEQ ID NO: 14173
  Cyclic GFR-binding peptide
  MOD_RES (1), (1): Xaa is C or S

SEQ ID NO: 56632 - protein, 42 aa, Artificial Sequence; identical to SEQ ID NO: 14174
  Cyclic GFR-binding peptide
  MOD_RES (2), (36): Xaa is C or S

SEQ ID NO: 56633 - protein, 38 aa, Artificial Sequence; identical to SEQ ID NO: 14177
  Cyclic GFR-binding peptide
  MOD_RES (1), (3): Xaa is C or S

SEQ ID NO: 56634 - protein, 32 aa, Artificial Sequence
  Cyclic GFR-binding peptide
  MOD_RES (1), (1): Xaa is C or S
XQSHEELSMEGIHQGQHPKIRMIQMTINSQGT

SEQ ID NO: 56635 - protein, 23 aa, Artificial Sequence
  Cyclic GFR-binding peptide
SMEGIFIPKKRVIEMIQVTINSL

SEQ ID NO: 56636 - protein, 35 aa, Artificial Sequence
  Cyclic GFR-binding peptide
  MOD_RES (1), (3): Xaa is C or S
XEXKNHQLFVTAKKHQGQHPKIRIKRMQVPREETP

SEQ ID NO: 56637 - protein, 40 aa, Artificial Sequence; identical to SEQ ID NO: 14183
  Cyclic GFR-binding peptide
  MOD_RES (1), (3), (37): Xaa is C or S

SEQ ID NO: 56638 - protein, 36 aa, Artificial Sequence
  Cyclic GFR-binding peptide
  MOD_RES (2), (4): Xaa is C or S
AXAXELHEELRVTAKKLKPKKRVYEIKRVQVPRHHV

SEQ ID NO: 56639 - protein, 43 aa, Artificial Sequence; identical to SEQ ID NO: 14185
  Cyclic GFR-binding peptide
  MOD_RES (2), (4), (38): Xaa is C or S

SEQ ID NO: 56640 - protein, 31 aa, Artificial Sequence
  Cyclic GFR-binding peptide
  MOD_RES (1), (1): Xaa is C or S
XKNHQLFSMEGLHQGQHPKIRMIQMTINSEE

SEQ ID NO: 56641 - protein, 33 aa, Artificial Sequence
  Cyclic GFR-binding peptide
  MOD_RES (2), (2): Xaa is C or S
EXKNHQLFSMEGLHQGQHPKIRMIQMTINSEET

SEQ ID NO: 56642 - protein, 27 aa, Artificial Sequence
  Cyclic GFR-binding peptide
LRVTAKKLKPKKRVYEIKRVQVPRHHV

SEQ ID NO: 56643 - protein, 28 aa, Artificial Sequence
  Cyclic GFR-binding peptide
DELTVQVEKFIPKKRVIEVKAVKVSRLQ

SEQ ID NO: 56644 - protein, 28 aa, Artificial Sequence
  Cyclic GFR-binding peptide
LHEELRVTAKKLKPKKRVYEIKRVQVPR

SEQ ID NO: 56645 - protein, 28 aa, Artificial Sequence
  Cyclic GFR-binding peptide
LTSMEGIFIPKKRVIEMIQVTINSLQVQ

SEQ ID NO: 56646 - protein, 29 aa, Artificial Sequence
  Cyclic GFR-binding peptide
ALHDELTSMEGLFIPKKRVIEMIQVTINS

SEQ ID NO: 56647 - protein, 38 aa, Artificial Sequence; identical to SEQ ID NO: 14188
  Cyclic GFR-binding peptide
  MOD_RES (35), (35): Xaa is C or S

SEQ ID NO: 56648 - protein, 35 aa, Artificial Sequence; identical to SEQ ID NO: 14191
  Cyclic GFR-binding peptide
  MOD_RES (1), (1): Xaa is C or S

SEQ ID NO: 56649 - protein, 32 aa, Artificial Sequence
  Cyclic GFR-binding peptide
  MOD_RES (28), (28): Xaa is C or S
VTAKKHQGQHPKIRIKRMQVPRQGTPVXELGE

SEQ ID NO: 56650 - protein, 41 aa, Artificial Sequence; identical to SEQ ID NO: 14192
  Cyclic GFR-binding peptide
  MOD_RES (1), (3), (37): Xaa is C or S

SEQ ID NO: 56651 - protein, 26 aa, Artificial Sequence
  Cyclic GFR-binding peptide
FVTAKKHQGQHPKIRIKRMQVPREET

SEQ ID NO: 56652 - protein, 39 aa, Artificial Sequence; identical to SEQ ID NO: 14194
  Cyclic GFR-binding peptide
  MOD_RES (35), (35): Xaa is C or S

SEQ ID NO: 56653 - protein, 38 aa, Artificial Sequence; identical to SEQ ID NO: 14196
  Cyclic GFR-binding peptide
  MOD_RES (2), (2): Xaa is C or S

SEQ ID NO: 56654 - protein, 30 aa, Artificial Sequence
  Cyclic GFR-binding peptide
HQLFVTAKKHQGQHPKIRIKRMQVPREETP

SEQ ID NO: 56655 - protein, 31 aa, Artificial Sequence
  Cyclic GFR-binding peptide
  MOD_RES (2), (2): Xaa is C or S
KXALHDELTVQVEKFIPKKRVIEVKAVKVSR

SEQ ID NO: 56656 - protein, 40 aa, Artificial Sequence; identical to SEQ ID NO: 14195
  Cyclic GFR-binding peptide
  MOD_RES (2), (39): Xaa is C or S

SEQ ID NO: 56657 - protein, 30 aa, Artificial Sequence
  Cyclic GFR-binding peptide
  MOD_RES (2), (2): Xaa is C or S
EXKNHQLFVTAKKHQGQHPKIRIKRMQVPR

SEQ ID NO: 56658 - protein, 29 aa, Artificial Sequence
  Cyclic GFR-binding peptide
TSMEGIFIPKKRVIEMIQVTINSLQVQTP

SEQ ID NO: 56659 - protein, 39 aa, Artificial Sequence; identical to SEQ ID NO: 14199
  Cyclic GFR-binding peptide
  MOD_RES (35), (35): Xaa is C or S

SEQ ID NO: 56660 - protein, 31 aa, Artificial Sequence
  Cyclic GFR-binding peptide
  MOD_RES (31), (31): Xaa is C or S
TSMEGLFIPKKRVIEMIQVTINSLQVQTPRX

SEQ ID NO: 56661 - protein, 31 aa, Artificial Sequence
  Cyclic GFR-binding peptide
  MOD_RES (30), (30): Xaa is C or S
LFVTAKKHQGQHPKIRIKRMQVPREETPVXE

SEQ ID NO: 56662 - protein, 40 aa, Artificial Sequence; identical to SEQ ID NO: 14200
  Cyclic GFR-binding peptide
  MOD_RES (36), (36): Xaa is C or S

SEQ ID NO: 56663 - protein, 31 aa, Artificial Sequence
  Cyclic GFR-binding peptide
  MOD_RES (1), (3): Xaa is C or S
XEXQSHEELSMEGIHQGQHPKIRMIQMTINS

SEQ ID NO: 56664 - protein, 33 aa, Artificial Sequence
  Cyclic GFR-binding peptide
  MOD_RES (32), (32): Xaa is C or S
HEELVTAKKHQGQHPKIRIKRMQVPRQGTPVXE

SEQ ID NO: 56665 - protein, 40 aa, Artificial Sequence; identical to SEQ ID NO: 14201
  Cyclic GFR-binding peptide
  MOD_RES (1), (3), (40): Xaa is C or S

SEQ ID NO: 56666 - protein, 41 aa, Artificial Sequence; identical to SEQ ID NO: 14203
  Cyclic GFR-binding peptide
  MOD_RES (2), (4), (41): Xaa is C or S

SEQ ID NO: 56667 - protein, 29 aa, Artificial Sequence
  Cyclic GFR-binding peptide
LTSMEGIFIPKKRVIEMIQVTINSLQVQT

SEQ ID NO: 56668 - protein, 26 aa, Artificial Sequence
  Cyclic GFR-binding peptide
DELTSMEGLFIPKKRVIEMIQVTINS

SEQ ID NO: 56669 - protein, 37 aa, Artificial Sequence; identical to SEQ ID NO: 14205
  Cyclic GFR-binding peptide
  MOD_RES (37), (37): Xaa is C or S

SEQ ID NO: 56670 - protein, 31 aa, Artificial Sequence
  Cyclic GFR-binding peptide
LTSMEGIFIPKKRVIEMIQVTINSLQVQTPR

SEQ ID NO: 56671 - protein, 42 aa, Artificial Sequence; identical to SEQ ID NO: 14207
  Cyclic GFR-binding peptide
  MOD_RES (2), (36): Xaa is C or S

SEQ ID NO: 56672 - protein, 30 aa, Artificial Sequence
  Cyclic GFR-binding peptide
HEELSMEGIHQGQHPKIRMIQMTINSQGTP

SEQ ID NO: 56673 - protein, 36 aa, Artificial Sequence; identical to SEQ ID NO: 14209
  Cyclic GFR-binding peptide
  MOD_RES (2), (2): Xaa is C or S

SEQ ID NO: 56674 - protein, 33 aa, Artificial Sequence
  Cyclic GFR-binding peptide
  MOD_RES (1), (1): Xaa is C or S
XKNHQLFSMEGLHQGQHPKIRMIQMTINSEETP

SEQ ID NO: 56675 - protein, 30 aa, Artificial Sequence
  Cyclic GFR-binding peptide
EELRVTAKKLKPKKRVYEIKRVQVPRHHVR

SEQ ID NO: 56676 - protein, 37 aa, Artificial Sequence
  Cyclic GFR-binding peptide
  MOD_RES (34), (34): Xaa is C or S
EELRVTAKKLKPKKRVYEIKRVQVPRHHVRSPQXKVS

SEQ ID NO: 56677 - protein, 36 aa, Artificial Sequence
  Cyclic GFR-binding peptide
  MOD_RES (2), (4): Xaa is C or S
RXEXQSHEELVTAKKHQGQHPKIRIKRMQVPRQGTP

SEQ ID NO: 56678 - protein, 41 aa, Artificial Sequence; identical to SEQ ID NO: 14212
  Cyclic GFR-binding peptide
  MOD_RES (1), (3), (40): Xaa is C or S

SEQ ID NO: 56679 - protein, 34 aa, Artificial Sequence; identical to SEQ ID NO: 14213
  Cyclic GFR-binding peptide
  MOD_RES (1), (1): Xaa is C or S

SEQ ID NO: 56680 - protein, 39 aa, Artificial Sequence; identical to SEQ ID NO: 14214
  Cyclic GFR-binding peptide
  MOD_RES (35), (35): Xaa is C or S

SEQ ID NO: 56681 - protein, 39 aa, Artificial Sequence; identical to SEQ ID NO: 14216
  Cyclic GFR-binding peptide
  MOD_RES (2), (4): Xaa is C or S

SEQ ID NO: 56682 - protein, 37 aa, Artificial Sequence
  Cyclic GFR-binding peptide
  MOD_RES (32), (32): Xaa is C or S
HEELVTAKKHQGQHPKIRIKRMQVPRQGTPVXELGED

SEQ ID NO: 56683 - protein, 34 aa, Artificial Sequence; identical to SEQ ID NO: 14217
  Cyclic GFR-binding peptide

SEQ ID NO: 56684 - protein, 31 aa, Artificial Sequence
  Cyclic GFR-binding peptide
  MOD_RES (29), (29): Xaa is C or S
FVQVEKHQGQHPKIRVKAMKVSREETPVXEL

SEQ ID NO: 56685 - protein, 32 aa, Artificial Sequence
  Cyclic GFR-binding peptide
  MOD_RES (29), (29): Xaa is C or S
LVQVEKHQGQHPKIRVKAMKVSRQGTPVXELG

SEQ ID NO: 56686 - protein, 29 aa, Artificial Sequence
  Cyclic GFR-binding peptide
KNHQLFVQVEKHQGQHPKIRVKAMKVSRE

SEQ ID NO: 56687 - protein, 28 aa, Artificial Sequence
  Cyclic GFR-binding peptide
KNHQLFSMEGLHQGQHPKIRMIQMTINS

SEQ ID NO: 56688 - protein, 32 aa, Artificial Sequence
  Cyclic GFR-binding peptide
  MOD_RES (1), (3): Xaa is C or S
XKXALHDELTSMEGLFIPKKRVIEMIQVTINS

SEQ ID NO: 56689 - protein, 30 aa, Artificial Sequence
  Cyclic GFR-binding peptide
LHDELTSMEGIFIPKKRVIEMIQVTINSLQ

SEQ ID NO: 56690 - protein, 34 aa, Artificial Sequence; identical to SEQ ID NO: 14219
  Cyclic GFR-binding peptide
  MOD_RES (34), (34): Xaa is C or S

SEQ ID NO: 56691 - protein, 28 aa, Artificial Sequence
  Cyclic GFR-binding peptide
LSMEGIHQGQHPKIRMIQMTINSQGTPV

SEQ ID NO: 56692 - protein, 38 aa, Artificial Sequence; identical to SEQ ID NO: 14220
  Cyclic GFR-binding peptide
  MOD_RES (1), (38): Xaa is C or S

SEQ ID NO: 56693 - protein, 38 aa, Artificial Sequence; identical to SEQ ID NO: 14221
  Cyclic GFR-binding peptide
  MOD_RES (1), (35): Xaa is C or S

SEQ ID NO: 56694 - protein, 24 aa, Artificial Sequence
  Cyclic GFR-binding peptide
VTAKKHQGQHPKIRIKRMQVPREE

SEQ ID NO: 56695 - protein, 39 aa, Artificial Sequence; identical to SEQ ID NO: 14222
  Cyclic GFR-binding peptide
  MOD_RES (2), (39): Xaa is C or S

SEQ ID NO: 56696 - protein, 32 aa, Artificial Sequence
  Cyclic GFR-binding peptide
  MOD_RES (1), (1): Xaa is C or S
XELHEELRSMEGLLKPKKRVYEMIQVTINSHH

SEQ ID NO: 56697 - protein, 37 aa, Artificial Sequence; identical to SEQ ID NO: 14223
  Cyclic GFR-binding peptide
  MOD_RES (34), (34): Xaa is C or S

SEQ ID NO: 56698 - protein, 31 aa, Artificial Sequence
  Cyclic GFR-binding peptide
LRSMEGLLKPKKRVYEMIQVTINSHHVRSPQ

SEQ ID NO: 56699 - protein, 34 aa, Artificial Sequence; identical to SEQ ID NO: 14224
  Cyclic GFR-binding peptide
  MOD_RES (33), (33): Xaa is C or S

SEQ ID NO: 56700 - protein, 42 aa, Artificial Sequence; identical to SEQ ID NO: 14225
  Cyclic GFR-binding peptide
  MOD_RES (2), (4), (38): Xaa is C or S

SEQ ID NO: 56701 - protein, 35 aa, Artificial Sequence
  Cyclic GFR-binding peptide
  MOD_RES (1), (3): Xaa is C or S
XKXALHDELTVQVEKFIPKKRVIEVKAVKVSRLQV

SEQ ID NO: 56702 - protein, 23 aa, Artificial Sequence
  Cyclic GFR-binding peptide
FVQVEKHQGQHPKIRVKAMKVSR

SEQ ID NO: 56703 - protein, 30 aa, Artificial Sequence
  Cyclic GFR-binding peptide
  MOD_RES (2), (2): Xaa is C or S
EXQSHEELVTAKKHQGQHPKIRIKRMQVPR

SEQ ID NO: 56704 - protein, 37 aa, Artificial Sequence; identical to SEQ ID NO: 14230
  Cyclic GFR-binding peptide
  MOD_RES (1), (35): Xaa is C or S

SEQ ID NO: 56705 - protein, 23 aa, Artificial Sequence
  Cyclic GFR-binding peptide
LVQVEKHQGQHPKIRVKAMKVSR

SEQ ID NO: 56706 - protein, 35 aa, Artificial Sequence; identical to SEQ ID NO: 14231
  Cyclic GFR-binding peptide
  MOD_RES (1), (35): Xaa is C or S

SEQ ID NO: 56707 - protein, 41 aa, Artificial Sequence; identical to SEQ ID NO: 14229
  Cyclic GFR-binding peptide
  MOD_RES (1), (3), (40): Xaa is C or S

SEQ ID NO: 56708 - protein, 33 aa, Artificial Sequence
  Cyclic GFR-binding peptide
  MOD_RES (1), (1): Xaa is C or S
XALHDELTSMEGLFIPKKRVIEMIQVTINSLQV

SEQ ID NO: 56709 - protein, 39 aa, Artificial Sequence; identical to SEQ ID NO: 14233
  Cyclic GFR-binding peptide
  MOD_RES (2), (36): Xaa is C or S

SEQ ID NO: 56710 - protein, 28 aa, Artificial Sequence
  Cyclic GFR-binding peptide
SMEGILKPKKRVYEMIQVTINSHHVRSP

SEQ ID NO: 56711 - protein, 33 aa, Artificial Sequence
  Cyclic GFR-binding peptide
EELRSMEGLLKPKKRVYEMIQVTINSHHVRSPQ

SEQ ID NO: 56712 - protein, 24 aa, Artificial Sequence
  Cyclic GFR-binding peptide
RSMEGLLKPKKRVYEMIQVTINSH

SEQ ID NO: 56713 - protein, 38 aa, Artificial Sequence; identical to SEQ ID NO: 14234
  Cyclic GFR-binding peptide
  MOD_RES (1), (3), (37): Xaa is C or S

SEQ ID NO: 56714 - protein, 28 aa, Artificial Sequence
  Cyclic GFR-binding peptide
LHEELRSMEGLLKPKKRVYEMIQVTINS

SEQ ID NO: 56715 - protein, 29 aa, Artificial Sequence
  Cyclic GFR-binding peptide
  MOD_RES (28), (28): Xaa is C or S
VQVEKHQGQHPKIRVKAMKVSREETPVXE

SEQ ID NO: 56716 - protein, 33 aa, Artificial Sequence
  Cyclic GFR-binding peptide
  MOD_RES (2), (4): Xaa is C or S
RXEXQSHEELSMEGIHQGQHPKIRMIQMTINSQ

SEQ ID NO: 56717 - protein, 33 aa, Artificial Sequence
  Cyclic GFR-binding peptide
  MOD_RES (28), (28): Xaa is C or S
VQVEKHQGQHPKIRVKAMKVSRQGTPVXELGED

SEQ ID NO: 56718 - protein, 29 aa, Artificial Sequence
  Cyclic GFR-binding peptide
EELRVTAKKLKPKKRVYEIKRVQVPRHHV

SEQ ID NO: 56719 - protein, 42 aa, Artificial Sequence; identical to SEQ ID NO: 14237
  Cyclic GFR-binding peptide
  MOD_RES (1), (38): Xaa is C or S

SEQ ID NO: 56720 - protein, 26 aa, Artificial Sequence
  Cyclic GFR-binding peptide
EELVTAKKHQGQHPKIRIKRMQVPRQ

SEQ ID NO: 56721 - protein, 31 aa, Artificial Sequence
  Cyclic GFR-binding peptide
ELRVTAKKLKPKKRVYEIKRVQVPRHHVRSP

SEQ ID NO: 56722 - protein, 34 aa, Artificial Sequence
  Cyclic GFR-binding peptide
  MOD_RES (2), (4): Xaa is C or S
RXEXQSHEELSMEGIHQGQHPKIRMIQMTINSQG

SEQ ID NO: 56723 - protein, 23 aa, Artificial Sequence
  Cyclic GFR-binding peptide
TSMEGIFIPKKRVIEMIQVTINS

SEQ ID NO: 56724 - protein, 33 aa, Artificial Sequence
  Cyclic GFR-binding peptide
  MOD_RES (33), (33): Xaa is C or S
ELTVQVEKFIPKKRVIEVKAVKVSRLQVQTPRX

SEQ ID NO: 56725 - protein, 36 aa, Artificial Sequence
  Cyclic GFR-binding peptide
  MOD_RES (33), (33): Xaa is C or S
ELRSMEGILKPKKRVYEMIQVTINSHHVRSPQXKVS

SEQ ID NO: 56726 - protein, 34 aa, Artificial Sequence
  Cyclic GFR-binding peptide
  MOD_RES (2), (2): Xaa is C or S
AXELHEELRSMEGLLKPKKRVYEMIQVTINSHHV

SEQ ID NO: 56727 - protein, 27 aa, Artificial Sequence
  Cyclic GFR-binding peptide
NHQLFSMEGLHQGQHPKIRMIQMTINS

SEQ ID NO: 56728 - protein, 37 aa, Artificial Sequence
  Cyclic GFR-binding peptide
  MOD_RES (2), (4): Xaa is C or S
AXAXELHEELRSMEGILKPKKRVYEMIQVTINSHHVR

SEQ ID NO: 56729 - protein, 42 aa, Artificial Sequence; identical to SEQ ID NO: 14241
  Cyclic GFR-binding peptide
  MOD_RES (2), (4), (38): Xaa is C or S

SEQ ID NO: 56730 - protein, 28 aa, Artificial Sequence
  Cyclic GFR-binding peptide
LHDELTVQVEKFIPKKRVIEVKAVKVSR

SEQ ID NO: 56731 - protein, 27 aa, Artificial Sequence
  Cyclic GFR-binding peptide
HDELTSMEGIFIPKKRVIEMIQVTINS

SEQ ID NO: 56732 - protein, 39 aa, Artificial Sequence; identical to SEQ ID NO: 14242
  Cyclic GFR-binding peptide
  MOD_RES (37), (37): Xaa is C or S

SEQ ID NO: 56733 - protein, 32 aa, Artificial Sequence
  Cyclic GFR-binding peptide
ELHEELRSMEGILKPKKRVYEMIQVTINSHHV

SEQ ID NO: 56734 - protein, 33 aa, Artificial Sequence
  Cyclic GFR-binding peptide
  MOD_RES (2), (2): Xaa is C or S
AXELHEELRSMEGLLKPKKRVYEMIQVTINSHH

SEQ ID NO: 56735 - protein, 29 aa, Artificial Sequence
  Cyclic GFR-binding peptide
EELVQVEKHQGQHPKIRVKAMKVSRQGTP

SEQ ID NO: 56736 - protein, 35 aa, Artificial Sequence
  Cyclic GFR-binding peptide
  MOD_RES (29), (29): Xaa is C or S
FVTAKKHQGQHPKIRIKRMQVPREETPVXELGEDN

SEQ ID NO: 56737 - protein, 34 aa, Artificial Sequence; identical to SEQ ID NO: 14246
  Cyclic GFR-binding peptide

SEQ ID NO: 56738 - protein, 36 aa, Artificial Sequence; identical to SEQ ID NO: 14245
  Cyclic GFR-binding peptide
  MOD_RES (34), (34): Xaa is C or S

SEQ ID NO: 56739 - protein, 25 aa, Artificial Sequence
  Cyclic GFR-binding peptide
LRVTAKKLKPKKRVYEIKRVQVPRH

SEQ ID NO: 56740 - protein, 40 aa, Artificial Sequence; identical to SEQ ID NO: 14249
  Cyclic GFR-binding peptide
  MOD_RES (37), (37): Xaa is C or S

SEQ ID NO: 56741 - protein, 36 aa, Artificial Sequence; identical to SEQ ID NO: 14248
  Cyclic GFR-binding peptide
  MOD_RES (2), (36): Xaa is C or S

SEQ ID NO: 56742 - protein, 42 aa, Artificial Sequence; identical to SEQ ID NO: 14250
  Cyclic GFR-binding peptide
  MOD_RES (2), (4), (41): Xaa is C or S

SEQ ID NO: 56743 - protein, 35 aa, Artificial Sequence; identical to SEQ ID NO: 14251
  Cyclic GFR-binding peptide
  MOD_RES (1), (1): Xaa is C or S

SEQ ID NO: 56744 - protein, 38 aa, Artificial Sequence; identical to SEQ ID NO: 14252
  Cyclic GFR-binding peptide
  MOD_RES (34), (34): Xaa is C or S

SEQ ID NO: 56745 - protein, 35 aa, Artificial Sequence; identical to SEQ ID NO: 14253
  Cyclic GFR-binding peptide
  MOD_RES (2), (2): Xaa is C or S

SEQ ID NO: 56746 - protein, 27 aa, Artificial Sequence
  Cyclic GFR-binding peptide
ELVTAKKHQGQHPKIRIKRMQVPRQGT

SEQ ID NO: 56747 - protein, 35 aa, Artificial Sequence
  Cyclic GFR-binding peptide
  MOD_RES (1), (3): Xaa is C or S
XEXQSHEELVQVEKHQGQHPKIRVKAMKVSRQGTP

SEQ ID NO: 56748 - protein, 33 aa, Artificial Sequence
  Cyclic GFR-binding peptide
  MOD_RES (33), (33): Xaa is C or S
ELRSMEGLLKPKKRVYEMIQVTINSHHVRSPQX

SEQ ID NO: 56749 - protein, 31 aa, Artificial Sequence
  Cyclic GFR-binding peptide
HQLFVQVEKHQGQHPKIRVKAMKVSREETPV

SEQ ID NO: 56750 - protein, 36 aa, Artificial Sequence
  Cyclic GFR-binding peptide
  MOD_RES (32), (32): Xaa is C or S
LRVTAKKLKPKKRVYEIKRVQVPRHHVRSPQXKVSS

SEQ ID NO: 56751 - protein, 33 aa, Artificial Sequence
  Cyclic GFR-binding peptide
  MOD_RES (1), (1): Xaa is C or S
XELHEELRVTAKKLKPKKRVYEIKRVQVPRHHV

SEQ ID NO: 56752 - protein, 34 aa, Artificial Sequence
  Cyclic GFR-binding peptide
  MOD_RES (30), (30): Xaa is C or S
LFSMEGLHQGQHPKIRMIQMTINSEETPVXELGE

SEQ ID NO: 56753 - protein, 40 aa, Artificial Sequence; identical to SEQ ID NO: 14258
  Cyclic GFR-binding peptide
  MOD_RES (34), (34): Xaa is C or S

SEQ ID NO: 56754 - protein, 27 aa, Artificial Sequence
  Cyclic GFR-binding peptide
EELSMEGIHQGQHPKIRMIQMTINSQG

SEQ ID NO: 56755 - protein, 35 aa, Artificial Sequence; identical to SEQ ID NO: 14259
  Cyclic GFR-binding peptide
  MOD_RES (34), (34): Xaa is C or S

SEQ ID NO: 56756 - protein, 30 aa, Artificial Sequence
  Cyclic GFR-binding peptide
RSMEGLLKPKKRVYEMIQVTINSHHVRSPQ

SEQ ID NO: 56757 - protein, 32 aa, Artificial Sequence
  Cyclic GFR-binding peptide
ELRSMEGLLKPKKRVYEMIQVTINSHHVRSPQ

SEQ ID NO: 56758 - protein, 31 aa, Artificial Sequence
  Cyclic GFR-binding peptide
  MOD_RES (1), (1): Xaa is C or S
XQSHEELVTAKKHQGQHPKIRIKRMQVPRQG

SEQ ID NO: 56759 - protein, 38 aa, Artificial Sequence; identical to SEQ ID NO: 14261
  Cyclic GFR-binding peptide
  MOD_RES (1), (35): Xaa is C or S

SEQ ID NO: 56760 - protein, 25 aa, Artificial Sequence
  Cyclic GFR-binding peptide
QLFVQVEKHQGQHPKIRVKAMKVSR

SEQ ID NO: 56761 - protein, 35 aa, Artificial Sequence; identical to SEQ ID NO: 14263
  Cyclic GFR-binding peptide
  MOD_RES (35), (35): Xaa is C or S

SEQ ID NO: 56762 - protein, 34 aa, Artificial Sequence
  Cyclic GFR-binding peptide
  MOD_RES (32), (32): Xaa is C or S
HEELVTAKKHQGQHPKIRIKRMQVPRQGTPVXEL

SEQ ID NO: 56763 - protein, 36 aa, Artificial Sequence
  Cyclic GFR-binding peptide
  MOD_RES (30), (30): Xaa is C or S
ELSMEGIHQGQHPKIRMIQMTINSQGTPVXELGEDN

SEQ ID NO: 56764 - protein, 28 aa, Artificial Sequence
  Cyclic GFR-binding peptide
ELTSMEGIFIPKKRVIEMIQVTINSLQV

SEQ ID NO: 56765 - protein, 30 aa, Artificial Sequence
  Cyclic GFR-binding peptide
SHEELSMEGIHQGQHPKIRMIQMTINSQGT

SEQ ID NO: 56766 - protein, 36 aa, Artificial Sequence; identical to SEQ ID NO: 14266
  Cyclic GFR-binding peptide
  MOD_RES (2), (36): Xaa is C or S

SEQ ID NO: 56767 - protein, 34 aa, Artificial Sequence
  Cyclic GFR-binding peptide
  MOD_RES (30), (30): Xaa is C or S
LFVQVEKHQGQHPKIRVKAMKVSREETPVXELGE

SEQ ID NO: 56768 - protein, 31 aa, Artificial Sequence
  Cyclic GFR-binding peptide
QSHEELSMEGIHQGQHPKIRMIQMTINSQGT

SEQ ID NO: 56769 - protein, 35 aa, Artificial Sequence; identical to SEQ ID NO: 14267
  Cyclic GFR-binding peptide
  MOD_RES (34), (34): Xaa is C or S

SEQ ID NO: 56770 - protein, 34 aa, Artificial Sequence
  Cyclic GFR-binding peptide
  MOD_RES (29), (29): Xaa is C or S
FVTAKKHQGQHPKIRIKRMQVPREETPVXELGED

SEQ ID NO: 56771 - protein, 36 aa, Artificial Sequence; identical to SEQ ID NO: 14269
  Cyclic GFR-binding peptide
  MOD_RES (2), (2): Xaa is C or S

SEQ ID NO: 56772 - protein, 31 aa, Artificial Sequence
  Cyclic GFR-binding peptide
ALHDELTSMEGLFIPKKRVIEMIQVTINSLQ

SEQ ID NO: 56773 - protein, 27 aa, Artificial Sequence
  Cyclic GFR-binding peptide
FVTAKKHQGQHPKIRIKRMQVPREETP

SEQ ID NO: 56774 - protein, 25 aa, Artificial Sequence
  Cyclic GFR-binding peptide
SMEGIHQGQHPKIRMIQMTINSQGT

SEQ ID NO: 56775 - protein, 35 aa, Artificial Sequence; identical to SEQ ID NO: 14274
  Cyclic GFR-binding peptide
  MOD_RES (33), (33): Xaa is C or S

SEQ ID NO: 56776 - protein, 41 aa, Artificial Sequence; identical to SEQ ID NO: 14275
  Cyclic GFR-binding peptide
  MOD_RES (37), (37): Xaa is C or S

SEQ ID NO: 56777 - protein, 30 aa, Artificial Sequence
  Cyclic GFR-binding peptide
LRSMEGLLKPKKRVYEMIQVTINSHHVRSP

SEQ ID NO: 56778 - protein, 36 aa, Artificial Sequence; identical to SEQ ID NO: 14277
  Cyclic GFR-binding peptide
  MOD_RES (36), (36): Xaa is C or S

SEQ ID NO: 56779 - protein, 35 aa, Artificial Sequence
  Cyclic GFR-binding peptide
  MOD_RES (2), (4): Xaa is C or S
EXKXALHDELTVQVEKFIPKKRVIEVKAVKVSRLQ

SEQ ID NO: 56780 - protein, 34 aa, Artificial Sequence
  Cyclic GFR-binding peptide
  MOD_RES (31), (31): Xaa is C or S
QLFSMEGLHQGQHPKIRMIQMTINSEETPVXELG

SEQ ID NO: 56781 - protein, 35 aa, Artificial Sequence
  Cyclic GFR-binding peptide
  MOD_RES (32), (32): Xaa is C or S
LTVQVEKFIPKKRVIEVKAVKVSRLQVQTPRXQVN

SEQ ID NO: 56782 - protein, 35 aa, Artificial Sequence
  Cyclic GFR-binding peptide
  MOD_RES (1), (3): Xaa is C or S
XEXKNHQLFVQVEKHQGQHPKIRVKAMKVSREETP

SEQ ID NO: 56783 - protein, 32 aa, Artificial Sequence
  Cyclic GFR-binding peptide
LHEELRSMEGLLKPKKRVYEMIQVTINSHHVR

SEQ ID NO: 56784 - protein, 42 aa, Artificial Sequence; identical to SEQ ID NO: 14281
  Cyclic GFR-binding peptide
  MOD_RES (1), (3), (40): Xaa is C or S

SEQ ID NO: 56785 - protein, 35 aa, Artificial Sequence
  Cyclic GFR-binding peptide
  MOD_RES (32), (32): Xaa is C or S
LRVTAKKLKPKKRVYEIKRVQVPRHHVRSPQXKVS

SEQ ID NO: 56786 - protein, 30 aa, Artificial Sequence
  Cyclic GFR-binding peptide
LHDELTSMEGLFIPKKRVIEMIQVTINSLQ

SEQ ID NO: 56787 - protein, 32 aa, Artificial Sequence
  Cyclic GFR-binding peptide
  MOD_RES (1), (1): Xaa is C or S
XALHDELTSMEGLFIPKKRVIEMIQVTINSLQ

SEQ ID NO: 56788 - protein, 30 aa, Artificial Sequence
  Cyclic GFR-binding peptide
ELRVTAKKLKPKKRVYEIKRVQVPRHHVRS

SEQ ID NO: 56789 - protein, 34 aa, Artificial Sequence
  Cyclic GFR-binding peptide
  MOD_RES (30), (30): Xaa is C or S
SMEGLFIPKKRVIEMIQVTINSLQVQTPRXQVNR

SEQ ID NO: 56790 - protein, 31 aa, Artificial Sequence
  Cyclic GFR-binding peptide
HQLFSMEGLHQGQHPKIRMIQMTINSEETPV

SEQ ID NO: 56791 - protein, 32 aa, Artificial Sequence
  Cyclic GFR-binding peptide
KNHQLFVQVEKHQGQHPKIRVKAMKVSREETP

SEQ ID NO: 56792 - protein, 28 aa, Artificial Sequence
  Cyclic GFR-binding peptide
  MOD_RES (28), (28): Xaa is C or S
VQVEKHQGQHPKIRVKAMKVSRQGTPVX

SEQ ID NO: 56793 - protein, 34 aa, Artificial Sequence
  Cyclic GFR-binding peptide
  MOD_RES (2), (4): Xaa is C or S
RXEXQSHEELVQVEKHQGQHPKIRVKAMKVSRQG

SEQ ID NO: 56794 - protein, 33 aa, Artificial Sequence
  Cyclic GFR-binding peptide
  MOD_RES (1), (1): Xaa is C or S
XELHEELRSMEGLLKPKKRVYEMIQVTINSHHV

SEQ ID NO: 56795 - protein, 37 aa, Artificial Sequence
  Cyclic GFR-binding peptide
  MOD_RES (34), (34): Xaa is C or S
DELTSMEGLFIPKKRVIEMIQVTINSLQVQTPRXQVN

SEQ ID NO: 56796 - protein, 27 aa, Artificial Sequence
  Cyclic GFR-binding peptide
FSMEGLHQGQHPKIRMIQMTINSEETP

SEQ ID NO: 56797 - protein, 36 aa, Artificial Sequence; identical to SEQ ID NO: 14284
  Cyclic GFR-binding peptide
  MOD_RES (35), (35): Xaa is C or S

SEQ ID NO: 56798 - protein, 31 aa, Artificial Sequence
  Cyclic GFR-binding peptide
LHDELTSMEGLFIPKKRVIEMIQVTINSLQV

SEQ ID NO: 56799 - protein, 28 aa, Artificial Sequence
  Cyclic GFR-binding peptide
LRSMEGILKPKKRVYEMIQVTINSHHVR

SEQ ID NO: 56800 - protein, 32 aa, Artificial Sequence
  Cyclic GFR-binding peptide
  MOD_RES (30), (30): Xaa is C or S
ELVTAKKHQGQHPKIRIKRMQVPRQGTPVXEL

SEQ ID NO: 56801 - protein, 26 aa, Artificial Sequence
  Cyclic GFR-binding peptide
EELRVTAKKLKPKKRVYEIKRVQVPR

SEQ ID NO: 56802 - protein, 30 aa, Artificial Sequence
  Cyclic GFR-binding peptide
EELSMEGIHQGQHPKIRMIQMTINSQGTPV

SEQ ID NO: 56803 - protein, 34 aa, Artificial Sequence
  Cyclic GFR-binding peptide
  MOD_RES (2), (4): Xaa is C or S
RXEXQSHEELVTAKKHQGQHPKIRIKRMQVPRQG

SEQ ID NO: 56804 - protein, 39 aa, Artificial Sequence; identical to SEQ ID NO: 14290
  Cyclic GFR-binding peptide
  MOD_RES (34), (34): Xaa is C or S

SEQ ID NO: 56805 - protein, 38 aa, Artificial Sequence; identical to SEQ ID NO: 14291
  Cyclic GFR-binding peptide
  MOD_RES (2), (4), (38): Xaa is C or S

SEQ ID NO: 56806 - protein, 37 aa, Artificial Sequence
  Cyclic GFR-binding peptide
  MOD_RES (31), (31): Xaa is C or S
EELSMEGIHQGQHPKIRMIQMTINSQGTPVXELGEDN

SEQ ID NO: 56807 - protein, 31 aa, Artificial Sequence
  Cyclic GFR-binding peptide
  MOD_RES (31), (31): Xaa is C or S
EELVQVEKHQGQHPKIRVKAMKVSRQGTPVX

SEQ ID NO: 56808 - protein, 44 aa, Artificial Sequence; identical to SEQ ID NO: 14295
  Cyclic GFR-binding peptide
  MOD_RES (2), (4), (38): Xaa is C or S

SEQ ID NO: 56809 - protein, 36 aa, Artificial Sequence; identical to SEQ ID NO: 14296
  Cyclic GFR-binding peptide
  MOD_RES (36), (36): Xaa is C or S

SEQ ID NO: 56810 - protein, 39 aa, Artificial Sequence; identical to SEQ ID NO: 14297
  Cyclic GFR-binding peptide
  MOD_RES (2), (36): Xaa is C or S

SEQ ID NO: 56811 - protein, 43 aa, Artificial Sequence; identical to SEQ ID NO: 14298
  Cyclic GFR-binding peptide
  MOD_RES (2), (4), (41): Xaa is C or S

SEQ ID NO: 56812 - protein, 36 aa, Artificial Sequence; identical to SEQ ID NO: 14299
  Cyclic GFR-binding peptide
  MOD_RES (1), (35): Xaa is C or S

SEQ ID NO: 56813 - protein, 28 aa, Artificial Sequence
  Cyclic GFR-binding peptide
ELVTAKKHQGQHPKIRIKRMQVPRQGTP

SEQ ID NO: 56814 - protein, 25 aa, Artificial Sequence
  Cyclic GFR-binding peptide
RSMEGILKPKKRVYEMIQVTINSHH

SEQ ID NO: 56815 - protein, 42 aa, Artificial Sequence; identical to SEQ ID NO: 14300
  Cyclic GFR-binding peptide
  MOD_RES (2), (4), (38): Xaa is C or S

SEQ ID NO: 56816 - protein, 34 aa, Artificial Sequence
  Cyclic GFR-binding peptide
  MOD_RES (32), (32): Xaa is C or S
LRSMEGLLKPKKRVYEMIQVTINSHHVRSPQXKV

SEQ ID NO: 56817 - protein, 33 aa, Artificial Sequence
  Cyclic GFR-binding peptide
  MOD_RES (30), (30): Xaa is C or S
VQVEKFIPKKRVIEVKAVKVSRLQVQTPRXQVN

SEQ ID NO: 56818 - protein, 28 aa, Artificial Sequence
  Cyclic GFR-binding peptide
QLFVQVEKHQGQHPKIRVKAMKVSREET

SEQ ID NO: 56819 - protein, 29 aa, Artificial Sequence
  Cyclic GFR-binding peptide
ELVQVEKHQGQHPKIRVKAMKVSRQGTPV

SEQ ID NO: 56820 - protein, 32 aa, Artificial Sequence
  Cyclic GFR-binding peptide
  MOD_RES (1), (1): Xaa is C or S
XELHEELRVTAKKLKPKKRVYEIKRVQVPRHH

SEQ ID NO: 56821 - protein, 44 aa, Artificial Sequence; identical to SEQ ID NO: 14303
  Cyclic GFR-binding peptide
  MOD_RES (2), (4), (38): Xaa is C or S

SEQ ID NO: 56822 - protein, 37 aa, Artificial Sequence
  Cyclic GFR-binding peptide
  MOD_RES (33), (33): Xaa is C or S
ELTVQVEKFIPKKRVIEVKAVKVSRLQVQTPRXQVNR

SEQ ID NO: 56823 - protein, 32 aa, Artificial Sequence
  Cyclic GFR-binding peptide
  MOD_RES (29), (29): Xaa is C or S
FVTAKKHQGQHPKIRIKRMQVPREETPVXELG

SEQ ID NO: 56824 - protein, 37 aa, Artificial Sequence; identical to SEQ ID NO: 14304
  Cyclic GFR-binding peptide
  MOD_RES (2), (2): Xaa is C or S

SEQ ID NO: 56825 - protein, 31 aa, Artificial Sequence
  Cyclic GFR-binding peptide
LHEELRSMEGILKPKKRVYEMIQVTINSHHV

SEQ ID NO: 56826 - protein, 36 aa, Artificial Sequence
  Cyclic GFR-binding peptide
  MOD_RES (33), (33): Xaa is C or S
ELTSMEGLFIPKKRVIEMIQVTINSLQVQTPRXQVN

SEQ ID NO: 56827 - protein, 36 aa, Artificial Sequence
  Cyclic GFR-binding peptide
  MOD_RES (2), (4): Xaa is C or S
RXEXQSHEELSMEGIHQGQHPKIRMIQMTINSQGTP

SEQ ID NO: 56828 - protein, 35 aa, Artificial Sequence
  Cyclic GFR-binding peptide
  MOD_RES (31), (31): Xaa is C or S
EELVTAKKHQGQHPKIRIKRMQVPRQGTPVXELGE

SEQ ID NO: 56829 - protein, 30 aa, Artificial Sequence
  Cyclic GFR-binding peptide
NHQLFSMEGLHQGQHPKIRMIQMTINSEET

SEQ ID NO: 56830 - protein, 31 aa, Artificial Sequence
  Cyclic GFR-binding peptide
NHQLFVTAKKHQGQHPKIRIKRMQVPREETP

SEQ ID NO: 56831 - protein, 33 aa, Artificial Sequence
  Cyclic GFR-binding peptide
  MOD_RES (29), (29): Xaa is C or S
LVQVEKHQGQHPKIRVKAMKVSRQGTPVXELGE

SEQ ID NO: 56832 - protein, 27 aa, Artificial Sequence
  Cyclic GFR-binding peptide
HDELTVQVEKFIPKKRVIEVKAVKVSR

SEQ ID NO: 56833 - protein, 34 aa, Artificial Sequence; identical to SEQ ID NO: 14308
  Cyclic GFR-binding peptide
  MOD_RES (33), (33): Xaa is C or S

SEQ ID NO: 56834 - protein, 31 aa, Artificial Sequence
  Cyclic GFR-binding peptide
SHEELVQVEKHQGQHPKIRVKAMKVSRQGTP

SEQ ID NO: 56835 - protein, 39 aa, Artificial Sequence; identical to SEQ ID NO: 14309
  Cyclic GFR-binding peptide
  MOD_RES (2), (39): Xaa is C or S

SEQ ID NO: 56836 - protein, 23 aa, Artificial Sequence
  Cyclic GFR-binding peptide
VTAKKHQGQHPKIRIKRMQVPRQ

SEQ ID NO: 56837 - protein, 34 aa, Artificial Sequence
  Cyclic GFR-binding peptide
  MOD_RES (32), (32): Xaa is C or S
HEELVQVEKHQGQHPKIRVKAMKVSRQGTPVXEL

SEQ ID NO: 56838 - protein, 38 aa, Artificial Sequence; identical to SEQ ID NO: 14313
  Cyclic GFR-binding peptide
  MOD_RES (34), (34): Xaa is C or S

SEQ ID NO: 56839 - protein, 30 aa, Artificial Sequence
  Cyclic GFR-binding peptide
  MOD_RES (28), (28): Xaa is C or S
VTAKKHQGQHPKIRIKRMQVPRQGTPVXEL

SEQ ID NO: 56840 - protein, 24 aa, Artificial Sequence
  Cyclic GFR-binding peptide
SMEGLHQGQHPKIRMIQMTINSEE

SEQ ID NO: 56841 - protein, 32 aa, Artificial Sequence
  Cyclic GFR-binding peptide
  MOD_RES (31), (31): Xaa is C or S
RSMEGLLKPKKRVYEMIQVTINSHHVRSPQXK

SEQ ID NO: 56842 - protein, 31 aa, Artificial Sequence
  Cyclic GFR-binding peptide
  MOD_RES (2), (2): Xaa is C or S
AXELHEELRSMEGILKPKKRVYEMIQVTINS

SEQ ID NO: 56843 - protein, 34 aa, Artificial Sequence
  Cyclic GFR-binding peptide
  MOD_RES (31), (31): Xaa is C or S
QLFVTAKKHQGQHPKIRIKRMQVPREETPVXELG

SEQ ID NO: 56844 - protein, 33 aa, Artificial Sequence
  Cyclic GFR-binding peptide
  MOD_RES (28), (28): Xaa is C or S
SMEGIHQGQHPKIRMIQMTINSQGTPVXELGED

SEQ ID NO: 56845 - protein, 32 aa, Artificial Sequence
  Cyclic GFR-binding peptide
ALHDELTVQVEKFIPKKRVIEVKAVKVSRLQV

SEQ ID NO: 56846 - protein, 38 aa, Artificial Sequence
  Cyclic GFR-binding peptide
  MOD_RES (32), (32): Xaa is C or S
HQLFSMEGLHQGQHPKIRMIQMTINSEETPVXELGEDN

SEQ ID NO: 56847 - protein, 31 aa, Artificial Sequence
  Cyclic GFR-binding peptide
  MOD_RES (2), (2): Xaa is C or S
EXQSHEELVQVEKHQGQHPKIRVKAMKVSRQ

SEQ ID NO: 56848 - protein, 43 aa, Artificial Sequence; identical to SEQ ID NO: 14318
  Cyclic GFR-binding peptide
  MOD_RES (1), (3), (40): Xaa is C or S

SEQ ID NO: 56849 - protein, 30 aa, Artificial Sequence
  Cyclic GFR-binding peptide
  MOD_RES (1), (1): Xaa is C or S
XKNHQLFSMEGLHQGQHPKIRMIQMTINSE

SEQ ID NO: 56850 - protein, 34 aa, Artificial Sequence; identical to SEQ ID NO: 14321
  Cyclic GFR-binding peptide
  MOD_RES (34), (34): Xaa is C or S

SEQ ID NO: 56851 - protein, 39 aa, Artificial Sequence; identical to SEQ ID NO: 14322
  Cyclic GFR-binding peptide
  MOD_RES (37), (37): Xaa is C or S

SEQ ID NO: 56852 - protein, 29 aa, Artificial Sequence
  Cyclic GFR-binding peptide
RSMEGILKPKKRVYEMIQVTINSHHVRSP

SEQ ID NO: 56853 - protein, 35 aa, Artificial Sequence; identical to SEQ ID NO: 14324
  Cyclic GFR-binding peptide
  MOD_RES (34), (34): Xaa is C or S

SEQ ID NO: 56854 - protein, 30 aa, Artificial Sequence
  Cyclic GFR-binding peptide
ELHEELRVTAKKLKPKKRVYEIKRVQVPRH

SEQ ID NO: 56855 - protein, 33 aa, Artificial Sequence
  Cyclic GFR-binding peptide
  MOD_RES (1), (3): Xaa is C or S
XKXALHDELTSMEGLFIPKKRVIEMIQVTINSL

SEQ ID NO: 56856 - protein, 37 aa, Artificial Sequence; identical to SEQ ID NO: 14326
  Cyclic GFR-binding peptide
  MOD_RES (1), (1): Xaa is C or S

SEQ ID NO: 56857 - protein, 30 aa, Artificial Sequence
  Cyclic GFR-binding peptide
ELHEELRSMEGILKPKKRVYEMIQVTINSH

SEQ ID NO: 56858 - protein, 36 aa, Artificial Sequence; identical to SEQ ID NO: 14327
  Cyclic GFR-binding peptide
  MOD_RES (2), (36): Xaa is C or S

SEQ ID NO: 56859 - protein, 40 aa, Artificial Sequence; identical to SEQ ID NO: 14330
  Cyclic GFR-binding peptide
  MOD_RES (2), (4): Xaa is C or S

SEQ ID NO: 56860 - protein, 40 aa, Artificial Sequence; identical to SEQ ID NO: 14331
  Cyclic GFR-binding peptide
  MOD_RES (1), (38): Xaa is C or S

SEQ ID NO: 56861 - protein, 33 aa, Artificial Sequence
  Cyclic GFR-binding peptide
ALHDELTSMEGLFIPKKRVIEMIQVTINSLQVQ

SEQ ID NO: 56862 - protein, 36 aa, Artificial Sequence
  Cyclic GFR-binding peptide
  MOD_RES (34), (34): Xaa is C or S
DELTSMEGLFIPKKRVIEMIQVTINSLQVQTPRXQV

SEQ ID NO: 56863 - protein, 36 aa, Artificial Sequence; identical to SEQ ID NO: 14332
  Cyclic GFR-binding peptide
  MOD_RES (35), (35): Xaa is C or S

SEQ ID NO: 56864 - protein, 35 aa, Artificial Sequence; identical to SEQ ID NO: 14333
  Cyclic GFR-binding peptide

SEQ ID NO: 56865 - protein, 39 aa, Artificial Sequence; identical to SEQ ID NO: 14334
  Cyclic GFR-binding peptide
  MOD_RES (34), (34): Xaa is C or S

SEQ ID NO: 56866 - protein, 31 aa, Artificial Sequence
  Cyclic GFR-binding peptide
ELHEELRSMEGLLKPKKRVYEMIQVTINSHH

SEQ ID NO: 56867 - protein, 43 aa, Artificial Sequence; identical to SEQ ID NO: 14336
  Cyclic GFR-binding peptide
  MOD_RES (1), (3), (37): Xaa is C or S

SEQ ID NO: 56868 - protein, 40 aa, Artificial Sequence; identical to SEQ ID NO: 14337
  Cyclic GFR-binding peptide
  MOD_RES (1), (3), (40): Xaa is C or S

SEQ ID NO: 56869 - protein, 40 aa, Artificial Sequence; identical to SEQ ID NO: 14338
  Cyclic GFR-binding peptide
  MOD_RES (1), (3), (40): Xaa is C or S

SEQ ID NO: 56870 - protein, 33 aa, Artificial Sequence
  Cyclic GFR-binding peptide
  MOD_RES (31), (31): Xaa is C or S
TVQVEKFIPKKRVIEVKAVKVSRLQVQTPRXQV

SEQ ID NO: 56871 - protein, 36 aa, Artificial Sequence; identical to SEQ ID NO: 14341
  Cyclic GFR-binding peptide
  MOD_RES (36), (36): Xaa is C or S

SEQ ID NO: 56872 - protein, 24 aa, Artificial Sequence
  Cyclic GFR-binding peptide
LRSMEGILKPKKRVYEMIQVTINS

SEQ ID NO: 56873 - protein, 33 aa, Artificial Sequence; identical to SEQ ID NO: 14340
  Cyclic GFR-binding peptide

SEQ ID NO: 56874 - protein, 28 aa, Artificial Sequence
  Cyclic GFR-binding peptide
ELTSMEGLFIPKKRVIEMIQVTINSLQV

SEQ ID NO: 56875 - protein, 33 aa, Artificial Sequence
  Cyclic GFR-binding peptide
  MOD_RES (1), (1): Xaa is C or S
XELHEELRSMEGILKPKKRVYEMIQVTINSHHV

SEQ ID NO: 56876 - protein, 33 aa, Artificial Sequence; identical to SEQ ID NO: 14342
  Cyclic GFR-binding peptide

SEQ ID NO: 56877 - protein, 27 aa, Artificial Sequence
  Cyclic GFR-binding peptide
QLFVQVEKHQGQHPKIRVKAMKVSREE

SEQ ID NO: 56878 - protein, 28 aa, Artificial Sequence
  Cyclic GFR-binding peptide
EELVTAKKHQGQHPKIRIKRMQVPRQGT

SEQ ID NO: 56879 - protein, 34 aa, Artificial Sequence; identical to SEQ ID NO: 14343
  Cyclic GFR-binding peptide

SEQ ID NO: 56880 - protein, 35 aa, Artificial Sequence
  Cyclic GFR-binding peptide
  MOD_RES (31), (31): Xaa is C or S
TSMEGLFIPKKRVIEMIQVTINSLQVQTPRXQVNR

SEQ ID NO: 56881 - protein, 26 aa, Artificial Sequence
  Cyclic GFR-binding peptide
HEELSMEGIHQGQHPKIRMIQMTINS

SEQ ID NO: 56882 - protein, 40 aa, Artificial Sequence; identical to SEQ ID NO: 14344
  Cyclic GFR-binding peptide
  MOD_RES (37), (37): Xaa is C or S

SEQ ID NO: 56883 - protein, 30 aa, Artificial Sequence
  Cyclic GFR-binding peptide
ALHDELTSMEGLFIPKKRVIEMIQVTINSL

SEQ ID NO: 56884 - protein, 30 aa, Artificial Sequence
  Cyclic GFR-binding peptide
LRVTAKKLKPKKRVYEIKRVQVPRHHVRSP

SEQ ID NO: 56885 - protein, 34 aa, Artificial Sequence; identical to SEQ ID NO: 14347
  Cyclic GFR-binding peptide
  MOD_RES (1), (1): Xaa is C or S

SEQ ID NO: 56886 - protein, 31 aa, Artificial Sequence
  Cyclic GFR-binding peptide
KNHQLFVQVEKHQGQHPKIRVKAMKVSREET

SEQ ID NO: 56887 - protein, 33 aa, Artificial Sequence
  Cyclic GFR-binding peptide
  MOD_RES (1), (1): Xaa is C or S
XALHDELTVQVEKFIPKKRVIEVKAVKVSRLQV

SEQ ID NO: 56888 - protein, 34 aa, Artificial Sequence
  Cyclic GFR-binding peptide
  MOD_RES (34), (34): Xaa is C or S
EELRVTAKKLKPKKRVYEIKRVQVPRHHVRSPQX

SEQ ID NO: 56889 - protein, 27 aa, Artificial Sequence
  Cyclic GFR-binding peptide
TSMEGIFIPKKRVIEMIQVTINSLQVQ

SEQ ID NO: 56890 - protein, 36 aa, Artificial Sequence; identical to SEQ ID NO: 14348
  Cyclic GFR-binding peptide
  MOD_RES (35), (35): Xaa is C or S

SEQ ID NO: 56891 - protein, 31 aa, Artificial Sequence
  Cyclic GFR-binding peptide
ELHEELRVTAKKLKPKKRVYEIKRVQVPRHH

SEQ ID NO: 56892 - protein, 40 aa, Artificial Sequence; identical to SEQ ID NO: 14349
  Cyclic GFR-binding peptide
  MOD_RES (34), (34): Xaa is C or S

SEQ ID NO: 56893 - protein, 32 aa, Artificial Sequence
  Cyclic GFR-binding peptide
  MOD_RES (32), (32): Xaa is C or S
HEELVQVEKHQGQHPKIRVKAMKVSRQGTPVX

SEQ ID NO: 56894 - protein, 31 aa, Artificial Sequence
  Cyclic GFR-binding peptide
QSHEELVQVEKHQGQHPKIRVKAMKVSRQGT

SEQ ID NO: 56895 - protein, 36 aa, Artificial Sequence; identical to SEQ ID NO: 14350
  Cyclic GFR-binding peptide

SEQ ID NO: 56896 - protein, 25 aa, Artificial Sequence
  Cyclic GFR-binding peptide
LTVQVEKFIPKKRVIEVKAVKVSRL

SEQ ID NO: 56897 - protein, 26 aa, Artificial Sequence
  Cyclic GFR-binding peptide
TSMEGLFIPKKRVIEMIQVTINSLQV

SEQ ID NO: 56898 - protein, 40 aa, Artificial Sequence; identical to SEQ ID NO: 14354
  Cyclic GFR-binding peptide
  MOD_RES (2), (39): Xaa is C or S

SEQ ID NO: 56899 - protein, 27 aa, Artificial Sequence
  Cyclic GFR-binding peptide
SHEELVQVEKHQGQHPKIRVKAMKVSR

SEQ ID NO: 56900 - protein, 38 aa, Artificial Sequence; identical to SEQ ID NO: 14355
  Cyclic GFR-binding peptide
  MOD_RES (36), (36): Xaa is C or S

SEQ ID NO: 56901 - protein, 32 aa, Artificial Sequence
  Cyclic GFR-binding peptide
  MOD_RES (1), (3): Xaa is C or S
XAXELHEELRSMEGLLKPKKRVYEMIQVTINS

SEQ ID NO: 56902 - protein, 38 aa, Artificial Sequence; identical to SEQ ID NO: 14357
  Cyclic GFR-binding peptide
  MOD_RES (2), (4), (38): Xaa is C or S

SEQ ID NO: 56903 - protein, 35 aa, Artificial Sequence
  Cyclic GFR-binding peptide
  MOD_RES (32), (32): Xaa is C or S
LTSMEGLFIPKKRVIEMIQVTINSLQVQTPRXQVN

SEQ ID NO: 56904 - protein, 43 aa, Artificial Sequence; identical to SEQ ID NO: 14358
  Cyclic GFR-binding peptide
  MOD_RES (1), (3), (40): Xaa is C or S

SEQ ID NO: 56905 - protein, 31 aa, Artificial Sequence
  Cyclic GFR-binding peptide
DELTSMEGIFIPKKRVIEMIQVTINSLQVQT

SEQ ID NO: 56906 - protein, 40 aa, Artificial Sequence; identical to SEQ ID NO: 14359
  Cyclic GFR-binding peptide
  MOD_RES (2), (39): Xaa is C or S

SEQ ID NO: 56907 - protein, 35 aa, Artificial Sequence
  Cyclic GFR-binding peptide
  MOD_RES (29), (29): Xaa is C or S
LSMEGIHQGQHPKIRMIQMTINSQGTPVXELGEDN

SEQ ID NO: 56908 - protein, 43 aa, Artificial Sequence; identical to SEQ ID NO: 14360
  Cyclic GFR-binding peptide
  MOD_RES (1), (3), (40): Xaa is C or S

SEQ ID NO: 56909 - protein, 26 aa, Artificial Sequence
  Cyclic GFR-binding peptide
ELTSMEGLFIPKKRVIEMIQVTINSL

SEQ ID NO: 56910 - protein, 43 aa, Artificial Sequence; identical to SEQ ID NO: 14363
  Cyclic GFR-binding peptide
  MOD_RES (2), (4), (41): Xaa is C or S

SEQ ID NO: 56911 - protein, 24 aa, Artificial Sequence
  Cyclic GFR-binding peptide
VQVEKHQGQHPKIRVKAMKVSREE

SEQ ID NO: 56912 - protein, 33 aa, Artificial Sequence
  Cyclic GFR-binding peptide
DELTSMEGIFIPKKRVIEMIQVTINSLQVQTPR

SEQ ID NO: 56913 - protein, 35 aa, Artificial Sequence
  Cyclic GFR-binding peptide
  MOD_RES (1), (3): Xaa is C or S
XEXQSHEELVTAKKHQGQHPKIRIKRMQVPRQGTP

SEQ ID NO: 56914 - protein, 28 aa, Artificial Sequence
  Cyclic GFR-binding peptide
SMEGLLKPKKRVYEMIQVTINSHHVRSP

SEQ ID NO: 56915 - protein, 28 aa, Artificial Sequence
  Cyclic GFR-binding peptide
ELRSMEGILKPKKRVYEMIQVTINSHHV

SEQ ID NO: 56916 - protein, 29 aa, Artificial Sequence
  Cyclic GFR-binding peptide
QLFVQVEKHQGQHPKIRVKAMKVSREETP

SEQ ID NO: 56917 - protein, 41 aa, Artificial Sequence; identical to SEQ ID NO: 14367
  Cyclic GFR-binding peptide
  MOD_RES (2), (4), (38): Xaa is C or S

SEQ ID NO: 56918 - protein, 31 aa, Artificial Sequence
  Cyclic GFR-binding peptide
  MOD_RES (2), (2): Xaa is C or S
AXELHEELRSMEGLLKPKKRVYEMIQVTINS

SEQ ID NO: 56919 - protein, 27 aa, Artificial Sequence
  Cyclic GFR-binding peptide
LTSMEGLFIPKKRVIEMIQVTINSLQV

SEQ ID NO: 56920 - protein, 26 aa, Artificial Sequence
  Cyclic GFR-binding peptide
HEELVQVEKHQGQHPKIRVKAMKVSR

SEQ ID NO: 56921 - protein, 36 aa, Artificial Sequence; identical to SEQ ID NO: 14370
  Cyclic GFR-binding peptide
  MOD_RES (2), (36): Xaa is C or S

SEQ ID NO: 56922 - protein, 36 aa, Artificial Sequence; identical to SEQ ID NO: 14371
  Cyclic GFR-binding peptide
  MOD_RES (34), (34): Xaa is C or S

SEQ ID NO: 56923 - protein, 35 aa, Artificial Sequence
  Cyclic GFR-binding peptide
  MOD_RES (2), (2): Xaa is C or S
AXELHEELRVTAKKLKPKKRVYEIKRVQVPRHHVR

SEQ ID NO: 56924 - protein, 27 aa, Artificial Sequence
  Cyclic GFR-binding peptide
EELRVTAKKLKPKKRVYEIKRVQVPRH

SEQ ID NO: 56925 - protein, 39 aa, Artificial Sequence; identical to SEQ ID NO: 14372
  Cyclic GFR-binding peptide
  MOD_RES (2), (36): Xaa is C or S

SEQ ID NO: 56926 - protein, 32 aa, Artificial Sequence
  Cyclic GFR-binding peptide
  MOD_RES (2), (2): Xaa is C or S
AXELHEELRVTAKKLKPKKRVYEIKRVQVPRH

SEQ ID NO: 56927 - protein, 37 aa, Artificial Sequence; identical to SEQ ID NO: 14375
  Cyclic GFR-binding peptide
  MOD_RES (35), (35): Xaa is C or S

SEQ ID NO: 56928 - protein, 33 aa, Artificial Sequence
  Cyclic GFR-binding peptide
  MOD_RES (1), (3): Xaa is C or S
XAXELHEELRSMEGLLKPKKRVYEMIQVTINSH

SEQ ID NO: 56929 - protein, 24 aa, Artificial Sequence
  Cyclic GFR-binding peptide
LTSMEGIFIPKKRVIEMIQVTINS

SEQ ID NO: 56930 - protein, 40 aa, Artificial Sequence; identical to SEQ ID NO: 14378
  Cyclic GFR-binding peptide
  MOD_RES (2), (4), (38): Xaa is C or S

SEQ ID NO: 56931 - protein, 36 aa, Artificial Sequence
  Cyclic GFR-binding peptide
  MOD_RES (31), (31): Xaa is C or S
QLFVTAKKHQGQHPKIRIKRMQVPREETPVXELGED

SEQ ID NO: 56932 - protein, 33 aa, Artificial Sequence
  Cyclic GFR-binding peptide
  MOD_RES (32), (32): Xaa is C or S
LTSMEGIFIPKKRVIEMIQVTINSLQVQTPRXQ

SEQ ID NO: 56933 - protein, 23 aa, Artificial Sequence
  Cyclic GFR-binding peptide
SMEGLLKPKKRVYEMIQVTINSH

SEQ ID NO: 56934 - protein, 32 aa, Artificial Sequence
  Cyclic GFR-binding peptide
  MOD_RES (30), (30): Xaa is C or S
LFVQVEKHQGQHPKIRVKAMKVSREETPVXEL

SEQ ID NO: 56935 - protein, 33 aa, Artificial Sequence
  Cyclic GFR-binding peptide
  MOD_RES (1), (3): Xaa is C or S
XAXELHEELRSMEGILKPKKRVYEMIQVTINSH

SEQ ID NO: 56936 - protein, 41 aa, Artificial Sequence; identical to SEQ ID NO: 14379
  Cyclic GFR-binding peptide
  MOD_RES (1), (3), (37): Xaa is C or S

SEQ ID NO: 56937 - protein, 30 aa, Artificial Sequence
  Cyclic GFR-binding peptide
HEELRSMEGILKPKKRVYEMIQVTINSHHV

SEQ ID NO: 56938 - protein, 35 aa, Artificial Sequence
  Cyclic GFR-binding peptide
  MOD_RES (2), (4): Xaa is C or S
EXKXALHDELTSMEGIFIPKKRVIEMIQVTINSLQ

SEQ ID NO: 56939 - protein, 34 aa, Artificial Sequence
  Cyclic GFR-binding peptide
  MOD_RES (1), (3): Xaa is C or S
XAXELHEELRSMEGILKPKKRVYEMIQVTINSHH

SEQ ID NO: 56940 - protein, 36 aa, Artificial Sequence; identical to SEQ ID NO: 14382
  Cyclic GFR-binding peptide
  MOD_RES (1), (35): Xaa is C or S

SEQ ID NO: 56941 - protein, 31 aa, Artificial Sequence
  Cyclic GFR-binding peptide
  MOD_RES (28), (28): Xaa is C or S
VTAKKHQGQHPKIRIKRMQVPREETPVXELG

SEQ ID NO: 56942 - protein, 40 aa, Artificial Sequence; identical to SEQ ID NO: 14384
  Cyclic GFR-binding peptide
  MOD_RES (1), (3), (40): Xaa is C or S

SEQ ID NO: 56943 - protein, 40 aa, Artificial Sequence; identical to SEQ ID NO: 14385
  Cyclic GFR-binding peptide
  MOD_RES (36), (36): Xaa is C or S

SEQ ID NO: 56944 - protein, 29 aa, Artificial Sequence
  Cyclic GFR-binding peptide
TSMEGLFIPKKRVIEMIQVTINSLQVQTP

SEQ ID NO: 56945 - protein, 37 aa, Artificial Sequence; identical to SEQ ID NO: 14386
  Cyclic GFR-binding peptide
  MOD_RES (34), (34): Xaa is C or S

SEQ ID NO: 56946 - protein, 23 aa, Artificial Sequence
  Cyclic GFR-binding peptide
SMEGLHQGQHPKIRMIQMTINSE

SEQ ID NO: 56947 - protein, 40 aa, Artificial Sequence; identical to SEQ ID NO: 14387
  Cyclic GFR-binding peptide
  MOD_RES (34), (34): Xaa is C or S

SEQ ID NO: 56948 - protein, 37 aa, Artificial Sequence; identical to SEQ ID NO: 14388
  Cyclic GFR-binding peptide
  MOD_RES (1), (3), (37): Xaa is C or S

SEQ ID NO: 56949 - protein, 31 aa, Artificial Sequence
  Cyclic GFR-binding peptide
  MOD_RES (31), (31): Xaa is C or S
TSMEGIFIPKKRVIEMIQVTINSLQVQTPRX

SEQ ID NO: 56950 - protein, 30 aa, Artificial Sequence
  Cyclic GFR-binding peptide
  MOD_RES (29), (29): Xaa is C or S
LVTAKKHQGQHPKIRIKRMQVPRQGTPVXE

SEQ ID NO: 56951 - protein, 34 aa, Artificial Sequence; identical to SEQ ID NO: 14390
  Cyclic GFR-binding peptide
  MOD_RES (33), (33): Xaa is C or S

SEQ ID NO: 56952 - protein, 31 aa, Artificial Sequence
  Cyclic GFR-binding peptide
AAAAAAAAASMEGILKPKKRVYEMIQVTINS

SEQ ID NO: 56953 - protein, 34 aa, Artificial Sequence
  Cyclic GFR-binding peptide
  MOD_RES (33), (33): Xaa is C or S
ELTSMEGLFIPKKRVIEMIQVTINSLQVQTPRXQ

SEQ ID NO: 56954 - protein, 28 aa, Artificial Sequence
  Cyclic GFR-binding peptide
KNHQLFVQVEKHQGQHPKIRVKAMKVSR

SEQ ID NO: 56955 - protein, 42 aa, Artificial Sequence; identical to SEQ ID NO: 14393
  Cyclic GFR-binding peptide
  MOD_RES (2), (4), (41): Xaa is C or S

SEQ ID NO: 56956 - protein, 34 aa, Artificial Sequence; identical to SEQ ID NO: 14394
  Cyclic GFR-binding peptide

SEQ ID NO: 56957 - protein, 32 aa, Artificial Sequence
  Cyclic GFR-binding peptide
  MOD_RES (1), (1): Xaa is C or S
XALHDELTSMEGIFIPKKRVIEMIQVTINSLQ

SEQ ID NO: 56958 - protein, 41 aa, Artificial Sequence; identical to SEQ ID NO: 14395
  Cyclic GFR-binding peptide
  MOD_RES (2), (4), (41): Xaa is C or S

SEQ ID NO: 56959 - protein, 31 aa, Artificial Sequence
  Cyclic GFR-binding peptide
  MOD_RES (1), (3): Xaa is C or S
XEXKNHQLFVQVEKHQGQHPKIRVKAMKVSR

SEQ ID NO: 56960 - protein, 32 aa, Artificial Sequence
  Cyclic GFR-binding peptide
EELRVTAKKLKPKKRVYEIKRVQVPRHHVRSP

SEQ ID NO: 56961 - protein, 27 aa, Artificial Sequence
  Cyclic GFR-binding peptide
HEELVQVEKHQGQHPKIRVKAMKVSRQ

SEQ ID NO: 56962 - protein, 40 aa, Artificial Sequence; identical to SEQ ID NO: 14398
  Cyclic GFR-binding peptide
  MOD_RES (2), (4), (38): Xaa is C or S

SEQ ID NO: 56963 - protein, 35 aa, Artificial Sequence
  Cyclic GFR-binding peptide
  MOD_RES (32), (32): Xaa is C or S
LTSMEGIFIPKKRVIEMIQVTINSLQVQTPRXQVN

SEQ ID NO: 56964 - protein, 34 aa, Artificial Sequence
  Cyclic GFR-binding peptide
  MOD_RES (2), (2): Xaa is C or S
EXKNHQLFVQVEKHQGQHPKIRVKAMKVSREETP

SEQ ID NO: 56965 - protein, 30 aa, Artificial Sequence
  Cyclic GFR-binding peptide
  MOD_RES (30), (30): Xaa is C or S
ELVQVEKHQGQHPKIRVKAMKVSRQGTPVX

SEQ ID NO: 56966 - protein, 35 aa, Artificial Sequence
  Cyclic GFR-binding peptide
  MOD_RES (1), (3): Xaa is C or S
XEXQSHEELSMEGIHQGQHPKIRMIQMTINSQGTP

SEQ ID NO: 56967 - protein, 31 aa, Artificial Sequence
  Cyclic GFR-binding peptide
  MOD_RES (30), (30): Xaa is C or S
ELVQVEKHQGQHPKIRVKAMKVSRQGTPVXE

SEQ ID NO: 56968 - protein, 28 aa, Artificial Sequence
  Cyclic GFR-binding peptide
SMEGIFIPKKRVIEMIQVTINSLQVQTP

SEQ ID NO: 56969 - protein, 38 aa, Artificial Sequence; identical to SEQ ID NO: 14404
  Cyclic GFR-binding peptide
  MOD_RES (37), (37): Xaa is C or S

SEQ ID NO: 56970 - protein, 33 aa, Artificial Sequence
  Cyclic GFR-binding peptide
  MOD_RES (2), (2): Xaa is C or S
EXKNHQLFVQVEKHQGQHPKIRVKAMKVSREET

SEQ ID NO: 56971 - protein, 25 aa, Artificial Sequence
  Cyclic GFR-binding peptide
VQVEKHQGQHPKIRVKAMKVSRQGT

SEQ ID NO: 56972 - protein, 30 aa, Artificial Sequence
  Cyclic GFR-binding peptide
QSHEELSMEGIHQGQHPKIRMIQMTINSQG

SEQ ID NO: 56973 - protein, 35 aa, Artificial Sequence
  Cyclic GFR-binding peptide
  MOD_RES (33), (33): Xaa is C or S
ELRSMEGILKPKKRVYEMIQVTINSHHVRSPQXKV

SEQ ID NO: 56974 - protein, 32 aa, Artificial Sequence
  Cyclic GFR-binding peptide
  MOD_RES (2), (2): Xaa is C or S
KXALHDELTSMEGLFIPKKRVIEMIQVTINSL

SEQ ID NO: 56975 - protein, 40 aa, Artificial Sequence; identical to SEQ ID NO: 14409
  Cyclic GFR-binding peptide
  MOD_RES (1), (38): Xaa is C or S

SEQ ID NO: 56976 - protein, 38 aa, Artificial Sequence
  Cyclic GFR-binding peptide
  MOD_RES (34), (34): Xaa is C or S
DELTVQVEKFIPKKRVIEVKAVKVSRLQVQTPRXQVNR

SEQ ID NO: 56977 - protein, 28 aa, Artificial Sequence
  Cyclic GFR-binding peptide
NHQLFVTAKKHQGQHPKIRIKRMQVPRE

SEQ ID NO: 56978 - protein, 26 aa, Artificial Sequence
  Cyclic GFR-binding peptide
QLFSMEGLHQGQHPKIRMIQMTINSE

SEQ ID NO: 56979 - protein, 28 aa, Artificial Sequence
  Cyclic GFR-binding peptide
  MOD_RES (28), (28): Xaa is C or S
SMEGIHQGQHPKIRMIQMTINSQGTPVX

SEQ ID NO: 56980 - protein, 32 aa, Artificial Sequence
  Cyclic GFR-binding peptide
  MOD_RES (1), (1): Xaa is C or S
XELHEELRSMEGILKPKKRVYEMIQVTINSHH

SEQ ID NO: 56981 - protein, 31 aa, Artificial Sequence
  Cyclic GFR-binding peptide
  MOD_RES (1), (1): Xaa is C or S
XKNHQLFVTAKKHQGQHPKIRIKRMQVPREE

SEQ ID NO: 56982 - protein, 32 aa, Artificial Sequence
  Cyclic GFR-binding peptide
  MOD_RES (28), (28): Xaa is C or S
SMEGLHQGQHPKIRMIQMTINSEETPVXELGE

SEQ ID NO: 56983 - protein, 38 aa, Artificial Sequence
  Cyclic GFR-binding peptide
  MOD_RES (34), (34): Xaa is C or S
EELRVTAKKLKPKKRVYEIKRVQVPRHHVRSPQXKVSS

SEQ ID NO: 56984 - protein, 33 aa, Artificial Sequence; identical to SEQ ID NO: 14411
  Cyclic GFR-binding peptide

SEQ ID NO: 56985 - protein, 27 aa, Artificial Sequence
  Cyclic GFR-binding peptide
ELVQVEKHQGQHPKIRVKAMKVSRQGT

SEQ ID NO: 56986 - protein, 40 aa, Artificial Sequence; identical to SEQ ID NO: 14412
  Cyclic GFR-binding peptide
  MOD_RES (36), (36): Xaa is C or S

SEQ ID NO: 56987 - protein, 26 aa, Artificial Sequence
  Cyclic GFR-binding peptide
LRSMEGILKPKKRVYEMIQVTINSHH

SEQ ID NO: 56988 - protein, 23 aa, Artificial Sequence
  Cyclic GFR-binding peptide
RSMEGILKPKKRVYEMIQVTINS

SEQ ID NO: 56989 - protein, 30 aa, Artificial Sequence
  Cyclic GFR-binding peptide
HEELRSMEGLLKPKKRVYEMIQVTINSHHV

SEQ ID NO: 56990 - protein, 36 aa, Artificial Sequence; identical to SEQ ID NO: 14413
  Cyclic GFR-binding peptide
  MOD_RES (1), (1): Xaa is C or S

SEQ ID NO: 56991 - protein, 30 aa, Artificial Sequence
  Cyclic GFR-binding peptide
  MOD_RES (2), (2): Xaa is C or S
EXKNHQLFSMEGLHQGQHPKIRMIQMTINS

SEQ ID NO: 56992 - protein, 27 aa, Artificial Sequence
  Cyclic GFR-binding peptide
LRSMEGLLKPKKRVYEMIQVTINSHHV

SEQ ID NO: 56993 - protein, 43 aa, Artificial Sequence; identical to SEQ ID NO: 14414
  Cyclic GFR-binding peptide
  MOD_RES (1), (3), (37): Xaa is C or S

SEQ ID NO: 56994 - protein, 29 aa, Artificial Sequence
  Cyclic GFR-binding peptide
LFVTAKKHQGQHPKIRIKRMQVPREETPV

SEQ ID NO: 56995 - protein, 30 aa, Artificial Sequence
  Cyclic GFR-binding peptide
QSHEELVQVEKHQGQHPKIRVKAMKVSRQG

SEQ ID NO: 56996 - protein, 28 aa, Artificial Sequence
  Cyclic GFR-binding peptide
NHQLFVQVEKHQGQHPKIRVKAMKVSRE

SEQ ID NO: 56997 - protein, 29 aa, Artificial Sequence
  Cyclic GFR-binding peptide
HEELRSMEGILKPKKRVYEMIQVTINSHH

SEQ ID NO: 56998 - protein, 27 aa, Artificial Sequence
  Cyclic GFR-binding peptide
LFSMEGLHQGQHPKIRMIQMTINSEET

SEQ ID NO: 56999 - protein, 28 aa, Artificial Sequence
  Cyclic GFR-binding peptide
HQLFVQVEKHQGQHPKIRVKAMKVSREE

SEQ ID NO: 57000 - protein, 35 aa, Artificial Sequence
  Cyclic GFR-binding peptide
  MOD_RES (31), (31): Xaa is C or S
EELVQVEKHQGQHPKIRVKAMKVSRQGTPVXELGE

SEQ ID NO: 57001 - protein, 31 aa, Artificial Sequence
  Cyclic GFR-binding peptide
  MOD_RES (29), (29): Xaa is C or S
FVTAKKHQGQHPKIRIKRMQVPREETPVXEL

SEQ ID NO: 57002 - protein, 34 aa, Artificial Sequence
  Cyclic GFR-binding peptide
  MOD_RES (1), (3): Xaa is C or S
XKXALHDELTSMEGLFIPKKRVIEMIQVTINSLQ

SEQ ID NO: 57003 - protein, 33 aa, Artificial Sequence
  Cyclic GFR-binding peptide
  MOD_RES (31), (31): Xaa is C or S
RVTAKKLKPKKRVYEIKRVQVPRHHVRSPQXKV

SEQ ID NO: 57004 - protein, 26 aa, Artificial Sequence
  Cyclic GFR-binding peptide
LTVQVEKFIPKKRVIEVKAVKVSRLQ

SEQ ID NO: 57005 - protein, 38 aa, Artificial Sequence; identical to SEQ ID NO: 14424
  Cyclic GFR-binding peptide
  MOD_RES (1), (3): Xaa is C or S

SEQ ID NO: 57006 - protein, 35 aa, Artificial Sequence
  Cyclic GFR-binding peptide
  MOD_RES (29), (29): Xaa is C or S
LVTAKKHQGQHPKIRIKRMQVPRQGTPVXELGEDN

SEQ ID NO: 57007 - protein, 31 aa, Artificial Sequence
  Cyclic GFR-binding peptide
ELTVQVEKFIPKKRVIEVKAVKVSRLQVQTP

SEQ ID NO: 57008 - protein, 36 aa, Artificial Sequence
  Cyclic GFR-binding peptide
  MOD_RES (2), (4): Xaa is C or S
EXKXALHDELTSMEGIFIPKKRVIEMIQVTINSLQV

SEQ ID NO: 57009 - protein, 37 aa, Artificial Sequence; identical to SEQ ID NO: 14426
  Cyclic GFR-binding peptide
  MOD_RES (35), (35): Xaa is C or S

SEQ ID NO: 57010 - protein, 32 aa, Artificial Sequence
  Cyclic GFR-binding peptide
  MOD_RES (2), (2): Xaa is C or S
EXQSHEELVQVEKHQGQHPKIRVKAMKVSRQG

SEQ ID NO: 57011 - protein, 32 aa, Artificial Sequence
  Cyclic GFR-binding peptide
  MOD_RES (2), (2): Xaa is C or S
EXKNHQLFVTAKKHQGQHPKIRIKRMQVPREE

SEQ ID NO: 57012 - protein, 31 aa, Artificial Sequence
  Cyclic GFR-binding peptide
  MOD_RES (30), (30): Xaa is C or S
LFSMEGLHQGQHPKIRMIQMTINSEETPVXE

SEQ ID NO: 57013 - protein, 33 aa, Artificial Sequence
  Cyclic GFR-binding peptide
  MOD_RES (2), (4): Xaa is C or S
RXEXKNHQLFVTAKKHQGQHPKIRIKRMQVPRE

SEQ ID NO: 57014 - protein, 30 aa, Artificial Sequence
  Cyclic GFR-binding peptide
  MOD_RES (29), (29): Xaa is C or S
LSMEGIHQGQHPKIRMIQMTINSQGTPVXE

SEQ ID NO: 57015 - protein, 31 aa, Artificial Sequence
  Cyclic GFR-binding peptide
  MOD_RES (1), (3): Xaa is C or S
XEXQSHEELVQVEKHQGQHPKIRVKAMKVSR

SEQ ID NO: 57016 - protein, 27 aa, Artificial Sequence
  Cyclic GFR-binding peptide
DELTSMEGIFIPKKRVIEMIQVTINSL

SEQ ID NO: 57017 - protein, 33 aa, Artificial Sequence
  Cyclic GFR-binding peptide
  MOD_RES (1), (3): Xaa is C or S
XEXKNHQLFVQVEKHQGQHPKIRVKAMKVSREE

SEQ ID NO: 57018 - protein, 31 aa, Artificial Sequence
  Cyclic GFR-binding peptide
  MOD_RES (31), (31): Xaa is C or S
RSMEGILKPKKRVYEMIQVTINSHHVRSPQX

SEQ ID NO: 57019 - protein, 26 aa, Artificial Sequence
  Cyclic GFR-binding peptide
TVQVEKFIPKKRVIEVKAVKVSRLQV

SEQ ID NO: 57020 - protein, 31 aa, Artificial Sequence
  Cyclic GFR-binding peptide
  MOD_RES (31), (31): Xaa is C or S
RVTAKKLKPKKRVYEIKRVQVPRHHVRSPQX

SEQ ID NO: 57021 - protein, 28 aa, Artificial Sequence
  Cyclic GFR-binding peptide
HEELRVTAKKLKPKKRVYEIKRVQVPRH

SEQ ID NO: 57022 - protein, 30 aa, Artificial Sequence
  Cyclic GFR-binding peptide
EELVTAKKHQGQHPKIRIKRMQVPRQGTPV

SEQ ID NO: 57023 - protein, 27 aa, Artificial Sequence
  Cyclic GFR-binding peptide
VQVEKHQGQHPKIRVKAMKVSRQGTPV

SEQ ID NO: 57024 - protein, 25 aa, Artificial Sequence
  Cyclic GFR-binding peptide
LVTAKKHQGQHPKIRIKRMQVPRQG

SEQ ID NO: 57025 - protein, 35 aa, Artificial Sequence; identical to SEQ ID NO: 14428
  Cyclic GFR-binding peptide
  MOD_RES (1), (1): Xaa is C or S

SEQ ID NO: 57026 - protein, 38 aa, Artificial Sequence; identical to SEQ ID NO: 14429
  Cyclic GFR-binding peptide
  MOD_RES (36), (36): Xaa is C or S

SEQ ID NO: 57027 - protein, 34 aa, Artificial Sequence
  Cyclic GFR-binding peptide
  MOD_RES (34), (34): Xaa is C or S
DELTSMEGIFIPKKRVIEMIQVTINSLQVQTPRX

SEQ ID NO: 57028 - protein, 24 aa, Artificial Sequence
  Cyclic GFR-binding peptide
RVTAKKLKPKKRVYEIKRVQVPRH

SEQ ID NO: 57029 - protein, 42 aa, Artificial Sequence; identical to SEQ ID NO: 14432
  Cyclic GFR-binding peptide
  MOD_RES (2), (39): Xaa is C or S

SEQ ID NO: 57030 - protein, 30 aa, Artificial Sequence
  Cyclic GFR-binding peptide
DELTSMEGIFIPKKRVIEMIQVTINSLQVQ

SEQ ID NO: 57031 - protein, 35 aa, Artificial Sequence
  Cyclic GFR-binding peptide
  MOD_RES (34), (34): Xaa is C or S
DELTVQVEKFIPKKRVIEVKAVKVSRLQVQTPRXQ

SEQ ID NO: 57032 - protein, 38 aa, Artificial Sequence; identical to SEQ ID NO: 14433
  Cyclic GFR-binding peptide
  MOD_RES (34), (34): Xaa is C or S

SEQ ID NO: 57033 - protein, 35 aa, Artificial Sequence
  Cyclic GFR-binding peptide
  MOD_RES (1), (3): Xaa is C or S
XEXKNHQLFSMEGLHQGQHPKIRMIQMTINSEETP

SEQ ID NO: 57034 - protein, 35 aa, Artificial Sequence; identical to SEQ ID NO: 14436
  Cyclic GFR-binding peptide
  MOD_RES (1), (1): Xaa is C or S

SEQ ID NO: 57035 - protein, 36 aa, Artificial Sequence; identical to SEQ ID NO: 14435
  Cyclic GFR-binding peptide
  MOD_RES (1), (1): Xaa is C or S

SEQ ID NO: 57036 - protein, 38 aa, Artificial Sequence; identical to SEQ ID NO: 14437
  Cyclic GFR-binding peptide
  MOD_RES (34), (34): Xaa is C or S

SEQ ID NO: 57037 - protein, 33 aa, Artificial Sequence
  Cyclic GFR-binding peptide
ALHDELTVQVEKFIPKKRVIEVKAVKVSRLQVQ

SEQ ID NO: 57038 - protein, 36 aa, Artificial Sequence; identical to SEQ ID NO: 14438
  Cyclic GFR-binding peptide
  MOD_RES (35), (35): Xaa is C or S

SEQ ID NO: 57039 - protein, 33 aa, Artificial Sequence; identical to SEQ ID NO: 14440
  Cyclic GFR-binding peptide

SEQ ID NO: 57040 - protein, 34 aa, Artificial Sequence
  Cyclic GFR-binding peptide
  MOD_RES (2), (2): Xaa is C or S
KXALHDELTSMEGLFIPKKRVIEMIQVTINSLQV

SEQ ID NO: 57041 - protein, 34 aa, Artificial Sequence; identical to SEQ ID NO: 14441
  Cyclic GFR-binding peptide

SEQ ID NO: 57042 - protein, 26 aa, Artificial Sequence
  Cyclic GFR-binding peptide
LRSMEGLLKPKKRVYEMIQVTINSHH

SEQ ID NO: 57043 - protein, 34 aa, Artificial Sequence
  Cyclic GFR-binding peptide
  MOD_RES (30), (30): Xaa is C or S
VQVEKFIPKKRVIEVKAVKVSRLQVQTPRXQVNR

SEQ ID NO: 57044 - protein, 26 aa, Artificial Sequence
  Cyclic GFR-binding peptide
RSMEGILKPKKRVYEMIQVTINSHHV

SEQ ID NO: 57045 - protein, 37 aa, Artificial Sequence; identical to SEQ ID NO: 14442
  Cyclic GFR-binding peptide
  MOD_RES (1), (35): Xaa is C or S

SEQ ID NO: 57046 - protein, 36 aa, Artificial Sequence; identical to SEQ ID NO: 14443
  Cyclic GFR-binding peptide
  MOD_RES (35), (35): Xaa is C or S

SEQ ID NO: 57047 - protein, 29 aa, Artificial Sequence
  Cyclic GFR-binding peptide
LHDELTSMEGLFIPKKRVIEMIQVTINSL

SEQ ID NO: 57048 - protein, 33 aa, Artificial Sequence
  Cyclic GFR-binding peptide
  MOD_RES (32), (32): Xaa is C or S
LTSMEGLFIPKKRVIEMIQVTINSLQVQTPRXQ

SEQ ID NO: 57049 - protein, 26 aa, Artificial Sequence
  Cyclic GFR-binding peptide
VQVEKHQGQHPKIRVKAMKVSRQGTP

SEQ ID NO: 57050 - protein, 38 aa, Artificial Sequence; identical to SEQ ID NO: 14445
  Cyclic GFR-binding peptide
  MOD_RES (37), (37): Xaa is C or S

SEQ ID NO: 57051 - protein, 31 aa, Artificial Sequence
  Cyclic GFR-binding peptide
SHEELVTAKKHQGQHPKIRIKRMQVPRQGTP

SEQ ID NO: 57052 - protein, 32 aa, Artificial Sequence
  Cyclic GFR-binding peptide
  MOD_RES (1), (3): Xaa is C or S
XKXALHDELTVQVEKFIPKKRVIEVKAVKVSR

SEQ ID NO: 57053 - protein, 40 aa, Artificial Sequence; identical to SEQ ID NO: 14448
  Cyclic GFR-binding peptide
  MOD_RES (1), (35): Xaa is C or S

SEQ ID NO: 57054 - protein, 35 aa, Artificial Sequence
  Cyclic GFR-binding peptide
  MOD_RES (34), (34): Xaa is C or S
EELRSMEGLLKPKKRVYEMIQVTINSHHVRSPQXK

SEQ ID NO: 57055 - protein, 40 aa, Artificial Sequence; identical to SEQ ID NO: 14451
  Cyclic GFR-binding peptide
  MOD_RES (1), (35): Xaa is C or S

SEQ ID NO: 57056 - protein, 28 aa, Artificial Sequence
  Cyclic GFR-binding peptide
LHDELTSMEGIFIPKKRVIEMIQVTINS

SEQ ID NO: 57057 - protein, 26 aa, Artificial Sequence
  Cyclic GFR-binding peptide
RVTAKKLKPKKRVYEIKRVQVPRHHV

SEQ ID NO: 57058 - protein, 41 aa, Artificial Sequence; identical to SEQ ID NO: 14456
  Cyclic GFR-binding peptide
  MOD_RES (2), (36): Xaa is C or S

SEQ ID NO: 57059 - protein, 36 aa, Artificial Sequence
  Cyclic GFR-binding peptide
  MOD_RES (33), (33): Xaa is C or S
ELTSMEGIFIPKKRVIEMIQVTINSLQVQTPRXQVN

SEQ ID NO: 57060 - protein, 28 aa, Artificial Sequence
  Cyclic GFR-binding peptide
LFSMEGLHQGQHPKIRMIQMTINSEETP

SEQ ID NO: 57061 - protein, 40 aa, Artificial Sequence; identical to SEQ ID NO: 14457
  Cyclic GFR-binding peptide
  MOD_RES (2), (4): Xaa is C or S

SEQ ID NO: 57062 - protein, 36 aa, Artificial Sequence; identical to SEQ ID NO: 14458
  Cyclic GFR-binding peptide
  MOD_RES (2), (2): Xaa is C or S

SEQ ID NO: 57063 - protein, 35 aa, Artificial Sequence
  Cyclic GFR-binding peptide
  MOD_RES (33), (33): Xaa is C or S
ELTSMEGIFIPKKRVIEMIQVTINSLQVQTPRXQV

SEQ ID NO: 57064 - protein, 37 aa, Artificial Sequence; identical to SEQ ID NO: 14460
  Cyclic GFR-binding peptide
  MOD_RES (1), (3): Xaa is C or S

SEQ ID NO: 57065 - protein, 33 aa, Artificial Sequence; identical to SEQ ID NO: 14461
  Cyclic GFR-binding peptide

SEQ ID NO: 57066 - protein, 32 aa, Artificial Sequence
  Cyclic GFR-binding peptide
  MOD_RES (32), (32): Xaa is C or S
HQLFSMEGLHQGQHPKIRMIQMTINSEETPVX

SEQ ID NO: 57067 - protein, 28 aa, Artificial Sequence
  Cyclic GFR-binding peptide
DELTSMEGLFIPKKRVIEMIQVTINSLQ

SEQ ID NO: 57068 - protein, 27 aa, Artificial Sequence
  Cyclic GFR-binding peptide
EELVTAKKHQGQHPKIRIKRMQVPRQG

SEQ ID NO: 57069 - protein, 43 aa, Artificial Sequence; identical to SEQ ID NO: 14462
  Cyclic GFR-binding peptide
  MOD_RES (1), (3), (37): Xaa is C or S

SEQ ID NO: 57070 - protein, 33 aa, Artificial Sequence
  Cyclic GFR-binding peptide
  MOD_RES (29), (29): Xaa is C or S
FSMEGLHQGQHPKIRMIQMTINSEETPVXELGE

SEQ ID NO: 57071 - protein, 45 aa, Artificial Sequence; identical to SEQ ID NO: 14463
  Cyclic GFR-binding peptide
  MOD_RES (2), (4), (41): Xaa is C or S

SEQ ID NO: 57072 - protein, 25 aa, Artificial Sequence
  Cyclic GFR-binding peptide
ELVQVEKHQGQHPKIRVKAMKVSRQ

SEQ ID NO: 57073 - protein, 29 aa, Artificial Sequence
  Cyclic GFR-binding peptide
TVQVEKFIPKKRVIEVKAVKVSRLQVQTP

SEQ ID NO: 57074 - protein, 28 aa, Artificial Sequence
  Cyclic GFR-binding peptide
ELRSMEGLLKPKKRVYEMIQVTINSHHV

SEQ ID NO: 57075 - protein, 36 aa, Artificial Sequence
  Cyclic GFR-binding peptide
  MOD_RES (32), (32): Xaa is C or S
HEELVTAKKHQGQHPKIRIKRMQVPRQGTPVXELGE

SEQ ID NO: 57076 - protein, 31 aa, Artificial Sequence
  Cyclic GFR-binding peptide
  MOD_RES (1), (1): Xaa is C or S
XALHDELTSMEGIFIPKKRVIEMIQVTINSL

SEQ ID NO: 57077 - protein, 34 aa, Artificial Sequence; identical to SEQ ID NO: 14467
  Cyclic GFR-binding peptide

SEQ ID NO: 57078 - protein, 37 aa, Artificial Sequence; identical to SEQ ID NO: 14468
  Cyclic GFR-binding peptide
  MOD_RES (34), (34): Xaa is C or S

SEQ ID NO: 57079 - protein, 32 aa, Artificial Sequence
  Cyclic GFR-binding peptide
EELRSMEGLLKPKKRVYEMIQVTINSHHVRSP

SEQ ID NO: 57080 - protein, 39 aa, Artificial Sequence; identical to SEQ ID NO: 14469
  Cyclic GFR-binding peptide
  MOD_RES (2), (4), (38): Xaa is C or S

SEQ ID NO: 57081 - protein, 31 aa, Artificial Sequence
  Cyclic GFR-binding peptide
AAAAAAAAASMEGLFIPKKRVIEMIQVTINS

SEQ ID NO: 57082 - protein, 33 aa, Artificial Sequence
  Cyclic GFR-binding peptide
  MOD_RES (2), (4): Xaa is C or S
EXKXALHDELTSMEGIFIPKKRVIEMIQVTINS

SEQ ID NO: 57083 - protein, 27 aa, Artificial Sequence
  Cyclic GFR-binding peptide
HEELRVTAKKLKPKKRVYEIKRVQVPR

SEQ ID NO: 57084 - protein, 28 aa, Artificial Sequence
  Cyclic GFR-binding peptide
TSMEGLFIPKKRVIEMIQVTINSLQVQT

SEQ ID NO: 57085 - protein, 26 aa, Artificial Sequence
  Cyclic GFR-binding peptide
LVTAKKHQGQHPKIRIKRMQVPRQGT

SEQ ID NO: 57086 - protein, 31 aa, Artificial Sequence
  Cyclic GFR-binding peptide
NHQLFVQVEKHQGQHPKIRVKAMKVSREETP

SEQ ID NO: 57087 - protein, 39 aa, Artificial Sequence; identical to SEQ ID NO: 14477
  Cyclic GFR-binding peptide
  MOD_RES (2), (39): Xaa is C or S

SEQ ID NO: 57088 - protein, 36 aa, Artificial Sequence
  Cyclic GFR-binding peptide
  MOD_RES (1), (3): Xaa is C or S
XAXELHEELRVTAKKLKPKKRVYEIKRVQVPRHHVR

SEQ ID NO: 57089 - protein, 32 aa, Artificial Sequence
  Cyclic GFR-binding peptide
  MOD_RES (32), (32): Xaa is C or S
LTVQVEKFIPKKRVIEVKAVKVSRLQVQTPRX

SEQ ID NO: 57090 - protein, 29 aa, Artificial Sequence
  Cyclic GFR-binding peptide
SMEGIFIPKKRVIEMIQVTINSLQVQTPR

SEQ ID NO: 57091 - protein, 41 aa, Artificial Sequence; identical to SEQ ID NO: 14478
  Cyclic GFR-binding peptide
  MOD_RES (2), (39): Xaa is C or S

SEQ ID NO: 57092 - protein, 39 aa, Artificial Sequence; identical to SEQ ID NO: 14479
  Cyclic GFR-binding peptide
  MOD_RES (1), (3), (37): Xaa is C or S

SEQ ID NO: 57093 - protein, 28 aa, Artificial Sequence
  Cyclic GFR-binding peptide
EELRSMEGLLKPKKRVYEMIQVTINSHH

SEQ ID NO: 57094 - protein, 38 aa, Artificial Sequence; identical to SEQ ID NO: 14480
  Cyclic GFR-binding peptide
  MOD_RES (2), (2): Xaa is C or S

SEQ ID NO: 57095 - protein, 39 aa, Artificial Sequence; identical to SEQ ID NO: 14482
  Cyclic GFR-binding peptide
  MOD_RES (2), (4), (38): Xaa is C or S

SEQ ID NO: 57096 - protein, 31 aa, Artificial Sequence
  Cyclic GFR-binding peptide
  MOD_RES (30), (30): Xaa is C or S
SMEGLLKPKKRVYEMIQVTINSHHVRSPQXK

SEQ ID NO: 57097 - protein, 40 aa, Artificial Sequence; identical to SEQ ID NO: 14485
  Cyclic GFR-binding peptide
  MOD_RES (1), (3), (37): Xaa is C or S

SEQ ID NO: 57098 - protein, 34 aa, Artificial Sequence; identical to SEQ ID NO: 14486
  Cyclic GFR-binding peptide

SEQ ID NO: 57099 - protein, 39 aa, Artificial Sequence; identical to SEQ ID NO: 14489
  Cyclic GFR-binding peptide
  MOD_RES (1), (38): Xaa is C or S

SEQ ID NO: 57100 - protein, 32 aa, Artificial Sequence
  Cyclic GFR-binding peptide
  MOD_RES (2), (4): Xaa is C or S
RXEXKNHQLFSMEGLHQGQHPKIRMIQMTINS

SEQ ID NO: 57101 - protein, 27 aa, Artificial Sequence
  Cyclic GFR-binding peptide
HQLFVTAKKHQGQHPKIRIKRMQVPRE

SEQ ID NO: 57102 - protein, 42 aa, Artificial Sequence; identical to SEQ ID NO: 14490
  Cyclic GFR-binding peptide
  MOD_RES (1), (38): Xaa is C or S

SEQ ID NO: 57103 - protein, 28 aa, Artificial Sequence
  Cyclic GFR-binding peptide
LVQVEKHQGQHPKIRVKAMKVSRQGTPV

SEQ ID NO: 57104 - protein, 36 aa, Artificial Sequence
  Cyclic GFR-binding peptide
  MOD_RES (30), (30): Xaa is C or S
LFVTAKKHQGQHPKIRIKRMQVPREETPVXELGEDN

SEQ ID NO: 57105 - protein, 37 aa, Artificial Sequence
  Cyclic GFR-binding peptide
  MOD_RES (2), (4): Xaa is C or S
AXAXELHEELRSMEGLLKPKKRVYEMIQVTINSHHVR

SEQ ID NO: 57106 - protein, 31 aa, Artificial Sequence
  Cyclic GFR-binding peptide
  MOD_RES (1), (1): Xaa is C or S
XELHEELRSMEGLLKPKKRVYEMIQVTINSH

SEQ ID NO: 57107 - protein, 38 aa, Artificial Sequence; identical to SEQ ID NO: 14491
  Cyclic GFR-binding peptide
  MOD_RES (1), (35): Xaa is C or S

SEQ ID NO: 57108 - protein, 42 aa, Artificial Sequence; identical to SEQ ID NO: 14492
  Cyclic GFR-binding peptide
  MOD_RES (1), (3), (40): Xaa is C or S

SEQ ID NO: 57109 - protein, 41 aa, Artificial Sequence; identical to SEQ ID NO: 14493
  Cyclic GFR-binding peptide
  MOD_RES (1), (35): Xaa is C or S

SEQ ID NO: 57110 - protein, 33 aa, Artificial Sequence
  Cyclic GFR-binding peptide
  MOD_RES (2), (4): Xaa is C or S
EXKXALHDELTVQVEKFIPKKRVIEVKAVKVSR

SEQ ID NO: 57111 - protein, 27 aa, Artificial Sequence
  Cyclic GFR-binding peptide
LRSMEGILKPKKRVYEMIQVTINSHHV

SEQ ID NO: 57112 - protein, 37 aa, Artificial Sequence
  Cyclic GFR-binding peptide
  MOD_RES (2), (4): Xaa is C or S
AXAXELHEELRVTAKKLKPKKRVYEIKRVQVPRHHVR

SEQ ID NO: 57113 - protein, 26 aa, Artificial Sequence
  Cyclic GFR-binding peptide
ELVQVEKHQGQHPKIRVKAMKVSRQG

SEQ ID NO: 57114 - protein, 40 aa, Artificial Sequence; identical to SEQ ID NO: 14495
  Cyclic GFR-binding peptide
  MOD_RES (2), (4), (38): Xaa is C or S

SEQ ID NO: 57115 - protein, 32 aa, Artificial Sequence
  Cyclic GFR-binding peptide
  MOD_RES (29), (29): Xaa is C or S
LSMEGIHQGQHPKIRMIQMTINSQGTPVXELG

SEQ ID NO: 57116 - protein, 36 aa, Artificial Sequence
  Cyclic GFR-binding peptide
  MOD_RES (31), (31): Xaa is C or S
EELSMEGIHQGQHPKIRMIQMTINSQGTPVXELGED

SEQ ID NO: 57117 - protein, 33 aa, Artificial Sequence
  Cyclic GFR-binding peptide
  MOD_RES (31), (31): Xaa is C or S
QLFVQVEKHQGQHPKIRVKAMKVSREETPVXEL

SEQ ID NO: 57118 - protein, 35 aa, Artificial Sequence; identical to SEQ ID NO: 14500
  Cyclic GFR-binding peptide
  MOD_RES (1), (35): Xaa is C or S

SEQ ID NO: 57119 - protein, 39 aa, Artificial Sequence; identical to SEQ ID NO: 14501
  Cyclic GFR-binding peptide
  MOD_RES (2), (4), (38): Xaa is C or S

SEQ ID NO: 57120 - protein, 29 aa, Artificial Sequence
  Cyclic GFR-binding peptide
ELRSMEGILKPKKRVYEMIQVTINSHHVR

SEQ ID NO: 57121 - protein, 34 aa, Artificial Sequence
  Cyclic GFR-binding peptide
  MOD_RES (31), (31): Xaa is C or S
RSMEGILKPKKRVYEMIQVTINSHHVRSPQXKVS

SEQ ID NO: 57122 - protein, 41 aa, Artificial Sequence; identical to SEQ ID NO: 14503
  Cyclic GFR-binding peptide
  MOD_RES (1), (3), (40): Xaa is C or S

SEQ ID NO: 57123 - protein, 37 aa, Artificial Sequence; identical to SEQ ID NO: 14504
  Cyclic GFR-binding peptide
  MOD_RES (2), (4): Xaa is C or S

SEQ ID NO: 57124 - protein, 37 aa, Artificial Sequence; identical to SEQ ID NO: 14505
  Cyclic GFR-binding peptide
  MOD_RES (2), (36): Xaa is C or S

SEQ ID NO: 57125 - protein, 35 aa, Artificial Sequence
  Cyclic GFR-binding peptide
  MOD_RES (33), (33): Xaa is C or S
ELRSMEGLLKPKKRVYEMIQVTINSHHVRSPQXKV

SEQ ID NO: 57126 - protein, 40 aa, Artificial Sequence; identical to SEQ ID NO: 14506
  Cyclic GFR-binding peptide
  MOD_RES (1), (3), (40): Xaa is C or S

SEQ ID NO: 57127 - protein, 44 aa, Artificial Sequence; identical to SEQ ID NO: 14508
  Cyclic GFR-binding peptide
  MOD_RES (1), (3), (40): Xaa is C or S

SEQ ID NO: 57128 - protein, 33 aa, Artificial Sequence
  Cyclic GFR-binding peptide
  MOD_RES (2), (2): Xaa is C or S
AXELHEELRSMEGILKPKKRVYEMIQVTINSHH

SEQ ID NO: 57129 - protein, 33 aa, Artificial Sequence
  Cyclic GFR-binding peptide
ELHEELRVTAKKLKPKKRVYEIKRVQVPRHHVR

SEQ ID NO: 57130 - protein, 29 aa, Artificial Sequence
  Cyclic GFR-binding peptide
  MOD_RES (29), (29): Xaa is C or S
LVQVEKHQGQHPKIRVKAMKVSRQGTPVX

SEQ ID NO: 57131 - protein, 26 aa, Artificial Sequence
  Cyclic GFR-binding peptide
SMEGLLKPKKRVYEMIQVTINSHHVR

SEQ ID NO: 57132 - protein, 31 aa, Artificial Sequence
  Cyclic GFR-binding peptide
HQLFVTAKKHQGQHPKIRIKRMQVPREETPV

SEQ ID NO: 57133 - protein, 33 aa, Artificial Sequence
  Cyclic GFR-binding peptide
  MOD_RES (32), (32): Xaa is C or S
HQLFVQVEKHQGQHPKIRVKAMKVSREETPVXE

SEQ ID NO: 57134 - protein, 37 aa, Artificial Sequence; identical to SEQ ID NO: 14509
  Cyclic GFR-binding peptide
  MOD_RES (35), (35): Xaa is C or S

SEQ ID NO: 57135 - protein, 37 aa, Artificial Sequence; identical to SEQ ID NO: 14510
  Cyclic GFR-binding peptide
  MOD_RES (35), (35): Xaa is C or S

SEQ ID NO: 57136 - protein, 23 aa, Artificial Sequence
  Cyclic GFR-binding peptide
VQVEKFIPKKRVIEVKAVKVSRL

SEQ ID NO: 57137 - protein, 29 aa, Artificial Sequence
  Cyclic GFR-binding peptide
LHEELRVTAKKLKPKKRVYEIKRVQVPRH

SEQ ID NO: 57138 - protein, 41 aa, Artificial Sequence; identical to SEQ ID NO: 14512
  Cyclic GFR-binding peptide
  MOD_RES (1), (3), (40): Xaa is C or S

SEQ ID NO: 57139 - protein, 37 aa, Artificial Sequence; identical to SEQ ID NO: 14513
  Cyclic GFR-binding peptide
  MOD_RES (2), (36): Xaa is C or S

SEQ ID NO: 57140 - protein, 41 aa, Artificial Sequence; identical to SEQ ID NO: 14514
  Cyclic GFR-binding peptide
  MOD_RES (2), (39): Xaa is C or S

SEQ ID NO: 57141 - protein, 24 aa, Artificial Sequence
  Cyclic GFR-binding peptide
VQVEKFIPKKRVIEVKAVKVSRLQ

SEQ ID NO: 57142 - protein, 41 aa, Artificial Sequence; identical to SEQ ID NO: 14515
  Cyclic GFR-binding peptide
  MOD_RES (2), (4), (38): Xaa is C or S

SEQ ID NO: 57143 - protein, 32 aa, Artificial Sequence
  Cyclic GFR-binding peptide
  MOD_RES (1), (3): Xaa is C or S
XKXALHDELTSMEGIFIPKKRVIEMIQVTINS

SEQ ID NO: 57144 - protein, 40 aa, Artificial Sequence; identical to SEQ ID NO: 14517
  Cyclic GFR-binding peptide
  MOD_RES (2), (4), (38): Xaa is C or S

SEQ ID NO: 57145 - protein, 27 aa, Artificial Sequence
  Cyclic GFR-binding peptide
ELRSMEGLLKPKKRVYEMIQVTINSHH

SEQ ID NO: 57146 - protein, 33 aa, Artificial Sequence
  Cyclic GFR-binding peptide
  MOD_RES (2), (4): Xaa is C or S
RXEXQSHEELVTAKKHQGQHPKIRIKRMQVPRQ

SEQ ID NO: 57147 - protein, 27 aa, Artificial Sequence
  Cyclic GFR-binding peptide
LVQVEKHQGQHPKIRVKAMKVSRQGTP

SEQ ID NO: 57148 - protein, 39 aa, Artificial Sequence; identical to SEQ ID NO: 14518
  Cyclic GFR-binding peptide
  MOD_RES (1), (3): Xaa is C or S

SEQ ID NO: 57149 - protein, 38 aa, Artificial Sequence; identical to SEQ ID NO: 14519
  Cyclic GFR-binding peptide
  MOD_RES (1), (35): Xaa is C or S

SEQ ID NO: 57150 - protein, 39 aa, Artificial Sequence; identical to SEQ ID NO: 14520
  Cyclic GFR-binding peptide
  MOD_RES (37), (37): Xaa is C or S

SEQ ID NO: 57151 - protein, 40 aa, Artificial Sequence; identical to SEQ ID NO: 14521
  Cyclic GFR-binding peptide
  MOD_RES (34), (34): Xaa is C or S

SEQ ID NO: 57152 - protein, 29 aa, Artificial Sequence
  Cyclic GFR-binding peptide
LHEELRSMEGILKPKKRVYEMIQVTINSH

SEQ ID NO: 57153 - protein, 35 aa, Artificial Sequence; identical to SEQ ID NO: 14527
  Cyclic GFR-binding peptide

SEQ ID NO: 57154 - protein, 38 aa, Artificial Sequence; identical to SEQ ID NO: 14529
  Cyclic GFR-binding peptide
  MOD_RES (2), (36): Xaa is C or S

SEQ ID NO: 57155 - protein, 29 aa, Artificial Sequence
  Cyclic GFR-binding peptide
ELTSMEGLFIPKKRVIEMIQVTINSLQVQ

SEQ ID NO: 57156 - protein, 31 aa, Artificial Sequence
  Cyclic GFR-binding peptide
KNHQLFVTAKKHQGQHPKIRIKRMQVPREET

SEQ ID NO: 57157 - protein, 28 aa, Artificial Sequence
  Cyclic GFR-binding peptide
LRSMEGLLKPKKRVYEMIQVTINSHHVR

SEQ ID NO: 57158 - protein, 35 aa, Artificial Sequence
  Cyclic GFR-binding peptide
  MOD_RES (34), (34): Xaa is C or S
EELRVTAKKLKPKKRVYEIKRVQVPRHHVRSPQXK

SEQ ID NO: 57159 - protein, 34 aa, Artificial Sequence
  Cyclic GFR-binding peptide
  MOD_RES (30), (30): Xaa is C or S
ELVTAKKHQGQHPKIRIKRMQVPRQGTPVXELGE

SEQ ID NO: 57160 - protein, 39 aa, Artificial Sequence; identical to SEQ ID NO: 14537
  Cyclic GFR-binding peptide
  MOD_RES (36), (36): Xaa is C or S

SEQ ID NO: 57161 - protein, 29 aa, Artificial Sequence
  Cyclic GFR-binding peptide
DELTVQVEKFIPKKRVIEVKAVKVSRLQV

SEQ ID NO: 57162 - protein, 31 aa, Artificial Sequence
  Cyclic GFR-binding peptide
HEELSMEGIHQGQHPKIRMIQMTINSQGTPV

SEQ ID NO: 57163 - protein, 29 aa, Artificial Sequence
  Cyclic GFR-binding peptide
HEELRSMEGLLKPKKRVYEMIQVTINSHH

SEQ ID NO: 57164 - protein, 32 aa, Artificial Sequence
  Cyclic GFR-binding peptide
  MOD_RES (28), (28): Xaa is C or S
VQVEKHQGQHPKIRVKAMKVSREETPVXELGE

SEQ ID NO: 57165 - protein, 40 aa, Artificial Sequence; identical to SEQ ID NO: 14539
  Cyclic GFR-binding peptide
  MOD_RES (36), (36): Xaa is C or S

SEQ ID NO: 57166 - protein, 37 aa, Artificial Sequence; identical to SEQ ID NO: 14540
  Cyclic GFR-binding peptide
  MOD_RES (2), (2): Xaa is C or S

SEQ ID NO: 57167 - protein, 34 aa, Artificial Sequence
  Cyclic GFR-binding peptide
  MOD_RES (31), (31): Xaa is C or S
RSMEGLLKPKKRVYEMIQVTINSHHVRSPQXKVS

SEQ ID NO: 57168 - protein, 42 aa, Artificial Sequence; identical to SEQ ID NO: 14541
  Cyclic GFR-binding peptide
  MOD_RES (2), (36): Xaa is C or S

SEQ ID NO: 57169 - protein, 25 aa, Artificial Sequence
  Cyclic GFR-binding peptide
ELTVQVEKFIPKKRVIEVKAVKVSR

SEQ ID NO: 57170 - protein, 31 aa, Artificial Sequence
  Cyclic GFR-binding peptide
  MOD_RES (29), (29): Xaa is C or S
LVQVEKHQGQHPKIRVKAMKVSRQGTPVXEL

SEQ ID NO: 57171 - protein, 31 aa, Artificial Sequence
  Cyclic GFR-binding peptide
EELRSMEGILKPKKRVYEMIQVTINSHHVRS

SEQ ID NO: 57172 - protein, 31 aa, Artificial Sequence
  Cyclic GFR-binding peptide
SHEELSMEGIHQGQHPKIRMIQMTINSQGTP

SEQ ID NO: 57173 - protein, 30 aa, Artificial Sequence
  Cyclic GFR-binding peptide
  MOD_RES (1), (1): Xaa is C or S
XQSHEELVTAKKHQGQHPKIRIKRMQVPRQ

SEQ ID NO: 57174 - protein, 36 aa, Artificial Sequence; identical to SEQ ID NO: 14543
  Cyclic GFR-binding peptide
  MOD_RES (1), (3): Xaa is C or S

SEQ ID NO: 57175 - protein, 41 aa, Artificial Sequence; identical to SEQ ID NO: 14545
  Cyclic GFR-binding peptide
  MOD_RES (1), (38): Xaa is C or S

SEQ ID NO: 57176 - protein, 36 aa, Artificial Sequence; identical to SEQ ID NO: 14546
  Cyclic GFR-binding peptide
  MOD_RES (34), (34): Xaa is C or S

SEQ ID NO: 57177 - protein, 43 aa, Artificial Sequence; identical to SEQ ID NO: 14548
  Cyclic GFR-binding peptide
  MOD_RES (2), (39): Xaa is C or S

SEQ ID NO: 57178 - protein, 31 aa, Artificial Sequence
  Cyclic GFR-binding peptide
AAAAAAAAAVTAKKFIPKKRVIEIKRVQVPR

SEQ ID NO: 57179 - protein, 36 aa, Artificial Sequence; identical to SEQ ID NO: 14554
  Cyclic GFR-binding peptide
  MOD_RES (34), (34): Xaa is C or S

SEQ ID NO: 57180 - protein, 28 aa, Artificial Sequence
  Cyclic GFR-binding peptide
RSMEGILKPKKRVYEMIQVTINSHHVRS

SEQ ID NO: 57181 - protein, 35 aa, Artificial Sequence
  Cyclic GFR-binding peptide
  MOD_RES (2), (4): Xaa is C or S
RXEXKNHQLFVTAKKHQGQHPKIRIKRMQVPREET

SEQ ID NO: 57182 - protein, 26 aa, Artificial Sequence
  Cyclic GFR-binding peptide
ELRVTAKKLKPKKRVYEIKRVQVPRH

SEQ ID NO: 57183 - protein, 32 aa, Artificial Sequence
  Cyclic GFR-binding peptide
  MOD_RES (30), (30): Xaa is C or S
VQVEKFIPKKRVIEVKAVKVSRLQVQTPRXQV

SEQ ID NO: 57184 - protein, 23 aa, Artificial Sequence
  Cyclic GFR-binding peptide
VQVEKHQGQHPKIRVKAMKVSRE

SEQ ID NO: 57185 - protein, 36 aa, Artificial Sequence; identical to SEQ ID NO: 14558
  Cyclic GFR-binding peptide

SEQ ID NO: 57186 - protein, 34 aa, Artificial Sequence
  Cyclic GFR-binding peptide
  MOD_RES (29), (29): Xaa is C or S
FSMEGLHQGQHPKIRMIQMTINSEETPVXELGED

SEQ ID NO: 57187 - protein, 29 aa, Artificial Sequence
  Cyclic GFR-binding peptide
HEELVQVEKHQGQHPKIRVKAMKVSRQGT

SEQ ID NO: 57188 - protein, 38 aa, Artificial Sequence
  Cyclic GFR-binding peptide
  MOD_RES (32), (32): Xaa is C or S
HQLFVTAKKHQGQHPKIRIKRMQVPREETPVXELGEDN

SEQ ID NO: 57189 - protein, 32 aa, Artificial Sequence
  Cyclic GFR-binding peptide
  MOD_RES (31), (31): Xaa is C or S
EELSMEGIHQGQHPKIRMIQMTINSQGTPVXE

SEQ ID NO: 57190 - protein, 27 aa, Artificial Sequence
  Cyclic GFR-binding peptide
HEELRSMEGLLKPKKRVYEMIQVTINS

SEQ ID NO: 57191 - protein, 27 aa, Artificial Sequence
  Cyclic GFR-binding peptide
HEELRSMEGILKPKKRVYEMIQVTINS

SEQ ID NO: 57192 - protein, 42 aa, Artificial Sequence; identical to SEQ ID NO: 14561
  Cyclic GFR-binding peptide
  MOD_RES (2), (4), (41): Xaa is C or S

SEQ ID NO: 57193 - protein, 30 aa, Artificial Sequence
  Cyclic GFR-binding peptide
QLFVQVEKHQGQHPKIRVKAMKVSREETPV

SEQ ID NO: 57194 - protein, 35 aa, Artificial Sequence
  Cyclic GFR-binding peptide
  MOD_RES (2), (2): Xaa is C or S
KXALHDELTSMEGIFIPKKRVIEMIQVTINSLQVQ

SEQ ID NO: 57195 - protein, 29 aa, Artificial Sequence
  Cyclic GFR-binding peptide
EELVTAKKHQGQHPKIRIKRMQVPRQGTP

SEQ ID NO: 57196 - protein, 34 aa, Artificial Sequence; identical to SEQ ID NO: 14564
  Cyclic GFR-binding peptide
  MOD_RES (1), (1): Xaa is C or S

SEQ ID NO: 57197 - protein, 35 aa, Artificial Sequence
  Cyclic GFR-binding peptide
  MOD_RES (31), (31): Xaa is C or S
TVQVEKFIPKKRVIEVKAVKVSRLQVQTPRXQVNR

SEQ ID NO: 57198 - protein, 30 aa, Artificial Sequence
  Cyclic GFR-binding peptide
  MOD_RES (30), (30): Xaa is C or S
SMEGIFIPKKRVIEMIQVTINSLQVQTPRX

SEQ ID NO: 57199 - protein, 33 aa, Artificial Sequence
  Cyclic GFR-binding peptide
  MOD_RES (1), (3): Xaa is C or S
XEXKNHQLFSMEGLHQGQHPKIRMIQMTINSEE

SEQ ID NO: 57200 - protein, 32 aa, Artificial Sequence
  Cyclic GFR-binding peptide
DELTSMEGLFIPKKRVIEMIQVTINSLQVQTP

SEQ ID NO: 57201 - protein, 39 aa, Artificial Sequence; identical to SEQ ID NO: 14567
  Cyclic GFR-binding peptide
  MOD_RES (37), (37): Xaa is C or S

SEQ ID NO: 57202 - protein, 31 aa, Artificial Sequence
  Cyclic GFR-binding peptide
AAAAAAAAASMEGIHQGQHPKIRMIQMTINS

SEQ ID NO: 57203 - protein, 29 aa, Artificial Sequence
  Cyclic GFR-binding peptide
RSMEGLLKPKKRVYEMIQVTINSHHVRSP

SEQ ID NO: 57204 - protein, 37 aa, Artificial Sequence; identical to SEQ ID NO: 14570
  Cyclic GFR-binding peptide
  MOD_RES (1), (35): Xaa is C or S

SEQ ID NO: 57205 - protein, 30 aa, Artificial Sequence
  Cyclic GFR-binding peptide
HQLFVQVEKHQGQHPKIRVKAMKVSREETP

SEQ ID NO: 57206 - protein, 28 aa, Artificial Sequence
  Cyclic GFR-binding peptide
EELRVTAKKLKPKKRVYEIKRVQVPRHH

SEQ ID NO: 57207 - protein, 33 aa, Artificial Sequence
  Cyclic GFR-binding peptide
  MOD_RES (30), (30): Xaa is C or S
LFVTAKKHQGQHPKIRIKRMQVPREETPVXELG

SEQ ID NO: 57208 - protein, 34 aa, Artificial Sequence
  Cyclic GFR-binding peptide
  MOD_RES (1), (1): Xaa is C or S
XALHDELTSMEGIFIPKKRVIEMIQVTINSLQVQ

SEQ ID NO: 57209 - protein, 37 aa, Artificial Sequence
  Cyclic GFR-binding peptide
  MOD_RES (5), (5): Xaa is C or S
SSVKXQPSRVHHSNITVQIMEYVRKKPKLLGEMSRLE

SEQ ID NO: 57210 - protein, 29 aa, Artificial Sequence
  Cyclic GFR-binding peptide
HHRPVQVRKIEYVRKKPKLKKATVRLEEH

SEQ ID NO: 57211 - protein, 23 aa, Artificial Sequence
  Cyclic GFR-binding peptide
RPVQVRKIEYVRKKPKLKKATVR

SEQ ID NO: 57212 - protein, 31 aa, Artificial Sequence
  Cyclic GFR-binding peptide
  MOD_RES (2), (2): Xaa is C or S
KXQPSRVHHSNITVQIMEYVRKKPKLIGEMS

SEQ ID NO: 57213 - protein, 29 aa, Artificial Sequence
  Cyclic GFR-binding peptide
RVHHSNITVQIMEYVRKKPKLLGEMSRLE

SEQ ID NO: 57214 - protein, 36 aa, Artificial Sequence; identical to SEQ ID NO: 14577
  Cyclic GFR-binding peptide
  MOD_RES (34), (36): Xaa is C or S

SEQ ID NO: 57215 - protein, 34 aa, Artificial Sequence
  Cyclic GFR-binding peptide
  MOD_RES (1), (1): Xaa is C or S
XQPSRVHHSNITVQIMEYVRKKPKLIGEMSRLEE

SEQ ID NO: 57216 - protein, 43 aa, Artificial Sequence; identical to SEQ ID NO: 14578
  Cyclic GFR-binding peptide
  MOD_RES (7), (41), (43): Xaa is C or S

SEQ ID NO: 57217 - protein, 35 aa, Artificial Sequence; identical to SEQ ID NO: 14579
  Cyclic GFR-binding peptide
  MOD_RES (1), (35): Xaa is C or S

SEQ ID NO: 57218 - protein, 26 aa, Artificial Sequence
  Cyclic GFR-binding peptide
EERSVKMAKVRIKPHQGQHKEVQVFL

SEQ ID NO: 57219 - protein, 31 aa, Artificial Sequence
  Cyclic GFR-binding peptide
PTEESNITMQIMRIKPHQGQHLGEMSFLQHN

SEQ ID NO: 57220 - protein, 36 aa, Artificial Sequence
  Cyclic GFR-binding peptide
  MOD_RES (7), (7): Xaa is C or S
NDEGLEXVPTGQRPVQMRKIRIKPHQGQHKKATVLE

SEQ ID NO: 57221 - protein, 30 aa, Artificial Sequence
  Cyclic GFR-binding peptide
QVQLRSVKVAKVEIVRKKPIFKEVQVTLED

SEQ ID NO: 57222 - protein, 32 aa, Artificial Sequence; identical to SEQ ID NO: 14584
  Cyclic GFR-binding peptide

SEQ ID NO: 57223 - protein, 34 aa, Artificial Sequence
  Cyclic GFR-binding peptide
  MOD_RES (1), (1): Xaa is C or S
XQPSRVHHSNITVQIMEYVRKKPKLLGEMSRLEE

SEQ ID NO: 57224 - protein, 42 aa, Artificial Sequence; identical to SEQ ID NO: 14585
  Cyclic GFR-binding peptide
  MOD_RES (5), (42): Xaa is C or S

SEQ ID NO: 57225 - protein, 27 aa, Artificial Sequence
  Cyclic GFR-binding peptide
PTGQRPVQMRKIRIKPHQGQHKKATVL

SEQ ID NO: 57226 - protein, 26 aa, Artificial Sequence
  Cyclic GFR-binding peptide
HSNITVQIMEYVRKKPKLIGEMSRLE

SEQ ID NO: 57227 - protein, 31 aa, Artificial Sequence
  Cyclic GFR-binding peptide
  MOD_RES (30), (30): Xaa is C or S
SNITVQIMEIVRKKPIFIGEMSTLEDHLAXK

SEQ ID NO: 57228 - protein, 32 aa, Artificial Sequence
  Cyclic GFR-binding peptide
  MOD_RES (2), (2): Xaa is C or S
KXQPSRVHHSNITVQIMEYVRKKPKLIGEMSR

SEQ ID NO: 57229 - protein, 31 aa, Artificial Sequence
  Cyclic GFR-binding peptide
  MOD_RES (1), (1): Xaa is C or S
XRPTQVQLRSVKVAKVEIVRKKPIFKEVQVT

SEQ ID NO: 57230 - protein, 31 aa, Artificial Sequence
  Cyclic GFR-binding peptide
  MOD_RES (2), (2): Xaa is C or S
QXRPTQVQLRSVKVAKVEIVRKKPIFKEVQV

SEQ ID NO: 57231 - protein, 24 aa, Artificial Sequence
  Cyclic GFR-binding peptide
SNITVQIMEYVRKKPKLLGEMSRL

SEQ ID NO: 57232 - protein, 26 aa, Artificial Sequence
  Cyclic GFR-binding peptide
QVQLRSVKVAKVEIVRKKPIFKEVQV

SEQ ID NO: 57233 - protein, 35 aa, Artificial Sequence; identical to SEQ ID NO: 14593
  Cyclic GFR-binding peptide
  MOD_RES (34), (34): Xaa is C or S

SEQ ID NO: 57234 - protein, 29 aa, Artificial Sequence
  Cyclic GFR-binding peptide
  MOD_RES (1), (1): Xaa is C or S
XVPTEESNITMQIMRIKPHQGQHLGEMSF

SEQ ID NO: 57235 - protein, 36 aa, Artificial Sequence
  Cyclic GFR-binding peptide
  MOD_RES (34), (36): Xaa is C or S
QVQLSNITVQIMEIVRKKPIFLGEMSTLEDHLAXKX

SEQ ID NO: 57236 - protein, 39 aa, Artificial Sequence; identical to SEQ ID NO: 14594
  Cyclic GFR-binding peptide
  MOD_RES (2), (39): Xaa is C or S

SEQ ID NO: 57237 - protein, 36 aa, Artificial Sequence; identical to SEQ ID NO: 14595
  Cyclic GFR-binding peptide
  MOD_RES (34), (36): Xaa is C or S

SEQ ID NO: 57238 - protein, 35 aa, Artificial Sequence
  Cyclic GFR-binding peptide
  MOD_RES (5), (5): Xaa is C or S
SSVKXQPSRVHHRPVQVRKIEYVRKKPKLKKATVR

SEQ ID NO: 57239 - protein, 37 aa, Artificial Sequence; identical to SEQ ID NO: 14599
  Cyclic GFR-binding peptide
  MOD_RES (1), (1): Xaa is C or S

SEQ ID NO: 57240 - protein, 36 aa, Artificial Sequence; identical to SEQ ID NO: 14602
  Cyclic GFR-binding peptide
  MOD_RES (1), (1): Xaa is C or S

SEQ ID NO: 57241 - protein, 45 aa, Artificial Sequence; identical to SEQ ID NO: 14603
  Cyclic GFR-binding peptide
  MOD_RES (5), (42), (44): Xaa is C or S

SEQ ID NO: 57242 - protein, 31 aa, Artificial Sequence
  Cyclic GFR-binding peptide
  MOD_RES (31), (31): Xaa is C or S
LRSVKVAKVEIVRKKPIFKEVQVTLEDHLAX

SEQ ID NO: 57243 - protein, 34 aa, Artificial Sequence; identical to SEQ ID NO: 14604
  Cyclic GFR-binding peptide

SEQ ID NO: 57244 - protein, 29 aa, Artificial Sequence
  Cyclic GFR-binding peptide
VHHSNITVQIMEYVRKKPKLIGEMSRLEE

SEQ ID NO: 57245 - protein, 37 aa, Artificial Sequence; identical to SEQ ID NO: 14605
  Cyclic GFR-binding peptide
  MOD_RES (34), (36): Xaa is C or S

SEQ ID NO: 57246 - protein, 35 aa, Artificial Sequence; identical to SEQ ID NO: 14606
  Cyclic GFR-binding peptide
  MOD_RES (1), (1): Xaa is C or S

SEQ ID NO: 57247 - protein, 34 aa, Artificial Sequence
  Cyclic GFR-binding peptide
  MOD_RES (33), (33): Xaa is C or S
VQLRSVKVAKVEIVRKKPIFKEVQVTLEDHLAXK

SEQ ID NO: 57248 - protein, 34 aa, Artificial Sequence
  Cyclic GFR-binding peptide
  MOD_RES (1), (1): Xaa is C or S
XRPTQVQLRSVKVAKVEIVRKKPIFKEVQVTLED

SEQ ID NO: 57249 - protein, 33 aa, Artificial Sequence; identical to SEQ ID NO: 14608
  Cyclic GFR-binding peptide

SEQ ID NO: 57250 - protein, 44 aa, Artificial Sequence; identical to SEQ ID NO: 14609
  Cyclic GFR-binding peptide
  MOD_RES (4), (41), (43): Xaa is C or S

SEQ ID NO: 57251 - protein, 34 aa, Artificial Sequence
  Cyclic GFR-binding peptide
  MOD_RES (32), (34): Xaa is C or S
TEERSVKMAKVRIKPHQGQHKEVQVFLQHNKXEX

SEQ ID NO: 57252 - protein, 32 aa, Artificial Sequence
  Cyclic GFR-binding peptide
  MOD_RES (1), (1): Xaa is C or S
XVPTEERSVKMAKVRIKPHQGQHKEVQVFLQH

SEQ ID NO: 57253 - protein, 30 aa, Artificial Sequence
  Cyclic GFR-binding peptide
LRSVKVAKVEIVRKKPIFKEVQVTLEDHLA

SEQ ID NO: 57254 - protein, 38 aa, Artificial Sequence; identical to SEQ ID NO: 14616
  Cyclic GFR-binding peptide
  MOD_RES (37), (37): Xaa is C or S

SEQ ID NO: 57255 - protein, 38 aa, Artificial Sequence; identical to SEQ ID NO: 14615
  Cyclic GFR-binding peptide
  MOD_RES (3), (37): Xaa is C or S

SEQ ID NO: 57256 - protein, 28 aa, Artificial Sequence
  Cyclic GFR-binding peptide
RVHHRPVQVRKIEYVRKKPKLKKATVRL

SEQ ID NO: 57257 - protein, 40 aa, Artificial Sequence; identical to SEQ ID NO: 14617
  Cyclic GFR-binding peptide
  MOD_RES (6), (40): Xaa is C or S

SEQ ID NO: 57258 - protein, 28 aa, Artificial Sequence
  Cyclic GFR-binding peptide
SRVHHSNITVQIMEYVRKKPKLLGEMSR

SEQ ID NO: 57259 - protein, 27 aa, Artificial Sequence
  Cyclic GFR-binding peptide
RVHHSNITVQIMEYVRKKPKLLGEMSR

SEQ ID NO: 57260 - protein, 37 aa, Artificial Sequence; identical to SEQ ID NO: 14620
  Cyclic GFR-binding peptide
  MOD_RES (3), (3): Xaa is C or S

SEQ ID NO: 57261 - protein, 33 aa, Artificial Sequence
  Cyclic GFR-binding peptide
  MOD_RES (2), (2): Xaa is C or S
KXQPSRVHHRPVQVRKIEYVRKKPKLKKATVRL

SEQ ID NO: 57262 - protein, 42 aa, Artificial Sequence; identical to SEQ ID NO: 14621
  Cyclic GFR-binding peptide
  MOD_RES (6), (40), (42): Xaa is C or S

SEQ ID NO: 57263 - protein, 41 aa, Artificial Sequence; identical to SEQ ID NO: 14622
  Cyclic GFR-binding peptide
  MOD_RES (4), (41): Xaa is C or S

SEQ ID NO: 57264 - protein, 38 aa, Artificial Sequence; identical to SEQ ID NO: 14624
  Cyclic GFR-binding peptide
  MOD_RES (4), (4): Xaa is C or S

SEQ ID NO: 57265 - protein, 37 aa, Artificial Sequence; identical to SEQ ID NO: 14625
  Cyclic GFR-binding peptide
  MOD_RES (5), (5): Xaa is C or S

SEQ ID NO: 57266 - protein, 38 aa, Artificial Sequence; identical to SEQ ID NO: 14626
  Cyclic GFR-binding peptide
  MOD_RES (1), (35), (37): Xaa is C or S

SEQ ID NO: 57267 - protein, 29 aa, Artificial Sequence
  Cyclic GFR-binding peptide
SRVHHSNITVQIMEYVRKKPKLLGEMSRL

SEQ ID NO: 57268 - protein, 30 aa, Artificial Sequence
  Cyclic GFR-binding peptide
  MOD_RES (2), (2): Xaa is C or S
EXVPTEERSVKMAKVRIKPHQGQHKEVQVF

SEQ ID NO: 57269 - protein, 28 aa, Artificial Sequence
  Cyclic GFR-binding peptide
PTGQSNITMQIMRIKPHQGQHIGEMSLE

SEQ ID NO: 57270 - protein, 35 aa, Artificial Sequence; identical to SEQ ID NO: 14628
  Cyclic GFR-binding peptide
  MOD_RES (1), (1): Xaa is C or S

SEQ ID NO: 57271 - protein, 39 aa, Artificial Sequence; identical to SEQ ID NO: 14629
  Cyclic GFR-binding peptide
  MOD_RES (2), (36), (38): Xaa is C or S

SEQ ID NO: 57272 - protein, 36 aa, Artificial Sequence
  Cyclic GFR-binding peptide
  MOD_RES (3), (3): Xaa is C or S
VQXRPTQVQLRSVKVAKVEIVRKKPIFKEVQVTLED

SEQ ID NO: 57273 - protein, 26 aa, Artificial Sequence
  Cyclic GFR-binding peptide
TGQSNITMQIMRIKPHQGQHIGEMSL

SEQ ID NO: 57274 - protein, 35 aa, Artificial Sequence; identical to SEQ ID NO: 14630
  Cyclic GFR-binding peptide
  MOD_RES (3), (3): Xaa is C or S

SEQ ID NO: 57275 - protein, 32 aa, Artificial Sequence
  Cyclic GFR-binding peptide
RPTQVQLSNITVQIMEIVRKKPIFIGEMSTLE

SEQ ID NO: 57276 - protein, 40 aa, Artificial Sequence; identical to SEQ ID NO: 14632
  Cyclic GFR-binding peptide
  MOD_RES (4), (4): Xaa is C or S

SEQ ID NO: 57277 - protein, 38 aa, Artificial Sequence; identical to SEQ ID NO: 14633
  Cyclic GFR-binding peptide
  MOD_RES (1), (35), (37): Xaa is C or S

SEQ ID NO: 57278 - protein, 37 aa, Artificial Sequence
  Cyclic GFR-binding peptide
  MOD_RES (7), (7): Xaa is C or S
NDEGLEXVPTEESNITMQIMRIKPHQGQHLGEMSFLQ

SEQ ID NO: 57279 - protein, 34 aa, Artificial Sequence
  Cyclic GFR-binding peptide
  MOD_RES (32), (34): Xaa is C or S
TGQSNITMQIMRIKPHQGQHIGEMSLEEHSQXEX

SEQ ID NO: 57280 - protein, 31 aa, Artificial Sequence
  Cyclic GFR-binding peptide
VHHRPVQVRKIEYVRKKPKLKKATVRLEEHL

SEQ ID NO: 57281 - protein, 34 aa, Artificial Sequence
  Cyclic GFR-binding peptide
  MOD_RES (34), (34): Xaa is C or S
RVHHRPVQVRKIEYVRKKPKLKKATVRLEEHLEX

SEQ ID NO: 57282 - protein, 29 aa, Artificial Sequence
  Cyclic GFR-binding peptide
VHHSNITVQIMEYVRKKPKLLGEMSRLEE

SEQ ID NO: 57283 - protein, 26 aa, Artificial Sequence
  Cyclic GFR-binding peptide
QVQLSNITVQIMEIVRKKPIFIGEMS

SEQ ID NO: 57284 - protein, 25 aa, Artificial Sequence
  Cyclic GFR-binding peptide
RPVQMRKIRIKPHQGQHKKATVLEE

SEQ ID NO: 57285 - protein, 31 aa, Artificial Sequence
  Cyclic GFR-binding peptide
  MOD_RES (2), (2): Xaa is C or S
QXRPTQVQLSNITVQIMEIVRKKPIFIGEMS

SEQ ID NO: 57286 - protein, 45 aa, Artificial Sequence; identical to SEQ ID NO: 14635
  Cyclic GFR-binding peptide
  MOD_RES (5), (42), (44): Xaa is C or S

SEQ ID NO: 57287 - protein, 34 aa, Artificial Sequence
  Cyclic GFR-binding peptide
  MOD_RES (5), (5): Xaa is C or S
SSVKXQPSRVHHSNITVQIMEYVRKKPKLLGEMS

SEQ ID NO: 57288 - protein, 39 aa, Artificial Sequence; identical to SEQ ID NO: 14637
  Cyclic GFR-binding peptide
  MOD_RES (5), (39): Xaa is C or S

SEQ ID NO: 57289 - protein, 29 aa, Artificial Sequence
  Cyclic GFR-binding peptide
RSVKVAKVEIVRKKPIFKEVQVTLEDHLA

SEQ ID NO: 57290 - protein, 42 aa, Artificial Sequence; identical to SEQ ID NO: 14638
  Cyclic GFR-binding peptide
  MOD_RES (5), (42): Xaa is C or S

SEQ ID NO: 57291 - protein, 31 aa, Artificial Sequence
  Cyclic GFR-binding peptide
  MOD_RES (2), (2): Xaa is C or S
EXVPTEERSVKMAKVRIKPHQGQHKEVQVFL

SEQ ID NO: 57292 - protein, 38 aa, Artificial Sequence
  Cyclic GFR-binding peptide
  MOD_RES (5), (5): Xaa is C or S
SSVKXQPSRVHHSNITVQIMEYVRKKPKLIGEMSRLEE

SEQ ID NO: 57293 - protein, 27 aa, Artificial Sequence
  Cyclic GFR-binding peptide
GQRSVKMAKVRIKPHQGQHKEVQVLEE

SEQ ID NO: 57294 - protein, 31 aa, Artificial Sequence
  Cyclic GFR-binding peptide
QVQLSNITVQIMEIVRKKPIFIGEMSTLEDH

SEQ ID NO: 57295 - protein, 29 aa, Artificial Sequence
  Cyclic GFR-binding peptide
GQRSVKMAKVRIKPHQGQHKEVQVLEEHS

SEQ ID NO: 57296 - protein, 31 aa, Artificial Sequence
  Cyclic GFR-binding peptide
  MOD_RES (31), (31): Xaa is C or S
LSNITVQIMEIVRKKPIFLGEMSTLEDHLAX

SEQ ID NO: 57297 - protein, 32 aa, Artificial Sequence
  Cyclic GFR-binding peptide
  MOD_RES (30), (32): Xaa is C or S
ERPVQMRKIRIKPHQGQHKKATVFLQHNKXEX

SEQ ID NO: 57298 - protein, 27 aa, Artificial Sequence
  Cyclic GFR-binding peptide
TQVQLSNITVQIMEIVRKKPIFIGEMS

SEQ ID NO: 57299 - protein, 33 aa, Artificial Sequence; identical to SEQ ID NO: 14644
  Cyclic GFR-binding peptide

SEQ ID NO: 57300 - protein, 34 aa, Artificial Sequence
  Cyclic GFR-binding peptide
  MOD_RES (2), (2): Xaa is C or S
KXQPSRVHHSNITVQIMEYVRKKPKLLGEMSRLE

SEQ ID NO: 57301 - protein, 36 aa, Artificial Sequence
  Cyclic GFR-binding peptide
  MOD_RES (5), (5): Xaa is C or S
RNVQXRPTQVQLRSVKVAKVEIVRKKPIFKEVQVTL

SEQ ID NO: 57302 - protein, 40 aa, Artificial Sequence; identical to SEQ ID NO: 14646
  Cyclic GFR-binding peptide
  MOD_RES (5), (5): Xaa is C or S

SEQ ID NO: 57303 - protein, 35 aa, Artificial Sequence; identical to SEQ ID NO: 14647
  Cyclic GFR-binding peptide

SEQ ID NO: 57304 - protein, 39 aa, Artificial Sequence; identical to SEQ ID NO: 14648
  Cyclic GFR-binding peptide
  MOD_RES (3), (37), (39): Xaa is C or S

SEQ ID NO: 57305 - protein, 41 aa, Artificial Sequence; identical to SEQ ID NO: 14649
  Cyclic GFR-binding peptide
  MOD_RES (5), (5): Xaa is C or S

SEQ ID NO: 57306 - protein, 26 aa, Artificial Sequence
  Cyclic GFR-binding peptide
RVHHSNITVQIMEYVRKKPKLIGEMS

SEQ ID NO: 57307 - protein, 35 aa, Artificial Sequence; identical to SEQ ID NO: 14650
  Cyclic GFR-binding peptide
  MOD_RES (34), (34): Xaa is C or S

SEQ ID NO: 57308 - protein, 32 aa, Artificial Sequence
  Cyclic GFR-binding peptide
  MOD_RES (2), (2): Xaa is C or S
EXVPTEESNITMQIMRIKPHQGQHLGEMSFLQ

SEQ ID NO: 57309 - protein, 35 aa, Artificial Sequence
  Cyclic GFR-binding peptide
  MOD_RES (3), (3): Xaa is C or S
VQXRPTQVQLSNITVQIMEIVRKKPIFLGEMSTLE

SEQ ID NO: 57310 - protein, 27 aa, Artificial Sequence
  Cyclic GFR-binding peptide
TEERSVKMAKVRIKPHQGQHKEVQVFL

SEQ ID NO: 57311 - protein, 29 aa, Artificial Sequence
  Cyclic GFR-binding peptide
  MOD_RES (2), (2): Xaa is C or S
EXVPTGQRSVKMAKVRIKPHQGQHKEVQV

SEQ ID NO: 57312 - protein, 27 aa, Artificial Sequence
  Cyclic GFR-binding peptide
RPVQMRKIRIKPHQGQHKKATVFLQHN

SEQ ID NO: 57313 - protein, 32 aa, Artificial Sequence
  Cyclic GFR-binding peptide
QVQLRSVKVAKVEIVRKKPIFKEVQVTLEDHL

SEQ ID NO: 57314 - protein, 38 aa, Artificial Sequence
  Cyclic GFR-binding peptide
  MOD_RES (5), (5): Xaa is C or S
SSVKXQPSRVHHSNITVQIMEYVRKKPKLLGEMSRLEE

SEQ ID NO: 57315 - protein, 24 aa, Artificial Sequence
  Cyclic GFR-binding peptide
QRPVQMRKIRIKPHQGQHKKATVL

SEQ ID NO: 57316 - protein, 32 aa, Artificial Sequence
  Cyclic GFR-binding peptide
  MOD_RES (5), (5): Xaa is C or S
EGLEXVPTGQRSVKMAKVRIKPHQGQHKEVQV

SEQ ID NO: 57317 - protein, 29 aa, Artificial Sequence
  Cyclic GFR-binding peptide
SNITVQIMEYVRKKPKLIGEMSRLEEHLE

SEQ ID NO: 57318 - protein, 41 aa, Artificial Sequence; identical to SEQ ID NO: 14656
  Cyclic GFR-binding peptide
  MOD_RES (4), (41): Xaa is C or S

SEQ ID NO: 57319 - protein, 34 aa, Artificial Sequence
  Cyclic GFR-binding peptide
  MOD_RES (4), (4): Xaa is C or S
GLEXVPTGQRPVQMRKIRIKPHQGQHKKATVLEE

SEQ ID NO: 57320 - protein, 32 aa, Artificial Sequence
  Cyclic GFR-binding peptide
  MOD_RES (2), (2): Xaa is C or S
EXVPTEERPVQMRKIRIKPHQGQHKKATVFLQ

SEQ ID NO: 57321 - protein, 32 aa, Artificial Sequence
  Cyclic GFR-binding peptide
  MOD_RES (1), (1): Xaa is C or S
XVPTGQSNITMQIMRIKPHQGQHIGEMSLEEH

SEQ ID NO: 57322 - protein, 36 aa, Artificial Sequence; identical to SEQ ID NO: 14660
  Cyclic GFR-binding peptide
  MOD_RES (2), (36): Xaa is C or S

SEQ ID NO: 57323 - protein, 37 aa, Artificial Sequence
  Cyclic GFR-binding peptide
  MOD_RES (5), (5): Xaa is C or S
SSVKXQPSRVHHSNITVQIMEYVRKKPKLIGEMSRLE

SEQ ID NO: 57324 - protein, 37 aa, Artificial Sequence; identical to SEQ ID NO: 14661
  Cyclic GFR-binding peptide
  MOD_RES (1), (1): Xaa is C or S

SEQ ID NO: 57325 - protein, 40 aa, Artificial Sequence; identical to SEQ ID NO: 14662
  Cyclic GFR-binding peptide
  MOD_RES (3), (40): Xaa is C or S

SEQ ID NO: 57326 - protein, 43 aa, Artificial Sequence; identical to SEQ ID NO: 14664
  Cyclic GFR-binding peptide
  MOD_RES (6), (40), (42): Xaa is C or S

SEQ ID NO: 57327 - protein, 27 aa, Artificial Sequence
  Cyclic GFR-binding peptide
RPVQMRKIRIKPHQGQHKKATVLEEHS

SEQ ID NO: 57328 - protein, 40 aa, Artificial Sequence; identical to SEQ ID NO: 14667
  Cyclic GFR-binding peptide
  MOD_RES (2), (39): Xaa is C or S

SEQ ID NO: 57329 - protein, 35 aa, Artificial Sequence; identical to SEQ ID NO: 14668
  Cyclic GFR-binding peptide
  MOD_RES (2), (2): Xaa is C or S

SEQ ID NO: 57330 - protein, 25 aa, Artificial Sequence
  Cyclic GFR-binding peptide
VQLSNITVQIMEIVRKKPIFLGEMS

SEQ ID NO: 57331 - protein, 37 aa, Artificial Sequence; identical to SEQ ID NO: 14669
  Cyclic GFR-binding peptide
  MOD_RES (1), (1): Xaa is C or S

SEQ ID NO: 57332 - protein, 34 aa, Artificial Sequence
  Cyclic GFR-binding peptide
  MOD_RES (7), (7): Xaa is C or S
NDEGLEXVPTEERPVQMRKIRIKPHQGQHKKATV

SEQ ID NO: 57333 - protein, 36 aa, Artificial Sequence
  Cyclic GFR-binding peptide
  MOD_RES (34), (36): Xaa is C or S
RVHHSNITVQIMEYVRKKPKLLGEMSRLEEHLEXAX

SEQ ID NO: 57334 - protein, 31 aa, Artificial Sequence
  Cyclic GFR-binding peptide
VQLRSVKVAKVEIVRKKPIFKEVQVTLEDHL

SEQ ID NO: 57335 - protein, 35 aa, Artificial Sequence; identical to SEQ ID NO: 14671
  Cyclic GFR-binding peptide

SEQ ID NO: 57336 - protein, 36 aa, Artificial Sequence; identical to SEQ ID NO: 14672
  Cyclic GFR-binding peptide
  MOD_RES (2), (36): Xaa is C or S

SEQ ID NO: 57337 - protein, 35 aa, Artificial Sequence
  Cyclic GFR-binding peptide
  MOD_RES (32), (34): Xaa is C or S
TGQRSVKMAKVRIKPHQGQHKEVQVLEEHSQXEXR

SEQ ID NO: 57338 - protein, 27 aa, Artificial Sequence
  Cyclic GFR-binding peptide
SNITMQIMRIKPHQGQHIGEMSLEEHS

SEQ ID NO: 57339 - protein, 29 aa, Artificial Sequence
  Cyclic GFR-binding peptide
RVHHRPVQVRKIEYVRKKPKLKKATVRLE

SEQ ID NO: 57340 - protein, 30 aa, Artificial Sequence
  Cyclic GFR-binding peptide
EESNITMQIMRIKPHQGQHLGEMSFLQHNK

SEQ ID NO: 57341 - protein, 24 aa, Artificial Sequence
  Cyclic GFR-binding peptide
RPVQVRKIEYVRKKPKLKKATVRL

SEQ ID NO: 57342 - protein, 26 aa, Artificial Sequence
  Cyclic GFR-binding peptide
PTEERPVQMRKIRIKPHQGQHKKATV

SEQ ID NO: 57343 - protein, 33 aa, Artificial Sequence
  Cyclic GFR-binding peptide
  MOD_RES (31), (33): Xaa is C or S
HRPVQVRKIEYVRKKPKLKKATVRLEEHLEXAX

SEQ ID NO: 57344 - protein, 29 aa, Artificial Sequence
  Cyclic GFR-binding peptide
QRSVKMAKVRIKPHQGQHKEVQVLEEHSQ

SEQ ID NO: 57345 - protein, 44 aa, Artificial Sequence; identical to SEQ ID NO: 14676
  Cyclic GFR-binding peptide
  MOD_RES (4), (41), (43): Xaa is C or S

SEQ ID NO: 57346 - protein, 27 aa, Artificial Sequence
  Cyclic GFR-binding peptide
QLRSVKVAKVEIVRKKPIFKEVQVTLE

SEQ ID NO: 57347 - protein, 43 aa, Artificial Sequence; identical to SEQ ID NO: 14677
  Cyclic GFR-binding peptide
  MOD_RES (5), (42): Xaa is C or S

SEQ ID NO: 57348 - protein, 30 aa, Artificial Sequence
  Cyclic GFR-binding peptide
RPTQVQLSNITVQIMEIVRKKPIFLGEMST

SEQ ID NO: 57349 - protein, 35 aa, Artificial Sequence
  Cyclic GFR-binding peptide
  MOD_RES (4), (4): Xaa is C or S
GLEXVPTGQRPVQMRKIRIKPHQGQHKKATVLEEH

SEQ ID NO: 57350 - protein, 38 aa, Artificial Sequence; identical to SEQ ID NO: 14679
  Cyclic GFR-binding peptide
  MOD_RES (5), (5): Xaa is C or S

SEQ ID NO: 57351 - protein, 25 aa, Artificial Sequence
  Cyclic GFR-binding peptide
SNITMQIMRIKPHQGQHIGEMSLEE

SEQ ID NO: 57352 - protein, 31 aa, Artificial Sequence
  Cyclic GFR-binding peptide
RPTQVQLRSVKVAKVEIVRKKPIFKEVQVTL

SEQ ID NO: 57353 - protein, 31 aa, Artificial Sequence
  Cyclic GFR-binding peptide
  MOD_RES (31), (31): Xaa is C or S
EERSVKMAKVRIKPHQGQHKEVQVFLQHNKX

SEQ ID NO: 57354 - protein, 29 aa, Artificial Sequence
  Cyclic GFR-binding peptide
TQVQLRSVKVAKVEIVRKKPIFKEVQVTL

SEQ ID NO: 57355 - protein, 35 aa, Artificial Sequence; identical to SEQ ID NO: 14680
  Cyclic GFR-binding peptide

SEQ ID NO: 57356 - protein, 32 aa, Artificial Sequence
  Cyclic GFR-binding peptide
  MOD_RES (1), (1): Xaa is C or S
XRPTQVQLSNITVQIMEIVRKKPIFLGEMSTL

SEQ ID NO: 57357 - protein, 28 aa, Artificial Sequence
  Cyclic GFR-binding peptide
HSNITVQIMEYVRKKPKLLGEMSRLEEH

SEQ ID NO: 57358 - protein, 31 aa, Artificial Sequence
  Cyclic GFR-binding peptide
  MOD_RES (30), (30): Xaa is C or S
RPVQVRKIEYVRKKPKLKKATVRLEEHLEXA

SEQ ID NO: 57359 - protein, 35 aa, Artificial Sequence
  Cyclic GFR-binding peptide
  MOD_RES (6), (6): Xaa is C or S
DEGLEXVPTEERPVQMRKIRIKPHQGQHKKATVFL

SEQ ID NO: 57360 - protein, 31 aa, Artificial Sequence
  Cyclic GFR-binding peptide
  MOD_RES (30), (30): Xaa is C or S
SNITVQIMEIVRKKPIFLGEMSTLEDHLAXK

SEQ ID NO: 57361 - protein, 32 aa, Artificial Sequence
  Cyclic GFR-binding peptide
  MOD_RES (1), (1): Xaa is C or S
XQPSRVHHSNITVQIMEYVRKKPKLIGEMSRL

SEQ ID NO: 57362 - protein, 38 aa, Artificial Sequence; identical to SEQ ID NO: 14681
  Cyclic GFR-binding peptide
  MOD_RES (4), (38): Xaa is C or S

SEQ ID NO: 57363 - protein, 26 aa, Artificial Sequence
  Cyclic GFR-binding peptide
SNITVQIMEYVRKKPKLLGEMSRLEE

SEQ ID NO: 57364 - protein, 37 aa, Artificial Sequence; identical to SEQ ID NO: 14682
  Cyclic GFR-binding peptide
  MOD_RES (3), (3): Xaa is C or S

SEQ ID NO: 57365 - protein, 26 aa, Artificial Sequence
  Cyclic GFR-binding peptide
VHHSNITVQIMEYVRKKPKLLGEMSR

SEQ ID NO: 57366 - protein, 33 aa, Artificial Sequence
  Cyclic GFR-binding peptide
  MOD_RES (3), (3): Xaa is C or S
LEXVPTGQRSVKMAKVRIKPHQGQHKEVQVLEE

SEQ ID NO: 57367 - protein, 29 aa, Artificial Sequence
  Cyclic GFR-binding peptide
  MOD_RES (2), (2): Xaa is C or S
EXVPTGQSNITMQIMRIKPHQGQHIGEMS

SEQ ID NO: 57368 - protein, 30 aa, Artificial Sequence
  Cyclic GFR-binding peptide
  MOD_RES (29), (29): Xaa is C or S
SNITMQIMRIKPHQGQHIGEMSLEEHSQXE

SEQ ID NO: 57369 - protein, 24 aa, Artificial Sequence
  Cyclic GFR-binding peptide
LSNITVQIMEIVRKKPIFIGEMST

SEQ ID NO: 57370 - protein, 34 aa, Artificial Sequence; identical to SEQ ID NO: 14685
  Cyclic GFR-binding peptide

SEQ ID NO: 57371 - protein, 24 aa, Artificial Sequence
  Cyclic GFR-binding peptide
LRSVKVAKVEIVRKKPIFKEVQVT

SEQ ID NO: 57372 - protein, 23 aa, Artificial Sequence
  Cyclic GFR-binding peptide
SNITMQIMRIKPHQGQHLGEMSF

SEQ ID NO: 57373 - protein, 29 aa, Artificial Sequence
  Cyclic GFR-binding peptide
  MOD_RES (29), (29): Xaa is C or S
SNITMQIMRIKPHQGQHIGEMSLEEHSQX

SEQ ID NO: 57374 - protein, 30 aa, Artificial Sequence
  Cyclic GFR-binding peptide
  MOD_RES (30), (30): Xaa is C or S
ERSVKMAKVRIKPHQGQHKEVQVFLQHNKX

SEQ ID NO: 57375 - protein, 39 aa, Artificial Sequence; identical to SEQ ID NO: 14687
  Cyclic GFR-binding peptide
  MOD_RES (4), (38): Xaa is C or S

SEQ ID NO: 57376 - protein, 31 aa, Artificial Sequence
  Cyclic GFR-binding peptide
RPVQVRKIEYVRKKPKLKKATVAAAAAAAAA

SEQ ID NO: 57377 - protein, 31 aa, Artificial Sequence
  Cyclic GFR-binding peptide
  MOD_RES (1), (1): Xaa is C or S
XVPTEESNITMQIMRIKPHQGQHLGEMSFLQ

SEQ ID NO: 57378 - protein, 32 aa, Artificial Sequence
  Cyclic GFR-binding peptide
  MOD_RES (5), (5): Xaa is C or S
EGLEXVPTGQSNITMQIMRIKPHQGQHIGEMS

SEQ ID NO: 57379 - protein, 36 aa, Artificial Sequence
  Cyclic GFR-binding peptide
  MOD_RES (5), (5): Xaa is C or S
EGLEXVPTGQSNITMQIMRIKPHQGQHIGEMSLEEH

SEQ ID NO: 57380 - protein, 40 aa, Artificial Sequence; identical to SEQ ID NO: 14691
  Cyclic GFR-binding peptide
  MOD_RES (7), (7): Xaa is C or S

SEQ ID NO: 57381 - protein, 34 aa, Artificial Sequence
  Cyclic GFR-binding peptide
  MOD_RES (33), (33): Xaa is C or S
PTGQSNITMQIMRIKPHQGQHIGEMSLEEHSQXE

SEQ ID NO: 57382 - protein, 30 aa, Artificial Sequence
  Cyclic GFR-binding peptide
QLRSVKVAKVEIVRKKPIFKEVQVTLEDHL

SEQ ID NO: 57383 - protein, 43 aa, Artificial Sequence; identical to SEQ ID NO: 14695
  Cyclic GFR-binding peptide
  MOD_RES (5), (42): Xaa is C or S

SEQ ID NO: 57384 - protein, 27 aa, Artificial Sequence
  Cyclic GFR-binding peptide
QSNITMQIMRIKPHQGQHIGEMSLEEH

SEQ ID NO: 57385 - protein, 39 aa, Artificial Sequence; identical to SEQ ID NO: 14696
  Cyclic GFR-binding peptide
  MOD_RES (5), (39): Xaa is C or S

SEQ ID NO: 57386 - protein, 22 aa, Artificial Sequence
  Cyclic GFR-binding peptide
RPVQVRKIEYVRKKPKLKKATV

SEQ ID NO: 57387 - protein, 34 aa, Artificial Sequence
  Cyclic GFR-binding peptide
  MOD_RES (3), (3): Xaa is C or S
VQXRPTQVQLSNITVQIMEIVRKKPIFIGEMSTL

SEQ ID NO: 57388 - protein, 38 aa, Artificial Sequence; identical to SEQ ID NO: 14698
  Cyclic GFR-binding peptide
  MOD_RES (1), (38): Xaa is C or S

SEQ ID NO: 57389 - protein, 32 aa, Artificial Sequence
  Cyclic GFR-binding peptide
  MOD_RES (31), (31): Xaa is C or S
HSNITVQIMEYVRKKPKLLGEMSRLEEHLEXA

SEQ ID NO: 57390 - protein, 37 aa, Artificial Sequence; identical to SEQ ID NO: 14699
  Cyclic GFR-binding peptide
  MOD_RES (4), (4): Xaa is C or S

SEQ ID NO: 57391 - protein, 29 aa, Artificial Sequence
  Cyclic GFR-binding peptide
SRVHHRPVQVRKIEYVRKKPKLKKATVRL

SEQ ID NO: 57392 - protein, 32 aa, Artificial Sequence
  Cyclic GFR-binding peptide
  MOD_RES (1), (1): Xaa is C or S
XVPTEERPVQMRKIRIKPHQGQHKKATVFLQH

SEQ ID NO: 57393 - protein, 35 aa, Artificial Sequence
  Cyclic GFR-binding peptide
  MOD_RES (33), (35): Xaa is C or S
VHHSNITVQIMEYVRKKPKLLGEMSRLEEHLEXAX

SEQ ID NO: 57394 - protein, 31 aa, Artificial Sequence
  Cyclic GFR-binding peptide
RSVKVAKVEYVRKKPKLKEVQVAAAAAAAAA

SEQ ID NO: 57395 - protein, 27 aa, Artificial Sequence
  Cyclic GFR-binding peptide
LSNITVQIMEIVRKKPIFLGEMSTLED

SEQ ID NO: 57396 - protein, 35 aa, Artificial Sequence; identical to SEQ ID NO: 14702
  Cyclic GFR-binding peptide
  MOD_RES (35), (35): Xaa is C or S

SEQ ID NO: 57397 - protein, 28 aa, Artificial Sequence
  Cyclic GFR-binding peptide
SNITMQIMRIKPHQGQHIGEMSLEEHSQ

SEQ ID NO: 57398 - protein, 32 aa, Artificial Sequence
  Cyclic GFR-binding peptide
  MOD_RES (29), (31): Xaa is C or S
RSVKMAKVRIKPHQGQHKEVQVFLQHNKXEXR

SEQ ID NO: 57399 - protein, 32 aa, Artificial Sequence
  Cyclic GFR-binding peptide
VQLSNITVQIMEIVRKKPIFIGEMSTLEDHLA

SEQ ID NO: 57400 - protein, 33 aa, Artificial Sequence; identical to SEQ ID NO: 14703
  Cyclic GFR-binding peptide
  MOD_RES (1), (1): Xaa is C or S

SEQ ID NO: 57401 - protein, 36 aa, Artificial Sequence
  Cyclic GFR-binding peptide
  MOD_RES (6), (6): Xaa is C or S
DEGLEXVPTEESNITMQIMRIKPHQGQHLGEMSFLQ

SEQ ID NO: 57402 - protein, 31 aa, Artificial Sequence
  Cyclic GFR-binding peptide
  MOD_RES (3), (3): Xaa is C or S
LEXVPTEESNITMQIMRIKPHQGQHLGEMSF

SEQ ID NO: 57403 - protein, 41 aa, Artificial Sequence; identical to SEQ ID NO: 14705
  Cyclic GFR-binding peptide
  MOD_RES (6), (40): Xaa is C or S

SEQ ID NO: 57404 - protein, 28 aa, Artificial Sequence
  Cyclic GFR-binding peptide
LSNITVQIMEIVRKKPIFLGEMSTLEDH

SEQ ID NO: 57405 - protein, 34 aa, Artificial Sequence; identical to SEQ ID NO: 14706
  Cyclic GFR-binding peptide

SEQ ID NO: 57406 - protein, 32 aa, Artificial Sequence
  Cyclic GFR-binding peptide
PTQVQLRSVKVAKVEIVRKKPIFKEVQVTLED

SEQ ID NO: 57407 - protein, 43 aa, Artificial Sequence; identical to SEQ ID NO: 14707
  Cyclic GFR-binding peptide
  MOD_RES (5), (42): Xaa is C or S

SEQ ID NO: 57408 - protein, 42 aa, Artificial Sequence; identical to SEQ ID NO: 14708
  Cyclic GFR-binding peptide
  MOD_RES (7), (41): Xaa is C or S

SEQ ID NO: 57409 - protein, 30 aa, Artificial Sequence
  Cyclic GFR-binding peptide
EERPVQMRKIRIKPHQGQHKKATVFLQHNK

SEQ ID NO: 57410 - protein, 23 aa, Artificial Sequence
  Cyclic GFR-binding peptide
LSNITVQIMEIVRKKPIFLGEMS

SEQ ID NO: 57411 - protein, 27 aa, Artificial Sequence
  Cyclic GFR-binding peptide
QVQLRSVKVAKVEIVRKKPIFKEVQVT

SEQ ID NO: 57412 - protein, 31 aa, Artificial Sequence
  Cyclic GFR-binding peptide
  MOD_RES (1), (1): Xaa is C or S
XQPSRVHHSNITVQIMEYVRKKPKLLGEMSR

SEQ ID NO: 57413 - protein, 45 aa, Artificial Sequence; identical to SEQ ID NO: 14711
  Cyclic GFR-binding peptide
  MOD_RES (5), (42), (44): Xaa is C or S

SEQ ID NO: 57414 - protein, 37 aa, Artificial Sequence
  Cyclic GFR-binding peptide
  MOD_RES (7), (7): Xaa is C or S
NDEGLEXVPTEERPVQMRKIRIKPHQGQHKKATVFLQ

SEQ ID NO: 57415 - protein, 36 aa, Artificial Sequence; identical to SEQ ID NO: 14712
  Cyclic GFR-binding peptide
  MOD_RES (34), (36): Xaa is C or S

SEQ ID NO: 57416 - protein, 38 aa, Artificial Sequence; identical to SEQ ID NO: 14713
  Cyclic GFR-binding peptide
  MOD_RES (2), (2): Xaa is C or S

SEQ ID NO: 57417 - protein, 37 aa, Artificial Sequence; identical to SEQ ID NO: 14714
  Cyclic GFR-binding peptide
  MOD_RES (2), (2): Xaa is C or S

SEQ ID NO: 57418 - protein, 30 aa, Artificial Sequence
  Cyclic GFR-binding peptide
GQRPVQMRKIRIKPHQGQHKKATVLEEHSQ

SEQ ID NO: 57419 - protein, 34 aa, Artificial Sequence
  Cyclic GFR-binding peptide
  MOD_RES (32), (34): Xaa is C or S
TEERPVQMRKIRIKPHQGQHKKATVFLQHNKXEX

SEQ ID NO: 57420 - protein, 35 aa, Artificial Sequence
  Cyclic GFR-binding peptide
  MOD_RES (4), (4): Xaa is C or S
SVKXQPSRVHHSNITVQIMEYVRKKPKLIGEMSRL

SEQ ID NO: 57421 - protein, 29 aa, Artificial Sequence
  Cyclic GFR-binding peptide
ERPVQMRKIRIKPHQGQHKKATVFLQHNK

SEQ ID NO: 57422 - protein, 24 aa, Artificial Sequence
  Cyclic GFR-binding peptide
ERSVKMAKVRIKPHQGQHKEVQVF

SEQ ID NO: 57423 - protein, 38 aa, Artificial Sequence; identical to SEQ ID NO: 14719
  Cyclic GFR-binding peptide
  MOD_RES (1), (38): Xaa is C or S

SEQ ID NO: 57424 - protein, 30 aa, Artificial Sequence
  Cyclic GFR-binding peptide
  MOD_RES (30), (30): Xaa is C or S
ERPVQMRKIRIKPHQGQHKKATVFLQHNKX

SEQ ID NO: 57425 - protein, 33 aa, Artificial Sequence; identical to SEQ ID NO: 14720
  Cyclic GFR-binding peptide

SEQ ID NO: 57426 - protein, 33 aa, Artificial Sequence
  Cyclic GFR-binding peptide
  MOD_RES (31), (33): Xaa is C or S
GQRPVQMRKIRIKPHQGQHKKATVLEEHSQXEX

SEQ ID NO: 57427 - protein, 34 aa, Artificial Sequence
  Cyclic GFR-binding peptide
  MOD_RES (31), (33): Xaa is C or S
LSNITVQIMEIVRKKPIFIGEMSTLEDHLAXKXE

SEQ ID NO: 57428 - protein, 41 aa, Artificial Sequence; identical to SEQ ID NO: 14721
  Cyclic GFR-binding peptide
  MOD_RES (3), (40): Xaa is C or S

SEQ ID NO: 57429 - protein, 37 aa, Artificial Sequence
  Cyclic GFR-binding peptide
  MOD_RES (34), (36): Xaa is C or S
QVQLSNITVQIMEIVRKKPIFIGEMSTLEDHLAXKXE

SEQ ID NO: 57430 - protein, 42 aa, Artificial Sequence; identical to SEQ ID NO: 14725
  Cyclic GFR-binding peptide
  MOD_RES (3), (40), (42): Xaa is C or S

SEQ ID NO: 57431 - protein, 40 aa, Artificial Sequence; identical to SEQ ID NO: 14724
  Cyclic GFR-binding peptide
  MOD_RES (5), (39): Xaa is C or S

SEQ ID NO: 57432 - protein, 40 aa, Artificial Sequence; identical to SEQ ID NO: 14726
  Cyclic GFR-binding peptide
  MOD_RES (37), (39): Xaa is C or S

SEQ ID NO: 57433 - protein, 32 aa, Artificial Sequence
  Cyclic GFR-binding peptide
  MOD_RES (31), (31): Xaa is C or S
HSNITVQIMEYVRKKPKLIGEMSRLEEHLEXA

SEQ ID NO: 57434 - protein, 25 aa, Artificial Sequence
  Cyclic GFR-binding peptide
QLSNITVQIMEIVRKKPIFLGEMST

SEQ ID NO: 57435 - protein, 32 aa, Artificial Sequence
  Cyclic GFR-binding peptide
  MOD_RES (1), (1): Xaa is C or S
XQPSRVHHSNITVQIMEYVRKKPKLLGEMSRL

SEQ ID NO: 57436 - protein, 23 aa, Artificial Sequence
  Cyclic GFR-binding peptide
ERPVQMRKIRIKPHQGQHKKATV

SEQ ID NO: 57437 - protein, 31 aa, Artificial Sequence
  Cyclic GFR-binding peptide
RVHHRPVQVRKIEYVRKKPKLKKATVRLEEH

SEQ ID NO: 57438 - protein, 34 aa, Artificial Sequence
  Cyclic GFR-binding peptide
  MOD_RES (7), (7): Xaa is C or S
NDEGLEXVPTGQSNITMQIMRIKPHQGQHIGEMS

SEQ ID NO: 57439 - protein, 39 aa, Artificial Sequence; identical to SEQ ID NO: 14732
  Cyclic GFR-binding peptide
  MOD_RES (4), (4): Xaa is C or S

SEQ ID NO: 57440 - protein, 28 aa, Artificial Sequence
  Cyclic GFR-binding peptide
VPTEERPVQMRKIRIKPHQGQHKKATVF

SEQ ID NO: 57441 - protein, 39 aa, Artificial Sequence; identical to SEQ ID NO: 14731
  Cyclic GFR-binding peptide
  MOD_RES (5), (39): Xaa is C or S

SEQ ID NO: 57442 - protein, 25 aa, Artificial Sequence
  Cyclic GFR-binding peptide
HHSNITVQIMEYVRKKPKLLGEMSR

SEQ ID NO: 57443 - protein, 37 aa, Artificial Sequence; identical to SEQ ID NO: 14734
  Cyclic GFR-binding peptide
  MOD_RES (2), (36): Xaa is C or S

SEQ ID NO: 57444 - protein, 36 aa, Artificial Sequence
  Cyclic GFR-binding peptide
  MOD_RES (4), (4): Xaa is C or S
NVQXRPTQVQLRSVKVAKVEIVRKKPIFKEVQVTLE

SEQ ID NO: 57445 - protein, 30 aa, Artificial Sequence
  Cyclic GFR-binding peptide
PTGQRPVQMRKIRIKPHQGQHKKATVLEEH

SEQ ID NO: 57446 - protein, 37 aa, Artificial Sequence
  Cyclic GFR-binding peptide
  MOD_RES (4), (4): Xaa is C or S
SVKXQPSRVHHSNITVQIMEYVRKKPKLIGEMSRLEE

SEQ ID NO: 57447 - protein, 36 aa, Artificial Sequence
  Cyclic GFR-binding peptide
  MOD_RES (7), (7): Xaa is C or S
NDEGLEXVPTEESNITMQIMRIKPHQGQHLGEMSFL

SEQ ID NO: 57448 - protein, 35 aa, Artificial Sequence; identical to SEQ ID NO: 14738
  Cyclic GFR-binding peptide
  MOD_RES (3), (3): Xaa is C or S

SEQ ID NO: 57449 - protein, 37 aa, Artificial Sequence; identical to SEQ ID NO: 14739
  Cyclic GFR-binding peptide
  MOD_RES (1), (35), (37): Xaa is C or S

SEQ ID NO: 57450 - protein, 32 aa, Artificial Sequence
  Cyclic GFR-binding peptide
  MOD_RES (3), (3): Xaa is C or S
LEXVPTEESNITMQIMRIKPHQGQHLGEMSFL

SEQ ID NO: 57451 - protein, 34 aa, Artificial Sequence; identical to SEQ ID NO: 14742
  Cyclic GFR-binding peptide

SEQ ID NO: 57452 - protein, 30 aa, Artificial Sequence
  Cyclic GFR-binding peptide
RVHHSNITVQIMEYVRKKPKLIGEMSRLEE

SEQ ID NO: 57453 - protein, 40 aa, Artificial Sequence; identical to SEQ ID NO: 14744
  Cyclic GFR-binding peptide
  MOD_RES (4), (4): Xaa is C or S

SEQ ID NO: 57454 - protein, 35 aa, Artificial Sequence
  Cyclic GFR-binding peptide
  MOD_RES (3), (3): Xaa is C or S
VKXQPSRVHHRPVQVRKIEYVRKKPKLKKATVRLE

SEQ ID NO: 57455 - protein, 30 aa, Artificial Sequence
  Cyclic GFR-binding peptide
TQVQLSNITVQIMEIVRKKPIFIGEMSTLE

SEQ ID NO: 57456 - protein, 25 aa, Artificial Sequence
  Cyclic GFR-binding peptide
TEERSVKMAKVRIKPHQGQHKEVQV

SEQ ID NO: 57457 - protein, 34 aa, Artificial Sequence
  Cyclic GFR-binding peptide
  MOD_RES (3), (3): Xaa is C or S
LEXVPTEESNITMQIMRIKPHQGQHLGEMSFLQH

SEQ ID NO: 57458 - protein, 28 aa, Artificial Sequence
  Cyclic GFR-binding peptide
QVQLSNITVQIMEIVRKKPIFLGEMSTL

SEQ ID NO: 57459 - protein, 34 aa, Artificial Sequence
  Cyclic GFR-binding peptide
  MOD_RES (32), (34): Xaa is C or S
QLSNITVQIMEIVRKKPIFIGEMSTLEDHLAXKX

SEQ ID NO: 57460 - protein, 40 aa, Artificial Sequence; identical to SEQ ID NO: 14747
  Cyclic GFR-binding peptide
  MOD_RES (4), (4): Xaa is C or S

SEQ ID NO: 57461 - protein, 33 aa, Artificial Sequence
  Cyclic GFR-binding peptide
  MOD_RES (5), (5): Xaa is C or S
EGLEXVPTGQSNITMQIMRIKPHQGQHIGEMSL

SEQ ID NO: 57462 - protein, 35 aa, Artificial Sequence; identical to SEQ ID NO: 14749
  Cyclic GFR-binding peptide
  MOD_RES (34), (34): Xaa is C or S

SEQ ID NO: 57463 - protein, 33 aa, Artificial Sequence
  Cyclic GFR-binding peptide
  MOD_RES (30), (32): Xaa is C or S
SNITVQIMEIVRKKPIFLGEMSTLEDHLAXKXE

SEQ ID NO: 57464 - protein, 31 aa, Artificial Sequence
  Cyclic GFR-binding peptide
VPTGQRSVKMAKVRIKPHQGQHKEVQVLEEH

SEQ ID NO: 57465 - protein, 22 aa, Artificial Sequence
  Cyclic GFR-binding peptide
SNITVQIMEYVRKKPKLLGEMS

SEQ ID NO: 57466 - protein, 37 aa, Artificial Sequence
  Cyclic GFR-binding peptide
  MOD_RES (6), (6): Xaa is C or S
DEGLEXVPTEERPVQMRKIRIKPHQGQHKKATVFLQH

SEQ ID NO: 57467 - protein, 38 aa, Artificial Sequence; identical to SEQ ID NO: 14755
  Cyclic GFR-binding peptide
  MOD_RES (35), (37): Xaa is C or S

SEQ ID NO: 57468 - protein, 33 aa, Artificial Sequence
  Cyclic GFR-binding peptide
RVHHSNITVQIMEYVRKKPKLIGEMSRLEEHLE

SEQ ID NO: 57469 - protein, 42 aa, Artificial Sequence; identical to SEQ ID NO: 14758
  Cyclic GFR-binding peptide
  MOD_RES (5), (39), (41): Xaa is C or S

SEQ ID NO: 57470 - protein, 32 aa, Artificial Sequence
  Cyclic GFR-binding peptide
  MOD_RES (2), (2): Xaa is C or S
QXRPTQVQLSNITVQIMEIVRKKPIFLGEMST

SEQ ID NO: 57471 - protein, 33 aa, Artificial Sequence; identical to SEQ ID NO: 14762
  Cyclic GFR-binding peptide
  MOD_RES (1), (1): Xaa is C or S

SEQ ID NO: 57472 - protein, 39 aa, Artificial Sequence; identical to SEQ ID NO: 14763
  Cyclic GFR-binding peptide
  MOD_RES (4), (4): Xaa is C or S

SEQ ID NO: 57473 - protein, 41 aa, Artificial Sequence; identical to SEQ ID NO: 14765
  Cyclic GFR-binding peptide
  MOD_RES (4), (38), (40): Xaa is C or S

SEQ ID NO: 57474 - protein, 37 aa, Artificial Sequence
  Cyclic GFR-binding peptide
  MOD_RES (4), (4): Xaa is C or S
SVKXQPSRVHHSNITVQIMEYVRKKPKLLGEMSRLEE

SEQ ID NO: 57475 - protein, 35 aa, Artificial Sequence
  Cyclic GFR-binding peptide
  MOD_RES (34), (34): Xaa is C or S
QVQLRSVKVAKVEIVRKKPIFKEVQVTLEDHLAXK

SEQ ID NO: 57476 - protein, 38 aa, Artificial Sequence; identical to SEQ ID NO: 14767
  Cyclic GFR-binding peptide
  MOD_RES (6), (6): Xaa is C or S

SEQ ID NO: 57477 - protein, 32 aa, Artificial Sequence
  Cyclic GFR-binding peptide
QVQLSNITVQIMEIVRKKPIFLGEMSTLEDHL

SEQ ID NO: 57478 - protein, 39 aa, Artificial Sequence; identical to SEQ ID NO: 14768
  Cyclic GFR-binding peptide
  MOD_RES (2), (39): Xaa is C or S

SEQ ID NO: 57479 - protein, 24 aa, Artificial Sequence
  Cyclic GFR-binding peptide
QRSVKMAKVRIKPHQGQHKEVQVL

SEQ ID NO: 57480 - protein, 35 aa, Artificial Sequence
  Cyclic GFR-binding peptide
  MOD_RES (5), (5): Xaa is C or S
EGLEXVPTEERSVKMAKVRIKPHQGQHKEVQVFLQ

SEQ ID NO: 57481 - protein, 30 aa, Artificial Sequence
  Cyclic GFR-binding peptide
VQLSNITVQIMEIVRKKPIFIGEMSTLEDH

SEQ ID NO: 57482 - protein, 39 aa, Artificial Sequence; identical to SEQ ID NO: 14770
  Cyclic GFR-binding peptide
  MOD_RES (4), (4): Xaa is C or S

SEQ ID NO: 57483 - protein, 42 aa, Artificial Sequence; identical to SEQ ID NO: 14773
  Cyclic GFR-binding peptide
  MOD_RES (5), (39), (41): Xaa is C or S

SEQ ID NO: 57484 - protein, 42 aa, Artificial Sequence; identical to SEQ ID NO: 14775
  Cyclic GFR-binding peptide
  MOD_RES (4), (41): Xaa is C or S

SEQ ID NO: 57485 - protein, 34 aa, Artificial Sequence
  Cyclic GFR-binding peptide
  MOD_RES (33), (33): Xaa is C or S
PTEESNITMQIMRIKPHQGQHLGEMSFLQHNKXE

SEQ ID NO: 57486 - protein, 43 aa, Artificial Sequence; identical to SEQ ID NO: 14776
  Cyclic GFR-binding peptide
  MOD_RES (7), (41), (43): Xaa is C or S

SEQ ID NO: 57487 - protein, 30 aa, Artificial Sequence
  Cyclic GFR-binding peptide
RVHHSNITVQIMEYVRKKPKLLGEMSRLEE

SEQ ID NO: 57488 - protein, 26 aa, Artificial Sequence
  Cyclic GFR-binding peptide
PTEESNITMQIMRIKPHQGQHLGEMS

SEQ ID NO: 57489 - protein, 31 aa, Artificial Sequence
  Cyclic GFR-binding peptide
  MOD_RES (1), (1): Xaa is C or S
XVPTGQRPVQMRKIRIKPHQGQHKKATVLEE

SEQ ID NO: 57490 - protein, 34 aa, Artificial Sequence; identical to SEQ ID NO: 14778
  Cyclic GFR-binding peptide

SEQ ID NO: 57491 - protein, 38 aa, Artificial Sequence; identical to SEQ ID NO: 14780
  Cyclic GFR-binding peptide
  MOD_RES (3), (3): Xaa is C or S

SEQ ID NO: 57492 - protein, 32 aa, Artificial Sequence
  Cyclic GFR-binding peptide
  MOD_RES (3), (3): Xaa is C or S
LEXVPTGQRSVKMAKVRIKPHQGQHKEVQVLE

SEQ ID NO: 57493 - protein, 34 aa, Artificial Sequence; identical to SEQ ID NO: 14782
  Cyclic GFR-binding peptide

SEQ ID NO: 57494 - protein, 37 aa, Artificial Sequence
  Cyclic GFR-binding peptide
  MOD_RES (7), (7): Xaa is C or S
NDEGLEXVPTGQRPVQMRKIRIKPHQGQHKKATVLEE

SEQ ID NO: 57495 - protein, 32 aa, Artificial Sequence
  Cyclic GFR-binding peptide
  MOD_RES (2), (2): Xaa is C or S
QXRPTQVQLSNITVQIMEIVRKKPIFIGEMST

SEQ ID NO: 57496 - protein, 34 aa, Artificial Sequence
  Cyclic GFR-binding peptide
  MOD_RES (5), (5): Xaa is C or S
SSVKXQPSRVHHRPVQVRKIEYVRKKPKLKKATV

SEQ ID NO: 57497 - protein, 33 aa, Artificial Sequence
  Cyclic GFR-binding peptide
QPSRVHHRPVQVRKIEYVRKKPKLKKATVRLEE

SEQ ID NO: 57498 - protein, 32 aa, Artificial Sequence
  Cyclic GFR-binding peptide
RPTQVQLSNITVQIMEIVRKKPIFLGEMSTLE

SEQ ID NO: 57499 - protein, 24 aa, Artificial Sequence
  Cyclic GFR-binding peptide
HHSNITVQIMEYVRKKPKLIGEMS

SEQ ID NO: 57500 - protein, 26 aa, Artificial Sequence
  Cyclic GFR-binding peptide
ERPVQMRKIRIKPHQGQHKKATVFLQ

SEQ ID NO: 57501 - protein, 30 aa, Artificial Sequence
  Cyclic GFR-binding peptide
VHHRPVQVRKIEYVRKKPKLKKATVRLEEH

SEQ ID NO: 57502 - protein, 27 aa, Artificial Sequence
  Cyclic GFR-binding peptide
ERSVKMAKVRIKPHQGQHKEVQVFLQH

SEQ ID NO: 57503 - protein, 29 aa, Artificial Sequence
  Cyclic GFR-binding peptide
GQRPVQMRKIRIKPHQGQHKKATVLEEHS

SEQ ID NO: 57504 - protein, 26 aa, Artificial Sequence
  Cyclic GFR-binding peptide
SNITVQIMEYVRKKPKLIGEMSRLEE

SEQ ID NO: 57505 - protein, 38 aa, Artificial Sequence; identical to SEQ ID NO: 14786
  Cyclic GFR-binding peptide
  MOD_RES (4), (4): Xaa is C or S

SEQ ID NO: 57506 - protein, 35 aa, Artificial Sequence; identical to SEQ ID NO: 14787
  Cyclic GFR-binding peptide
  MOD_RES (2), (2): Xaa is C or S

SEQ ID NO: 57507 - protein, 26 aa, Artificial Sequence
  Cyclic GFR-binding peptide
TGQRSVKMAKVRIKPHQGQHKEVQVL

SEQ ID NO: 57508 - protein, 25 aa, Artificial Sequence
  Cyclic GFR-binding peptide
ESNITMQIMRIKPHQGQHLGEMSFL

SEQ ID NO: 57509 - protein, 35 aa, Artificial Sequence
  Cyclic GFR-binding peptide
  MOD_RES (4), (4): Xaa is C or S
GLEXVPTGQRSVKMAKVRIKPHQGQHKEVQVLEEH

SEQ ID NO: 57510 - protein, 37 aa, Artificial Sequence
  Cyclic GFR-binding peptide
  MOD_RES (6), (6): Xaa is C or S
DEGLEXVPTGQSNITMQIMRIKPHQGQHIGEMSLEEH

SEQ ID NO: 57511 - protein, 36 aa, Artificial Sequence
  Cyclic GFR-binding peptide
  MOD_RES (33), (35): Xaa is C or S
PTEERPVQMRKIRIKPHQGQHKKATVFLQHNKXEXR

SEQ ID NO: 57512 - protein, 36 aa, Artificial Sequence; identical to SEQ ID NO: 14790
  Cyclic GFR-binding peptide
  MOD_RES (2), (36): Xaa is C or S

SEQ ID NO: 57513 - protein, 42 aa, Artificial Sequence; identical to SEQ ID NO: 14791
  Cyclic GFR-binding peptide
  MOD_RES (6), (40), (42): Xaa is C or S

SEQ ID NO: 57514 - protein, 38 aa, Artificial Sequence; identical to SEQ ID NO: 14792
  Cyclic GFR-binding peptide
  MOD_RES (3), (37): Xaa is C or S

SEQ ID NO: 57515 - protein, 37 aa, Artificial Sequence; identical to SEQ ID NO: 14793
  Cyclic GFR-binding peptide
  MOD_RES (5), (5): Xaa is C or S

SEQ ID NO: 57516 - protein, 30 aa, Artificial Sequence
  Cyclic GFR-binding peptide
  MOD_RES (2), (2): Xaa is C or S
EXVPTEERPVQMRKIRIKPHQGQHKKATVF

SEQ ID NO: 57517 - protein, 33 aa, Artificial Sequence
  Cyclic GFR-binding peptide
  MOD_RES (31), (33): Xaa is C or S
GQRSVKMAKVRIKPHQGQHKEVQVLEEHSQXEX

SEQ ID NO: 57518 - protein, 25 aa, Artificial Sequence
  Cyclic GFR-binding peptide
EERPVQMRKIRIKPHQGQHKKATVF

SEQ ID NO: 57519 - protein, 29 aa, Artificial Sequence
  Cyclic GFR-binding peptide
TGQRPVQMRKIRIKPHQGQHKKATVLEEH

SEQ ID NO: 57520 - protein, 35 aa, Artificial Sequence; identical to SEQ ID NO: 14796
  Cyclic GFR-binding peptide
  MOD_RES (3), (3): Xaa is C or S

SEQ ID NO: 57521 - protein, 27 aa, Artificial Sequence
  Cyclic GFR-binding peptide
VPTGQSNITMQIMRIKPHQGQHIGEMS

SEQ ID NO: 57522 - protein, 28 aa, Artificial Sequence
  Cyclic GFR-binding peptide
LRSVKVAKVEIVRKKPIFKEVQVTLEDH

SEQ ID NO: 57523 - protein, 31 aa, Artificial Sequence
  Cyclic GFR-binding peptide
  MOD_RES (4), (4): Xaa is C or S
GLEXVPTGQSNITMQIMRIKPHQGQHIGEMS

SEQ ID NO: 57524 - protein, 38 aa, Artificial Sequence
  Cyclic GFR-binding peptide
  MOD_RES (7), (7): Xaa is C or S
NDEGLEXVPTGQRSVKMAKVRIKPHQGQHKEVQVLEEH

SEQ ID NO: 57525 - protein, 34 aa, Artificial Sequence
  Cyclic GFR-binding peptide
  MOD_RES (2), (2): Xaa is C or S
KXQPSRVHHSNITVQIMEYVRKKPKLIGEMSRLE

SEQ ID NO: 57526 - protein, 27 aa, Artificial Sequence
  Cyclic GFR-binding peptide
VQLRSVKVAKVEIVRKKPIFKEVQVTL

SEQ ID NO: 57527 - protein, 24 aa, Artificial Sequence
  Cyclic GFR-binding peptide
HSNITVQIMEYVRKKPKLIGEMSR

SEQ ID NO: 57528 - protein, 34 aa, Artificial Sequence
  Cyclic GFR-binding peptide
  MOD_RES (34), (34): Xaa is C or S
RVHHSNITVQIMEYVRKKPKLLGEMSRLEEHLEX

SEQ ID NO: 57529 - protein, 29 aa, Artificial Sequence
  Cyclic GFR-binding peptide
  MOD_RES (29), (29): Xaa is C or S
RSVKMAKVRIKPHQGQHKEVQVLEEHSQX

SEQ ID NO: 57530 - protein, 33 aa, Artificial Sequence
  Cyclic GFR-binding peptide
  MOD_RES (1), (1): Xaa is C or S
XRPTQVQLSNITVQIMEIVRKKPIFIGEMSTLE

SEQ ID NO: 57531 - protein, 33 aa, Artificial Sequence
  Cyclic GFR-binding peptide
  MOD_RES (32), (32): Xaa is C or S
QLRSVKVAKVEIVRKKPIFKEVQVTLEDHLAXK

SEQ ID NO: 57532 - protein, 26 aa, Artificial Sequence
  Cyclic GFR-binding peptide
LSNITVQIMEIVRKKPIFIGEMSTLE

SEQ ID NO: 57533 - protein, 40 aa, Artificial Sequence; identical to SEQ ID NO: 14802
  Cyclic GFR-binding peptide
  MOD_RES (37), (39): Xaa is C or S

SEQ ID NO: 57534 - protein, 37 aa, Artificial Sequence; identical to SEQ ID NO: 14803
  Cyclic GFR-binding peptide
  MOD_RES (36), (36): Xaa is C or S

SEQ ID NO: 57535 - protein, 33 aa, Artificial Sequence
  Cyclic GFR-binding peptide
  MOD_RES (4), (4): Xaa is C or S
GLEXVPTGQRSVKMAKVRIKPHQGQHKEVQVLE

SEQ ID NO: 57536 - protein, 38 aa, Artificial Sequence; identical to SEQ ID NO: 14804
  Cyclic GFR-binding peptide
  MOD_RES (2), (2): Xaa is C or S

SEQ ID NO: 57537 - protein, 31 aa, Artificial Sequence
  Cyclic GFR-binding peptide
  MOD_RES (29), (31): Xaa is C or S
RPVQMRKIRIKPHQGQHKKATVFLQHNKXEX

SEQ ID NO: 57538 - protein, 35 aa, Artificial Sequence; identical to SEQ ID NO: 14807
  Cyclic GFR-binding peptide
  MOD_RES (34), (34): Xaa is C or S

SEQ ID NO: 57539 - protein, 33 aa, Artificial Sequence; identical to SEQ ID NO: 14806
  Cyclic GFR-binding peptide
  MOD_RES (1), (1): Xaa is C or S

SEQ ID NO: 57540 - protein, 39 aa, Artificial Sequence; identical to SEQ ID NO: 14809
  Cyclic GFR-binding peptide
  MOD_RES (5), (5): Xaa is C or S

SEQ ID NO: 57541 - protein, 28 aa, Artificial Sequence
  Cyclic GFR-binding peptide
QSNITMQIMRIKPHQGQHIGEMSLEEHS

SEQ ID NO: 57542 - protein, 42 aa, Artificial Sequence; identical to SEQ ID NO: 14811
  Cyclic GFR-binding peptide
  MOD_RES (4), (41): Xaa is C or S

SEQ ID NO: 57543 - protein, 36 aa, Artificial Sequence
  Cyclic GFR-binding peptide
  MOD_RES (5), (5): Xaa is C or S
EGLEXVPTEERSVKMAKVRIKPHQGQHKEVQVFLQH

SEQ ID NO: 57544 - protein, 33 aa, Artificial Sequence
  Cyclic GFR-binding peptide
  MOD_RES (2), (2): Xaa is C or S
EXVPTGQSNITMQIMRIKPHQGQHIGEMSLEEH

SEQ ID NO: 57545 - protein, 33 aa, Artificial Sequence
  Cyclic GFR-binding peptide
  MOD_RES (2), (2): Xaa is C or S
EXVPTEESNITMQIMRIKPHQGQHLGEMSFLQH

SEQ ID NO: 57546 - protein, 32 aa, Artificial Sequence
  Cyclic GFR-binding peptide
PSRVHHSNITVQIMEYVRKKPKLIGEMSRLEE

SEQ ID NO: 57547 - protein, 38 aa, Artificial Sequence; identical to SEQ ID NO: 14812
  Cyclic GFR-binding peptide
  MOD_RES (5), (5): Xaa is C or S

SEQ ID NO: 57548 - protein, 32 aa, Artificial Sequence
  Cyclic GFR-binding peptide
  MOD_RES (2), (2): Xaa is C or S
EXVPTGQRPVQMRKIRIKPHQGQHKKATVLEE

SEQ ID NO: 57549 - protein, 30 aa, Artificial Sequence
  Cyclic GFR-binding peptide
QPSRVHHSNITVQIMEYVRKKPKLIGEMSR

SEQ ID NO: 57550 - protein, 27 aa, Artificial Sequence
  Cyclic GFR-binding peptide
RSVKMAKVRIKPHQGQHKEVQVFLQHN

SEQ ID NO: 57551 - protein, 26 aa, Artificial Sequence
  Cyclic GFR-binding peptide
PTGQSNITMQIMRIKPHQGQHIGEMS

SEQ ID NO: 57552 - protein, 29 aa, Artificial Sequence
  Cyclic GFR-binding peptide
TEERPVQMRKIRIKPHQGQHKKATVFLQH

SEQ ID NO: 57553 - protein, 29 aa, Artificial Sequence
  Cyclic GFR-binding peptide
PTGQSNITMQIMRIKPHQGQHIGEMSLEE

SEQ ID NO: 57554 - protein, 32 aa, Artificial Sequence
  Cyclic GFR-binding peptide
VHHSNITVQIMEYVRKKPKLLGEMSRLEEHLE

SEQ ID NO: 57555 - protein, 22 aa, Artificial Sequence
  Cyclic GFR-binding peptide
SNITVQIMEIVRKKPIFIGEMS

SEQ ID NO: 57556 - protein, 29 aa, Artificial Sequence
  Cyclic GFR-binding peptide
QPSRVHHSNITVQIMEYVRKKPKLIGEMS

SEQ ID NO: 57557 - protein, 28 aa, Artificial Sequence
  Cyclic GFR-binding peptide
VPTEERSVKMAKVRIKPHQGQHKEVQVF

SEQ ID NO: 57558 - protein, 29 aa, Artificial Sequence
  Cyclic GFR-binding peptide
  MOD_RES (1), (1): Xaa is C or S
XVPTGQSNITMQIMRIKPHQGQHIGEMSL

SEQ ID NO: 57559 - protein, 39 aa, Artificial Sequence; identical to SEQ ID NO: 14815
  Cyclic GFR-binding peptide
  MOD_RES (37), (39): Xaa is C or S

SEQ ID NO: 57560 - protein, 33 aa, Artificial Sequence
  Cyclic GFR-binding peptide
  MOD_RES (4), (4): Xaa is C or S
NVQXRPTQVQLSNITVQIMEIVRKKPIFIGEMS

SEQ ID NO: 57561 - protein, 29 aa, Artificial Sequence
  Cyclic GFR-binding peptide
TGQSNITMQIMRIKPHQGQHIGEMSLEEH

SEQ ID NO: 57562 - protein, 33 aa, Artificial Sequence
  Cyclic GFR-binding peptide
  MOD_RES (32), (32): Xaa is C or S
TGQRPVQMRKIRIKPHQGQHKKATVLEEHSQXE

SEQ ID NO: 57563 - protein, 28 aa, Artificial Sequence
  Cyclic GFR-binding peptide
PTEERSVKMAKVRIKPHQGQHKEVQVFL

SEQ ID NO: 57564 - protein, 24 aa, Artificial Sequence
  Cyclic GFR-binding peptide
RPVQMRKIRIKPHQGQHKKATVLE

SEQ ID NO: 57565 - protein, 24 aa, Artificial Sequence
  Cyclic GFR-binding peptide
GQRPVQMRKIRIKPHQGQHKKATV

SEQ ID NO: 57566 - protein, 28 aa, Artificial Sequence
  Cyclic GFR-binding peptide
GQSNITMQIMRIKPHQGQHIGEMSLEEH

SEQ ID NO: 57567 - protein, 38 aa, Artificial Sequence; identical to SEQ ID NO: 14818
  Cyclic GFR-binding peptide
  MOD_RES (1), (38): Xaa is C or S

SEQ ID NO: 57568 - protein, 39 aa, Artificial Sequence; identical to SEQ ID NO: 14821
  Cyclic GFR-binding peptide
  MOD_RES (3), (37), (39): Xaa is C or S

SEQ ID NO: 57569 - protein, 24 aa, Artificial Sequence
  Cyclic GFR-binding peptide
RSVKVAKVEIVRKKPIFKEVQVTL

SEQ ID NO: 57570 - protein, 30 aa, Artificial Sequence
  Cyclic GFR-binding peptide
PTQVQLSNITVQIMEIVRKKPIFIGEMSTL

SEQ ID NO: 57571 - protein, 34 aa, Artificial Sequence
  Cyclic GFR-binding peptide
  MOD_RES (4), (4): Xaa is C or S
GLEXVPTGQSNITMQIMRIKPHQGQHIGEMSLEE

SEQ ID NO: 57572 - protein, 28 aa, Artificial Sequence
  Cyclic GFR-binding peptide
TGQSNITMQIMRIKPHQGQHIGEMSLEE

SEQ ID NO: 57573 - protein, 36 aa, Artificial Sequence; identical to SEQ ID NO: 14824
  Cyclic GFR-binding peptide

SEQ ID NO: 57574 - protein, 32 aa, Artificial Sequence
  Cyclic GFR-binding peptide
PTEERPVQMRKIRIKPHQGQHKKATVFLQHNK

SEQ ID NO: 57575 - protein, 38 aa, Artificial Sequence
  Cyclic GFR-binding peptide
  MOD_RES (5), (5): Xaa is C or S
RNVQXRPTQVQLSNITVQIMEIVRKKPIFLGEMSTLED

SEQ ID NO: 57576 - protein, 30 aa, Artificial Sequence
  Cyclic GFR-binding peptide
  MOD_RES (3), (3): Xaa is C or S
LEXVPTEERSVKMAKVRIKPHQGQHKEVQV

SEQ ID NO: 57577 - protein, 35 aa, Artificial Sequence; identical to SEQ ID NO: 14826
  Cyclic GFR-binding peptide
  MOD_RES (35), (35): Xaa is C or S

SEQ ID NO: 57578 - protein, 29 aa, Artificial Sequence
  Cyclic GFR-binding peptide
VPTGQSNITMQIMRIKPHQGQHIGEMSLE

SEQ ID NO: 57579 - protein, 44 aa, Artificial Sequence; identical to SEQ ID NO: 14828
  Cyclic GFR-binding peptide
  MOD_RES (5), (42), (44): Xaa is C or S

SEQ ID NO: 57580 - protein, 30 aa, Artificial Sequence
  Cyclic GFR-binding peptide
HHRPVQVRKIEYVRKKPKLKKATVRLEEHL

SEQ ID NO: 57581 - protein, 37 aa, Artificial Sequence
  Cyclic GFR-binding peptide
  MOD_RES (6), (6): Xaa is C or S
DEGLEXVPTEESNITMQIMRIKPHQGQHLGEMSFLQH

SEQ ID NO: 57582 - protein, 37 aa, Artificial Sequence
  Cyclic GFR-binding peptide
  MOD_RES (5), (5): Xaa is C or S
RNVQXRPTQVQLSNITVQIMEIVRKKPIFLGEMSTLE

SEQ ID NO: 57583 - protein, 32 aa, Artificial Sequence
  Cyclic GFR-binding peptide
  MOD_RES (3), (3): Xaa is C or S
VQXRPTQVQLSNITVQIMEIVRKKPIFIGEMS

SEQ ID NO: 57584 - protein, 30 aa, Artificial Sequence
  Cyclic GFR-binding peptide
  MOD_RES (3), (3): Xaa is C or S
LEXVPTGQRSVKMAKVRIKPHQGQHKEVQV

SEQ ID NO: 57585 - protein, 42 aa, Artificial Sequence; identical to SEQ ID NO: 14831
  Cyclic GFR-binding peptide
  MOD_RES (7), (41): Xaa is C or S

SEQ ID NO: 57586 - protein, 36 aa, Artificial Sequence
  Cyclic GFR-binding peptide
  MOD_RES (6), (6): Xaa is C or S
DEGLEXVPTGQRPVQMRKIRIKPHQGQHKKATVLEE

SEQ ID NO: 57587 - protein, 28 aa, Artificial Sequence
  Cyclic GFR-binding peptide
  MOD_RES (1), (1): Xaa is C or S
XVPTEERSVKMAKVRIKPHQGQHKEVQV

SEQ ID NO: 57588 - protein, 29 aa, Artificial Sequence
  Cyclic GFR-binding peptide
RPTQVQLRSVKVAKVEIVRKKPIFKEVQV

SEQ ID NO: 57589 - protein, 34 aa, Artificial Sequence; identical to SEQ ID NO: 14832
  Cyclic GFR-binding peptide

SEQ ID NO: 57590 - protein, 36 aa, Artificial Sequence; identical to SEQ ID NO: 14833
  Cyclic GFR-binding peptide
  MOD_RES (2), (36): Xaa is C or S

SEQ ID NO: 57591 - protein, 35 aa, Artificial Sequence
  Cyclic GFR-binding peptide
  MOD_RES (32), (34): Xaa is C or S
HHSNITVQIMEYVRKKPKLLGEMSRLEEHLEXAXA

SEQ ID NO: 57592 - protein, 33 aa, Artificial Sequence
  Cyclic GFR-binding peptide
  MOD_RES (30), (32): Xaa is C or S
SNITVQIMEYVRKKPKLLGEMSRLEEHLEXAXA

SEQ ID NO: 57593 - protein, 31 aa, Artificial Sequence
  Cyclic GFR-binding peptide
  MOD_RES (29), (31): Xaa is C or S
RPVQMRKIRIKPHQGQHKKATVLEEHSQXEX

SEQ ID NO: 57594 - protein, 39 aa, Artificial Sequence; identical to SEQ ID NO: 14834
  Cyclic GFR-binding peptide
  MOD_RES (4), (38): Xaa is C or S

SEQ ID NO: 57595 - protein, 27 aa, Artificial Sequence
  Cyclic GFR-binding peptide
VPTEESNITMQIMRIKPHQGQHLGEMS

SEQ ID NO: 57596 - protein, 31 aa, Artificial Sequence
  Cyclic GFR-binding peptide
  MOD_RES (31), (31): Xaa is C or S
GQRSVKMAKVRIKPHQGQHKEVQVLEEHSQX

SEQ ID NO: 57597 - protein, 37 aa, Artificial Sequence
  Cyclic GFR-binding peptide
  MOD_RES (5), (5): Xaa is C or S
SSVKXQPSRVHHRPVQVRKIEYVRKKPKLKKATVRLE

SEQ ID NO: 57598 - protein, 26 aa, Artificial Sequence
  Cyclic GFR-binding peptide
HSNITVQIMEYVRKKPKLLGEMSRLE

SEQ ID NO: 57599 - protein, 36 aa, Artificial Sequence
  Cyclic GFR-binding peptide
  MOD_RES (33), (35): Xaa is C or S
PTEESNITMQIMRIKPHQGQHLGEMSFLQHNKXEXR

SEQ ID NO: 57600 - protein, 34 aa, Artificial Sequence
  Cyclic GFR-binding peptide
  MOD_RES (5), (5): Xaa is C or S
EGLEXVPTGQSNITMQIMRIKPHQGQHIGEMSLE

SEQ ID NO: 57601 - protein, 31 aa, Artificial Sequence
  Cyclic GFR-binding peptide
RSVKVAKVEIVRKKPIFKEVQVAAAAAAAAA

SEQ ID NO: 57602 - protein, 27 aa, Artificial Sequence
  Cyclic GFR-binding peptide
PTEERSVKMAKVRIKPHQGQHKEVQVF

SEQ ID NO: 57603 - protein, 33 aa, Artificial Sequence
  Cyclic GFR-binding peptide
  MOD_RES (6), (6): Xaa is C or S
DEGLEXVPTEERSVKMAKVRIKPHQGQHKEVQV

SEQ ID NO: 57604 - protein, 34 aa, Artificial Sequence
  Cyclic GFR-binding peptide
  MOD_RES (2), (2): Xaa is C or S
QXRPTQVQLSNITVQIMEIVRKKPIFIGEMSTLE

SEQ ID NO: 57605 - protein, 43 aa, Artificial Sequence; identical to SEQ ID NO: 14837
  Cyclic GFR-binding peptide
  MOD_RES (6), (40), (42): Xaa is C or S

SEQ ID NO: 57606 - protein, 40 aa, Artificial Sequence; identical to SEQ ID NO: 14838
  Cyclic GFR-binding peptide
  MOD_RES (3), (40): Xaa is C or S

SEQ ID NO: 57607 - protein, 33 aa, Artificial Sequence
  Cyclic GFR-binding peptide
  MOD_RES (4), (4): Xaa is C or S
GLEXVPTEESNITMQIMRIKPHQGQHLGEMSFL

SEQ ID NO: 57608 - protein, 28 aa, Artificial Sequence
  Cyclic GFR-binding peptide
EERPVQMRKIRIKPHQGQHKKATVFLQH

SEQ ID NO: 57609 - protein, 33 aa, Artificial Sequence; identical to SEQ ID NO: 14839
  Cyclic GFR-binding peptide

SEQ ID NO: 57610 - protein, 36 aa, Artificial Sequence; identical to SEQ ID NO: 14841
  Cyclic GFR-binding peptide
  MOD_RES (35), (35): Xaa is C or S

SEQ ID NO: 57611 - protein, 30 aa, Artificial Sequence
  Cyclic GFR-binding peptide
  MOD_RES (1), (1): Xaa is C or S
XRPTQVQLRSVKVAKVEIVRKKPIFKEVQV

SEQ ID NO: 57612 - protein, 30 aa, Artificial Sequence
  Cyclic GFR-binding peptide
  MOD_RES (2), (2): Xaa is C or S
EXVPTGQRSVKMAKVRIKPHQGQHKEVQVL

SEQ ID NO: 57613 - protein, 27 aa, Artificial Sequence
  Cyclic GFR-binding peptide
SRVHHSNITVQIMEYVRKKPKLLGEMS

SEQ ID NO: 57614 - protein, 40 aa, Artificial Sequence; identical to SEQ ID NO: 14843
  Cyclic GFR-binding peptide
  MOD_RES (4), (38), (40): Xaa is C or S

SEQ ID NO: 57615 - protein, 40 aa, Artificial Sequence; identical to SEQ ID NO: 14844
  Cyclic GFR-binding peptide
  MOD_RES (5), (39): Xaa is C or S

SEQ ID NO: 57616 - protein, 30 aa, Artificial Sequence
  Cyclic GFR-binding peptide
  MOD_RES (30), (30): Xaa is C or S
SNITVQIMEIVRKKPIFIGEMSTLEDHLAX

SEQ ID NO: 57617 - protein, 24 aa, Artificial Sequence
  Cyclic GFR-binding peptide
QLSNITVQIMEIVRKKPIFIGEMS

SEQ ID NO: 57618 - protein, 25 aa, Artificial Sequence
  Cyclic GFR-binding peptide
EERSVKMAKVRIKPHQGQHKEVQVF

SEQ ID NO: 57619 - protein, 35 aa, Artificial Sequence
  Cyclic GFR-binding peptide
  MOD_RES (6), (6): Xaa is C or S
DEGLEXVPTGQRSVKMAKVRIKPHQGQHKEVQVLE

SEQ ID NO: 57620 - protein, 27 aa, Artificial Sequence
  Cyclic GFR-binding peptide
PTGQSNITMQIMRIKPHQGQHIGEMSL

SEQ ID NO: 57621 - protein, 30 aa, Artificial Sequence
  Cyclic GFR-binding peptide
  MOD_RES (30), (30): Xaa is C or S
QSNITMQIMRIKPHQGQHIGEMSLEEHSQX

SEQ ID NO: 57622 - protein, 32 aa, Artificial Sequence
  Cyclic GFR-binding peptide
  MOD_RES (2), (2): Xaa is C or S
KXQPSRVHHRPVQVRKIEYVRKKPKLKKATVR

SEQ ID NO: 57623 - protein, 31 aa, Artificial Sequence
  Cyclic GFR-binding peptide
QLRSVKVAKVEIVRKKPIFKEVQVTLEDHLA

SEQ ID NO: 57624 - protein, 39 aa, Artificial Sequence; identical to SEQ ID NO: 14847
  Cyclic GFR-binding peptide
  MOD_RES (7), (7): Xaa is C or S

SEQ ID NO: 57625 - protein, 30 aa, Artificial Sequence
  Cyclic GFR-binding peptide
HHSNITVQIMEYVRKKPKLLGEMSRLEEHL

SEQ ID NO: 57626 - protein, 33 aa, Artificial Sequence
  Cyclic GFR-binding peptide
  MOD_RES (3), (3): Xaa is C or S
VKXQPSRVHHSNITVQIMEYVRKKPKLLGEMSR

SEQ ID NO: 57627 - protein, 41 aa, Artificial Sequence; identical to SEQ ID NO: 14848
  Cyclic GFR-binding peptide
  MOD_RES (5), (5): Xaa is C or S

SEQ ID NO: 57628 - protein, 37 aa, Artificial Sequence; identical to SEQ ID NO: 14849
  Cyclic GFR-binding peptide
  MOD_RES (2), (36): Xaa is C or S

SEQ ID NO: 57629 - protein, 29 aa, Artificial Sequence
  Cyclic GFR-binding peptide
VQLSNITVQIMEIVRKKPIFIGEMSTLED

SEQ ID NO: 57630 - protein, 39 aa, Artificial Sequence; identical to SEQ ID NO: 14851
  Cyclic GFR-binding peptide
  MOD_RES (7), (7): Xaa is C or S

SEQ ID NO: 57631 - protein, 34 aa, Artificial Sequence
  Cyclic GFR-binding peptide
  MOD_RES (31), (33): Xaa is C or S
EERSVKMAKVRIKPHQGQHKEVQVFLQHNKXEXR

SEQ ID NO: 57632 - protein, 39 aa, Artificial Sequence; identical to SEQ ID NO: 14852
  Cyclic GFR-binding peptide
  MOD_RES (37), (39): Xaa is C or S

SEQ ID NO: 57633 - protein, 31 aa, Artificial Sequence
  Cyclic GFR-binding peptide
  MOD_RES (3), (3): Xaa is C or S
LEXVPTGQSNITMQIMRIKPHQGQHIGEMSL

SEQ ID NO: 57634 - protein, 38 aa, Artificial Sequence; identical to SEQ ID NO: 14854
  Cyclic GFR-binding peptide
  MOD_RES (6), (6): Xaa is C or S

SEQ ID NO: 57635 - protein, 32 aa, Artificial Sequence
  Cyclic GFR-binding peptide
  MOD_RES (31), (31): Xaa is C or S
GQRPVQMRKIRIKPHQGQHKKATVLEEHSQXE

SEQ ID NO: 57636 - protein, 32 aa, Artificial Sequence
  Cyclic GFR-binding peptide
PTEESNITMQIMRIKPHQGQHLGEMSFLQHNK

SEQ ID NO: 57637 - protein, 33 aa, Artificial Sequence
  Cyclic GFR-binding peptide
  MOD_RES (30), (32): Xaa is C or S
RPVQVRKIEYVRKKPKLKKATVRLEEHLEXAXA

SEQ ID NO: 57638 - protein, 37 aa, Artificial Sequence; identical to SEQ ID NO: 14858
  Cyclic GFR-binding peptide
  MOD_RES (36), (36): Xaa is C or S

SEQ ID NO: 57639 - protein, 33 aa, Artificial Sequence
  Cyclic GFR-binding peptide
  MOD_RES (32), (32): Xaa is C or S
HHRPVQVRKIEYVRKKPKLKKATVRLEEHLEXA

SEQ ID NO: 57640 - protein, 27 aa, Artificial Sequence
  Cyclic GFR-binding peptide
SNITVQIMEIVRKKPIFLGEMSTLEDH

SEQ ID NO: 57641 - protein, 30 aa, Artificial Sequence
  Cyclic GFR-binding peptide
TEERSVKMAKVRIKPHQGQHKEVQVFLQHN

SEQ ID NO: 57642 - protein, 43 aa, Artificial Sequence; identical to SEQ ID NO: 14863
  Cyclic GFR-binding peptide
  MOD_RES (3), (40), (42): Xaa is C or S

SEQ ID NO: 57643 - protein, 34 aa, Artificial Sequence
  Cyclic GFR-binding peptide
  MOD_RES (33), (33): Xaa is C or S
VHHRPVQVRKIEYVRKKPKLKKATVRLEEHLEXA

SEQ ID NO: 57644 - protein, 37 aa, Artificial Sequence; identical to SEQ ID NO: 14864
  Cyclic GFR-binding peptide
  MOD_RES (36), (36): Xaa is C or S

SEQ ID NO: 57645 - protein, 30 aa, Artificial Sequence
  Cyclic GFR-binding peptide
TEERPVQMRKIRIKPHQGQHKKATVFLQHN

SEQ ID NO: 57646 - protein, 35 aa, Artificial Sequence
  Cyclic GFR-binding peptide
  MOD_RES (5), (5): Xaa is C or S
RNVQXRPTQVQLSNITVQIMEIVRKKPIFIGEMST

SEQ ID NO: 57647 - protein, 33 aa, Artificial Sequence
  Cyclic GFR-binding peptide
  MOD_RES (3), (3): Xaa is C or S
LEXVPTEERPVQMRKIRIKPHQGQHKKATVFLQ

SEQ ID NO: 57648 - protein, 25 aa, Artificial Sequence
  Cyclic GFR-binding peptide
VHHRPVQVRKIEYVRKKPKLKKATV

SEQ ID NO: 57649 - protein, 30 aa, Artificial Sequence
  Cyclic GFR-binding peptide
  MOD_RES (1), (1): Xaa is C or S
XQPSRVHHSNITVQIMEYVRKKPKLIGEMS

SEQ ID NO: 57650 - protein, 40 aa, Artificial Sequence; identical to SEQ ID NO: 14865
  Cyclic GFR-binding peptide
  MOD_RES (3), (40): Xaa is C or S

SEQ ID NO: 57651 - protein, 30 aa, Artificial Sequence
  Cyclic GFR-binding peptide
SRVHHSNITVQIMEYVRKKPKLIGEMSRLE

SEQ ID NO: 57652 - protein, 30 aa, Artificial Sequence
  Cyclic GFR-binding peptide
  MOD_RES (1), (1): Xaa is C or S
XVPTGQSNITMQIMRIKPHQGQHIGEMSLE

SEQ ID NO: 57653 - protein, 34 aa, Artificial Sequence
  Cyclic GFR-binding peptide
  MOD_RES (32), (34): Xaa is C or S
TEESNITMQIMRIKPHQGQHLGEMSFLQHNKXEX

SEQ ID NO: 57654 - protein, 35 aa, Artificial Sequence
  Cyclic GFR-binding peptide
  MOD_RES (32), (34): Xaa is C or S
HHRPVQVRKIEYVRKKPKLKKATVRLEEHLEXAXA

SEQ ID NO: 57655 - protein, 31 aa, Artificial Sequence
  Cyclic GFR-binding peptide
RSVKMAKVRIKPHQGQHKEVQVAAAAAAAAA

SEQ ID NO: 57656 - protein, 39 aa, Artificial Sequence; identical to SEQ ID NO: 14871
  Cyclic GFR-binding peptide
  MOD_RES (5), (5): Xaa is C or S

SEQ ID NO: 57657 - protein, 24 aa, Artificial Sequence
  Cyclic GFR-binding peptide
RPVQMRKIRIKPHQGQHKKATVFL

SEQ ID NO: 57658 - protein, 41 aa, Artificial Sequence; identical to SEQ ID NO: 14872
  Cyclic GFR-binding peptide
  MOD_RES (6), (40): Xaa is C or S

SEQ ID NO: 57659 - protein, 34 aa, Artificial Sequence
  Cyclic GFR-binding peptide
  MOD_RES (31), (33): Xaa is C or S
HSNITVQIMEYVRKKPKLIGEMSRLEEHLEXAXA

SEQ ID NO: 57660 - protein, 33 aa, Artificial Sequence
  Cyclic GFR-binding peptide
  MOD_RES (2), (2): Xaa is C or S
QXRPTQVQLRSVKVAKVEIVRKKPIFKEVQVTL

SEQ ID NO: 57661 - protein, 31 aa, Artificial Sequence
  Cyclic GFR-binding peptide
  MOD_RES (31), (31): Xaa is C or S
HRPVQVRKIEYVRKKPKLKKATVRLEEHLEX

SEQ ID NO: 57662 - protein, 38 aa, Artificial Sequence; identical to SEQ ID NO: 14873
  Cyclic GFR-binding peptide
  MOD_RES (6), (6): Xaa is C or S

SEQ ID NO: 57663 - protein, 26 aa, Artificial Sequence
  Cyclic GFR-binding peptide
RSVKMAKVRIKPHQGQHKEVQVFLQH

SEQ ID NO: 57664 - protein, 33 aa, Artificial Sequence
  Cyclic GFR-binding peptide
  MOD_RES (2), (2): Xaa is C or S
EXVPTEERPVQMRKIRIKPHQGQHKKATVFLQH

SEQ ID NO: 57665 - protein, 35 aa, Artificial Sequence; identical to SEQ ID NO: 14876
  Cyclic GFR-binding peptide
  MOD_RES (3), (3): Xaa is C or S

SEQ ID NO: 57666 - protein, 30 aa, Artificial Sequence
  Cyclic GFR-binding peptide
EERSVKMAKVRIKPHQGQHKEVQVFLQHNK

SEQ ID NO: 57667 - protein, 39 aa, Artificial Sequence; identical to SEQ ID NO: 14877
  Cyclic GFR-binding peptide
  MOD_RES (5), (39): Xaa is C or S

SEQ ID NO: 57668 - protein, 41 aa, Artificial Sequence; identical to SEQ ID NO: 14878
  Cyclic GFR-binding peptide
  MOD_RES (5), (39), (41): Xaa is C or S

SEQ ID NO: 57669 - protein, 37 aa, Artificial Sequence; identical to SEQ ID NO: 14879
  Cyclic GFR-binding peptide
  MOD_RES (1), (1): Xaa is C or S

SEQ ID NO: 57670 - protein, 29 aa, Artificial Sequence
  Cyclic GFR-binding peptide
LSNITVQIMEIVRKKPIFIGEMSTLEDHL

SEQ ID NO: 57671 - protein, 42 aa, Artificial Sequence; identical to SEQ ID NO: 14880
  Cyclic GFR-binding peptide
  MOD_RES (6), (40), (42): Xaa is C or S

SEQ ID NO: 57672 - protein, 38 aa, Artificial Sequence; identical to SEQ ID NO: 14881
  Cyclic GFR-binding peptide
  MOD_RES (4), (4): Xaa is C or S

SEQ ID NO: 57673 - protein, 23 aa, Artificial Sequence
  Cyclic GFR-binding peptide
QSNITMQIMRIKPHQGQHIGEMS

SEQ ID NO: 57674 - protein, 33 aa, Artificial Sequence
  Cyclic GFR-binding peptide
  MOD_RES (3), (3): Xaa is C or S
VQXRPTQVQLSNITVQIMEIVRKKPIFLGEMST

SEQ ID NO: 57675 - protein, 38 aa, Artificial Sequence; identical to SEQ ID NO: 14882
  Cyclic GFR-binding peptide
  MOD_RES (36), (38): Xaa is C or S

SEQ ID NO: 57676 - protein, 41 aa, Artificial Sequence; identical to SEQ ID NO: 14883
  Cyclic GFR-binding peptide
  MOD_RES (3), (40): Xaa is C or S

SEQ ID NO: 57677 - protein, 35 aa, Artificial Sequence
  Cyclic GFR-binding peptide
  MOD_RES (4), (4): Xaa is C or S
GLEXVPTEERPVQMRKIRIKPHQGQHKKATVFLQH

SEQ ID NO: 57678 - protein, 40 aa, Artificial Sequence; identical to SEQ ID NO: 14884
  Cyclic GFR-binding peptide
  MOD_RES (37), (39): Xaa is C or S

SEQ ID NO: 57679 - protein, 31 aa, Artificial Sequence
  Cyclic GFR-binding peptide
HHSNITVQIMEYVRKKPKLIGEMSRLEEHLE

SEQ ID NO: 57680 - protein, 30 aa, Artificial Sequence
  Cyclic GFR-binding peptide
LSNITVQIMEIVRKKPIFIGEMSTLEDHLA

SEQ ID NO: 57681 - protein, 37 aa, Artificial Sequence; identical to SEQ ID NO: 14885
  Cyclic GFR-binding peptide
  MOD_RES (37), (37): Xaa is C or S

SEQ ID NO: 57682 - protein, 40 aa, Artificial Sequence; identical to SEQ ID NO: 14886
  Cyclic GFR-binding peptide
  MOD_RES (6), (40): Xaa is C or S

SEQ ID NO: 57683 - protein, 33 aa, Artificial Sequence
  Cyclic GFR-binding peptide
  MOD_RES (31), (33): Xaa is C or S
LSNITVQIMEIVRKKPIFIGEMSTLEDHLAXKX

SEQ ID NO: 57684 - protein, 27 aa, Artificial Sequence
  Cyclic GFR-binding peptide
TGQSNITMQIMRIKPHQGQHIGEMSLE

SEQ ID NO: 57685 - protein, 38 aa, Artificial Sequence; identical to SEQ ID NO: 14888
  Cyclic GFR-binding peptide
  MOD_RES (2), (36), (38): Xaa is C or S

SEQ ID NO: 57686 - protein, 36 aa, Artificial Sequence
  Cyclic GFR-binding peptide
  MOD_RES (33), (35): Xaa is C or S
VHHSNITVQIMEYVRKKPKLIGEMSRLEEHLEXAXA

SEQ ID NO: 57687 - protein, 41 aa, Artificial Sequence; identical to SEQ ID NO: 14890
  Cyclic GFR-binding peptide
  MOD_RES (4), (38), (40): Xaa is C or S

SEQ ID NO: 57688 - protein, 30 aa, Artificial Sequence
  Cyclic GFR-binding peptide
PTEESNITMQIMRIKPHQGQHLGEMSFLQH

SEQ ID NO: 57689 - protein, 42 aa, Artificial Sequence; identical to SEQ ID NO: 14891
  Cyclic GFR-binding peptide
  MOD_RES (3), (40), (42): Xaa is C or S

SEQ ID NO: 57690 - protein, 37 aa, Artificial Sequence
  Cyclic GFR-binding peptide
  MOD_RES (4), (4): Xaa is C or S
NVQXRPTQVQLSNITVQIMEIVRKKPIFIGEMSTLED

SEQ ID NO: 57691 - protein, 37 aa, Artificial Sequence; identical to SEQ ID NO: 14894
  Cyclic GFR-binding peptide
  MOD_RES (1), (35), (37): Xaa is C or S

SEQ ID NO: 57692 - protein, 26 aa, Artificial Sequence
  Cyclic GFR-binding peptide
RPVQMRKIRIKPHQGQHKKATVFLQH

SEQ ID NO: 57693 - protein, 39 aa, Artificial Sequence; identical to SEQ ID NO: 14895
  Cyclic GFR-binding peptide
  MOD_RES (4), (4): Xaa is C or S

SEQ ID NO: 57694 - protein, 30 aa, Artificial Sequence
  Cyclic GFR-binding peptide
VPTGQRSVKMAKVRIKPHQGQHKEVQVLEE

SEQ ID NO: 57695 - protein, 42 aa, Artificial Sequence; identical to SEQ ID NO: 14897
  Cyclic GFR-binding peptide
  MOD_RES (2), (39), (41): Xaa is C or S

SEQ ID NO: 57696 - protein, 29 aa, Artificial Sequence
  Cyclic GFR-binding peptide
  MOD_RES (2), (2): Xaa is C or S
EXVPTEERPVQMRKIRIKPHQGQHKKATV

SEQ ID NO: 57697 - protein, 23 aa, Artificial Sequence
  Cyclic GFR-binding peptide
HSNITVQIMEYVRKKPKLIGEMS

SEQ ID NO: 57698 - protein, 23 aa, Artificial Sequence
  Cyclic GFR-binding peptide
SNITVQIMEIVRKKPIFLGEMST

SEQ ID NO: 57699 - protein, 42 aa, Artificial Sequence; identical to SEQ ID NO: 14900
  Cyclic GFR-binding peptide
  MOD_RES (7), (41): Xaa is C or S

SEQ ID NO: 57700 - protein, 31 aa, Artificial Sequence
  Cyclic GFR-binding peptide
  MOD_RES (2), (2): Xaa is C or S
EXVPTGQSNITMQIMRIKPHQGQHIGEMSLE

SEQ ID NO: 57701 - protein, 31 aa, Artificial Sequence
  Cyclic GFR-binding peptide
RPVQMRKIRIKPHQGQHKKATVAAAAAAAAA

SEQ ID NO: 57702 - protein, 37 aa, Artificial Sequence; identical to SEQ ID NO: 14901
  Cyclic GFR-binding peptide
  MOD_RES (37), (37): Xaa is C or S

SEQ ID NO: 57703 - protein, 34 aa, Artificial Sequence
  Cyclic GFR-binding peptide
  MOD_RES (4), (4): Xaa is C or S
NVQXRPTQVQLRSVKVAKVEIVRKKPIFKEVQVT

SEQ ID NO: 57704 - protein, 26 aa, Artificial Sequence
  Cyclic GFR-binding peptide
ERSVKMAKVRIKPHQGQHKEVQVFLQ

SEQ ID NO: 57705 - protein, 38 aa, Artificial Sequence; identical to SEQ ID NO: 14903
  Cyclic GFR-binding peptide
  MOD_RES (36), (38): Xaa is C or S

SEQ ID NO: 57706 - protein, 31 aa, Artificial Sequence
  Cyclic GFR-binding peptide
  MOD_RES (4), (4): Xaa is C or S
GLEXVPTEERSVKMAKVRIKPHQGQHKEVQV

SEQ ID NO: 57707 - protein, 38 aa, Artificial Sequence; identical to SEQ ID NO: 14904
  Cyclic GFR-binding peptide
  MOD_RES (6), (6): Xaa is C or S

SEQ ID NO: 57708 - protein, 40 aa, Artificial Sequence; identical to SEQ ID NO: 14906
  Cyclic GFR-binding peptide
  MOD_RES (6), (40): Xaa is C or S

SEQ ID NO: 57709 - protein, 25 aa, Artificial Sequence
  Cyclic GFR-binding peptide
SNITVQIMEIVRKKPIFLGEMSTLE

SEQ ID NO: 57710 - protein, 29 aa, Artificial Sequence
  Cyclic GFR-binding peptide
VQLSNITVQIMEIVRKKPIFLGEMSTLED

SEQ ID NO: 57711 - protein, 39 aa, Artificial Sequence; identical to SEQ ID NO: 14909
  Cyclic GFR-binding peptide
  MOD_RES (36), (38): Xaa is C or S

SEQ ID NO: 57712 - protein, 39 aa, Artificial Sequence; identical to SEQ ID NO: 14910
  Cyclic GFR-binding peptide
  MOD_RES (1), (38): Xaa is C or S

SEQ ID NO: 57713 - protein, 35 aa, Artificial Sequence
  Cyclic GFR-binding peptide
  MOD_RES (6), (6): Xaa is C or S
DEGLEXVPTEERSVKMAKVRIKPHQGQHKEVQVFL

SEQ ID NO: 57714 - protein, 37 aa, Artificial Sequence; identical to SEQ ID NO: 14911
  Cyclic GFR-binding peptide
  MOD_RES (3), (37): Xaa is C or S

SEQ ID NO: 57715 - protein, 43 aa, Artificial Sequence; identical to SEQ ID NO: 14912
  Cyclic GFR-binding peptide
  MOD_RES (3), (40), (42): Xaa is C or S

SEQ ID NO: 57716 - protein, 24 aa, Artificial Sequence
  Cyclic GFR-binding peptide
QSNITMQIMRIKPHQGQHIGEMSL

SEQ ID NO: 57717 - protein, 39 aa, Artificial Sequence; identical to SEQ ID NO: 14916
  Cyclic GFR-binding peptide
  MOD_RES (5), (39): Xaa is C or S

SEQ ID NO: 57718 - protein, 32 aa, Artificial Sequence
  Cyclic GFR-binding peptide
  MOD_RES (31), (31): Xaa is C or S
LSNITVQIMEIVRKKPIFIGEMSTLEDHLAXK

SEQ ID NO: 57719 - protein, 32 aa, Artificial Sequence
  Cyclic GFR-binding peptide
  MOD_RES (4), (4): Xaa is C or S
GLEXVPTEESNITMQIMRIKPHQGQHLGEMSF

SEQ ID NO: 57720 - protein, 33 aa, Artificial Sequence
  Cyclic GFR-binding peptide
  MOD_RES (3), (3): Xaa is C or S
LEXVPTEESNITMQIMRIKPHQGQHLGEMSFLQ

SEQ ID NO: 57721 - protein, 35 aa, Artificial Sequence
  Cyclic GFR-binding peptide
  MOD_RES (6), (6): Xaa is C or S
DEGLEXVPTGQRPVQMRKIRIKPHQGQHKKATVLE

SEQ ID NO: 57722 - protein, 39 aa, Artificial Sequence; identical to SEQ ID NO: 14917
  Cyclic GFR-binding peptide
  MOD_RES (4), (4): Xaa is C or S

SEQ ID NO: 57723 - protein, 29 aa, Artificial Sequence
  Cyclic GFR-binding peptide
SNITVQIMEIVRKKPIFIGEMSTLEDHLA

SEQ ID NO: 57724 - protein, 27 aa, Artificial Sequence
  Cyclic GFR-binding peptide
LRSVKVAKVEIVRKKPIFKEVQVTLED

SEQ ID NO: 57725 - protein, 38 aa, Artificial Sequence; identical to SEQ ID NO: 14920
  Cyclic GFR-binding peptide
  MOD_RES (2), (36), (38): Xaa is C or S

SEQ ID NO: 57726 - protein, 38 aa, Artificial Sequence; identical to SEQ ID NO: 14921
  Cyclic GFR-binding peptide
  MOD_RES (37), (37): Xaa is C or S

SEQ ID NO: 57727 - protein, 28 aa, Artificial Sequence
  Cyclic GFR-binding peptide
EESNITMQIMRIKPHQGQHLGEMSFLQH

SEQ ID NO: 57728 - protein, 31 aa, Artificial Sequence
  Cyclic GFR-binding peptide
SNITVQIMEYVRKKPKLLGEMSAAAAAAAAA

SEQ ID NO: 57729 - protein, 35 aa, Artificial Sequence
  Cyclic GFR-binding peptide
  MOD_RES (4), (4): Xaa is C or S
GLEXVPTGQSNITMQIMRIKPHQGQHIGEMSLEEH

SEQ ID NO: 57730 - protein, 37 aa, Artificial Sequence
  Cyclic GFR-binding peptide
  MOD_RES (5), (5): Xaa is C or S
RNVQXRPTQVQLSNITVQIMEIVRKKPIFIGEMSTLE

SEQ ID NO: 57731 - protein, 39 aa, Artificial Sequence; identical to SEQ ID NO: 14922
  Cyclic GFR-binding peptide
  MOD_RES (4), (38): Xaa is C or S

SEQ ID NO: 57732 - protein, 23 aa, Artificial Sequence
  Cyclic GFR-binding peptide
SNITMQIMRIKPHQGQHIGEMSL

SEQ ID NO: 57733 - protein, 36 aa, Artificial Sequence
  Cyclic GFR-binding peptide
  MOD_RES (5), (5): Xaa is C or S
EGLEXVPTEESNITMQIMRIKPHQGQHLGEMSFLQH

SEQ ID NO: 57734 - protein, 25 aa, Artificial Sequence
  Cyclic GFR-binding peptide
GQRSVKMAKVRIKPHQGQHKEVQVL

SEQ ID NO: 57735 - protein, 31 aa, Artificial Sequence
  Cyclic GFR-binding peptide
TQVQLSNITVQIMEIVRKKPIFLGEMSTLED

SEQ ID NO: 57736 - protein, 38 aa, Artificial Sequence; identical to SEQ ID NO: 14923
  Cyclic GFR-binding peptide
  MOD_RES (35), (37): Xaa is C or S

SEQ ID NO: 57737 - protein, 35 aa, Artificial Sequence
  Cyclic GFR-binding peptide
  MOD_RES (4), (4): Xaa is C or S
GLEXVPTEERSVKMAKVRIKPHQGQHKEVQVFLQH

SEQ ID NO: 57738 - protein, 40 aa, Artificial Sequence; identical to SEQ ID NO: 14924
  Cyclic GFR-binding peptide
  MOD_RES (3), (40): Xaa is C or S

SEQ ID NO: 57739 - protein, 29 aa, Artificial Sequence
  Cyclic GFR-binding peptide
QLSNITVQIMEIVRKKPIFIGEMSTLEDH

SEQ ID NO: 57740 - protein, 27 aa, Artificial Sequence
  Cyclic GFR-binding peptide
EESNITMQIMRIKPHQGQHLGEMSFLQ

SEQ ID NO: 57741 - protein, 36 aa, Artificial Sequence
  Cyclic GFR-binding peptide
  MOD_RES (33), (35): Xaa is C or S
VHHSNITVQIMEYVRKKPKLLGEMSRLEEHLEXAXA

SEQ ID NO: 57742 - protein, 25 aa, Artificial Sequence
  Cyclic GFR-binding peptide
LSNITVQIMEIVRKKPIFLGEMSTL

SEQ ID NO: 57743 - protein, 37 aa, Artificial Sequence; identical to SEQ ID NO: 14925
  Cyclic GFR-binding peptide
  MOD_RES (1), (35), (37): Xaa is C or S

SEQ ID NO: 57744 - protein, 23 aa, Artificial Sequence
  Cyclic GFR-binding peptide
QRSVKMAKVRIKPHQGQHKEVQV

SEQ ID NO: 57745 - protein, 31 aa, Artificial Sequence
  Cyclic GFR-binding peptide
  MOD_RES (1), (1): Xaa is C or S
XVPTGQSNITMQIMRIKPHQGQHIGEMSLEE

SEQ ID NO: 57746 - protein, 39 aa, Artificial Sequence; identical to SEQ ID NO: 14926
  Cyclic GFR-binding peptide
  MOD_RES (6), (6): Xaa is C or S

SEQ ID NO: 57747 - protein, 25 aa, Artificial Sequence
  Cyclic GFR-binding peptide
SNITVQIMEYVRKKPKLIGEMSRLE

SEQ ID NO: 57748 - protein, 41 aa, Artificial Sequence; identical to SEQ ID NO: 14928
  Cyclic GFR-binding peptide
  MOD_RES (3), (40): Xaa is C or S

SEQ ID NO: 57749 - protein, 29 aa, Artificial Sequence
  Cyclic GFR-binding peptide
  MOD_RES (29), (29): Xaa is C or S
SNITMQIMRIKPHQGQHLGEMSFLQHNKX

SEQ ID NO: 57750 - protein, 26 aa, Artificial Sequence
  Cyclic GFR-binding peptide
QLSNITVQIMEIVRKKPIFLGEMSTL

SEQ ID NO: 57751 - protein, 32 aa, Artificial Sequence
  Cyclic GFR-binding peptide
  MOD_RES (32), (32): Xaa is C or S
QLRSVKVAKVEIVRKKPIFKEVQVTLEDHLAX

SEQ ID NO: 57752 - protein, 39 aa, Artificial Sequence; identical to SEQ ID NO: 14931
  Cyclic GFR-binding peptide
  MOD_RES (37), (39): Xaa is C or S

SEQ ID NO: 57753 - protein, 33 aa, Artificial Sequence
  Cyclic GFR-binding peptide
  MOD_RES (2), (2): Xaa is C or S
KXQPSRVHHSNITVQIMEYVRKKPKLIGEMSRL

SEQ ID NO: 57754 - protein, 43 aa, Artificial Sequence; identical to SEQ ID NO: 14932
  Cyclic GFR-binding peptide
  MOD_RES (4), (41), (43): Xaa is C or S

SEQ ID NO: 57755 - protein, 33 aa, Artificial Sequence; identical to SEQ ID NO: 14933
  Cyclic GFR-binding peptide

SEQ ID NO: 57756 - protein, 44 aa, Artificial Sequence; identical to SEQ ID NO: 14935
  Cyclic GFR-binding peptide
  MOD_RES (5), (42), (44): Xaa is C or S

SEQ ID NO: 57757 - protein, 44 aa, Artificial Sequence; identical to SEQ ID NO: 14936
  Cyclic GFR-binding peptide
  MOD_RES (5), (42), (44): Xaa is C or S

SEQ ID NO: 57758 - protein, 38 aa, Artificial Sequence; identical to SEQ ID NO: 14937
  Cyclic GFR-binding peptide
  MOD_RES (35), (37): Xaa is C or S

SEQ ID NO: 57759 - protein, 33 aa, Artificial Sequence; identical to SEQ ID NO: 14941
  Cyclic GFR-binding peptide

SEQ ID NO: 57760 - protein, 35 aa, Artificial Sequence; identical to SEQ ID NO: 14942
  Cyclic GFR-binding peptide
  MOD_RES (1), (35): Xaa is C or S

SEQ ID NO: 57761 - protein, 34 aa, Artificial Sequence
  Cyclic GFR-binding peptide
  MOD_RES (32), (34): Xaa is C or S
QLRSVKVAKVEIVRKKPIFKEVQVTLEDHLAXKX

SEQ ID NO: 57762 - protein, 33 aa, Artificial Sequence
  Cyclic GFR-binding peptide
  MOD_RES (32), (32): Xaa is C or S
QLSNITVQIMEIVRKKPIFLGEMSTLEDHLAXK

SEQ ID NO: 57763 - protein, 39 aa, Artificial Sequence; identical to SEQ ID NO: 14944
  Cyclic GFR-binding peptide
  MOD_RES (36), (38): Xaa is C or S

SEQ ID NO: 57764 - protein, 31 aa, Artificial Sequence
  Cyclic GFR-binding peptide
RVHHSNITVQIMEYVRKKPKLLGEMSRLEEH

SEQ ID NO: 57765 - protein, 37 aa, Artificial Sequence; identical to SEQ ID NO: 14946
  Cyclic GFR-binding peptide
  MOD_RES (2), (36): Xaa is C or S

SEQ ID NO: 57766 - protein, 27 aa, Artificial Sequence
  Cyclic GFR-binding peptide
QRPVQMRKIRIKPHQGQHKKATVLEEH

SEQ ID NO: 57767 - protein, 30 aa, Artificial Sequence
  Cyclic GFR-binding peptide
HHSNITVQIMEYVRKKPKLIGEMSRLEEHL

SEQ ID NO: 57768 - protein, 34 aa, Artificial Sequence; identical to SEQ ID NO: 14949
  Cyclic GFR-binding peptide
  MOD_RES (1), (1): Xaa is C or S

SEQ ID NO: 57769 - protein, 32 aa, Artificial Sequence
  Cyclic GFR-binding peptide
  MOD_RES (1), (1): Xaa is C or S
XRPTQVQLSNITVQIMEIVRKKPIFIGEMSTL

SEQ ID NO: 57770 - protein, 37 aa, Artificial Sequence; identical to SEQ ID NO: 14952
  Cyclic GFR-binding peptide
  MOD_RES (5), (5): Xaa is C or S

SEQ ID NO: 57771 - protein, 33 aa, Artificial Sequence
  Cyclic GFR-binding peptide
  MOD_RES (1), (1): Xaa is C or S
XRPTQVQLSNITVQIMEIVRKKPIFLGEMSTLE

SEQ ID NO: 57772 - protein, 32 aa, Artificial Sequence
  Cyclic GFR-binding peptide
  MOD_RES (32), (32): Xaa is C or S
TGQRPVQMRKIRIKPHQGQHKKATVLEEHSQX

SEQ ID NO: 57773 - protein, 38 aa, Artificial Sequence; identical to SEQ ID NO: 14954
  Cyclic GFR-binding peptide
  MOD_RES (35), (37): Xaa is C or S

SEQ ID NO: 57774 - protein, 30 aa, Artificial Sequence
  Cyclic GFR-binding peptide
  MOD_RES (3), (3): Xaa is C or S
LEXVPTGQSNITMQIMRIKPHQGQHIGEMS

SEQ ID NO: 57775 - protein, 29 aa, Artificial Sequence
  Cyclic GFR-binding peptide
ESNITMQIMRIKPHQGQHLGEMSFLQHNK

SEQ ID NO: 57776 - protein, 32 aa, Artificial Sequence; identical to SEQ ID NO: 1122
  Cyclic GFR-binding peptide

SEQ ID NO: 57777 - protein, 38 aa, Artificial Sequence; identical to SEQ ID NO: 14957
  Cyclic GFR-binding peptide
  MOD_RES (2), (36), (38): Xaa is C or S

SEQ ID NO: 57778 - protein, 35 aa, Artificial Sequence
  Cyclic GFR-binding peptide
  MOD_RES (32), (34): Xaa is C or S
TGQSNITMQIMRIKPHQGQHIGEMSLEEHSQXEXR

SEQ ID NO: 57779 - protein, 39 aa, Artificial Sequence; identical to SEQ ID NO: 14958
  Cyclic GFR-binding peptide
  MOD_RES (3), (3): Xaa is C or S

SEQ ID NO: 57780 - protein, 27 aa, Artificial Sequence
  Cyclic GFR-binding peptide
TEERPVQMRKIRIKPHQGQHKKATVFL

SEQ ID NO: 57781 - protein, 36 aa, Artificial Sequence; identical to SEQ ID NO: 14960
  Cyclic GFR-binding peptide
  MOD_RES (4), (4): Xaa is C or S

SEQ ID NO: 57782 - protein, 33 aa, Artificial Sequence
  Cyclic GFR-binding peptide
  MOD_RES (4), (4): Xaa is C or S
GLEXVPTGQRPVQMRKIRIKPHQGQHKKATVLE

SEQ ID NO: 57783 - protein, 25 aa, Artificial Sequence
  Cyclic GFR-binding peptide
QLSNITVQIMEIVRKKPIFIGEMST

SEQ ID NO: 57784 - protein, 28 aa, Artificial Sequence
  Cyclic GFR-binding peptide
VPTGQRPVQMRKIRIKPHQGQHKKATVL

SEQ ID NO: 57785 - protein, 31 aa, Artificial Sequence
  Cyclic GFR-binding peptide
SRVHHRPVQVRKIEYVRKKPKLKKATVRLEE

SEQ ID NO: 57786 - protein, 37 aa, Artificial Sequence; identical to SEQ ID NO: 14962
  Cyclic GFR-binding peptide
  MOD_RES (1), (35), (37): Xaa is C or S

SEQ ID NO: 57787 - protein, 39 aa, Artificial Sequence; identical to SEQ ID NO: 14964
  Cyclic GFR-binding peptide
  MOD_RES (7), (7): Xaa is C or S

SEQ ID NO: 57788 - protein, 36 aa, Artificial Sequence; identical to SEQ ID NO: 14965
  Cyclic GFR-binding peptide
  MOD_RES (1), (35): Xaa is C or S

SEQ ID NO: 57789 - protein, 35 aa, Artificial Sequence
  Cyclic GFR-binding peptide
  MOD_RES (7), (7): Xaa is C or S
NDEGLEXVPTGQRSVKMAKVRIKPHQGQHKEVQVL

SEQ ID NO: 57790 - protein, 41 aa, Artificial Sequence; identical to SEQ ID NO: 14966
  Cyclic GFR-binding peptide
  MOD_RES (7), (41): Xaa is C or S

SEQ ID NO: 57791 - protein, 28 aa, Artificial Sequence
  Cyclic GFR-binding peptide
SNITVQIMEIVRKKPIFLGEMSTLEDHL

SEQ ID NO: 57792 - protein, 36 aa, Artificial Sequence; identical to SEQ ID NO: 14967
  Cyclic GFR-binding peptide
  MOD_RES (4), (4): Xaa is C or S

SEQ ID NO: 57793 - protein, 33 aa, Artificial Sequence
  Cyclic GFR-binding peptide
  MOD_RES (4), (4): Xaa is C or S
SVKXQPSRVHHSNITVQIMEYVRKKPKLLGEMS

SEQ ID NO: 57794 - protein, 29 aa, Artificial Sequence
  Cyclic GFR-binding peptide
QLSNITVQIMEIVRKKPIFLGEMSTLEDH

SEQ ID NO: 57795 - protein, 35 aa, Artificial Sequence
  Cyclic GFR-binding peptide
  MOD_RES (33), (35): Xaa is C or S
VQLSNITVQIMEIVRKKPIFIGEMSTLEDHLAXKX

SEQ ID NO: 57796 - protein, 31 aa, Artificial Sequence
  Cyclic GFR-binding peptide
QLSNITVQIMEIVRKKPIFIGEMSTLEDHLA

SEQ ID NO: 57797 - protein, 35 aa, Artificial Sequence
  Cyclic GFR-binding peptide
  MOD_RES (32), (34): Xaa is C or S
QLSNITVQIMEIVRKKPIFLGEMSTLEDHLAXKXE

SEQ ID NO: 57798 - protein, 43 aa, Artificial Sequence; identical to SEQ ID NO: 14974
  Cyclic GFR-binding peptide
  MOD_RES (5), (42): Xaa is C or S

SEQ ID NO: 57799 - protein, 30 aa, Artificial Sequence
  Cyclic GFR-binding peptide
TQVQLSNITVQIMEIVRKKPIFLGEMSTLE

SEQ ID NO: 57800 - protein, 35 aa, Artificial Sequence
  Cyclic GFR-binding peptide
  MOD_RES (33), (35): Xaa is C or S
VQLSNITVQIMEIVRKKPIFLGEMSTLEDHLAXKX

SEQ ID NO: 57801 - protein, 32 aa, Artificial Sequence
  Cyclic GFR-binding peptide
  MOD_RES (29), (31): Xaa is C or S
SNITMQIMRIKPHQGQHIGEMSLEEHSQXEXR

SEQ ID NO: 57802 - protein, 37 aa, Artificial Sequence; identical to SEQ ID NO: 14975
  Cyclic GFR-binding peptide
  MOD_RES (4), (4): Xaa is C or S

SEQ ID NO: 57803 - protein, 37 aa, Artificial Sequence; identical to SEQ ID NO: 14976
  Cyclic GFR-binding peptide
  MOD_RES (1), (35), (37): Xaa is C or S

SEQ ID NO: 57804 - protein, 33 aa, Artificial Sequence
  Cyclic GFR-binding peptide
  MOD_RES (33), (33): Xaa is C or S
PTGQSNITMQIMRIKPHQGQHIGEMSLEEHSQX

SEQ ID NO: 57805 - protein, 25 aa, Artificial Sequence
  Cyclic GFR-binding peptide
QRPVQMRKIRIKPHQGQHKKATVLE

SEQ ID NO: 57806 - protein, 38 aa, Artificial Sequence; identical to SEQ ID NO: 14977
  Cyclic GFR-binding peptide
  MOD_RES (37), (37): Xaa is C or S

SEQ ID NO: 57807 - protein, 41 aa, Artificial Sequence; identical to SEQ ID NO: 14978
  Cyclic GFR-binding peptide
  MOD_RES (1), (38), (40): Xaa is C or S

SEQ ID NO: 57808 - protein, 39 aa, Artificial Sequence; identical to SEQ ID NO: 14979
  Cyclic GFR-binding peptide
  MOD_RES (36), (38): Xaa is C or S

SEQ ID NO: 57809 - protein, 37 aa, Artificial Sequence; identical to SEQ ID NO: 14980
  Cyclic GFR-binding peptide
  MOD_RES (34), (36): Xaa is C or S

SEQ ID NO: 57810 - protein, 28 aa, Artificial Sequence
  Cyclic GFR-binding peptide
PTQVQLRSVKVAKVEIVRKKPIFKEVQV

SEQ ID NO: 57811 - protein, 33 aa, Artificial Sequence
  Cyclic GFR-binding peptide
  MOD_RES (1), (1): Xaa is C or S
XQPSRVHHSNITVQIMEYVRKKPKLIGEMSRLE

SEQ ID NO: 57812 - protein, 44 aa, Artificial Sequence; identical to SEQ ID NO: 14982
  Cyclic GFR-binding peptide
  MOD_RES (7), (41), (43): Xaa is C or S

SEQ ID NO: 57813 - protein, 41 aa, Artificial Sequence; identical to SEQ ID NO: 14983
  Cyclic GFR-binding peptide
  MOD_RES (4), (38), (40): Xaa is C or S

SEQ ID NO: 57814 - protein, 29 aa, Artificial Sequence
  Cyclic GFR-binding peptide
LRSVKVAKVEIVRKKPIFKEVQVTLEDHL

SEQ ID NO: 57815 - protein, 33 aa, Artificial Sequence
  Cyclic GFR-binding peptide
  MOD_RES (33), (33): Xaa is C or S
PTGQRPVQMRKIRIKPHQGQHKKATVLEEHSQX

SEQ ID NO: 57816 - protein, 35 aa, Artificial Sequence; identical to SEQ ID NO: 14986
  Cyclic GFR-binding peptide
  MOD_RES (1), (35): Xaa is C or S

SEQ ID NO: 57817 - protein, 37 aa, Artificial Sequence; identical to SEQ ID NO: 14987
  Cyclic GFR-binding peptide
  MOD_RES (37), (37): Xaa is C or S

SEQ ID NO: 57818 - protein, 35 aa, Artificial Sequence
  Cyclic GFR-binding peptide
  MOD_RES (4), (4): Xaa is C or S
SVKXQPSRVHHSNITVQIMEYVRKKPKLLGEMSRL

SEQ ID NO: 57819 - protein, 35 aa, Artificial Sequence
  Cyclic GFR-binding peptide
  MOD_RES (2), (2): Xaa is C or S
KXQPSRVHHSNITVQIMEYVRKKPKLIGEMSRLEE

SEQ ID NO: 57820 - protein, 40 aa, Artificial Sequence; identical to SEQ ID NO: 14989
  Cyclic GFR-binding peptide
  MOD_RES (1), (38), (40): Xaa is C or S

SEQ ID NO: 57821 - protein, 25 aa, Artificial Sequence
  Cyclic GFR-binding peptide
SNITVQIMEIVRKKPIFIGEMSTLE

SEQ ID NO: 57822 - protein, 33 aa, Artificial Sequence
  Cyclic GFR-binding peptide
  MOD_RES (32), (32): Xaa is C or S
QLSNITVQIMEIVRKKPIFIGEMSTLEDHLAXK

SEQ ID NO: 57823 - protein, 35 aa, Artificial Sequence
  Cyclic GFR-binding peptide
  MOD_RES (33), (35): Xaa is C or S
VHHRPVQVRKIEYVRKKPKLKKATVRLEEHLEXAX

SEQ ID NO: 57824 - protein, 39 aa, Artificial Sequence; identical to SEQ ID NO: 14997
  Cyclic GFR-binding peptide
  MOD_RES (37), (39): Xaa is C or S

SEQ ID NO: 57825 - protein, 32 aa, Artificial Sequence
  Cyclic GFR-binding peptide
  MOD_RES (30), (32): Xaa is C or S
QRSVKMAKVRIKPHQGQHKEVQVLEEHSQXEX

SEQ ID NO: 57826 - protein, 32 aa, Artificial Sequence
  Cyclic GFR-binding peptide
  MOD_RES (31), (31): Xaa is C or S
GQSNITMQIMRIKPHQGQHIGEMSLEEHSQXE

SEQ ID NO: 57827 - protein, 38 aa, Artificial Sequence; identical to SEQ ID NO: 14998
  Cyclic GFR-binding peptide
  MOD_RES (4), (4): Xaa is C or S

SEQ ID NO: 57828 - protein, 29 aa, Artificial Sequence
  Cyclic GFR-binding peptide
EESNITMQIMRIKPHQGQHLGEMSFLQHN

SEQ ID NO: 57829 - protein, 37 aa, Artificial Sequence; identical to SEQ ID NO: 14999
  Cyclic GFR-binding peptide
  MOD_RES (5), (5): Xaa is C or S

SEQ ID NO: 57830 - protein, 40 aa, Artificial Sequence; identical to SEQ ID NO: 15000
  Cyclic GFR-binding peptide
  MOD_RES (3), (37), (39): Xaa is C or S

SEQ ID NO: 57831 - protein, 32 aa, Artificial Sequence
  Cyclic GFR-binding peptide
  MOD_RES (30), (32): Xaa is C or S
SNITVQIMEYVRKKPKLIGEMSRLEEHLEXAX

SEQ ID NO: 57832 - protein, 29 aa, Artificial Sequence
  Cyclic GFR-binding peptide
  MOD_RES (29), (29): Xaa is C or S
RPVQMRKIRIKPHQGQHKKATVLEEHSQX

SEQ ID NO: 57833 - protein, 27 aa, Artificial Sequence
  Cyclic GFR-binding peptide
EERPVQMRKIRIKPHQGQHKKATVFLQ

SEQ ID NO: 57834 - protein, 32 aa, Artificial Sequence
  Cyclic GFR-binding peptide
  MOD_RES (1), (1): Xaa is C or S
XQPSRVHHRPVQVRKIEYVRKKPKLKKATVRL

SEQ ID NO: 57835 - protein, 33 aa, Artificial Sequence
  Cyclic GFR-binding peptide
  MOD_RES (6), (6): Xaa is C or S
DEGLEXVPTGQRPVQMRKIRIKPHQGQHKKATV

SEQ ID NO: 57836 - protein, 33 aa, Artificial Sequence
  Cyclic GFR-binding peptide
RVHHSNITVQIMEYVRKKPKLLGEMSRLEEHLE

SEQ ID NO: 57837 - protein, 36 aa, Artificial Sequence; identical to SEQ ID NO: 15003
  Cyclic GFR-binding peptide
  MOD_RES (36), (36): Xaa is C or S

SEQ ID NO: 57838 - protein, 32 aa, Artificial Sequence
  Cyclic GFR-binding peptide
  MOD_RES (4), (4): Xaa is C or S
GLEXVPTEERSVKMAKVRIKPHQGQHKEVQVF

SEQ ID NO: 57839 - protein, 39 aa, Artificial Sequence; identical to SEQ ID NO: 15005
  Cyclic GFR-binding peptide
  MOD_RES (36), (38): Xaa is C or S

SEQ ID NO: 57840 - protein, 41 aa, Artificial Sequence; identical to SEQ ID NO: 15006
  Cyclic GFR-binding peptide
  MOD_RES (5), (5): Xaa is C or S

SEQ ID NO: 57841 - protein, 42 aa, Artificial Sequence; identical to SEQ ID NO: 15007
  Cyclic GFR-binding peptide
  MOD_RES (5), (39), (41): Xaa is C or S

SEQ ID NO: 57842 - protein, 39 aa, Artificial Sequence; identical to SEQ ID NO: 15008
  Cyclic GFR-binding peptide
  MOD_RES (2), (39): Xaa is C or S

SEQ ID NO: 57843 - protein, 32 aa, Artificial Sequence; identical to SEQ ID NO: 1141
  Cyclic GFR-binding peptide

SEQ ID NO: 57844 - protein, 36 aa, Artificial Sequence; identical to SEQ ID NO: 15010
  Cyclic GFR-binding peptide
  MOD_RES (35), (35): Xaa is C or S

SEQ ID NO: 57845 - protein, 34 aa, Artificial Sequence
  Cyclic GFR-binding peptide
  MOD_RES (3), (3): Xaa is C or S
VKXQPSRVHHRPVQVRKIEYVRKKPKLKKATVRL

SEQ ID NO: 57846 - protein, 29 aa, Artificial Sequence
  Cyclic GFR-binding peptide
  MOD_RES (1), (1): Xaa is C or S
XVPTGQRPVQMRKIRIKPHQGQHKKATVL

SEQ ID NO: 57847 - protein, 43 aa, Artificial Sequence; identical to SEQ ID NO: 15013
  Cyclic GFR-binding peptide
  MOD_RES (7), (41), (43): Xaa is C or S

SEQ ID NO: 57848 - protein, 38 aa, Artificial Sequence; identical to SEQ ID NO: 15014
  Cyclic GFR-binding peptide
  MOD_RES (4), (4): Xaa is C or S

SEQ ID NO: 57849 - protein, 32 aa, Artificial Sequence
  Cyclic GFR-binding peptide
  MOD_RES (30), (32): Xaa is C or S
RPVQVRKIEYVRKKPKLKKATVRLEEHLEXAX

SEQ ID NO: 57850 - protein, 25 aa, Artificial Sequence
  Cyclic GFR-binding peptide
SNITVQIMEYVRKKPKLLGEMSRLE

SEQ ID NO: 57851 - protein, 34 aa, Artificial Sequence
  Cyclic GFR-binding peptide
  MOD_RES (32), (34): Xaa is C or S
HHSNITVQIMEYVRKKPKLLGEMSRLEEHLEXAX

SEQ ID NO: 57852 - protein, 34 aa, Artificial Sequence
  Cyclic GFR-binding peptide
  MOD_RES (31), (33): Xaa is C or S
EERPVQMRKIRIKPHQGQHKKATVFLQHNKXEXR

SEQ ID NO: 57853 - protein, 29 aa, Artificial Sequence
  Cyclic GFR-binding peptide
  MOD_RES (29), (29): Xaa is C or S
RPVQMRKIRIKPHQGQHKKATVFLQHNKX

SEQ ID NO: 57854 - protein, 32 aa, Artificial Sequence; identical to SEQ ID NO: 15016
  Cyclic GFR-binding peptide

SEQ ID NO: 57855 - protein, 34 aa, Artificial Sequence
  Cyclic GFR-binding peptide
  MOD_RES (6), (6): Xaa is C or S
DEGLEXVPTGQSNITMQIMRIKPHQGQHIGEMSL

SEQ ID NO: 57856 - protein, 29 aa, Artificial Sequence
  Cyclic GFR-binding peptide
GQSNITMQIMRIKPHQGQHIGEMSLEEHS

SEQ ID NO: 57857 - protein, 39 aa, Artificial Sequence; identical to SEQ ID NO: 15018
  Cyclic GFR-binding peptide
  MOD_RES (7), (7): Xaa is C or S

SEQ ID NO: 57858 - protein, 37 aa, Artificial Sequence; identical to SEQ ID NO: 15019
  Cyclic GFR-binding peptide
  MOD_RES (2), (36): Xaa is C or S

SEQ ID NO: 57859 - protein, 32 aa, Artificial Sequence
  Cyclic GFR-binding peptide
RVHHSNITVQIMEYVRKKPKLIGEMSRLEEHL

SEQ ID NO: 57860 - protein, 31 aa, Artificial Sequence
  Cyclic GFR-binding peptide
QVQLRSVKVAKVEIVRKKPIFKEVQVTLEDH

SEQ ID NO: 57861 - protein, 25 aa, Artificial Sequence
  Cyclic GFR-binding peptide
ERPVQMRKIRIKPHQGQHKKATVFL

SEQ ID NO: 57862 - protein, 34 aa, Artificial Sequence
  Cyclic GFR-binding peptide
  MOD_RES (3), (3): Xaa is C or S
VQXRPTQVQLSNITVQIMEIVRKKPIFLGEMSTL

SEQ ID NO: 57863 - protein, 26 aa, Artificial Sequence
  Cyclic GFR-binding peptide
TEERSVKMAKVRIKPHQGQHKEVQVF

SEQ ID NO: 57864 - protein, 29 aa, Artificial Sequence
  Cyclic GFR-binding peptide
SRVHHSNITVQIMEYVRKKPKLIGEMSRL

SEQ ID NO: 57865 - protein, 26 aa, Artificial Sequence
  Cyclic GFR-binding peptide
GQSNITMQIMRIKPHQGQHIGEMSLE

SEQ ID NO: 57866 - protein, 30 aa, Artificial Sequence
  Cyclic GFR-binding peptide
  MOD_RES (29), (29): Xaa is C or S
RSVKMAKVRIKPHQGQHKEVQVFLQHNKXE

SEQ ID NO: 57867 - protein, 28 aa, Artificial Sequence
  Cyclic GFR-binding peptide
VQLRSVKVAKVEIVRKKPIFKEVQVTLE

SEQ ID NO: 57868 - protein, 25 aa, Artificial Sequence
  Cyclic GFR-binding peptide
RPVQVRKIEYVRKKPKLKKATVRLE

SEQ ID NO: 57869 - protein, 30 aa, Artificial Sequence
  Cyclic GFR-binding peptide
PTQVQLRSVKVAKVEIVRKKPIFKEVQVTL

SEQ ID NO: 57870 - protein, 28 aa, Artificial Sequence
  Cyclic GFR-binding peptide
RPVQMRKIRIKPHQGQHKKATVLEEHSQ

SEQ ID NO: 57871 - protein, 41 aa, Artificial Sequence; identical to SEQ ID NO: 15023
  Cyclic GFR-binding peptide
  MOD_RES (2), (39), (41): Xaa is C or S

SEQ ID NO: 57872 - protein, 31 aa, Artificial Sequence
  Cyclic GFR-binding peptide
  MOD_RES (30), (30): Xaa is C or S
QSNITMQIMRIKPHQGQHIGEMSLEEHSQXE

SEQ ID NO: 57873 - protein, 32 aa, Artificial Sequence
  Cyclic GFR-binding peptide
  MOD_RES (5), (5): Xaa is C or S
EGLEXVPTEERPVQMRKIRIKPHQGQHKKATV

SEQ ID NO: 57874 - protein, 41 aa, Artificial Sequence; identical to SEQ ID NO: 15026
  Cyclic GFR-binding peptide
  MOD_RES (7), (41): Xaa is C or S

SEQ ID NO: 57875 - protein, 38 aa, Artificial Sequence; identical to SEQ ID NO: 15027
  Cyclic GFR-binding peptide
  MOD_RES (35), (37): Xaa is C or S

SEQ ID NO: 57876 - protein, 32 aa, Artificial Sequence
  Cyclic GFR-binding peptide
  MOD_RES (1), (1): Xaa is C or S
XVPTGQRPVQMRKIRIKPHQGQHKKATVLEEH

SEQ ID NO: 57877 - protein, 37 aa, Artificial Sequence; identical to SEQ ID NO: 15032
  Cyclic GFR-binding peptide
  MOD_RES (35), (37): Xaa is C or S

SEQ ID NO: 57878 - protein, 37 aa, Artificial Sequence; identical to SEQ ID NO: 15033
  Cyclic GFR-binding peptide
  MOD_RES (5), (5): Xaa is C or S

SEQ ID NO: 57879 - protein, 28 aa, Artificial Sequence
  Cyclic GFR-binding peptide
QRSVKMAKVRIKPHQGQHKEVQVLEEHS

SEQ ID NO: 57880 - protein, 30 aa, Artificial Sequence
  Cyclic GFR-binding peptide
HSNITVQIMEYVRKKPKLLGEMSRLEEHLE

SEQ ID NO: 57881 - protein, 23 aa, Artificial Sequence
  Cyclic GFR-binding peptide
HRPVQVRKIEYVRKKPKLKKATV

SEQ ID NO: 57882 - protein, 41 aa, Artificial Sequence; identical to SEQ ID NO: 15035
  Cyclic GFR-binding peptide
  MOD_RES (7), (41): Xaa is C or S

SEQ ID NO: 57883 - protein, 43 aa, Artificial Sequence; identical to SEQ ID NO: 15036
  Cyclic GFR-binding peptide
  MOD_RES (6), (40), (42): Xaa is C or S

SEQ ID NO: 57884 - protein, 36 aa, Artificial Sequence; identical to SEQ ID NO: 15037
  Cyclic GFR-binding peptide
  MOD_RES (35), (35): Xaa is C or S

SEQ ID NO: 57885 - protein, 36 aa, Artificial Sequence; identical to SEQ ID NO: 15038
  Cyclic GFR-binding peptide
  MOD_RES (3), (3): Xaa is C or S

SEQ ID NO: 57886 - protein, 33 aa, Artificial Sequence; identical to SEQ ID NO: 15039
  Cyclic GFR-binding peptide
  MOD_RES (1), (1): Xaa is C or S

SEQ ID NO: 57887 - protein, 30 aa, Artificial Sequence
  Cyclic GFR-binding peptide
SRVHHSNITVQIMEYVRKKPKLLGEMSRLE

SEQ ID NO: 57888 - protein, 35 aa, Artificial Sequence
  Cyclic GFR-binding peptide
  MOD_RES (6), (6): Xaa is C or S
DEGLEXVPTEESNITMQIMRIKPHQGQHLGEMSFL

SEQ ID NO: 57889 - protein, 32 aa, Artificial Sequence; identical to SEQ ID NO: 15042
  Cyclic GFR-binding peptide

SEQ ID NO: 57890 - protein, 28 aa, Artificial Sequence
  Cyclic GFR-binding peptide
QVQLRSVKVAKVEIVRKKPIFKEVQVTL

SEQ ID NO: 57891 - protein, 38 aa, Artificial Sequence; identical to SEQ ID NO: 15045
  Cyclic GFR-binding peptide
  MOD_RES (2), (2): Xaa is C or S

SEQ ID NO: 57892 - protein, 36 aa, Artificial Sequence
  Cyclic GFR-binding peptide
  MOD_RES (34), (36): Xaa is C or S
QVQLRSVKVAKVEIVRKKPIFKEVQVTLEDHLAXKX

SEQ ID NO: 57893 - protein, 39 aa, Artificial Sequence; identical to SEQ ID NO: 15047
  Cyclic GFR-binding peptide
  MOD_RES (5), (39): Xaa is C or S

SEQ ID NO: 57894 - protein, 33 aa, Artificial Sequence; identical to SEQ ID NO: 15048
  Cyclic GFR-binding peptide
  MOD_RES (1), (1): Xaa is C or S

SEQ ID NO: 57895 - protein, 38 aa, Artificial Sequence
  Cyclic GFR-binding peptide
  MOD_RES (5), (5): Xaa is C or S
RNVQXRPTQVQLSNITVQIMEIVRKKPIFIGEMSTLED

SEQ ID NO: 57896 - protein, 34 aa, Artificial Sequence
  Cyclic GFR-binding peptide
  MOD_RES (5), (5): Xaa is C or S
RNVQXRPTQVQLSNITVQIMEIVRKKPIFIGEMS

SEQ ID NO: 57897 - protein, 33 aa, Artificial Sequence
  Cyclic GFR-binding peptide
  MOD_RES (4), (4): Xaa is C or S
GLEXVPTEERSVKMAKVRIKPHQGQHKEVQVFL

SEQ ID NO: 57898 - protein, 28 aa, Artificial Sequence
  Cyclic GFR-binding peptide
QRPVQMRKIRIKPHQGQHKKATVLEEHS

SEQ ID NO: 57899 - protein, 37 aa, Artificial Sequence; identical to SEQ ID NO: 15053
  Cyclic GFR-binding peptide
  MOD_RES (35), (37): Xaa is C or S

SEQ ID NO: 57900 - protein, 35 aa, Artificial Sequence; identical to SEQ ID NO: 15054
  Cyclic GFR-binding peptide
  MOD_RES (34), (34): Xaa is C or S

SEQ ID NO: 57901 - protein, 44 aa, Artificial Sequence; identical to SEQ ID NO: 15055
  Cyclic GFR-binding peptide
  MOD_RES (7), (41), (43): Xaa is C or S

SEQ ID NO: 57902 - protein, 29 aa, Artificial Sequence
  Cyclic GFR-binding peptide
  MOD_RES (2), (2): Xaa is C or S
EXVPTEESNITMQIMRIKPHQGQHLGEMS

SEQ ID NO: 57903 - protein, 35 aa, Artificial Sequence
  Cyclic GFR-binding peptide
  MOD_RES (5), (5): Xaa is C or S
EGLEXVPTGQSNITMQIMRIKPHQGQHIGEMSLEE

SEQ ID NO: 57904 - protein, 34 aa, Artificial Sequence
  Cyclic GFR-binding peptide
  MOD_RES (4), (4): Xaa is C or S
NVQXRPTQVQLSNITVQIMEIVRKKPIFIGEMST

SEQ ID NO: 57905 - protein, 35 aa, Artificial Sequence
  Cyclic GFR-binding peptide
  MOD_RES (7), (7): Xaa is C or S
NDEGLEXVPTEESNITMQIMRIKPHQGQHLGEMSF

SEQ ID NO: 57906 - protein, 24 aa, Artificial Sequence
  Cyclic GFR-binding peptide
ERPVQMRKIRIKPHQGQHKKATVF

SEQ ID NO: 57907 - protein, 34 aa, Artificial Sequence
  Cyclic GFR-binding peptide
  MOD_RES (1), (1): Xaa is C or S
XRPTQVQLSNITVQIMEIVRKKPIFLGEMSTLED

SEQ ID NO: 57908 - protein, 31 aa, Artificial Sequence
  Cyclic GFR-binding peptide
VHHSNITVQIMEYVRKKPKLLGEMSRLEEHL

SEQ ID NO: 57909 - protein, 32 aa, Artificial Sequence; identical to SEQ ID NO: 15059
  Cyclic GFR-binding peptide

SEQ ID NO: 57910 - protein, 38 aa, Artificial Sequence; identical to SEQ ID NO: 15061
  Cyclic GFR-binding peptide
  MOD_RES (2), (36), (38): Xaa is C or S

SEQ ID NO: 57911 - protein, 41 aa, Artificial Sequence; identical to SEQ ID NO: 15062
  Cyclic GFR-binding peptide
  MOD_RES (1), (38), (40): Xaa is C or S

SEQ ID NO: 57912 - protein, 42 aa, Artificial Sequence; identical to SEQ ID NO: 15063
  Cyclic GFR-binding peptide
  MOD_RES (6), (40), (42): Xaa is C or S

SEQ ID NO: 57913 - protein, 33 aa, Artificial Sequence; identical to SEQ ID NO: 15064
  Cyclic GFR-binding peptide

SEQ ID NO: 57914 - protein, 42 aa, Artificial Sequence; identical to SEQ ID NO: 15065
  Cyclic GFR-binding peptide
  MOD_RES (2), (39), (41): Xaa is C or S

SEQ ID NO: 57915 - protein, 32 aa, Artificial Sequence; identical to SEQ ID NO: 15067
  Cyclic GFR-binding peptide

SEQ ID NO: 57916 - protein, 39 aa, Artificial Sequence; identical to SEQ ID NO: 15068
  Cyclic GFR-binding peptide
  MOD_RES (6), (6): Xaa is C or S

SEQ ID NO: 57917 - protein, 32 aa, Artificial Sequence
  Cyclic GFR-binding peptide
PTQVQLSNITVQIMEIVRKKPIFIGEMSTLED

SEQ ID NO: 57918 - protein, 29 aa, Artificial Sequence
  Cyclic GFR-binding peptide
TEERSVKMAKVRIKPHQGQHKEVQVFLQH

SEQ ID NO: 57919 - protein, 31 aa, Artificial Sequence
  Cyclic GFR-binding peptide
  MOD_RES (1), (1): Xaa is C or S
XVPTEERPVQMRKIRIKPHQGQHKKATVFLQ

SEQ ID NO: 57920 - protein, 32 aa, Artificial Sequence; identical to SEQ ID NO: 15069
  Cyclic GFR-binding peptide

SEQ ID NO: 57921 - protein, 35 aa, Artificial Sequence; identical to SEQ ID NO: 15071
  Cyclic GFR-binding peptide

SEQ ID NO: 57922 - protein, 32 aa, Artificial Sequence
  Cyclic GFR-binding peptide
  MOD_RES (30), (32): Xaa is C or S
QRPVQMRKIRIKPHQGQHKKATVLEEHSQXEX

SEQ ID NO: 57923 - protein, 28 aa, Artificial Sequence
  Cyclic GFR-binding peptide
HHSNITVQIMEYVRKKPKLIGEMSRLEE

SEQ ID NO: 57924 - protein, 33 aa, Artificial Sequence
  Cyclic GFR-binding peptide
  MOD_RES (32), (32): Xaa is C or S
TGQRSVKMAKVRIKPHQGQHKEVQVLEEHSQXE

SEQ ID NO: 57925 - protein, 28 aa, Artificial Sequence
  Cyclic GFR-binding peptide
PSRVHHRPVQVRKIEYVRKKPKLKKATV

SEQ ID NO: 57926 - protein, 40 aa, Artificial Sequence; identical to SEQ ID NO: 15074
  Cyclic GFR-binding peptide
  MOD_RES (2), (39): Xaa is C or S

SEQ ID NO: 57927 - protein, 29 aa, Artificial Sequence
  Cyclic GFR-binding peptide
QRPVQMRKIRIKPHQGQHKKATVLEEHSQ

SEQ ID NO: 57928 - protein, 33 aa, Artificial Sequence
  Cyclic GFR-binding peptide
  MOD_RES (33), (33): Xaa is C or S
PTEERSVKMAKVRIKPHQGQHKEVQVFLQHNKX

SEQ ID NO: 57929 - protein, 31 aa, Artificial Sequence
  Cyclic GFR-binding peptide
  MOD_RES (3), (3): Xaa is C or S
LEXVPTGQRPVQMRKIRIKPHQGQHKKATVL

SEQ ID NO: 57930 - protein, 27 aa, Artificial Sequence
  Cyclic GFR-binding peptide
HSNITVQIMEYVRKKPKLIGEMSRLEE

SEQ ID NO: 57931 - protein, 37 aa, Artificial Sequence; identical to SEQ ID NO: 15077
  Cyclic GFR-binding peptide
  MOD_RES (34), (36): Xaa is C or S

SEQ ID NO: 57932 - protein, 27 aa, Artificial Sequence
  Cyclic GFR-binding peptide
SRVHHRPVQVRKIEYVRKKPKLKKATV

SEQ ID NO: 57933 - protein, 34 aa, Artificial Sequence; identical to SEQ ID NO: 15078
  Cyclic GFR-binding peptide
  MOD_RES (1), (1): Xaa is C or S

SEQ ID NO: 57934 - protein, 37 aa, Artificial Sequence
  Cyclic GFR-binding peptide
  MOD_RES (34), (36): Xaa is C or S
QVQLRSVKVAKVEIVRKKPIFKEVQVTLEDHLAXKXE

SEQ ID NO: 57935 - protein, 33 aa, Artificial Sequence
  Cyclic GFR-binding peptide
  MOD_RES (33), (33): Xaa is C or S
VQLSNITVQIMEIVRKKPIFIGEMSTLEDHLAX

SEQ ID NO: 57936 - protein, 22 aa, Artificial Sequence
  Cyclic GFR-binding peptide
RSVKVAKVEIVRKKPIFKEVQV

SEQ ID NO: 57937 - protein, 30 aa, Artificial Sequence
  Cyclic GFR-binding peptide
  MOD_RES (30), (30): Xaa is C or S
QRSVKMAKVRIKPHQGQHKEVQVLEEHSQX

SEQ ID NO: 57938 - protein, 31 aa, Artificial Sequence
  Cyclic GFR-binding peptide
VQLSNITVQIMEIVRKKPIFIGEMSTLEDHL

SEQ ID NO: 57939 - protein, 34 aa, Artificial Sequence
  Cyclic GFR-binding peptide
  MOD_RES (31), (33): Xaa is C or S
HRPVQVRKIEYVRKKPKLKKATVRLEEHLEXAXA

SEQ ID NO: 57940 - protein, 33 aa, Artificial Sequence; identical to SEQ ID NO: 15082
  Cyclic GFR-binding peptide
  MOD_RES (1), (1): Xaa is C or S

SEQ ID NO: 57941 - protein, 32 aa, Artificial Sequence
  Cyclic GFR-binding peptide
QPSRVHHRPVQVRKIEYVRKKPKLKKATVRLE

SEQ ID NO: 57942 - protein, 38 aa, Artificial Sequence
  Cyclic GFR-binding peptide
  MOD_RES (7), (7): Xaa is C or S
NDEGLEXVPTGQRPVQMRKIRIKPHQGQHKKATVLEEH

SEQ ID NO: 57943 - protein, 41 aa, Artificial Sequence; identical to SEQ ID NO: 15084
  Cyclic GFR-binding peptide
  MOD_RES (4), (38), (40): Xaa is C or S

SEQ ID NO: 57944 - protein, 31 aa, Artificial Sequence
  Cyclic GFR-binding peptide
VPTGQRPVQMRKIRIKPHQGQHKKATVLEEH

SEQ ID NO: 57945 - protein, 34 aa, Artificial Sequence
  Cyclic GFR-binding peptide
  MOD_RES (7), (7): Xaa is C or S
NDEGLEXVPTEESNITMQIMRIKPHQGQHLGEMS

SEQ ID NO: 57946 - protein, 41 aa, Artificial Sequence; identical to SEQ ID NO: 15086
  Cyclic GFR-binding peptide
  MOD_RES (7), (41): Xaa is C or S

SEQ ID NO: 57947 - protein, 36 aa, Artificial Sequence
  Cyclic GFR-binding peptide
  MOD_RES (5), (5): Xaa is C or S
SSVKXQPSRVHHSNITVQIMEYVRKKPKLLGEMSRL

SEQ ID NO: 57948 - protein, 34 aa, Artificial Sequence
  Cyclic GFR-binding peptide
  MOD_RES (5), (5): Xaa is C or S
EGLEXVPTEERPVQMRKIRIKPHQGQHKKATVFL

SEQ ID NO: 57949 - protein, 30 aa, Artificial Sequence
  Cyclic GFR-binding peptide
QPSRVHHRPVQVRKIEYVRKKPKLKKATVR

SEQ ID NO: 57950 - protein, 35 aa, Artificial Sequence
  Cyclic GFR-binding peptide
  MOD_RES (3), (3): Xaa is C or S
VQXRPTQVQLRSVKVAKVEIVRKKPIFKEVQVTLE

SEQ ID NO: 57951 - protein, 29 aa, Artificial Sequence
  Cyclic GFR-binding peptide
HSNITVQIMEYVRKKPKLLGEMSRLEEHL

SEQ ID NO: 57952 - protein, 28 aa, Artificial Sequence
  Cyclic GFR-binding peptide
RSVKMAKVRIKPHQGQHKEVQVLEEHSQ

SEQ ID NO: 57953 - protein, 39 aa, Artificial Sequence; identical to SEQ ID NO: 15088
  Cyclic GFR-binding peptide
  MOD_RES (36), (38): Xaa is C or S

SEQ ID NO: 57954 - protein, 33 aa, Artificial Sequence
  Cyclic GFR-binding peptide
  MOD_RES (30), (32): Xaa is C or S
SNITVQIMEYVRKKPKLIGEMSRLEEHLEXAXA

SEQ ID NO: 57955 - protein, 34 aa, Artificial Sequence
  Cyclic GFR-binding peptide
  MOD_RES (7), (7): Xaa is C or S
NDEGLEXVPTGQRSVKMAKVRIKPHQGQHKEVQV

SEQ ID NO: 57956 - protein, 32 aa, Artificial Sequence
  Cyclic GFR-binding peptide
  MOD_RES (29), (31): Xaa is C or S
RSVKMAKVRIKPHQGQHKEVQVLEEHSQXEXR

SEQ ID NO: 57957 - protein, 40 aa, Artificial Sequence; identical to SEQ ID NO: 15090
  Cyclic GFR-binding peptide
  MOD_RES (4), (38), (40): Xaa is C or S

SEQ ID NO: 57958 - protein, 25 aa, Artificial Sequence
  Cyclic GFR-binding peptide
EESNITMQIMRIKPHQGQHLGEMSF

SEQ ID NO: 57959 - protein, 31 aa, Artificial Sequence
  Cyclic GFR-binding peptide
SNITVQIMEIVRKKPIFIGEMSAAAAAAAAA

SEQ ID NO: 57960 - protein, 30 aa, Artificial Sequence
  Cyclic GFR-binding peptide
QVQLSNITVQIMEIVRKKPIFLGEMSTLED

SEQ ID NO: 57961 - protein, 33 aa, Artificial Sequence
  Cyclic GFR-binding peptide
  MOD_RES (31), (33): Xaa is C or S
LRSVKVAKVEIVRKKPIFKEVQVTLEDHLAXKX

SEQ ID NO: 57962 - protein, 33 aa, Artificial Sequence
  Cyclic GFR-binding peptide
  MOD_RES (2), (2): Xaa is C or S
KXQPSRVHHSNITVQIMEYVRKKPKLLGEMSRL

SEQ ID NO: 57963 - protein, 32 aa, Artificial Sequence
  Cyclic GFR-binding peptide
  MOD_RES (30), (32): Xaa is C or S
QSNITMQIMRIKPHQGQHIGEMSLEEHSQXEX

SEQ ID NO: 57964 - protein, 34 aa, Artificial Sequence
  Cyclic GFR-binding peptide
  MOD_RES (33), (33): Xaa is C or S
PTGQRSVKMAKVRIKPHQGQHKEVQVLEEHSQXE

SEQ ID NO: 57965 - protein, 41 aa, Artificial Sequence; identical to SEQ ID NO: 15096
  Cyclic GFR-binding peptide
  MOD_RES (5), (39), (41): Xaa is C or S

SEQ ID NO: 57966 - protein, 36 aa, Artificial Sequence; identical to SEQ ID NO: 15098
  Cyclic GFR-binding peptide
  MOD_RES (1), (1): Xaa is C or S

SEQ ID NO: 57967 - protein, 34 aa, Artificial Sequence
  Cyclic GFR-binding peptide
  MOD_RES (34), (34): Xaa is C or S
QVQLRSVKVAKVEIVRKKPIFKEVQVTLEDHLAX

SEQ ID NO: 57968 - protein, 26 aa, Artificial Sequence
  Cyclic GFR-binding peptide
RPVQMRKIRIKPHQGQHKKATVLEEH

SEQ ID NO: 57969 - protein, 38 aa, Artificial Sequence; identical to SEQ ID NO: 15099
  Cyclic GFR-binding peptide
  MOD_RES (35), (37): Xaa is C or S

SEQ ID NO: 57970 - protein, 30 aa, Artificial Sequence
  Cyclic GFR-binding peptide
  MOD_RES (30), (30): Xaa is C or S
SNITVQIMEYVRKKPKLIGEMSRLEEHLEX

SEQ ID NO: 57971 - protein, 36 aa, Artificial Sequence
  Cyclic GFR-binding peptide
  MOD_RES (3), (3): Xaa is C or S
VKXQPSRVHHRPVQVRKIEYVRKKPKLKKATVRLEE

SEQ ID NO: 57972 - protein, 26 aa, Artificial Sequence
  Cyclic GFR-binding peptide
TEESNITMQIMRIKPHQGQHLGEMSF

SEQ ID NO: 57973 - protein, 33 aa, Artificial Sequence; identical to SEQ ID NO: 15106
  Cyclic GFR-binding peptide

SEQ ID NO: 57974 - protein, 31 aa, Artificial Sequence
  Cyclic GFR-binding peptide
RVHHSNITVQIMEYVRKKPKLIGEMSRLEEH

SEQ ID NO: 57975 - protein, 29 aa, Artificial Sequence
  Cyclic GFR-binding peptide
  MOD_RES (2), (2): Xaa is C or S
EXVPTGQRPVQMRKIRIKPHQGQHKKATV

SEQ ID NO: 57976 - protein, 31 aa, Artificial Sequence
  Cyclic GFR-binding peptide
PSRVHHSNITVQIMEYVRKKPKLIGEMSRLE

SEQ ID NO: 57977 - protein, 36 aa, Artificial Sequence; identical to SEQ ID NO: 15110
  Cyclic GFR-binding peptide
  MOD_RES (1), (35): Xaa is C or S

SEQ ID NO: 57978 - protein, 35 aa, Artificial Sequence; identical to SEQ ID NO: 15111
  Cyclic GFR-binding peptide

SEQ ID NO: 57979 - protein, 28 aa, Artificial Sequence
  Cyclic GFR-binding peptide
TEERPVQMRKIRIKPHQGQHKKATVFLQ

SEQ ID NO: 57980 - protein, 44 aa, Artificial Sequence; identical to SEQ ID NO: 15114
  Cyclic GFR-binding peptide
  MOD_RES (7), (41), (43): Xaa is C or S

SEQ ID NO: 57981 - protein, 36 aa, Artificial Sequence
  Cyclic GFR-binding peptide
  MOD_RES (33), (35): Xaa is C or S
PTEERSVKMAKVRIKPHQGQHKEVQVFLQHNKXEXR

SEQ ID NO: 57982 - protein, 26 aa, Artificial Sequence
  Cyclic GFR-binding peptide
RSVKVAKVEIVRKKPIFKEVQVTLED

SEQ ID NO: 57983 - protein, 30 aa, Artificial Sequence
  Cyclic GFR-binding peptide
  MOD_RES (1), (1): Xaa is C or S
XVPTEERSVKMAKVRIKPHQGQHKEVQVFL

SEQ ID NO: 57984 - protein, 32 aa, Artificial Sequence
  Cyclic GFR-binding peptide
  MOD_RES (3), (3): Xaa is C or S
VKXQPSRVHHSNITVQIMEYVRKKPKLIGEMS

SEQ ID NO: 57985 - protein, 33 aa, Artificial Sequence
  Cyclic GFR-binding peptide
  MOD_RES (4), (4): Xaa is C or S
SVKXQPSRVHHRPVQVRKIEYVRKKPKLKKATV

SEQ ID NO: 57986 - protein, 31 aa, Artificial Sequence
  Cyclic GFR-binding peptide
  MOD_RES (30), (30): Xaa is C or S
QRPVQMRKIRIKPHQGQHKKATVLEEHSQXE

SEQ ID NO: 57987 - protein, 34 aa, Artificial Sequence; identical to SEQ ID NO: 15119
  Cyclic GFR-binding peptide

SEQ ID NO: 57988 - protein, 37 aa, Artificial Sequence
  Cyclic GFR-binding peptide
  MOD_RES (6), (6): Xaa is C or S
DEGLEXVPTEERSVKMAKVRIKPHQGQHKEVQVFLQH

SEQ ID NO: 57989 - protein, 36 aa, Artificial Sequence
  Cyclic GFR-binding peptide
  MOD_RES (4), (4): Xaa is C or S
SVKXQPSRVHHRPVQVRKIEYVRKKPKLKKATVRLE

SEQ ID NO: 57990 - protein, 38 aa, Artificial Sequence; identical to SEQ ID NO: 15120
  Cyclic GFR-binding peptide
  MOD_RES (4), (38): Xaa is C or S

SEQ ID NO: 57991 - protein, 32 aa, Artificial Sequence; identical to SEQ ID NO: 1181
  Cyclic GFR-binding peptide

SEQ ID NO: 57992 - protein, 29 aa, Artificial Sequence
  Cyclic GFR-binding peptide
QSNITMQIMRIKPHQGQHIGEMSLEEHSQ

SEQ ID NO: 57993 - protein, 32 aa, Artificial Sequence
  Cyclic GFR-binding peptide
  MOD_RES (29), (31): Xaa is C or S
RPVQMRKIRIKPHQGQHKKATVLEEHSQXEXR

SEQ ID NO: 57994 - protein, 32 aa, Artificial Sequence
  Cyclic GFR-binding peptide
  MOD_RES (2), (2): Xaa is C or S
EXVPTGQRSVKMAKVRIKPHQGQHKEVQVLEE

SEQ ID NO: 57995 - protein, 37 aa, Artificial Sequence
  Cyclic GFR-binding peptide
  MOD_RES (4), (4): Xaa is C or S
NVQXRPTQVQLRSVKVAKVEIVRKKPIFKEVQVTLED

SEQ ID NO: 57996 - protein, 36 aa, Artificial Sequence
  Cyclic GFR-binding peptide
  MOD_RES (5), (5): Xaa is C or S
RNVQXRPTQVQLSNITVQIMEIVRKKPIFIGEMSTL

SEQ ID NO: 57997 - protein, 42 aa, Artificial Sequence; identical to SEQ ID NO: 15122
  Cyclic GFR-binding peptide
  MOD_RES (3), (40), (42): Xaa is C or S

SEQ ID NO: 57998 - protein, 42 aa, Artificial Sequence; identical to SEQ ID NO: 15125
  Cyclic GFR-binding peptide
  MOD_RES (6), (40), (42): Xaa is C or S

SEQ ID NO: 57999 - protein, 25 aa, Artificial Sequence
  Cyclic GFR-binding peptide
SNITMQIMRIKPHQGQHLGEMSFLQ

SEQ ID NO: 58000 - protein, 41 aa, Artificial Sequence; identical to SEQ ID NO: 15126
  Cyclic GFR-binding peptide
  MOD_RES (5), (5): Xaa is C or S

SEQ ID NO: 58001 - protein, 38 aa, Artificial Sequence; identical to SEQ ID NO: 15127
  Cyclic GFR-binding peptide
  MOD_RES (36), (38): Xaa is C or S

SEQ ID NO: 58002 - protein, 24 aa, Artificial Sequence
  Cyclic GFR-binding peptide
SNITMQIMRIKPHQGQHIGEMSLE

SEQ ID NO: 58003 - protein, 36 aa, Artificial Sequence; identical to SEQ ID NO: 15128
  Cyclic GFR-binding peptide
  MOD_RES (4), (4): Xaa is C or S

SEQ ID NO: 58004 - protein, 32 aa, Artificial Sequence
  Cyclic GFR-binding peptide
  MOD_RES (32), (32): Xaa is C or S
TEESNITMQIMRIKPHQGQHLGEMSFLQHNKX

SEQ ID NO: 58005 - protein, 28 aa, Artificial Sequence
  Cyclic GFR-binding peptide
PTQVQLSNITVQIMEIVRKKPIFLGEMS

SEQ ID NO: 58006 - protein, 37 aa, Artificial Sequence; identical to SEQ ID NO: 15129
  Cyclic GFR-binding peptide
  MOD_RES (2), (2): Xaa is C or S

SEQ ID NO: 58007 - protein, 25 aa, Artificial Sequence
  Cyclic GFR-binding peptide
VQLRSVKVAKVEIVRKKPIFKEVQV

SEQ ID NO: 58008 - protein, 43 aa, Artificial Sequence; identical to SEQ ID NO: 15131
  Cyclic GFR-binding peptide
  MOD_RES (4), (41), (43): Xaa is C or S

SEQ ID NO: 58009 - protein, 28 aa, Artificial Sequence
  Cyclic GFR-binding peptide
  MOD_RES (1), (1): Xaa is C or S
XVPTGQRPVQMRKIRIKPHQGQHKKATV

SEQ ID NO: 58010 - protein, 25 aa, Artificial Sequence
  Cyclic GFR-binding peptide
TEERPVQMRKIRIKPHQGQHKKATV

SEQ ID NO: 58011 - protein, 23 aa, Artificial Sequence
  Cyclic GFR-binding peptide
RSVKVAKVEIVRKKPIFKEVQVT

SEQ ID NO: 58012 - protein, 32 aa, Artificial Sequence
  Cyclic GFR-binding peptide
  MOD_RES (3), (3): Xaa is C or S
LEXVPTEERPVQMRKIRIKPHQGQHKKATVFL

SEQ ID NO: 58013 - protein, 31 aa, Artificial Sequence
  Cyclic GFR-binding peptide
  MOD_RES (30), (30): Xaa is C or S
ERPVQMRKIRIKPHQGQHKKATVFLQHNKXE

SEQ ID NO: 58014 - protein, 29 aa, Artificial Sequence
  Cyclic GFR-binding peptide
QVQLRSVKVAKVEIVRKKPIFKEVQVTLE

SEQ ID NO: 58015 - protein, 39 aa, Artificial Sequence; identical to SEQ ID NO: 15135
  Cyclic GFR-binding peptide
  MOD_RES (3), (3): Xaa is C or S

SEQ ID NO: 58016 - protein, 35 aa, Artificial Sequence
  Cyclic GFR-binding peptide
  MOD_RES (32), (34): Xaa is C or S
TGQRPVQMRKIRIKPHQGQHKKATVLEEHSQXEXR

SEQ ID NO: 58017 - protein, 41 aa, Artificial Sequence; identical to SEQ ID NO: 15136
  Cyclic GFR-binding peptide
  MOD_RES (6), (40): Xaa is C or S

SEQ ID NO: 58018 - protein, 25 aa, Artificial Sequence
  Cyclic GFR-binding peptide
VHHSNITVQIMEYVRKKPKLLGEMS

SEQ ID NO: 58019 - protein, 32 aa, Artificial Sequence
  Cyclic GFR-binding peptide
  MOD_RES (30), (32): Xaa is C or S
ERSVKMAKVRIKPHQGQHKEVQVFLQHNKXEX

SEQ ID NO: 58020 - protein, 36 aa, Artificial Sequence; identical to SEQ ID NO: 15137
  Cyclic GFR-binding peptide
  MOD_RES (4), (4): Xaa is C or S

SEQ ID NO: 58021 - protein, 37 aa, Artificial Sequence
  Cyclic GFR-binding peptide
  MOD_RES (7), (7): Xaa is C or S
NDEGLEXVPTGQRSVKMAKVRIKPHQGQHKEVQVLEE

SEQ ID NO: 58022 - protein, 30 aa, Artificial Sequence
  Cyclic GFR-binding peptide
VPTEESNITMQIMRIKPHQGQHLGEMSFLQ

SEQ ID NO: 58023 - protein, 32 aa, Artificial Sequence
  Cyclic GFR-binding peptide
PTGQRPVQMRKIRIKPHQGQHKKATVLEEHSQ

SEQ ID NO: 58024 - protein, 38 aa, Artificial Sequence; identical to SEQ ID NO: 15140
  Cyclic GFR-binding peptide
  MOD_RES (2), (36), (38): Xaa is C or S

SEQ ID NO: 58025 - protein, 29 aa, Artificial Sequence
  Cyclic GFR-binding peptide
VPTGQRPVQMRKIRIKPHQGQHKKATVLE

SEQ ID NO: 58026 - protein, 32 aa, Artificial Sequence
  Cyclic GFR-binding peptide
  MOD_RES (30), (32): Xaa is C or S
ESNITMQIMRIKPHQGQHLGEMSFLQHNKXEX

SEQ ID NO: 58027 - protein, 33 aa, Artificial Sequence
  Cyclic GFR-binding peptide
  MOD_RES (1), (1): Xaa is C or S
XQPSRVHHRPVQVRKIEYVRKKPKLKKATVRLE

SEQ ID NO: 58028 - protein, 27 aa, Artificial Sequence
  Cyclic GFR-binding peptide
TQVQLRSVKVAKVEIVRKKPIFKEVQV

SEQ ID NO: 58029 - protein, 34 aa, Artificial Sequence; identical to SEQ ID NO: 15142
  Cyclic GFR-binding peptide
  MOD_RES (34), (34): Xaa is C or S

SEQ ID NO: 58030 - protein, 31 aa, Artificial Sequence
  Cyclic GFR-binding peptide
  MOD_RES (4), (4): Xaa is C or S
GLEXVPTGQRSVKMAKVRIKPHQGQHKEVQV

SEQ ID NO: 58031 - protein, 32 aa, Artificial Sequence
  Cyclic GFR-binding peptide
  MOD_RES (2), (2): Xaa is C or S
QXRPTQVQLRSVKVAKVEIVRKKPIFKEVQVT

SEQ ID NO: 58032 - protein, 37 aa, Artificial Sequence; identical to SEQ ID NO: 15143
  Cyclic GFR-binding peptide
  MOD_RES (2), (2): Xaa is C or S

SEQ ID NO: 58033 - protein, 36 aa, Artificial Sequence; identical to SEQ ID NO: 15144
  Cyclic GFR-binding peptide

SEQ ID NO: 58034 - protein, 44 aa, Artificial Sequence; identical to SEQ ID NO: 15145
  Cyclic GFR-binding peptide
  MOD_RES (4), (41), (43): Xaa is C or S

SEQ ID NO: 58035 - protein, 32 aa, Artificial Sequence
  Cyclic GFR-binding peptide
  MOD_RES (29), (31): Xaa is C or S
RPVQMRKIRIKPHQGQHKKATVFLQHNKXEXR

SEQ ID NO: 58036 - protein, 28 aa, Artificial Sequence
  Cyclic GFR-binding peptide
GQRSVKMAKVRIKPHQGQHKEVQVLEEH

SEQ ID NO: 58037 - protein, 36 aa, Artificial Sequence; identical to SEQ ID NO: 15146
  Cyclic GFR-binding peptide
  MOD_RES (4), (4): Xaa is C or S

SEQ ID NO: 58038 - protein, 33 aa, Artificial Sequence
  Cyclic GFR-binding peptide
RPTQVQLSNITVQIMEIVRKKPIFLGEMSTLED

SEQ ID NO: 58039 - protein, 32 aa, Artificial Sequence
  Cyclic GFR-binding peptide
PTGQSNITMQIMRIKPHQGQHIGEMSLEEHSQ

SEQ ID NO: 58040 - protein, 30 aa, Artificial Sequence
  Cyclic GFR-binding peptide
  MOD_RES (30), (30): Xaa is C or S
RPVQVRKIEYVRKKPKLKKATVRLEEHLEX

SEQ ID NO: 58041 - protein, 34 aa, Artificial Sequence
  Cyclic GFR-binding peptide
  MOD_RES (33), (33): Xaa is C or S
VHHSNITVQIMEYVRKKPKLIGEMSRLEEHLEXA

SEQ ID NO: 58042 - protein, 40 aa, Artificial Sequence; identical to SEQ ID NO: 15147
  Cyclic GFR-binding peptide
  MOD_RES (3), (37), (39): Xaa is C or S

SEQ ID NO: 58043 - protein, 34 aa, Artificial Sequence
  Cyclic GFR-binding peptide
  MOD_RES (3), (3): Xaa is C or S
LEXVPTGQSNITMQIMRIKPHQGQHIGEMSLEEH

SEQ ID NO: 58044 - protein, 25 aa, Artificial Sequence
  Cyclic GFR-binding peptide
HSNITVQIMEYVRKKPKLLGEMSRL

SEQ ID NO: 58045 - protein, 24 aa, Artificial Sequence
  Cyclic GFR-binding peptide
SNITMQIMRIKPHQGQHLGEMSFL

SEQ ID NO: 58046 - protein, 37 aa, Artificial Sequence; identical to SEQ ID NO: 15149
  Cyclic GFR-binding peptide
  MOD_RES (2), (2): Xaa is C or S

SEQ ID NO: 58047 - protein, 37 aa, Artificial Sequence; identical to SEQ ID NO: 15150
  Cyclic GFR-binding peptide
  MOD_RES (36), (36): Xaa is C or S

SEQ ID NO: 58048 - protein, 27 aa, Artificial Sequence
  Cyclic GFR-binding peptide
VPTGQRPVQMRKIRIKPHQGQHKKATV

SEQ ID NO: 58049 - protein, 44 aa, Artificial Sequence; identical to SEQ ID NO: 15152
  Cyclic GFR-binding peptide
  MOD_RES (7), (41), (43): Xaa is C or S

SEQ ID NO: 58050 - protein, 36 aa, Artificial Sequence; identical to SEQ ID NO: 15154
  Cyclic GFR-binding peptide
  MOD_RES (1), (1): Xaa is C or S

SEQ ID NO: 58051 - protein, 35 aa, Artificial Sequence; identical to SEQ ID NO: 15155
  Cyclic GFR-binding peptide
  MOD_RES (1), (1): Xaa is C or S

SEQ ID NO: 58052 - protein, 28 aa, Artificial Sequence
  Cyclic GFR-binding peptide
QLSNITVQIMEIVRKKPIFIGEMSTLED

SEQ ID NO: 58053 - protein, 36 aa, Artificial Sequence
  Cyclic GFR-binding peptide
  MOD_RES (5), (5): Xaa is C or S
EGLEXVPTEERPVQMRKIRIKPHQGQHKKATVFLQH

SEQ ID NO: 58054 - protein, 25 aa, Artificial Sequence
  Cyclic GFR-binding peptide
TGQRPVQMRKIRIKPHQGQHKKATV

SEQ ID NO: 58055 - protein, 35 aa, Artificial Sequence
  Cyclic GFR-binding peptide
  MOD_RES (32), (34): Xaa is C or S
TEESNITMQIMRIKPHQGQHLGEMSFLQHNKXEXR

SEQ ID NO: 58056 - protein, 37 aa, Artificial Sequence; identical to SEQ ID NO: 15157
  Cyclic GFR-binding peptide
  MOD_RES (37), (37): Xaa is C or S

SEQ ID NO: 58057 - protein, 27 aa, Artificial Sequence
  Cyclic GFR-binding peptide
VPTEERPVQMRKIRIKPHQGQHKKATV

SEQ ID NO: 58058 - protein, 43 aa, Artificial Sequence; identical to SEQ ID NO: 15158
  Cyclic GFR-binding peptide
  MOD_RES (3), (40), (42): Xaa is C or S

SEQ ID NO: 58059 - protein, 34 aa, Artificial Sequence; identical to SEQ ID NO: 15159
  Cyclic GFR-binding peptide

SEQ ID NO: 58060 - protein, 37 aa, Artificial Sequence; identical to SEQ ID NO: 15160
  Cyclic GFR-binding peptide
  MOD_RES (4), (4): Xaa is C or S

SEQ ID NO: 58061 - protein, 34 aa, Artificial Sequence
  Cyclic GFR-binding peptide
  MOD_RES (33), (33): Xaa is C or S
PTEERPVQMRKIRIKPHQGQHKKATVFLQHNKXE

SEQ ID NO: 58062 - protein, 37 aa, Artificial Sequence; identical to SEQ ID NO: 15161
  Cyclic GFR-binding peptide
  MOD_RES (3), (37): Xaa is C or S

SEQ ID NO: 58063 - protein, 25 aa, Artificial Sequence
  Cyclic GFR-binding peptide
LSNITVQIMEIVRKKPIFIGEMSTL

SEQ ID NO: 58064 - protein, 37 aa, Artificial Sequence; identical to SEQ ID NO: 15162
  Cyclic GFR-binding peptide
  MOD_RES (34), (36): Xaa is C or S

SEQ ID NO: 58065 - protein, 42 aa, Artificial Sequence; identical to SEQ ID NO: 15164
  Cyclic GFR-binding peptide
  MOD_RES (6), (40), (42): Xaa is C or S

SEQ ID NO: 58066 - protein, 39 aa, Artificial Sequence; identical to SEQ ID NO: 15165
  Cyclic GFR-binding peptide
  MOD_RES (37), (39): Xaa is C or S

SEQ ID NO: 58067 - protein, 32 aa, Artificial Sequence
  Cyclic GFR-binding peptide
VHHRPVQVRKIEYVRKKPKLKKATVRLEEHLE

SEQ ID NO: 58068 - protein, 36 aa, Artificial Sequence
  Cyclic GFR-binding peptide
  MOD_RES (6), (6): Xaa is C or S
DEGLEXVPTGQRSVKMAKVRIKPHQGQHKEVQVLEE

SEQ ID NO: 58069 - protein, 26 aa, Artificial Sequence
  Cyclic GFR-binding peptide
QRSVKMAKVRIKPHQGQHKEVQVLEE

SEQ ID NO: 58070 - protein, 35 aa, Artificial Sequence; identical to SEQ ID NO: 15166
  Cyclic GFR-binding peptide
  MOD_RES (1), (1): Xaa is C or S

SEQ ID NO: 58071 - protein, 36 aa, Artificial Sequence; identical to SEQ ID NO: 15167
  Cyclic GFR-binding peptide
  MOD_RES (4), (4): Xaa is C or S

SEQ ID NO: 58072 - protein, 36 aa, Artificial Sequence
  Cyclic GFR-binding peptide
  MOD_RES (3), (3): Xaa is C or S
VKXQPSRVHHSNITVQIMEYVRKKPKLLGEMSRLEE

SEQ ID NO: 58073 - protein, 38 aa, Artificial Sequence; identical to SEQ ID NO: 15169
  Cyclic GFR-binding peptide
  MOD_RES (1), (35), (37): Xaa is C or S

SEQ ID NO: 58074 - protein, 34 aa, Artificial Sequence
  Cyclic GFR-binding peptide
  MOD_RES (2), (2): Xaa is C or S
KXQPSRVHHRPVQVRKIEYVRKKPKLKKATVRLE

SEQ ID NO: 58075 - protein, 43 aa, Artificial Sequence; identical to SEQ ID NO: 15171
  Cyclic GFR-binding peptide
  MOD_RES (3), (40), (42): Xaa is C or S

SEQ ID NO: 58076 - protein, 29 aa, Artificial Sequence
  Cyclic GFR-binding peptide
VPTEERSVKMAKVRIKPHQGQHKEVQVFL

SEQ ID NO: 58077 - protein, 30 aa, Artificial Sequence
  Cyclic GFR-binding peptide
PTGQRSVKMAKVRIKPHQGQHKEVQVLEEH

SEQ ID NO: 58078 - protein, 38 aa, Artificial Sequence; identical to SEQ ID NO: 15172
  Cyclic GFR-binding peptide
  MOD_RES (3), (3): Xaa is C or S

SEQ ID NO: 58079 - protein, 35 aa, Artificial Sequence; identical to SEQ ID NO: 15173
  Cyclic GFR-binding peptide

SEQ ID NO: 58080 - protein, 33 aa, Artificial Sequence
  Cyclic GFR-binding peptide
  MOD_RES (5), (5): Xaa is C or S
EGLEXVPTGQRPVQMRKIRIKPHQGQHKKATVL

SEQ ID NO: 58081 - protein, 42 aa, Artificial Sequence; identical to SEQ ID NO: 15174
  Cyclic GFR-binding peptide
  MOD_RES (4), (41): Xaa is C or S

SEQ ID NO: 58082 - protein, 22 aa, Artificial Sequence
  Cyclic GFR-binding peptide
RPVQMRKIRIKPHQGQHKKATV

SEQ ID NO: 58083 - protein, 34 aa, Artificial Sequence
  Cyclic GFR-binding peptide
  MOD_RES (4), (4): Xaa is C or S
NVQXRPTQVQLSNITVQIMEIVRKKPIFLGEMST

SEQ ID NO: 58084 - protein, 39 aa, Artificial Sequence; identical to SEQ ID NO: 15176
  Cyclic GFR-binding peptide
  MOD_RES (1), (38): Xaa is C or S

SEQ ID NO: 58085 - protein, 27 aa, Artificial Sequence
  Cyclic GFR-binding peptide
RVHHSNITVQIMEYVRKKPKLIGEMSR

SEQ ID NO: 58086 - protein, 25 aa, Artificial Sequence
  Cyclic GFR-binding peptide
HSNITVQIMEYVRKKPKLIGEMSRL

SEQ ID NO: 58087 - protein, 41 aa, Artificial Sequence; identical to SEQ ID NO: 15178
  Cyclic GFR-binding peptide
  MOD_RES (1), (38), (40): Xaa is C or S

SEQ ID NO: 58088 - protein, 39 aa, Artificial Sequence; identical to SEQ ID NO: 15180
  Cyclic GFR-binding peptide
  MOD_RES (1), (38): Xaa is C or S

SEQ ID NO: 58089 - protein, 42 aa, Artificial Sequence; identical to SEQ ID NO: 15181
  Cyclic GFR-binding peptide
  MOD_RES (4), (41): Xaa is C or S

SEQ ID NO: 58090 - protein, 33 aa, Artificial Sequence
  Cyclic GFR-binding peptide
QVQLSNITVQIMEIVRKKPIFIGEMSTLEDHLA

SEQ ID NO: 58091 - protein, 31 aa, Artificial Sequence
  Cyclic GFR-binding peptide
  MOD_RES (31), (31): Xaa is C or S
GQSNITMQIMRIKPHQGQHIGEMSLEEHSQX

SEQ ID NO: 58092 - protein, 30 aa, Artificial Sequence
  Cyclic GFR-binding peptide
  MOD_RES (1), (1): Xaa is C or S
XVPTGQRPVQMRKIRIKPHQGQHKKATVLE

SEQ ID NO: 58093 - protein, 33 aa, Artificial Sequence
  Cyclic GFR-binding peptide
  MOD_RES (32), (32): Xaa is C or S
TEERPVQMRKIRIKPHQGQHKKATVFLQHNKXE

SEQ ID NO: 58094 - protein, 37 aa, Artificial Sequence; identical to SEQ ID NO: 15183
  Cyclic GFR-binding peptide
  MOD_RES (37), (37): Xaa is C or S

SEQ ID NO: 58095 - protein, 36 aa, Artificial Sequence
  Cyclic GFR-binding peptide
  MOD_RES (5), (5): Xaa is C or S
SSVKXQPSRVHHSNITVQIMEYVRKKPKLIGEMSRL

SEQ ID NO: 58096 - protein, 32 aa, Artificial Sequence
  Cyclic GFR-binding peptide
  MOD_RES (31), (31): Xaa is C or S
LRSVKVAKVEIVRKKPIFKEVQVTLEDHLAXK

SEQ ID NO: 58097 - protein, 39 aa, Artificial Sequence; identical to SEQ ID NO: 15185
  Cyclic GFR-binding peptide
  MOD_RES (2), (36), (38): Xaa is C or S

SEQ ID NO: 58098 - protein, 31 aa, Artificial Sequence
  Cyclic GFR-binding peptide
PTQVQLSNITVQIMEIVRKKPIFIGEMSTLE

SEQ ID NO: 58099 - protein, 41 aa, Artificial Sequence; identical to SEQ ID NO: 15186
  Cyclic GFR-binding peptide
  MOD_RES (2), (39), (41): Xaa is C or S

SEQ ID NO: 58100 - protein, 35 aa, Artificial Sequence
  Cyclic GFR-binding peptide
  MOD_RES (5), (5): Xaa is C or S
SSVKXQPSRVHHSNITVQIMEYVRKKPKLIGEMSR

SEQ ID NO: 58101 - protein, 34 aa, Artificial Sequence
  Cyclic GFR-binding peptide
  MOD_RES (31), (33): Xaa is C or S
HSNITVQIMEYVRKKPKLLGEMSRLEEHLEXAXA

SEQ ID NO: 58102 - protein, 31 aa, Artificial Sequence
  Cyclic GFR-binding peptide
QPSRVHHRPVQVRKIEYVRKKPKLKKATVRL

SEQ ID NO: 58103 - protein, 33 aa, Artificial Sequence
  Cyclic GFR-binding peptide
  MOD_RES (30), (32): Xaa is C or S
ESNITMQIMRIKPHQGQHLGEMSFLQHNKXEXR

SEQ ID NO: 58104 - protein, 27 aa, Artificial Sequence
  Cyclic GFR-binding peptide
ESNITMQIMRIKPHQGQHLGEMSFLQH

SEQ ID NO: 58105 - protein, 32 aa, Artificial Sequence
  Cyclic GFR-binding peptide
RPTQVQLRSVKVAKVEIVRKKPIFKEVQVTLE

SEQ ID NO: 58106 - protein, 32 aa, Artificial Sequence
  Cyclic GFR-binding peptide
  MOD_RES (3), (3): Xaa is C or S
LEXVPTGQSNITMQIMRIKPHQGQHIGEMSLE

SEQ ID NO: 58107 - protein, 28 aa, Artificial Sequence
  Cyclic GFR-binding peptide
VPTEESNITMQIMRIKPHQGQHLGEMSF

SEQ ID NO: 58108 - protein, 31 aa, Artificial Sequence
  Cyclic GFR-binding peptide
QPSRVHHSNITVQIMEYVRKKPKLIGEMSRL

SEQ ID NO: 58109 - protein, 29 aa, Artificial Sequence
  Cyclic GFR-binding peptide
RPVQVRKIEYVRKKPKLKKATVRLEEHLE

SEQ ID NO: 58110 - protein, 35 aa, Artificial Sequence; identical to SEQ ID NO: 15195
  Cyclic GFR-binding peptide

SEQ ID NO: 58111 - protein, 34 aa, Artificial Sequence
  Cyclic GFR-binding peptide
  MOD_RES (7), (7): Xaa is C or S
NDEGLEXVPTEERSVKMAKVRIKPHQGQHKEVQV

SEQ ID NO: 58112 - protein, 29 aa, Artificial Sequence
  Cyclic GFR-binding peptide
SNITVQIMEYVRKKPKLLGEMSRLEEHLE

SEQ ID NO: 58113 - protein, 22 aa, Artificial Sequence
  Cyclic GFR-binding peptide
SNITVQIMEIVRKKPIFLGEMS

SEQ ID NO: 58114 - protein, 41 aa, Artificial Sequence; identical to SEQ ID NO: 15200
  Cyclic GFR-binding peptide
  MOD_RES (5), (39), (41): Xaa is C or S

SEQ ID NO: 58115 - protein, 25 aa, Artificial Sequence
  Cyclic GFR-binding peptide
ERSVKMAKVRIKPHQGQHKEVQVFL

SEQ ID NO: 58116 - protein, 24 aa, Artificial Sequence
  Cyclic GFR-binding peptide
GQRSVKMAKVRIKPHQGQHKEVQV

SEQ ID NO: 58117 - protein, 32 aa, Artificial Sequence; identical to SEQ ID NO: 15202
  Cyclic GFR-binding peptide

SEQ ID NO: 58118 - protein, 36 aa, Artificial Sequence; identical to SEQ ID NO: 15203
  Cyclic GFR-binding peptide
  MOD_RES (3), (3): Xaa is C or S

SEQ ID NO: 58119 - protein, 36 aa, Artificial Sequence
  Cyclic GFR-binding peptide
  MOD_RES (6), (6): Xaa is C or S
DEGLEXVPTEERSVKMAKVRIKPHQGQHKEVQVFLQ

SEQ ID NO: 58120 - protein, 35 aa, Artificial Sequence
  Cyclic GFR-binding peptide
  MOD_RES (2), (2): Xaa is C or S
QXRPTQVQLSNITVQIMEIVRKKPIFLGEMSTLED

SEQ ID NO: 58121 - protein, 32 aa, Artificial Sequence
  Cyclic GFR-binding peptide
  MOD_RES (3), (3): Xaa is C or S
VKXQPSRVHHSNITVQIMEYVRKKPKLLGEMS

SEQ ID NO: 58122 - protein, 31 aa, Artificial Sequence
  Cyclic GFR-binding peptide
RPTQVQLSNITVQIMEIVRKKPIFLGEMSTL

SEQ ID NO: 58123 - protein, 35 aa, Artificial Sequence; identical to SEQ ID NO: 15204
  Cyclic GFR-binding peptide
  MOD_RES (2), (2): Xaa is C or S

SEQ ID NO: 58124 - protein, 29 aa, Artificial Sequence
  Cyclic GFR-binding peptide
  MOD_RES (29), (29): Xaa is C or S
RSVKMAKVRIKPHQGQHKEVQVFLQHNKX

SEQ ID NO: 58125 - protein, 31 aa, Artificial Sequence
  Cyclic GFR-binding peptide
  MOD_RES (2), (2): Xaa is C or S
EXVPTGQRPVQMRKIRIKPHQGQHKKATVLE

SEQ ID NO: 58126 - protein, 36 aa, Artificial Sequence
  Cyclic GFR-binding peptide
  MOD_RES (33), (35): Xaa is C or S
VQLRSVKVAKVEIVRKKPIFKEVQVTLEDHLAXKXE

SEQ ID NO: 58127 - protein, 28 aa, Artificial Sequence
  Cyclic GFR-binding peptide
HSNITVQIMEYVRKKPKLIGEMSRLEEH

SEQ ID NO: 58128 - protein, 43 aa, Artificial Sequence; identical to SEQ ID NO: 15208
  Cyclic GFR-binding peptide
  MOD_RES (6), (40), (42): Xaa is C or S

SEQ ID NO: 58129 - protein, 33 aa, Artificial Sequence; identical to SEQ ID NO: 15209
  Cyclic GFR-binding peptide

SEQ ID NO: 58130 - protein, 35 aa, Artificial Sequence
  Cyclic GFR-binding peptide
  MOD_RES (5), (5): Xaa is C or S
EGLEXVPTEERPVQMRKIRIKPHQGQHKKATVFLQ

SEQ ID NO: 58131 - protein, 42 aa, Artificial Sequence; identical to SEQ ID NO: 15210
  Cyclic GFR-binding peptide
  MOD_RES (5), (42): Xaa is C or S

SEQ ID NO: 58132 - protein, 36 aa, Artificial Sequence
  Cyclic GFR-binding peptide
  MOD_RES (3), (3): Xaa is C or S
VKXQPSRVHHSNITVQIMEYVRKKPKLIGEMSRLEE

SEQ ID NO: 58133 - protein, 40 aa, Artificial Sequence; identical to SEQ ID NO: 15211
  Cyclic GFR-binding peptide
  MOD_RES (5), (5): Xaa is C or S

SEQ ID NO: 58134 - protein, 35 aa, Artificial Sequence
  Cyclic GFR-binding peptide
  MOD_RES (32), (34): Xaa is C or S
HHSNITVQIMEYVRKKPKLIGEMSRLEEHLEXAXA

SEQ ID NO: 58135 - protein, 27 aa, Artificial Sequence
  Cyclic GFR-binding peptide
RVHHRPVQVRKIEYVRKKPKLKKATVR

SEQ ID NO: 58136 - protein, 36 aa, Artificial Sequence
  Cyclic GFR-binding peptide
  MOD_RES (34), (36): Xaa is C or S
QVQLSNITVQIMEIVRKKPIFIGEMSTLEDHLAXKX

SEQ ID NO: 58137 - protein, 35 aa, Artificial Sequence; identical to SEQ ID NO: 15213
  Cyclic GFR-binding peptide

SEQ ID NO: 58138 - protein, 36 aa, Artificial Sequence; identical to SEQ ID NO: 15214
  Cyclic GFR-binding peptide
  MOD_RES (2), (2): Xaa is C or S

SEQ ID NO: 58139 - protein, 30 aa, Artificial Sequence
  Cyclic GFR-binding peptide
TGQRSVKMAKVRIKPHQGQHKEVQVLEEHS

SEQ ID NO: 58140 - protein, 34 aa, Artificial Sequence
  Cyclic GFR-binding peptide
  MOD_RES (31), (33): Xaa is C or S
EESNITMQIMRIKPHQGQHLGEMSFLQHNKXEXR

SEQ ID NO: 58141 - protein, 30 aa, Artificial Sequence
  Cyclic GFR-binding peptide
  MOD_RES (1), (1): Xaa is C or S
XVPTEESNITMQIMRIKPHQGQHLGEMSFL

SEQ ID NO: 58142 - protein, 41 aa, Artificial Sequence; identical to SEQ ID NO: 15216
  Cyclic GFR-binding peptide
  MOD_RES (4), (41): Xaa is C or S

SEQ ID NO: 58143 - protein, 35 aa, Artificial Sequence; identical to SEQ ID NO: 15218
  Cyclic GFR-binding peptide

SEQ ID NO: 58144 - protein, 26 aa, Artificial Sequence
  Cyclic GFR-binding peptide
PTEERSVKMAKVRIKPHQGQHKEVQV

SEQ ID NO: 58145 - protein, 39 aa, Artificial Sequence; identical to SEQ ID NO: 15220
  Cyclic GFR-binding peptide
  MOD_RES (3), (37), (39): Xaa is C or S

SEQ ID NO: 58146 - protein, 33 aa, Artificial Sequence; identical to SEQ ID NO: 15221
  Cyclic GFR-binding peptide

SEQ ID NO: 58147 - protein, 37 aa, Artificial Sequence; identical to SEQ ID NO: 15222
  Cyclic GFR-binding peptide
  MOD_RES (35), (37): Xaa is C or S

SEQ ID NO: 58148 - protein, 31 aa, Artificial Sequence
  Cyclic GFR-binding peptide
  MOD_RES (30), (30): Xaa is C or S
ESNITMQIMRIKPHQGQHLGEMSFLQHNKXE

SEQ ID NO: 58149 - protein, 29 aa, Artificial Sequence
  Cyclic GFR-binding peptide
PSRVHHRPVQVRKIEYVRKKPKLKKATVR

SEQ ID NO: 58150 - protein, 35 aa, Artificial Sequence
  Cyclic GFR-binding peptide
  MOD_RES (2), (2): Xaa is C or S
QXRPTQVQLSNITVQIMEIVRKKPIFIGEMSTLED

SEQ ID NO: 58151 - protein, 34 aa, Artificial Sequence
  Cyclic GFR-binding peptide
  MOD_RES (6), (6): Xaa is C or S
DEGLEXVPTGQRPVQMRKIRIKPHQGQHKKATVL

SEQ ID NO: 58152 - protein, 38 aa, Artificial Sequence; identical to SEQ ID NO: 15226
  Cyclic GFR-binding peptide
  MOD_RES (3), (37): Xaa is C or S

SEQ ID NO: 58153 - protein, 39 aa, Artificial Sequence; identical to SEQ ID NO: 15225
  Cyclic GFR-binding peptide
  MOD_RES (2), (39): Xaa is C or S

SEQ ID NO: 58154 - protein, 22 aa, Artificial Sequence
  Cyclic GFR-binding peptide
SNITVQIMEYVRKKPKLIGEMS

SEQ ID NO: 58155 - protein, 37 aa, Artificial Sequence; identical to SEQ ID NO: 15227
  Cyclic GFR-binding peptide
  MOD_RES (35), (37): Xaa is C or S

SEQ ID NO: 58156 - protein, 33 aa, Artificial Sequence
  Cyclic GFR-binding peptide
  MOD_RES (5), (5): Xaa is C or S
EGLEXVPTEERSVKMAKVRIKPHQGQHKEVQVF

SEQ ID NO: 58157 - protein, 43 aa, Artificial Sequence; identical to SEQ ID NO: 15228
  Cyclic GFR-binding peptide
  MOD_RES (6), (40), (42): Xaa is C or S

SEQ ID NO: 58158 - protein, 37 aa, Artificial Sequence; identical to SEQ ID NO: 15229
  Cyclic GFR-binding peptide
  MOD_RES (1), (1): Xaa is C or S

SEQ ID NO: 58159 - protein, 33 aa, Artificial Sequence
  Cyclic GFR-binding peptide
  MOD_RES (6), (6): Xaa is C or S
DEGLEXVPTEERPVQMRKIRIKPHQGQHKKATV

SEQ ID NO: 58160 - protein, 35 aa, Artificial Sequence
  Cyclic GFR-binding peptide
  MOD_RES (34), (34): Xaa is C or S
QVQLSNITVQIMEIVRKKPIFLGEMSTLEDHLAXK

SEQ ID NO: 58161 - protein, 35 aa, Artificial Sequence
  Cyclic GFR-binding peptide
  MOD_RES (6), (6): Xaa is C or S
DEGLEXVPTGQSNITMQIMRIKPHQGQHIGEMSLE

SEQ ID NO: 58162 - protein, 30 aa, Artificial Sequence
  Cyclic GFR-binding peptide
RPTQVQLRSVKVAKVEIVRKKPIFKEVQVT

SEQ ID NO: 58163 - protein, 38 aa, Artificial Sequence; identical to SEQ ID NO: 15233
  Cyclic GFR-binding peptide
  MOD_RES (1), (38): Xaa is C or S

SEQ ID NO: 58164 - protein, 31 aa, Artificial Sequence
  Cyclic GFR-binding peptide
TGQRPVQMRKIRIKPHQGQHKKATVLEEHSQ

SEQ ID NO: 58165 - protein, 29 aa, Artificial Sequence
  Cyclic GFR-binding peptide
  MOD_RES (1), (1): Xaa is C or S
XVPTEERPVQMRKIRIKPHQGQHKKATVF

SEQ ID NO: 58166 - protein, 43 aa, Artificial Sequence; identical to SEQ ID NO: 15235
  Cyclic GFR-binding peptide
  MOD_RES (5), (42): Xaa is C or S

SEQ ID NO: 58167 - protein, 25 aa, Artificial Sequence
  Cyclic GFR-binding peptide
VQLSNITVQIMEIVRKKPIFIGEMS

SEQ ID NO: 58168 - protein, 38 aa, Artificial Sequence; identical to SEQ ID NO: 15236
  Cyclic GFR-binding peptide
  MOD_RES (3), (3): Xaa is C or S

SEQ ID NO: 58169 - protein, 34 aa, Artificial Sequence; identical to SEQ ID NO: 15238
  Cyclic GFR-binding peptide

SEQ ID NO: 58170 - protein, 26 aa, Artificial Sequence
  Cyclic GFR-binding peptide
QLSNITVQIMEIVRKKPIFIGEMSTL

SEQ ID NO: 58171 - protein, 26 aa, Artificial Sequence
  Cyclic GFR-binding peptide
RVHHRPVQVRKIEYVRKKPKLKKATV

SEQ ID NO: 58172 - protein, 28 aa, Artificial Sequence
  Cyclic GFR-binding peptide
  MOD_RES (1), (1): Xaa is C or S
XVPTEERPVQMRKIRIKPHQGQHKKATV

SEQ ID NO: 58173 - protein, 24 aa, Artificial Sequence
  Cyclic GFR-binding peptide
RSVKMAKVRIKPHQGQHKEVQVLE

SEQ ID NO: 58174 - protein, 39 aa, Artificial Sequence; identical to SEQ ID NO: 15245
  Cyclic GFR-binding peptide
  MOD_RES (7), (7): Xaa is C or S

SEQ ID NO: 58175 - protein, 30 aa, Artificial Sequence
  Cyclic GFR-binding peptide
  MOD_RES (1), (1): Xaa is C or S
XRPTQVQLSNITVQIMEIVRKKPIFLGEMS

SEQ ID NO: 58176 - protein, 40 aa, Artificial Sequence; identical to SEQ ID NO: 15248
  Cyclic GFR-binding peptide
  MOD_RES (5), (39): Xaa is C or S

SEQ ID NO: 58177 - protein, 33 aa, Artificial Sequence
  Cyclic GFR-binding peptide
  MOD_RES (2), (2): Xaa is C or S
EXVPTGQRSVKMAKVRIKPHQGQHKEVQVLEEH

SEQ ID NO: 58178 - protein, 39 aa, Artificial Sequence; identical to SEQ ID NO: 15249
  Cyclic GFR-binding peptide
  MOD_RES (3), (37), (39): Xaa is C or S

SEQ ID NO: 58179 - protein, 34 aa, Artificial Sequence
  Cyclic GFR-binding peptide
  MOD_RES (33), (33): Xaa is C or S
PTGQRPVQMRKIRIKPHQGQHKKATVLEEHSQXE

SEQ ID NO: 58180 - protein, 28 aa, Artificial Sequence
  Cyclic GFR-binding peptide
ESNITMQIMRIKPHQGQHLGEMSFLQHN

SEQ ID NO: 58181 - protein, 30 aa, Artificial Sequence
  Cyclic GFR-binding peptide
VQLSNITVQIMEIVRKKPIFLGEMSTLEDH

SEQ ID NO: 58182 - protein, 34 aa, Artificial Sequence
  Cyclic GFR-binding peptide
  MOD_RES (31), (33): Xaa is C or S
LRSVKVAKVEIVRKKPIFKEVQVTLEDHLAXKXE

SEQ ID NO: 58183 - protein, 31 aa, Artificial Sequence
  Cyclic GFR-binding peptide
  MOD_RES (2), (2): Xaa is C or S
KXQPSRVHHRPVQVRKIEYVRKKPKLKKATV

SEQ ID NO: 58184 - protein, 24 aa, Artificial Sequence
  Cyclic GFR-binding peptide
GQSNITMQIMRIKPHQGQHIGEMS

SEQ ID NO: 58185 - protein, 27 aa, Artificial Sequence
  Cyclic GFR-binding peptide
QVQLSNITVQIMEIVRKKPIFLGEMST

SEQ ID NO: 58186 - protein, 40 aa, Artificial Sequence; identical to SEQ ID NO: 15256
  Cyclic GFR-binding peptide
  MOD_RES (5), (39): Xaa is C or S

SEQ ID NO: 58187 - protein, 29 aa, Artificial Sequence
  Cyclic GFR-binding peptide
EERPVQMRKIRIKPHQGQHKKATVFLQHN

SEQ ID NO: 58188 - protein, 39 aa, Artificial Sequence; identical to SEQ ID NO: 15258
  Cyclic GFR-binding peptide
  MOD_RES (3), (37), (39): Xaa is C or S

SEQ ID NO: 58189 - protein, 33 aa, Artificial Sequence
  Cyclic GFR-binding peptide
  MOD_RES (3), (3): Xaa is C or S
LEXVPTGQSNITMQIMRIKPHQGQHIGEMSLEE

SEQ ID NO: 58190 - protein, 38 aa, Artificial Sequence; identical to SEQ ID NO: 15259
  Cyclic GFR-binding peptide
  MOD_RES (6), (6): Xaa is C or S

SEQ ID NO: 58191 - protein, 33 aa, Artificial Sequence
  Cyclic GFR-binding peptide
  MOD_RES (33), (33): Xaa is C or S
PTEERPVQMRKIRIKPHQGQHKKATVFLQHNKX

SEQ ID NO: 58192 - protein, 41 aa, Artificial Sequence; identical to SEQ ID NO: 15262
  Cyclic GFR-binding peptide
  MOD_RES (6), (40): Xaa is C or S

SEQ ID NO: 58193 - protein, 23 aa, Artificial Sequence
  Cyclic GFR-binding peptide
SNITVQIMEYVRKKPKLLGEMSR

SEQ ID NO: 58194 - protein, 24 aa, Artificial Sequence
  Cyclic GFR-binding peptide
QLSNITVQIMEIVRKKPIFLGEMS

SEQ ID NO: 58195 - protein, 26 aa, Artificial Sequence
  Cyclic GFR-binding peptide
QSNITMQIMRIKPHQGQHIGEMSLEE

SEQ ID NO: 58196 - protein, 36 aa, Artificial Sequence; identical to SEQ ID NO: 15265
  Cyclic GFR-binding peptide
  MOD_RES (34), (36): Xaa is C or S

SEQ ID NO: 58197 - protein, 34 aa, Artificial Sequence
  Cyclic GFR-binding peptide
  MOD_RES (3), (3): Xaa is C or S
LEXVPTEERSVKMAKVRIKPHQGQHKEVQVFLQH

SEQ ID NO: 58198 - protein, 25 aa, Artificial Sequence
  Cyclic GFR-binding peptide
TEESNITMQIMRIKPHQGQHLGEMS

SEQ ID NO: 58199 - protein, 34 aa, Artificial Sequence
  Cyclic GFR-binding peptide
  MOD_RES (32), (34): Xaa is C or S
TGQRSVKMAKVRIKPHQGQHKEVQVLEEHSQXEX

SEQ ID NO: 58200 - protein, 31 aa, Artificial Sequence
  Cyclic GFR-binding peptide
PSRVHHSNITVQIMEYVRKKPKLLGEMSRLE

SEQ ID NO: 58201 - protein, 27 aa, Artificial Sequence
  Cyclic GFR-binding peptide
QLSNITVQIMEIVRKKPIFLGEMSTLE

SEQ ID NO: 58202 - protein, 27 aa, Artificial Sequence
  Cyclic GFR-binding peptide
QLSNITVQIMEIVRKKPIFIGEMSTLE

SEQ ID NO: 58203 - protein, 37 aa, Artificial Sequence
  Cyclic GFR-binding peptide
  MOD_RES (6), (6): Xaa is C or S
DEGLEXVPTGQRSVKMAKVRIKPHQGQHKEVQVLEEH

SEQ ID NO: 58204 - protein, 37 aa, Artificial Sequence; identical to SEQ ID NO: 15270
  Cyclic GFR-binding peptide
  MOD_RES (2), (2): Xaa is C or S

SEQ ID NO: 58205 - protein, 31 aa, Artificial Sequence
  Cyclic GFR-binding peptide
  MOD_RES (31), (31): Xaa is C or S
HSNITVQIMEYVRKKPKLIGEMSRLEEHLEX

SEQ ID NO: 58206 - protein, 30 aa, Artificial Sequence
  Cyclic GFR-binding peptide
  MOD_RES (1), (1): Xaa is C or S
XVPTEERPVQMRKIRIKPHQGQHKKATVFL

SEQ ID NO: 58207 - protein, 35 aa, Artificial Sequence
  Cyclic GFR-binding peptide
  MOD_RES (5), (5): Xaa is C or S
EGLEXVPTEESNITMQIMRIKPHQGQHLGEMSFLQ

SEQ ID NO: 58208 - protein, 38 aa, Artificial Sequence; identical to SEQ ID NO: 15273
  Cyclic GFR-binding peptide
  MOD_RES (2), (2): Xaa is C or S

SEQ ID NO: 58209 - protein, 42 aa, Artificial Sequence; identical to SEQ ID NO: 15274
  Cyclic GFR-binding peptide
  MOD_RES (4), (41): Xaa is C or S

SEQ ID NO: 58210 - protein, 25 aa, Artificial Sequence
  Cyclic GFR-binding peptide
QLRSVKVAKVEIVRKKPIFKEVQVT

SEQ ID NO: 58211 - protein, 40 aa, Artificial Sequence; identical to SEQ ID NO: 15275
  Cyclic GFR-binding peptide
  MOD_RES (5), (39): Xaa is C or S

SEQ ID NO: 58212 - protein, 27 aa, Artificial Sequence
  Cyclic GFR-binding peptide
VQLSNITVQIMEIVRKKPIFIGEMSTL

SEQ ID NO: 58213 - protein, 36 aa, Artificial Sequence; identical to SEQ ID NO: 15276
  Cyclic GFR-binding peptide
  MOD_RES (36), (36): Xaa is C or S

SEQ ID NO: 58214 - protein, 42 aa, Artificial Sequence; identical to SEQ ID NO: 15277
  Cyclic GFR-binding peptide
  MOD_RES (2), (39), (41): Xaa is C or S

SEQ ID NO: 58215 - protein, 34 aa, Artificial Sequence; identical to SEQ ID NO: 15279
  Cyclic GFR-binding peptide
  MOD_RES (1), (1): Xaa is C or S

SEQ ID NO: 58216 - protein, 35 aa, Artificial Sequence
  Cyclic GFR-binding peptide
  MOD_RES (5), (5): Xaa is C or S
SSVKXQPSRVHHSNITVQIMEYVRKKPKLLGEMSR

SEQ ID NO: 58217 - protein, 44 aa, Artificial Sequence; identical to SEQ ID NO: 15284
  Cyclic GFR-binding peptide
  MOD_RES (5), (42), (44): Xaa is C or S

SEQ ID NO: 58218 - protein, 31 aa, Artificial Sequence
  Cyclic GFR-binding peptide
QVQLSNITVQIMEIVRKKPIFLGEMSTLEDH

SEQ ID NO: 58219 - protein, 31 aa, Artificial Sequence
  Cyclic GFR-binding peptide
TEESNITMQIMRIKPHQGQHLGEMSFLQHNK

SEQ ID NO: 58220 - protein, 30 aa, Artificial Sequence
  Cyclic GFR-binding peptide
  MOD_RES (30), (30): Xaa is C or S
RSVKVAKVEIVRKKPIFKEVQVTLEDHLAX

SEQ ID NO: 58221 - protein, 33 aa, Artificial Sequence
  Cyclic GFR-binding peptide
  MOD_RES (4), (4): Xaa is C or S
GLEXVPTGQSNITMQIMRIKPHQGQHIGEMSLE

SEQ ID NO: 58222 - protein, 41 aa, Artificial Sequence; identical to SEQ ID NO: 15286
  Cyclic GFR-binding peptide
  MOD_RES (5), (5): Xaa is C or S

SEQ ID NO: 58223 - protein, 34 aa, Artificial Sequence; identical to SEQ ID NO: 15287
  Cyclic GFR-binding peptide
  MOD_RES (2), (2): Xaa is C or S

SEQ ID NO: 58224 - protein, 25 aa, Artificial Sequence
  Cyclic GFR-binding peptide
HHRPVQVRKIEYVRKKPKLKKATVR

SEQ ID NO: 58225 - protein, 39 aa, Artificial Sequence; identical to SEQ ID NO: 15289
  Cyclic GFR-binding peptide
  MOD_RES (5), (5): Xaa is C or S

SEQ ID NO: 58226 - protein, 42 aa, Artificial Sequence; identical to SEQ ID NO: 15290
  Cyclic GFR-binding peptide
  MOD_RES (5), (42): Xaa is C or S

SEQ ID NO: 58227 - protein, 35 aa, Artificial Sequence
  Cyclic GFR-binding peptide
  MOD_RES (7), (7): Xaa is C or S
NDEGLEXVPTEERSVKMAKVRIKPHQGQHKEVQVF

SEQ ID NO: 58228 - protein, 25 aa, Artificial Sequence
  Cyclic GFR-binding peptide
QSNITMQIMRIKPHQGQHIGEMSLE

SEQ ID NO: 58229 - protein, 34 aa, Artificial Sequence
  Cyclic GFR-binding peptide
  MOD_RES (34), (34): Xaa is C or S
QVQLSNITVQIMEIVRKKPIFLGEMSTLEDHLAX

SEQ ID NO: 58230 - protein, 26 aa, Artificial Sequence
  Cyclic GFR-binding peptide
SNITVQIMEIVRKKPIFIGEMSTLED

SEQ ID NO: 58231 - protein, 29 aa, Artificial Sequence
  Cyclic GFR-binding peptide
VPTEESNITMQIMRIKPHQGQHLGEMSFL

SEQ ID NO: 58232 - protein, 33 aa, Artificial Sequence
  Cyclic GFR-binding peptide
  MOD_RES (30), (32): Xaa is C or S
QRSVKMAKVRIKPHQGQHKEVQVLEEHSQXEXR

SEQ ID NO: 58233 - protein, 37 aa, Artificial Sequence
  Cyclic GFR-binding peptide
  MOD_RES (34), (36): Xaa is C or S
QVQLSNITVQIMEIVRKKPIFLGEMSTLEDHLAXKXE

SEQ ID NO: 58234 - protein, 35 aa, Artificial Sequence
  Cyclic GFR-binding peptide
  MOD_RES (4), (4): Xaa is C or S
GLEXVPTEESNITMQIMRIKPHQGQHLGEMSFLQH

SEQ ID NO: 58235 - protein, 30 aa, Artificial Sequence
  Cyclic GFR-binding peptide
PSRVHHSNITVQIMEYVRKKPKLIGEMSRL

SEQ ID NO: 58236 - protein, 39 aa, Artificial Sequence; identical to SEQ ID NO: 15293
  Cyclic GFR-binding peptide
  MOD_RES (2), (39): Xaa is C or S

SEQ ID NO: 58237 - protein, 32 aa, Artificial Sequence
  Cyclic GFR-binding peptide
  MOD_RES (32), (32): Xaa is C or S
TEERPVQMRKIRIKPHQGQHKKATVFLQHNKX

SEQ ID NO: 58238 - protein, 37 aa, Artificial Sequence
  Cyclic GFR-binding peptide
  MOD_RES (7), (7): Xaa is C or S
NDEGLEXVPTEERSVKMAKVRIKPHQGQHKEVQVFLQ

SEQ ID NO: 58239 - protein, 36 aa, Artificial Sequence
  Cyclic GFR-binding peptide
  MOD_RES (5), (5): Xaa is C or S
EGLEXVPTGQRSVKMAKVRIKPHQGQHKEVQVLEEH

SEQ ID NO: 58240 - protein, 43 aa, Artificial Sequence; identical to SEQ ID NO: 15294
  Cyclic GFR-binding peptide
  MOD_RES (4), (41), (43): Xaa is C or S

SEQ ID NO: 58241 - protein, 34 aa, Artificial Sequence
  Cyclic GFR-binding peptide
  MOD_RES (5), (5): Xaa is C or S
EGLEXVPTGQRSVKMAKVRIKPHQGQHKEVQVLE

SEQ ID NO: 58242 - protein, 34 aa, Artificial Sequence; identical to SEQ ID NO: 15296
  Cyclic GFR-binding peptide
  MOD_RES (34), (34): Xaa is C or S

SEQ ID NO: 58243 - protein, 41 aa, Artificial Sequence; identical to SEQ ID NO: 15299
  Cyclic GFR-binding peptide
  MOD_RES (5), (39), (41): Xaa is C or S

SEQ ID NO: 58244 - protein, 39 aa, Artificial Sequence; identical to SEQ ID NO: 15300
  Cyclic GFR-binding peptide
  MOD_RES (6), (6): Xaa is C or S

SEQ ID NO: 58245 - protein, 26 aa, Artificial Sequence
  Cyclic GFR-binding peptide
SNITMQIMRIKPHQGQHLGEMSFLQH

SEQ ID NO: 58246 - protein, 33 aa, Artificial Sequence
  Cyclic GFR-binding peptide
  MOD_RES (6), (6): Xaa is C or S
DEGLEXVPTEESNITMQIMRIKPHQGQHLGEMS

SEQ ID NO: 58247 - protein, 39 aa, Artificial Sequence; identical to SEQ ID NO: 15301
  Cyclic GFR-binding peptide
  MOD_RES (6), (6): Xaa is C or S

SEQ ID NO: 58248 - protein, 34 aa, Artificial Sequence
  Cyclic GFR-binding peptide
  MOD_RES (3), (3): Xaa is C or S
LEXVPTEERPVQMRKIRIKPHQGQHKKATVFLQH

SEQ ID NO: 58249 - protein, 33 aa, Artificial Sequence
  Cyclic GFR-binding peptide
RPTQVQLRSVKVAKVEIVRKKPIFKEVQVTLED

SEQ ID NO: 58250 - protein, 36 aa, Artificial Sequence
  Cyclic GFR-binding peptide
  MOD_RES (33), (35): Xaa is C or S
PTGQRSVKMAKVRIKPHQGQHKEVQVLEEHSQXEXR

SEQ ID NO: 58251 - protein, 38 aa, Artificial Sequence
  Cyclic GFR-binding peptide
  MOD_RES (7), (7): Xaa is C or S
NDEGLEXVPTGQSNITMQIMRIKPHQGQHIGEMSLEEH

SEQ ID NO: 58252 - protein, 36 aa, Artificial Sequence
  Cyclic GFR-binding peptide
  MOD_RES (34), (36): Xaa is C or S
RVHHSNITVQIMEYVRKKPKLIGEMSRLEEHLEXAX

SEQ ID NO: 58253 - protein, 33 aa, Artificial Sequence
  Cyclic GFR-binding peptide
  MOD_RES (31), (33): Xaa is C or S
EERPVQMRKIRIKPHQGQHKKATVFLQHNKXEX

SEQ ID NO: 58254 - protein, 32 aa, Artificial Sequence
  Cyclic GFR-binding peptide
  MOD_RES (31), (31): Xaa is C or S
EERSVKMAKVRIKPHQGQHKEVQVFLQHNKXE

SEQ ID NO: 58255 - protein, 31 aa, Artificial Sequence
  Cyclic GFR-binding peptide
SNITMQIMRIKPHQGQHLGEMSAAAAAAAAA

SEQ ID NO: 58256 - protein, 36 aa, Artificial Sequence
  Cyclic GFR-binding peptide
  MOD_RES (33), (35): Xaa is C or S
VQLSNITVQIMEIVRKKPIFLGEMSTLEDHLAXKXE

SEQ ID NO: 58257 - protein, 27 aa, Artificial Sequence
  Cyclic GFR-binding peptide
VPTEERSVKMAKVRIKPHQGQHKEVQV

SEQ ID NO: 58258 - protein, 33 aa, Artificial Sequence
  Cyclic GFR-binding peptide
QPSRVHHSNITVQIMEYVRKKPKLIGEMSRLEE

SEQ ID NO: 58259 - protein, 30 aa, Artificial Sequence
  Cyclic GFR-binding peptide
  MOD_RES (30), (30): Xaa is C or S
SNITVQIMEIVRKKPIFLGEMSTLEDHLAX

SEQ ID NO: 58260 - protein, 24 aa, Artificial Sequence
  Cyclic GFR-binding peptide
HHSNITVQIMEYVRKKPKLLGEMS

SEQ ID NO: 58261 - protein, 28 aa, Artificial Sequence
  Cyclic GFR-binding peptide
TGQRSVKMAKVRIKPHQGQHKEVQVLEE

SEQ ID NO: 58262 - protein, 37 aa, Artificial Sequence; identical to SEQ ID NO: 15305
  Cyclic GFR-binding peptide
  MOD_RES (2), (2): Xaa is C or S

SEQ ID NO: 58263 - protein, 32 aa, Artificial Sequence
  Cyclic GFR-binding peptide
  MOD_RES (32), (32): Xaa is C or S
TGQRSVKMAKVRIKPHQGQHKEVQVLEEHSQX

SEQ ID NO: 58264 - protein, 41 aa, Artificial Sequence; identical to SEQ ID NO: 15306
  Cyclic GFR-binding peptide
  MOD_RES (7), (41): Xaa is C or S

SEQ ID NO: 58265 - protein, 28 aa, Artificial Sequence
  Cyclic GFR-binding peptide
  MOD_RES (1), (1): Xaa is C or S
XVPTEESNITMQIMRIKPHQGQHLGEMS

SEQ ID NO: 58266 - protein, 29 aa, Artificial Sequence
  Cyclic GFR-binding peptide
QPSRVHHRPVQVRKIEYVRKKPKLKKATV

SEQ ID NO: 58267 - protein, 30 aa, Artificial Sequence
  Cyclic GFR-binding peptide
  MOD_RES (3), (3): Xaa is C or S
LEXVPTEESNITMQIMRIKPHQGQHLGEMS

SEQ ID NO: 58268 - protein, 29 aa, Artificial Sequence
  Cyclic GFR-binding peptide
  MOD_RES (1), (1): Xaa is C or S
XVPTEERSVKMAKVRIKPHQGQHKEVQVF

SEQ ID NO: 58269 - protein, 33 aa, Artificial Sequence
  Cyclic GFR-binding peptide
  MOD_RES (3), (3): Xaa is C or S
VQXRPTQVQLSNITVQIMEIVRKKPIFIGEMST

SEQ ID NO: 58270 - protein, 34 aa, Artificial Sequence
  Cyclic GFR-binding peptide
  MOD_RES (2), (2): Xaa is C or S
QXRPTQVQLRSVKVAKVEIVRKKPIFKEVQVTLE

SEQ ID NO: 58271 - protein, 44 aa, Artificial Sequence; identical to SEQ ID NO: 15307
  Cyclic GFR-binding peptide
  MOD_RES (5), (42), (44): Xaa is C or S

SEQ ID NO: 58272 - protein, 26 aa, Artificial Sequence
  Cyclic GFR-binding peptide
PTGQRPVQMRKIRIKPHQGQHKKATV

SEQ ID NO: 58273 - protein, 32 aa, Artificial Sequence
  Cyclic GFR-binding peptide
  MOD_RES (2), (2): Xaa is C or S
EXVPTEERSVKMAKVRIKPHQGQHKEVQVFLQ

SEQ ID NO: 58274 - protein, 38 aa, Artificial Sequence; identical to SEQ ID NO: 15309
  Cyclic GFR-binding peptide
  MOD_RES (3), (3): Xaa is C or S

SEQ ID NO: 58275 - protein, 33 aa, Artificial Sequence
  Cyclic GFR-binding peptide
  MOD_RES (4), (4): Xaa is C or S
SVKXQPSRVHHSNITVQIMEYVRKKPKLIGEMS

SEQ ID NO: 58276 - protein, 34 aa, Artificial Sequence; identical to SEQ ID NO: 15312
  Cyclic GFR-binding peptide

SEQ ID NO: 58277 - protein, 32 aa, Artificial Sequence
  Cyclic GFR-binding peptide
QVQLSNITVQIMEIVRKKPIFIGEMSTLEDHL

SEQ ID NO: 58278 - protein, 32 aa, Artificial Sequence
  Cyclic GFR-binding peptide
VQLSNITVQIMEIVRKKPIFLGEMSTLEDHLA

SEQ ID NO: 58279 - protein, 37 aa, Artificial Sequence; identical to SEQ ID NO: 15314
  Cyclic GFR-binding peptide
  MOD_RES (34), (36): Xaa is C or S

SEQ ID NO: 58280 - protein, 36 aa, Artificial Sequence
  Cyclic GFR-binding peptide
  MOD_RES (5), (5): Xaa is C or S
RNVQXRPTQVQLSNITVQIMEIVRKKPIFLGEMSTL

SEQ ID NO: 58281 - protein, 25 aa, Artificial Sequence
  Cyclic GFR-binding peptide
VHHSNITVQIMEYVRKKPKLIGEMS

SEQ ID NO: 58282 - protein, 29 aa, Artificial Sequence
  Cyclic GFR-binding peptide
PTEERPVQMRKIRIKPHQGQHKKATVFLQ

SEQ ID NO: 58283 - protein, 34 aa, Artificial Sequence
  Cyclic GFR-binding peptide
  MOD_RES (3), (3): Xaa is C or S
VKXQPSRVHHSNITVQIMEYVRKKPKLIGEMSRL

SEQ ID NO: 58284 - protein, 32 aa, Artificial Sequence
  Cyclic GFR-binding peptide
  MOD_RES (3), (3): Xaa is C or S
VKXQPSRVHHRPVQVRKIEYVRKKPKLKKATV

SEQ ID NO: 58285 - protein, 31 aa, Artificial Sequence
  Cyclic GFR-binding peptide
TQVQLRSVKVAKVEIVRKKPIFKEVQVTLED

SEQ ID NO: 58286 - protein, 33 aa, Artificial Sequence; identical to SEQ ID NO: 15318
  Cyclic GFR-binding peptide

SEQ ID NO: 58287 - protein, 30 aa, Artificial Sequence
  Cyclic GFR-binding peptide
  MOD_RES (2), (2): Xaa is C or S
EXVPTEESNITMQIMRIKPHQGQHLGEMSF

SEQ ID NO: 58288 - protein, 28 aa, Artificial Sequence
  Cyclic GFR-binding peptide
PTEERPVQMRKIRIKPHQGQHKKATVFL

SEQ ID NO: 58289 - protein, 28 aa, Artificial Sequence
  Cyclic GFR-binding peptide
TQVQLSNITVQIMEIVRKKPIFIGEMST

SEQ ID NO: 58290 - protein, 26 aa, Artificial Sequence
  Cyclic GFR-binding peptide
VQLSNITVQIMEIVRKKPIFIGEMST

SEQ ID NO: 58291 - protein, 32 aa, Artificial Sequence
  Cyclic GFR-binding peptide
PTGQRSVKMAKVRIKPHQGQHKEVQVLEEHSQ

SEQ ID NO: 58292 - protein, 30 aa, Artificial Sequence
  Cyclic GFR-binding peptide
TQVQLRSVKVAKVEIVRKKPIFKEVQVTLE

SEQ ID NO: 58293 - protein, 35 aa, Artificial Sequence
  Cyclic GFR-binding peptide
  MOD_RES (34), (34): Xaa is C or S
RVHHSNITVQIMEYVRKKPKLLGEMSRLEEHLEXA

SEQ ID NO: 58294 - protein, 40 aa, Artificial Sequence; identical to SEQ ID NO: 15321
  Cyclic GFR-binding peptide
  MOD_RES (37), (39): Xaa is C or S

SEQ ID NO: 58295 - protein, 29 aa, Artificial Sequence
  Cyclic GFR-binding peptide
QVQLSNITVQIMEIVRKKPIFIGEMSTLE

SEQ ID NO: 58296 - protein, 45 aa, Artificial Sequence; identical to SEQ ID NO: 15323
  Cyclic GFR-binding peptide
  MOD_RES (5), (42), (44): Xaa is C or S

SEQ ID NO: 58297 - protein, 34 aa, Artificial Sequence; identical to SEQ ID NO: 15324
  Cyclic GFR-binding peptide
  MOD_RES (34), (34): Xaa is C or S

SEQ ID NO: 58298 - protein, 29 aa, Artificial Sequence
  Cyclic GFR-binding peptide
QPSRVHHSNITVQIMEYVRKKPKLLGEMS

SEQ ID NO: 58299 - protein, 38 aa, Artificial Sequence; identical to SEQ ID NO: 15326
  Cyclic GFR-binding peptide
  MOD_RES (3), (37): Xaa is C or S

SEQ ID NO: 58300 - protein, 38 aa, Artificial Sequence; identical to SEQ ID NO: 15327
  Cyclic GFR-binding peptide
  MOD_RES (1), (35), (37): Xaa is C or S

SEQ ID NO: 58301 - protein, 22 aa, Artificial Sequence
  Cyclic GFR-binding peptide
RSVKMAKVRIKPHQGQHKEVQV

SEQ ID NO: 58302 - protein, 33 aa, Artificial Sequence
  Cyclic GFR-binding peptide
  MOD_RES (3), (3): Xaa is C or S
LEXVPTGQRPVQMRKIRIKPHQGQHKKATVLEE

SEQ ID NO: 58303 - protein, 29 aa, Artificial Sequence
  Cyclic GFR-binding peptide
PTEESNITMQIMRIKPHQGQHLGEMSFLQ

SEQ ID NO: 58304 - protein, 26 aa, Artificial Sequence
  Cyclic GFR-binding peptide
GQRPVQMRKIRIKPHQGQHKKATVLE

SEQ ID NO: 58305 - protein, 45 aa, Artificial Sequence; identical to SEQ ID NO: 15328
  Cyclic GFR-binding peptide
  MOD_RES (5), (42), (44): Xaa is C or S

SEQ ID NO: 58306 - protein, 32 aa, Artificial Sequence
  Cyclic GFR-binding peptide
RVHHRPVQVRKIEYVRKKPKLKKATVRLEEHL

SEQ ID NO: 58307 - protein, 36 aa, Artificial Sequence
  Cyclic GFR-binding peptide
  MOD_RES (7), (7): Xaa is C or S
NDEGLEXVPTEERSVKMAKVRIKPHQGQHKEVQVFL

SEQ ID NO: 58308 - protein, 34 aa, Artificial Sequence
  Cyclic GFR-binding peptide
  MOD_RES (34), (34): Xaa is C or S
RVHHSNITVQIMEYVRKKPKLIGEMSRLEEHLEX

SEQ ID NO: 58309 - protein, 34 aa, Artificial Sequence
  Cyclic GFR-binding peptide
  MOD_RES (31), (33): Xaa is C or S
LSNITVQIMEIVRKKPIFLGEMSTLEDHLAXKXE

SEQ ID NO: 58310 - protein, 30 aa, Artificial Sequence
  Cyclic GFR-binding peptide
  MOD_RES (29), (29): Xaa is C or S
RSVKMAKVRIKPHQGQHKEVQVLEEHSQXE

SEQ ID NO: 58311 - protein, 32 aa, Artificial Sequence
  Cyclic GFR-binding peptide
  MOD_RES (4), (4): Xaa is C or S
GLEXVPTGQRPVQMRKIRIKPHQGQHKKATVL

SEQ ID NO: 58312 - protein, 32 aa, Artificial Sequence
  Cyclic GFR-binding peptide
  MOD_RES (3), (3): Xaa is C or S
VQXRPTQVQLSNITVQIMEIVRKKPIFLGEMS

SEQ ID NO: 58313 - protein, 35 aa, Artificial Sequence; identical to SEQ ID NO: 15330
  Cyclic GFR-binding peptide
  MOD_RES (1), (1): Xaa is C or S

SEQ ID NO: 58314 - protein, 27 aa, Artificial Sequence
  Cyclic GFR-binding peptide
TQVQLSNITVQIMEIVRKKPIFLGEMS

SEQ ID NO: 58315 - protein, 34 aa, Artificial Sequence
  Cyclic GFR-binding peptide
  MOD_RES (6), (6): Xaa is C or S
DEGLEXVPTGQRSVKMAKVRIKPHQGQHKEVQVL

SEQ ID NO: 58316 - protein, 24 aa, Artificial Sequence
  Cyclic GFR-binding peptide
SNITVQIMEIVRKKPIFLGEMSTL

SEQ ID NO: 58317 - protein, 31 aa, Artificial Sequence
  Cyclic GFR-binding peptide
PTQVQLSNITVQIMEIVRKKPIFLGEMSTLE

SEQ ID NO: 58318 - protein, 26 aa, Artificial Sequence
  Cyclic GFR-binding peptide
EESNITMQIMRIKPHQGQHLGEMSFL

SEQ ID NO: 58319 - protein, 40 aa, Artificial Sequence; identical to SEQ ID NO: 15331
  Cyclic GFR-binding peptide
  MOD_RES (4), (38), (40): Xaa is C or S

SEQ ID NO: 58320 - protein, 38 aa, Artificial Sequence; identical to SEQ ID NO: 15332
  Cyclic GFR-binding peptide
  MOD_RES (3), (37): Xaa is C or S

SEQ ID NO: 58321 - protein, 34 aa, Artificial Sequence
  Cyclic GFR-binding peptide
  MOD_RES (4), (4): Xaa is C or S
GLEXVPTGQRSVKMAKVRIKPHQGQHKEVQVLEE

SEQ ID NO: 58322 - protein, 27 aa, Artificial Sequence
  Cyclic GFR-binding peptide
HHSNITVQIMEYVRKKPKLIGEMSRLE

SEQ ID NO: 58323 - protein, 33 aa, Artificial Sequence
  Cyclic GFR-binding peptide
  MOD_RES (33), (33): Xaa is C or S
PTGQRSVKMAKVRIKPHQGQHKEVQVLEEHSQX

SEQ ID NO: 58324 - protein, 33 aa, Artificial Sequence; identical to SEQ ID NO: 15335
  Cyclic GFR-binding peptide

SEQ ID NO: 58325 - protein, 32 aa, Artificial Sequence
  Cyclic GFR-binding peptide
QPSRVHHSNITVQIMEYVRKKPKLIGEMSRLE

SEQ ID NO: 58326 - protein, 28 aa, Artificial Sequence
  Cyclic GFR-binding peptide
SRVHHRPVQVRKIEYVRKKPKLKKATVR

SEQ ID NO: 58327 - protein, 39 aa, Artificial Sequence; identical to SEQ ID NO: 15338
  Cyclic GFR-binding peptide
  MOD_RES (2), (36), (38): Xaa is C or S

SEQ ID NO: 58328 - protein, 30 aa, Artificial Sequence
  Cyclic GFR-binding peptide
  MOD_RES (1), (1): Xaa is C or S
XQPSRVHHRPVQVRKIEYVRKKPKLKKATV

SEQ ID NO: 58329 - protein, 29 aa, Artificial Sequence
  Cyclic GFR-binding peptide
RPTQVQLSNITVQIMEIVRKKPIFLGEMS

SEQ ID NO: 58330 - protein, 40 aa, Artificial Sequence; identical to SEQ ID NO: 15339
  Cyclic GFR-binding peptide
  MOD_RES (2), (39): Xaa is C or S

SEQ ID NO: 58331 - protein, 36 aa, Artificial Sequence; identical to SEQ ID NO: 15340
  Cyclic GFR-binding peptide
  MOD_RES (34), (36): Xaa is C or S

SEQ ID NO: 58332 - protein, 31 aa, Artificial Sequence
  Cyclic GFR-binding peptide
  MOD_RES (1), (1): Xaa is C or S
XVPTEERSVKMAKVRIKPHQGQHKEVQVFLQ

SEQ ID NO: 58333 - protein, 28 aa, Artificial Sequence
  Cyclic GFR-binding peptide
TQVQLRSVKVAKVEIVRKKPIFKEVQVT

SEQ ID NO: 58334 - protein, 35 aa, Artificial Sequence; identical to SEQ ID NO: 15341
  Cyclic GFR-binding peptide

SEQ ID NO: 58335 - protein, 34 aa, Artificial Sequence
  Cyclic GFR-binding peptide
  MOD_RES (32), (34): Xaa is C or S
TGQRPVQMRKIRIKPHQGQHKKATVLEEHSQXEX

SEQ ID NO: 58336 - protein, 34 aa, Artificial Sequence
  Cyclic GFR-binding peptide
  MOD_RES (33), (33): Xaa is C or S
VQLSNITVQIMEIVRKKPIFIGEMSTLEDHLAXK

SEQ ID NO: 58337 - protein, 34 aa, Artificial Sequence
  Cyclic GFR-binding peptide
  MOD_RES (32), (34): Xaa is C or S
HHRPVQVRKIEYVRKKPKLKKATVRLEEHLEXAX

SEQ ID NO: 58338 - protein, 32 aa, Artificial Sequence; identical to SEQ ID NO: 15348
  Cyclic GFR-binding peptide

SEQ ID NO: 58339 - protein, 44 aa, Artificial Sequence; identical to SEQ ID NO: 15349
  Cyclic GFR-binding peptide
  MOD_RES (4), (41), (43): Xaa is C or S

SEQ ID NO: 58340 - protein, 31 aa, Artificial Sequence
  Cyclic GFR-binding peptide
  MOD_RES (30), (30): Xaa is C or S
ERSVKMAKVRIKPHQGQHKEVQVFLQHNKXE

SEQ ID NO: 58341 - protein, 29 aa, Artificial Sequence
  Cyclic GFR-binding peptide
QLRSVKVAKVEIVRKKPIFKEVQVTLEDH

SEQ ID NO: 58342 - protein, 35 aa, Artificial Sequence
  Cyclic GFR-binding peptide
  MOD_RES (33), (35): Xaa is C or S
VHHSNITVQIMEYVRKKPKLIGEMSRLEEHLEXAX

SEQ ID NO: 58343 - protein, 38 aa, Artificial Sequence; identical to SEQ ID NO: 15354
  Cyclic GFR-binding peptide
  MOD_RES (1), (38): Xaa is C or S

SEQ ID NO: 58344 - protein, 29 aa, Artificial Sequence
  Cyclic GFR-binding peptide
TEESNITMQIMRIKPHQGQHLGEMSFLQH

SEQ ID NO: 58345 - protein, 40 aa, Artificial Sequence; identical to SEQ ID NO: 15356
  Cyclic GFR-binding peptide
  MOD_RES (6), (40): Xaa is C or S

SEQ ID NO: 58346 - protein, 24 aa, Artificial Sequence
  Cyclic GFR-binding peptide
RSVKMAKVRIKPHQGQHKEVQVFL

SEQ ID NO: 58347 - protein, 42 aa, Artificial Sequence; identical to SEQ ID NO: 15355
  Cyclic GFR-binding peptide
  MOD_RES (3), (40), (42): Xaa is C or S

SEQ ID NO: 58348 - protein, 26 aa, Artificial Sequence
  Cyclic GFR-binding peptide
HHRPVQVRKIEYVRKKPKLKKATVRL

SEQ ID NO: 58349 - protein, 35 aa, Artificial Sequence
  Cyclic GFR-binding peptide
  MOD_RES (34), (34): Xaa is C or S
RVHHSNITVQIMEYVRKKPKLIGEMSRLEEHLEXA

SEQ ID NO: 58350 - protein, 23 aa, Artificial Sequence
  Cyclic GFR-binding peptide
RPVQMRKIRIKPHQGQHKKATVL

SEQ ID NO: 58351 - protein, 23 aa, Artificial Sequence
  Cyclic GFR-binding peptide
RPVQMRKIRIKPHQGQHKKATVF

SEQ ID NO: 58352 - protein, 26 aa, Artificial Sequence
  Cyclic GFR-binding peptide
LRSVKVAKVEIVRKKPIFKEVQVTLE

SEQ ID NO: 58353 - protein, 33 aa, Artificial Sequence
  Cyclic GFR-binding peptide
  MOD_RES (32), (32): Xaa is C or S
TGQSNITMQIMRIKPHQGQHIGEMSLEEHSQXE

SEQ ID NO: 58354 - protein, 37 aa, Artificial Sequence; identical to SEQ ID NO: 15359
  Cyclic GFR-binding peptide
  MOD_RES (3), (37): Xaa is C or S

SEQ ID NO: 58355 - protein, 31 aa, Artificial Sequence
  Cyclic GFR-binding peptide
SRVHHSNITVQIMEYVRKKPKLLGEMSRLEE

SEQ ID NO: 58356 - protein, 30 aa, Artificial Sequence
  Cyclic GFR-binding peptide
  MOD_RES (3), (3): Xaa is C or S
LEXVPTEERPVQMRKIRIKPHQGQHKKATV

SEQ ID NO: 58357 - protein, 28 aa, Artificial Sequence
  Cyclic GFR-binding peptide
RPVQMRKIRIKPHQGQHKKATVFLQHNK

SEQ ID NO: 58358 - protein, 28 aa, Artificial Sequence
  Cyclic GFR-binding peptide
PTGQRSVKMAKVRIKPHQGQHKEVQVLE

SEQ ID NO: 58359 - protein, 33 aa, Artificial Sequence
  Cyclic GFR-binding peptide
  MOD_RES (30), (32): Xaa is C or S
ERSVKMAKVRIKPHQGQHKEVQVFLQHNKXEXR

SEQ ID NO: 58360 - protein, 28 aa, Artificial Sequence
  Cyclic GFR-binding peptide
TEESNITMQIMRIKPHQGQHLGEMSFLQ

SEQ ID NO: 58361 - protein, 41 aa, Artificial Sequence; identical to SEQ ID NO: 15362
  Cyclic GFR-binding peptide
  MOD_RES (4), (41): Xaa is C or S

SEQ ID NO: 58362 - protein, 28 aa, Artificial Sequence
  Cyclic GFR-binding peptide
LSNITVQIMEIVRKKPIFIGEMSTLEDH

SEQ ID NO: 58363 - protein, 26 aa, Artificial Sequence
  Cyclic GFR-binding peptide
QVQLSNITVQIMEIVRKKPIFLGEMS

SEQ ID NO: 58364 - protein, 30 aa, Artificial Sequence
  Cyclic GFR-binding peptide
PTQVQLSNITVQIMEIVRKKPIFLGEMSTL

SEQ ID NO: 58365 - protein, 31 aa, Artificial Sequence
  Cyclic GFR-binding peptide
  MOD_RES (29), (31): Xaa is C or S
SNITMQIMRIKPHQGQHLGEMSFLQHNKXEX

SEQ ID NO: 58366 - protein, 40 aa, Artificial Sequence; identical to SEQ ID NO: 15364
  Cyclic GFR-binding peptide
  MOD_RES (4), (38), (40): Xaa is C or S

SEQ ID NO: 58367 - protein, 30 aa, Artificial Sequence
  Cyclic GFR-binding peptide
VPTEERPVQMRKIRIKPHQGQHKKATVFLQ

SEQ ID NO: 58368 - protein, 38 aa, Artificial Sequence
  Cyclic GFR-binding peptide
  MOD_RES (7), (7): Xaa is C or S
NDEGLEXVPTEERSVKMAKVRIKPHQGQHKEVQVFLQH

SEQ ID NO: 58369 - protein, 28 aa, Artificial Sequence
  Cyclic GFR-binding peptide
GQRPVQMRKIRIKPHQGQHKKATVLEEH

SEQ ID NO: 58370 - protein, 35 aa, Artificial Sequence; identical to SEQ ID NO: 15367
  Cyclic GFR-binding peptide
  MOD_RES (1), (35): Xaa is C or S

SEQ ID NO: 58371 - protein, 38 aa, Artificial Sequence; identical to SEQ ID NO: 15368
  Cyclic GFR-binding peptide
  MOD_RES (37), (37): Xaa is C or S

SEQ ID NO: 58372 - protein, 24 aa, Artificial Sequence
  Cyclic GFR-binding peptide
HHRPVQVRKIEYVRKKPKLKKATV

SEQ ID NO: 58373 - protein, 34 aa, Artificial Sequence
  Cyclic GFR-binding peptide
  MOD_RES (5), (5): Xaa is C or S
SSVKXQPSRVHHSNITVQIMEYVRKKPKLIGEMS

SEQ ID NO: 58374 - protein, 32 aa, Artificial Sequence; identical to SEQ ID NO: 1162
  Cyclic GFR-binding peptide

SEQ ID NO: 58375 - protein, 38 aa, Artificial Sequence; identical to SEQ ID NO: 15372
  Cyclic GFR-binding peptide
  MOD_RES (36), (38): Xaa is C or S

SEQ ID NO: 58376 - protein, 29 aa, Artificial Sequence
  Cyclic GFR-binding peptide
EERSVKMAKVRIKPHQGQHKEVQVFLQHN

SEQ ID NO: 58377 - protein, 30 aa, Artificial Sequence
  Cyclic GFR-binding peptide
TGQRPVQMRKIRIKPHQGQHKKATVLEEHS

SEQ ID NO: 58378 - protein, 34 aa, Artificial Sequence; identical to SEQ ID NO: 15374
  Cyclic GFR-binding peptide
  MOD_RES (2), (2): Xaa is C or S

SEQ ID NO: 58379 - protein, 33 aa, Artificial Sequence
  Cyclic GFR-binding peptide
  MOD_RES (31), (33): Xaa is C or S
GQSNITMQIMRIKPHQGQHIGEMSLEEHSQXEX

SEQ ID NO: 58380 - protein, 25 aa, Artificial Sequence
  Cyclic GFR-binding peptide
GQSNITMQIMRIKPHQGQHIGEMSL

SEQ ID NO: 58381 - protein, 30 aa, Artificial Sequence
  Cyclic GFR-binding peptide
  MOD_RES (30), (30): Xaa is C or S
SNITVQIMEYVRKKPKLLGEMSRLEEHLEX

SEQ ID NO: 58382 - protein, 36 aa, Artificial Sequence; identical to SEQ ID NO: 15377
  Cyclic GFR-binding peptide

SEQ ID NO: 58383 - protein, 36 aa, Artificial Sequence; identical to SEQ ID NO: 15378
  Cyclic GFR-binding peptide
  MOD_RES (36), (36): Xaa is C or S

SEQ ID NO: 58384 - protein, 31 aa, Artificial Sequence
  Cyclic GFR-binding peptide
  MOD_RES (2), (2): Xaa is C or S
QXRPTQVQLSNITVQIMEIVRKKPIFLGEMS

SEQ ID NO: 58385 - protein, 33 aa, Artificial Sequence; identical to SEQ ID NO: 15380
  Cyclic GFR-binding peptide

SEQ ID NO: 58386 - protein, 35 aa, Artificial Sequence; identical to SEQ ID NO: 15381
  Cyclic GFR-binding peptide
  MOD_RES (3), (3): Xaa is C or S

SEQ ID NO: 58387 - protein, 30 aa, Artificial Sequence
  Cyclic GFR-binding peptide
VQLRSVKVAKVEIVRKKPIFKEVQVTLEDH

SEQ ID NO: 58388 - protein, 35 aa, Artificial Sequence
  Cyclic GFR-binding peptide
  MOD_RES (32), (34): Xaa is C or S
TEERSVKMAKVRIKPHQGQHKEVQVFLQHNKXEXR

SEQ ID NO: 58389 - protein, 34 aa, Artificial Sequence; identical to SEQ ID NO: 15383
  Cyclic GFR-binding peptide
  MOD_RES (1), (1): Xaa is C or S

SEQ ID NO: 58390 - protein, 36 aa, Artificial Sequence; identical to SEQ ID NO: 15385
  Cyclic GFR-binding peptide

SEQ ID NO: 58391 - protein, 44 aa, Artificial Sequence; identical to SEQ ID NO: 15386
  Cyclic GFR-binding peptide
  MOD_RES (4), (41), (43): Xaa is C or S

SEQ ID NO: 58392 - protein, 25 aa, Artificial Sequence
  Cyclic GFR-binding peptide
RPVQMRKIRIKPHQGQHKKATVFLQ

SEQ ID NO: 58393 - protein, 31 aa, Artificial Sequence
  Cyclic GFR-binding peptide
  MOD_RES (4), (4): Xaa is C or S
GLEXVPTEESNITMQIMRIKPHQGQHLGEMS

SEQ ID NO: 58394 - protein, 30 aa, Artificial Sequence
  Cyclic GFR-binding peptide
  MOD_RES (1), (1): Xaa is C or S
XQPSRVHHSNITVQIMEYVRKKPKLLGEMS

SEQ ID NO: 58395 - protein, 27 aa, Artificial Sequence
  Cyclic GFR-binding peptide
HSNITVQIMEYVRKKPKLLGEMSRLEE

SEQ ID NO: 58396 - protein, 34 aa, Artificial Sequence
  Cyclic GFR-binding peptide
  MOD_RES (3), (3): Xaa is C or S
VQXRPTQVQLRSVKVAKVEIVRKKPIFKEVQVTL

SEQ ID NO: 58397 - protein, 34 aa, Artificial Sequence
  Cyclic GFR-binding peptide
  MOD_RES (7), (7): Xaa is C or S
NDEGLEXVPTGQRPVQMRKIRIKPHQGQHKKATV

SEQ ID NO: 58398 - protein, 44 aa, Artificial Sequence; identical to SEQ ID NO: 15390
  Cyclic GFR-binding peptide
  MOD_RES (4), (41), (43): Xaa is C or S

SEQ ID NO: 58399 - protein, 40 aa, Artificial Sequence; identical to SEQ ID NO: 15391
  Cyclic GFR-binding peptide
  MOD_RES (4), (4): Xaa is C or S

SEQ ID NO: 58400 - protein, 24 aa, Artificial Sequence
  Cyclic GFR-binding peptide
LSNITVQIMEIVRKKPIFLGEMST

SEQ ID NO: 58401 - protein, 31 aa, Artificial Sequence
  Cyclic GFR-binding peptide
  MOD_RES (4), (4): Xaa is C or S
GLEXVPTGQRPVQMRKIRIKPHQGQHKKATV

SEQ ID NO: 58402 - protein, 41 aa, Artificial Sequence; identical to SEQ ID NO: 15394
  Cyclic GFR-binding peptide
  MOD_RES (3), (40): Xaa is C or S

SEQ ID NO: 58403 - protein, 36 aa, Artificial Sequence
  Cyclic GFR-binding peptide
  MOD_RES (4), (4): Xaa is C or S
SVKXQPSRVHHSNITVQIMEYVRKKPKLLGEMSRLE

SEQ ID NO: 58404 - protein, 41 aa, Artificial Sequence; identical to SEQ ID NO: 15396
  Cyclic GFR-binding peptide
  MOD_RES (1), (38), (40): Xaa is C or S

SEQ ID NO: 58405 - protein, 38 aa, Artificial Sequence; identical to SEQ ID NO: 15399
  Cyclic GFR-binding peptide
  MOD_RES (6), (6): Xaa is C or S

SEQ ID NO: 58406 - protein, 39 aa, Artificial Sequence; identical to SEQ ID NO: 15400
  Cyclic GFR-binding peptide
  MOD_RES (7), (7): Xaa is C or S

SEQ ID NO: 58407 - protein, 30 aa, Artificial Sequence
  Cyclic GFR-binding peptide
RPTQVQLSNITVQIMEIVRKKPIFIGEMST

SEQ ID NO: 58408 - protein, 28 aa, Artificial Sequence
  Cyclic GFR-binding peptide
VHHRPVQVRKIEYVRKKPKLKKATVRLE

SEQ ID NO: 58409 - protein, 34 aa, Artificial Sequence; identical to SEQ ID NO: 15401
  Cyclic GFR-binding peptide
  MOD_RES (2), (2): Xaa is C or S

SEQ ID NO: 58410 - protein, 33 aa, Artificial Sequence
  Cyclic GFR-binding peptide
  MOD_RES (3), (3): Xaa is C or S
VKXQPSRVHHSNITVQIMEYVRKKPKLIGEMSR

SEQ ID NO: 58411 - protein, 34 aa, Artificial Sequence
  Cyclic GFR-binding peptide
  MOD_RES (4), (4): Xaa is C or S
SVKXQPSRVHHRPVQVRKIEYVRKKPKLKKATVR

SEQ ID NO: 58412 - protein, 33 aa, Artificial Sequence
  Cyclic GFR-binding peptide
  MOD_RES (4), (4): Xaa is C or S
NVQXRPTQVQLSNITVQIMEIVRKKPIFLGEMS

SEQ ID NO: 58413 - protein, 25 aa, Artificial Sequence
  Cyclic GFR-binding peptide
RSVKMAKVRIKPHQGQHKEVQVLEE

SEQ ID NO: 58414 - protein, 37 aa, Artificial Sequence; identical to SEQ ID NO: 15404
  Cyclic GFR-binding peptide
  MOD_RES (35), (37): Xaa is C or S

SEQ ID NO: 58415 - protein, 26 aa, Artificial Sequence
  Cyclic GFR-binding peptide
EERPVQMRKIRIKPHQGQHKKATVFL

SEQ ID NO: 58416 - protein, 32 aa, Artificial Sequence
  Cyclic GFR-binding peptide
  MOD_RES (32), (32): Xaa is C or S
TEERSVKMAKVRIKPHQGQHKEVQVFLQHNKX

SEQ ID NO: 58417 - protein, 36 aa, Artificial Sequence
  Cyclic GFR-binding peptide
  MOD_RES (7), (7): Xaa is C or S
NDEGLEXVPTGQRSVKMAKVRIKPHQGQHKEVQVLE

SEQ ID NO: 58418 - protein, 33 aa, Artificial Sequence
  Cyclic GFR-binding peptide
  MOD_RES (5), (5): Xaa is C or S
EGLEXVPTEERPVQMRKIRIKPHQGQHKKATVF

SEQ ID NO: 58419 - protein, 34 aa, Artificial Sequence
  Cyclic GFR-binding peptide
  MOD_RES (4), (4): Xaa is C or S
GLEXVPTEERSVKMAKVRIKPHQGQHKEVQVFLQ

SEQ ID NO: 58420 - protein, 40 aa, Artificial Sequence; identical to SEQ ID NO: 15406
  Cyclic GFR-binding peptide
  MOD_RES (7), (7): Xaa is C or S

SEQ ID NO: 58421 - protein, 37 aa, Artificial Sequence; identical to SEQ ID NO: 15407
  Cyclic GFR-binding peptide
  MOD_RES (5), (5): Xaa is C or S

SEQ ID NO: 58422 - protein, 34 aa, Artificial Sequence
  Cyclic GFR-binding peptide
  MOD_RES (6), (6): Xaa is C or S
DEGLEXVPTEERSVKMAKVRIKPHQGQHKEVQVF

SEQ ID NO: 58423 - protein, 41 aa, Artificial Sequence; identical to SEQ ID NO: 15409
  Cyclic GFR-binding peptide
  MOD_RES (6), (40): Xaa is C or S

SEQ ID NO: 58424 - protein, 41 aa, Artificial Sequence; identical to SEQ ID NO: 15410
  Cyclic GFR-binding peptide
  MOD_RES (4), (41): Xaa is C or S

SEQ ID NO: 58425 - protein, 40 aa, Artificial Sequence; identical to SEQ ID NO: 15408
  Cyclic GFR-binding peptide
  MOD_RES (5), (39): Xaa is C or S

SEQ ID NO: 58426 - protein, 24 aa, Artificial Sequence
  Cyclic GFR-binding peptide
ESNITMQIMRIKPHQGQHLGEMSF

SEQ ID NO: 58427 - protein, 27 aa, Artificial Sequence
  Cyclic GFR-binding peptide
HHRPVQVRKIEYVRKKPKLKKATVRLE

SEQ ID NO: 58428 - protein, 29 aa, Artificial Sequence
  Cyclic GFR-binding peptide
TQVQLSNITVQIMEIVRKKPIFLGEMSTL

SEQ ID NO: 58429 - protein, 28 aa, Artificial Sequence
  Cyclic GFR-binding peptide
SNITVQIMEYVRKKPKLIGEMSRLEEHL

SEQ ID NO: 58430 - protein, 27 aa, Artificial Sequence
  Cyclic GFR-binding peptide
SRVHHSNITVQIMEYVRKKPKLIGEMS

SEQ ID NO: 58431 - protein, 36 aa, Artificial Sequence
  Cyclic GFR-binding peptide
  MOD_RES (3), (3): Xaa is C or S
VQXRPTQVQLSNITVQIMEIVRKKPIFIGEMSTLED

SEQ ID NO: 58432 - protein, 32 aa, Artificial Sequence
  Cyclic GFR-binding peptide
  MOD_RES (31), (31): Xaa is C or S
EESNITMQIMRIKPHQGQHLGEMSFLQHNKXE

SEQ ID NO: 58433 - protein, 36 aa, Artificial Sequence; identical to SEQ ID NO: 15417
  Cyclic GFR-binding peptide
  MOD_RES (36), (36): Xaa is C or S

SEQ ID NO: 58434 - protein, 42 aa, Artificial Sequence; identical to SEQ ID NO: 15418
  Cyclic GFR-binding peptide
  MOD_RES (7), (41): Xaa is C or S

SEQ ID NO: 58435 - protein, 38 aa, Artificial Sequence; identical to SEQ ID NO: 15421
  Cyclic GFR-binding peptide
  MOD_RES (36), (38): Xaa is C or S

SEQ ID NO: 58436 - protein, 32 aa, Artificial Sequence
  Cyclic GFR-binding peptide
  MOD_RES (32), (32): Xaa is C or S
TGQSNITMQIMRIKPHQGQHIGEMSLEEHSQX

SEQ ID NO: 58437 - protein, 23 aa, Artificial Sequence
  Cyclic GFR-binding peptide
LSNITVQIMEIVRKKPIFIGEMS

SEQ ID NO: 58438 - protein, 35 aa, Artificial Sequence
  Cyclic GFR-binding peptide
  MOD_RES (33), (35): Xaa is C or S
PTEERPVQMRKIRIKPHQGQHKKATVFLQHNKXEX

SEQ ID NO: 58439 - protein, 40 aa, Artificial Sequence; identical to SEQ ID NO: 15427
  Cyclic GFR-binding peptide
  MOD_RES (4), (38), (40): Xaa is C or S

SEQ ID NO: 58440 - protein, 36 aa, Artificial Sequence
  Cyclic GFR-binding peptide
  MOD_RES (33), (35): Xaa is C or S
VHHRPVQVRKIEYVRKKPKLKKATVRLEEHLEXAXA

SEQ ID NO: 58441 - protein, 43 aa, Artificial Sequence; identical to SEQ ID NO: 15429
  Cyclic GFR-binding peptide
  MOD_RES (6), (40), (42): Xaa is C or S

SEQ ID NO: 58442 - protein, 31 aa, Artificial Sequence
  Cyclic GFR-binding peptide
  MOD_RES (31), (31): Xaa is C or S
EESNITMQIMRIKPHQGQHLGEMSFLQHNKX

SEQ ID NO: 58443 - protein, 33 aa, Artificial Sequence
  Cyclic GFR-binding peptide
  MOD_RES (32), (32): Xaa is C or S
TEESNITMQIMRIKPHQGQHLGEMSFLQHNKXE

SEQ ID NO: 58444 - protein, 27 aa, Artificial Sequence
  Cyclic GFR-binding peptide
VHHRPVQVRKIEYVRKKPKLKKATVRL

SEQ ID NO: 58445 - protein, 28 aa, Artificial Sequence
  Cyclic GFR-binding peptide
QLRSVKVAKVEIVRKKPIFKEVQVTLED

SEQ ID NO: 58446 - protein, 28 aa, Artificial Sequence
  Cyclic GFR-binding peptide
RPVQVRKIEYVRKKPKLKKATVRLEEHL

SEQ ID NO: 58447 - protein, 28 aa, Artificial Sequence
  Cyclic GFR-binding peptide
QVQLSNITVQIMEIVRKKPIFIGEMSTL

SEQ ID NO: 58448 - protein, 29 aa, Artificial Sequence
  Cyclic GFR-binding peptide
SNITVQIMEIVRKKPIFLGEMSTLEDHLA

SEQ ID NO: 58449 - protein, 38 aa, Artificial Sequence; identical to SEQ ID NO: 15432
  Cyclic GFR-binding peptide
  MOD_RES (4), (4): Xaa is C or S

SEQ ID NO: 58450 - protein, 35 aa, Artificial Sequence; identical to SEQ ID NO: 15435
  Cyclic GFR-binding peptide
  MOD_RES (35), (35): Xaa is C or S

SEQ ID NO: 58451 - protein, 32 aa, Artificial Sequence
  Cyclic GFR-binding peptide
  MOD_RES (5), (5): Xaa is C or S
EGLEXVPTGQRPVQMRKIRIKPHQGQHKKATV

SEQ ID NO: 58452 - protein, 41 aa, Artificial Sequence; identical to SEQ ID NO: 15436
  Cyclic GFR-binding peptide
  MOD_RES (5), (39), (41): Xaa is C or S

SEQ ID NO: 58453 - protein, 26 aa, Artificial Sequence
  Cyclic GFR-binding peptide
TEERPVQMRKIRIKPHQGQHKKATVF

SEQ ID NO: 58454 - protein, 39 aa, Artificial Sequence; identical to SEQ ID NO: 15438
  Cyclic GFR-binding peptide
  MOD_RES (5), (5): Xaa is C or S

SEQ ID NO: 58455 - protein, 38 aa, Artificial Sequence; identical to SEQ ID NO: 15440
  Cyclic GFR-binding peptide
  MOD_RES (37), (37): Xaa is C or S

SEQ ID NO: 58456 - protein, 30 aa, Artificial Sequence
  Cyclic GFR-binding peptide
PTEERPVQMRKIRIKPHQGQHKKATVFLQH

SEQ ID NO: 58457 - protein, 31 aa, Artificial Sequence
  Cyclic GFR-binding peptide
  MOD_RES (30), (30): Xaa is C or S
RSVKVAKVEIVRKKPIFKEVQVTLEDHLAXK

SEQ ID NO: 58458 - protein, 40 aa, Artificial Sequence; identical to SEQ ID NO: 15439
  Cyclic GFR-binding peptide
  MOD_RES (2), (39): Xaa is C or S

SEQ ID NO: 58459 - protein, 30 aa, Artificial Sequence
  Cyclic GFR-binding peptide
  MOD_RES (29), (29): Xaa is C or S
RPVQMRKIRIKPHQGQHKKATVFLQHNKXE

SEQ ID NO: 58460 - protein, 29 aa, Artificial Sequence
  Cyclic GFR-binding peptide
PTQVQLSNITVQIMEIVRKKPIFIGEMST

SEQ ID NO: 58461 - protein, 39 aa, Artificial Sequence; identical to SEQ ID NO: 15443
  Cyclic GFR-binding peptide
  MOD_RES (5), (5): Xaa is C or S

SEQ ID NO: 58462 - protein, 31 aa, Artificial Sequence
  Cyclic GFR-binding peptide
  MOD_RES (1), (1): Xaa is C or S
XRPTQVQLSNITVQIMEIVRKKPIFLGEMST

SEQ ID NO: 58463 - protein, 31 aa, Artificial Sequence
  Cyclic GFR-binding peptide
  MOD_RES (2), (2): Xaa is C or S
EXVPTEERPVQMRKIRIKPHQGQHKKATVFL

SEQ ID NO: 58464 - protein, 40 aa, Artificial Sequence; identical to SEQ ID NO: 15444
  Cyclic GFR-binding peptide
  MOD_RES (5), (5): Xaa is C or S

SEQ ID NO: 58465 - protein, 31 aa, Artificial Sequence
  Cyclic GFR-binding peptide
  MOD_RES (29), (31): Xaa is C or S
SNITMQIMRIKPHQGQHIGEMSLEEHSQXEX

SEQ ID NO: 58466 - protein, 33 aa, Artificial Sequence
  Cyclic GFR-binding peptide
  MOD_RES (2), (2): Xaa is C or S
EXVPTGQRPVQMRKIRIKPHQGQHKKATVLEEH

SEQ ID NO: 58467 - protein, 40 aa, Artificial Sequence; identical to SEQ ID NO: 15445
  Cyclic GFR-binding peptide
  MOD_RES (1), (38), (40): Xaa is C or S

SEQ ID NO: 58468 - protein, 41 aa, Artificial Sequence; identical to SEQ ID NO: 15447
  Cyclic GFR-binding peptide
  MOD_RES (1), (38), (40): Xaa is C or S

SEQ ID NO: 58469 - protein, 29 aa, Artificial Sequence
  Cyclic GFR-binding peptide
TQVQLSNITVQIMEIVRKKPIFIGEMSTL

SEQ ID NO: 58470 - protein, 26 aa, Artificial Sequence
  Cyclic GFR-binding peptide
SNITVQIMEIVRKKPIFLGEMSTLED

SEQ ID NO: 58471 - protein, 37 aa, Artificial Sequence; identical to SEQ ID NO: 15449
  Cyclic GFR-binding peptide
  MOD_RES (1), (1): Xaa is C or S

SEQ ID NO: 58472 - protein, 31 aa, Artificial Sequence
  Cyclic GFR-binding peptide
RPTQVQLSNITVQIMEIVRKKPIFIGEMSTL

SEQ ID NO: 58473 - protein, 42 aa, Artificial Sequence; identical to SEQ ID NO: 15451
  Cyclic GFR-binding peptide
  MOD_RES (7), (41): Xaa is C or S

SEQ ID NO: 58474 - protein, 30 aa, Artificial Sequence
  Cyclic GFR-binding peptide
PTGQSNITMQIMRIKPHQGQHIGEMSLEEH

SEQ ID NO: 58475 - protein, 36 aa, Artificial Sequence; identical to SEQ ID NO: 15453
  Cyclic GFR-binding peptide
  MOD_RES (35), (35): Xaa is C or S

SEQ ID NO: 58476 - protein, 33 aa, Artificial Sequence
  Cyclic GFR-binding peptide
  MOD_RES (33), (33): Xaa is C or S
PTEESNITMQIMRIKPHQGQHLGEMSFLQHNKX

SEQ ID NO: 58477 - protein, 30 aa, Artificial Sequence
  Cyclic GFR-binding peptide
RVHHRPVQVRKIEYVRKKPKLKKATVRLEE

SEQ ID NO: 58478 - protein, 37 aa, Artificial Sequence
  Cyclic GFR-binding peptide
  MOD_RES (4), (4): Xaa is C or S
SVKXQPSRVHHRPVQVRKIEYVRKKPKLKKATVRLEE

SEQ ID NO: 58479 - protein, 36 aa, Artificial Sequence
  Cyclic GFR-binding peptide
  MOD_RES (33), (35): Xaa is C or S
PTGQRPVQMRKIRIKPHQGQHKKATVLEEHSQXEXR

SEQ ID NO: 58480 - protein, 41 aa, Artificial Sequence; identical to SEQ ID NO: 15456
  Cyclic GFR-binding peptide
  MOD_RES (2), (39), (41): Xaa is C or S

SEQ ID NO: 58481 - protein, 34 aa, Artificial Sequence; identical to SEQ ID NO: 15457
  Cyclic GFR-binding peptide
  MOD_RES (34), (34): Xaa is C or S

SEQ ID NO: 58482 - protein, 39 aa, Artificial Sequence; identical to SEQ ID NO: 15458
  Cyclic GFR-binding peptide
  MOD_RES (5), (5): Xaa is C or S

SEQ ID NO: 58483 - protein, 39 aa, Artificial Sequence; identical to SEQ ID NO: 15460
  Cyclic GFR-binding peptide
  MOD_RES (36), (38): Xaa is C or S

SEQ ID NO: 58484 - protein, 37 aa, Artificial Sequence
  Cyclic GFR-binding peptide
  MOD_RES (6), (6): Xaa is C or S
DEGLEXVPTGQRPVQMRKIRIKPHQGQHKKATVLEEH

SEQ ID NO: 58485 - protein, 34 aa, Artificial Sequence; identical to SEQ ID NO: 15461
  Cyclic GFR-binding peptide

SEQ ID NO: 58486 - protein, 31 aa, Artificial Sequence
  Cyclic GFR-binding peptide
  MOD_RES (3), (3): Xaa is C or S
LEXVPTEERSVKMAKVRIKPHQGQHKEVQVF

SEQ ID NO: 58487 - protein, 32 aa, Artificial Sequence
  Cyclic GFR-binding peptide
  MOD_RES (4), (4): Xaa is C or S
GLEXVPTGQRSVKMAKVRIKPHQGQHKEVQVL

SEQ ID NO: 58488 - protein, 29 aa, Artificial Sequence
  Cyclic GFR-binding peptide
ERSVKMAKVRIKPHQGQHKEVQVFLQHNK

SEQ ID NO: 58489 - protein, 28 aa, Artificial Sequence
  Cyclic GFR-binding peptide
SNITMQIMRIKPHQGQHLGEMSFLQHNK

SEQ ID NO: 58490 - protein, 32 aa, Artificial Sequence
  Cyclic GFR-binding peptide
  MOD_RES (30), (32): Xaa is C or S
SNITVQIMEIVRKKPIFLGEMSTLEDHLAXKX

SEQ ID NO: 58491 - protein, 30 aa, Artificial Sequence
  Cyclic GFR-binding peptide
QLSNITVQIMEIVRKKPIFIGEMSTLEDHL

SEQ ID NO: 58492 - protein, 34 aa, Artificial Sequence; identical to SEQ ID NO: 15463
  Cyclic GFR-binding peptide
  MOD_RES (1), (1): Xaa is C or S

SEQ ID NO: 58493 - protein, 28 aa, Artificial Sequence
  Cyclic GFR-binding peptide
VPTGQSNITMQIMRIKPHQGQHIGEMSL

SEQ ID NO: 58494 - protein, 38 aa, Artificial Sequence; identical to SEQ ID NO: 15464
  Cyclic GFR-binding peptide
  MOD_RES (1), (38): Xaa is C or S

SEQ ID NO: 58495 - protein, 38 aa, Artificial Sequence; identical to SEQ ID NO: 15465
  Cyclic GFR-binding peptide
  MOD_RES (4), (38): Xaa is C or S

SEQ ID NO: 58496 - protein, 24 aa, Artificial Sequence
  Cyclic GFR-binding peptide
EERPVQMRKIRIKPHQGQHKKATV

SEQ ID NO: 58497 - protein, 39 aa, Artificial Sequence; identical to SEQ ID NO: 15466
  Cyclic GFR-binding peptide
  MOD_RES (1), (38): Xaa is C or S

SEQ ID NO: 58498 - protein, 32 aa, Artificial Sequence
  Cyclic GFR-binding peptide
  MOD_RES (32), (32): Xaa is C or S
HHSNITVQIMEYVRKKPKLLGEMSRLEEHLEX

SEQ ID NO: 58499 - protein, 37 aa, Artificial Sequence; identical to SEQ ID NO: 15467
  Cyclic GFR-binding peptide
  MOD_RES (4), (4): Xaa is C or S

SEQ ID NO: 58500 - protein, 31 aa, Artificial Sequence
  Cyclic GFR-binding peptide
QPSRVHHSNITVQIMEYVRKKPKLLGEMSRL

SEQ ID NO: 58501 - protein, 34 aa, Artificial Sequence; identical to SEQ ID NO: 15468
  Cyclic GFR-binding peptide
  MOD_RES (2), (2): Xaa is C or S

SEQ ID NO: 58502 - protein, 42 aa, Artificial Sequence; identical to SEQ ID NO: 15469
  Cyclic GFR-binding peptide
  MOD_RES (5), (39), (41): Xaa is C or S

SEQ ID NO: 58503 - protein, 35 aa, Artificial Sequence
  Cyclic GFR-binding peptide
  MOD_RES (33), (35): Xaa is C or S
VQLRSVKVAKVEIVRKKPIFKEVQVTLEDHLAXKX

SEQ ID NO: 58504 - protein, 23 aa, Artificial Sequence
  Cyclic GFR-binding peptide
RSVKMAKVRIKPHQGQHKEVQVF

SEQ ID NO: 58505 - protein, 30 aa, Artificial Sequence
  Cyclic GFR-binding peptide
  MOD_RES (29), (29): Xaa is C or S
RPVQMRKIRIKPHQGQHKKATVLEEHSQXE

SEQ ID NO: 58506 - protein, 37 aa, Artificial Sequence; identical to SEQ ID NO: 15474
  Cyclic GFR-binding peptide
  MOD_RES (3), (37): Xaa is C or S

SEQ ID NO: 58507 - protein, 23 aa, Artificial Sequence
  Cyclic GFR-binding peptide
RSVKMAKVRIKPHQGQHKEVQVL

SEQ ID NO: 58508 - protein, 35 aa, Artificial Sequence; identical to SEQ ID NO: 15475
  Cyclic GFR-binding peptide
  MOD_RES (1), (35): Xaa is C or S

SEQ ID NO: 58509 - protein, 41 aa, Artificial Sequence; identical to SEQ ID NO: 15473
  Cyclic GFR-binding peptide
  MOD_RES (2), (39), (41): Xaa is C or S

SEQ ID NO: 58510 - protein, 33 aa, Artificial Sequence
  Cyclic GFR-binding peptide
  MOD_RES (33), (33): Xaa is C or S
VQLSNITVQIMEIVRKKPIFLGEMSTLEDHLAX

SEQ ID NO: 58511 - protein, 39 aa, Artificial Sequence; identical to SEQ ID NO: 15477
  Cyclic GFR-binding peptide
  MOD_RES (4), (38): Xaa is C or S

SEQ ID NO: 58512 - protein, 28 aa, Artificial Sequence
  Cyclic GFR-binding peptide
PSRVHHSNITVQIMEYVRKKPKLIGEMS

SEQ ID NO: 58513 - protein, 33 aa, Artificial Sequence
  Cyclic GFR-binding peptide
QPSRVHHSNITVQIMEYVRKKPKLLGEMSRLEE

SEQ ID NO: 58514 - protein, 24 aa, Artificial Sequence
  Cyclic GFR-binding peptide
HSNITVQIMEYVRKKPKLLGEMSR

SEQ ID NO: 58515 - protein, 38 aa, Artificial Sequence; identical to SEQ ID NO: 15478
  Cyclic GFR-binding peptide
  MOD_RES (2), (36), (38): Xaa is C or S

SEQ ID NO: 58516 - protein, 28 aa, Artificial Sequence
  Cyclic GFR-binding peptide
SNITVQIMEYVRKKPKLLGEMSRLEEHL

SEQ ID NO: 58517 - protein, 29 aa, Artificial Sequence
  Cyclic GFR-binding peptide
  MOD_RES (2), (2): Xaa is C or S
EXVPTEERSVKMAKVRIKPHQGQHKEVQV

SEQ ID NO: 58518 - protein, 33 aa, Artificial Sequence
  Cyclic GFR-binding peptide
  MOD_RES (30), (32): Xaa is C or S
QSNITMQIMRIKPHQGQHIGEMSLEEHSQXEXR

SEQ ID NO: 58519 - protein, 33 aa, Artificial Sequence
  Cyclic GFR-binding peptide
  MOD_RES (6), (6): Xaa is C or S
DEGLEXVPTGQRSVKMAKVRIKPHQGQHKEVQV

SEQ ID NO: 58520 - protein, 29 aa, Artificial Sequence
  Cyclic GFR-binding peptide
VHHRPVQVRKIEYVRKKPKLKKATVRLEE

SEQ ID NO: 58521 - protein, 42 aa, Artificial Sequence; identical to SEQ ID NO: 15481
  Cyclic GFR-binding peptide
  MOD_RES (5), (42): Xaa is C or S

SEQ ID NO: 58522 - protein, 26 aa, Artificial Sequence
  Cyclic GFR-binding peptide
QRPVQMRKIRIKPHQGQHKKATVLEE

SEQ ID NO: 58523 - protein, 31 aa, Artificial Sequence
  Cyclic GFR-binding peptide
PSRVHHRPVQVRKIEYVRKKPKLKKATVRLE

SEQ ID NO: 58524 - protein, 34 aa, Artificial Sequence
  Cyclic GFR-binding peptide
  MOD_RES (31), (33): Xaa is C or S
GQSNITMQIMRIKPHQGQHIGEMSLEEHSQXEXR

SEQ ID NO: 58525 - protein, 23 aa, Artificial Sequence
  Cyclic GFR-binding peptide
SNITVQIMEIVRKKPIFIGEMST

SEQ ID NO: 58526 - protein, 33 aa, Artificial Sequence
  Cyclic GFR-binding peptide
  MOD_RES (1), (1): Xaa is C or S
XRPTQVQLRSVKVAKVEIVRKKPIFKEVQVTLE

SEQ ID NO: 58527 - protein, 36 aa, Artificial Sequence
  Cyclic GFR-binding peptide
  MOD_RES (4), (4): Xaa is C or S
SVKXQPSRVHHSNITVQIMEYVRKKPKLIGEMSRLE

SEQ ID NO: 58528 - protein, 34 aa, Artificial Sequence
  Cyclic GFR-binding peptide
  MOD_RES (33), (33): Xaa is C or S
VHHSNITVQIMEYVRKKPKLLGEMSRLEEHLEXA

SEQ ID NO: 58529 - protein, 27 aa, Artificial Sequence
  Cyclic GFR-binding peptide
SNITMQIMRIKPHQGQHLGEMSFLQHN

SEQ ID NO: 58530 - protein, 37 aa, Artificial Sequence
  Cyclic GFR-binding peptide
  MOD_RES (34), (36): Xaa is C or S
RVHHSNITVQIMEYVRKKPKLIGEMSRLEEHLEXAXA

SEQ ID NO: 58531 - protein, 42 aa, Artificial Sequence; identical to SEQ ID NO: 15485
  Cyclic GFR-binding peptide
  MOD_RES (5), (39), (41): Xaa is C or S

SEQ ID NO: 58532 - protein, 28 aa, Artificial Sequence
  Cyclic GFR-binding peptide
RSVKVAKVEIVRKKPIFKEVQVTLEDHL

SEQ ID NO: 58533 - protein, 27 aa, Artificial Sequence
  Cyclic GFR-binding peptide
SNITVQIMEIVRKKPIFIGEMSTLEDH

SEQ ID NO: 58534 - protein, 39 aa, Artificial Sequence; identical to SEQ ID NO: 15486
  Cyclic GFR-binding peptide
  MOD_RES (3), (3): Xaa is C or S

SEQ ID NO: 58535 - protein, 32 aa, Artificial Sequence
  Cyclic GFR-binding peptide
VHHSNITVQIMEYVRKKPKLIGEMSRLEEHLE

SEQ ID NO: 58536 - protein, 33 aa, Artificial Sequence
  Cyclic GFR-binding peptide
  MOD_RES (32), (32): Xaa is C or S
HHSNITVQIMEYVRKKPKLLGEMSRLEEHLEXA

SEQ ID NO: 58537 - protein, 29 aa, Artificial Sequence
  Cyclic GFR-binding peptide
PTGQRSVKMAKVRIKPHQGQHKEVQVLEE

SEQ ID NO: 58538 - protein, 35 aa, Artificial Sequence
  Cyclic GFR-binding peptide
  MOD_RES (7), (7): Xaa is C or S
NDEGLEXVPTEERPVQMRKIRIKPHQGQHKKATVF

SEQ ID NO: 58539 - protein, 34 aa, Artificial Sequence; identical to SEQ ID NO: 15490
  Cyclic GFR-binding peptide

SEQ ID NO: 58540 - protein, 36 aa, Artificial Sequence; identical to SEQ ID NO: 15489
  Cyclic GFR-binding peptide
  MOD_RES (3), (3): Xaa is C or S

SEQ ID NO: 58541 - protein, 25 aa, Artificial Sequence
  Cyclic GFR-binding peptide
HRPVQVRKIEYVRKKPKLKKATVRL

SEQ ID NO: 58542 - protein, 40 aa, Artificial Sequence; identical to SEQ ID NO: 15493
  Cyclic GFR-binding peptide
  MOD_RES (4), (4): Xaa is C or S

SEQ ID NO: 58543 - protein, 36 aa, Artificial Sequence; identical to SEQ ID NO: 15492
  Cyclic GFR-binding peptide
  MOD_RES (1), (35): Xaa is C or S

SEQ ID NO: 58544 - protein, 42 aa, Artificial Sequence; identical to SEQ ID NO: 15494
  Cyclic GFR-binding peptide
  MOD_RES (2), (39), (41): Xaa is C or S

SEQ ID NO: 58545 - protein, 35 aa, Artificial Sequence; identical to SEQ ID NO: 15495
  Cyclic GFR-binding peptide
  MOD_RES (35), (35): Xaa is C or S

SEQ ID NO: 58546 - protein, 38 aa, Artificial Sequence; identical to SEQ ID NO: 15496
  Cyclic GFR-binding peptide
  MOD_RES (5), (5): Xaa is C or S

SEQ ID NO: 58547 - protein, 35 aa, Artificial Sequence; identical to SEQ ID NO: 15497
  Cyclic GFR-binding peptide
  MOD_RES (34), (34): Xaa is C or S

SEQ ID NO: 58548 - protein, 27 aa, Artificial Sequence
  Cyclic GFR-binding peptide
TGQRPVQMRKIRIKPHQGQHKKATVLE

SEQ ID NO: 58549 - protein, 35 aa, Artificial Sequence
  Cyclic GFR-binding peptide
  MOD_RES (33), (35): Xaa is C or S
PTGQRSVKMAKVRIKPHQGQHKEVQVLEEHSQXEX

SEQ ID NO: 58550 - protein, 33 aa, Artificial Sequence
  Cyclic GFR-binding peptide
  MOD_RES (1), (1): Xaa is C or S
XQPSRVHHSNITVQIMEYVRKKPKLLGEMSRLE

SEQ ID NO: 58551 - protein, 31 aa, Artificial Sequence
  Cyclic GFR-binding peptide
VPTEERSVKMAKVRIKPHQGQHKEVQVFLQH

SEQ ID NO: 58552 - protein, 36 aa, Artificial Sequence
  Cyclic GFR-binding peptide
  MOD_RES (5), (5): Xaa is C or S
SSVKXQPSRVHHRPVQVRKIEYVRKKPKLKKATVRL

SEQ ID NO: 58553 - protein, 33 aa, Artificial Sequence
  Cyclic GFR-binding peptide
  MOD_RES (33), (33): Xaa is C or S
VHHRPVQVRKIEYVRKKPKLKKATVRLEEHLEX

SEQ ID NO: 58554 - protein, 34 aa, Artificial Sequence
  Cyclic GFR-binding peptide
  MOD_RES (5), (5): Xaa is C or S
EGLEXVPTEESNITMQIMRIKPHQGQHLGEMSFL

SEQ ID NO: 58555 - protein, 40 aa, Artificial Sequence; identical to SEQ ID NO: 15502
  Cyclic GFR-binding peptide
  MOD_RES (7), (7): Xaa is C or S

SEQ ID NO: 58556 - protein, 27 aa, Artificial Sequence
  Cyclic GFR-binding peptide
GQSNITMQIMRIKPHQGQHIGEMSLEE

SEQ ID NO: 58557 - protein, 35 aa, Artificial Sequence; identical to SEQ ID NO: 15503
  Cyclic GFR-binding peptide
  MOD_RES (2), (2): Xaa is C or S

SEQ ID NO: 58558 - protein, 30 aa, Artificial Sequence
  Cyclic GFR-binding peptide
QPSRVHHSNITVQIMEYVRKKPKLLGEMSR

SEQ ID NO: 58559 - protein, 32 aa, Artificial Sequence
  Cyclic GFR-binding peptide
QPSRVHHSNITVQIMEYVRKKPKLLGEMSRLE

SEQ ID NO: 58560 - protein, 31 aa, Artificial Sequence
  Cyclic GFR-binding peptide
  MOD_RES (31), (31): Xaa is C or S
GQRPVQMRKIRIKPHQGQHKKATVLEEHSQX

SEQ ID NO: 58561 - protein, 38 aa, Artificial Sequence; identical to SEQ ID NO: 15505
  Cyclic GFR-binding peptide
  MOD_RES (4), (38): Xaa is C or S

SEQ ID NO: 58562 - protein, 25 aa, Artificial Sequence
  Cyclic GFR-binding peptide
RSVKMAKVRIKPHQGQHKEVQVFLQ

SEQ ID NO: 58563 - protein, 35 aa, Artificial Sequence; identical to SEQ ID NO: 15507
  Cyclic GFR-binding peptide
  MOD_RES (1), (1): Xaa is C or S

SEQ ID NO: 58564 - protein, 34 aa, Artificial Sequence
  Cyclic GFR-binding peptide
  MOD_RES (3), (3): Xaa is C or S
LEXVPTGQRPVQMRKIRIKPHQGQHKKATVLEEH

SEQ ID NO: 58565 - protein, 36 aa, Artificial Sequence
  Cyclic GFR-binding peptide
  MOD_RES (7), (7): Xaa is C or S
NDEGLEXVPTGQSNITMQIMRIKPHQGQHIGEMSLE

SEQ ID NO: 58566 - protein, 28 aa, Artificial Sequence
  Cyclic GFR-binding peptide
VQLSNITVQIMEIVRKKPIFIGEMSTLE

SEQ ID NO: 58567 - protein, 30 aa, Artificial Sequence
  Cyclic GFR-binding peptide
TGQSNITMQIMRIKPHQGQHIGEMSLEEHS

SEQ ID NO: 58568 - protein, 36 aa, Artificial Sequence; identical to SEQ ID NO: 15510
  Cyclic GFR-binding peptide
  MOD_RES (1), (35): Xaa is C or S

SEQ ID NO: 58569 - protein, 34 aa, Artificial Sequence
  Cyclic GFR-binding peptide
  MOD_RES (5), (5): Xaa is C or S
EGLEXVPTEERSVKMAKVRIKPHQGQHKEVQVFL

SEQ ID NO: 58570 - protein, 31 aa, Artificial Sequence
  Cyclic GFR-binding peptide
TGQSNITMQIMRIKPHQGQHIGEMSLEEHSQ

SEQ ID NO: 58571 - protein, 35 aa, Artificial Sequence; identical to SEQ ID NO: 15511
  Cyclic GFR-binding peptide
  MOD_RES (2), (2): Xaa is C or S

SEQ ID NO: 58572 - protein, 34 aa, Artificial Sequence
  Cyclic GFR-binding peptide
  MOD_RES (6), (6): Xaa is C or S
DEGLEXVPTEERPVQMRKIRIKPHQGQHKKATVF

SEQ ID NO: 58573 - protein, 36 aa, Artificial Sequence; identical to SEQ ID NO: 15513
  Cyclic GFR-binding peptide
  MOD_RES (35), (35): Xaa is C or S

SEQ ID NO: 58574 - protein, 31 aa, Artificial Sequence
  Cyclic GFR-binding peptide
QLSNITVQIMEIVRKKPIFLGEMSTLEDHLA

SEQ ID NO: 58575 - protein, 27 aa, Artificial Sequence
  Cyclic GFR-binding peptide
PTEERPVQMRKIRIKPHQGQHKKATVF

SEQ ID NO: 58576 - protein, 25 aa, Artificial Sequence
  Cyclic GFR-binding peptide
TGQSNITMQIMRIKPHQGQHIGEMS

SEQ ID NO: 58577 - protein, 35 aa, Artificial Sequence; identical to SEQ ID NO: 15518
  Cyclic GFR-binding peptide
  MOD_RES (3), (3): Xaa is C or S

SEQ ID NO: 58578 - protein, 41 aa, Artificial Sequence; identical to SEQ ID NO: 15519
  Cyclic GFR-binding peptide
  MOD_RES (5), (5): Xaa is C or S

SEQ ID NO: 58579 - protein, 30 aa, Artificial Sequence
  Cyclic GFR-binding peptide
PSRVHHSNITVQIMEYVRKKPKLLGEMSRL

SEQ ID NO: 58580 - protein, 36 aa, Artificial Sequence; identical to SEQ ID NO: 15521
  Cyclic GFR-binding peptide
  MOD_RES (1), (1): Xaa is C or S

SEQ ID NO: 58581 - protein, 35 aa, Artificial Sequence
  Cyclic GFR-binding peptide
  MOD_RES (32), (34): Xaa is C or S
QLRSVKVAKVEIVRKKPIFKEVQVTLEDHLAXKXE

SEQ ID NO: 58582 - protein, 34 aa, Artificial Sequence
  Cyclic GFR-binding peptide
  MOD_RES (4), (4): Xaa is C or S
GLEXVPTEESNITMQIMRIKPHQGQHLGEMSFLQ

SEQ ID NO: 58583 - protein, 35 aa, Artificial Sequence
  Cyclic GFR-binding peptide
  MOD_RES (4), (4): Xaa is C or S
NVQXRPTQVQLRSVKVAKVEIVRKKPIFKEVQVTL

SEQ ID NO: 58584 - protein, 35 aa, Artificial Sequence
  Cyclic GFR-binding peptide
  MOD_RES (33), (35): Xaa is C or S
PTEERSVKMAKVRIKPHQGQHKEVQVFLQHNKXEX

SEQ ID NO: 58585 - protein, 32 aa, Artificial Sequence
  Cyclic GFR-binding peptide
RVHHSNITVQIMEYVRKKPKLLGEMSRLEEHL

SEQ ID NO: 58586 - protein, 42 aa, Artificial Sequence; identical to SEQ ID NO: 15525
  Cyclic GFR-binding peptide
  MOD_RES (3), (40), (42): Xaa is C or S

SEQ ID NO: 58587 - protein, 35 aa, Artificial Sequence
  Cyclic GFR-binding peptide
  MOD_RES (4), (4): Xaa is C or S
SVKXQPSRVHHRPVQVRKIEYVRKKPKLKKATVRL

SEQ ID NO: 58588 - protein, 30 aa, Artificial Sequence
  Cyclic GFR-binding peptide
QLSNITVQIMEIVRKKPIFLGEMSTLEDHL

SEQ ID NO: 58589 - protein, 32 aa, Artificial Sequence
  Cyclic GFR-binding peptide
  MOD_RES (32), (32): Xaa is C or S
QLSNITVQIMEIVRKKPIFLGEMSTLEDHLAX

SEQ ID NO: 58590 - protein, 30 aa, Artificial Sequence
  Cyclic GFR-binding peptide
SRVHHRPVQVRKIEYVRKKPKLKKATVRLE

SEQ ID NO: 58591 - protein, 34 aa, Artificial Sequence
  Cyclic GFR-binding peptide
  MOD_RES (5), (5): Xaa is C or S
RNVQXRPTQVQLSNITVQIMEIVRKKPIFLGEMS

SEQ ID NO: 58592 - protein, 31 aa, Artificial Sequence
  Cyclic GFR-binding peptide
VPTEESNITMQIMRIKPHQGQHLGEMSFLQH

SEQ ID NO: 58593 - protein, 32 aa, Artificial Sequence
  Cyclic GFR-binding peptide
PTEERSVKMAKVRIKPHQGQHKEVQVFLQHNK

SEQ ID NO: 58594 - protein, 28 aa, Artificial Sequence
  Cyclic GFR-binding peptide
  MOD_RES (1), (1): Xaa is C or S
XVPTGQRSVKMAKVRIKPHQGQHKEVQV

SEQ ID NO: 58595 - protein, 34 aa, Artificial Sequence
  Cyclic GFR-binding peptide
  MOD_RES (31), (33): Xaa is C or S
GQRSVKMAKVRIKPHQGQHKEVQVLEEHSQXEXR

SEQ ID NO: 58596 - protein, 33 aa, Artificial Sequence
  Cyclic GFR-binding peptide
  MOD_RES (33), (33): Xaa is C or S
VHHSNITVQIMEYVRKKPKLLGEMSRLEEHLEX

SEQ ID NO: 58597 - protein, 37 aa, Artificial Sequence
  Cyclic GFR-binding peptide
  MOD_RES (4), (4): Xaa is C or S
NVQXRPTQVQLSNITVQIMEIVRKKPIFLGEMSTLED

SEQ ID NO: 58598 - protein, 27 aa, Artificial Sequence
  Cyclic GFR-binding peptide
PTEESNITMQIMRIKPHQGQHLGEMSF

SEQ ID NO: 58599 - protein, 36 aa, Artificial Sequence; identical to SEQ ID NO: 15528
  Cyclic GFR-binding peptide
  MOD_RES (2), (2): Xaa is C or S

SEQ ID NO: 58600 - protein, 31 aa, Artificial Sequence
  Cyclic GFR-binding peptide
VQLSNITVQIMEIVRKKPIFLGEMSTLEDHL

SEQ ID NO: 58601 - protein, 28 aa, Artificial Sequence
  Cyclic GFR-binding peptide
RVHHSNITVQIMEYVRKKPKLIGEMSRL

SEQ ID NO: 58602 - protein, 32 aa, Artificial Sequence
  Cyclic GFR-binding peptide
  MOD_RES (3), (3): Xaa is C or S
LEXVPTGQRPVQMRKIRIKPHQGQHKKATVLE

SEQ ID NO: 58603 - protein, 26 aa, Artificial Sequence
  Cyclic GFR-binding peptide
RPVQVRKIEYVRKKPKLKKATVRLEE

SEQ ID NO: 58604 - protein, 30 aa, Artificial Sequence
  Cyclic GFR-binding peptide
VPTGQSNITMQIMRIKPHQGQHIGEMSLEE

SEQ ID NO: 58605 - protein, 34 aa, Artificial Sequence
  Cyclic GFR-binding peptide
  MOD_RES (31), (33): Xaa is C or S
GQRPVQMRKIRIKPHQGQHKKATVLEEHSQXEXR

SEQ ID NO: 58606 - protein, 39 aa, Artificial Sequence; identical to SEQ ID NO: 15534
  Cyclic GFR-binding peptide
  MOD_RES (6), (6): Xaa is C or S

SEQ ID NO: 58607 - protein, 38 aa, Artificial Sequence; identical to SEQ ID NO: 15535
  Cyclic GFR-binding peptide
  MOD_RES (1), (35), (37): Xaa is C or S

SEQ ID NO: 58608 - protein, 37 aa, Artificial Sequence
  Cyclic GFR-binding peptide
  MOD_RES (7), (7): Xaa is C or S
NDEGLEXVPTGQSNITMQIMRIKPHQGQHIGEMSLEE

SEQ ID NO: 58609 - protein, 31 aa, Artificial Sequence
  Cyclic GFR-binding peptide
  MOD_RES (1), (1): Xaa is C or S
XVPTGQRSVKMAKVRIKPHQGQHKEVQVLEE

SEQ ID NO: 58610 - protein, 44 aa, Artificial Sequence; identical to SEQ ID NO: 15539
  Cyclic GFR-binding peptide
  MOD_RES (7), (41), (43): Xaa is C or S

SEQ ID NO: 58611 - protein, 36 aa, Artificial Sequence; identical to SEQ ID NO: 15540
  Cyclic GFR-binding peptide
  MOD_RES (1), (1): Xaa is C or S

SEQ ID NO: 58612 - protein, 39 aa, Artificial Sequence; identical to SEQ ID NO: 15541
  Cyclic GFR-binding peptide
  MOD_RES (4), (38): Xaa is C or S

SEQ ID NO: 58613 - protein, 43 aa, Artificial Sequence; identical to SEQ ID NO: 15542
  Cyclic GFR-binding peptide
  MOD_RES (3), (40), (42): Xaa is C or S

SEQ ID NO: 58614 - protein, 36 aa, Artificial Sequence; identical to SEQ ID NO: 15543
  Cyclic GFR-binding peptide
  MOD_RES (2), (36): Xaa is C or S

SEQ ID NO: 58615 - protein, 28 aa, Artificial Sequence
  Cyclic GFR-binding peptide
PTGQRPVQMRKIRIKPHQGQHKKATVLE

SEQ ID NO: 58616 - protein, 25 aa, Artificial Sequence
  Cyclic GFR-binding peptide
HHSNITVQIMEYVRKKPKLIGEMSR

SEQ ID NO: 58617 - protein, 42 aa, Artificial Sequence; identical to SEQ ID NO: 15544
  Cyclic GFR-binding peptide
  MOD_RES (5), (39), (41): Xaa is C or S

SEQ ID NO: 58618 - protein, 34 aa, Artificial Sequence
  Cyclic GFR-binding peptide
  MOD_RES (3), (3): Xaa is C or S
VKXQPSRVHHSNITVQIMEYVRKKPKLLGEMSRL

SEQ ID NO: 58619 - protein, 33 aa, Artificial Sequence
  Cyclic GFR-binding peptide
  MOD_RES (4), (4): Xaa is C or S
NVQXRPTQVQLRSVKVAKVEIVRKKPIFKEVQV

SEQ ID NO: 58620 - protein, 28 aa, Artificial Sequence
  Cyclic GFR-binding peptide
TEERSVKMAKVRIKPHQGQHKEVQVFLQ

SEQ ID NO: 58621 - protein, 29 aa, Artificial Sequence
  Cyclic GFR-binding peptide
VPTGQRSVKMAKVRIKPHQGQHKEVQVLE

SEQ ID NO: 58622 - protein, 32 aa, Artificial Sequence
  Cyclic GFR-binding peptide
  MOD_RES (32), (32): Xaa is C or S
HHRPVQVRKIEYVRKKPKLKKATVRLEEHLEX

SEQ ID NO: 58623 - protein, 44 aa, Artificial Sequence; identical to SEQ ID NO: 15547
  Cyclic GFR-binding peptide
  MOD_RES (7), (41), (43): Xaa is C or S

SEQ ID NO: 58624 - protein, 37 aa, Artificial Sequence
  Cyclic GFR-binding peptide
  MOD_RES (5), (5): Xaa is C or S
RNVQXRPTQVQLRSVKVAKVEIVRKKPIFKEVQVTLE

SEQ ID NO: 58625 - protein, 32 aa, Artificial Sequence
  Cyclic GFR-binding peptide
  MOD_RES (4), (4): Xaa is C or S
GLEXVPTEERPVQMRKIRIKPHQGQHKKATVF

SEQ ID NO: 58626 - protein, 37 aa, Artificial Sequence; identical to SEQ ID NO: 15548
  Cyclic GFR-binding peptide
  MOD_RES (36), (36): Xaa is C or S

SEQ ID NO: 58627 - protein, 31 aa, Artificial Sequence
  Cyclic GFR-binding peptide
VHHSNITVQIMEYVRKKPKLIGEMSRLEEHL

SEQ ID NO: 58628 - protein, 36 aa, Artificial Sequence
  Cyclic GFR-binding peptide
  MOD_RES (4), (4): Xaa is C or S
NVQXRPTQVQLSNITVQIMEIVRKKPIFLGEMSTLE

SEQ ID NO: 58629 - protein, 36 aa, Artificial Sequence
  Cyclic GFR-binding peptide
  MOD_RES (33), (35): Xaa is C or S
PTGQSNITMQIMRIKPHQGQHIGEMSLEEHSQXEXR

SEQ ID NO: 58630 - protein, 35 aa, Artificial Sequence
  Cyclic GFR-binding peptide
  MOD_RES (5), (5): Xaa is C or S
EGLEXVPTGQRPVQMRKIRIKPHQGQHKKATVLEE

SEQ ID NO: 58631 - protein, 30 aa, Artificial Sequence
  Cyclic GFR-binding peptide
TEESNITMQIMRIKPHQGQHLGEMSFLQHN

SEQ ID NO: 58632 - protein, 31 aa, Artificial Sequence
  Cyclic GFR-binding peptide
PTEERPVQMRKIRIKPHQGQHKKATVFLQHN

SEQ ID NO: 58633 - protein, 33 aa, Artificial Sequence
  Cyclic GFR-binding peptide
  MOD_RES (5), (5): Xaa is C or S
EGLEXVPTGQRSVKMAKVRIKPHQGQHKEVQVL

SEQ ID NO: 58634 - protein, 27 aa, Artificial Sequence
  Cyclic GFR-binding peptide
RSVKVAKVEIVRKKPIFKEVQVTLEDH

SEQ ID NO: 58635 - protein, 34 aa, Artificial Sequence; identical to SEQ ID NO: 15552
  Cyclic GFR-binding peptide
  MOD_RES (2), (2): Xaa is C or S

SEQ ID NO: 58636 - protein, 31 aa, Artificial Sequence
  Cyclic GFR-binding peptide
PTGQRSVKMAKVRIKPHQGQHKEVQVLEEHS

SEQ ID NO: 58637 - protein, 39 aa, Artificial Sequence; identical to SEQ ID NO: 15553
  Cyclic GFR-binding peptide
  MOD_RES (1), (38): Xaa is C or S

SEQ ID NO: 58638 - protein, 23 aa, Artificial Sequence
  Cyclic GFR-binding peptide
QRPVQMRKIRIKPHQGQHKKATV

SEQ ID NO: 58639 - protein, 34 aa, Artificial Sequence
  Cyclic GFR-binding peptide
  MOD_RES (3), (3): Xaa is C or S
LEXVPTGQRSVKMAKVRIKPHQGQHKEVQVLEEH

SEQ ID NO: 58640 - protein, 38 aa, Artificial Sequence; identical to SEQ ID NO: 15557
  Cyclic GFR-binding peptide
  MOD_RES (5), (5): Xaa is C or S

SEQ ID NO: 58641 - protein, 30 aa, Artificial Sequence
  Cyclic GFR-binding peptide
  MOD_RES (3), (3): Xaa is C or S
LEXVPTGQRPVQMRKIRIKPHQGQHKKATV

SEQ ID NO: 58642 - protein, 24 aa, Artificial Sequence
  Cyclic GFR-binding peptide
EESNITMQIMRIKPHQGQHLGEMS

SEQ ID NO: 58643 - protein, 32 aa, Artificial Sequence
  Cyclic GFR-binding peptide
  MOD_RES (2), (2): Xaa is C or S
KXQPSRVHHSNITVQIMEYVRKKPKLLGEMSR

SEQ ID NO: 58644 - protein, 31 aa, Artificial Sequence
  Cyclic GFR-binding peptide
  MOD_RES (30), (30): Xaa is C or S
SNITVQIMEYVRKKPKLIGEMSRLEEHLEXA

SEQ ID NO: 58645 - protein, 34 aa, Artificial Sequence
  Cyclic GFR-binding peptide
  MOD_RES (4), (4): Xaa is C or S
GLEXVPTEERPVQMRKIRIKPHQGQHKKATVFLQ

SEQ ID NO: 58646 - protein, 33 aa, Artificial Sequence
  Cyclic GFR-binding peptide
  MOD_RES (6), (6): Xaa is C or S
DEGLEXVPTGQSNITMQIMRIKPHQGQHIGEMS

SEQ ID NO: 58647 - protein, 32 aa, Artificial Sequence
  Cyclic GFR-binding peptide
VQLRSVKVAKVEIVRKKPIFKEVQVTLEDHLA

SEQ ID NO: 58648 - protein, 38 aa, Artificial Sequence
  Cyclic GFR-binding peptide
  MOD_RES (7), (7): Xaa is C or S
NDEGLEXVPTEESNITMQIMRIKPHQGQHLGEMSFLQH

SEQ ID NO: 58649 - protein, 31 aa, Artificial Sequence
  Cyclic GFR-binding peptide
  MOD_RES (30), (30): Xaa is C or S
QRSVKMAKVRIKPHQGQHKEVQVLEEHSQXE

SEQ ID NO: 58650 - protein, 43 aa, Artificial Sequence; identical to SEQ ID NO: 15562
  Cyclic GFR-binding peptide
  MOD_RES (4), (41), (43): Xaa is C or S

SEQ ID NO: 58651 - protein, 30 aa, Artificial Sequence
  Cyclic GFR-binding peptide
  MOD_RES (30), (30): Xaa is C or S
ESNITMQIMRIKPHQGQHLGEMSFLQHNKX

SEQ ID NO: 58652 - protein, 34 aa, Artificial Sequence; identical to SEQ ID NO: 15565
  Cyclic GFR-binding peptide
  MOD_RES (1), (1): Xaa is C or S

SEQ ID NO: 58653 - protein, 39 aa, Artificial Sequence; identical to SEQ ID NO: 15566
  Cyclic GFR-binding peptide
  MOD_RES (3), (3): Xaa is C or S

SEQ ID NO: 58654 - protein, 29 aa, Artificial Sequence
  Cyclic GFR-binding peptide
PSRVHHSNITVQIMEYVRKKPKLIGEMSR

SEQ ID NO: 58655 - protein, 35 aa, Artificial Sequence; identical to SEQ ID NO: 15568
  Cyclic GFR-binding peptide
  MOD_RES (2), (2): Xaa is C or S

SEQ ID NO: 58656 - protein, 30 aa, Artificial Sequence
  Cyclic GFR-binding peptide
HRPVQVRKIEYVRKKPKLKKATVRLEEHLE

SEQ ID NO: 58657 - protein, 33 aa, Artificial Sequence
  Cyclic GFR-binding peptide
  MOD_RES (31), (33): Xaa is C or S
LSNITVQIMEIVRKKPIFLGEMSTLEDHLAXKX

SEQ ID NO: 58658 - protein, 37 aa, Artificial Sequence; identical to SEQ ID NO: 15570
  Cyclic GFR-binding peptide
  MOD_RES (37), (37): Xaa is C or S

SEQ ID NO: 58659 - protein, 30 aa, Artificial Sequence
  Cyclic GFR-binding peptide
HSNITVQIMEYVRKKPKLIGEMSRLEEHLE

SEQ ID NO: 58660 - protein, 36 aa, Artificial Sequence; identical to SEQ ID NO: 15571
  Cyclic GFR-binding peptide
  MOD_RES (1), (35): Xaa is C or S

SEQ ID NO: 58661 - protein, 40 aa, Artificial Sequence; identical to SEQ ID NO: 15574
  Cyclic GFR-binding peptide
  MOD_RES (37), (39): Xaa is C or S

SEQ ID NO: 58662 - protein, 40 aa, Artificial Sequence; identical to SEQ ID NO: 15575
  Cyclic GFR-binding peptide
  MOD_RES (3), (40): Xaa is C or S

SEQ ID NO: 58663 - protein, 33 aa, Artificial Sequence
  Cyclic GFR-binding peptide
QVQLSNITVQIMEIVRKKPIFLGEMSTLEDHLA

SEQ ID NO: 58664 - protein, 36 aa, Artificial Sequence
  Cyclic GFR-binding peptide
  MOD_RES (3), (3): Xaa is C or S
VQXRPTQVQLSNITVQIMEIVRKKPIFLGEMSTLED

SEQ ID NO: 58665 - protein, 36 aa, Artificial Sequence; identical to SEQ ID NO: 15576
  Cyclic GFR-binding peptide
  MOD_RES (2), (2): Xaa is C or S

SEQ ID NO: 58666 - protein, 35 aa, Artificial Sequence; identical to SEQ ID NO: 15577
  Cyclic GFR-binding peptide

SEQ ID NO: 58667 - protein, 39 aa, Artificial Sequence; identical to SEQ ID NO: 15578
  Cyclic GFR-binding peptide
  MOD_RES (6), (6): Xaa is C or S

SEQ ID NO: 58668 - protein, 31 aa, Artificial Sequence
  Cyclic GFR-binding peptide
HHSNITVQIMEYVRKKPKLLGEMSRLEEHLE

SEQ ID NO: 58669 - protein, 43 aa, Artificial Sequence; identical to SEQ ID NO: 15580
  Cyclic GFR-binding peptide
  MOD_RES (7), (41), (43): Xaa is C or S

SEQ ID NO: 58670 - protein, 40 aa, Artificial Sequence; identical to SEQ ID NO: 15581
  Cyclic GFR-binding peptide
  MOD_RES (1), (38), (40): Xaa is C or S

SEQ ID NO: 58671 - protein, 40 aa, Artificial Sequence; identical to SEQ ID NO: 15582
  Cyclic GFR-binding peptide
  MOD_RES (1), (38), (40): Xaa is C or S

SEQ ID NO: 58672 - protein, 33 aa, Artificial Sequence
  Cyclic GFR-binding peptide
  MOD_RES (3), (3): Xaa is C or S
VQXRPTQVQLRSVKVAKVEIVRKKPIFKEVQVT

SEQ ID NO: 58673 - protein, 36 aa, Artificial Sequence; identical to SEQ ID NO: 15585
  Cyclic GFR-binding peptide
  MOD_RES (1), (1): Xaa is C or S

SEQ ID NO: 58674 - protein, 24 aa, Artificial Sequence
  Cyclic GFR-binding peptide
SNITVQIMEYVRKKPKLIGEMSRL

SEQ ID NO: 58675 - protein, 33 aa, Artificial Sequence; identical to SEQ ID NO: 15584
  Cyclic GFR-binding peptide

SEQ ID NO: 58676 - protein, 28 aa, Artificial Sequence
  Cyclic GFR-binding peptide
VQLSNITVQIMEIVRKKPIFLGEMSTLE

SEQ ID NO: 58677 - protein, 33 aa, Artificial Sequence
  Cyclic GFR-binding peptide
  MOD_RES (33), (33): Xaa is C or S
VHHSNITVQIMEYVRKKPKLIGEMSRLEEHLEX

SEQ ID NO: 58678 - protein, 33 aa, Artificial Sequence; identical to SEQ ID NO: 15586
  Cyclic GFR-binding peptide

SEQ ID NO: 58679 - protein, 27 aa, Artificial Sequence
  Cyclic GFR-binding peptide
EERSVKMAKVRIKPHQGQHKEVQVFLQ

SEQ ID NO: 58680 - protein, 28 aa, Artificial Sequence
  Cyclic GFR-binding peptide
TGQRPVQMRKIRIKPHQGQHKKATVLEE

SEQ ID NO: 58681 - protein, 34 aa, Artificial Sequence; identical to SEQ ID NO: 15587
  Cyclic GFR-binding peptide

SEQ ID NO: 58682 - protein, 35 aa, Artificial Sequence
  Cyclic GFR-binding peptide
  MOD_RES (5), (5): Xaa is C or S
RNVQXRPTQVQLSNITVQIMEIVRKKPIFLGEMST

SEQ ID NO: 58683 - protein, 26 aa, Artificial Sequence
  Cyclic GFR-binding peptide
SNITMQIMRIKPHQGQHIGEMSLEEH

SEQ ID NO: 58684 - protein, 40 aa, Artificial Sequence; identical to SEQ ID NO: 15588
  Cyclic GFR-binding peptide
  MOD_RES (4), (4): Xaa is C or S

SEQ ID NO: 58685 - protein, 30 aa, Artificial Sequence
  Cyclic GFR-binding peptide
LSNITVQIMEIVRKKPIFLGEMSTLEDHLA

SEQ ID NO: 58686 - protein, 30 aa, Artificial Sequence
  Cyclic GFR-binding peptide
PSRVHHRPVQVRKIEYVRKKPKLKKATVRL

SEQ ID NO: 58687 - protein, 34 aa, Artificial Sequence; identical to SEQ ID NO: 15591
  Cyclic GFR-binding peptide
  MOD_RES (34), (34): Xaa is C or S

SEQ ID NO: 58688 - protein, 31 aa, Artificial Sequence
  Cyclic GFR-binding peptide
TEERSVKMAKVRIKPHQGQHKEVQVFLQHNK

SEQ ID NO: 58689 - protein, 33 aa, Artificial Sequence
  Cyclic GFR-binding peptide
  MOD_RES (33), (33): Xaa is C or S
VQLRSVKVAKVEIVRKKPIFKEVQVTLEDHLAX

SEQ ID NO: 58690 - protein, 34 aa, Artificial Sequence
  Cyclic GFR-binding peptide
  MOD_RES (1), (1): Xaa is C or S
XQPSRVHHRPVQVRKIEYVRKKPKLKKATVRLEE

SEQ ID NO: 58691 - protein, 27 aa, Artificial Sequence
  Cyclic GFR-binding peptide
QVQLSNITVQIMEIVRKKPIFIGEMST

SEQ ID NO: 58692 - protein, 36 aa, Artificial Sequence; identical to SEQ ID NO: 15592
  Cyclic GFR-binding peptide
  MOD_RES (2), (2): Xaa is C or S

SEQ ID NO: 58693 - protein, 31 aa, Artificial Sequence
  Cyclic GFR-binding peptide
HHRPVQVRKIEYVRKKPKLKKATVRLEEHLE

SEQ ID NO: 58694 - protein, 40 aa, Artificial Sequence; identical to SEQ ID NO: 15593
  Cyclic GFR-binding peptide
  MOD_RES (7), (7): Xaa is C or S

SEQ ID NO: 58695 - protein, 32 aa, Artificial Sequence
  Cyclic GFR-binding peptide
  MOD_RES (1), (1): Xaa is C or S
XVPTGQRSVKMAKVRIKPHQGQHKEVQVLEEH

SEQ ID NO: 58696 - protein, 31 aa, Artificial Sequence
  Cyclic GFR-binding peptide
TGQRSVKMAKVRIKPHQGQHKEVQVLEEHSQ

SEQ ID NO: 58697 - protein, 36 aa, Artificial Sequence; identical to SEQ ID NO: 15594
  Cyclic GFR-binding peptide

SEQ ID NO: 58698 - protein, 25 aa, Artificial Sequence
  Cyclic GFR-binding peptide
LRSVKVAKVEIVRKKPIFKEVQVTL

SEQ ID NO: 58699 - protein, 26 aa, Artificial Sequence
  Cyclic GFR-binding peptide
VQLSNITVQIMEIVRKKPIFLGEMST

SEQ ID NO: 58700 - protein, 40 aa, Artificial Sequence; identical to SEQ ID NO: 15598
  Cyclic GFR-binding peptide
  MOD_RES (2), (39): Xaa is C or S

SEQ ID NO: 58701 - protein, 27 aa, Artificial Sequence
  Cyclic GFR-binding peptide
RSVKMAKVRIKPHQGQHKEVQVLEEHS

SEQ ID NO: 58702 - protein, 38 aa, Artificial Sequence; identical to SEQ ID NO: 15599
  Cyclic GFR-binding peptide
  MOD_RES (3), (3): Xaa is C or S

SEQ ID NO: 58703 - protein, 32 aa, Artificial Sequence
  Cyclic GFR-binding peptide
  MOD_RES (30), (32): Xaa is C or S
SNITVQIMEYVRKKPKLLGEMSRLEEHLEXAX

SEQ ID NO: 58704 - protein, 38 aa, Artificial Sequence; identical to SEQ ID NO: 15601
  Cyclic GFR-binding peptide
  MOD_RES (1), (35), (37): Xaa is C or S

SEQ ID NO: 58705 - protein, 35 aa, Artificial Sequence
  Cyclic GFR-binding peptide
  MOD_RES (4), (4): Xaa is C or S
NVQXRPTQVQLSNITVQIMEIVRKKPIFLGEMSTL

SEQ ID NO: 58706 - protein, 43 aa, Artificial Sequence; identical to SEQ ID NO: 15602
  Cyclic GFR-binding peptide
  MOD_RES (4), (41), (43): Xaa is C or S

SEQ ID NO: 58707 - protein, 31 aa, Artificial Sequence
  Cyclic GFR-binding peptide
TQVQLSNITVQIMEIVRKKPIFIGEMSTLED

SEQ ID NO: 58708 - protein, 40 aa, Artificial Sequence; identical to SEQ ID NO: 15603
  Cyclic GFR-binding peptide
  MOD_RES (2), (39): Xaa is C or S

SEQ ID NO: 58709 - protein, 35 aa, Artificial Sequence
  Cyclic GFR-binding peptide
  MOD_RES (7), (7): Xaa is C or S
NDEGLEXVPTGQSNITMQIMRIKPHQGQHIGEMSL

SEQ ID NO: 58710 - protein, 43 aa, Artificial Sequence; identical to SEQ ID NO: 15604
  Cyclic GFR-binding peptide
  MOD_RES (4), (41), (43): Xaa is C or S

SEQ ID NO: 58711 - protein, 26 aa, Artificial Sequence
  Cyclic GFR-binding peptide
LSNITVQIMEIVRKKPIFLGEMSTLE

SEQ ID NO: 58712 - protein, 43 aa, Artificial Sequence; identical to SEQ ID NO: 15607
  Cyclic GFR-binding peptide
  MOD_RES (3), (40), (42): Xaa is C or S

SEQ ID NO: 58713 - protein, 24 aa, Artificial Sequence
  Cyclic GFR-binding peptide
EERSVKMAKVRIKPHQGQHKEVQV

SEQ ID NO: 58714 - protein, 33 aa, Artificial Sequence
  Cyclic GFR-binding peptide
RPTQVQLSNITVQIMEIVRKKPIFIGEMSTLED

SEQ ID NO: 58715 - protein, 35 aa, Artificial Sequence
  Cyclic GFR-binding peptide
  MOD_RES (33), (35): Xaa is C or S
PTGQRPVQMRKIRIKPHQGQHKKATVLEEHSQXEX

SEQ ID NO: 58716 - protein, 28 aa, Artificial Sequence
  Cyclic GFR-binding peptide
PSRVHHSNITVQIMEYVRKKPKLLGEMS

SEQ ID NO: 58717 - protein, 28 aa, Artificial Sequence
  Cyclic GFR-binding peptide
VHHSNITVQIMEYVRKKPKLIGEMSRLE

SEQ ID NO: 58718 - protein, 29 aa, Artificial Sequence
  Cyclic GFR-binding peptide
PTEERSVKMAKVRIKPHQGQHKEVQVFLQ

SEQ ID NO: 58719 - protein, 41 aa, Artificial Sequence; identical to SEQ ID NO: 15611
  Cyclic GFR-binding peptide
  MOD_RES (4), (38), (40): Xaa is C or S

SEQ ID NO: 58720 - protein, 31 aa, Artificial Sequence
  Cyclic GFR-binding peptide
  MOD_RES (30), (30): Xaa is C or S
SNITVQIMEYVRKKPKLLGEMSRLEEHLEXA

SEQ ID NO: 58721 - protein, 27 aa, Artificial Sequence
  Cyclic GFR-binding peptide
VQLSNITVQIMEIVRKKPIFLGEMSTL

SEQ ID NO: 58722 - protein, 26 aa, Artificial Sequence
  Cyclic GFR-binding peptide
RSVKMAKVRIKPHQGQHKEVQVLEEH

SEQ ID NO: 58723 - protein, 36 aa, Artificial Sequence; identical to SEQ ID NO: 15614
  Cyclic GFR-binding peptide
  MOD_RES (1), (35): Xaa is C or S

SEQ ID NO: 58724 - protein, 36 aa, Artificial Sequence; identical to SEQ ID NO: 15615
  Cyclic GFR-binding peptide
  MOD_RES (3), (3): Xaa is C or S

SEQ ID NO: 58725 - protein, 35 aa, Artificial Sequence
  Cyclic GFR-binding peptide
  MOD_RES (34), (34): Xaa is C or S
RVHHRPVQVRKIEYVRKKPKLKKATVRLEEHLEXA

SEQ ID NO: 58726 - protein, 27 aa, Artificial Sequence
  Cyclic GFR-binding peptide
HRPVQVRKIEYVRKKPKLKKATVRLEE

SEQ ID NO: 58727 - protein, 39 aa, Artificial Sequence; identical to SEQ ID NO: 15616
  Cyclic GFR-binding peptide
  MOD_RES (4), (38): Xaa is C or S

SEQ ID NO: 58728 - protein, 32 aa, Artificial Sequence
  Cyclic GFR-binding peptide
  MOD_RES (31), (31): Xaa is C or S
HRPVQVRKIEYVRKKPKLKKATVRLEEHLEXA

SEQ ID NO: 58729 - protein, 37 aa, Artificial Sequence; identical to SEQ ID NO: 15619
  Cyclic GFR-binding peptide
  MOD_RES (3), (3): Xaa is C or S

SEQ ID NO: 58730 - protein, 33 aa, Artificial Sequence
  Cyclic GFR-binding peptide
  MOD_RES (31), (33): Xaa is C or S
HSNITVQIMEYVRKKPKLLGEMSRLEEHLEXAX

SEQ ID NO: 58731 - protein, 24 aa, Artificial Sequence
  Cyclic GFR-binding peptide
SNITVQIMEIVRKKPIFIGEMSTL

SEQ ID NO: 58732 - protein, 40 aa, Artificial Sequence; identical to SEQ ID NO: 15622
  Cyclic GFR-binding peptide
  MOD_RES (3), (37), (39): Xaa is C or S

SEQ ID NO: 58733 - protein, 36 aa, Artificial Sequence
  Cyclic GFR-binding peptide
  MOD_RES (6), (6): Xaa is C or S
DEGLEXVPTEERPVQMRKIRIKPHQGQHKKATVFLQ

SEQ ID NO: 58734 - protein, 33 aa, Artificial Sequence
  Cyclic GFR-binding peptide
  MOD_RES (2), (2): Xaa is C or S
QXRPTQVQLSNITVQIMEIVRKKPIFIGEMSTL

SEQ ID NO: 58735 - protein, 23 aa, Artificial Sequence
  Cyclic GFR-binding peptide
HSNITVQIMEYVRKKPKLLGEMS

SEQ ID NO: 58736 - protein, 32 aa, Artificial Sequence
  Cyclic GFR-binding peptide
  MOD_RES (3), (3): Xaa is C or S
LEXVPTEERSVKMAKVRIKPHQGQHKEVQVFL

SEQ ID NO: 58737 - protein, 33 aa, Artificial Sequence
  Cyclic GFR-binding peptide
  MOD_RES (31), (33): Xaa is C or S
HSNITVQIMEYVRKKPKLIGEMSRLEEHLEXAX

SEQ ID NO: 58738 - protein, 41 aa, Artificial Sequence; identical to SEQ ID NO: 15623
  Cyclic GFR-binding peptide
  MOD_RES (5), (39), (41): Xaa is C or S

SEQ ID NO: 58739 - protein, 30 aa, Artificial Sequence
  Cyclic GFR-binding peptide
VHHSNITVQIMEYVRKKPKLIGEMSRLEEH

SEQ ID NO: 58740 - protein, 35 aa, Artificial Sequence
  Cyclic GFR-binding peptide
  MOD_RES (32), (34): Xaa is C or S
QLSNITVQIMEIVRKKPIFIGEMSTLEDHLAXKXE

SEQ ID NO: 58741 - protein, 34 aa, Artificial Sequence
  Cyclic GFR-binding peptide
  MOD_RES (32), (34): Xaa is C or S
HHSNITVQIMEYVRKKPKLIGEMSRLEEHLEXAX

SEQ ID NO: 58742 - protein, 36 aa, Artificial Sequence; identical to SEQ ID NO: 15626
  Cyclic GFR-binding peptide
  MOD_RES (2), (36): Xaa is C or S

SEQ ID NO: 58743 - protein, 31 aa, Artificial Sequence
  Cyclic GFR-binding peptide
  MOD_RES (4), (4): Xaa is C or S
GLEXVPTEERPVQMRKIRIKPHQGQHKKATV

SEQ ID NO: 58744 - protein, 40 aa, Artificial Sequence; identical to SEQ ID NO: 15628
  Cyclic GFR-binding peptide
  MOD_RES (1), (38), (40): Xaa is C or S

SEQ ID NO: 58745 - protein, 40 aa, Artificial Sequence; identical to SEQ ID NO: 15629
  Cyclic GFR-binding peptide
  MOD_RES (5), (5): Xaa is C or S

SEQ ID NO: 58746 - protein, 29 aa, Artificial Sequence
  Cyclic GFR-binding peptide
PTQVQLSNITVQIMEIVRKKPIFLGEMST

SEQ ID NO: 58747 - protein, 37 aa, Artificial Sequence; identical to SEQ ID NO: 15630
  Cyclic GFR-binding peptide
  MOD_RES (4), (4): Xaa is C or S

SEQ ID NO: 58748 - protein, 23 aa, Artificial Sequence
  Cyclic GFR-binding peptide
ESNITMQIMRIKPHQGQHLGEMS

SEQ ID NO: 58749 - protein, 40 aa, Artificial Sequence; identical to SEQ ID NO: 15631
  Cyclic GFR-binding peptide
  MOD_RES (7), (7): Xaa is C or S

SEQ ID NO: 58750 - protein, 37 aa, Artificial Sequence; identical to SEQ ID NO: 15632
  Cyclic GFR-binding peptide
  MOD_RES (1), (35), (37): Xaa is C or S

SEQ ID NO: 58751 - protein, 31 aa, Artificial Sequence
  Cyclic GFR-binding peptide
  MOD_RES (1), (1): Xaa is C or S
XRPTQVQLSNITVQIMEIVRKKPIFIGEMST

SEQ ID NO: 58752 - protein, 30 aa, Artificial Sequence
  Cyclic GFR-binding peptide
  MOD_RES (2), (2): Xaa is C or S
EXVPTGQRPVQMRKIRIKPHQGQHKKATVL

SEQ ID NO: 58753 - protein, 34 aa, Artificial Sequence; identical to SEQ ID NO: 15634
  Cyclic GFR-binding peptide
  MOD_RES (2), (2): Xaa is C or S

SEQ ID NO: 58754 - protein, 31 aa, Artificial Sequence
  Cyclic GFR-binding peptide
SNITVQIMEYVRKKPKLIGEMSAAAAAAAAA

SEQ ID NO: 58755 - protein, 34 aa, Artificial Sequence
  Cyclic GFR-binding peptide
  MOD_RES (2), (2): Xaa is C or S
QXRPTQVQLSNITVQIMEIVRKKPIFLGEMSTLE

SEQ ID NO: 58756 - protein, 28 aa, Artificial Sequence
  Cyclic GFR-binding peptide
RSVKMAKVRIKPHQGQHKEVQVFLQHNK

SEQ ID NO: 58757 - protein, 42 aa, Artificial Sequence; identical to SEQ ID NO: 15637
  Cyclic GFR-binding peptide
  MOD_RES (2), (39), (41): Xaa is C or S

SEQ ID NO: 58758 - protein, 34 aa, Artificial Sequence; identical to SEQ ID NO: 15638
  Cyclic GFR-binding peptide

SEQ ID NO: 58759 - protein, 32 aa, Artificial Sequence
  Cyclic GFR-binding peptide
  MOD_RES (32), (32): Xaa is C or S
QLSNITVQIMEIVRKKPIFIGEMSTLEDHLAX

SEQ ID NO: 58760 - protein, 41 aa, Artificial Sequence; identical to SEQ ID NO: 15639
  Cyclic GFR-binding peptide
  MOD_RES (1), (38), (40): Xaa is C or S

SEQ ID NO: 58761 - protein, 31 aa, Artificial Sequence
  Cyclic GFR-binding peptide
  MOD_RES (29), (31): Xaa is C or S
RSVKMAKVRIKPHQGQHKEVQVFLQHNKXEX

SEQ ID NO: 58762 - protein, 32 aa, Artificial Sequence
  Cyclic GFR-binding peptide
PSRVHHRPVQVRKIEYVRKKPKLKKATVRLEE

SEQ ID NO: 58763 - protein, 27 aa, Artificial Sequence
  Cyclic GFR-binding peptide
QRSVKMAKVRIKPHQGQHKEVQVLEEH

SEQ ID NO: 58764 - protein, 40 aa, Artificial Sequence; identical to SEQ ID NO: 15642
  Cyclic GFR-binding peptide
  MOD_RES (3), (37), (39): Xaa is C or S

SEQ ID NO: 58765 - protein, 35 aa, Artificial Sequence
  Cyclic GFR-binding peptide
  MOD_RES (4), (4): Xaa is C or S
NVQXRPTQVQLSNITVQIMEIVRKKPIFIGEMSTL

SEQ ID NO: 58766 - protein, 34 aa, Artificial Sequence
  Cyclic GFR-binding peptide
  MOD_RES (33), (33): Xaa is C or S
PTEERSVKMAKVRIKPHQGQHKEVQVFLQHNKXE

SEQ ID NO: 58767 - protein, 30 aa, Artificial Sequence
  Cyclic GFR-binding peptide
  MOD_RES (1), (1): Xaa is C or S
XVPTGQRSVKMAKVRIKPHQGQHKEVQVLE

SEQ ID NO: 58768 - protein, 35 aa, Artificial Sequence
  Cyclic GFR-binding peptide
  MOD_RES (33), (35): Xaa is C or S
PTGQSNITMQIMRIKPHQGQHIGEMSLEEHSQXEX

SEQ ID NO: 58769 - protein, 31 aa, Artificial Sequence
  Cyclic GFR-binding peptide
  MOD_RES (2), (2): Xaa is C or S
EXVPTGQRSVKMAKVRIKPHQGQHKEVQVLE

SEQ ID NO: 58770 - protein, 28 aa, Artificial Sequence
  Cyclic GFR-binding peptide
PTQVQLSNITVQIMEIVRKKPIFIGEMS

SEQ ID NO: 58771 - protein, 38 aa, Artificial Sequence; identical to SEQ ID NO: 15648
  Cyclic GFR-binding peptide
  MOD_RES (2), (2): Xaa is C or S

SEQ ID NO: 58772 - protein, 33 aa, Artificial Sequence
  Cyclic GFR-binding peptide
  MOD_RES (32), (32): Xaa is C or S
TEERSVKMAKVRIKPHQGQHKEVQVFLQHNKXE

SEQ ID NO: 58773 - protein, 25 aa, Artificial Sequence
  Cyclic GFR-binding peptide
TGQRSVKMAKVRIKPHQGQHKEVQV

SEQ ID NO: 58774 - protein, 30 aa, Artificial Sequence
  Cyclic GFR-binding peptide
GQSNITMQIMRIKPHQGQHIGEMSLEEHSQ

SEQ ID NO: 58775 - protein, 35 aa, Artificial Sequence
  Cyclic GFR-binding peptide
  MOD_RES (3), (3): Xaa is C or S
VKXQPSRVHHSNITVQIMEYVRKKPKLIGEMSRLE

SEQ ID NO: 58776 - protein, 32 aa, Artificial Sequence
  Cyclic GFR-binding peptide
  MOD_RES (31), (31): Xaa is C or S
LSNITVQIMEIVRKKPIFLGEMSTLEDHLAXK

SEQ ID NO: 58777 - protein, 40 aa, Artificial Sequence; identical to SEQ ID NO: 15653
  Cyclic GFR-binding peptide
  MOD_RES (3), (40): Xaa is C or S

SEQ ID NO: 58778 - protein, 38 aa, Artificial Sequence
  Cyclic GFR-binding peptide
  MOD_RES (5), (5): Xaa is C or S
RNVQXRPTQVQLRSVKVAKVEIVRKKPIFKEVQVTLED

SEQ ID NO: 58779 - protein, 28 aa, Artificial Sequence
  Cyclic GFR-binding peptide
ERPVQMRKIRIKPHQGQHKKATVFLQHN

SEQ ID NO: 58780 - protein, 26 aa, Artificial Sequence
  Cyclic GFR-binding peptide
ESNITMQIMRIKPHQGQHLGEMSFLQ

SEQ ID NO: 58781 - protein, 28 aa, Artificial Sequence
  Cyclic GFR-binding peptide
  MOD_RES (1), (1): Xaa is C or S
XVPTGQSNITMQIMRIKPHQGQHIGEMS

SEQ ID NO: 58782 - protein, 32 aa, Artificial Sequence
  Cyclic GFR-binding peptide
  MOD_RES (32), (32): Xaa is C or S
HHSNITVQIMEYVRKKPKLIGEMSRLEEHLEX

SEQ ID NO: 58783 - protein, 31 aa, Artificial Sequence
  Cyclic GFR-binding peptide
  MOD_RES (31), (31): Xaa is C or S
EERPVQMRKIRIKPHQGQHKKATVFLQHNKX

SEQ ID NO: 58784 - protein, 32 aa, Artificial Sequence
  Cyclic GFR-binding peptide
  MOD_RES (5), (5): Xaa is C or S
EGLEXVPTEESNITMQIMRIKPHQGQHLGEMS

SEQ ID NO: 58785 - protein, 38 aa, Artificial Sequence
  Cyclic GFR-binding peptide
  MOD_RES (5), (5): Xaa is C or S
SSVKXQPSRVHHRPVQVRKIEYVRKKPKLKKATVRLEE

SEQ ID NO: 58786 - protein, 33 aa, Artificial Sequence; identical to SEQ ID NO: 15655
  Cyclic GFR-binding peptide

SEQ ID NO: 58787 - protein, 27 aa, Artificial Sequence
  Cyclic GFR-binding peptide
TGQRSVKMAKVRIKPHQGQHKEVQVLE

SEQ ID NO: 58788 - protein, 40 aa, Artificial Sequence; identical to SEQ ID NO: 15656
  Cyclic GFR-binding peptide
  MOD_RES (5), (5): Xaa is C or S

SEQ ID NO: 58789 - protein, 26 aa, Artificial Sequence
  Cyclic GFR-binding peptide
HHSNITVQIMEYVRKKPKLIGEMSRL

SEQ ID NO: 58790 - protein, 23 aa, Artificial Sequence
  Cyclic GFR-binding peptide
SNITVQIMEYVRKKPKLIGEMSR

SEQ ID NO: 58791 - protein, 30 aa, Artificial Sequence
  Cyclic GFR-binding peptide
VHHSNITVQIMEYVRKKPKLLGEMSRLEEH

SEQ ID NO: 58792 - protein, 36 aa, Artificial Sequence; identical to SEQ ID NO: 15657
  Cyclic GFR-binding peptide
  MOD_RES (36), (36): Xaa is C or S

SEQ ID NO: 58793 - protein, 30 aa, Artificial Sequence
  Cyclic GFR-binding peptide
  MOD_RES (29), (29): Xaa is C or S
SNITMQIMRIKPHQGQHLGEMSFLQHNKXE

SEQ ID NO: 58794 - protein, 27 aa, Artificial Sequence
  Cyclic GFR-binding peptide
VHHSNITVQIMEYVRKKPKLLGEMSRL

SEQ ID NO: 58795 - protein, 43 aa, Artificial Sequence; identical to SEQ ID NO: 15658
  Cyclic GFR-binding peptide
  MOD_RES (7), (41), (43): Xaa is C or S

SEQ ID NO: 58796 - protein, 29 aa, Artificial Sequence
  Cyclic GFR-binding peptide
VPTEERPVQMRKIRIKPHQGQHKKATVFL

SEQ ID NO: 58797 - protein, 30 aa, Artificial Sequence
  Cyclic GFR-binding peptide
GQRSVKMAKVRIKPHQGQHKEVQVLEEHSQ

SEQ ID NO: 58798 - protein, 28 aa, Artificial Sequence
  Cyclic GFR-binding peptide
ERSVKMAKVRIKPHQGQHKEVQVFLQHN

SEQ ID NO: 58799 - protein, 29 aa, Artificial Sequence
  Cyclic GFR-binding peptide
HHSNITVQIMEYVRKKPKLIGEMSRLEEH

SEQ ID NO: 58800 - protein, 27 aa, Artificial Sequence
  Cyclic GFR-binding peptide
TEESNITMQIMRIKPHQGQHLGEMSFL

SEQ ID NO: 58801 - protein, 28 aa, Artificial Sequence
  Cyclic GFR-binding peptide
EERSVKMAKVRIKPHQGQHKEVQVFLQH

SEQ ID NO: 58802 - protein, 35 aa, Artificial Sequence
  Cyclic GFR-binding peptide
  MOD_RES (5), (5): Xaa is C or S
EGLEXVPTGQRSVKMAKVRIKPHQGQHKEVQVLEE

SEQ ID NO: 58803 - protein, 31 aa, Artificial Sequence
  Cyclic GFR-binding peptide
  MOD_RES (3), (3): Xaa is C or S
LEXVPTEERPVQMRKIRIKPHQGQHKKATVF

SEQ ID NO: 58804 - protein, 34 aa, Artificial Sequence
  Cyclic GFR-binding peptide
  MOD_RES (32), (34): Xaa is C or S
QLSNITVQIMEIVRKKPIFLGEMSTLEDHLAXKX

SEQ ID NO: 58805 - protein, 33 aa, Artificial Sequence
  Cyclic GFR-binding peptide
  MOD_RES (3), (3): Xaa is C or S
VKXQPSRVHHRPVQVRKIEYVRKKPKLKKATVR

SEQ ID NO: 58806 - protein, 26 aa, Artificial Sequence
  Cyclic GFR-binding peptide
QLRSVKVAKVEIVRKKPIFKEVQVTL

SEQ ID NO: 58807 - protein, 38 aa, Artificial Sequence; identical to SEQ ID NO: 15668
  Cyclic GFR-binding peptide
  MOD_RES (36), (38): Xaa is C or S

SEQ ID NO: 58808 - protein, 35 aa, Artificial Sequence
  Cyclic GFR-binding peptide
  MOD_RES (7), (7): Xaa is C or S
NDEGLEXVPTGQRPVQMRKIRIKPHQGQHKKATVL

SEQ ID NO: 58809 - protein, 31 aa, Artificial Sequence
  Cyclic GFR-binding peptide
PTQVQLRSVKVAKVEIVRKKPIFKEVQVTLE

SEQ ID NO: 58810 - protein, 36 aa, Artificial Sequence
  Cyclic GFR-binding peptide
  MOD_RES (33), (35): Xaa is C or S
VQLSNITVQIMEIVRKKPIFIGEMSTLEDHLAXKXE

SEQ ID NO: 58811 - protein, 37 aa, Artificial Sequence; identical to SEQ ID NO: 15670
  Cyclic GFR-binding peptide
  MOD_RES (3), (3): Xaa is C or S

SEQ ID NO: 58812 - protein, 32 aa, Artificial Sequence
  Cyclic GFR-binding peptide
  MOD_RES (31), (31): Xaa is C or S
GQRSVKMAKVRIKPHQGQHKEVQVLEEHSQXE

SEQ ID NO: 58813 - protein, 32 aa, Artificial Sequence
  Cyclic GFR-binding peptide
  MOD_RES (31), (31): Xaa is C or S
EERPVQMRKIRIKPHQGQHKKATVFLQHNKXE

SEQ ID NO: 58814 - protein, 31 aa, Artificial Sequence
  Cyclic GFR-binding peptide
  MOD_RES (2), (2): Xaa is C or S
EXVPTEESNITMQIMRIKPHQGQHLGEMSFL

SEQ ID NO: 58815 - protein, 33 aa, Artificial Sequence
  Cyclic GFR-binding peptide
  MOD_RES (30), (32): Xaa is C or S
ERPVQMRKIRIKPHQGQHKKATVFLQHNKXEXR

SEQ ID NO: 58816 - protein, 30 aa, Artificial Sequence
  Cyclic GFR-binding peptide
  MOD_RES (2), (2): Xaa is C or S
EXVPTGQSNITMQIMRIKPHQGQHIGEMSL

SEQ ID NO: 58817 - protein, 31 aa, Artificial Sequence
  Cyclic GFR-binding peptide
  MOD_RES (29), (31): Xaa is C or S
RSVKMAKVRIKPHQGQHKEVQVLEEHSQXEX

SEQ ID NO: 58818 - protein, 27 aa, Artificial Sequence
  Cyclic GFR-binding peptide
LSNITVQIMEIVRKKPIFIGEMSTLED

SEQ ID NO: 58819 - protein, 33 aa, Artificial Sequence
  Cyclic GFR-binding peptide
  MOD_RES (31), (33): Xaa is C or S
EERSVKMAKVRIKPHQGQHKEVQVFLQHNKXEX

SEQ ID NO: 58820 - protein, 31 aa, Artificial Sequence
  Cyclic GFR-binding peptide
  MOD_RES (1), (1): Xaa is C or S
XQPSRVHHSNITVQIMEYVRKKPKLIGEMSR

SEQ ID NO: 58821 - protein, 26 aa, Artificial Sequence
  Cyclic GFR-binding peptide
VQLRSVKVAKVEIVRKKPIFKEVQVT

SEQ ID NO: 58822 - protein, 31 aa, Artificial Sequence
  Cyclic GFR-binding peptide
  MOD_RES (1), (1): Xaa is C or S
XQPSRVHHRPVQVRKIEYVRKKPKLKKATVR

SEQ ID NO: 58823 - protein, 28 aa, Artificial Sequence
  Cyclic GFR-binding peptide
HRPVQVRKIEYVRKKPKLKKATVRLEEH

SEQ ID NO: 58824 - protein, 30 aa, Artificial Sequence
  Cyclic GFR-binding peptide
VPTGQRPVQMRKIRIKPHQGQHKKATVLEE

SEQ ID NO: 58825 - protein, 27 aa, Artificial Sequence
  Cyclic GFR-binding peptide
VPTGQRSVKMAKVRIKPHQGQHKEVQV

SEQ ID NO: 58826 - protein, 25 aa, Artificial Sequence
  Cyclic GFR-binding peptide
GQRPVQMRKIRIKPHQGQHKKATVL

SEQ ID NO: 58827 - protein, 35 aa, Artificial Sequence; identical to SEQ ID NO: 15672
  Cyclic GFR-binding peptide
  MOD_RES (35), (35): Xaa is C or S

SEQ ID NO: 58828 - protein, 38 aa, Artificial Sequence; identical to SEQ ID NO: 15673
  Cyclic GFR-binding peptide
  MOD_RES (3), (3): Xaa is C or S

SEQ ID NO: 58829 - protein, 34 aa, Artificial Sequence
  Cyclic GFR-binding peptide
  MOD_RES (1), (1): Xaa is C or S
XRPTQVQLSNITVQIMEIVRKKPIFIGEMSTLED

SEQ ID NO: 58830 - protein, 24 aa, Artificial Sequence
  Cyclic GFR-binding peptide
HRPVQVRKIEYVRKKPKLKKATVR

SEQ ID NO: 58831 - protein, 42 aa, Artificial Sequence; identical to SEQ ID NO: 15676
  Cyclic GFR-binding peptide
  MOD_RES (4), (41): Xaa is C or S

SEQ ID NO: 58832 - protein, 30 aa, Artificial Sequence
  Cyclic GFR-binding peptide
QVQLSNITVQIMEIVRKKPIFIGEMSTLED

SEQ ID NO: 58833 - protein, 35 aa, Artificial Sequence
  Cyclic GFR-binding peptide
  MOD_RES (2), (2): Xaa is C or S
QXRPTQVQLRSVKVAKVEIVRKKPIFKEVQVTLED

SEQ ID NO: 58834 - protein, 38 aa, Artificial Sequence; identical to SEQ ID NO: 15677
  Cyclic GFR-binding peptide
  MOD_RES (5), (5): Xaa is C or S

SEQ ID NO: 58835 - protein, 35 aa, Artificial Sequence
  Cyclic GFR-binding peptide
  MOD_RES (33), (35): Xaa is C or S
PTEESNITMQIMRIKPHQGQHLGEMSFLQHNKXEX

SEQ ID NO: 58836 - protein, 35 aa, Artificial Sequence; identical to SEQ ID NO: 15680
  Cyclic GFR-binding peptide
  MOD_RES (35), (35): Xaa is C or S

SEQ ID NO: 58837 - protein, 36 aa, Artificial Sequence; identical to SEQ ID NO: 15679
  Cyclic GFR-binding peptide
  MOD_RES (36), (36): Xaa is C or S

SEQ ID NO: 58838 - protein, 38 aa, Artificial Sequence; identical to SEQ ID NO: 15681
  Cyclic GFR-binding peptide
  MOD_RES (5), (5): Xaa is C or S

SEQ ID NO: 58839 - protein, 33 aa, Artificial Sequence
  Cyclic GFR-binding peptide
QVQLRSVKVAKVEIVRKKPIFKEVQVTLEDHLA

SEQ ID NO: 58840 - protein, 36 aa, Artificial Sequence; identical to SEQ ID NO: 15682
  Cyclic GFR-binding peptide
  MOD_RES (2), (2): Xaa is C or S

SEQ ID NO: 58841 - protein, 33 aa, Artificial Sequence; identical to SEQ ID NO: 15684
  Cyclic GFR-binding peptide

SEQ ID NO: 58842 - protein, 34 aa, Artificial Sequence
  Cyclic GFR-binding peptide
  MOD_RES (33), (33): Xaa is C or S
VQLSNITVQIMEIVRKKPIFLGEMSTLEDHLAXK

SEQ ID NO: 58843 - protein, 34 aa, Artificial Sequence; identical to SEQ ID NO: 15685
  Cyclic GFR-binding peptide

SEQ ID NO: 58844 - protein, 26 aa, Artificial Sequence
  Cyclic GFR-binding peptide
HHSNITVQIMEYVRKKPKLLGEMSRL

SEQ ID NO: 58845 - protein, 34 aa, Artificial Sequence
  Cyclic GFR-binding peptide
  MOD_RES (5), (5): Xaa is C or S
RNVQXRPTQVQLRSVKVAKVEIVRKKPIFKEVQV

SEQ ID NO: 58846 - protein, 26 aa, Artificial Sequence
  Cyclic GFR-binding peptide
VHHSNITVQIMEYVRKKPKLIGEMSR

SEQ ID NO: 58847 - protein, 37 aa, Artificial Sequence; identical to SEQ ID NO: 15686
  Cyclic GFR-binding peptide
  MOD_RES (3), (37): Xaa is C or S

SEQ ID NO: 58848 - protein, 36 aa, Artificial Sequence; identical to SEQ ID NO: 15687
  Cyclic GFR-binding peptide
  MOD_RES (2), (2): Xaa is C or S

SEQ ID NO: 58849 - protein, 29 aa, Artificial Sequence
  Cyclic GFR-binding peptide
LSNITVQIMEIVRKKPIFLGEMSTLEDHL

SEQ ID NO: 58850 - protein, 33 aa, Artificial Sequence
  Cyclic GFR-binding peptide
  MOD_RES (2), (2): Xaa is C or S
QXRPTQVQLSNITVQIMEIVRKKPIFLGEMSTL

SEQ ID NO: 58851 - protein, 26 aa, Artificial Sequence
  Cyclic GFR-binding peptide
PTGQRSVKMAKVRIKPHQGQHKEVQV

SEQ ID NO: 58852 - protein, 38 aa, Artificial Sequence; identical to SEQ ID NO: 15689
  Cyclic GFR-binding peptide
  MOD_RES (2), (2): Xaa is C or S

SEQ ID NO: 58853 - protein, 31 aa, Artificial Sequence
  Cyclic GFR-binding peptide
PTGQRPVQMRKIRIKPHQGQHKKATVLEEHS

SEQ ID NO: 58854 - protein, 32 aa, Artificial Sequence
  Cyclic GFR-binding peptide
  MOD_RES (30), (32): Xaa is C or S
RSVKVAKVEIVRKKPIFKEVQVTLEDHLAXKX

SEQ ID NO: 58855 - protein, 40 aa, Artificial Sequence; identical to SEQ ID NO: 15692
  Cyclic GFR-binding peptide
  MOD_RES (6), (40): Xaa is C or S

SEQ ID NO: 58856 - protein, 35 aa, Artificial Sequence
  Cyclic GFR-binding peptide
  MOD_RES (2), (2): Xaa is C or S
KXQPSRVHHSNITVQIMEYVRKKPKLLGEMSRLEE

SEQ ID NO: 58857 - protein, 40 aa, Artificial Sequence; identical to SEQ ID NO: 15695
  Cyclic GFR-binding peptide
  MOD_RES (6), (40): Xaa is C or S

SEQ ID NO: 58858 - protein, 28 aa, Artificial Sequence
  Cyclic GFR-binding peptide
SNITVQIMEIVRKKPIFIGEMSTLEDHL

SEQ ID NO: 58859 - protein, 26 aa, Artificial Sequence
  Cyclic GFR-binding peptide
VHHRPVQVRKIEYVRKKPKLKKATVR

SEQ ID NO: 58860 - protein, 41 aa, Artificial Sequence; identical to SEQ ID NO: 15700
  Cyclic GFR-binding peptide
  MOD_RES (6), (40): Xaa is C or S

SEQ ID NO: 58861 - protein, 36 aa, Artificial Sequence
  Cyclic GFR-binding peptide
  MOD_RES (4), (4): Xaa is C or S
NVQXRPTQVQLSNITVQIMEIVRKKPIFIGEMSTLE

SEQ ID NO: 58862 - protein, 28 aa, Artificial Sequence
  Cyclic GFR-binding peptide
PTEESNITMQIMRIKPHQGQHLGEMSFL

SEQ ID NO: 58863 - protein, 40 aa, Artificial Sequence; identical to SEQ ID NO: 15701
  Cyclic GFR-binding peptide
  MOD_RES (37), (39): Xaa is C or S

SEQ ID NO: 58864 - protein, 36 aa, Artificial Sequence; identical to SEQ ID NO: 15702
  Cyclic GFR-binding peptide
  MOD_RES (35), (35): Xaa is C or S

SEQ ID NO: 58865 - protein, 35 aa, Artificial Sequence
  Cyclic GFR-binding peptide
  MOD_RES (3), (3): Xaa is C or S
VQXRPTQVQLSNITVQIMEIVRKKPIFIGEMSTLE

SEQ ID NO: 58866 - protein, 37 aa, Artificial Sequence; identical to SEQ ID NO: 15704
  Cyclic GFR-binding peptide
  MOD_RES (35), (37): Xaa is C or S

SEQ ID NO: 58867 - protein, 33 aa, Artificial Sequence; identical to SEQ ID NO: 15705
  Cyclic GFR-binding peptide

SEQ ID NO: 58868 - protein, 32 aa, Artificial Sequence
  Cyclic GFR-binding peptide
  MOD_RES (1), (1): Xaa is C or S
XVPTEESNITMQIMRIKPHQGQHLGEMSFLQH

SEQ ID NO: 58869 - protein, 28 aa, Artificial Sequence
  Cyclic GFR-binding peptide
QLSNITVQIMEIVRKKPIFLGEMSTLED

SEQ ID NO: 58870 - protein, 27 aa, Artificial Sequence
  Cyclic GFR-binding peptide
GQRPVQMRKIRIKPHQGQHKKATVLEE

SEQ ID NO: 58871 - protein, 43 aa, Artificial Sequence; identical to SEQ ID NO: 15706
  Cyclic GFR-binding peptide
  MOD_RES (7), (41), (43): Xaa is C or S

SEQ ID NO: 58872 - protein, 33 aa, Artificial Sequence
  Cyclic GFR-binding peptide
  MOD_RES (5), (5): Xaa is C or S
EGLEXVPTEESNITMQIMRIKPHQGQHLGEMSF

SEQ ID NO: 58873 - protein, 45 aa, Artificial Sequence; identical to SEQ ID NO: 15707
  Cyclic GFR-binding peptide
  MOD_RES (5), (42), (44): Xaa is C or S

SEQ ID NO: 58874 - protein, 25 aa, Artificial Sequence
  Cyclic GFR-binding peptide
QRSVKMAKVRIKPHQGQHKEVQVLE

SEQ ID NO: 58875 - protein, 29 aa, Artificial Sequence
  Cyclic GFR-binding peptide
PTQVQLRSVKVAKVEIVRKKPIFKEVQVT

SEQ ID NO: 58876 - protein, 28 aa, Artificial Sequence
  Cyclic GFR-binding peptide
VHHSNITVQIMEYVRKKPKLLGEMSRLE

SEQ ID NO: 58877 - protein, 36 aa, Artificial Sequence
  Cyclic GFR-binding peptide
  MOD_RES (5), (5): Xaa is C or S
EGLEXVPTGQRPVQMRKIRIKPHQGQHKKATVLEEH

SEQ ID NO: 58878 - protein, 31 aa, Artificial Sequence
  Cyclic GFR-binding peptide
  MOD_RES (31), (31): Xaa is C or S
LSNITVQIMEIVRKKPIFIGEMSTLEDHLAX

SEQ ID NO: 58879 - protein, 34 aa, Artificial Sequence; identical to SEQ ID NO: 15711
  Cyclic GFR-binding peptide

SEQ ID NO: 58880 - protein, 37 aa, Artificial Sequence; identical to SEQ ID NO: 15712
  Cyclic GFR-binding peptide
  MOD_RES (4), (4): Xaa is C or S

SEQ ID NO: 58881 - protein, 32 aa, Artificial Sequence
  Cyclic GFR-binding peptide
PSRVHHSNITVQIMEYVRKKPKLLGEMSRLEE

SEQ ID NO: 58882 - protein, 39 aa, Artificial Sequence; identical to SEQ ID NO: 15713
  Cyclic GFR-binding peptide
  MOD_RES (2), (36), (38): Xaa is C or S

SEQ ID NO: 58883 - protein, 31 aa, Artificial Sequence
  Cyclic GFR-binding peptide
SNITVQIMEIVRKKPIFLGEMSAAAAAAAAA

SEQ ID NO: 58884 - protein, 33 aa, Artificial Sequence
  Cyclic GFR-binding peptide
  MOD_RES (30), (32): Xaa is C or S
SNITVQIMEIVRKKPIFIGEMSTLEDHLAXKXE

SEQ ID NO: 58885 - protein, 27 aa, Artificial Sequence
  Cyclic GFR-binding peptide
RPVQVRKIEYVRKKPKLKKATVRLEEH

SEQ ID NO: 58886 - protein, 28 aa, Artificial Sequence
  Cyclic GFR-binding peptide
TQVQLSNITVQIMEIVRKKPIFLGEMST

SEQ ID NO: 58887 - protein, 26 aa, Artificial Sequence
  Cyclic GFR-binding peptide
TGQRPVQMRKIRIKPHQGQHKKATVL

SEQ ID NO: 58888 - protein, 31 aa, Artificial Sequence
  Cyclic GFR-binding peptide
PTEERSVKMAKVRIKPHQGQHKEVQVFLQHN

SEQ ID NO: 58889 - protein, 39 aa, Artificial Sequence; identical to SEQ ID NO: 15721
  Cyclic GFR-binding peptide
  MOD_RES (1), (38): Xaa is C or S

SEQ ID NO: 58890 - protein, 36 aa, Artificial Sequence
  Cyclic GFR-binding peptide
  MOD_RES (34), (36): Xaa is C or S
RVHHRPVQVRKIEYVRKKPKLKKATVRLEEHLEXAX

SEQ ID NO: 58891 - protein, 32 aa, Artificial Sequence
  Cyclic GFR-binding peptide
  MOD_RES (1), (1): Xaa is C or S
XRPTQVQLRSVKVAKVEIVRKKPIFKEVQVTL

SEQ ID NO: 58892 - protein, 29 aa, Artificial Sequence
  Cyclic GFR-binding peptide
RPTQVQLSNITVQIMEIVRKKPIFIGEMS

SEQ ID NO: 58893 - protein, 41 aa, Artificial Sequence; identical to SEQ ID NO: 15722
  Cyclic GFR-binding peptide
  MOD_RES (3), (40): Xaa is C or S

SEQ ID NO: 58894 - protein, 39 aa, Artificial Sequence; identical to SEQ ID NO: 15723
  Cyclic GFR-binding peptide
  MOD_RES (3), (37), (39): Xaa is C or S

SEQ ID NO: 58895 - protein, 28 aa, Artificial Sequence
  Cyclic GFR-binding peptide
HHSNITVQIMEYVRKKPKLLGEMSRLEE

SEQ ID NO: 58896 - protein, 38 aa, Artificial Sequence; identical to SEQ ID NO: 15724
  Cyclic GFR-binding peptide
  MOD_RES (37), (37): Xaa is C or S

SEQ ID NO: 58897 - protein, 39 aa, Artificial Sequence; identical to SEQ ID NO: 15726
  Cyclic GFR-binding peptide
  MOD_RES (2), (36), (38): Xaa is C or S

SEQ ID NO: 58898 - protein, 31 aa, Artificial Sequence
  Cyclic GFR-binding peptide
  MOD_RES (2), (2): Xaa is C or S
KXQPSRVHHSNITVQIMEYVRKKPKLLGEMS

SEQ ID NO: 58899 - protein, 40 aa, Artificial Sequence; identical to SEQ ID NO: 15729
  Cyclic GFR-binding peptide
  MOD_RES (4), (38), (40): Xaa is C or S

SEQ ID NO: 58900 - protein, 34 aa, Artificial Sequence; identical to SEQ ID NO: 15730
  Cyclic GFR-binding peptide

SEQ ID NO: 58901 - protein, 39 aa, Artificial Sequence; identical to SEQ ID NO: 15733
  Cyclic GFR-binding peptide
  MOD_RES (2), (39): Xaa is C or S

SEQ ID NO: 58902 - protein, 32 aa, Artificial Sequence
  Cyclic GFR-binding peptide
  MOD_RES (29), (31): Xaa is C or S
SNITMQIMRIKPHQGQHLGEMSFLQHNKXEXR

SEQ ID NO: 58903 - protein, 27 aa, Artificial Sequence
  Cyclic GFR-binding peptide
ERPVQMRKIRIKPHQGQHKKATVFLQH

SEQ ID NO: 58904 - protein, 42 aa, Artificial Sequence; identical to SEQ ID NO: 15734
  Cyclic GFR-binding peptide
  MOD_RES (5), (42): Xaa is C or S

SEQ ID NO: 58905 - protein, 28 aa, Artificial Sequence
  Cyclic GFR-binding peptide
VPTGQRSVKMAKVRIKPHQGQHKEVQVL

SEQ ID NO: 58906 - protein, 36 aa, Artificial Sequence
  Cyclic GFR-binding peptide
  MOD_RES (7), (7): Xaa is C or S
NDEGLEXVPTEERPVQMRKIRIKPHQGQHKKATVFL

SEQ ID NO: 58907 - protein, 37 aa, Artificial Sequence
  Cyclic GFR-binding peptide
  MOD_RES (34), (36): Xaa is C or S
RVHHSNITVQIMEYVRKKPKLLGEMSRLEEHLEXAXA

SEQ ID NO: 58908 - protein, 31 aa, Artificial Sequence
  Cyclic GFR-binding peptide
  MOD_RES (31), (31): Xaa is C or S
HSNITVQIMEYVRKKPKLLGEMSRLEEHLEX

SEQ ID NO: 58909 - protein, 38 aa, Artificial Sequence; identical to SEQ ID NO: 15735
  Cyclic GFR-binding peptide
  MOD_RES (4), (38): Xaa is C or S

SEQ ID NO: 58910 - protein, 42 aa, Artificial Sequence; identical to SEQ ID NO: 15736
  Cyclic GFR-binding peptide
  MOD_RES (3), (40), (42): Xaa is C or S

SEQ ID NO: 58911 - protein, 41 aa, Artificial Sequence; identical to SEQ ID NO: 15737
  Cyclic GFR-binding peptide
  MOD_RES (7), (41): Xaa is C or S

SEQ ID NO: 58912 - protein, 33 aa, Artificial Sequence
  Cyclic GFR-binding peptide
  MOD_RES (30), (32): Xaa is C or S
RSVKVAKVEIVRKKPIFKEVQVTLEDHLAXKXE

SEQ ID NO: 58913 - protein, 27 aa, Artificial Sequence
  Cyclic GFR-binding peptide
VHHSNITVQIMEYVRKKPKLIGEMSRL

SEQ ID NO: 58914 - protein, 37 aa, Artificial Sequence
  Cyclic GFR-binding peptide
  MOD_RES (34), (36): Xaa is C or S
RVHHRPVQVRKIEYVRKKPKLKKATVRLEEHLEXAXA

SEQ ID NO: 58915 - protein, 26 aa, Artificial Sequence
  Cyclic GFR-binding peptide
GQRSVKMAKVRIKPHQGQHKEVQVLE

SEQ ID NO: 58916 - protein, 40 aa, Artificial Sequence; identical to SEQ ID NO: 15739
  Cyclic GFR-binding peptide
  MOD_RES (3), (37), (39): Xaa is C or S

SEQ ID NO: 58917 - protein, 32 aa, Artificial Sequence
  Cyclic GFR-binding peptide
  MOD_RES (4), (4): Xaa is C or S
GLEXVPTGQSNITMQIMRIKPHQGQHIGEMSL

SEQ ID NO: 58918 - protein, 36 aa, Artificial Sequence
  Cyclic GFR-binding peptide
  MOD_RES (6), (6): Xaa is C or S
DEGLEXVPTGQSNITMQIMRIKPHQGQHIGEMSLEE

SEQ ID NO: 58919 - protein, 33 aa, Artificial Sequence
  Cyclic GFR-binding peptide
  MOD_RES (3), (3): Xaa is C or S
LEXVPTEERSVKMAKVRIKPHQGQHKEVQVFLQ

SEQ ID NO: 58920 - protein, 35 aa, Artificial Sequence; identical to SEQ ID NO: 15744
  Cyclic GFR-binding peptide
  MOD_RES (1), (35): Xaa is C or S

SEQ ID NO: 58921 - protein, 39 aa, Artificial Sequence; identical to SEQ ID NO: 15745
  Cyclic GFR-binding peptide
  MOD_RES (2), (36), (38): Xaa is C or S

SEQ ID NO: 58922 - protein, 29 aa, Artificial Sequence
  Cyclic GFR-binding peptide
RVHHSNITVQIMEYVRKKPKLIGEMSRLE

SEQ ID NO: 58923 - protein, 34 aa, Artificial Sequence
  Cyclic GFR-binding peptide
  MOD_RES (4), (4): Xaa is C or S
SVKXQPSRVHHSNITVQIMEYVRKKPKLIGEMSR

SEQ ID NO: 58924 - protein, 41 aa, Artificial Sequence; identical to SEQ ID NO: 15747
  Cyclic GFR-binding peptide
  MOD_RES (2), (39), (41): Xaa is C or S

SEQ ID NO: 58925 - protein, 37 aa, Artificial Sequence; identical to SEQ ID NO: 15748
  Cyclic GFR-binding peptide
  MOD_RES (34), (36): Xaa is C or S

SEQ ID NO: 58926 - protein, 37 aa, Artificial Sequence; identical to SEQ ID NO: 15749
  Cyclic GFR-binding peptide
  MOD_RES (2), (36): Xaa is C or S

SEQ ID NO: 58927 - protein, 35 aa, Artificial Sequence
  Cyclic GFR-binding peptide
  MOD_RES (3), (3): Xaa is C or S
VKXQPSRVHHSNITVQIMEYVRKKPKLLGEMSRLE

SEQ ID NO: 58928 - protein, 40 aa, Artificial Sequence; identical to SEQ ID NO: 15750
  Cyclic GFR-binding peptide
  MOD_RES (1), (38), (40): Xaa is C or S

SEQ ID NO: 58929 - protein, 44 aa, Artificial Sequence; identical to SEQ ID NO: 15752
  Cyclic GFR-binding peptide
  MOD_RES (5), (42), (44): Xaa is C or S

SEQ ID NO: 58930 - protein, 33 aa, Artificial Sequence
  Cyclic GFR-binding peptide
  MOD_RES (32), (32): Xaa is C or S
HHSNITVQIMEYVRKKPKLIGEMSRLEEHLEXA

SEQ ID NO: 58931 - protein, 33 aa, Artificial Sequence
  Cyclic GFR-binding peptide
RVHHRPVQVRKIEYVRKKPKLKKATVRLEEHLE

SEQ ID NO: 58932 - protein, 29 aa, Artificial Sequence
  Cyclic GFR-binding peptide
  MOD_RES (1), (1): Xaa is C or S
XVPTGQRSVKMAKVRIKPHQGQHKEVQVL

SEQ ID NO: 58933 - protein, 26 aa, Artificial Sequence
  Cyclic GFR-binding peptide
RVHHSNITVQIMEYVRKKPKLLGEMS

SEQ ID NO: 58934 - protein, 31 aa, Artificial Sequence
  Cyclic GFR-binding peptide
VPTEERPVQMRKIRIKPHQGQHKKATVFLQH

SEQ ID NO: 58935 - protein, 33 aa, Artificial Sequence
  Cyclic GFR-binding peptide
  MOD_RES (2), (2): Xaa is C or S
EXVPTEERSVKMAKVRIKPHQGQHKEVQVFLQH

SEQ ID NO: 58936 - protein, 37 aa, Artificial Sequence; identical to SEQ ID NO: 15753
  Cyclic GFR-binding peptide
  MOD_RES (3), (3): Xaa is C or S

SEQ ID NO: 58937 - protein, 37 aa, Artificial Sequence; identical to SEQ ID NO: 15754
  Cyclic GFR-binding peptide
  MOD_RES (3), (3): Xaa is C or S

SEQ ID NO: 58938 - protein, 23 aa, Artificial Sequence
  Cyclic GFR-binding peptide
LRSVKVAKVEIVRKKPIFKEVQV

SEQ ID NO: 58939 - protein, 29 aa, Artificial Sequence
  Cyclic GFR-binding peptide
HRPVQVRKIEYVRKKPKLKKATVRLEEHL

SEQ ID NO: 58940 - protein, 41 aa, Artificial Sequence; identical to SEQ ID NO: 15756
  Cyclic GFR-binding peptide
  MOD_RES (2), (39), (41): Xaa is C or S

SEQ ID NO: 58941 - protein, 37 aa, Artificial Sequence; identical to SEQ ID NO: 15757
  Cyclic GFR-binding peptide
  MOD_RES (2), (36): Xaa is C or S

SEQ ID NO: 58942 - protein, 41 aa, Artificial Sequence; identical to SEQ ID NO: 15758
  Cyclic GFR-binding peptide
  MOD_RES (3), (40): Xaa is C or S

SEQ ID NO: 58943 - protein, 24 aa, Artificial Sequence
  Cyclic GFR-binding peptide
QLRSVKVAKVEIVRKKPIFKEVQV

SEQ ID NO: 58944 - protein, 41 aa, Artificial Sequence; identical to SEQ ID NO: 15759
  Cyclic GFR-binding peptide
  MOD_RES (4), (38), (40): Xaa is C or S

SEQ ID NO: 58945 - protein, 32 aa, Artificial Sequence
  Cyclic GFR-binding peptide
  MOD_RES (30), (32): Xaa is C or S
SNITVQIMEIVRKKPIFIGEMSTLEDHLAXKX

SEQ ID NO: 58946 - protein, 40 aa, Artificial Sequence; identical to SEQ ID NO: 15761
  Cyclic GFR-binding peptide
  MOD_RES (3), (37), (39): Xaa is C or S

SEQ ID NO: 58947 - protein, 27 aa, Artificial Sequence
  Cyclic GFR-binding peptide
HHSNITVQIMEYVRKKPKLLGEMSRLE

SEQ ID NO: 58948 - protein, 33 aa, Artificial Sequence
  Cyclic GFR-binding peptide
  MOD_RES (30), (32): Xaa is C or S
QRPVQMRKIRIKPHQGQHKKATVLEEHSQXEXR

SEQ ID NO: 58949 - protein, 27 aa, Artificial Sequence
  Cyclic GFR-binding peptide
PTGQRSVKMAKVRIKPHQGQHKEVQVL

SEQ ID NO: 58950 - protein, 39 aa, Artificial Sequence; identical to SEQ ID NO: 15762
  Cyclic GFR-binding peptide
  MOD_RES (37), (39): Xaa is C or S

SEQ ID NO: 58951 - protein, 38 aa, Artificial Sequence; identical to SEQ ID NO: 15763
  Cyclic GFR-binding peptide
  MOD_RES (4), (38): Xaa is C or S

SEQ ID NO: 58952 - protein, 39 aa, Artificial Sequence; identical to SEQ ID NO: 15764
  Cyclic GFR-binding peptide
  MOD_RES (3), (3): Xaa is C or S

SEQ ID NO: 58953 - protein, 40 aa, Artificial Sequence; identical to SEQ ID NO: 15765
  Cyclic GFR-binding peptide
  MOD_RES (7), (7): Xaa is C or S

SEQ ID NO: 58954 - protein, 29 aa, Artificial Sequence
  Cyclic GFR-binding peptide
HSNITVQIMEYVRKKPKLIGEMSRLEEHL

SEQ ID NO: 58955 - protein, 35 aa, Artificial Sequence; identical to SEQ ID NO: 15771
  Cyclic GFR-binding peptide

SEQ ID NO: 58956 - protein, 38 aa, Artificial Sequence; identical to SEQ ID NO: 15773
  Cyclic GFR-binding peptide
  MOD_RES (3), (37): Xaa is C or S

SEQ ID NO: 58957 - protein, 29 aa, Artificial Sequence
  Cyclic GFR-binding peptide
QVQLSNITVQIMEIVRKKPIFLGEMSTLE

SEQ ID NO: 58958 - protein, 31 aa, Artificial Sequence
  Cyclic GFR-binding peptide
TEERPVQMRKIRIKPHQGQHKKATVFLQHNK

SEQ ID NO: 58959 - protein, 28 aa, Artificial Sequence
  Cyclic GFR-binding peptide
RVHHSNITVQIMEYVRKKPKLLGEMSRL

SEQ ID NO: 58960 - protein, 35 aa, Artificial Sequence
  Cyclic GFR-binding peptide
  MOD_RES (2), (2): Xaa is C or S
KXQPSRVHHRPVQVRKIEYVRKKPKLKKATVRLEE

SEQ ID NO: 58961 - protein, 34 aa, Artificial Sequence
  Cyclic GFR-binding peptide
  MOD_RES (5), (5): Xaa is C or S
EGLEXVPTGQRPVQMRKIRIKPHQGQHKKATVLE

SEQ ID NO: 58962 - protein, 39 aa, Artificial Sequence; identical to SEQ ID NO: 15781
  Cyclic GFR-binding peptide
  MOD_RES (4), (4): Xaa is C or S

SEQ ID NO: 58963 - protein, 29 aa, Artificial Sequence
  Cyclic GFR-binding peptide
VQLRSVKVAKVEIVRKKPIFKEVQVTLED

SEQ ID NO: 58964 - protein, 31 aa, Artificial Sequence
  Cyclic GFR-binding peptide
VPTGQSNITMQIMRIKPHQGQHIGEMSLEEH

SEQ ID NO: 58965 - protein, 29 aa, Artificial Sequence
  Cyclic GFR-binding peptide
HHSNITVQIMEYVRKKPKLLGEMSRLEEH

SEQ ID NO: 58966 - protein, 32 aa, Artificial Sequence
  Cyclic GFR-binding peptide
  MOD_RES (5), (5): Xaa is C or S
EGLEXVPTEERSVKMAKVRIKPHQGQHKEVQV

SEQ ID NO: 58967 - protein, 40 aa, Artificial Sequence; identical to SEQ ID NO: 15783
  Cyclic GFR-binding peptide
  MOD_RES (5), (5): Xaa is C or S

SEQ ID NO: 58968 - protein, 37 aa, Artificial Sequence; identical to SEQ ID NO: 15784
  Cyclic GFR-binding peptide
  MOD_RES (36), (36): Xaa is C or S

SEQ ID NO: 58969 - protein, 34 aa, Artificial Sequence
  Cyclic GFR-binding peptide
  MOD_RES (4), (4): Xaa is C or S
SVKXQPSRVHHSNITVQIMEYVRKKPKLLGEMSR

SEQ ID NO: 58970 - protein, 42 aa, Artificial Sequence; identical to SEQ ID NO: 15785
  Cyclic GFR-binding peptide
  MOD_RES (7), (41): Xaa is C or S

SEQ ID NO: 58971 - protein, 25 aa, Artificial Sequence
  Cyclic GFR-binding peptide
RSVKVAKVEIVRKKPIFKEVQVTLE

SEQ ID NO: 58972 - protein, 31 aa, Artificial Sequence
  Cyclic GFR-binding peptide
  MOD_RES (3), (3): Xaa is C or S
LEXVPTGQRSVKMAKVRIKPHQGQHKEVQVL

SEQ ID NO: 58973 - protein, 31 aa, Artificial Sequence
  Cyclic GFR-binding peptide
SRVHHSNITVQIMEYVRKKPKLIGEMSRLEE

SEQ ID NO: 58974 - protein, 31 aa, Artificial Sequence
  Cyclic GFR-binding peptide
PTGQSNITMQIMRIKPHQGQHIGEMSLEEHS

SEQ ID NO: 58975 - protein, 30 aa, Artificial Sequence
  Cyclic GFR-binding peptide
  MOD_RES (30), (30): Xaa is C or S
QRPVQMRKIRIKPHQGQHKKATVLEEHSQX

SEQ ID NO: 58976 - protein, 36 aa, Artificial Sequence; identical to SEQ ID NO: 15787
  Cyclic GFR-binding peptide
  MOD_RES (34), (36): Xaa is C or S

SEQ ID NO: 58977 - protein, 41 aa, Artificial Sequence; identical to SEQ ID NO: 15789
  Cyclic GFR-binding peptide
  MOD_RES (4), (41): Xaa is C or S

SEQ ID NO: 58978 - protein, 36 aa, Artificial Sequence; identical to SEQ ID NO: 15790
  Cyclic GFR-binding peptide
  MOD_RES (3), (3): Xaa is C or S

SEQ ID NO: 58979 - protein, 43 aa, Artificial Sequence; identical to SEQ ID NO: 15792
  Cyclic GFR-binding peptide
  MOD_RES (5), (42): Xaa is C or S

SEQ ID NO: 58980 - protein, 31 aa, Artificial Sequence
  Cyclic GFR-binding peptide
RPVQVRKIEIVRKKPIFKKATVAAAAAAAAA

SEQ ID NO: 58981 - protein, 36 aa, Artificial Sequence; identical to SEQ ID NO: 15798
  Cyclic GFR-binding peptide
  MOD_RES (3), (3): Xaa is C or S

SEQ ID NO: 58982 - protein, 28 aa, Artificial Sequence
  Cyclic GFR-binding peptide
SRVHHSNITVQIMEYVRKKPKLIGEMSR

SEQ ID NO: 58983 - protein, 35 aa, Artificial Sequence
  Cyclic GFR-binding peptide
  MOD_RES (32), (34): Xaa is C or S
TEERPVQMRKIRIKPHQGQHKKATVFLQHNKXEXR

SEQ ID NO: 58984 - protein, 26 aa, Artificial Sequence
  Cyclic GFR-binding peptide
HRPVQVRKIEYVRKKPKLKKATVRLE

SEQ ID NO: 58985 - protein, 32 aa, Artificial Sequence
  Cyclic GFR-binding peptide
  MOD_RES (3), (3): Xaa is C or S
VQXRPTQVQLRSVKVAKVEIVRKKPIFKEVQV

SEQ ID NO: 58986 - protein, 23 aa, Artificial Sequence
  Cyclic GFR-binding peptide
ERSVKMAKVRIKPHQGQHKEVQV

SEQ ID NO: 58987 - protein, 36 aa, Artificial Sequence; identical to SEQ ID NO: 15802
  Cyclic GFR-binding peptide

SEQ ID NO: 58988 - protein, 34 aa, Artificial Sequence
  Cyclic GFR-binding peptide
  MOD_RES (6), (6): Xaa is C or S
DEGLEXVPTEESNITMQIMRIKPHQGQHLGEMSF

SEQ ID NO: 58989 - protein, 29 aa, Artificial Sequence
  Cyclic GFR-binding peptide
TGQRSVKMAKVRIKPHQGQHKEVQVLEEH

SEQ ID NO: 58990 - protein, 38 aa, Artificial Sequence
  Cyclic GFR-binding peptide
  MOD_RES (7), (7): Xaa is C or S
NDEGLEXVPTEERPVQMRKIRIKPHQGQHKKATVFLQH

SEQ ID NO: 58991 - protein, 32 aa, Artificial Sequence
  Cyclic GFR-binding peptide
  MOD_RES (2), (2): Xaa is C or S
EXVPTGQSNITMQIMRIKPHQGQHIGEMSLEE

SEQ ID NO: 58992 - protein, 27 aa, Artificial Sequence
  Cyclic GFR-binding peptide
SNITVQIMEYVRKKPKLLGEMSRLEEH

SEQ ID NO: 58993 - protein, 27 aa, Artificial Sequence
  Cyclic GFR-binding peptide
SNITVQIMEYVRKKPKLIGEMSRLEEH

SEQ ID NO: 58994 - protein, 42 aa, Artificial Sequence; identical to SEQ ID NO: 15805
  Cyclic GFR-binding peptide
  MOD_RES (2), (39), (41): Xaa is C or S

SEQ ID NO: 58995 - protein, 30 aa, Artificial Sequence
  Cyclic GFR-binding peptide
VPTEERSVKMAKVRIKPHQGQHKEVQVFLQ

SEQ ID NO: 58996 - protein, 35 aa, Artificial Sequence
  Cyclic GFR-binding peptide
  MOD_RES (34), (34): Xaa is C or S
QVQLSNITVQIMEIVRKKPIFIGEMSTLEDHLAXK

SEQ ID NO: 58997 - protein, 29 aa, Artificial Sequence
  Cyclic GFR-binding peptide
PTGQRPVQMRKIRIKPHQGQHKKATVLEE

SEQ ID NO: 58998 - protein, 34 aa, Artificial Sequence; identical to SEQ ID NO: 15808
  Cyclic GFR-binding peptide
  MOD_RES (34), (34): Xaa is C or S

SEQ ID NO: 58999 - protein, 35 aa, Artificial Sequence
  Cyclic GFR-binding peptide
  MOD_RES (5), (5): Xaa is C or S
RNVQXRPTQVQLRSVKVAKVEIVRKKPIFKEVQVT

SEQ ID NO: 59000 - protein, 30 aa, Artificial Sequence
  Cyclic GFR-binding peptide
  MOD_RES (1), (1): Xaa is C or S
XRPTQVQLSNITVQIMEIVRKKPIFIGEMS

SEQ ID NO: 59001 - protein, 33 aa, Artificial Sequence
  Cyclic GFR-binding peptide
  MOD_RES (31), (33): Xaa is C or S
EESNITMQIMRIKPHQGQHLGEMSFLQHNKXEX

SEQ ID NO: 59002 - protein, 32 aa, Artificial Sequence
  Cyclic GFR-binding peptide
PTQVQLSNITVQIMEIVRKKPIFLGEMSTLED

SEQ ID NO: 59003 - protein, 39 aa, Artificial Sequence; identical to SEQ ID NO: 15811
  Cyclic GFR-binding peptide
  MOD_RES (3), (3): Xaa is C or S

SEQ ID NO: 59004 - protein, 31 aa, Artificial Sequence
  Cyclic GFR-binding peptide
SNITMQIMRIKPHQGQHIGEMSAAAAAAAAA

SEQ ID NO: 59005 - protein, 29 aa, Artificial Sequence
  Cyclic GFR-binding peptide
PSRVHHSNITVQIMEYVRKKPKLLGEMSR

SEQ ID NO: 59006 - protein, 37 aa, Artificial Sequence; identical to SEQ ID NO: 15814
  Cyclic GFR-binding peptide
  MOD_RES (3), (37): Xaa is C or S

SEQ ID NO: 59007 - protein, 30 aa, Artificial Sequence
  Cyclic GFR-binding peptide
PTEERSVKMAKVRIKPHQGQHKEVQVFLQH

SEQ ID NO: 59008 - protein, 28 aa, Artificial Sequence
  Cyclic GFR-binding peptide
HHRPVQVRKIEYVRKKPKLKKATVRLEE

SEQ ID NO: 59009 - protein, 33 aa, Artificial Sequence
  Cyclic GFR-binding peptide
  MOD_RES (4), (4): Xaa is C or S
GLEXVPTEERPVQMRKIRIKPHQGQHKKATVFL

SEQ ID NO: 59010 - protein, 34 aa, Artificial Sequence
  Cyclic GFR-binding peptide
  MOD_RES (34), (34): Xaa is C or S
QVQLSNITVQIMEIVRKKPIFIGEMSTLEDHLAX

SEQ ID NO: 59011 - protein, 35 aa, Artificial Sequence
  Cyclic GFR-binding peptide
  MOD_RES (30), (31): Xaa is C or S
KVVMEYQKYVKPTRGVIYLISIPSLDQPVXXPSAS

SEQ ID NO: 59012 - protein, 40 aa, Artificial Sequence; identical to SEQ ID NO: 15822
  Cyclic GFR-binding peptide
  MOD_RES (2), (4), (36), (37): Xaa is C or S

SEQ ID NO: 59013 - protein, 32 aa, Artificial Sequence; identical to SEQ ID NO: 15824
  Cyclic GFR-binding peptide
  MOD_RES (31), (32): Xaa is C or S

SEQ ID NO: 59014 - protein, 31 aa, Artificial Sequence
  Cyclic GFR-binding peptide
  MOD_RES (1), (1): Xaa is C or S
XESVAMGEYQKYYTVVGKDIYLISIPSLKTP

SEQ ID NO: 59015 - protein, 29 aa, Artificial Sequence
  Cyclic GFR-binding peptide
  MOD_RES (26), (26): Xaa is C or S
EYKFKIVNSSDDLYLVSIPELKTPAXTPK

SEQ ID NO: 59016 - protein, 22 aa, Artificial Sequence
  Cyclic GFR-binding peptide
EYQKYIVNSSDDIYLVSIPSLK

SEQ ID NO: 59017 - protein, 28 aa, Artificial Sequence
  Cyclic GFR-binding peptide
VMEEYKFKVVKDYEDLYLMSIPELETPV

SEQ ID NO: 59018 - protein, 37 aa, Artificial Sequence; identical to SEQ ID NO: 15830
  Cyclic GFR-binding peptide
  MOD_RES (2), (33), (34): Xaa is C or S

SEQ ID NO: 59019 - protein, 32 aa, Artificial Sequence
  Cyclic GFR-binding peptide
  MOD_RES (28), (29): Xaa is C or S
IMEYQKYIKPTKGIIYLISIPSLDQSVXXPSA

SEQ ID NO: 59020 - protein, 34 aa, Artificial Sequence; identical to SEQ ID NO: 15835
  Cyclic GFR-binding peptide
  MOD_RES (1), (33), (34): Xaa is C or S

SEQ ID NO: 59021 - protein, 24 aa, Artificial Sequence
  Cyclic GFR-binding peptide
MDEYKFKVVKENEDLYLMSIPELE

SEQ ID NO: 59022 - protein, 35 aa, Artificial Sequence; identical to SEQ ID NO: 15839
  Cyclic GFR-binding peptide
  MOD_RES (1), (3), (35): Xaa is C or S

SEQ ID NO: 59023 - protein, 31 aa, Artificial Sequence; identical to SEQ ID NO: 15841
  Cyclic GFR-binding peptide
  MOD_RES (31), (31): Xaa is C or S

SEQ ID NO: 59024 - protein, 24 aa, Artificial Sequence
  Cyclic GFR-binding peptide
NEYKFKIVNSSDDLYLVSIPELKT

SEQ ID NO: 59025 - protein, 42 aa, Artificial Sequence; identical to SEQ ID NO: 15845
  Cyclic GFR-binding peptide
  MOD_RES (2), (4), (36), (37): Xaa is C or S

SEQ ID NO: 59026 - protein, 23 aa, Artificial Sequence
  Cyclic GFR-binding peptide
EEYKFKTPVGMDDLYLVSIPELK

SEQ ID NO: 59027 - protein, 32 aa, Artificial Sequence
  Cyclic GFR-binding peptide
  MOD_RES (28), (29): Xaa is C or S
IMEYKFKIKPTKGILYLISIPELDQSVXXPSA

SEQ ID NO: 59028 - protein, 36 aa, Artificial Sequence; identical to SEQ ID NO: 15847
  Cyclic GFR-binding peptide
  MOD_RES (31), (32): Xaa is C or S

SEQ ID NO: 59029 - protein, 26 aa, Artificial Sequence
  Cyclic GFR-binding peptide
VIMEYQKYIKPTKGIIYLISIPSLDQ

SEQ ID NO: 59030 - protein, 25 aa, Artificial Sequence
  Cyclic GFR-binding peptide
VMDEYKFKVVKENEDLYLMSIPELE

SEQ ID NO: 59031 - protein, 41 aa, Artificial Sequence; identical to SEQ ID NO: 15853
  Cyclic GFR-binding peptide
  MOD_RES (1), (3), (35), (36): Xaa is C or S

SEQ ID NO: 59032 - protein, 31 aa, Artificial Sequence
  Cyclic GFR-binding peptide
  MOD_RES (30), (31): Xaa is C or S
VVMDRYKKLVVNNAADFYLISIANLRAPVXX

SEQ ID NO: 59033 - protein, 24 aa, Artificial Sequence
  Cyclic GFR-binding peptide
MDEYQKYVVKENEDIYLMSIPSLE

SEQ ID NO: 59034 - protein, 40 aa, Artificial Sequence; identical to SEQ ID NO: 15855
  Cyclic GFR-binding peptide
  MOD_RES (1), (3), (35), (36): Xaa is C or S

SEQ ID NO: 59035 - protein, 27 aa, Artificial Sequence
  Cyclic GFR-binding peptide
VAMGYHYKLYTVVGKDKYLISIPSLKT

SEQ ID NO: 59036 - protein, 26 aa, Artificial Sequence
  Cyclic GFR-binding peptide
  MOD_RES (26), (26): Xaa is C or S
EYKFKVVNNAADLYLISIPELRAPVX

SEQ ID NO: 59037 - protein, 37 aa, Artificial Sequence; identical to SEQ ID NO: 15861
  Cyclic GFR-binding peptide
  MOD_RES (2), (34), (35): Xaa is C or S

SEQ ID NO: 59038 - protein, 26 aa, Artificial Sequence
  Cyclic GFR-binding peptide
ESVAMGEYQKYYTVVGKDIYLISIPS

SEQ ID NO: 59039 - protein, 26 aa, Artificial Sequence
  Cyclic GFR-binding peptide
VVMNEYQKYIVNNSSDIYLVSIPSLK

SEQ ID NO: 59040 - protein, 34 aa, Artificial Sequence
  Cyclic GFR-binding peptide
  MOD_RES (28), (29): Xaa is C or S
VMEYKFKVKPTRGVLYLISIPELDQPVXXPSASA

SEQ ID NO: 59041 - protein, 29 aa, Artificial Sequence
  Cyclic GFR-binding peptide
  MOD_RES (1), (1): Xaa is C or S
XESVAMGEYQKYYTVVGKDIYLISIPSLK

SEQ ID NO: 59042 - protein, 36 aa, Artificial Sequence
  Cyclic GFR-binding peptide
  MOD_RES (30), (31): Xaa is C or S
VVMNEYQKYIVNSSDDIYLVSIPSLQTPAXXPKPVT

SEQ ID NO: 59043 - protein, 27 aa, Artificial Sequence
  Cyclic GFR-binding peptide
MNEYQKYIVNSSDDIYLVSIPSLQTPA

SEQ ID NO: 59044 - protein, 33 aa, Artificial Sequence; identical to SEQ ID NO: 15872
  Cyclic GFR-binding peptide
  MOD_RES (1), (33): Xaa is C or S

SEQ ID NO: 59045 - protein, 30 aa, Artificial Sequence
  Cyclic GFR-binding peptide
  MOD_RES (2), (4): Xaa is C or S
RXGXAEVVMDYHYKLVVNNAADKYLISIPS

SEQ ID NO: 59046 - protein, 36 aa, Artificial Sequence; identical to SEQ ID NO: 15873
  Cyclic GFR-binding peptide
  MOD_RES (2), (4), (35), (36): Xaa is C or S

SEQ ID NO: 59047 - protein, 23 aa, Artificial Sequence
  Cyclic GFR-binding peptide
EEYKFKVVKDYEDLYLMSIPELE

SEQ ID NO: 59048 - protein, 30 aa, Artificial Sequence
  Cyclic GFR-binding peptide
ESVAMGRYKKLYTVVGKDFYLISIANLKTP

SEQ ID NO: 59049 - protein, 29 aa, Artificial Sequence
  Cyclic GFR-binding peptide
  MOD_RES (26), (27): Xaa is C or S
EYQKYVVKENEDIYLMSIPSLETPVXXAK

SEQ ID NO: 59050 - protein, 29 aa, Artificial Sequence
  Cyclic GFR-binding peptide
AAAAAAAAAEYKFKVKPTRGVLYLISIPE

SEQ ID NO: 59051 - protein, 25 aa, Artificial Sequence
  Cyclic GFR-binding peptide
NEYKFKIVNSSDDLYLVSIPELKTP

SEQ ID NO: 59052 - protein, 41 aa, Artificial Sequence; identical to SEQ ID NO: 15879
  Cyclic GFR-binding peptide
  MOD_RES (1), (3), (35), (36): Xaa is C or S

SEQ ID NO: 59053 - protein, 31 aa, Artificial Sequence
  Cyclic GFR-binding peptide
  MOD_RES (28), (29): Xaa is C or S
GEEYKFKTPVGMDDLYLVSIPELKTPVXXAK

SEQ ID NO: 59054 - protein, 23 aa, Artificial Sequence
  Cyclic GFR-binding peptide
EYKFKIVNNSSDLYLVSIPELKT

SEQ ID NO: 59055 - protein, 34 aa, Artificial Sequence; identical to SEQ ID NO: 15885
  Cyclic GFR-binding peptide
  MOD_RES (1), (3): Xaa is C or S

SEQ ID NO: 59056 - protein, 32 aa, Artificial Sequence
  Cyclic GFR-binding peptide
  MOD_RES (29), (30): Xaa is C or S
VMNEYQKYIVNSSDDIYLVSIPSLQTPAXXPK

SEQ ID NO: 59057 - protein, 28 aa, Artificial Sequence
  Cyclic GFR-binding peptide
SKVVMEYQKYVKPTRGVIYLISIPSLDQ

SEQ ID NO: 59058 - protein, 28 aa, Artificial Sequence
  Cyclic GFR-binding peptide
  MOD_RES (1), (1): Xaa is C or S
XESVAMGYHYKLYTVVGKDKYLISIPSL

SEQ ID NO: 59059 - protein, 30 aa, Artificial Sequence
  Cyclic GFR-binding peptide
  MOD_RES (1), (1): Xaa is C or S
XESVAMGRYKKLYTVVGKDFYLISIANLKT

SEQ ID NO: 59060 - protein, 40 aa, Artificial Sequence; identical to SEQ ID NO: 15893
  Cyclic GFR-binding peptide
  MOD_RES (1), (3), (35), (36): Xaa is C or S

SEQ ID NO: 59061 - protein, 30 aa, Artificial Sequence
  Cyclic GFR-binding peptide
  MOD_RES (28), (29): Xaa is C or S
MEEYQKYVVKDYEDIYLMSIPSLETPVXXA

SEQ ID NO: 59062 - protein, 32 aa, Artificial Sequence
  Cyclic GFR-binding peptide
  MOD_RES (28), (29): Xaa is C or S
MGEYQKYYTVVGKDIYLISIPSLKTPVXXAKS

SEQ ID NO: 59063 - protein, 37 aa, Artificial Sequence; identical to SEQ ID NO: 15896
  Cyclic GFR-binding peptide
  MOD_RES (2), (34), (35): Xaa is C or S

SEQ ID NO: 59064 - protein, 31 aa, Artificial Sequence
  Cyclic GFR-binding peptide
  MOD_RES (27), (28): Xaa is C or S
NEYKFKIVNSSDDLYLVSIPELKTPAXXPKP

SEQ ID NO: 59065 - protein, 38 aa, Artificial Sequence; identical to SEQ ID NO: 15898
  Cyclic GFR-binding peptide
  MOD_RES (2), (34), (35): Xaa is C or S

SEQ ID NO: 59066 - protein, 23 aa, Artificial Sequence
  Cyclic GFR-binding peptide
EYKFKVVKENEDLYLMSIPELET

SEQ ID NO: 59067 - protein, 34 aa, Artificial Sequence
  Cyclic GFR-binding peptide
  MOD_RES (30), (31): Xaa is C or S
VVMEEYKFKVVKDYEDLYLMSIPELETPVXXAKP

SEQ ID NO: 59068 - protein, 24 aa, Artificial Sequence
  Cyclic GFR-binding peptide
VIMEYQKYVKPKRGVIYLISIPSL

SEQ ID NO: 59069 - protein, 22 aa, Artificial Sequence
  Cyclic GFR-binding peptide
GEYQKYYTVVGKDIYLISIPSL

SEQ ID NO: 59070 - protein, 33 aa, Artificial Sequence
  Cyclic GFR-binding peptide
  MOD_RES (28), (29): Xaa is C or S
MEEYQKYVVKDYEDIYLMSIPSLETPVXXAKPI

SEQ ID NO: 59071 - protein, 42 aa, Artificial Sequence; identical to SEQ ID NO: 15904
  Cyclic GFR-binding peptide
  MOD_RES (2), (4), (36), (37): Xaa is C or S

SEQ ID NO: 59072 - protein, 38 aa, Artificial Sequence; identical to SEQ ID NO: 15905
  Cyclic GFR-binding peptide
  MOD_RES (1), (3), (35), (36): Xaa is C or S

SEQ ID NO: 59073 - protein, 25 aa, Artificial Sequence
  Cyclic GFR-binding peptide
VMNEYQKYIVNSSDDIYLVSIPSLQ

SEQ ID NO: 59074 - protein, 27 aa, Artificial Sequence
  Cyclic GFR-binding peptide
IMEYQKYVKPKRGVIYLISIPSLAQPV

SEQ ID NO: 59075 - protein, 31 aa, Artificial Sequence
  Cyclic GFR-binding peptide
  MOD_RES (29), (30): Xaa is C or S
VMNEYQKYIVNSSDDIYLVSIPSLKTPAXXP

SEQ ID NO: 59076 - protein, 35 aa, Artificial Sequence; identical to SEQ ID NO: 15914
  Cyclic GFR-binding peptide
  MOD_RES (2), (34), (35): Xaa is C or S

SEQ ID NO: 59077 - protein, 33 aa, Artificial Sequence
  Cyclic GFR-binding peptide
  MOD_RES (30), (31): Xaa is C or S
KVIMEYKFKIKPTKGILYLISIPELDQSVXXPS

SEQ ID NO: 59078 - protein, 22 aa, Artificial Sequence
  Cyclic GFR-binding peptide
EYKFKIKPTKGILYLISIPELD

SEQ ID NO: 59079 - protein, 34 aa, Artificial Sequence
  Cyclic GFR-binding peptide
  MOD_RES (2), (4): Xaa is C or S
RXGXESVAMGRYKKLYTVVGKDFYLISIANLKTP

SEQ ID NO: 59080 - protein, 26 aa, Artificial Sequence
  Cyclic GFR-binding peptide
VVMNEYQKYIVNSSDDIYLVSIPSLK

SEQ ID NO: 59081 - protein, 41 aa, Artificial Sequence; identical to SEQ ID NO: 15916
  Cyclic GFR-binding peptide
  MOD_RES (2), (4), (36), (37): Xaa is C or S

SEQ ID NO: 59082 - protein, 37 aa, Artificial Sequence; identical to SEQ ID NO: 15920
  Cyclic GFR-binding peptide
  MOD_RES (1), (3), (35): Xaa is C or S

SEQ ID NO: 59083 - protein, 31 aa, Artificial Sequence
  Cyclic GFR-binding peptide
  MOD_RES (27), (27): Xaa is C or S
NEYQKYIVNSSDDIYLVSIPSLKTPAXTPKT

SEQ ID NO: 59084 - protein, 35 aa, Artificial Sequence; identical to SEQ ID NO: 15932
  Cyclic GFR-binding peptide
  MOD_RES (2), (34): Xaa is C or S

SEQ ID NO: 59085 - protein, 31 aa, Artificial Sequence
  Cyclic GFR-binding peptide
  MOD_RES (28), (29): Xaa is C or S
GEEYQKYTPVGMDDIYLVSIPSLKTPVXXAK

SEQ ID NO: 59086 - protein, 25 aa, Artificial Sequence
  Cyclic GFR-binding peptide
EYQKYIKPTKGIIYLISIPSLDQSV

SEQ ID NO: 59087 - protein, 35 aa, Artificial Sequence
  Cyclic GFR-binding peptide
  MOD_RES (29), (30): Xaa is C or S
VIMEYKFKIKPTKGILYLISIPELDQSVXXPSASA

SEQ ID NO: 59088 - protein, 37 aa, Artificial Sequence; identical to SEQ ID NO: 15939
  Cyclic GFR-binding peptide
  MOD_RES (31), (32): Xaa is C or S

SEQ ID NO: 59089 - protein, 30 aa, Artificial Sequence
  Cyclic GFR-binding peptide
  MOD_RES (1), (1): Xaa is C or S
XSKVVMEYKFKVKPTRGVLYLISIPELDQP

SEQ ID NO: 59090 - protein, 26 aa, Artificial Sequence
  Cyclic GFR-binding peptide
EEYKFKVVKDYEDLYLMSIPELETPV

SEQ ID NO: 59091 - protein, 34 aa, Artificial Sequence
  Cyclic GFR-binding peptide
  MOD_RES (2), (4): Xaa is C or S
RXGXGEVVMEEYQKYVVKDYEDIYLMSIPSLETP

SEQ ID NO: 59092 - protein, 32 aa, Artificial Sequence; identical to SEQ ID NO: 15941
  Cyclic GFR-binding peptide
  MOD_RES (31), (32): Xaa is C or S

SEQ ID NO: 59093 - protein, 33 aa, Artificial Sequence
  Cyclic GFR-binding peptide
  MOD_RES (28), (29): Xaa is C or S
MNEYQKYIVNSSDDIYLVSIPSLKTPAXXPKPV

SEQ ID NO: 59094 - protein, 39 aa, Artificial Sequence; identical to SEQ ID NO: 15945
  Cyclic GFR-binding peptide
  MOD_RES (1), (3), (35), (36): Xaa is C or S

SEQ ID NO: 59095 - protein, 28 aa, Artificial Sequence
  Cyclic GFR-binding peptide
GEVVMDEYQKYVVKENEDIYLMSIPSLE

SEQ ID NO: 59096 - protein, 34 aa, Artificial Sequence; identical to SEQ ID NO: 15951
  Cyclic GFR-binding peptide
  MOD_RES (31), (32): Xaa is C or S

SEQ ID NO: 59097 - protein, 35 aa, Artificial Sequence; identical to SEQ ID NO: 15953
  Cyclic GFR-binding peptide
  MOD_RES (1), (34), (35): Xaa is C or S

SEQ ID NO: 59098 - protein, 28 aa, Artificial Sequence
  Cyclic GFR-binding peptide
VVMEYQKYVKPTRGVIYLISIPSLDQPV

SEQ ID NO: 59099 - protein, 30 aa, Artificial Sequence; identical to SEQ ID NO: 1929
  Cyclic GFR-binding peptide

SEQ ID NO: 59100 - protein, 29 aa, Artificial Sequence
  Cyclic GFR-binding peptide
AAAAAAAAAEYKFKTPVGMDDLYLVSIPE

SEQ ID NO: 59101 - protein, 33 aa, Artificial Sequence
  Cyclic GFR-binding peptide
  MOD_RES (29), (30): Xaa is C or S
VMDEYKFKVVNNAADLYLISIPELRAPVXXSAP

SEQ ID NO: 59102 - protein, 30 aa, Artificial Sequence
  Cyclic GFR-binding peptide
  MOD_RES (1), (3): Xaa is C or S
XGXAEVVMDYHYKLVVNNAADKYLISIPSL

SEQ ID NO: 59103 - protein, 37 aa, Artificial Sequence; identical to SEQ ID NO: 15962
  Cyclic GFR-binding peptide
  MOD_RES (2), (4), (36), (37): Xaa is C or S

SEQ ID NO: 59104 - protein, 25 aa, Artificial Sequence
  Cyclic GFR-binding peptide
VAMGEYQKYYTVVGKDIYLISIPSL

SEQ ID NO: 59105 - protein, 35 aa, Artificial Sequence; identical to SEQ ID NO: 15964
  Cyclic GFR-binding peptide
  MOD_RES (1), (3), (34), (35): Xaa is C or S

SEQ ID NO: 59106 - protein, 36 aa, Artificial Sequence; identical to SEQ ID NO: 15974
  Cyclic GFR-binding peptide
  MOD_RES (2), (4), (36): Xaa is C or S

SEQ ID NO: 59107 - protein, 32 aa, Artificial Sequence
  Cyclic GFR-binding peptide
  MOD_RES (29), (30): Xaa is C or S
VVMEYQKYVKPTRGVIYLISIPSLDQPVXXPS

SEQ ID NO: 59108 - protein, 29 aa, Artificial Sequence
  Cyclic GFR-binding peptide
AAAAAAAAAEYQKYVKPKRGVIYLISIPS

SEQ ID NO: 59109 - protein, 29 aa, Artificial Sequence
  Cyclic GFR-binding peptide
  MOD_RES (29), (29): Xaa is C or S
VMNEYKFKIVNSSDDLYLVSIPELQTPAX

SEQ ID NO: 59110 - protein, 29 aa, Artificial Sequence
  Cyclic GFR-binding peptide
SRVVMNEYKFKIVNSSDDLYLVSIPELKT

SEQ ID NO: 59111 - protein, 31 aa, Artificial Sequence
  Cyclic GFR-binding peptide
  MOD_RES (28), (29): Xaa is C or S
MDEYKFKVVNNAADLYLISIPELRAPVXXSA

SEQ ID NO: 59112 - protein, 31 aa, Artificial Sequence
  Cyclic GFR-binding peptide
  MOD_RES (2), (2): Xaa is C or S
GXEAVSMGEEYQKYTPVGMDDIYLVSIPSLK

SEQ ID NO: 59113 - protein, 36 aa, Artificial Sequence; identical to SEQ ID NO: 15984
  Cyclic GFR-binding peptide
  MOD_RES (2), (4), (36): Xaa is C or S

SEQ ID NO: 59114 - protein, 39 aa, Artificial Sequence; identical to SEQ ID NO: 15986
  Cyclic GFR-binding peptide
  MOD_RES (2), (4), (36), (37): Xaa is C or S

SEQ ID NO: 59115 - protein, 27 aa, Artificial Sequence
  Cyclic GFR-binding peptide
  MOD_RES (27), (27): Xaa is C or S
GRYKKLYTVVGKDFYLISIANLKTPVX

SEQ ID NO: 59116 - protein, 35 aa, Artificial Sequence
  Cyclic GFR-binding peptide
  MOD_RES (29), (30): Xaa is C or S
VMDEYKFKVVNNAADLYLISIPELRAPVXXSAPAA

SEQ ID NO: 59117 - protein, 33 aa, Artificial Sequence
  Cyclic GFR-binding peptide
  MOD_RES (1), (3): Xaa is C or S
XGXGEVVMEEYKFKVVKDYEDLYLMSIPELETP

SEQ ID NO: 59118 - protein, 30 aa, Artificial Sequence; identical to SEQ ID NO: 1932
  Cyclic GFR-binding peptide

SEQ ID NO: 59119 - protein, 36 aa, Artificial Sequence; identical to SEQ ID NO: 15994
  Cyclic GFR-binding peptide
  MOD_RES (2), (4), (36): Xaa is C or S

SEQ ID NO: 59120 - protein, 28 aa, Artificial Sequence
  Cyclic GFR-binding peptide
VMNEYQKYIVNNSSDIYLVSIPSLKTPA

SEQ ID NO: 59121 - protein, 38 aa, Artificial Sequence; identical to SEQ ID NO: 16002
  Cyclic GFR-binding peptide
  MOD_RES (1), (3), (34), (35): Xaa is C or S

SEQ ID NO: 59122 - protein, 28 aa, Artificial Sequence
  Cyclic GFR-binding peptide
VVMNEYQKYIVNSSDDIYLVSIPSLKTP

SEQ ID NO: 59123 - protein, 22 aa, Artificial Sequence
  Cyclic GFR-binding peptide
EYQKYVVKDYEDIYLMSIPSLE

SEQ ID NO: 59124 - protein, 41 aa, Artificial Sequence; identical to SEQ ID NO: 16005
  Cyclic GFR-binding peptide
  MOD_RES (2), (4), (36), (37): Xaa is C or S

SEQ ID NO: 59125 - protein, 30 aa, Artificial Sequence
  Cyclic GFR-binding peptide
  MOD_RES (2), (4): Xaa is C or S
RXGXGEVVMDEYQKYVVKENEDIYLMSIPS

SEQ ID NO: 59126 - protein, 38 aa, Artificial Sequence; identical to SEQ ID NO: 16008
  Cyclic GFR-binding peptide
  MOD_RES (32), (33): Xaa is C or S

SEQ ID NO: 59127 - protein, 26 aa, Artificial Sequence
  Cyclic GFR-binding peptide
AEVVMDRYKKLVVNNAADFYLISIAN

SEQ ID NO: 59128 - protein, 31 aa, Artificial Sequence
  Cyclic GFR-binding peptide
  MOD_RES (2), (2): Xaa is C or S
KXSKVIMEYQKYIKPTKGIIYLISIPSLDQS

SEQ ID NO: 59129 - protein, 32 aa, Artificial Sequence
  Cyclic GFR-binding peptide
  MOD_RES (2), (4): Xaa is C or S
HXGXSRVVMNEYQKYIVNSSDDIYLVSIPSLK

SEQ ID NO: 59130 - protein, 21 aa, Artificial Sequence
  Cyclic GFR-binding peptide
EYKFKVKPTRGVLYLISIPEL

SEQ ID NO: 59131 - protein, 30 aa, Artificial Sequence
  Cyclic GFR-binding peptide
  MOD_RES (2), (4): Xaa is C or S
HXGXSRVVMNEYQKYIVNSSDDIYLVSIPS

SEQ ID NO: 59132 - protein, 28 aa, Artificial Sequence
  Cyclic GFR-binding peptide
  MOD_RES (26), (27): Xaa is C or S
EYQKYIVNSSDDIYLVSIPSLQTPAXXP

SEQ ID NO: 59133 - protein, 39 aa, Artificial Sequence; identical to SEQ ID NO: 16017
  Cyclic GFR-binding peptide
  MOD_RES (2), (34), (35): Xaa is C or S

SEQ ID NO: 59134 - protein, 36 aa, Artificial Sequence; identical to SEQ ID NO: 16019
  Cyclic GFR-binding peptide
  MOD_RES (2), (34), (35): Xaa is C or S

SEQ ID NO: 59135 - protein, 37 aa, Artificial Sequence; identical to SEQ ID NO: 16020
  Cyclic GFR-binding peptide
  MOD_RES (2), (4), (35), (36): Xaa is C or S

SEQ ID NO: 59136 - protein, 29 aa, Artificial Sequence
  Cyclic GFR-binding peptide
KVVMEYKFKVKPTRGVLYLISIPELDQPV

SEQ ID NO: 59137 - protein, 36 aa, Artificial Sequence
  Cyclic GFR-binding peptide
  MOD_RES (32), (33): Xaa is C or S
AVSMGEEYQKYTPVGMDDIYLVSIPSLKTPVXXAKG

SEQ ID NO: 59138 - protein, 31 aa, Artificial Sequence
  Cyclic GFR-binding peptide
  MOD_RES (27), (28): Xaa is C or S
NEYQKYIVNNSSDIYLVSIPSLKTPAXXAKP

SEQ ID NO: 59139 - protein, 27 aa, Artificial Sequence
  Cyclic GFR-binding peptide
IMEYKFKVKPKRGVLYLISIPELAQPV

SEQ ID NO: 59140 - protein, 32 aa, Artificial Sequence
  Cyclic GFR-binding peptide
  MOD_RES (30), (31): Xaa is C or S
VVMNEYQKYIVNSSDDIYLVSIPSLQTPAXXP

SEQ ID NO: 59141 - protein, 30 aa, Artificial Sequence
  Cyclic GFR-binding peptide
  MOD_RES (26), (27): Xaa is C or S
EYKFKIVNNSSDLYLVSIPELKTPAXXAKP

SEQ ID NO: 59142 - protein, 25 aa, Artificial Sequence
  Cyclic GFR-binding peptide
SKVVMEYQKYVKPTRGVIYLISIPS

SEQ ID NO: 59143 - protein, 30 aa, Artificial Sequence
  Cyclic GFR-binding peptide
  MOD_RES (28), (29): Xaa is C or S
MNEYKFKIVNSSDDLYLVSIPELKTPAXXP

SEQ ID NO: 59144 - protein, 25 aa, Artificial Sequence
  Cyclic GFR-binding peptide
VMNEYKFKIVNSSDDLYLVSIPELK

SEQ ID NO: 59145 - protein, 31 aa, Artificial Sequence
  Cyclic GFR-binding peptide
  MOD_RES (29), (30): Xaa is C or S
VVMEYQKYVKPTRGVIYLISIPSLDQPVXXP

SEQ ID NO: 59146 - protein, 28 aa, Artificial Sequence
  Cyclic GFR-binding peptide
SRVVMNEYQKYIVNSSDDIYLVSIPSLK

SEQ ID NO: 59147 - protein, 40 aa, Artificial Sequence; identical to SEQ ID NO: 16037
  Cyclic GFR-binding peptide
  MOD_RES (1), (3), (35), (36): Xaa is C or S

SEQ ID NO: 59148 - protein, 29 aa, Artificial Sequence
  Cyclic GFR-binding peptide
  MOD_RES (27), (28): Xaa is C or S
MEYQKYVKPKRGVIYLISIPSLAQPVXXP

SEQ ID NO: 59149 - protein, 31 aa, Artificial Sequence; identical to SEQ ID NO: 16038
  Cyclic GFR-binding peptide

SEQ ID NO: 59150 - protein, 31 aa, Artificial Sequence; identical to SEQ ID NO: 16045
  Cyclic GFR-binding peptide

SEQ ID NO: 59151 - protein, 33 aa, Artificial Sequence; identical to SEQ ID NO: 16044
  Cyclic GFR-binding peptide
  MOD_RES (1), (33): Xaa is C or S

SEQ ID NO: 59152 - protein, 37 aa, Artificial Sequence; identical to SEQ ID NO: 16046
  Cyclic GFR-binding peptide
  MOD_RES (32), (33): Xaa is C or S

SEQ ID NO: 59153 - protein, 33 aa, Artificial Sequence
  Cyclic GFR-binding peptide
  MOD_RES (28), (29): Xaa is C or S
MNEYKFKIVNSSDDLYLVSIPELKTPAXXPKPV

SEQ ID NO: 59154 - protein, 26 aa, Artificial Sequence
  Cyclic GFR-binding peptide
EEYKFKTPVGMDDLYLVSIPELKTPV

SEQ ID NO: 59155 - protein, 28 aa, Artificial Sequence
  Cyclic GFR-binding peptide
  MOD_RES (1), (1): Xaa is C or S
XSRVVMNEYKFKIVNSSDDLYLVSIPEL

SEQ ID NO: 59156 - protein, 31 aa, Artificial Sequence
  Cyclic GFR-binding peptide
  MOD_RES (28), (29): Xaa is C or S
MNEYKFKIVNNSSDLYLVSIPELKTPAXXAK

SEQ ID NO: 59157 - protein, 33 aa, Artificial Sequence
  Cyclic GFR-binding peptide
  MOD_RES (27), (28): Xaa is C or S
MEYQKYVKPKRGVIYLISIPSLAQPVXXPAASA

SEQ ID NO: 59158 - protein, 32 aa, Artificial Sequence
  Cyclic GFR-binding peptide
  MOD_RES (30), (31): Xaa is C or S
VVMDYHYKLVVNNAADKYLISIPSLRAPVXXS

SEQ ID NO: 59159 - protein, 26 aa, Artificial Sequence
  Cyclic GFR-binding peptide
KVVMEYQKYVKPTRGVIYLISIPSLD

SEQ ID NO: 59160 - protein, 32 aa, Artificial Sequence
  Cyclic GFR-binding peptide
  MOD_RES (2), (2): Xaa is C or S
GXEAVSMGEEYKFKTPVGMDDLYLVSIPELKT

SEQ ID NO: 59161 - protein, 23 aa, Artificial Sequence
  Cyclic GFR-binding peptide
EYKFKIVNSSDDLYLVSIPELQT

SEQ ID NO: 59162 - protein, 38 aa, Artificial Sequence; identical to SEQ ID NO: 16067
  Cyclic GFR-binding peptide
  MOD_RES (2), (34), (35): Xaa is C or S

SEQ ID NO: 59163 - protein, 32 aa, Artificial Sequence; identical to SEQ ID NO: 16068
  Cyclic GFR-binding peptide
  MOD_RES (31), (32): Xaa is C or S

SEQ ID NO: 59164 - protein, 31 aa, Artificial Sequence
  Cyclic GFR-binding peptide
  MOD_RES (26), (27): Xaa is C or S
EYQKYVKPTRGVIYLISIPSLDQPVXXPSAS

SEQ ID NO: 59165 - protein, 22 aa, Artificial Sequence
  Cyclic GFR-binding peptide
EYQKYVKPTRGVIYLISIPSLD

SEQ ID NO: 59166 - protein, 34 aa, Artificial Sequence
  Cyclic GFR-binding peptide
  MOD_RES (30), (31): Xaa is C or S
VVMDEYQKYVVKENEDIYLMSIPSLETPVXXAKP

SEQ ID NO: 59167 - protein, 34 aa, Artificial Sequence
  Cyclic GFR-binding peptide
  MOD_RES (30), (31): Xaa is C or S
VAMGYHYKLYTVVGKDKYLISIPSLKTPVXXAKS

SEQ ID NO: 59168 - protein, 20 aa, Artificial Sequence
  Cyclic GFR-binding peptide
EYKFKTPVGMDDLYLVSIPE

SEQ ID NO: 59169 - protein, 27 aa, Artificial Sequence
  Cyclic GFR-binding peptide
VMNEYQKYIVNSSDDIYLVSIPSLQTP

SEQ ID NO: 59170 - protein, 32 aa, Artificial Sequence
  Cyclic GFR-binding peptide
  MOD_RES (26), (27): Xaa is C or S
EYKFKVVKENEDLYLMSIPELETPVXXAKPIK

SEQ ID NO: 59171 - protein, 35 aa, Artificial Sequence; identical to SEQ ID NO: 16078
  Cyclic GFR-binding peptide
  MOD_RES (1), (32), (33): Xaa is C or S

SEQ ID NO: 59172 - protein, 21 aa, Artificial Sequence
  Cyclic GFR-binding peptide
DRYKKLVVNNAADFYLISIAN

SEQ ID NO: 59173 - protein, 26 aa, Artificial Sequence
  Cyclic GFR-binding peptide
  MOD_RES (26), (26): Xaa is C or S
EYKFKIVNNSSDLYLVSIPELKTPAX

SEQ ID NO: 59174 - protein, 27 aa, Artificial Sequence
  Cyclic GFR-binding peptide
  MOD_RES (1), (1): Xaa is C or S
XESVAMGRYKKLYTVVGKDFYLISIAN

SEQ ID NO: 59175 - protein, 33 aa, Artificial Sequence; identical to SEQ ID NO: 16082
  Cyclic GFR-binding peptide
  MOD_RES (2), (33): Xaa is C or S

SEQ ID NO: 59176 - protein, 24 aa, Artificial Sequence
  Cyclic GFR-binding peptide
VVMNEYKFKIVNSSDDLYLVSIPE

SEQ ID NO: 59177 - protein, 33 aa, Artificial Sequence
  Cyclic GFR-binding peptide
  MOD_RES (30), (31): Xaa is C or S
KVVMEYQKYVKPTRGVIYLISIPSLDQPVXXPS

SEQ ID NO: 59178 - protein, 37 aa, Artificial Sequence; identical to SEQ ID NO: 16083
  Cyclic GFR-binding peptide
  MOD_RES (1), (32), (33): Xaa is C or S

SEQ ID NO: 59179 - protein, 32 aa, Artificial Sequence
  Cyclic GFR-binding peptide
  MOD_RES (29), (30): Xaa is C or S
VMDYHYKLVVNNAADKYLISIPSLRAPVXXSA

SEQ ID NO: 59180 - protein, 34 aa, Artificial Sequence; identical to SEQ ID NO: 16084
  Cyclic GFR-binding peptide
  MOD_RES (1), (3): Xaa is C or S

SEQ ID NO: 59181 - protein, 29 aa, Artificial Sequence
  Cyclic GFR-binding peptide
VVMDEYQKYVVKENEDIYLMSIPSLETPV

SEQ ID NO: 59182 - protein, 28 aa, Artificial Sequence
  Cyclic GFR-binding peptide
  MOD_RES (28), (28): Xaa is C or S
MDRYKKLVVNNAADFYLISIANLRAPVX

SEQ ID NO: 59183 - protein, 32 aa, Artificial Sequence
  Cyclic GFR-binding peptide
  MOD_RES (30), (30): Xaa is C or S
VVMNEYKFKIVNSSDDLYLVSIPELKTPAXTP

SEQ ID NO: 59184 - protein, 31 aa, Artificial Sequence
  Cyclic GFR-binding peptide
  MOD_RES (30), (31): Xaa is C or S
KVVMEYQKYVKPTRGVIYLISIPSLDQPVXX

SEQ ID NO: 59185 - protein, 30 aa, Artificial Sequence; identical to SEQ ID NO: 16090
  Cyclic GFR-binding peptide

SEQ ID NO: 59186 - protein, 35 aa, Artificial Sequence; identical to SEQ ID NO: 16091
  Cyclic GFR-binding peptide
  MOD_RES (33), (34): Xaa is C or S

SEQ ID NO: 59187 - protein, 29 aa, Artificial Sequence
  Cyclic GFR-binding peptide
SKVVMEYQKYVKPTRGVIYLISIPSLDQP

SEQ ID NO: 59188 - protein, 32 aa, Artificial Sequence
  Cyclic GFR-binding peptide
  MOD_RES (28), (29): Xaa is C or S
MDEYQKYVVKENEDIYLMSIPSLETPVXXAKP

SEQ ID NO: 59189 - protein, 36 aa, Artificial Sequence; identical to SEQ ID NO: 16095
  Cyclic GFR-binding peptide
  MOD_RES (1), (3), (35), (36): Xaa is C or S

SEQ ID NO: 59190 - protein, 34 aa, Artificial Sequence; identical to SEQ ID NO: 16097
  Cyclic GFR-binding peptide
  MOD_RES (31), (32): Xaa is C or S

SEQ ID NO: 59191 - protein, 27 aa, Artificial Sequence
  Cyclic GFR-binding peptide
  MOD_RES (2), (2): Xaa is C or S
KXSKVVMEYQKYVKPTRGVIYLISIPS

SEQ ID NO: 59192 - protein, 33 aa, Artificial Sequence; identical to SEQ ID NO: 16098
  Cyclic GFR-binding peptide
  MOD_RES (1), (3): Xaa is C or S

SEQ ID NO: 59193 - protein, 33 aa, Artificial Sequence; identical to SEQ ID NO: 16100
  Cyclic GFR-binding peptide
  MOD_RES (1), (33): Xaa is C or S

SEQ ID NO: 59194 - protein, 28 aa, Artificial Sequence
  Cyclic GFR-binding peptide
  MOD_RES (27), (28): Xaa is C or S
MEYQKYIKPTKGIIYLISIPSLDQSVXX

SEQ ID NO: 59195 - protein, 32 aa, Artificial Sequence
  Cyclic GFR-binding peptide
  MOD_RES (26), (27): Xaa is C or S
EYKFKIKPTKGILYLISIPELDQSVXXPSASA

SEQ ID NO: 59196 - protein, 30 aa, Artificial Sequence
  Cyclic GFR-binding peptide
  MOD_RES (29), (30): Xaa is C or S
VVMEYKFKVKPTRGVLYLISIPELDQPVXX

SEQ ID NO: 59197 - protein, 30 aa, Artificial Sequence
  Cyclic GFR-binding peptide
  MOD_RES (28), (29): Xaa is C or S
MNEYQKYIVNSSDDIYLVSIPSLKTPAXXP

SEQ ID NO: 59198 - protein, 27 aa, Artificial Sequence
  Cyclic GFR-binding peptide
  MOD_RES (1), (1): Xaa is C or S
XSRVVMNEYQKYIVNSSDDIYLVSIPS

SEQ ID NO: 59199 - protein, 34 aa, Artificial Sequence; identical to SEQ ID NO: 16110
  Cyclic GFR-binding peptide
  MOD_RES (2), (33), (34): Xaa is C or S

SEQ ID NO: 59200 - protein, 28 aa, Artificial Sequence
  Cyclic GFR-binding peptide
  MOD_RES (26), (27): Xaa is C or S
EYQKYIVNNSSDIYLVSIPSLKTPAXXA

SEQ ID NO: 59201 - protein, 35 aa, Artificial Sequence; identical to SEQ ID NO: 16116
  Cyclic GFR-binding peptide
  MOD_RES (2), (34), (35): Xaa is C or S

SEQ ID NO: 59202 - protein, 38 aa, Artificial Sequence; identical to SEQ ID NO: 16117
  Cyclic GFR-binding peptide
  MOD_RES (1), (3), (34), (35): Xaa is C or S

SEQ ID NO: 59203 - protein, 29 aa, Artificial Sequence
  Cyclic GFR-binding peptide
  MOD_RES (27), (28): Xaa is C or S
NEYKFKIVNSSDDLYLVSIPELKTPAXXP

SEQ ID NO: 59204 - protein, 31 aa, Artificial Sequence
  Cyclic GFR-binding peptide
  MOD_RES (31), (31): Xaa is C or S
VSMGEEYKFKTPVGMDDLYLVSIPELKTPVX

SEQ ID NO: 59205 - protein, 32 aa, Artificial Sequence
  Cyclic GFR-binding peptide
  MOD_RES (2), (4): Xaa is C or S
RXGXAEVVMDRYKKLVVNNAADFYLISIANLR

SEQ ID NO: 59206 - protein, 28 aa, Artificial Sequence
  Cyclic GFR-binding peptide
  MOD_RES (26), (27): Xaa is C or S
EYQKYVKPKRGVIYLISIPSLAQPVXXP

SEQ ID NO: 59207 - protein, 27 aa, Artificial Sequence
  Cyclic GFR-binding peptide
VMEYQKYVKPTRGVIYLISIPSLDQPV

SEQ ID NO: 59208 - protein, 32 aa, Artificial Sequence
  Cyclic GFR-binding peptide
  MOD_RES (29), (30): Xaa is C or S
VMDEYQKYVVKENEDIYLMSIPSLETPVXXAK

SEQ ID NO: 59209 - protein, 25 aa, Artificial Sequence
  Cyclic GFR-binding peptide
VIMEYQKYVKPKRGVIYLISIPSLA

SEQ ID NO: 59210 - protein, 29 aa, Artificial Sequence
  Cyclic GFR-binding peptide
  MOD_RES (2), (2): Xaa is C or S
KXSRVIMEYKFKVKPKRGVLYLISIPELA

SEQ ID NO: 59211 - protein, 31 aa, Artificial Sequence
  Cyclic GFR-binding peptide
  MOD_RES (2), (4): Xaa is C or S
SXKXSKVIMEYKFKIKPTKGILYLISIPELD

SEQ ID NO: 59212 - protein, 36 aa, Artificial Sequence; identical to SEQ ID NO: 16125
  Cyclic GFR-binding peptide
  MOD_RES (1), (3), (35), (36): Xaa is C or S

SEQ ID NO: 59213 - protein, 27 aa, Artificial Sequence
  Cyclic GFR-binding peptide
VVMDEYKFKVVKENEDLYLMSIPELET

SEQ ID NO: 59214 - protein, 40 aa, Artificial Sequence; identical to SEQ ID NO: 16126
  Cyclic GFR-binding peptide
  MOD_RES (1), (3), (34), (35): Xaa is C or S

SEQ ID NO: 59215 - protein, 40 aa, Artificial Sequence; identical to SEQ ID NO: 16127
  Cyclic GFR-binding peptide
  MOD_RES (2), (34), (35): Xaa is C or S

SEQ ID NO: 59216 - protein, 27 aa, Artificial Sequence
  Cyclic GFR-binding peptide
  MOD_RES (27), (27): Xaa is C or S
EEYKFKVVKDYEDLYLMSIPELETPVX

SEQ ID NO: 59217 - protein, 29 aa, Artificial Sequence
  Cyclic GFR-binding peptide
RVVMNEYKFKIVNSSDDLYLVSIPELQTP

SEQ ID NO: 59218 - protein, 27 aa, Artificial Sequence
  Cyclic GFR-binding peptide
VVMNEYKFKIVNSSDDLYLVSIPELQT

SEQ ID NO: 59219 - protein, 28 aa, Artificial Sequence
  Cyclic GFR-binding peptide
  MOD_RES (1), (1): Xaa is C or S
XSKVVMEYQKYVKPTRGVIYLISIPSLD

SEQ ID NO: 59220 - protein, 40 aa, Artificial Sequence; identical to SEQ ID NO: 16129
  Cyclic GFR-binding peptide
  MOD_RES (2), (4), (36), (37): Xaa is C or S

SEQ ID NO: 59221 - protein, 23 aa, Artificial Sequence
  Cyclic GFR-binding peptide
DYHYKLVVNNAADKYLISIPSLR

SEQ ID NO: 59222 - protein, 36 aa, Artificial Sequence; identical to SEQ ID NO: 16132
  Cyclic GFR-binding peptide
  MOD_RES (31), (32): Xaa is C or S

SEQ ID NO: 59223 - protein, 30 aa, Artificial Sequence
  Cyclic GFR-binding peptide
  MOD_RES (1), (3): Xaa is C or S
XGXGEVVMDEYKFKVVKENEDLYLMSIPEL

SEQ ID NO: 59224 - protein, 29 aa, Artificial Sequence
  Cyclic GFR-binding peptide
  MOD_RES (29), (29): Xaa is C or S
AMGYHYKLYTVVGKDKYLISIPSLKTPVX

SEQ ID NO: 59225 - protein, 32 aa, Artificial Sequence
  Cyclic GFR-binding peptide
  MOD_RES (2), (4): Xaa is C or S
SXKXSKVVMEYQKYVKPTRGVIYLISIPSLDQ

SEQ ID NO: 59226 - protein, 30 aa, Artificial Sequence
  Cyclic GFR-binding peptide
  MOD_RES (26), (27): Xaa is C or S
EYKFKVVKENEDLYLMSIPELETPVXXAKP

SEQ ID NO: 59227 - protein, 33 aa, Artificial Sequence
  Cyclic GFR-binding peptide
  MOD_RES (27), (28): Xaa is C or S
MEYQKYVKPTRGVIYLISIPSLDQPVXXPSASA

SEQ ID NO: 59228 - protein, 32 aa, Artificial Sequence
  Cyclic GFR-binding peptide
  MOD_RES (28), (29): Xaa is C or S
MDEYKFKVVKENEDLYLMSIPELETPVXXAKP

SEQ ID NO: 59229 - protein, 29 aa, Artificial Sequence
  Cyclic GFR-binding peptide
GEVVMDEYKFKVVKENEDLYLMSIPELET

SEQ ID NO: 59230 - protein, 34 aa, Artificial Sequence; identical to SEQ ID NO: 16139
  Cyclic GFR-binding peptide
  MOD_RES (1), (32), (33): Xaa is C or S

SEQ ID NO: 59231 - protein, 35 aa, Artificial Sequence; identical to SEQ ID NO: 16143
  Cyclic GFR-binding peptide
  MOD_RES (1), (33), (34): Xaa is C or S

SEQ ID NO: 59232 - protein, 29 aa, Artificial Sequence
  Cyclic GFR-binding peptide
  MOD_RES (27), (28): Xaa is C or S
NEYQKYIVNNSSDIYLVSIPSLKTPAXXA

SEQ ID NO: 59233 - protein, 29 aa, Artificial Sequence
  Cyclic GFR-binding peptide
ESVAMGEYQKYYTVVGKDIYLISIPSLKT

SEQ ID NO: 59234 - protein, 28 aa, Artificial Sequence
  Cyclic GFR-binding peptide
  MOD_RES (28), (28): Xaa is C or S
MEEYKFKVVKDYEDLYLMSIPELETPVX

SEQ ID NO: 59235 - protein, 36 aa, Artificial Sequence; identical to SEQ ID NO: 16154
  Cyclic GFR-binding peptide
  MOD_RES (1), (32), (33): Xaa is C or S

SEQ ID NO: 59236 - protein, 27 aa, Artificial Sequence
  Cyclic GFR-binding peptide
KVIMEYQKYIKPTKGIIYLISIPSLDQ

SEQ ID NO: 59237 - protein, 41 aa, Artificial Sequence; identical to SEQ ID NO: 16155
  Cyclic GFR-binding peptide
  MOD_RES (2), (4), (36), (37): Xaa is C or S

SEQ ID NO: 59238 - protein, 37 aa, Artificial Sequence; identical to SEQ ID NO: 16157
  Cyclic GFR-binding peptide
  MOD_RES (2), (35), (36): Xaa is C or S

SEQ ID NO: 59239 - protein, 35 aa, Artificial Sequence; identical to SEQ ID NO: 16159
  Cyclic GFR-binding peptide
  MOD_RES (1), (33), (34): Xaa is C or S

SEQ ID NO: 59240 - protein, 35 aa, Artificial Sequence
  Cyclic GFR-binding peptide
  MOD_RES (29), (30): Xaa is C or S
VIMEYQKYVKPKRGVIYLISIPSLAQPVXXPAASA

SEQ ID NO: 59241 - protein, 31 aa, Artificial Sequence
  Cyclic GFR-binding peptide
  MOD_RES (2), (4): Xaa is C or S
HXGXARVVMNEYQKYIVNSSDDIYLVSIPSL

SEQ ID NO: 59242 - protein, 22 aa, Artificial Sequence
  Cyclic GFR-binding peptide
MEYQKYVKPKRGVIYLISIPSL

SEQ ID NO: 59243 - protein, 30 aa, Artificial Sequence
  Cyclic GFR-binding peptide
  MOD_RES (28), (29): Xaa is C or S
MGEYQKYYTVVGKDIYLISIPSLKTPVXXA

SEQ ID NO: 59244 - protein, 37 aa, Artificial Sequence; identical to SEQ ID NO: 16165
  Cyclic GFR-binding peptide
  MOD_RES (31), (32): Xaa is C or S

SEQ ID NO: 59245 - protein, 39 aa, Artificial Sequence; identical to SEQ ID NO: 16166
  Cyclic GFR-binding peptide
  MOD_RES (1), (33), (34): Xaa is C or S

SEQ ID NO: 59246 - protein, 33 aa, Artificial Sequence
  Cyclic GFR-binding peptide
  MOD_RES (28), (29): Xaa is C or S
MDRYKKLVVNNAADFYLISIANLRAPVXXSAPA

SEQ ID NO: 59247 - protein, 30 aa, Artificial Sequence
  Cyclic GFR-binding peptide
  MOD_RES (1), (3): Xaa is C or S
XKXSRVIMEYKFKVKPKRGVLYLISIPELA

SEQ ID NO: 59248 - protein, 25 aa, Artificial Sequence
  Cyclic GFR-binding peptide
VAMGRYKKLYTVVGKDFYLISIANL

SEQ ID NO: 59249 - protein, 33 aa, Artificial Sequence; identical to SEQ ID NO: 16175
  Cyclic GFR-binding peptide
  MOD_RES (1), (33): Xaa is C or S

SEQ ID NO: 59250 - protein, 34 aa, Artificial Sequence
  Cyclic GFR-binding peptide
  MOD_RES (30), (31): Xaa is C or S
VVMNEYKFKIVNSSDDLYLVSIPELQTPAXXPKP

SEQ ID NO: 59251 - protein, 29 aa, Artificial Sequence
  Cyclic GFR-binding peptide
  MOD_RES (26), (27): Xaa is C or S
EYQKYVVKDYEDIYLMSIPSLETPVXXAK

SEQ ID NO: 59252 - protein, 36 aa, Artificial Sequence
  Cyclic GFR-binding peptide
  MOD_RES (30), (31): Xaa is C or S
VVMEEYQKYVVKDYEDIYLMSIPSLETPVXXAKPIS

SEQ ID NO: 59253 - protein, 20 aa, Artificial Sequence
  Cyclic GFR-binding peptide
EYKFKIKPTKGILYLISIPE

SEQ ID NO: 59254 - protein, 22 aa, Artificial Sequence
  Cyclic GFR-binding peptide
YHYKLVVNNAADKYLISIPSLR

SEQ ID NO: 59255 - protein, 37 aa, Artificial Sequence; identical to SEQ ID NO: 16182
  Cyclic GFR-binding peptide
  MOD_RES (1), (3), (34), (35): Xaa is C or S

SEQ ID NO: 59256 - protein, 30 aa, Artificial Sequence
  Cyclic GFR-binding peptide
  MOD_RES (26), (27): Xaa is C or S
EYQKYIKPTKGIIYLISIPSLDQSVXXPSA

SEQ ID NO: 59257 - protein, 30 aa, Artificial Sequence
  Cyclic GFR-binding peptide
  MOD_RES (26), (27): Xaa is C or S
EYKFKIVNSSDDLYLVSIPELQTPAXXPKP

SEQ ID NO: 59258 - protein, 35 aa, Artificial Sequence
  Cyclic GFR-binding peptide
  MOD_RES (30), (31): Xaa is C or S
VVMDEYKFKVVNNAADLYLISIPELRAPVXXSAPA

SEQ ID NO: 59259 - protein, 27 aa, Artificial Sequence
  Cyclic GFR-binding peptide
VMNEYKFKIVNNSSDLYLVSIPELKTP

SEQ ID NO: 59260 - protein, 29 aa, Artificial Sequence
  Cyclic GFR-binding peptide
SMGEEYQKYTPVGMDDIYLVSIPSLKTPV

SEQ ID NO: 59261 - protein, 23 aa, Artificial Sequence
  Cyclic GFR-binding peptide
EYQKYVKPTRGVIYLISIPSLDQ

SEQ ID NO: 59262 - protein, 41 aa, Artificial Sequence; identical to SEQ ID NO: 16191
  Cyclic GFR-binding peptide
  MOD_RES (1), (3), (35), (36): Xaa is C or S

SEQ ID NO: 59263 - protein, 39 aa, Artificial Sequence; identical to SEQ ID NO: 16192
  Cyclic GFR-binding peptide
  MOD_RES (2), (4), (35), (36): Xaa is C or S

SEQ ID NO: 59264 - protein, 26 aa, Artificial Sequence
  Cyclic GFR-binding peptide
AEVVMDEYKFKVVNNAADLYLISIPE

SEQ ID NO: 59265 - protein, 35 aa, Artificial Sequence; identical to SEQ ID NO: 16197
  Cyclic GFR-binding peptide
  MOD_RES (32), (33): Xaa is C or S

SEQ ID NO: 59266 - protein, 38 aa, Artificial Sequence; identical to SEQ ID NO: 16198
  Cyclic GFR-binding peptide
  MOD_RES (1), (33), (34): Xaa is C or S

SEQ ID NO: 59267 - protein, 39 aa, Artificial Sequence; identical to SEQ ID NO: 16199
  Cyclic GFR-binding peptide
  MOD_RES (2), (33), (34): Xaa is C or S

SEQ ID NO: 59268 - protein, 29 aa, Artificial Sequence
  Cyclic GFR-binding peptide
AAAAAAAAAEYQKYVVKDYEDIYLMSIPS

SEQ ID NO: 59269 - protein, 32 aa, Artificial Sequence
  Cyclic GFR-binding peptide
  MOD_RES (27), (28): Xaa is C or S
DEYQKYVVKENEDIYLMSIPSLETPVXXAKPI

SEQ ID NO: 59270 - protein, 35 aa, Artificial Sequence; identical to SEQ ID NO: 16200
  Cyclic GFR-binding peptide
  MOD_RES (32), (33): Xaa is C or S

SEQ ID NO: 59271 - protein, 26 aa, Artificial Sequence
  Cyclic GFR-binding peptide
  MOD_RES (26), (26): Xaa is C or S
EYKFKVKPKRGVLYLISIPELAQPVX

SEQ ID NO: 59272 - protein, 33 aa, Artificial Sequence
  Cyclic GFR-binding peptide
  MOD_RES (27), (28): Xaa is C or S
MEYKFKIKPTKGILYLISIPELDQSVXXPSASA

SEQ ID NO: 59273 - protein, 34 aa, Artificial Sequence
  Cyclic GFR-binding peptide
  MOD_RES (2), (4): Xaa is C or S
RXGXEAVSMGEEYQKYTPVGMDDIYLVSIPSLKT

SEQ ID NO: 59274 - protein, 29 aa, Artificial Sequence
  Cyclic GFR-binding peptide
VVMEEYKFKVVKDYEDLYLMSIPELETPV

SEQ ID NO: 59275 - protein, 37 aa, Artificial Sequence; identical to SEQ ID NO: 16206
  Cyclic GFR-binding peptide
  MOD_RES (2), (34), (35): Xaa is C or S

SEQ ID NO: 59276 - protein, 35 aa, Artificial Sequence; identical to SEQ ID NO: 16208
  Cyclic GFR-binding peptide
  MOD_RES (31), (32): Xaa is C or S

SEQ ID NO: 59277 - protein, 37 aa, Artificial Sequence; identical to SEQ ID NO: 16213
  Cyclic GFR-binding peptide
  MOD_RES (2), (4), (35), (36): Xaa is C or S

SEQ ID NO: 59278 - protein, 26 aa, Artificial Sequence
  Cyclic GFR-binding peptide
IMEYQKYIKPTKGIIYLISIPSLDQS

SEQ ID NO: 59279 - protein, 35 aa, Artificial Sequence
  Cyclic GFR-binding peptide
  MOD_RES (30), (31): Xaa is C or S
RVIMEYQKYVKPKRGVIYLISIPSLAQPVXXPAAS

SEQ ID NO: 59280 - protein, 32 aa, Artificial Sequence
  Cyclic GFR-binding peptide
  MOD_RES (2), (4): Xaa is C or S
SXKXSKVIMEYKFKIKPTKGILYLISIPELDQ

SEQ ID NO: 59281 - protein, 30 aa, Artificial Sequence
  Cyclic GFR-binding peptide
  MOD_RES (27), (27): Xaa is C or S
NEYKFKIVNSSDDLYLVSIPELKTPAXTPK

SEQ ID NO: 59282 - protein, 24 aa, Artificial Sequence
  Cyclic GFR-binding peptide
DEYKFKVVNNAADLYLISIPELRA

SEQ ID NO: 59283 - protein, 32 aa, Artificial Sequence
  Cyclic GFR-binding peptide
  MOD_RES (2), (2): Xaa is C or S
GXGEVVMDEYQKYVVKENEDIYLMSIPSLETP

SEQ ID NO: 59284 - protein, 34 aa, Artificial Sequence
  Cyclic GFR-binding peptide
  MOD_RES (2), (4): Xaa is C or S
HXGXAKVVMNEYKFKIVNNSSDLYLVSIPELKTP

SEQ ID NO: 59285 - protein, 23 aa, Artificial Sequence
  Cyclic GFR-binding peptide
EYKFKIKPTKGILYLISIPELDQ

SEQ ID NO: 59286 - protein, 37 aa, Artificial Sequence; identical to SEQ ID NO: 16223
  Cyclic GFR-binding peptide
  MOD_RES (1), (33), (34): Xaa is C or S

SEQ ID NO: 59287 - protein, 33 aa, Artificial Sequence; identical to SEQ ID NO: 16225
  Cyclic GFR-binding peptide
  MOD_RES (32), (33): Xaa is C or S

SEQ ID NO: 59288 - protein, 29 aa, Artificial Sequence
  Cyclic GFR-binding peptide
  MOD_RES (29), (29): Xaa is C or S
VIMEYQKYIKPTKGIIYLISIPSLDQSVX

SEQ ID NO: 59289 - protein, 30 aa, Artificial Sequence
  Cyclic GFR-binding peptide
  MOD_RES (29), (30): Xaa is C or S
AMGEYQKYYTVVGKDIYLISIPSLKTPVXX

SEQ ID NO: 59290 - protein, 33 aa, Artificial Sequence
  Cyclic GFR-binding peptide
  MOD_RES (29), (30): Xaa is C or S
VMEEYQKYVVKDYEDIYLMSIPSLETPVXXAKP

SEQ ID NO: 59291 - protein, 34 aa, Artificial Sequence; identical to SEQ ID NO: 16227
  Cyclic GFR-binding peptide
  MOD_RES (1), (32), (33): Xaa is C or S

SEQ ID NO: 59292 - protein, 20 aa, Artificial Sequence
  Cyclic GFR-binding peptide
EYQKYVKPTRGVIYLISIPS

SEQ ID NO: 59293 - protein, 26 aa, Artificial Sequence
  Cyclic GFR-binding peptide
GRYKKLYTVVGKDFYLISIANLKTPV

SEQ ID NO: 59294 - protein, 26 aa, Artificial Sequence
  Cyclic GFR-binding peptide
SRVIMEYKFKVKPKRGVLYLISIPEL

SEQ ID NO: 59295 - protein, 33 aa, Artificial Sequence; identical to SEQ ID NO: 16228
  Cyclic GFR-binding peptide
  MOD_RES (2), (2): Xaa is C or S

SEQ ID NO: 59296 - protein, 23 aa, Artificial Sequence
  Cyclic GFR-binding peptide
EYKFKVVKDYEDLYLMSIPELET

SEQ ID NO: 59297 - protein, 32 aa, Artificial Sequence
  Cyclic GFR-binding peptide
  MOD_RES (30), (31): Xaa is C or S
VVMDRYKKLVVNNAADFYLISIANLRAPVXXS

SEQ ID NO: 59298 - protein, 21 aa, Artificial Sequence
  Cyclic GFR-binding peptide
EYKFKVVNNAADLYLISIPEL

SEQ ID NO: 59299 - protein, 28 aa, Artificial Sequence
  Cyclic GFR-binding peptide
RVVMNEYKFKIVNSSDDLYLVSIPELQT

SEQ ID NO: 59300 - protein, 37 aa, Artificial Sequence; identical to SEQ ID NO: 16236
  Cyclic GFR-binding peptide
  MOD_RES (32), (33): Xaa is C or S

SEQ ID NO: 59301 - protein, 32 aa, Artificial Sequence
  Cyclic GFR-binding peptide
  MOD_RES (29), (29): Xaa is C or S
VMNEYKFKIVNSSDDLYLVSIPELKTPAXTPK

SEQ ID NO: 59302 - protein, 24 aa, Artificial Sequence
  Cyclic GFR-binding peptide
VVMDEYKFKVVKENEDLYLMSIPE

SEQ ID NO: 59303 - protein, 24 aa, Artificial Sequence
  Cyclic GFR-binding peptide
EYKFKVKPTRGVLYLISIPELDQP

SEQ ID NO: 59304 - protein, 31 aa, Artificial Sequence; identical to SEQ ID NO: 16239
  Cyclic GFR-binding peptide
  MOD_RES (31), (31): Xaa is C or S

SEQ ID NO: 59305 - protein, 25 aa, Artificial Sequence
  Cyclic GFR-binding peptide
EVVMDYHYKLVVNNAADKYLISIPS

SEQ ID NO: 59306 - protein, 23 aa, Artificial Sequence
  Cyclic GFR-binding peptide
GRYKKLYTVVGKDFYLISIANLK

SEQ ID NO: 59307 - protein, 37 aa, Artificial Sequence; identical to SEQ ID NO: 16243
  Cyclic GFR-binding peptide
  MOD_RES (2), (34), (35): Xaa is C or S

SEQ ID NO: 59308 - protein, 26 aa, Artificial Sequence
  Cyclic GFR-binding peptide
  MOD_RES (26), (26): Xaa is C or S
EYKFKIVNSSDDLYLVSIPELKTPAX

SEQ ID NO: 59309 - protein, 41 aa, Artificial Sequence; identical to SEQ ID NO: 16244
  Cyclic GFR-binding peptide
  MOD_RES (2), (4), (36), (37): Xaa is C or S

SEQ ID NO: 59310 - protein, 31 aa, Artificial Sequence
  Cyclic GFR-binding peptide
  MOD_RES (29), (30): Xaa is C or S
MGEEYQKYTPVGMDDIYLVSIPSLKTPVXXA

SEQ ID NO: 59311 - protein, 32 aa, Artificial Sequence
  Cyclic GFR-binding peptide
  MOD_RES (2), (4): Xaa is C or S
HXGXAKVVMNEYQKYIVNNSSDIYLVSIPSLK

SEQ ID NO: 59312 - protein, 27 aa, Artificial Sequence
  Cyclic GFR-binding peptide
VMNEYKFKIVNSSDDLYLVSIPELKTP

SEQ ID NO: 59313 - protein, 30 aa, Artificial Sequence
  Cyclic GFR-binding peptide
  MOD_RES (29), (30): Xaa is C or S
MGEEYQKYTPVGMDDIYLVSIPSLKTPVXX

SEQ ID NO: 59314 - protein, 26 aa, Artificial Sequence
  Cyclic GFR-binding peptide
  MOD_RES (26), (26): Xaa is C or S
RYKKLYTVVGKDFYLISIANLKTPVX

SEQ ID NO: 59315 - protein, 31 aa, Artificial Sequence
  Cyclic GFR-binding peptide
  MOD_RES (29), (30): Xaa is C or S
AMGEYQKYYTVVGKDIYLISIPSLKTPVXXA

SEQ ID NO: 59316 - protein, 40 aa, Artificial Sequence; identical to SEQ ID NO: 16251
  Cyclic GFR-binding peptide
  MOD_RES (1), (3), (35), (36): Xaa is C or S

SEQ ID NO: 59317 - protein, 31 aa, Artificial Sequence
  Cyclic GFR-binding peptide
  MOD_RES (1), (3): Xaa is C or S
XGXARVVMNEYQKYIVNSSDDIYLVSIPSLQ

SEQ ID NO: 59318 - protein, 23 aa, Artificial Sequence
  Cyclic GFR-binding peptide
MGYHYKLYTVVGKDKYLISIPSL

SEQ ID NO: 59319 - protein, 37 aa, Artificial Sequence; identical to SEQ ID NO: 16252
  Cyclic GFR-binding peptide
  MOD_RES (1), (3), (35), (36): Xaa is C or S

SEQ ID NO: 59320 - protein, 27 aa, Artificial Sequence
  Cyclic GFR-binding peptide
SKVVMEYKFKVKPTRGVLYLISIPELD

SEQ ID NO: 59321 - protein, 31 aa, Artificial Sequence
  Cyclic GFR-binding peptide
  MOD_RES (2), (4): Xaa is C or S
RXGXESVAMGRYKKLYTVVGKDFYLISIANL

SEQ ID NO: 59322 - protein, 31 aa, Artificial Sequence
  Cyclic GFR-binding peptide
  MOD_RES (26), (27): Xaa is C or S
EYKFKTPVGMDDLYLVSIPELKTPVXXAKGV

SEQ ID NO: 59323 - protein, 26 aa, Artificial Sequence
  Cyclic GFR-binding peptide
MDRYKKLVVNNAADFYLISIANLRAP

SEQ ID NO: 59324 - protein, 35 aa, Artificial Sequence; identical to SEQ ID NO: 16260
  Cyclic GFR-binding peptide
  MOD_RES (1), (3), (34), (35): Xaa is C or S

SEQ ID NO: 59325 - protein, 37 aa, Artificial Sequence; identical to SEQ ID NO: 16263
  Cyclic GFR-binding peptide
  MOD_RES (31), (32): Xaa is C or S

SEQ ID NO: 59326 - protein, 27 aa, Artificial Sequence
  Cyclic GFR-binding peptide
EVVMDEYQKYVVKENEDIYLMSIPSLE

SEQ ID NO: 59327 - protein, 31 aa, Artificial Sequence
  Cyclic GFR-binding peptide
  MOD_RES (27), (28): Xaa is C or S
GEYQKYYTVVGKDIYLISIPSLKTPVXXAKS

SEQ ID NO: 59328 - protein, 24 aa, Artificial Sequence
  Cyclic GFR-binding peptide
AMGYHYKLYTVVGKDKYLISIPSL

SEQ ID NO: 59329 - protein, 39 aa, Artificial Sequence; identical to SEQ ID NO: 16265
  Cyclic GFR-binding peptide
  MOD_RES (2), (34): Xaa is C or S

SEQ ID NO: 59330 - protein, 34 aa, Artificial Sequence
  Cyclic GFR-binding peptide
  MOD_RES (29), (30): Xaa is C or S
AMGRYKKLYTVVGKDFYLISIANLKTPVXXAKSA

SEQ ID NO: 59331 - protein, 37 aa, Artificial Sequence; identical to SEQ ID NO: 16270
  Cyclic GFR-binding peptide
  MOD_RES (1), (3), (35), (36): Xaa is C or S

SEQ ID NO: 59332 - protein, 38 aa, Artificial Sequence; identical to SEQ ID NO: 16274
  Cyclic GFR-binding peptide
  MOD_RES (2), (4), (36), (37): Xaa is C or S

SEQ ID NO: 59333 - protein, 35 aa, Artificial Sequence; identical to SEQ ID NO: 16275
  Cyclic GFR-binding peptide
  MOD_RES (2), (4): Xaa is C or S

SEQ ID NO: 59334 - protein, 38 aa, Artificial Sequence; identical to SEQ ID NO: 16277
  Cyclic GFR-binding peptide
  MOD_RES (2), (4), (35), (36): Xaa is C or S

SEQ ID NO: 59335 - protein, 39 aa, Artificial Sequence; identical to SEQ ID NO: 16280
  Cyclic GFR-binding peptide
  MOD_RES (33), (34): Xaa is C or S

SEQ ID NO: 59336 - protein, 26 aa, Artificial Sequence
  Cyclic GFR-binding peptide
SVAMGEYQKYYTVVGKDIYLISIPSL

SEQ ID NO: 59337 - protein, 32 aa, Artificial Sequence
  Cyclic GFR-binding peptide
  MOD_RES (2), (4): Xaa is C or S
HXGXARVVMNEYQKYIVNSSDDIYLVSIPSLQ

SEQ ID NO: 59338 - protein, 37 aa, Artificial Sequence; identical to SEQ ID NO: 16285
  Cyclic GFR-binding peptide
  MOD_RES (1), (33), (34): Xaa is C or S

SEQ ID NO: 59339 - protein, 32 aa, Artificial Sequence
  Cyclic GFR-binding peptide
  MOD_RES (30), (31): Xaa is C or S
VVMEEYQKYVVKDYEDIYLMSIPSLETPVXXA

SEQ ID NO: 59340 - protein, 33 aa, Artificial Sequence; identical to SEQ ID NO: 16290
  Cyclic GFR-binding peptide
  MOD_RES (32), (33): Xaa is C or S

SEQ ID NO: 59341 - protein, 24 aa, Artificial Sequence
  Cyclic GFR-binding peptide
MNEYKFKIVNSSDDLYLVSIPELQ

SEQ ID NO: 59342 - protein, 33 aa, Artificial Sequence
  Cyclic GFR-binding peptide
  MOD_RES (2), (4): Xaa is C or S
RXGXESVAMGEYQKYYTVVGKDIYLISIPSLKT

SEQ ID NO: 59343 - protein, 28 aa, Artificial Sequence
  Cyclic GFR-binding peptide
SVAMGEYQKYYTVVGKDIYLISIPSLKT

SEQ ID NO: 59344 - protein, 42 aa, Artificial Sequence; identical to SEQ ID NO: 16296
  Cyclic GFR-binding peptide
  MOD_RES (2), (4), (36), (37): Xaa is C or S

SEQ ID NO: 59345 - protein, 36 aa, Artificial Sequence
  Cyclic GFR-binding peptide
  MOD_RES (30), (31): Xaa is C or S
VVMDEYKFKVVKENEDLYLMSIPELETPVXXAKPIK

SEQ ID NO: 59346 - protein, 28 aa, Artificial Sequence
  Cyclic GFR-binding peptide
  MOD_RES (27), (28): Xaa is C or S
MEYQKYVKPTRGVIYLISIPSLDQPVXX

SEQ ID NO: 59347 - protein, 31 aa, Artificial Sequence
  Cyclic GFR-binding peptide
  MOD_RES (30), (31): Xaa is C or S
VVMNEYKFKIVNSSDDLYLVSIPELQTPAXX

SEQ ID NO: 59348 - protein, 34 aa, Artificial Sequence; identical to SEQ ID NO: 16302
  Cyclic GFR-binding peptide
  MOD_RES (1), (33), (34): Xaa is C or S

SEQ ID NO: 59349 - protein, 40 aa, Artificial Sequence; identical to SEQ ID NO: 16303
  Cyclic GFR-binding peptide
  MOD_RES (2), (4), (36), (37): Xaa is C or S

SEQ ID NO: 59350 - protein, 28 aa, Artificial Sequence
  Cyclic GFR-binding peptide
AMGRYKKLYTVVGKDFYLISIANLKTPV

SEQ ID NO: 59351 - protein, 32 aa, Artificial Sequence
  Cyclic GFR-binding peptide
  MOD_RES (2), (4): Xaa is C or S
HXGXARVVMNEYKFKIVNSSDDLYLVSIPELQ

SEQ ID NO: 59352 - protein, 32 aa, Artificial Sequence
  Cyclic GFR-binding peptide
  MOD_RES (29), (30): Xaa is C or S
VMNEYKFKIVNSSDDLYLVSIPELKTPAXXPK

SEQ ID NO: 59353 - protein, 31 aa, Artificial Sequence
  Cyclic GFR-binding peptide
  MOD_RES (1), (3): Xaa is C or S
XGXAEVVMDEYKFKVVNNAADLYLISIPELR

SEQ ID NO: 59354 - protein, 31 aa, Artificial Sequence
  Cyclic GFR-binding peptide
  MOD_RES (28), (29): Xaa is C or S
MGEYQKYYTVVGKDIYLISIPSLKTPVXXAK

SEQ ID NO: 59355 - protein, 27 aa, Artificial Sequence
  Cyclic GFR-binding peptide
  MOD_RES (1), (1): Xaa is C or S
XSKVIMEYQKYIKPTKGIIYLISIPSL

SEQ ID NO: 59356 - protein, 22 aa, Artificial Sequence
  Cyclic GFR-binding peptide
EYQKYIVNNSSDIYLVSIPSLK

SEQ ID NO: 59357 - protein, 33 aa, Artificial Sequence
  Cyclic GFR-binding peptide
  MOD_RES (27), (28): Xaa is C or S
EEYQKYTPVGMDDIYLVSIPSLKTPVXXAKGVK

SEQ ID NO: 59358 - protein, 26 aa, Artificial Sequence
  Cyclic GFR-binding peptide
GEEYKFKTPVGMDDLYLVSIPELKTP

SEQ ID NO: 59359 - protein, 38 aa, Artificial Sequence; identical to SEQ ID NO: 16306
  Cyclic GFR-binding peptide
  MOD_RES (2), (4), (36), (37): Xaa is C or S

SEQ ID NO: 59360 - protein, 32 aa, Artificial Sequence
  Cyclic GFR-binding peptide
  MOD_RES (28), (29): Xaa is C or S
IMEYQKYVKPKRGVIYLISIPSLAQPVXXPAA

SEQ ID NO: 59361 - protein, 32 aa, Artificial Sequence
  Cyclic GFR-binding peptide
  MOD_RES (26), (27): Xaa is C or S
EYKFKVVKDYEDLYLMSIPELETPVXXAKPIS

SEQ ID NO: 59362 - protein, 32 aa, Artificial Sequence; identical to SEQ ID NO: 16311
  Cyclic GFR-binding peptide
  MOD_RES (32), (32): Xaa is C or S

SEQ ID NO: 59363 - protein, 33 aa, Artificial Sequence
  Cyclic GFR-binding peptide
  MOD_RES (2), (4): Xaa is C or S
RXGXGEVVMDEYQKYVVKENEDIYLMSIPSLET

SEQ ID NO: 59364 - protein, 36 aa, Artificial Sequence; identical to SEQ ID NO: 16313
  Cyclic GFR-binding peptide
  MOD_RES (2), (34), (35): Xaa is C or S

SEQ ID NO: 59365 - protein, 40 aa, Artificial Sequence; identical to SEQ ID NO: 16318
  Cyclic GFR-binding peptide
  MOD_RES (1), (3), (34), (35): Xaa is C or S

SEQ ID NO: 59366 - protein, 29 aa, Artificial Sequence
  Cyclic GFR-binding peptide
  MOD_RES (27), (28): Xaa is C or S
GEYQKYYTVVGKDIYLISIPSLKTPVXXA

SEQ ID NO: 59367 - protein, 23 aa, Artificial Sequence
  Cyclic GFR-binding peptide
EYQKYTPVGMDDIYLVSIPSLKT

SEQ ID NO: 59368 - protein, 27 aa, Artificial Sequence
  Cyclic GFR-binding peptide
  MOD_RES (26), (27): Xaa is C or S
EYKFKVKPTRGVLYLISIPELDQPVXX

SEQ ID NO: 59369 - protein, 33 aa, Artificial Sequence
  Cyclic GFR-binding peptide
  MOD_RES (1), (3): Xaa is C or S
XGXAKVVMNEYKFKIVNNSSDLYLVSIPELKTP

SEQ ID NO: 59370 - protein, 36 aa, Artificial Sequence; identical to SEQ ID NO: 16321
  Cyclic GFR-binding peptide
  MOD_RES (31), (32): Xaa is C or S

SEQ ID NO: 59371 - protein, 26 aa, Artificial Sequence
  Cyclic GFR-binding peptide
AMGEYQKYYTVVGKDIYLISIPSLKT

SEQ ID NO: 59372 - protein, 27 aa, Artificial Sequence
  Cyclic GFR-binding peptide
VAMGEYQKYYTVVGKDIYLISIPSLKT

SEQ ID NO: 59373 - protein, 36 aa, Artificial Sequence; identical to SEQ ID NO: 16322
  Cyclic GFR-binding peptide
  MOD_RES (2), (4), (35), (36): Xaa is C or S

SEQ ID NO: 59374 - protein, 38 aa, Artificial Sequence; identical to SEQ ID NO: 16325
  Cyclic GFR-binding peptide
  MOD_RES (2), (4), (36), (37): Xaa is C or S

SEQ ID NO: 59375 - protein, 22 aa, Artificial Sequence
  Cyclic GFR-binding peptide
EYQKYYTVVGKDIYLISIPSLK

SEQ ID NO: 59376 - protein, 29 aa, Artificial Sequence
  Cyclic GFR-binding peptide
AEVVMDEYKFKVVNNAADLYLISIPELRA

SEQ ID NO: 59377 - protein, 31 aa, Artificial Sequence
  Cyclic GFR-binding peptide
  MOD_RES (2), (4): Xaa is C or S
HXGXSRVVMNEYKFKIVNSSDDLYLVSIPEL

SEQ ID NO: 59378 - protein, 25 aa, Artificial Sequence
  Cyclic GFR-binding peptide
KVIMEYQKYIKPTKGIIYLISIPSL

SEQ ID NO: 59379 - protein, 40 aa, Artificial Sequence; identical to SEQ ID NO: 16329
  Cyclic GFR-binding peptide
  MOD_RES (2), (35), (36): Xaa is C or S

SEQ ID NO: 59380 - protein, 31 aa, Artificial Sequence
  Cyclic GFR-binding peptide
  MOD_RES (2), (4): Xaa is C or S
RXGXGEVVMDEYKFKVVKENEDLYLMSIPEL

SEQ ID NO: 59381 - protein, 27 aa, Artificial Sequence
  Cyclic GFR-binding peptide
VAMGRYKKLYTVVGKDFYLISIANLKT

SEQ ID NO: 59382 - protein, 38 aa, Artificial Sequence; identical to SEQ ID NO: 16332
  Cyclic GFR-binding peptide
  MOD_RES (2), (34), (35): Xaa is C or S

SEQ ID NO: 59383 - protein, 32 aa, Artificial Sequence
  Cyclic GFR-binding peptide
  MOD_RES (30), (31): Xaa is C or S
KVIMEYQKYIKPTKGIIYLISIPSLDQSVXXP

SEQ ID NO: 59384 - protein, 32 aa, Artificial Sequence
  Cyclic GFR-binding peptide
  MOD_RES (26), (27): Xaa is C or S
YHYKLYTVVGKDKYLISIPSLKTPVXXAKSAK

SEQ ID NO: 59385 - protein, 21 aa, Artificial Sequence
  Cyclic GFR-binding peptide
NEYKFKIVNNSSDLYLVSIPE

SEQ ID NO: 59386 - protein, 33 aa, Artificial Sequence
  Cyclic GFR-binding peptide
  MOD_RES (29), (30): Xaa is C or S
VMNEYKFKIVNSSDDLYLVSIPELKTPAXXPKP

SEQ ID NO: 59387 - protein, 27 aa, Artificial Sequence
  Cyclic GFR-binding peptide
  MOD_RES (2), (2): Xaa is C or S
KXSKVIMEYQKYIKPTKGIIYLISIPS

SEQ ID NO: 59388 - protein, 38 aa, Artificial Sequence; identical to SEQ ID NO: 16334
  Cyclic GFR-binding peptide
  MOD_RES (1), (3), (34), (35): Xaa is C or S

SEQ ID NO: 59389 - protein, 30 aa, Artificial Sequence
  Cyclic GFR-binding peptide
  MOD_RES (2), (4): Xaa is C or S
SXKXSKVIMEYKFKIKPTKGILYLISIPEL

SEQ ID NO: 59390 - protein, 33 aa, Artificial Sequence
  Cyclic GFR-binding peptide
  MOD_RES (29), (30): Xaa is C or S
VIMEYQKYIKPTKGIIYLISIPSLDQSVXXPSA

SEQ ID NO: 59391 - protein, 37 aa, Artificial Sequence; identical to SEQ ID NO: 16338
  Cyclic GFR-binding peptide
  MOD_RES (1), (3), (36), (37): Xaa is C or S

SEQ ID NO: 59392 - protein, 31 aa, Artificial Sequence
  Cyclic GFR-binding peptide
  MOD_RES (2), (2): Xaa is C or S
GXAKVVMNEYQKYIVNNSSDIYLVSIPSLKT

SEQ ID NO: 59393 - protein, 37 aa, Artificial Sequence; identical to SEQ ID NO: 16339
  Cyclic GFR-binding peptide
  MOD_RES (1), (3), (36), (37): Xaa is C or S

SEQ ID NO: 59394 - protein, 28 aa, Artificial Sequence
  Cyclic GFR-binding peptide
  MOD_RES (2), (2): Xaa is C or S
GXGEVVMDEYKFKVVKENEDLYLMSIPE

SEQ ID NO: 59395 - protein, 22 aa, Artificial Sequence
  Cyclic GFR-binding peptide
EYKFKVKPKRGVLYLISIPELA

SEQ ID NO: 59396 - protein, 25 aa, Artificial Sequence
  Cyclic GFR-binding peptide
VMEYQKYVKPTRGVIYLISIPSLDQ

SEQ ID NO: 59397 - protein, 32 aa, Artificial Sequence; identical to SEQ ID NO: 16346
  Cyclic GFR-binding peptide
  MOD_RES (32), (32): Xaa is C or S

SEQ ID NO: 59398 - protein, 32 aa, Artificial Sequence
  Cyclic GFR-binding peptide
  MOD_RES (27), (28): Xaa is C or S
GEYQKYYTVVGKDIYLISIPSLKTPVXXAKSA

SEQ ID NO: 59399 - protein, 33 aa, Artificial Sequence
  Cyclic GFR-binding peptide
  MOD_RES (27), (28): Xaa is C or S
NEYQKYIVNSSDDIYLVSIPSLKTPAXXPKPVY

SEQ ID NO: 59400 - protein, 27 aa, Artificial Sequence
  Cyclic GFR-binding peptide
  MOD_RES (1), (1): Xaa is C or S
XARVVMNEYQKYIVNSSDDIYLVSIPS

SEQ ID NO: 59401 - protein, 39 aa, Artificial Sequence; identical to SEQ ID NO: 16350
  Cyclic GFR-binding peptide
  MOD_RES (1), (3), (34), (35): Xaa is C or S

SEQ ID NO: 59402 - protein, 31 aa, Artificial Sequence
  Cyclic GFR-binding peptide
  MOD_RES (26), (26): Xaa is C or S
EYQKYIVNSSDDIYLVSIPSLKTPAXTPKTV

SEQ ID NO: 59403 - protein, 24 aa, Artificial Sequence
  Cyclic GFR-binding peptide
MEYQKYIKPTKGIIYLISIPSLDQ

SEQ ID NO: 59404 - protein, 33 aa, Artificial Sequence
  Cyclic GFR-binding peptide
  MOD_RES (29), (30): Xaa is C or S
VMDEYKFKVVKENEDLYLMSIPELETPVXXAKP

SEQ ID NO: 59405 - protein, 23 aa, Artificial Sequence
  Cyclic GFR-binding peptide
DEYKFKVVNNAADLYLISIPELR

SEQ ID NO: 59406 - protein, 24 aa, Artificial Sequence
  Cyclic GFR-binding peptide
VMDRYKKLVVNNAADFYLISIANL

SEQ ID NO: 59407 - protein, 30 aa, Artificial Sequence
  Cyclic GFR-binding peptide
  MOD_RES (26), (27): Xaa is C or S
EYKFKVVNNAADLYLISIPELRAPVXXSAP

SEQ ID NO: 59408 - protein, 31 aa, Artificial Sequence
  Cyclic GFR-binding peptide
  MOD_RES (28), (29): Xaa is C or S
IMEYKFKIKPTKGILYLISIPELDQSVXXPS

SEQ ID NO: 59409 - protein, 35 aa, Artificial Sequence; identical to SEQ ID NO: 16356
  Cyclic GFR-binding peptide
  MOD_RES (2), (33), (34): Xaa is C or S

SEQ ID NO: 59410 - protein, 30 aa, Artificial Sequence
  Cyclic GFR-binding peptide
  MOD_RES (28), (29): Xaa is C or S
MEEYKFKVVKDYEDLYLMSIPELETPVXXA

SEQ ID NO: 59411 - protein, 30 aa, Artificial Sequence
  Cyclic GFR-binding peptide
  MOD_RES (29), (30): Xaa is C or S
VMNEYKFKIVNSSDDLYLVSIPELKTPAXX

SEQ ID NO: 59412 - protein, 39 aa, Artificial Sequence; identical to SEQ ID NO: 16357
  Cyclic GFR-binding peptide
  MOD_RES (1), (3), (35), (36): Xaa is C or S

SEQ ID NO: 59413 - protein, 26 aa, Artificial Sequence
  Cyclic GFR-binding peptide
KVIMEYKFKIKPTKGILYLISIPELD

SEQ ID NO: 59414 - protein, 26 aa, Artificial Sequence
  Cyclic GFR-binding peptide
MGEEYKFKTPVGMDDLYLVSIPELKT

SEQ ID NO: 59415 - protein, 28 aa, Artificial Sequence
  Cyclic GFR-binding peptide
  MOD_RES (27), (28): Xaa is C or S
DEYQKYVVKENEDIYLMSIPSLETPVXX

SEQ ID NO: 59416 - protein, 30 aa, Artificial Sequence
  Cyclic GFR-binding peptide
  MOD_RES (1), (1): Xaa is C or S
XARVVMNEYQKYIVNSSDDIYLVSIPSLQT

SEQ ID NO: 59417 - protein, 34 aa, Artificial Sequence; identical to SEQ ID NO: 16365
  Cyclic GFR-binding peptide
  MOD_RES (2), (4): Xaa is C or S

SEQ ID NO: 59418 - protein, 32 aa, Artificial Sequence; identical to SEQ ID NO: 16366
  Cyclic GFR-binding peptide
  MOD_RES (32), (32): Xaa is C or S

SEQ ID NO: 59419 - protein, 35 aa, Artificial Sequence; identical to SEQ ID NO: 16370
  Cyclic GFR-binding peptide
  MOD_RES (31), (32): Xaa is C or S

SEQ ID NO: 59420 - protein, 32 aa, Artificial Sequence; identical to SEQ ID NO: 16371
  Cyclic GFR-binding peptide
  MOD_RES (32), (32): Xaa is C or S

SEQ ID NO: 59421 - protein, 32 aa, Artificial Sequence
  Cyclic GFR-binding peptide
  MOD_RES (27), (28): Xaa is C or S
EEYQKYTPVGMDDIYLVSIPSLKTPVXXAKGV

SEQ ID NO: 59422 - protein, 29 aa, Artificial Sequence
  Cyclic GFR-binding peptide
AAAAAAAAAEYKFKIKPTKGILYLISIPE

SEQ ID NO: 59423 - protein, 36 aa, Artificial Sequence; identical to SEQ ID NO: 16377
  Cyclic GFR-binding peptide
  MOD_RES (2), (33), (34): Xaa is C or S

SEQ ID NO: 59424 - protein, 27 aa, Artificial Sequence
  Cyclic GFR-binding peptide
  MOD_RES (1), (1): Xaa is C or S
XAKVVMNEYQKYIVNNSSDIYLVSIPS

SEQ ID NO: 59425 - protein, 27 aa, Artificial Sequence
  Cyclic GFR-binding peptide
GEVVMDEYKFKVVKENEDLYLMSIPEL

SEQ ID NO: 59426 - protein, 32 aa, Artificial Sequence
  Cyclic GFR-binding peptide
  MOD_RES (1), (3): Xaa is C or S
XGXAEVVMDEYKFKVVNNAADLYLISIPELRA

SEQ ID NO: 59427 - protein, 33 aa, Artificial Sequence
  Cyclic GFR-binding peptide
  MOD_RES (31), (32): Xaa is C or S
VSMGEEYQKYTPVGMDDIYLVSIPSLKTPVXXA

SEQ ID NO: 59428 - protein, 26 aa, Artificial Sequence
  Cyclic GFR-binding peptide
  MOD_RES (26), (26): Xaa is C or S
EYKFKVVKENEDLYLMSIPELETPVX

SEQ ID NO: 59429 - protein, 27 aa, Artificial Sequence
  Cyclic GFR-binding peptide
MNEYKFKIVNSSDDLYLVSIPELQTPA

SEQ ID NO: 59430 - protein, 28 aa, Artificial Sequence
  Cyclic GFR-binding peptide
  MOD_RES (28), (28): Xaa is C or S
MGEYQKYYTVVGKDIYLISIPSLKTPVX

SEQ ID NO: 59431 - protein, 39 aa, Artificial Sequence; identical to SEQ ID NO: 16389
  Cyclic GFR-binding peptide
  MOD_RES (1), (3), (34), (35): Xaa is C or S

SEQ ID NO: 59432 - protein, 32 aa, Artificial Sequence; identical to SEQ ID NO: 16393
  Cyclic GFR-binding peptide
  MOD_RES (2), (2): Xaa is C or S

SEQ ID NO: 59433 - protein, 35 aa, Artificial Sequence; identical to SEQ ID NO: 16394
  Cyclic GFR-binding peptide
  MOD_RES (31), (32): Xaa is C or S

SEQ ID NO: 59434 - protein, 34 aa, Artificial Sequence
  Cyclic GFR-binding peptide
  MOD_RES (28), (29): Xaa is C or S
VMEYQKYVKPTRGVIYLISIPSLDQPVXXPSASA

SEQ ID NO: 59435 - protein, 42 aa, Artificial Sequence; identical to SEQ ID NO: 16397
  Cyclic GFR-binding peptide
  MOD_RES (2), (4), (36), (37): Xaa is C or S

SEQ ID NO: 59436 - protein, 36 aa, Artificial Sequence; identical to SEQ ID NO: 16399
  Cyclic GFR-binding peptide
  MOD_RES (2), (34), (35): Xaa is C or S

SEQ ID NO: 59437 - protein, 28 aa, Artificial Sequence
  Cyclic GFR-binding peptide
  MOD_RES (28), (28): Xaa is C or S
MGRYKKLYTVVGKDFYLISIANLKTPVX

SEQ ID NO: 59438 - protein, 34 aa, Artificial Sequence; identical to SEQ ID NO: 16403
  Cyclic GFR-binding peptide
  MOD_RES (1), (32), (33): Xaa is C or S

SEQ ID NO: 59439 - protein, 30 aa, Artificial Sequence
  Cyclic GFR-binding peptide
  MOD_RES (1), (3): Xaa is C or S
XGXARVVMNEYKFKIVNSSDDLYLVSIPEL

SEQ ID NO: 59440 - protein, 32 aa, Artificial Sequence
  Cyclic GFR-binding peptide
  MOD_RES (1), (3): Xaa is C or S
XKXSRVIMEYQKYVKPKRGVIYLISIPSLAQP

SEQ ID NO: 59441 - protein, 32 aa, Artificial Sequence
  Cyclic GFR-binding peptide
  MOD_RES (26), (27): Xaa is C or S
EYQKYIVNSSDDIYLVSIPSLKTPAXXPKPVY

SEQ ID NO: 59442 - protein, 34 aa, Artificial Sequence; identical to SEQ ID NO: 16410
  Cyclic GFR-binding peptide
  MOD_RES (1), (3): Xaa is C or S

SEQ ID NO: 59443 - protein, 30 aa, Artificial Sequence
  Cyclic GFR-binding peptide
  MOD_RES (1), (3): Xaa is C or S
XGXEAVSMGEEYKFKTPVGMDDLYLVSIPE

SEQ ID NO: 59444 - protein, 34 aa, Artificial Sequence; identical to SEQ ID NO: 16414
  Cyclic GFR-binding peptide
  MOD_RES (31), (31): Xaa is C or S

SEQ ID NO: 59445 - protein, 27 aa, Artificial Sequence
  Cyclic GFR-binding peptide
VMNEYQKYIVNNSSDIYLVSIPSLKTP

SEQ ID NO: 59446 - protein, 31 aa, Artificial Sequence
  Cyclic GFR-binding peptide
  MOD_RES (26), (27): Xaa is C or S
YHYKLYTVVGKDKYLISIPSLKTPVXXAKSA

SEQ ID NO: 59447 - protein, 30 aa, Artificial Sequence; identical to SEQ ID NO: 16421
  Cyclic GFR-binding peptide

SEQ ID NO: 59448 - protein, 33 aa, Artificial Sequence; identical to SEQ ID NO: 16422
  Cyclic GFR-binding peptide
  MOD_RES (1), (32), (33): Xaa is C or S

SEQ ID NO: 59449 - protein, 26 aa, Artificial Sequence
  Cyclic GFR-binding peptide
SKVVMEYKFKVKPTRGVLYLISIPEL

SEQ ID NO: 59450 - protein, 21 aa, Artificial Sequence
  Cyclic GFR-binding peptide
GEYQKYYTVVGKDIYLISIPS

SEQ ID NO: 59451 - protein, 39 aa, Artificial Sequence; identical to SEQ ID NO: 16423
  Cyclic GFR-binding peptide
  MOD_RES (1), (34), (35): Xaa is C or S

SEQ ID NO: 59452 - protein, 28 aa, Artificial Sequence
  Cyclic GFR-binding peptide
  MOD_RES (28), (28): Xaa is C or S
MNEYKFKIVNSSDDLYLVSIPELKTPAX

SEQ ID NO: 59453 - protein, 27 aa, Artificial Sequence
  Cyclic GFR-binding peptide
EVVMDRYKKLVVNNAADFYLISIANLR

SEQ ID NO: 59454 - protein, 21 aa, Artificial Sequence
  Cyclic GFR-binding peptide
EYQKYVKPKRGVIYLISIPSL

SEQ ID NO: 59455 - protein, 31 aa, Artificial Sequence
  Cyclic GFR-binding peptide
  MOD_RES (1), (3): Xaa is C or S
XGXAKVVMNEYQKYIVNNSSDIYLVSIPSLK

SEQ ID NO: 59456 - protein, 38 aa, Artificial Sequence; identical to SEQ ID NO: 16430
  Cyclic GFR-binding peptide
  MOD_RES (2), (33), (34): Xaa is C or S

SEQ ID NO: 59457 - protein, 27 aa, Artificial Sequence
  Cyclic GFR-binding peptide
AEVVMDEYKFKVVNNAADLYLISIPEL

SEQ ID NO: 59458 - protein, 28 aa, Artificial Sequence
  Cyclic GFR-binding peptide
  MOD_RES (28), (28): Xaa is C or S
GEEYQKYTPVGMDDIYLVSIPSLKTPVX

SEQ ID NO: 59459 - protein, 27 aa, Artificial Sequence
  Cyclic GFR-binding peptide
AEVVMDRYKKLVVNNAADFYLISIANL

SEQ ID NO: 59460 - protein, 35 aa, Artificial Sequence; identical to SEQ ID NO: 16432
  Cyclic GFR-binding peptide
  MOD_RES (1), (33), (34): Xaa is C or S

SEQ ID NO: 59461 - protein, 29 aa, Artificial Sequence
  Cyclic GFR-binding peptide
  MOD_RES (28), (29): Xaa is C or S
MNEYQKYIVNSSDDIYLVSIPSLQTPAXX

SEQ ID NO: 59462 - protein, 28 aa, Artificial Sequence
  Cyclic GFR-binding peptide
  MOD_RES (27), (28): Xaa is C or S
NEYKFKIVNSSDDLYLVSIPELKTPAXX

SEQ ID NO: 59463 - protein, 25 aa, Artificial Sequence
  Cyclic GFR-binding peptide
MNEYKFKIVNNSSDLYLVSIPELKT

SEQ ID NO: 59464 - protein, 37 aa, Artificial Sequence; identical to SEQ ID NO: 16433
  Cyclic GFR-binding peptide
  MOD_RES (2), (34), (35): Xaa is C or S

SEQ ID NO: 59465 - protein, 30 aa, Artificial Sequence
  Cyclic GFR-binding peptide
  MOD_RES (1), (3): Xaa is C or S
XGXSRVVMNEYQKYIVNSSDDIYLVSIPSL

SEQ ID NO: 59466 - protein, 35 aa, Artificial Sequence; identical to SEQ ID NO: 16437
  Cyclic GFR-binding peptide
  MOD_RES (31), (32): Xaa is C or S

SEQ ID NO: 59467 - protein, 33 aa, Artificial Sequence
  Cyclic GFR-binding peptide
  MOD_RES (2), (4): Xaa is C or S
RXGXGEVVMEEYQKYVVKDYEDIYLMSIPSLET

SEQ ID NO: 59468 - protein, 28 aa, Artificial Sequence
  Cyclic GFR-binding peptide
VVMDEYKFKVVKENEDLYLMSIPELETP

SEQ ID NO: 59469 - protein, 41 aa, Artificial Sequence; identical to SEQ ID NO: 16444
  Cyclic GFR-binding peptide
  MOD_RES (1), (3), (35), (36): Xaa is C or S

SEQ ID NO: 59470 - protein, 37 aa, Artificial Sequence; identical to SEQ ID NO: 16445
  Cyclic GFR-binding peptide
  MOD_RES (31), (32): Xaa is C or S

SEQ ID NO: 59471 - protein, 28 aa, Artificial Sequence
  Cyclic GFR-binding peptide
  MOD_RES (1), (1): Xaa is C or S
XSKVIMEYQKYIKPTKGIIYLISIPSLD

SEQ ID NO: 59472 - protein, 30 aa, Artificial Sequence
  Cyclic GFR-binding peptide
  MOD_RES (26), (27): Xaa is C or S
EYQKYTPVGMDDIYLVSIPSLKTPVXXAKG

SEQ ID NO: 59473 - protein, 22 aa, Artificial Sequence
  Cyclic GFR-binding peptide
EYQKYIVNSSDDIYLVSIPSLQ

SEQ ID NO: 59474 - protein, 37 aa, Artificial Sequence; identical to SEQ ID NO: 16447
  Cyclic GFR-binding peptide
  MOD_RES (31), (32): Xaa is C or S

SEQ ID NO: 59475 - protein, 27 aa, Artificial Sequence
  Cyclic GFR-binding peptide
VSMGEEYKFKTPVGMDDLYLVSIPELK

SEQ ID NO: 59476 - protein, 32 aa, Artificial Sequence; identical to SEQ ID NO: 16454
  Cyclic GFR-binding peptide
  MOD_RES (32), (32): Xaa is C or S

SEQ ID NO: 59477 - protein, 29 aa, Artificial Sequence
  Cyclic GFR-binding peptide
RVVMNEYKFKIVNSSDDLYLVSIPELKTP

SEQ ID NO: 59478 - protein, 37 aa, Artificial Sequence
  Cyclic GFR-binding peptide
  MOD_RES (32), (33): Xaa is C or S
AVSMGEEYQKYTPVGMDDIYLVSIPSLKTPVXXAKGV

SEQ ID NO: 59479 - protein, 27 aa, Artificial Sequence
  Cyclic GFR-binding peptide
  MOD_RES (26), (27): Xaa is C or S
EYQKYIKPTKGIIYLISIPSLDQSVXX

SEQ ID NO: 59480 - protein, 29 aa, Artificial Sequence
  Cyclic GFR-binding peptide
EVVMEEYQKYVVKDYEDIYLMSIPSLETP

SEQ ID NO: 59481 - protein, 32 aa, Artificial Sequence
  Cyclic GFR-binding peptide
  MOD_RES (27), (28): Xaa is C or S
DRYKKLVVNNAADFYLISIANLRAPVXXSAPA

SEQ ID NO: 59482 - protein, 36 aa, Artificial Sequence; identical to SEQ ID NO: 16464
  Cyclic GFR-binding peptide
  MOD_RES (2), (35), (36): Xaa is C or S

SEQ ID NO: 59483 - protein, 38 aa, Artificial Sequence; identical to SEQ ID NO: 16467
  Cyclic GFR-binding peptide
  MOD_RES (1), (3), (35), (36): Xaa is C or S

SEQ ID NO: 59484 - protein, 37 aa, Artificial Sequence; identical to SEQ ID NO: 16468
  Cyclic GFR-binding peptide
  MOD_RES (1), (33), (34): Xaa is C or S

SEQ ID NO: 59485 - protein, 21 aa, Artificial Sequence
  Cyclic GFR-binding peptide
EYQKYIVNNSSDIYLVSIPSL

SEQ ID NO: 59486 - protein, 24 aa, Artificial Sequence
  Cyclic GFR-binding peptide
MGYHYKLYTVVGKDKYLISIPSLK

SEQ ID NO: 59487 - protein, 31 aa, Artificial Sequence
  Cyclic GFR-binding peptide
  MOD_RES (29), (30): Xaa is C or S
VMDEYQKYVVKENEDIYLMSIPSLETPVXXA

SEQ ID NO: 59488 - protein, 37 aa, Artificial Sequence; identical to SEQ ID NO: 16470
  Cyclic GFR-binding peptide
  MOD_RES (2), (33), (34): Xaa is C or S

SEQ ID NO: 59489 - protein, 36 aa, Artificial Sequence
  Cyclic GFR-binding peptide
  MOD_RES (30), (31): Xaa is C or S
KVVMEYKFKVKPTRGVLYLISIPELDQPVXXPSASA

SEQ ID NO: 59490 - protein, 33 aa, Artificial Sequence; identical to SEQ ID NO: 16471
  Cyclic GFR-binding peptide
  MOD_RES (31), (32): Xaa is C or S

SEQ ID NO: 59491 - protein, 38 aa, Artificial Sequence; identical to SEQ ID NO: 16473
  Cyclic GFR-binding peptide
  MOD_RES (1), (33), (34): Xaa is C or S

SEQ ID NO: 59492 - protein, 29 aa, Artificial Sequence
  Cyclic GFR-binding peptide
KVVMNEYKFKIVNNSSDLYLVSIPELKTP

SEQ ID NO: 59493 - protein, 27 aa, Artificial Sequence
  Cyclic GFR-binding peptide
  MOD_RES (1), (1): Xaa is C or S
XAEVVMDEYKFKVVNNAADLYLISIPE

SEQ ID NO: 59494 - protein, 35 aa, Artificial Sequence; identical to SEQ ID NO: 16479
  Cyclic GFR-binding peptide
  MOD_RES (32), (32): Xaa is C or S

SEQ ID NO: 59495 - protein, 28 aa, Artificial Sequence
  Cyclic GFR-binding peptide
  MOD_RES (27), (28): Xaa is C or S
EEYQKYVVKDYEDIYLMSIPSLETPVXX

SEQ ID NO: 59496 - protein, 31 aa, Artificial Sequence
  Cyclic GFR-binding peptide
  MOD_RES (26), (27): Xaa is C or S
RYKKLYTVVGKDFYLISIANLKTPVXXAKSA

SEQ ID NO: 59497 - protein, 33 aa, Artificial Sequence
  Cyclic GFR-binding peptide
  MOD_RES (30), (31): Xaa is C or S
VVMNEYKFKIVNSSDDLYLVSIPELQTPAXXPK

SEQ ID NO: 59498 - protein, 35 aa, Artificial Sequence; identical to SEQ ID NO: 16486
  Cyclic GFR-binding peptide
  MOD_RES (2), (4): Xaa is C or S

SEQ ID NO: 59499 - protein, 30 aa, Artificial Sequence
  Cyclic GFR-binding peptide
  MOD_RES (30), (30): Xaa is C or S
VVMNEYKFKIVNSSDDLYLVSIPELQTPAX

SEQ ID NO: 59500 - protein, 28 aa, Artificial Sequence
  Cyclic GFR-binding peptide
EAVSMGEEYQKYTPVGMDDIYLVSIPSL

SEQ ID NO: 59501 - protein, 26 aa, Artificial Sequence
  Cyclic GFR-binding peptide
  MOD_RES (26), (26): Xaa is C or S
EYQKYTPVGMDDIYLVSIPSLKTPVX

SEQ ID NO: 59502 - protein, 40 aa, Artificial Sequence; identical to SEQ ID NO: 16493
  Cyclic GFR-binding peptide
  MOD_RES (1), (3), (35), (36): Xaa is C or S

SEQ ID NO: 59503 - protein, 27 aa, Artificial Sequence
  Cyclic GFR-binding peptide
  MOD_RES (1), (1): Xaa is C or S
XAEVVMDYHYKLVVNNAADKYLISIPS

SEQ ID NO: 59504 - protein, 40 aa, Artificial Sequence; identical to SEQ ID NO: 16496
  Cyclic GFR-binding peptide
  MOD_RES (1), (3), (35), (36): Xaa is C or S

SEQ ID NO: 59505 - protein, 28 aa, Artificial Sequence
  Cyclic GFR-binding peptide
  MOD_RES (28), (28): Xaa is C or S
MNEYQKYIVNSSDDIYLVSIPSLKTPAX

SEQ ID NO: 59506 - protein, 29 aa, Artificial Sequence
  Cyclic GFR-binding peptide
  MOD_RES (26), (27): Xaa is C or S
EYQKYYTVVGKDIYLISIPSLKTPVXXAK

SEQ ID NO: 59507 - protein, 35 aa, Artificial Sequence
  Cyclic GFR-binding peptide
  MOD_RES (30), (31): Xaa is C or S
VVMNEYQKYIVNNSSDIYLVSIPSLKTPAXXAKPV

SEQ ID NO: 59508 - protein, 35 aa, Artificial Sequence
  Cyclic GFR-binding peptide
  MOD_RES (29), (30): Xaa is C or S
VMDYHYKLVVNNAADKYLISIPSLRAPVXXSAPAA

SEQ ID NO: 59509 - protein, 32 aa, Artificial Sequence; identical to SEQ ID NO: 16500
  Cyclic GFR-binding peptide
  MOD_RES (1), (1): Xaa is C or S

SEQ ID NO: 59510 - protein, 35 aa, Artificial Sequence
  Cyclic GFR-binding peptide
  MOD_RES (29), (30): Xaa is C or S
VMNEYQKYIVNNSSDIYLVSIPSLKTPAXXAKPVA

SEQ ID NO: 59511 - protein, 36 aa, Artificial Sequence; identical to SEQ ID NO: 16503
  Cyclic GFR-binding peptide
  MOD_RES (2), (34), (35): Xaa is C or S

SEQ ID NO: 59512 - protein, 32 aa, Artificial Sequence
  Cyclic GFR-binding peptide
  MOD_RES (29), (30): Xaa is C or S
AMGYHYKLYTVVGKDKYLISIPSLKTPVXXAK

SEQ ID NO: 59513 - protein, 36 aa, Artificial Sequence; identical to SEQ ID NO: 16506
  Cyclic GFR-binding peptide
  MOD_RES (2), (34): Xaa is C or S

SEQ ID NO: 59514 - protein, 25 aa, Artificial Sequence
  Cyclic GFR-binding peptide
EYQKYVVKENEDIYLMSIPSLETPV

SEQ ID NO: 59515 - protein, 32 aa, Artificial Sequence; identical to SEQ ID NO: 16508
  Cyclic GFR-binding peptide
  MOD_RES (1), (1): Xaa is C or S

SEQ ID NO: 59516 - protein, 35 aa, Artificial Sequence
  Cyclic GFR-binding peptide
  MOD_RES (2), (4): Xaa is C or S
RXGXEAVSMGEEYQKYTPVGMDDIYLVSIPSLKTP

SEQ ID NO: 59517 - protein, 29 aa, Artificial Sequence
  Cyclic GFR-binding peptide
  MOD_RES (27), (27): Xaa is C or S
NEYKFKIVNSSDDLYLVSIPELKTPAXTP

SEQ ID NO: 59518 - protein, 34 aa, Artificial Sequence
  Cyclic GFR-binding peptide
  MOD_RES (29), (29): Xaa is C or S
VMNEYQKYIVNSSDDIYLVSIPSLKTPAXTPKTV

SEQ ID NO: 59519 - protein, 31 aa, Artificial Sequence; identical to SEQ ID NO: 16514
  Cyclic GFR-binding peptide
  MOD_RES (31), (31): Xaa is C or S

SEQ ID NO: 59520 - protein, 37 aa, Artificial Sequence; identical to SEQ ID NO: 16515
  Cyclic GFR-binding peptide
  MOD_RES (2), (33), (34): Xaa is C or S

SEQ ID NO: 59521 - protein, 33 aa, Artificial Sequence
  Cyclic GFR-binding peptide
  MOD_RES (30), (31): Xaa is C or S
VVMDEYQKYVVKENEDIYLMSIPSLETPVXXAK

SEQ ID NO: 59522 - protein, 34 aa, Artificial Sequence
  Cyclic GFR-binding peptide
  MOD_RES (2), (4): Xaa is C or S
HXGXAKVVMNEYQKYIVNNSSDIYLVSIPSLKTP

SEQ ID NO: 59523 - protein, 34 aa, Artificial Sequence; identical to SEQ ID NO: 16517
  Cyclic GFR-binding peptide
  MOD_RES (2), (33), (34): Xaa is C or S

SEQ ID NO: 59524 - protein, 34 aa, Artificial Sequence
  Cyclic GFR-binding peptide
  MOD_RES (29), (30): Xaa is C or S
VIMEYKFKVKPKRGVLYLISIPELAQPVXXPAAS

SEQ ID NO: 59525 - protein, 41 aa, Artificial Sequence; identical to SEQ ID NO: 16518
  Cyclic GFR-binding peptide
  MOD_RES (2), (4), (36), (37): Xaa is C or S

SEQ ID NO: 59526 - protein, 35 aa, Artificial Sequence; identical to SEQ ID NO: 16520
  Cyclic GFR-binding peptide
  MOD_RES (1), (33), (34): Xaa is C or S

SEQ ID NO: 59527 - protein, 25 aa, Artificial Sequence
  Cyclic GFR-binding peptide
DEYKFKVVNNAADLYLISIPELRAP

SEQ ID NO: 59528 - protein, 31 aa, Artificial Sequence
  Cyclic GFR-binding peptide
  MOD_RES (27), (28): Xaa is C or S
NEYQKYIVNSSDDIYLVSIPSLKTPAXXPKP

SEQ ID NO: 59529 - protein, 35 aa, Artificial Sequence; identical to SEQ ID NO: 16524
  Cyclic GFR-binding peptide
  MOD_RES (2), (4): Xaa is C or S

SEQ ID NO: 59530 - protein, 28 aa, Artificial Sequence
  Cyclic GFR-binding peptide
VSMGEEYQKYTPVGMDDIYLVSIPSLKT

SEQ ID NO: 59531 - protein, 40 aa, Artificial Sequence; identical to SEQ ID NO: 16525
  Cyclic GFR-binding peptide
  MOD_RES (2), (4), (36), (37): Xaa is C or S

SEQ ID NO: 59532 - protein, 28 aa, Artificial Sequence
  Cyclic GFR-binding peptide
  MOD_RES (1), (1): Xaa is C or S
XGEVVMEEYQKYVVKDYEDIYLMSIPSL

SEQ ID NO: 59533 - protein, 29 aa, Artificial Sequence
  Cyclic GFR-binding peptide
  MOD_RES (1), (3): Xaa is C or S
XKXSRVIMEYQKYVKPKRGVIYLISIPSL

SEQ ID NO: 59534 - protein, 25 aa, Artificial Sequence
  Cyclic GFR-binding peptide
IMEYQKYVKPKRGVIYLISIPSLAQ

SEQ ID NO: 59535 - protein, 34 aa, Artificial Sequence
  Cyclic GFR-binding peptide
  MOD_RES (28), (29): Xaa is C or S
MGEYQKYYTVVGKDIYLISIPSLKTPVXXAKSAK

SEQ ID NO: 59536 - protein, 30 aa, Artificial Sequence
  Cyclic GFR-binding peptide
  MOD_RES (26), (27): Xaa is C or S
EYQKYIVNSSDDIYLVSIPSLKTPAXXPKP

SEQ ID NO: 59537 - protein, 32 aa, Artificial Sequence
  Cyclic GFR-binding peptide
  MOD_RES (29), (30): Xaa is C or S
VMDEYKFKVVNNAADLYLISIPELRAPVXXSA

SEQ ID NO: 59538 - protein, 23 aa, Artificial Sequence
  Cyclic GFR-binding peptide
EYQKYVKPKRGVIYLISIPSLAQ

SEQ ID NO: 59539 - protein, 36 aa, Artificial Sequence; identical to SEQ ID NO: 16533
  Cyclic GFR-binding peptide
  MOD_RES (2), (34), (35): Xaa is C or S

SEQ ID NO: 59540 - protein, 38 aa, Artificial Sequence; identical to SEQ ID NO: 16534
  Cyclic GFR-binding peptide
  MOD_RES (2), (4), (36), (37): Xaa is C or S

SEQ ID NO: 59541 - protein, 35 aa, Artificial Sequence; identical to SEQ ID NO: 16537
  Cyclic GFR-binding peptide
  MOD_RES (1), (33), (34): Xaa is C or S

SEQ ID NO: 59542 - protein, 24 aa, Artificial Sequence
  Cyclic GFR-binding peptide
DYHYKLVVNNAADKYLISIPSLRA

SEQ ID NO: 59543 - protein, 35 aa, Artificial Sequence; identical to SEQ ID NO: 16538
  Cyclic GFR-binding peptide
  MOD_RES (32), (33): Xaa is C or S

SEQ ID NO: 59544 - protein, 31 aa, Artificial Sequence
  Cyclic GFR-binding peptide
  MOD_RES (30), (31): Xaa is C or S
VVMDYHYKLVVNNAADKYLISIPSLRAPVXX

SEQ ID NO: 59545 - protein, 26 aa, Artificial Sequence
  Cyclic GFR-binding peptide
AVSMGEEYQKYTPVGMDDIYLVSIPS

SEQ ID NO: 59546 - protein, 36 aa, Artificial Sequence; identical to SEQ ID NO: 16543
  Cyclic GFR-binding peptide
  MOD_RES (1), (3), (35), (36): Xaa is C or S

SEQ ID NO: 59547 - protein, 34 aa, Artificial Sequence; identical to SEQ ID NO: 16548
  Cyclic GFR-binding peptide
  MOD_RES (32), (33): Xaa is C or S

SEQ ID NO: 59548 - protein, 27 aa, Artificial Sequence
  Cyclic GFR-binding peptide
SVAMGYHYKLYTVVGKDKYLISIPSLK

SEQ ID NO: 59549 - protein, 35 aa, Artificial Sequence; identical to SEQ ID NO: 16552
  Cyclic GFR-binding peptide
  MOD_RES (1), (3), (35): Xaa is C or S

SEQ ID NO: 59550 - protein, 33 aa, Artificial Sequence; identical to SEQ ID NO: 16554
  Cyclic GFR-binding peptide
  MOD_RES (2), (2): Xaa is C or S

SEQ ID NO: 59551 - protein, 36 aa, Artificial Sequence; identical to SEQ ID NO: 16557
  Cyclic GFR-binding peptide
  MOD_RES (1), (3), (34), (35): Xaa is C or S

SEQ ID NO: 59552 - protein, 35 aa, Artificial Sequence; identical to SEQ ID NO: 16559
  Cyclic GFR-binding peptide
  MOD_RES (2), (4), (35): Xaa is C or S

SEQ ID NO: 59553 - protein, 29 aa, Artificial Sequence
  Cyclic GFR-binding peptide
  MOD_RES (1), (3): Xaa is C or S
XGXAEVVMDYHYKLVVNNAADKYLISIPS

SEQ ID NO: 59554 - protein, 22 aa, Artificial Sequence
  Cyclic GFR-binding peptide
DRYKKLVVNNAADFYLISIANL

SEQ ID NO: 59555 - protein, 34 aa, Artificial Sequence
  Cyclic GFR-binding peptide
  MOD_RES (29), (30): Xaa is C or S
VIMEYQKYVKPKRGVIYLISIPSLAQPVXXPAAS

SEQ ID NO: 59556 - protein, 22 aa, Artificial Sequence
  Cyclic GFR-binding peptide
GYHYKLYTVVGKDKYLISIPSL

SEQ ID NO: 59557 - protein, 35 aa, Artificial Sequence; identical to SEQ ID NO: 16569
  Cyclic GFR-binding peptide
  MOD_RES (1), (33), (34): Xaa is C or S

SEQ ID NO: 59558 - protein, 29 aa, Artificial Sequence
  Cyclic GFR-binding peptide
VVMNEYQKYIVNSSDDIYLVSIPSLKTPA

SEQ ID NO: 59559 - protein, 30 aa, Artificial Sequence
  Cyclic GFR-binding peptide
  MOD_RES (28), (29): Xaa is C or S
MGRYKKLYTVVGKDFYLISIANLKTPVXXA

SEQ ID NO: 59560 - protein, 39 aa, Artificial Sequence; identical to SEQ ID NO: 16578
  Cyclic GFR-binding peptide
  MOD_RES (2), (33), (34): Xaa is C or S

SEQ ID NO: 59561 - protein, 24 aa, Artificial Sequence
  Cyclic GFR-binding peptide
MGEEYKFKTPVGMDDLYLVSIPEL

SEQ ID NO: 59562 - protein, 34 aa, Artificial Sequence
  Cyclic GFR-binding peptide
  MOD_RES (29), (30): Xaa is C or S
VMDEYQKYVVKENEDIYLMSIPSLETPVXXAKPI

SEQ ID NO: 59563 - protein, 25 aa, Artificial Sequence
  Cyclic GFR-binding peptide
SMGEEYKFKTPVGMDDLYLVSIPEL

SEQ ID NO: 59564 - protein, 25 aa, Artificial Sequence
  Cyclic GFR-binding peptide
NEYQKYIVNSSDDIYLVSIPSLKTP

SEQ ID NO: 59565 - protein, 40 aa, Artificial Sequence; identical to SEQ ID NO: 16579
  Cyclic GFR-binding peptide
  MOD_RES (2), (34), (35): Xaa is C or S

SEQ ID NO: 59566 - protein, 36 aa, Artificial Sequence; identical to SEQ ID NO: 16588
  Cyclic GFR-binding peptide
  MOD_RES (33), (34): Xaa is C or S

SEQ ID NO: 59567 - protein, 30 aa, Artificial Sequence
  Cyclic GFR-binding peptide
AVSMGEEYKFKTPVGMDDLYLVSIPELKTP

SEQ ID NO: 59568 - protein, 24 aa, Artificial Sequence
  Cyclic GFR-binding peptide
NEYQKYIVNSSDDIYLVSIPSLKT

SEQ ID NO: 59569 - protein, 39 aa, Artificial Sequence; identical to SEQ ID NO: 16590
  Cyclic GFR-binding peptide
  MOD_RES (2), (4), (37), (38): Xaa is C or S

SEQ ID NO: 59570 - protein, 29 aa, Artificial Sequence
  Cyclic GFR-binding peptide
SVAMGEYQKYYTVVGKDIYLISIPSLKTP

SEQ ID NO: 59571 - protein, 40 aa, Artificial Sequence; identical to SEQ ID NO: 16596
  Cyclic GFR-binding peptide
  MOD_RES (1), (3), (35): Xaa is C or S

SEQ ID NO: 59572 - protein, 27 aa, Artificial Sequence
  Cyclic GFR-binding peptide
  MOD_RES (1), (1): Xaa is C or S
XAEVVMDRYKKLVVNNAADFYLISIAN

SEQ ID NO: 59573 - protein, 26 aa, Artificial Sequence
  Cyclic GFR-binding peptide
  MOD_RES (26), (26): Xaa is C or S
YHYKLYTVVGKDKYLISIPSLKTPVX

SEQ ID NO: 59574 - protein, 29 aa, Artificial Sequence
  Cyclic GFR-binding peptide
  MOD_RES (1), (3): Xaa is C or S
XGXAEVVMDEYKFKVVNNAADLYLISIPE

SEQ ID NO: 59575 - protein, 29 aa, Artificial Sequence
  Cyclic GFR-binding peptide
  MOD_RES (26), (27): Xaa is C or S
EYQKYIVNNSSDIYLVSIPSLKTPAXXAK

SEQ ID NO: 59576 - protein, 39 aa, Artificial Sequence; identical to SEQ ID NO: 16603
  Cyclic GFR-binding peptide
  MOD_RES (2), (4), (35), (36): Xaa is C or S

SEQ ID NO: 59577 - protein, 31 aa, Artificial Sequence
  Cyclic GFR-binding peptide
  MOD_RES (1), (3): Xaa is C or S
XKXSKVVMEYKFKVKPTRGVLYLISIPELDQ

SEQ ID NO: 59578 - protein, 31 aa, Artificial Sequence
  Cyclic GFR-binding peptide
  MOD_RES (29), (30): Xaa is C or S
VMDYHYKLVVNNAADKYLISIPSLRAPVXXS

SEQ ID NO: 59579 - protein, 28 aa, Artificial Sequence
  Cyclic GFR-binding peptide
RVIMEYQKYVKPKRGVIYLISIPSLAQP

SEQ ID NO: 59580 - protein, 31 aa, Artificial Sequence
  Cyclic GFR-binding peptide
  MOD_RES (2), (2): Xaa is C or S
KXSRVIMEYQKYVKPKRGVIYLISIPSLAQP

SEQ ID NO: 59581 - protein, 31 aa, Artificial Sequence
  Cyclic GFR-binding peptide
  MOD_RES (27), (28): Xaa is C or S
GYHYKLYTVVGKDKYLISIPSLKTPVXXAKS

SEQ ID NO: 59582 - protein, 33 aa, Artificial Sequence; identical to SEQ ID NO: 16612
  Cyclic GFR-binding peptide
  MOD_RES (31), (32): Xaa is C or S

SEQ ID NO: 59583 - protein, 26 aa, Artificial Sequence
  Cyclic GFR-binding peptide
  MOD_RES (1), (1): Xaa is C or S
XSRVIMEYQKYVKPKRGVIYLISIPS

SEQ ID NO: 59584 - protein, 27 aa, Artificial Sequence
  Cyclic GFR-binding peptide
VIMEYQKYVKPKRGVIYLISIPSLAQP

SEQ ID NO: 59585 - protein, 37 aa, Artificial Sequence; identical to SEQ ID NO: 16614
  Cyclic GFR-binding peptide
  MOD_RES (1), (33), (34): Xaa is C or S

SEQ ID NO: 59586 - protein, 33 aa, Artificial Sequence
  Cyclic GFR-binding peptide
  MOD_RES (29), (30): Xaa is C or S
VMDYHYKLVVNNAADKYLISIPSLRAPVXXSAP

SEQ ID NO: 59587 - protein, 29 aa, Artificial Sequence
  Cyclic GFR-binding peptide
  MOD_RES (1), (3): Xaa is C or S
XGXESVAMGEYQKYYTVVGKDIYLISIPS

SEQ ID NO: 59588 - protein, 29 aa, Artificial Sequence
  Cyclic GFR-binding peptide
ARVVMNEYKFKIVNSSDDLYLVSIPELQT

SEQ ID NO: 59589 - protein, 35 aa, Artificial Sequence
  Cyclic GFR-binding peptide
  MOD_RES (30), (31): Xaa is C or S
SMGEEYQKYTPVGMDDIYLVSIPSLKTPVXXAKGV

SEQ ID NO: 59590 - protein, 38 aa, Artificial Sequence; identical to SEQ ID NO: 16615
  Cyclic GFR-binding peptide
  MOD_RES (33), (34): Xaa is C or S

SEQ ID NO: 59591 - protein, 31 aa, Artificial Sequence; identical to SEQ ID NO: 16619
  Cyclic GFR-binding peptide
  MOD_RES (1), (1): Xaa is C or S

SEQ ID NO: 59592 - protein, 24 aa, Artificial Sequence
  Cyclic GFR-binding peptide
KVIMEYKFKIKPTKGILYLISIPE

SEQ ID NO: 59593 - protein, 33 aa, Artificial Sequence
  Cyclic GFR-binding peptide
  MOD_RES (30), (31): Xaa is C or S
VVMDEYKFKVVNNAADLYLISIPELRAPVXXSA

SEQ ID NO: 59594 - protein, 38 aa, Artificial Sequence; identical to SEQ ID NO: 16622
  Cyclic GFR-binding peptide
  MOD_RES (32), (33): Xaa is C or S

SEQ ID NO: 59595 - protein, 24 aa, Artificial Sequence
  Cyclic GFR-binding peptide
KVVMEYKFKVKPTRGVLYLISIPE

SEQ ID NO: 59596 - protein, 32 aa, Artificial Sequence; identical to SEQ ID NO: 16624
  Cyclic GFR-binding peptide
  MOD_RES (31), (32): Xaa is C or S

SEQ ID NO: 59597 - protein, 29 aa, Artificial Sequence
  Cyclic GFR-binding peptide
  MOD_RES (28), (29): Xaa is C or S
IMEYKFKVKPKRGVLYLISIPELAQPVXX

SEQ ID NO: 59598 - protein, 28 aa, Artificial Sequence
  Cyclic GFR-binding peptide
ARVVMNEYQKYIVNSSDDIYLVSIPSLQ

SEQ ID NO: 59599 - protein, 33 aa, Artificial Sequence; identical to SEQ ID NO: 16627
  Cyclic GFR-binding peptide
  MOD_RES (1), (33): Xaa is C or S

SEQ ID NO: 59600 - protein, 33 aa, Artificial Sequence; identical to SEQ ID NO: 16628
  Cyclic GFR-binding peptide
  MOD_RES (31), (32): Xaa is C or S

SEQ ID NO: 59601 - protein, 25 aa, Artificial Sequence
  Cyclic GFR-binding peptide
DYHYKLVVNNAADKYLISIPSLRAP

SEQ ID NO: 59602 - protein, 31 aa, Artificial Sequence
  Cyclic GFR-binding peptide
  MOD_RES (1), (3): Xaa is C or S
XGXESVAMGEYQKYYTVVGKDIYLISIPSLK

SEQ ID NO: 59603 - protein, 24 aa, Artificial Sequence
  Cyclic GFR-binding peptide
VMNEYQKYIVNSSDDIYLVSIPSL

SEQ ID NO: 59604 - protein, 25 aa, Artificial Sequence
  Cyclic GFR-binding peptide
VVMDEYQKYVVKENEDIYLMSIPSL

SEQ ID NO: 59605 - protein, 31 aa, Artificial Sequence; identical to SEQ ID NO: 16636
  Cyclic GFR-binding peptide
  MOD_RES (31), (31): Xaa is C or S

SEQ ID NO: 59606 - protein, 40 aa, Artificial Sequence; identical to SEQ ID NO: 16637
  Cyclic GFR-binding peptide
  MOD_RES (2), (34), (35): Xaa is C or S

SEQ ID NO: 59607 - protein, 28 aa, Artificial Sequence
  Cyclic GFR-binding peptide
  MOD_RES (28), (28): Xaa is C or S
MNEYKFKIVNNSSDLYLVSIPELKTPAX

SEQ ID NO: 59608 - protein, 34 aa, Artificial Sequence; identical to SEQ ID NO: 16639
  Cyclic GFR-binding peptide
  MOD_RES (32), (33): Xaa is C or S

SEQ ID NO: 59609 - protein, 35 aa, Artificial Sequence; identical to SEQ ID NO: 16641
  Cyclic GFR-binding peptide
  MOD_RES (2), (34), (35): Xaa is C or S

SEQ ID NO: 59610 - protein, 30 aa, Artificial Sequence
  Cyclic GFR-binding peptide
  MOD_RES (28), (29): Xaa is C or S
MDEYKFKVVNNAADLYLISIPELRAPVXXS

SEQ ID NO: 59611 - protein, 38 aa, Artificial Sequence; identical to SEQ ID NO: 16646
  Cyclic GFR-binding peptide
  MOD_RES (2), (4), (35), (36): Xaa is C or S

SEQ ID NO: 59612 - protein, 33 aa, Artificial Sequence; identical to SEQ ID NO: 16649
  Cyclic GFR-binding peptide
  MOD_RES (31), (32): Xaa is C or S

SEQ ID NO: 59613 - protein, 30 aa, Artificial Sequence
  Cyclic GFR-binding peptide
  MOD_RES (2), (2): Xaa is C or S
GXAKVVMNEYKFKIVNNSSDLYLVSIPELK

SEQ ID NO: 59614 - protein, 29 aa, Artificial Sequence
  Cyclic GFR-binding peptide
  MOD_RES (28), (29): Xaa is C or S
MGYHYKLYTVVGKDKYLISIPSLKTPVXX

SEQ ID NO: 59615 - protein, 33 aa, Artificial Sequence
  Cyclic GFR-binding peptide
  MOD_RES (28), (29): Xaa is C or S
MDEYKFKVVNNAADLYLISIPELRAPVXXSAPA

SEQ ID NO: 59616 - protein, 34 aa, Artificial Sequence; identical to SEQ ID NO: 16653
  Cyclic GFR-binding peptide
  MOD_RES (1), (3), (34): Xaa is C or S

SEQ ID NO: 59617 - protein, 36 aa, Artificial Sequence; identical to SEQ ID NO: 16654
  Cyclic GFR-binding peptide
  MOD_RES (32), (32): Xaa is C or S

SEQ ID NO: 59618 - protein, 34 aa, Artificial Sequence; identical to SEQ ID NO: 16655
  Cyclic GFR-binding peptide
  MOD_RES (32), (33): Xaa is C or S

SEQ ID NO: 59619 - protein, 33 aa, Artificial Sequence; identical to SEQ ID NO: 16658
  Cyclic GFR-binding peptide
  MOD_RES (2), (2): Xaa is C or S

SEQ ID NO: 59620 - protein, 32 aa, Artificial Sequence
  Cyclic GFR-binding peptide
  MOD_RES (26), (26): Xaa is C or S
EYQKYIVNSSDDIYLVSIPSLKTPAXTPKTVH

SEQ ID NO: 59621 - protein, 34 aa, Artificial Sequence
  Cyclic GFR-binding peptide
  MOD_RES (30), (30): Xaa is C or S
VVMNEYKFKIVNSSDDLYLVSIPELKTPAXTPKT

SEQ ID NO: 59622 - protein, 34 aa, Artificial Sequence; identical to SEQ ID NO: 16664
  Cyclic GFR-binding peptide
  MOD_RES (32), (33): Xaa is C or S

SEQ ID NO: 59623 - protein, 32 aa, Artificial Sequence
  Cyclic GFR-binding peptide
  MOD_RES (29), (30): Xaa is C or S
VMNEYQKYIVNSSDDIYLVSIPSLKTPAXXPK

SEQ ID NO: 59624 - protein, 24 aa, Artificial Sequence
  Cyclic GFR-binding peptide
EYQKYIKPTKGIIYLISIPSLDQS

SEQ ID NO: 59625 - protein, 36 aa, Artificial Sequence; identical to SEQ ID NO: 16668
  Cyclic GFR-binding peptide
  MOD_RES (1), (3), (34), (35): Xaa is C or S

SEQ ID NO: 59626 - protein, 30 aa, Artificial Sequence
  Cyclic GFR-binding peptide
  MOD_RES (30), (30): Xaa is C or S
SMGEEYKFKTPVGMDDLYLVSIPELKTPVX

SEQ ID NO: 59627 - protein, 33 aa, Artificial Sequence
  Cyclic GFR-binding peptide
  MOD_RES (2), (4): Xaa is C or S
SXKXSRVIMEYQKYVKPKRGVIYLISIPSLAQP

SEQ ID NO: 59628 - protein, 30 aa, Artificial Sequence
  Cyclic GFR-binding peptide
  MOD_RES (2), (4): Xaa is C or S
RXGXGEVVMDEYKFKVVKENEDLYLMSIPE

SEQ ID NO: 59629 - protein, 34 aa, Artificial Sequence
  Cyclic GFR-binding peptide
  MOD_RES (28), (29): Xaa is C or S
GEEYQKYTPVGMDDIYLVSIPSLKTPVXXAKGVK

SEQ ID NO: 59630 - protein, 30 aa, Artificial Sequence
  Cyclic GFR-binding peptide
  MOD_RES (2), (2): Xaa is C or S
GXEAVSMGEEYKFKTPVGMDDLYLVSIPEL

SEQ ID NO: 59631 - protein, 34 aa, Artificial Sequence; identical to SEQ ID NO: 16674
  Cyclic GFR-binding peptide
  MOD_RES (1), (33), (34): Xaa is C or S

SEQ ID NO: 59632 - protein, 29 aa, Artificial Sequence
  Cyclic GFR-binding peptide
AEVVMDRYKKLVVNNAADFYLISIANLRA

SEQ ID NO: 59633 - protein, 32 aa, Artificial Sequence; identical to SEQ ID NO: 16681
  Cyclic GFR-binding peptide
  MOD_RES (31), (32): Xaa is C or S

SEQ ID NO: 59634 - protein, 28 aa, Artificial Sequence
  Cyclic GFR-binding peptide
  MOD_RES (27), (28): Xaa is C or S
DEYKFKVVKENEDLYLMSIPELETPVXX

SEQ ID NO: 59635 - protein, 24 aa, Artificial Sequence
  Cyclic GFR-binding peptide
AMGEYQKYYTVVGKDIYLISIPSL

SEQ ID NO: 59636 - protein, 33 aa, Artificial Sequence; identical to SEQ ID NO: 16687
  Cyclic GFR-binding peptide
  MOD_RES (1), (1): Xaa is C or S

SEQ ID NO: 59637 - protein, 25 aa, Artificial Sequence
  Cyclic GFR-binding peptide
SMGEEYQKYTPVGMDDIYLVSIPSL

SEQ ID NO: 59638 - protein, 25 aa, Artificial Sequence
  Cyclic GFR-binding peptide
EYQKYIVNSSDDIYLVSIPSLQTPA

SEQ ID NO: 59639 - protein, 30 aa, Artificial Sequence
  Cyclic GFR-binding peptide
  MOD_RES (1), (3): Xaa is C or S
XGXEAVSMGEEYQKYTPVGMDDIYLVSIPS

SEQ ID NO: 59640 - protein, 35 aa, Artificial Sequence; identical to SEQ ID NO: 16691
  Cyclic GFR-binding peptide
  MOD_RES (1), (33), (34): Xaa is C or S

SEQ ID NO: 59641 - protein, 28 aa, Artificial Sequence
  Cyclic GFR-binding peptide
  MOD_RES (28), (28): Xaa is C or S
IMEYKFKIKPTKGILYLISIPELDQSVX

SEQ ID NO: 59642 - protein, 30 aa, Artificial Sequence
  Cyclic GFR-binding peptide
  MOD_RES (2), (2): Xaa is C or S
GXAEVVMDRYKKLVVNNAADFYLISIANLR

SEQ ID NO: 59643 - protein, 30 aa, Artificial Sequence
  Cyclic GFR-binding peptide
  MOD_RES (27), (28): Xaa is C or S
DRYKKLVVNNAADFYLISIANLRAPVXXSA

SEQ ID NO: 59644 - protein, 33 aa, Artificial Sequence
  Cyclic GFR-binding peptide
  MOD_RES (30), (31): Xaa is C or S
VVMNEYQKYIVNNSSDIYLVSIPSLKTPAXXAK

SEQ ID NO: 59645 - protein, 23 aa, Artificial Sequence
  Cyclic GFR-binding peptide
GYHYKLYTVVGKDKYLISIPSLK

SEQ ID NO: 59646 - protein, 30 aa, Artificial Sequence
  Cyclic GFR-binding peptide
  MOD_RES (1), (1): Xaa is C or S
XAKVVMNEYQKYIVNNSSDIYLVSIPSLKT

SEQ ID NO: 59647 - protein, 33 aa, Artificial Sequence; identical to SEQ ID NO: 16695
  Cyclic GFR-binding peptide
  MOD_RES (1), (32), (33): Xaa is C or S

SEQ ID NO: 59648 - protein, 33 aa, Artificial Sequence
  Cyclic GFR-binding peptide
  MOD_RES (2), (4): Xaa is C or S
RXGXGEVVMEEYKFKVVKDYEDLYLMSIPELET

SEQ ID NO: 59649 - protein, 37 aa, Artificial Sequence; identical to SEQ ID NO: 16699
  Cyclic GFR-binding peptide
  MOD_RES (1), (3), (35), (36): Xaa is C or S

SEQ ID NO: 59650 - protein, 31 aa, Artificial Sequence
  Cyclic GFR-binding peptide
  MOD_RES (28), (29): Xaa is C or S
MDEYKFKVVKENEDLYLMSIPELETPVXXAK

SEQ ID NO: 59651 - protein, 36 aa, Artificial Sequence
  Cyclic GFR-binding peptide
  MOD_RES (30), (31): Xaa is C or S
RVIMEYKFKVKPKRGVLYLISIPELAQPVXXPAASA

SEQ ID NO: 59652 - protein, 33 aa, Artificial Sequence; identical to SEQ ID NO: 16701
  Cyclic GFR-binding peptide
  MOD_RES (31), (32): Xaa is C or S

SEQ ID NO: 59653 - protein, 35 aa, Artificial Sequence
  Cyclic GFR-binding peptide
  MOD_RES (32), (33): Xaa is C or S
AVSMGEEYQKYTPVGMDDIYLVSIPSLKTPVXXAK

SEQ ID NO: 59654 - protein, 34 aa, Artificial Sequence
  Cyclic GFR-binding peptide
  MOD_RES (29), (30): Xaa is C or S
VMDEYKFKVVNNAADLYLISIPELRAPVXXSAPA

SEQ ID NO: 59655 - protein, 30 aa, Artificial Sequence
  Cyclic GFR-binding peptide
  MOD_RES (26), (26): Xaa is C or S
EYQKYIVNSSDDIYLVSIPSLKTPAXTPKT

SEQ ID NO: 59656 - protein, 23 aa, Artificial Sequence
  Cyclic GFR-binding peptide
VMDEYKFKVVNNAADLYLISIPE

SEQ ID NO: 59657 - protein, 27 aa, Artificial Sequence
  Cyclic GFR-binding peptide
VMEYKFKVKPTRGVLYLISIPELDQPV

SEQ ID NO: 59658 - protein, 37 aa, Artificial Sequence; identical to SEQ ID NO: 16710
  Cyclic GFR-binding peptide
  MOD_RES (1), (3), (35), (36): Xaa is C or S

SEQ ID NO: 59659 - protein, 26 aa, Artificial Sequence
  Cyclic GFR-binding peptide
  MOD_RES (26), (26): Xaa is C or S
EYKFKVVKDYEDLYLMSIPELETPVX

SEQ ID NO: 59660 - protein, 38 aa, Artificial Sequence; identical to SEQ ID NO: 16715
  Cyclic GFR-binding peptide
  MOD_RES (2), (34), (35): Xaa is C or S

SEQ ID NO: 59661 - protein, 30 aa, Artificial Sequence
  Cyclic GFR-binding peptide
  MOD_RES (26), (27): Xaa is C or S
RYKKLVVNNAADFYLISIANLRAPVXXSAP

SEQ ID NO: 59662 - protein, 23 aa, Artificial Sequence
  Cyclic GFR-binding peptide
RYKKLYTVVGKDFYLISIANLKT

SEQ ID NO: 59663 - protein, 36 aa, Artificial Sequence; identical to SEQ ID NO: 16721
  Cyclic GFR-binding peptide
  MOD_RES (1), (32), (33): Xaa is C or S

SEQ ID NO: 59664 - protein, 23 aa, Artificial Sequence
  Cyclic GFR-binding peptide
DEYKFKVVKENEDLYLMSIPELE

SEQ ID NO: 59665 - protein, 41 aa, Artificial Sequence; identical to SEQ ID NO: 16723
  Cyclic GFR-binding peptide
  MOD_RES (1), (3), (35), (36): Xaa is C or S

SEQ ID NO: 59666 - protein, 37 aa, Artificial Sequence; identical to SEQ ID NO: 16724
  Cyclic GFR-binding peptide
  MOD_RES (31), (32): Xaa is C or S

SEQ ID NO: 59667 - protein, 29 aa, Artificial Sequence
  Cyclic GFR-binding peptide
  MOD_RES (26), (27): Xaa is C or S
EYKFKVKPTRGVLYLISIPELDQPVXXPS

SEQ ID NO: 59668 - protein, 39 aa, Artificial Sequence; identical to SEQ ID NO: 16726
  Cyclic GFR-binding peptide
  MOD_RES (2), (34), (35): Xaa is C or S

SEQ ID NO: 59669 - protein, 35 aa, Artificial Sequence; identical to SEQ ID NO: 16729
  Cyclic GFR-binding peptide
  MOD_RES (2), (34), (35): Xaa is C or S

SEQ ID NO: 59670 - protein, 20 aa, Artificial Sequence
  Cyclic GFR-binding peptide
EYQKYVVKENEDIYLMSIPS

SEQ ID NO: 59671 - protein, 33 aa, Artificial Sequence
  Cyclic GFR-binding peptide
  MOD_RES (27), (28): Xaa is C or S
NEYKFKIVNSSDDLYLVSIPELKTPAXXPKPVY

SEQ ID NO: 59672 - protein, 32 aa, Artificial Sequence
  Cyclic GFR-binding peptide
  MOD_RES (32), (32): Xaa is C or S
AVSMGEEYKFKTPVGMDDLYLVSIPELKTPVX

SEQ ID NO: 59673 - protein, 29 aa, Artificial Sequence
  Cyclic GFR-binding peptide
AAAAAAAAAYHYKLYTVVGKDKYLISIPS

SEQ ID NO: 59674 - protein, 41 aa, Artificial Sequence; identical to SEQ ID NO: 16748
  Cyclic GFR-binding peptide
  MOD_RES (2), (35), (36): Xaa is C or S

SEQ ID NO: 59675 - protein, 31 aa, Artificial Sequence
  Cyclic GFR-binding peptide
  MOD_RES (1), (1): Xaa is C or S
XGEVVMDEYQKYVVKENEDIYLMSIPSLETP

SEQ ID NO: 59676 - protein, 35 aa, Artificial Sequence
  Cyclic GFR-binding peptide
  MOD_RES (29), (30): Xaa is C or S
MGEEYKFKTPVGMDDLYLVSIPELKTPVXXAKGVK

SEQ ID NO: 59677 - protein, 40 aa, Artificial Sequence; identical to SEQ ID NO: 16758
  Cyclic GFR-binding peptide
  MOD_RES (2), (34), (35): Xaa is C or S

SEQ ID NO: 59678 - protein, 32 aa, Artificial Sequence
  Cyclic GFR-binding peptide
  MOD_RES (27), (28): Xaa is C or S
MEYKFKVKPTRGVLYLISIPELDQPVXXPSAS

SEQ ID NO: 59679 - protein, 38 aa, Artificial Sequence; identical to SEQ ID NO: 16759
  Cyclic GFR-binding peptide
  MOD_RES (1), (32), (33): Xaa is C or S

SEQ ID NO: 59680 - protein, 33 aa, Artificial Sequence
  Cyclic GFR-binding peptide
  MOD_RES (1), (3): Xaa is C or S
XGXGEVVMDEYQKYVVKENEDIYLMSIPSLETP

SEQ ID NO: 59681 - protein, 31 aa, Artificial Sequence
  Cyclic GFR-binding peptide
  MOD_RES (2), (4): Xaa is C or S
RXGXAEVVMDYHYKLVVNNAADKYLISIPSL

SEQ ID NO: 59682 - protein, 22 aa, Artificial Sequence
  Cyclic GFR-binding peptide
GEEYKFKTPVGMDDLYLVSIPE

SEQ ID NO: 59683 - protein, 31 aa, Artificial Sequence; identical to SEQ ID NO: 16765
  Cyclic GFR-binding peptide

SEQ ID NO: 59684 - protein, 29 aa, Artificial Sequence
  Cyclic GFR-binding peptide
  MOD_RES (27), (28): Xaa is C or S
MEYQKYIKPTKGIIYLISIPSLDQSVXXP

SEQ ID NO: 59685 - protein, 31 aa, Artificial Sequence
  Cyclic GFR-binding peptide
  MOD_RES (1), (3): Xaa is C or S
XGXGEVVMDEYKFKVVKENEDLYLMSIPELE

SEQ ID NO: 59686 - protein, 38 aa, Artificial Sequence; identical to SEQ ID NO: 16772
  Cyclic GFR-binding peptide
  MOD_RES (2), (4), (36), (37): Xaa is C or S

SEQ ID NO: 59687 - protein, 32 aa, Artificial Sequence
  Cyclic GFR-binding peptide
  MOD_RES (29), (30): Xaa is C or S
VVMEYKFKVKPTRGVLYLISIPELDQPVXXPS

SEQ ID NO: 59688 - protein, 33 aa, Artificial Sequence
  Cyclic GFR-binding peptide
  MOD_RES (28), (29): Xaa is C or S
VMEYKFKVKPTRGVLYLISIPELDQPVXXPSAS

SEQ ID NO: 59689 - protein, 33 aa, Artificial Sequence
  Cyclic GFR-binding peptide
  MOD_RES (2), (4): Xaa is C or S
HXGXSRVVMNEYKFKIVNSSDDLYLVSIPELKT

SEQ ID NO: 59690 - protein, 26 aa, Artificial Sequence
  Cyclic GFR-binding peptide
VIMEYQKYVKPKRGVIYLISIPSLAQ

SEQ ID NO: 59691 - protein, 31 aa, Artificial Sequence; identical to SEQ ID NO: 16774
  Cyclic GFR-binding peptide
  MOD_RES (1), (1): Xaa is C or S

SEQ ID NO: 59692 - protein, 32 aa, Artificial Sequence
  Cyclic GFR-binding peptide
  MOD_RES (28), (29): Xaa is C or S
IMEYKFKVKPKRGVLYLISIPELAQPVXXPAA

SEQ ID NO: 59693 - protein, 34 aa, Artificial Sequence; identical to SEQ ID NO: 16775
  Cyclic GFR-binding peptide
  MOD_RES (2), (2): Xaa is C or S

SEQ ID NO: 59694 - protein, 35 aa, Artificial Sequence; identical to SEQ ID NO: 16776
  Cyclic GFR-binding peptide
  MOD_RES (2), (34), (35): Xaa is C or S

SEQ ID NO: 59695 - protein, 28 aa, Artificial Sequence
  Cyclic GFR-binding peptide
  MOD_RES (26), (27): Xaa is C or S
EYQKYTPVGMDDIYLVSIPSLKTPVXXA

SEQ ID NO: 59696 - protein, 28 aa, Artificial Sequence
  Cyclic GFR-binding peptide
  MOD_RES (28), (28): Xaa is C or S
MEEYQKYVVKDYEDIYLMSIPSLETPVX

SEQ ID NO: 59697 - protein, 33 aa, Artificial Sequence; identical to SEQ ID NO: 16779
  Cyclic GFR-binding peptide
  MOD_RES (2), (33): Xaa is C or S

SEQ ID NO: 59698 - protein, 30 aa, Artificial Sequence
  Cyclic GFR-binding peptide
  MOD_RES (29), (29): Xaa is C or S
VMNEYQKYIVNSSDDIYLVSIPSLKTPAXT

SEQ ID NO: 59699 - protein, 35 aa, Artificial Sequence; identical to SEQ ID NO: 16788
  Cyclic GFR-binding peptide
  MOD_RES (2), (4): Xaa is C or S

SEQ ID NO: 59700 - protein, 29 aa, Artificial Sequence
  Cyclic GFR-binding peptide
  MOD_RES (2), (2): Xaa is C or S
GXGEVVMDEYKFKVVKENEDLYLMSIPEL

SEQ ID NO: 59701 - protein, 33 aa, Artificial Sequence; identical to SEQ ID NO: 16789
  Cyclic GFR-binding peptide
  MOD_RES (2), (2): Xaa is C or S

SEQ ID NO: 59702 - protein, 25 aa, Artificial Sequence
  Cyclic GFR-binding peptide
VVMEEYQKYVVKDYEDIYLMSIPSL

SEQ ID NO: 59703 - protein, 29 aa, Artificial Sequence
  Cyclic GFR-binding peptide
AVSMGEEYQKYTPVGMDDIYLVSIPSLKT

SEQ ID NO: 59704 - protein, 28 aa, Artificial Sequence
  Cyclic GFR-binding peptide
SMGEEYKFKTPVGMDDLYLVSIPELKTP

SEQ ID NO: 59705 - protein, 23 aa, Artificial Sequence
  Cyclic GFR-binding peptide
AMGRYKKLYTVVGKDFYLISIAN

SEQ ID NO: 59706 - protein, 24 aa, Artificial Sequence
  Cyclic GFR-binding peptide
YHYKLYTVVGKDKYLISIPSLKTP

SEQ ID NO: 59707 - protein, 31 aa, Artificial Sequence
  Cyclic GFR-binding peptide
  MOD_RES (29), (30): Xaa is C or S
VMNEYKFKIVNNSSDLYLVSIPELKTPAXXA

SEQ ID NO: 59708 - protein, 33 aa, Artificial Sequence
  Cyclic GFR-binding peptide
  MOD_RES (27), (28): Xaa is C or S
MEYQKYIKPTKGIIYLISIPSLDQSVXXPSASA

SEQ ID NO: 59709 - protein, 30 aa, Artificial Sequence
  Cyclic GFR-binding peptide
  MOD_RES (29), (30): Xaa is C or S
AMGRYKKLYTVVGKDFYLISIANLKTPVXX

SEQ ID NO: 59710 - protein, 30 aa, Artificial Sequence; identical to SEQ ID NO: 16799
  Cyclic GFR-binding peptide

SEQ ID NO: 59711 - protein, 39 aa, Artificial Sequence; identical to SEQ ID NO: 16801
  Cyclic GFR-binding peptide
  MOD_RES (2), (4), (35), (36): Xaa is C or S

SEQ ID NO: 59712 - protein, 35 aa, Artificial Sequence; identical to SEQ ID NO: 16802
  Cyclic GFR-binding peptide
  MOD_RES (1), (33), (34): Xaa is C or S

SEQ ID NO: 59713 - protein, 26 aa, Artificial Sequence
  Cyclic GFR-binding peptide
  MOD_RES (26), (26): Xaa is C or S
EYQKYVKPTRGVIYLISIPSLDQPVX

SEQ ID NO: 59714 - protein, 26 aa, Artificial Sequence
  Cyclic GFR-binding peptide
MDEYKFKVVNNAADLYLISIPELRAP

SEQ ID NO: 59715 - protein, 27 aa, Artificial Sequence
  Cyclic GFR-binding peptide
SKVIMEYKFKIKPTKGILYLISIPELD

SEQ ID NO: 59716 - protein, 25 aa, Artificial Sequence
  Cyclic GFR-binding peptide
VVMEEYKFKVVKDYEDLYLMSIPEL

SEQ ID NO: 59717 - protein, 28 aa, Artificial Sequence
  Cyclic GFR-binding peptide
  MOD_RES (27), (27): Xaa is C or S
NEYKFKIVNSSDDLYLVSIPELKTPAXT

SEQ ID NO: 59718 - protein, 35 aa, Artificial Sequence; identical to SEQ ID NO: 16808
  Cyclic GFR-binding peptide
  MOD_RES (2), (4): Xaa is C or S

SEQ ID NO: 59719 - protein, 26 aa, Artificial Sequence
  Cyclic GFR-binding peptide
MEEYQKYVVKDYEDIYLMSIPSLETP

SEQ ID NO: 59720 - protein, 28 aa, Artificial Sequence
  Cyclic GFR-binding peptide
  MOD_RES (27), (28): Xaa is C or S
NEYQKYIVNNSSDIYLVSIPSLKTPAXX

SEQ ID NO: 59721 - protein, 29 aa, Artificial Sequence
  Cyclic GFR-binding peptide
  MOD_RES (2), (4): Xaa is C or S
SXKXSKVVMEYQKYVKPTRGVIYLISIPS

SEQ ID NO: 59722 - protein, 34 aa, Artificial Sequence
  Cyclic GFR-binding peptide
  MOD_RES (30), (31): Xaa is C or S
KVIMEYKFKIKPTKGILYLISIPELDQSVXXPSA

SEQ ID NO: 59723 - protein, 32 aa, Artificial Sequence
  Cyclic GFR-binding peptide
  MOD_RES (28), (29): Xaa is C or S
MGRYKKLYTVVGKDFYLISIANLKTPVXXAKS

SEQ ID NO: 59724 - protein, 35 aa, Artificial Sequence
  Cyclic GFR-binding peptide
  MOD_RES (29), (30): Xaa is C or S
VMNEYKFKIVNNSSDLYLVSIPELKTPAXXAKPVA

SEQ ID NO: 59725 - protein, 36 aa, Artificial Sequence; identical to SEQ ID NO: 16814
  Cyclic GFR-binding peptide
  MOD_RES (31), (32): Xaa is C or S

SEQ ID NO: 59726 - protein, 30 aa, Artificial Sequence
  Cyclic GFR-binding peptide
  MOD_RES (2), (2): Xaa is C or S
GXAEVVMDEYKFKVVNNAADLYLISIPELR

SEQ ID NO: 59727 - protein, 30 aa, Artificial Sequence
  Cyclic GFR-binding peptide
  MOD_RES (2), (4): Xaa is C or S
SXKXSKVVMEYQKYVKPTRGVIYLISIPSL

SEQ ID NO: 59728 - protein, 29 aa, Artificial Sequence
  Cyclic GFR-binding peptide
  MOD_RES (28), (29): Xaa is C or S
VMEYKFKVKPTRGVLYLISIPELDQPVXX

SEQ ID NO: 59729 - protein, 28 aa, Artificial Sequence
  Cyclic GFR-binding peptide
  MOD_RES (27), (27): Xaa is C or S
NEYQKYIVNSSDDIYLVSIPSLKTPAXT

SEQ ID NO: 59730 - protein, 23 aa, Artificial Sequence
  Cyclic GFR-binding peptide
VIMEYKFKIKPTKGILYLISIPE

SEQ ID NO: 59731 - protein, 30 aa, Artificial Sequence
  Cyclic GFR-binding peptide
GEVVMEEYQKYVVKDYEDIYLMSIPSLETP

SEQ ID NO: 59732 - protein, 30 aa, Artificial Sequence
  Cyclic GFR-binding peptide
  MOD_RES (1), (1): Xaa is C or S
XSRVIMEYKFKVKPKRGVLYLISIPELAQP

SEQ ID NO: 59733 - protein, 35 aa, Artificial Sequence; identical to SEQ ID NO: 16823
  Cyclic GFR-binding peptide
  MOD_RES (1), (3), (35): Xaa is C or S

SEQ ID NO: 59734 - protein, 22 aa, Artificial Sequence
  Cyclic GFR-binding peptide
NEYKFKIVNNSSDLYLVSIPEL

SEQ ID NO: 59735 - protein, 30 aa, Artificial Sequence
  Cyclic GFR-binding peptide
  MOD_RES (28), (29): Xaa is C or S
VMEYQKYVKPTRGVIYLISIPSLDQPVXXP

SEQ ID NO: 59736 - protein, 21 aa, Artificial Sequence
  Cyclic GFR-binding peptide
MEYQKYVKPKRGVIYLISIPS

SEQ ID NO: 59737 - protein, 31 aa, Artificial Sequence
  Cyclic GFR-binding peptide
  MOD_RES (30), (31): Xaa is C or S
KVIMEYKFKIKPTKGILYLISIPELDQSVXX

SEQ ID NO: 59738 - protein, 32 aa, Artificial Sequence; identical to SEQ ID NO: 16831
  Cyclic GFR-binding peptide
  MOD_RES (32), (32): Xaa is C or S

SEQ ID NO: 59739 - protein, 30 aa, Artificial Sequence
  Cyclic GFR-binding peptide
  MOD_RES (30), (30): Xaa is C or S
RVIMEYQKYVKPKRGVIYLISIPSLAQPVX

SEQ ID NO: 59740 - protein, 37 aa, Artificial Sequence; identical to SEQ ID NO: 16834
  Cyclic GFR-binding peptide
  MOD_RES (31), (31): Xaa is C or S

SEQ ID NO: 59741 - protein, 35 aa, Artificial Sequence; identical to SEQ ID NO: 16837
  Cyclic GFR-binding peptide
  MOD_RES (32), (33): Xaa is C or S

SEQ ID NO: 59742 - protein, 40 aa, Artificial Sequence; identical to SEQ ID NO: 16838
  Cyclic GFR-binding peptide
  MOD_RES (2), (34), (35): Xaa is C or S

SEQ ID NO: 59743 - protein, 29 aa, Artificial Sequence
  Cyclic GFR-binding peptide
EAVSMGEEYKFKTPVGMDDLYLVSIPELK

SEQ ID NO: 59744 - protein, 34 aa, Artificial Sequence
  Cyclic GFR-binding peptide
  MOD_RES (28), (29): Xaa is C or S
MGRYKKLYTVVGKDFYLISIANLKTPVXXAKSAK

SEQ ID NO: 59745 - protein, 40 aa, Artificial Sequence; identical to SEQ ID NO: 16840
  Cyclic GFR-binding peptide
  MOD_RES (2), (4), (35), (36): Xaa is C or S

SEQ ID NO: 59746 - protein, 25 aa, Artificial Sequence
  Cyclic GFR-binding peptide
EYQKYIVNNSSDIYLVSIPSLKTPA

SEQ ID NO: 59747 - protein, 28 aa, Artificial Sequence
  Cyclic GFR-binding peptide
  MOD_RES (27), (28): Xaa is C or S
NEYKFKIVNNSSDLYLVSIPELKTPAXX

SEQ ID NO: 59748 - protein, 36 aa, Artificial Sequence; identical to SEQ ID NO: 16846
  Cyclic GFR-binding peptide
  MOD_RES (31), (32): Xaa is C or S

SEQ ID NO: 59749 - protein, 25 aa, Artificial Sequence
  Cyclic GFR-binding peptide
EVVMDEYKFKVVKENEDLYLMSIPE

SEQ ID NO: 59750 - protein, 31 aa, Artificial Sequence
  Cyclic GFR-binding peptide
  MOD_RES (1), (1): Xaa is C or S
XAKVVMNEYKFKIVNNSSDLYLVSIPELKTP

SEQ ID NO: 59751 - protein, 26 aa, Artificial Sequence
  Cyclic GFR-binding peptide
SMGEEYKFKTPVGMDDLYLVSIPELK

SEQ ID NO: 59752 - protein, 26 aa, Artificial Sequence
  Cyclic GFR-binding peptide
EVVMDRYKKLVVNNAADFYLISIANL

SEQ ID NO: 59753 - protein, 30 aa, Artificial Sequence
  Cyclic GFR-binding peptide
  MOD_RES (2), (4): Xaa is C or S
SXKXSRVIMEYQKYVKPKRGVIYLISIPSL

SEQ ID NO: 59754 - protein, 24 aa, Artificial Sequence
  Cyclic GFR-binding peptide
MNEYQKYIVNSSDDIYLVSIPSLQ

SEQ ID NO: 59755 - protein, 37 aa, Artificial Sequence; identical to SEQ ID NO: 16857
  Cyclic GFR-binding peptide
  MOD_RES (1), (33), (34): Xaa is C or S

SEQ ID NO: 59756 - protein, 34 aa, Artificial Sequence; identical to SEQ ID NO: 16858
  Cyclic GFR-binding peptide
  MOD_RES (2), (33), (34): Xaa is C or S

SEQ ID NO: 59757 - protein, 29 aa, Artificial Sequence
  Cyclic GFR-binding peptide
VVMDEYKFKVVNNAADLYLISIPELRAPV

SEQ ID NO: 59758 - protein, 42 aa, Artificial Sequence; identical to SEQ ID NO: 16861
  Cyclic GFR-binding peptide
  MOD_RES (2), (4), (36), (37): Xaa is C or S

SEQ ID NO: 59759 - protein, 38 aa, Artificial Sequence; identical to SEQ ID NO: 16862
  Cyclic GFR-binding peptide
  MOD_RES (2), (33), (34): Xaa is C or S

SEQ ID NO: 59760 - protein, 30 aa, Artificial Sequence; identical to SEQ ID NO: 1933
  Cyclic GFR-binding peptide

SEQ ID NO: 59761 - protein, 26 aa, Artificial Sequence
  Cyclic GFR-binding peptide
MDEYKFKVVKENEDLYLMSIPELETP

SEQ ID NO: 59762 - protein, 39 aa, Artificial Sequence; identical to SEQ ID NO: 16867
  Cyclic GFR-binding peptide
  MOD_RES (2), (34), (35): Xaa is C or S

SEQ ID NO: 59763 - protein, 26 aa, Artificial Sequence
  Cyclic GFR-binding peptide
RVIMEYQKYVKPKRGVIYLISIPSLA

SEQ ID NO: 59764 - protein, 30 aa, Artificial Sequence
  Cyclic GFR-binding peptide
  MOD_RES (26), (27): Xaa is C or S
EYKFKVKPKRGVLYLISIPELAQPVXXPAA

SEQ ID NO: 59765 - protein, 34 aa, Artificial Sequence; identical to SEQ ID NO: 16868
  Cyclic GFR-binding peptide
  MOD_RES (31), (32): Xaa is C or S

SEQ ID NO: 59766 - protein, 33 aa, Artificial Sequence
  Cyclic GFR-binding peptide
  MOD_RES (2), (4): Xaa is C or S
SXKXSKVIMEYKFKIKPTKGILYLISIPELDQS

SEQ ID NO: 59767 - protein, 34 aa, Artificial Sequence
  Cyclic GFR-binding peptide
  MOD_RES (30), (31): Xaa is C or S
VAMGRYKKLYTVVGKDFYLISIANLKTPVXXAKS

SEQ ID NO: 59768 - protein, 29 aa, Artificial Sequence
  Cyclic GFR-binding peptide
RVIMEYKFKVKPKRGVLYLISIPELAQPV

SEQ ID NO: 59769 - protein, 24 aa, Artificial Sequence
  Cyclic GFR-binding peptide
KVVMEYQKYVKPTRGVIYLISIPS

SEQ ID NO: 59770 - protein, 40 aa, Artificial Sequence; identical to SEQ ID NO: 16870
  Cyclic GFR-binding peptide
  MOD_RES (2), (4), (36), (37): Xaa is C or S

SEQ ID NO: 59771 - protein, 33 aa, Artificial Sequence; identical to SEQ ID NO: 16874
  Cyclic GFR-binding peptide
  MOD_RES (31), (32): Xaa is C or S

SEQ ID NO: 59772 - protein, 41 aa, Artificial Sequence; identical to SEQ ID NO: 16877
  Cyclic GFR-binding peptide
  MOD_RES (2), (4), (36), (37): Xaa is C or S

SEQ ID NO: 59773 - protein, 35 aa, Artificial Sequence
  Cyclic GFR-binding peptide
  MOD_RES (29), (30): Xaa is C or S
VIMEYQKYIKPTKGIIYLISIPSLDQSVXXPSASA

SEQ ID NO: 59774 - protein, 26 aa, Artificial Sequence
  Cyclic GFR-binding peptide
IMEYKFKIKPTKGILYLISIPELDQS

SEQ ID NO: 59775 - protein, 28 aa, Artificial Sequence
  Cyclic GFR-binding peptide
  MOD_RES (1), (1): Xaa is C or S
XARVVMNEYKFKIVNSSDDLYLVSIPEL

SEQ ID NO: 59776 - protein, 36 aa, Artificial Sequence
  Cyclic GFR-binding peptide
  MOD_RES (30), (31): Xaa is C or S
VVMNEYQKYIVNSSDDIYLVSIPSLKTPAXXPKPVY

SEQ ID NO: 59777 - protein, 37 aa, Artificial Sequence; identical to SEQ ID NO: 16881
  Cyclic GFR-binding peptide
  MOD_RES (2), (4), (36), (37): Xaa is C or S

SEQ ID NO: 59778 - protein, 39 aa, Artificial Sequence; identical to SEQ ID NO: 16883
  Cyclic GFR-binding peptide
  MOD_RES (1), (3), (35), (36): Xaa is C or S

SEQ ID NO: 59779 - protein, 23 aa, Artificial Sequence
  Cyclic GFR-binding peptide
VMNEYKFKIVNSSDDLYLVSIPE

SEQ ID NO: 59780 - protein, 29 aa, Artificial Sequence
  Cyclic GFR-binding peptide
  MOD_RES (28), (29): Xaa is C or S
MDYHYKLVVNNAADKYLISIPSLRAPVXX

SEQ ID NO: 59781 - protein, 35 aa, Artificial Sequence
  Cyclic GFR-binding peptide
  MOD_RES (29), (30): Xaa is C or S
AMGRYKKLYTVVGKDFYLISIANLKTPVXXAKSAK

SEQ ID NO: 59782 - protein, 25 aa, Artificial Sequence
  Cyclic GFR-binding peptide
MNEYQKYIVNSSDDIYLVSIPSLKT

SEQ ID NO: 59783 - protein, 29 aa, Artificial Sequence
  Cyclic GFR-binding peptide
  MOD_RES (26), (27): Xaa is C or S
EYQKYVKPKRGVIYLISIPSLAQPVXXPA

SEQ ID NO: 59784 - protein, 28 aa, Artificial Sequence
  Cyclic GFR-binding peptide
EVVMDEYKFKVVKENEDLYLMSIPELET

SEQ ID NO: 59785 - protein, 37 aa, Artificial Sequence; identical to SEQ ID NO: 16886
  Cyclic GFR-binding peptide
  MOD_RES (2), (34), (35): Xaa is C or S

SEQ ID NO: 59786 - protein, 40 aa, Artificial Sequence; identical to SEQ ID NO: 16889
  Cyclic GFR-binding peptide
  MOD_RES (2), (4), (37), (38): Xaa is C or S

SEQ ID NO: 59787 - protein, 33 aa, Artificial Sequence
  Cyclic GFR-binding peptide
  MOD_RES (29), (29): Xaa is C or S
VMNEYKFKIVNSSDDLYLVSIPELKTPAXTPKT

SEQ ID NO: 59788 - protein, 37 aa, Artificial Sequence; identical to SEQ ID NO: 16891
  Cyclic GFR-binding peptide
  MOD_RES (31), (32): Xaa is C or S

SEQ ID NO: 59789 - protein, 31 aa, Artificial Sequence
  Cyclic GFR-binding peptide
  MOD_RES (28), (29): Xaa is C or S
MEEYQKYVVKDYEDIYLMSIPSLETPVXXAK

SEQ ID NO: 59790 - protein, 28 aa, Artificial Sequence
  Cyclic GFR-binding peptide
EVVMDRYKKLVVNNAADFYLISIANLRA

SEQ ID NO: 59791 - protein, 35 aa, Artificial Sequence
  Cyclic GFR-binding peptide
  MOD_RES (30), (31): Xaa is C or S
VAMGEYQKYYTVVGKDIYLISIPSLKTPVXXAKSA

SEQ ID NO: 59792 - protein, 32 aa, Artificial Sequence; identical to SEQ ID NO: 16898
  Cyclic GFR-binding peptide
  MOD_RES (1), (32): Xaa is C or S

SEQ ID NO: 59793 - protein, 27 aa, Artificial Sequence
  Cyclic GFR-binding peptide
MDYHYKLVVNNAADKYLISIPSLRAPV

SEQ ID NO: 59794 - protein, 38 aa, Artificial Sequence; identical to SEQ ID NO: 16899
  Cyclic GFR-binding peptide
  MOD_RES (32), (33): Xaa is C or S

SEQ ID NO: 59795 - protein, 30 aa, Artificial Sequence
  Cyclic GFR-binding peptide
  MOD_RES (27), (27): Xaa is C or S
NEYQKYIVNSSDDIYLVSIPSLKTPAXTPK

SEQ ID NO: 59796 - protein, 33 aa, Artificial Sequence; identical to SEQ ID NO: 16901
  Cyclic GFR-binding peptide
  MOD_RES (2), (2): Xaa is C or S

SEQ ID NO: 59797 - protein, 31 aa, Artificial Sequence
  Cyclic GFR-binding peptide
  MOD_RES (2), (2): Xaa is C or S
GXAKVVMNEYKFKIVNNSSDLYLVSIPELKT

SEQ ID NO: 59798 - protein, 34 aa, Artificial Sequence; identical to SEQ ID NO: 16907
  Cyclic GFR-binding peptide
  MOD_RES (32), (32): Xaa is C or S

SEQ ID NO: 59799 - protein, 27 aa, Artificial Sequence
  Cyclic GFR-binding peptide
  MOD_RES (2), (2): Xaa is C or S
KXSRVIMEYKFKVKPKRGVLYLISIPE

SEQ ID NO: 59800 - protein, 26 aa, Artificial Sequence
  Cyclic GFR-binding peptide
DEYKFKVVKENEDLYLMSIPELETPV

SEQ ID NO: 59801 - protein, 34 aa, Artificial Sequence
  Cyclic GFR-binding peptide
  MOD_RES (28), (29): Xaa is C or S
MNEYKFKIVNSSDDLYLVSIPELQTPAXXPKPVT

SEQ ID NO: 59802 - protein, 29 aa, Artificial Sequence
  Cyclic GFR-binding peptide
  MOD_RES (27), (28): Xaa is C or S
DEYQKYVVKENEDIYLMSIPSLETPVXXA

SEQ ID NO: 59803 - protein, 28 aa, Artificial Sequence
  Cyclic GFR-binding peptide
  MOD_RES (27), (28): Xaa is C or S
DRYKKLVVNNAADFYLISIANLRAPVXX

SEQ ID NO: 59804 - protein, 27 aa, Artificial Sequence
  Cyclic GFR-binding peptide
VIMEYKFKVKPKRGVLYLISIPELAQP

SEQ ID NO: 59805 - protein, 32 aa, Artificial Sequence; identical to SEQ ID NO: 16915
  Cyclic GFR-binding peptide
  MOD_RES (2), (2): Xaa is C or S

SEQ ID NO: 59806 - protein, 37 aa, Artificial Sequence; identical to SEQ ID NO: 16916
  Cyclic GFR-binding peptide
  MOD_RES (1), (34), (35): Xaa is C or S

SEQ ID NO: 59807 - protein, 26 aa, Artificial Sequence
  Cyclic GFR-binding peptide
GEEYQKYTPVGMDDIYLVSIPSLKTP

SEQ ID NO: 59808 - protein, 21 aa, Artificial Sequence
  Cyclic GFR-binding peptide
EYQKYIVNSSDDIYLVSIPSL

SEQ ID NO: 59809 - protein, 21 aa, Artificial Sequence
  Cyclic GFR-binding peptide
EYQKYTPVGMDDIYLVSIPSL

SEQ ID NO: 59810 - protein, 35 aa, Artificial Sequence; identical to SEQ ID NO: 16917
  Cyclic GFR-binding peptide
  MOD_RES (2), (34), (35): Xaa is C or S

SEQ ID NO: 59811 - protein, 31 aa, Artificial Sequence
  Cyclic GFR-binding peptide
  MOD_RES (29), (30): Xaa is C or S
AMGYHYKLYTVVGKDKYLISIPSLKTPVXXA

SEQ ID NO: 59812 - protein, 31 aa, Artificial Sequence
  Cyclic GFR-binding peptide
  MOD_RES (28), (29): Xaa is C or S
IMEYQKYIKPTKGIIYLISIPSLDQSVXXPS

SEQ ID NO: 59813 - protein, 28 aa, Artificial Sequence
  Cyclic GFR-binding peptide
  MOD_RES (26), (27): Xaa is C or S
EYKFKVVKDYEDLYLMSIPELETPVXXA

SEQ ID NO: 59814 - protein, 37 aa, Artificial Sequence; identical to SEQ ID NO: 16923
  Cyclic GFR-binding peptide
  MOD_RES (2), (4), (36), (37): Xaa is C or S

SEQ ID NO: 59815 - protein, 35 aa, Artificial Sequence; identical to SEQ ID NO: 16924
  Cyclic GFR-binding peptide
  MOD_RES (1), (3), (35): Xaa is C or S

SEQ ID NO: 59816 - protein, 37 aa, Artificial Sequence; identical to SEQ ID NO: 16926
  Cyclic GFR-binding peptide
  MOD_RES (2), (33), (34): Xaa is C or S

SEQ ID NO: 59817 - protein, 34 aa, Artificial Sequence; identical to SEQ ID NO: 16928
  Cyclic GFR-binding peptide
  MOD_RES (1), (3), (34): Xaa is C or S

SEQ ID NO: 59818 - protein, 36 aa, Artificial Sequence
  Cyclic GFR-binding peptide
  MOD_RES (31), (32): Xaa is C or S
VSMGEEYKFKTPVGMDDLYLVSIPELKTPVXXAKGV

SEQ ID NO: 59819 - protein, 28 aa, Artificial Sequence
  Cyclic GFR-binding peptide
  MOD_RES (2), (2): Xaa is C or S
GXAKVVMNEYQKYIVNNSSDIYLVSIPS

SEQ ID NO: 59820 - protein, 36 aa, Artificial Sequence
  Cyclic GFR-binding peptide
  MOD_RES (30), (31): Xaa is C or S
VVMDEYKFKVVNNAADLYLISIPELRAPVXXSAPAA

SEQ ID NO: 59821 - protein, 31 aa, Artificial Sequence
  Cyclic GFR-binding peptide
  MOD_RES (2), (4): Xaa is C or S
SXKXSKVVMEYQKYVKPTRGVIYLISIPSLD

SEQ ID NO: 59822 - protein, 32 aa, Artificial Sequence
  Cyclic GFR-binding peptide
  MOD_RES (28), (29): Xaa is C or S
MNEYKFKIVNNSSDLYLVSIPELKTPAXXAKP

SEQ ID NO: 59823 - protein, 28 aa, Artificial Sequence
  Cyclic GFR-binding peptide
VMDYHYKLVVNNAADKYLISIPSLRAPV

SEQ ID NO: 59824 - protein, 26 aa, Artificial Sequence
  Cyclic GFR-binding peptide
RVVMNEYQKYIVNSSDDIYLVSIPSL

SEQ ID NO: 59825 - protein, 34 aa, Artificial Sequence; identical to SEQ ID NO: 16939
  Cyclic GFR-binding peptide
  MOD_RES (1), (3), (34): Xaa is C or S

SEQ ID NO: 59826 - protein, 29 aa, Artificial Sequence
  Cyclic GFR-binding peptide
  MOD_RES (26), (27): Xaa is C or S
EYQKYIVNSSDDIYLVSIPSLQTPAXXPK

SEQ ID NO: 59827 - protein, 30 aa, Artificial Sequence
  Cyclic GFR-binding peptide
  MOD_RES (2), (4): Xaa is C or S
HXGXAKVVMNEYQKYIVNNSSDIYLVSIPS

SEQ ID NO: 59828 - protein, 24 aa, Artificial Sequence
  Cyclic GFR-binding peptide
VIMEYQKYIKPTKGIIYLISIPSL

SEQ ID NO: 59829 - protein, 32 aa, Artificial Sequence
  Cyclic GFR-binding peptide
  MOD_RES (29), (30): Xaa is C or S
VMNEYKFKIVNSSDDLYLVSIPELQTPAXXPK

SEQ ID NO: 59830 - protein, 29 aa, Artificial Sequence
  Cyclic GFR-binding peptide
SKVIMEYKFKIKPTKGILYLISIPELDQS

SEQ ID NO: 59831 - protein, 33 aa, Artificial Sequence
  Cyclic GFR-binding peptide
  MOD_RES (30), (31): Xaa is C or S
RVIMEYQKYVKPKRGVIYLISIPSLAQPVXXPA

SEQ ID NO: 59832 - protein, 31 aa, Artificial Sequence; identical to SEQ ID NO: 16944
  Cyclic GFR-binding peptide
  MOD_RES (1), (1): Xaa is C or S

SEQ ID NO: 59833 - protein, 33 aa, Artificial Sequence; identical to SEQ ID NO: 16945
  Cyclic GFR-binding peptide
  MOD_RES (1), (3): Xaa is C or S

SEQ ID NO: 59834 - protein, 32 aa, Artificial Sequence
  Cyclic GFR-binding peptide
  MOD_RES (26), (27): Xaa is C or S
RYKKLYTVVGKDFYLISIANLKTPVXXAKSAK

SEQ ID NO: 59835 - protein, 31 aa, Artificial Sequence
  Cyclic GFR-binding peptide
  MOD_RES (28), (29): Xaa is C or S
MNEYKFKIVNSSDDLYLVSIPELKTPAXXPK

SEQ ID NO: 59836 - protein, 32 aa, Artificial Sequence
  Cyclic GFR-binding peptide
  MOD_RES (1), (3): Xaa is C or S
XGXSRVVMNEYQKYIVNSSDDIYLVSIPSLKT

SEQ ID NO: 59837 - protein, 30 aa, Artificial Sequence
  Cyclic GFR-binding peptide
  MOD_RES (28), (29): Xaa is C or S
MNEYQKYIVNNSSDIYLVSIPSLKTPAXXA

SEQ ID NO: 59838 - protein, 33 aa, Artificial Sequence
  Cyclic GFR-binding peptide
  MOD_RES (27), (28): Xaa is C or S
MEYKFKVKPKRGVLYLISIPELAQPVXXPAASA

SEQ ID NO: 59839 - protein, 24 aa, Artificial Sequence
  Cyclic GFR-binding peptide
VMEYKFKVKPTRGVLYLISIPELD

SEQ ID NO: 59840 - protein, 33 aa, Artificial Sequence; identical to SEQ ID NO: 16954
  Cyclic GFR-binding peptide
  MOD_RES (1), (3): Xaa is C or S

SEQ ID NO: 59841 - protein, 40 aa, Artificial Sequence; identical to SEQ ID NO: 16955
  Cyclic GFR-binding peptide
  MOD_RES (2), (4), (36), (37): Xaa is C or S

SEQ ID NO: 59842 - protein, 33 aa, Artificial Sequence; identical to SEQ ID NO: 16956
  Cyclic GFR-binding peptide
  MOD_RES (32), (32): Xaa is C or S

SEQ ID NO: 59843 - protein, 31 aa, Artificial Sequence
  Cyclic GFR-binding peptide
  MOD_RES (2), (2): Xaa is C or S
GXAEVVMDYHYKLVVNNAADKYLISIPSLRA

SEQ ID NO: 59844 - protein, 30 aa, Artificial Sequence
  Cyclic GFR-binding peptide
  MOD_RES (2), (4): Xaa is C or S
HXGXAKVVMNEYKFKIVNNSSDLYLVSIPE

SEQ ID NO: 59845 - protein, 27 aa, Artificial Sequence
  Cyclic GFR-binding peptide
SVAMGRYKKLYTVVGKDFYLISIANLK

SEQ ID NO: 59846 - protein, 39 aa, Artificial Sequence; identical to SEQ ID NO: 16961
  Cyclic GFR-binding peptide
  MOD_RES (2), (34): Xaa is C or S

SEQ ID NO: 59847 - protein, 28 aa, Artificial Sequence
  Cyclic GFR-binding peptide
VIMEYKFKVKPKRGVLYLISIPELAQPV

SEQ ID NO: 59848 - protein, 33 aa, Artificial Sequence
  Cyclic GFR-binding peptide
  MOD_RES (2), (4): Xaa is C or S
RXGXESVAMGRYKKLYTVVGKDFYLISIANLKT

SEQ ID NO: 59849 - protein, 31 aa, Artificial Sequence
  Cyclic GFR-binding peptide
  MOD_RES (2), (4): Xaa is C or S
RXGXAEVVMDRYKKLVVNNAADFYLISIANL

SEQ ID NO: 59850 - protein, 24 aa, Artificial Sequence
  Cyclic GFR-binding peptide
MGEEYQKYTPVGMDDIYLVSIPSL

SEQ ID NO: 59851 - protein, 32 aa, Artificial Sequence
  Cyclic GFR-binding peptide
  MOD_RES (1), (3): Xaa is C or S
XKXSKVIMEYQKYIKPTKGIIYLISIPSLDQS

SEQ ID NO: 59852 - protein, 30 aa, Artificial Sequence
  Cyclic GFR-binding peptide
  MOD_RES (26), (27): Xaa is C or S
EYQKYIVNSSDDIYLVSIPSLQTPAXXPKP

SEQ ID NO: 59853 - protein, 25 aa, Artificial Sequence
  Cyclic GFR-binding peptide
VVMNEYQKYIVNNSSDIYLVSIPSL

SEQ ID NO: 59854 - protein, 29 aa, Artificial Sequence
  Cyclic GFR-binding peptide
  MOD_RES (1), (1): Xaa is C or S
XARVVMNEYKFKIVNSSDDLYLVSIPELQ

SEQ ID NO: 59855 - protein, 29 aa, Artificial Sequence
  Cyclic GFR-binding peptide
EAVSMGEEYQKYTPVGMDDIYLVSIPSLK

SEQ ID NO: 59856 - protein, 29 aa, Artificial Sequence
  Cyclic GFR-binding peptide
  MOD_RES (1), (3): Xaa is C or S
XGXARVVMNEYKFKIVNSSDDLYLVSIPE

SEQ ID NO: 59857 - protein, 22 aa, Artificial Sequence
  Cyclic GFR-binding peptide
EEYKFKVVKDYEDLYLMSIPEL

SEQ ID NO: 59858 - protein, 32 aa, Artificial Sequence
  Cyclic GFR-binding peptide
  MOD_RES (30), (31): Xaa is C or S
VVMNEYQKYIVNNSSDIYLVSIPSLKTPAXXA

SEQ ID NO: 59859 - protein, 22 aa, Artificial Sequence
  Cyclic GFR-binding peptide
EYQKYTPVGMDDIYLVSIPSLK

SEQ ID NO: 59860 - protein, 37 aa, Artificial Sequence; identical to SEQ ID NO: 16969
  Cyclic GFR-binding peptide
  MOD_RES (1), (3), (34), (35): Xaa is C or S

SEQ ID NO: 59861 - protein, 31 aa, Artificial Sequence
  Cyclic GFR-binding peptide
  MOD_RES (2), (2): Xaa is C or S
GXGEVVMDEYQKYVVKENEDIYLMSIPSLET

SEQ ID NO: 59862 - protein, 30 aa, Artificial Sequence
  Cyclic GFR-binding peptide
  MOD_RES (1), (3): Xaa is C or S
XGXGEVVMEEYQKYVVKDYEDIYLMSIPSL

SEQ ID NO: 59863 - protein, 38 aa, Artificial Sequence; identical to SEQ ID NO: 16974
  Cyclic GFR-binding peptide
  MOD_RES (32), (32): Xaa is C or S

SEQ ID NO: 59864 - protein, 33 aa, Artificial Sequence; identical to SEQ ID NO: 16976
  Cyclic GFR-binding peptide
  MOD_RES (1), (32), (33): Xaa is C or S

SEQ ID NO: 59865 - protein, 21 aa, Artificial Sequence
  Cyclic GFR-binding peptide
EYQKYVVKENEDIYLMSIPSL

SEQ ID NO: 59866 - protein, 26 aa, Artificial Sequence
  Cyclic GFR-binding peptide
  MOD_RES (26), (26): Xaa is C or S
EYQKYIVNSSDDIYLVSIPSLKTPAX

SEQ ID NO: 59867 - protein, 32 aa, Artificial Sequence
  Cyclic GFR-binding peptide
  MOD_RES (29), (29): Xaa is C or S
VMNEYQKYIVNSSDDIYLVSIPSLKTPAXTPK

SEQ ID NO: 59868 - protein, 35 aa, Artificial Sequence; identical to SEQ ID NO: 16982
  Cyclic GFR-binding peptide
  MOD_RES (2), (33), (34): Xaa is C or S

SEQ ID NO: 59869 - protein, 31 aa, Artificial Sequence
  Cyclic GFR-binding peptide
  MOD_RES (2), (2): Xaa is C or S
GXARVVMNEYQKYIVNSSDDIYLVSIPSLQT

SEQ ID NO: 59870 - protein, 31 aa, Artificial Sequence
  Cyclic GFR-binding peptide
  MOD_RES (26), (27): Xaa is C or S
EYKFKVVNNAADLYLISIPELRAPVXXSAPA

SEQ ID NO: 59871 - protein, 38 aa, Artificial Sequence; identical to SEQ ID NO: 16985
  Cyclic GFR-binding peptide
  MOD_RES (2), (34), (35): Xaa is C or S

SEQ ID NO: 59872 - protein, 30 aa, Artificial Sequence
  Cyclic GFR-binding peptide
  MOD_RES (29), (30): Xaa is C or S
VMEEYKFKVVKDYEDLYLMSIPELETPVXX

SEQ ID NO: 59873 - protein, 30 aa, Artificial Sequence
  Cyclic GFR-binding peptide
  MOD_RES (29), (30): Xaa is C or S
VVMEYQKYVKPTRGVIYLISIPSLDQPVXX

SEQ ID NO: 59874 - protein, 38 aa, Artificial Sequence; identical to SEQ ID NO: 16987
  Cyclic GFR-binding peptide
  MOD_RES (32), (33): Xaa is C or S

SEQ ID NO: 59875 - protein, 32 aa, Artificial Sequence; identical to SEQ ID NO: 16989
  Cyclic GFR-binding peptide
  MOD_RES (1), (1): Xaa is C or S

SEQ ID NO: 59876 - protein, 31 aa, Artificial Sequence
  Cyclic GFR-binding peptide
  MOD_RES (30), (31): Xaa is C or S
VVMDEYKFKVVKENEDLYLMSIPELETPVXX

SEQ ID NO: 59877 - protein, 34 aa, Artificial Sequence
  Cyclic GFR-binding peptide
  MOD_RES (1), (3): Xaa is C or S
XGXEAVSMGEEYKFKTPVGMDDLYLVSIPELKTP

SEQ ID NO: 59878 - protein, 35 aa, Artificial Sequence; identical to SEQ ID NO: 16992
  Cyclic GFR-binding peptide
  MOD_RES (32), (32): Xaa is C or S

SEQ ID NO: 59879 - protein, 31 aa, Artificial Sequence
  Cyclic GFR-binding peptide
  MOD_RES (28), (29): Xaa is C or S
MGRYKKLYTVVGKDFYLISIANLKTPVXXAK

SEQ ID NO: 59880 - protein, 38 aa, Artificial Sequence; identical to SEQ ID NO: 16993
  Cyclic GFR-binding peptide
  MOD_RES (2), (33), (34): Xaa is C or S

SEQ ID NO: 59881 - protein, 28 aa, Artificial Sequence
  Cyclic GFR-binding peptide
ESVAMGEYQKYYTVVGKDIYLISIPSLK

SEQ ID NO: 59882 - protein, 36 aa, Artificial Sequence; identical to SEQ ID NO: 16997
  Cyclic GFR-binding peptide
  MOD_RES (32), (33): Xaa is C or S

SEQ ID NO: 59883 - protein, 29 aa, Artificial Sequence
  Cyclic GFR-binding peptide
VVMNEYKFKIVNSSDDLYLVSIPELKTPA

SEQ ID NO: 59884 - protein, 33 aa, Artificial Sequence
  Cyclic GFR-binding peptide
  MOD_RES (27), (28): Xaa is C or S
EEYKFKTPVGMDDLYLVSIPELKTPVXXAKGVK

SEQ ID NO: 59885 - protein, 38 aa, Artificial Sequence; identical to SEQ ID NO: 16998
  Cyclic GFR-binding peptide
  MOD_RES (1), (3), (34), (35): Xaa is C or S

SEQ ID NO: 59886 - protein, 29 aa, Artificial Sequence
  Cyclic GFR-binding peptide
  MOD_RES (29), (29): Xaa is C or S
VMDRYKKLVVNNAADFYLISIANLRAPVX

SEQ ID NO: 59887 - protein, 31 aa, Artificial Sequence
  Cyclic GFR-binding peptide
  MOD_RES (29), (30): Xaa is C or S
VMDEYKFKVVNNAADLYLISIPELRAPVXXS

SEQ ID NO: 59888 - protein, 29 aa, Artificial Sequence
  Cyclic GFR-binding peptide
SRVIMEYKFKVKPKRGVLYLISIPELAQP

SEQ ID NO: 59889 - protein, 33 aa, Artificial Sequence
  Cyclic GFR-binding peptide
  MOD_RES (28), (29): Xaa is C or S
IMEYQKYVKPKRGVIYLISIPSLAQPVXXPAAS

SEQ ID NO: 59890 - protein, 28 aa, Artificial Sequence
  Cyclic GFR-binding peptide
  MOD_RES (1), (3): Xaa is C or S
XKXSKVIMEYKFKIKPTKGILYLISIPE

SEQ ID NO: 59891 - protein, 32 aa, Artificial Sequence
  Cyclic GFR-binding peptide
  MOD_RES (30), (31): Xaa is C or S
RVIMEYQKYVKPKRGVIYLISIPSLAQPVXXP

SEQ ID NO: 59892 - protein, 24 aa, Artificial Sequence
  Cyclic GFR-binding peptide
MNEYQKYIVNSSDDIYLVSIPSLK

SEQ ID NO: 59893 - protein, 21 aa, Artificial Sequence
  Cyclic GFR-binding peptide
MEYQKYVKPTRGVIYLISIPS

SEQ ID NO: 59894 - protein, 39 aa, Artificial Sequence; identical to SEQ ID NO: 17008
  Cyclic GFR-binding peptide
  MOD_RES (2), (34), (35): Xaa is C or S

SEQ ID NO: 59895 - protein, 27 aa, Artificial Sequence
  Cyclic GFR-binding peptide
  MOD_RES (27), (27): Xaa is C or S
DEYKFKVVKENEDLYLMSIPELETPVX

SEQ ID NO: 59896 - protein, 31 aa, Artificial Sequence
  Cyclic GFR-binding peptide
  MOD_RES (1), (1): Xaa is C or S
XARVVMNEYKFKIVNSSDDLYLVSIPELQTP

SEQ ID NO: 59897 - protein, 39 aa, Artificial Sequence; identical to SEQ ID NO: 17012
  Cyclic GFR-binding peptide
  MOD_RES (2), (4), (35), (36): Xaa is C or S

SEQ ID NO: 59898 - protein, 34 aa, Artificial Sequence
  Cyclic GFR-binding peptide
  MOD_RES (30), (31): Xaa is C or S
VVMNEYKFKIVNNSSDLYLVSIPELKTPAXXAKP

SEQ ID NO: 59899 - protein, 27 aa, Artificial Sequence
  Cyclic GFR-binding peptide
VVMNEYQKYIVNNSSDIYLVSIPSLKT

SEQ ID NO: 59900 - protein, 40 aa, Artificial Sequence; identical to SEQ ID NO: 17014
  Cyclic GFR-binding peptide
  MOD_RES (1), (34), (35): Xaa is C or S

SEQ ID NO: 59901 - protein, 34 aa, Artificial Sequence
  Cyclic GFR-binding peptide
  MOD_RES (30), (30): Xaa is C or S
VVMNEYQKYIVNSSDDIYLVSIPSLKTPAXTPKT

SEQ ID NO: 59902 - protein, 24 aa, Artificial Sequence
  Cyclic GFR-binding peptide
EYKFKVKPKRGVLYLISIPELAQP

SEQ ID NO: 59903 - protein, 32 aa, Artificial Sequence
  Cyclic GFR-binding peptide
  MOD_RES (27), (28): Xaa is C or S
NEYQKYIVNSSDDIYLVSIPSLKTPAXXPKPV

SEQ ID NO: 59904 - protein, 38 aa, Artificial Sequence; identical to SEQ ID NO: 17017
  Cyclic GFR-binding peptide
  MOD_RES (2), (33), (34): Xaa is C or S

SEQ ID NO: 59905 - protein, 37 aa, Artificial Sequence; identical to SEQ ID NO: 17018
  Cyclic GFR-binding peptide
  MOD_RES (31), (32): Xaa is C or S

SEQ ID NO: 59906 - protein, 28 aa, Artificial Sequence
  Cyclic GFR-binding peptide
  MOD_RES (1), (1): Xaa is C or S
XESVAMGRYKKLYTVVGKDFYLISIANL

SEQ ID NO: 59907 - protein, 31 aa, Artificial Sequence; identical to SEQ ID NO: 17025
  Cyclic GFR-binding peptide

SEQ ID NO: 59908 - protein, 38 aa, Artificial Sequence; identical to SEQ ID NO: 17024
  Cyclic GFR-binding peptide
  MOD_RES (2), (34), (35): Xaa is C or S

SEQ ID NO: 59909 - protein, 25 aa, Artificial Sequence
  Cyclic GFR-binding peptide
EEYKFKVVKDYEDLYLMSIPELETP

SEQ ID NO: 59910 - protein, 40 aa, Artificial Sequence; identical to SEQ ID NO: 17027
  Cyclic GFR-binding peptide
  MOD_RES (2), (4), (35), (36): Xaa is C or S

SEQ ID NO: 59911 - protein, 27 aa, Artificial Sequence
  Cyclic GFR-binding peptide
  MOD_RES (27), (27): Xaa is C or S
NEYQKYIVNSSDDIYLVSIPSLQTPAX

SEQ ID NO: 59912 - protein, 37 aa, Artificial Sequence; identical to SEQ ID NO: 17028
  Cyclic GFR-binding peptide
  MOD_RES (32), (33): Xaa is C or S

SEQ ID NO: 59913 - protein, 30 aa, Artificial Sequence
  Cyclic GFR-binding peptide
  MOD_RES (30), (30): Xaa is C or S
VVMEEYQKYVVKDYEDIYLMSIPSLETPVX

SEQ ID NO: 59914 - protein, 31 aa, Artificial Sequence; identical to SEQ ID NO: 17030
  Cyclic GFR-binding peptide

SEQ ID NO: 59915 - protein, 38 aa, Artificial Sequence; identical to SEQ ID NO: 17032
  Cyclic GFR-binding peptide
  MOD_RES (32), (33): Xaa is C or S

SEQ ID NO: 59916 - protein, 24 aa, Artificial Sequence
  Cyclic GFR-binding peptide
RYKKLYTVVGKDFYLISIANLKTP

SEQ ID NO: 59917 - protein, 38 aa, Artificial Sequence; identical to SEQ ID NO: 17035
  Cyclic GFR-binding peptide
  MOD_RES (1), (3), (35), (36): Xaa is C or S

SEQ ID NO: 59918 - protein, 33 aa, Artificial Sequence
  Cyclic GFR-binding peptide
  MOD_RES (27), (28): Xaa is C or S
GEYQKYYTVVGKDIYLISIPSLKTPVXXAKSAK

SEQ ID NO: 59919 - protein, 37 aa, Artificial Sequence; identical to SEQ ID NO: 17036
  Cyclic GFR-binding peptide
  MOD_RES (1), (3), (35), (36): Xaa is C or S

SEQ ID NO: 59920 - protein, 40 aa, Artificial Sequence; identical to SEQ ID NO: 17038
  Cyclic GFR-binding peptide
  MOD_RES (1), (3), (35), (36): Xaa is C or S

SEQ ID NO: 59921 - protein, 34 aa, Artificial Sequence
  Cyclic GFR-binding peptide
  MOD_RES (2), (4): Xaa is C or S
RXGXAEVVMDYHYKLVVNNAADKYLISIPSLRAP

SEQ ID NO: 59922 - protein, 27 aa, Artificial Sequence
  Cyclic GFR-binding peptide
  MOD_RES (26), (27): Xaa is C or S
RYKKLVVNNAADFYLISIANLRAPVXX

SEQ ID NO: 59923 - protein, 42 aa, Artificial Sequence; identical to SEQ ID NO: 17039
  Cyclic GFR-binding peptide
  MOD_RES (2), (4), (36), (37): Xaa is C or S

SEQ ID NO: 59924 - protein, 31 aa, Artificial Sequence; identical to SEQ ID NO: 17040
  Cyclic GFR-binding peptide
  MOD_RES (31), (31): Xaa is C or S

SEQ ID NO: 59925 - protein, 27 aa, Artificial Sequence
  Cyclic GFR-binding peptide
  MOD_RES (26), (27): Xaa is C or S
YHYKLVVNNAADKYLISIPSLRAPVXX

SEQ ID NO: 59926 - protein, 28 aa, Artificial Sequence
  Cyclic GFR-binding peptide
VVMNEYKFKIVNSSDDLYLVSIPELQTP

SEQ ID NO: 59927 - protein, 22 aa, Artificial Sequence
  Cyclic GFR-binding peptide
MGEYQKYYTVVGKDIYLISIPS

SEQ ID NO: 59928 - protein, 30 aa, Artificial Sequence
  Cyclic GFR-binding peptide
  MOD_RES (1), (1): Xaa is C or S
XESVAMGYHYKLYTVVGKDKYLISIPSLKT

SEQ ID NO: 59929 - protein, 36 aa, Artificial Sequence; identical to SEQ ID NO: 17046
  Cyclic GFR-binding peptide
  MOD_RES (1), (3), (34), (35): Xaa is C or S

SEQ ID NO: 59930 - protein, 30 aa, Artificial Sequence
  Cyclic GFR-binding peptide
AEVVMDYHYKLVVNNAADKYLISIPSLRAP

SEQ ID NO: 59931 - protein, 29 aa, Artificial Sequence
  Cyclic GFR-binding peptide
  MOD_RES (1), (3): Xaa is C or S
XGXESVAMGRYKKLYTVVGKDFYLISIAN

SEQ ID NO: 59932 - protein, 28 aa, Artificial Sequence
  Cyclic GFR-binding peptide
SVAMGYHYKLYTVVGKDKYLISIPSLKT

SEQ ID NO: 59933 - protein, 40 aa, Artificial Sequence; identical to SEQ ID NO: 17053
  Cyclic GFR-binding peptide
  MOD_RES (1), (3), (36), (37): Xaa is C or S

SEQ ID NO: 59934 - protein, 33 aa, Artificial Sequence; identical to SEQ ID NO: 17058
  Cyclic GFR-binding peptide
  MOD_RES (1), (33): Xaa is C or S

SEQ ID NO: 59935 - protein, 34 aa, Artificial Sequence; identical to SEQ ID NO: 17059
  Cyclic GFR-binding peptide
  MOD_RES (2), (4): Xaa is C or S

SEQ ID NO: 59936 - protein, 21 aa, Artificial Sequence
  Cyclic GFR-binding peptide
DEYKFKVVNNAADLYLISIPE

SEQ ID NO: 59937 - protein, 33 aa, Artificial Sequence
  Cyclic GFR-binding peptide
  MOD_RES (28), (29): Xaa is C or S
GEEYQKYTPVGMDDIYLVSIPSLKTPVXXAKGV

SEQ ID NO: 59938 - protein, 29 aa, Artificial Sequence
  Cyclic GFR-binding peptide
VAMGYHYKLYTVVGKDKYLISIPSLKTPV

SEQ ID NO: 59939 - protein, 38 aa, Artificial Sequence; identical to SEQ ID NO: 17066
  Cyclic GFR-binding peptide
  MOD_RES (2), (34): Xaa is C or S

SEQ ID NO: 59940 - protein, 35 aa, Artificial Sequence; identical to SEQ ID NO: 20677
  Cyclic GFR-binding peptide
  MOD_RES (2), (4): Xaa is C or S

SEQ ID NO: 59941 - protein, 32 aa, Artificial Sequence
  Cyclic GFR-binding peptide
  MOD_RES (28), (29): Xaa is C or S
GEEYQKYTPVGMDDIYLVSIPSLKTPVXXAKG

SEQ ID NO: 59942 - protein, 34 aa, Artificial Sequence; identical to SEQ ID NO: 17071
  Cyclic GFR-binding peptide
  MOD_RES (1), (33), (34): Xaa is C or S

SEQ ID NO: 59943 - protein, 34 aa, Artificial Sequence; identical to SEQ ID NO: 17074
  Cyclic GFR-binding peptide
  MOD_RES (32), (33): Xaa is C or S

SEQ ID NO: 59944 - protein, 37 aa, Artificial Sequence; identical to SEQ ID NO: 17076
  Cyclic GFR-binding peptide
  MOD_RES (31), (32): Xaa is C or S

SEQ ID NO: 59945 - protein, 25 aa, Artificial Sequence
  Cyclic GFR-binding peptide
MGEEYKFKTPVGMDDLYLVSIPELK

SEQ ID NO: 59946 - protein, 30 aa, Artificial Sequence
  Cyclic GFR-binding peptide
  MOD_RES (29), (30): Xaa is C or S
VMDEYQKYVVKENEDIYLMSIPSLETPVXX

SEQ ID NO: 59947 - protein, 24 aa, Artificial Sequence
  Cyclic GFR-binding peptide
EEYKFKTPVGMDDLYLVSIPELKT

SEQ ID NO: 59948 - protein, 28 aa, Artificial Sequence
  Cyclic GFR-binding peptide
  MOD_RES (27), (28): Xaa is C or S
MEYQKYVKPKRGVIYLISIPSLAQPVXX

SEQ ID NO: 59949 - protein, 40 aa, Artificial Sequence; identical to SEQ ID NO: 17083
  Cyclic GFR-binding peptide
  MOD_RES (2), (34), (35): Xaa is C or S

SEQ ID NO: 59950 - protein, 29 aa, Artificial Sequence
  Cyclic GFR-binding peptide
  MOD_RES (27), (27): Xaa is C or S
NEYQKYIVNSSDDIYLVSIPSLKTPAXTP

SEQ ID NO: 59951 - protein, 24 aa, Artificial Sequence
  Cyclic GFR-binding peptide
NEYQKYIVNSSDDIYLVSIPSLQT

SEQ ID NO: 59952 - protein, 34 aa, Artificial Sequence; identical to SEQ ID NO: 17086
  Cyclic GFR-binding peptide
  MOD_RES (1), (33), (34): Xaa is C or S

SEQ ID NO: 59953 - protein, 36 aa, Artificial Sequence
  Cyclic GFR-binding peptide
  MOD_RES (30), (31): Xaa is C or S
KVIMEYKFKIKPTKGILYLISIPELDQSVXXPSASA

SEQ ID NO: 59954 - protein, 35 aa, Artificial Sequence; identical to SEQ ID NO: 17089
  Cyclic GFR-binding peptide
  MOD_RES (2), (4): Xaa is C or S

SEQ ID NO: 59955 - protein, 35 aa, Artificial Sequence
  Cyclic GFR-binding peptide
  MOD_RES (29), (30): Xaa is C or S
MGEEYQKYTPVGMDDIYLVSIPSLKTPVXXAKGVK

SEQ ID NO: 59956 - protein, 24 aa, Artificial Sequence
  Cyclic GFR-binding peptide
VIMEYKFKVKPKRGVLYLISIPEL

SEQ ID NO: 59957 - protein, 35 aa, Artificial Sequence; identical to SEQ ID NO: 17095
  Cyclic GFR-binding peptide
  MOD_RES (1), (3), (35): Xaa is C or S

SEQ ID NO: 59958 - protein, 28 aa, Artificial Sequence
  Cyclic GFR-binding peptide
  MOD_RES (2), (2): Xaa is C or S
GXAEVVMDRYKKLVVNNAADFYLISIAN

SEQ ID NO: 59959 - protein, 26 aa, Artificial Sequence
  Cyclic GFR-binding peptide
KVVMNEYQKYIVNNSSDIYLVSIPSL

SEQ ID NO: 59960 - protein, 41 aa, Artificial Sequence; identical to SEQ ID NO: 17101
  Cyclic GFR-binding peptide
  MOD_RES (1), (3), (35), (36): Xaa is C or S

SEQ ID NO: 59961 - protein, 27 aa, Artificial Sequence
  Cyclic GFR-binding peptide
RVVMNEYKFKIVNSSDDLYLVSIPELK

SEQ ID NO: 59962 - protein, 39 aa, Artificial Sequence; identical to SEQ ID NO: 17117
  Cyclic GFR-binding peptide
  MOD_RES (2), (33), (34): Xaa is C or S

SEQ ID NO: 59963 - protein, 32 aa, Artificial Sequence
  Cyclic GFR-binding peptide
  MOD_RES (29), (30): Xaa is C or S
VIMEYQKYIKPTKGIIYLISIPSLDQSVXXPS

SEQ ID NO: 59964 - protein, 33 aa, Artificial Sequence
  Cyclic GFR-binding peptide
  MOD_RES (28), (29): Xaa is C or S
MGEYQKYYTVVGKDIYLISIPSLKTPVXXAKSA

SEQ ID NO: 59965 - protein, 35 aa, Artificial Sequence
  Cyclic GFR-binding peptide
  MOD_RES (29), (30): Xaa is C or S
VMDEYQKYVVKENEDIYLMSIPSLETPVXXAKPIK

SEQ ID NO: 59966 - protein, 30 aa, Artificial Sequence
  Cyclic GFR-binding peptide
  MOD_RES (29), (30): Xaa is C or S
VMNEYQKYIVNNSSDIYLVSIPSLKTPAXX

SEQ ID NO: 59967 - protein, 36 aa, Artificial Sequence
  Cyclic GFR-binding peptide
  MOD_RES (30), (30): Xaa is C or S
VVMNEYKFKIVNSSDDLYLVSIPELKTPAXTPKTVH

SEQ ID NO: 59968 - protein, 39 aa, Artificial Sequence; identical to SEQ ID NO: 17121
  Cyclic GFR-binding peptide
  MOD_RES (1), (33), (34): Xaa is C or S

SEQ ID NO: 59969 - protein, 28 aa, Artificial Sequence
  Cyclic GFR-binding peptide
SKVIMEYQKYIKPTKGIIYLISIPSLDQ

SEQ ID NO: 59970 - protein, 33 aa, Artificial Sequence; identical to SEQ ID NO: 17126
  Cyclic GFR-binding peptide
  MOD_RES (1), (3): Xaa is C or S

SEQ ID NO: 59971 - protein, 29 aa, Artificial Sequence
  Cyclic GFR-binding peptide
EVVMEEYKFKVVKDYEDLYLMSIPELETP

SEQ ID NO: 59972 - protein, 28 aa, Artificial Sequence
  Cyclic GFR-binding peptide
  MOD_RES (2), (2): Xaa is C or S
GXGEVVMEEYQKYVVKDYEDIYLMSIPS

SEQ ID NO: 59973 - protein, 32 aa, Artificial Sequence
  Cyclic GFR-binding peptide
  MOD_RES (1), (3): Xaa is C or S
XGXAEVVMDYHYKLVVNNAADKYLISIPSLRA

SEQ ID NO: 59974 - protein, 35 aa, Artificial Sequence; identical to SEQ ID NO: 17135
  Cyclic GFR-binding peptide
  MOD_RES (32), (33): Xaa is C or S

SEQ ID NO: 59975 - protein, 28 aa, Artificial Sequence
  Cyclic GFR-binding peptide
  MOD_RES (27), (28): Xaa is C or S
NEYQKYIVNSSDDIYLVSIPSLKTPAXX

SEQ ID NO: 59976 - protein, 24 aa, Artificial Sequence
  Cyclic GFR-binding peptide
RYKKLVVNNAADFYLISIANLRAP

SEQ ID NO: 59977 - protein, 27 aa, Artificial Sequence
  Cyclic GFR-binding peptide
VVMEEYKFKVVKDYEDLYLMSIPELET

SEQ ID NO: 59978 - protein, 27 aa, Artificial Sequence
  Cyclic GFR-binding peptide
VVMNEYQKYIVNSSDDIYLVSIPSLKT

SEQ ID NO: 59979 - protein, 23 aa, Artificial Sequence
  Cyclic GFR-binding peptide
NEYQKYIVNNSSDIYLVSIPSLK

SEQ ID NO: 59980 - protein, 28 aa, Artificial Sequence
  Cyclic GFR-binding peptide
  MOD_RES (1), (1): Xaa is C or S
XARVVMNEYQKYIVNSSDDIYLVSIPSL

SEQ ID NO: 59981 - protein, 33 aa, Artificial Sequence
  Cyclic GFR-binding peptide
  MOD_RES (30), (31): Xaa is C or S
RVIMEYKFKVKPKRGVLYLISIPELAQPVXXPA

SEQ ID NO: 59982 - protein, 38 aa, Artificial Sequence; identical to SEQ ID NO: 17145
  Cyclic GFR-binding peptide
  MOD_RES (1), (32), (33): Xaa is C or S

SEQ ID NO: 59983 - protein, 32 aa, Artificial Sequence
  Cyclic GFR-binding peptide
  MOD_RES (2), (4): Xaa is C or S
SXKXSRVIMEYKFKVKPKRGVLYLISIPELAQ

SEQ ID NO: 59984 - protein, 32 aa, Artificial Sequence
  Cyclic GFR-binding peptide
  MOD_RES (30), (31): Xaa is C or S
KVIMEYKFKIKPTKGILYLISIPELDQSVXXP

SEQ ID NO: 59985 - protein, 33 aa, Artificial Sequence
  Cyclic GFR-binding peptide
  MOD_RES (27), (28): Xaa is C or S
NEYQKYIVNNSSDIYLVSIPSLKTPAXXAKPVA

SEQ ID NO: 59986 - protein, 35 aa, Artificial Sequence
  Cyclic GFR-binding peptide
  MOD_RES (30), (31): Xaa is C or S
VVMNEYKFKIVNSSDDLYLVSIPELKTPAXXPKPV

SEQ ID NO: 59987 - protein, 27 aa, Artificial Sequence
  Cyclic GFR-binding peptide
MNEYQKYIVNSSDDIYLVSIPSLKTPA

SEQ ID NO: 59988 - protein, 23 aa, Artificial Sequence
  Cyclic GFR-binding peptide
EYQKYIKPTKGIIYLISIPSLDQ

SEQ ID NO: 59989 - protein, 35 aa, Artificial Sequence; identical to SEQ ID NO: 17150
  Cyclic GFR-binding peptide
  MOD_RES (2), (33), (34): Xaa is C or S

SEQ ID NO: 59990 - protein, 29 aa, Artificial Sequence
  Cyclic GFR-binding peptide
VVMNEYQKYIVNSSDDIYLVSIPSLQTPA

SEQ ID NO: 59991 - protein, 31 aa, Artificial Sequence
  Cyclic GFR-binding peptide
  MOD_RES (1), (1): Xaa is C or S
XSRVVMNEYKFKIVNSSDDLYLVSIPELKTP

SEQ ID NO: 59992 - protein, 32 aa, Artificial Sequence
  Cyclic GFR-binding peptide
  MOD_RES (2), (4): Xaa is C or S
RXGXAEVVMDYHYKLVVNNAADKYLISIPSLR

SEQ ID NO: 59993 - protein, 30 aa, Artificial Sequence
  Cyclic GFR-binding peptide
  MOD_RES (27), (28): Xaa is C or S
DEYKFKVVNNAADLYLISIPELRAPVXXSA

SEQ ID NO: 59994 - protein, 28 aa, Artificial Sequence
  Cyclic GFR-binding peptide
  MOD_RES (1), (1): Xaa is C or S
XSRVIMEYKFKVKPKRGVLYLISIPELA

SEQ ID NO: 59995 - protein, 31 aa, Artificial Sequence
  Cyclic GFR-binding peptide
  MOD_RES (29), (30): Xaa is C or S
VMNEYKFKIVNSSDDLYLVSIPELKTPAXXP

SEQ ID NO: 59996 - protein, 24 aa, Artificial Sequence
  Cyclic GFR-binding peptide
MGEYQKYYTVVGKDIYLISIPSLK

SEQ ID NO: 59997 - protein, 36 aa, Artificial Sequence; identical to SEQ ID NO: 17164
  Cyclic GFR-binding peptide
  MOD_RES (1), (33): Xaa is C or S

SEQ ID NO: 59998 - protein, 38 aa, Artificial Sequence; identical to SEQ ID NO: 17168
  Cyclic GFR-binding peptide
  MOD_RES (1), (33), (34): Xaa is C or S

SEQ ID NO: 59999 - protein, 26 aa, Artificial Sequence
  Cyclic GFR-binding peptide
MNEYKFKIVNNSSDLYLVSIPELKTP

SEQ ID NO: 60000 - protein, 28 aa, Artificial Sequence
  Cyclic GFR-binding peptide
VVMDYHYKLVVNNAADKYLISIPSLRAP

SEQ ID NO: 60001 - protein, 30 aa, Artificial Sequence
  Cyclic GFR-binding peptide
  MOD_RES (1), (3): Xaa is C or S
XGXAKVVMNEYQKYIVNNSSDIYLVSIPSL

SEQ ID NO: 60002 - protein, 27 aa, Artificial Sequence
  Cyclic GFR-binding peptide
  MOD_RES (26), (27): Xaa is C or S
RYKKLYTVVGKDFYLISIANLKTPVXX

SEQ ID NO: 60003 - protein, 37 aa, Artificial Sequence; identical to SEQ ID NO: 17172
  Cyclic GFR-binding peptide
  MOD_RES (2), (4), (36), (37): Xaa is C or S

SEQ ID NO: 60004 - protein, 34 aa, Artificial Sequence; identical to SEQ ID NO: 17174
  Cyclic GFR-binding peptide
  MOD_RES (32), (33): Xaa is C or S

SEQ ID NO: 60005 - protein, 27 aa, Artificial Sequence
  Cyclic GFR-binding peptide
  MOD_RES (27), (27): Xaa is C or S
DYHYKLVVNNAADKYLISIPSLRAPVX

SEQ ID NO: 60006 - protein, 36 aa, Artificial Sequence; identical to SEQ ID NO: 17175
  Cyclic GFR-binding peptide
  MOD_RES (1), (32), (33): Xaa is C or S

SEQ ID NO: 60007 - protein, 37 aa, Artificial Sequence; identical to SEQ ID NO: 17177
  Cyclic GFR-binding peptide
  MOD_RES (2), (4), (36), (37): Xaa is C or S

SEQ ID NO: 60008 - protein, 25 aa, Artificial Sequence
  Cyclic GFR-binding peptide
MGYHYKLYTVVGKDKYLISIPSLKT

SEQ ID NO: 60009 - protein, 33 aa, Artificial Sequence
  Cyclic GFR-binding peptide
  MOD_RES (2), (4): Xaa is C or S
RXGXEAVSMGEEYKFKTPVGMDDLYLVSIPELK

SEQ ID NO: 60010 - protein, 20 aa, Artificial Sequence
  Cyclic GFR-binding peptide
EYQKYVVKDYEDIYLMSIPS

SEQ ID NO: 60011 - protein, 37 aa, Artificial Sequence; identical to SEQ ID NO: 17180
  Cyclic GFR-binding peptide
  MOD_RES (33), (34): Xaa is C or S

SEQ ID NO: 60012 - protein, 33 aa, Artificial Sequence
  Cyclic GFR-binding peptide
  MOD_RES (28), (29): Xaa is C or S
GEEYKFKTPVGMDDLYLVSIPELKTPVXXAKGV

SEQ ID NO: 60013 - protein, 31 aa, Artificial Sequence
  Cyclic GFR-binding peptide
  MOD_RES (1), (1): Xaa is C or S
XAEVVMDEYKFKVVNNAADLYLISIPELRAP

SEQ ID NO: 60014 - protein, 37 aa, Artificial Sequence; identical to SEQ ID NO: 17190
  Cyclic GFR-binding peptide
  MOD_RES (32), (33): Xaa is C or S

SEQ ID NO: 60015 - protein, 28 aa, Artificial Sequence
  Cyclic GFR-binding peptide
  MOD_RES (26), (27): Xaa is C or S
EYKFKIVNNSSDLYLVSIPELKTPAXXA

SEQ ID NO: 60016 - protein, 24 aa, Artificial Sequence
  Cyclic GFR-binding peptide
EYQKYIVNSSDDIYLVSIPSLQTP

SEQ ID NO: 60017 - protein, 26 aa, Artificial Sequence
  Cyclic GFR-binding peptide
VMDEYKFKVVNNAADLYLISIPELRA

SEQ ID NO: 60018 - protein, 29 aa, Artificial Sequence
  Cyclic GFR-binding peptide
  MOD_RES (1), (1): Xaa is C or S
XGEVVMEEYKFKVVKDYEDLYLMSIPELE

SEQ ID NO: 60019 - protein, 43 aa, Artificial Sequence; identical to SEQ ID NO: 17195
  Cyclic GFR-binding peptide
  MOD_RES (2), (4), (37), (38): Xaa is C or S

SEQ ID NO: 60020 - protein, 34 aa, Artificial Sequence
  Cyclic GFR-binding peptide
  MOD_RES (29), (30): Xaa is C or S
AMGEYQKYYTVVGKDIYLISIPSLKTPVXXAKSA

SEQ ID NO: 60021 - protein, 21 aa, Artificial Sequence
  Cyclic GFR-binding peptide
GYHYKLYTVVGKDKYLISIPS

SEQ ID NO: 60022 - protein, 28 aa, Artificial Sequence
  Cyclic GFR-binding peptide
  MOD_RES (2), (2): Xaa is C or S
KXSRVIMEYQKYVKPKRGVIYLISIPSL

SEQ ID NO: 60023 - protein, 32 aa, Artificial Sequence; identical to SEQ ID NO: 17200
  Cyclic GFR-binding peptide
  MOD_RES (1), (1): Xaa is C or S

SEQ ID NO: 60024 - protein, 40 aa, Artificial Sequence; identical to SEQ ID NO: 17207
  Cyclic GFR-binding peptide
  MOD_RES (2), (34), (35): Xaa is C or S

SEQ ID NO: 60025 - protein, 32 aa, Artificial Sequence
  Cyclic GFR-binding peptide
  MOD_RES (2), (4): Xaa is C or S
SXKXSRVIMEYQKYVKPKRGVIYLISIPSLAQ

SEQ ID NO: 60026 - protein, 29 aa, Artificial Sequence
  Cyclic GFR-binding peptide
AAAAAAAAARYKKLYTVVGKDFYLISIAN

SEQ ID NO: 60027 - protein, 35 aa, Artificial Sequence
  Cyclic GFR-binding peptide
  MOD_RES (30), (31): Xaa is C or S
VAMGYHYKLYTVVGKDKYLISIPSLKTPVXXAKSA

SEQ ID NO: 60028 - protein, 30 aa, Artificial Sequence
  Cyclic GFR-binding peptide
  MOD_RES (2), (2): Xaa is C or S
GXESVAMGEYQKYYTVVGKDIYLISIPSLK

SEQ ID NO: 60029 - protein, 33 aa, Artificial Sequence
  Cyclic GFR-binding peptide
  MOD_RES (2), (4): Xaa is C or S
SXKXSKVVMEYQKYVKPTRGVIYLISIPSLDQP

SEQ ID NO: 60030 - protein, 26 aa, Artificial Sequence
  Cyclic GFR-binding peptide
VAMGYHYKLYTVVGKDKYLISIPSLK

SEQ ID NO: 60031 - protein, 31 aa, Artificial Sequence
  Cyclic GFR-binding peptide
  MOD_RES (1), (3): Xaa is C or S
XGXESVAMGRYKKLYTVVGKDFYLISIANLK

SEQ ID NO: 60032 - protein, 34 aa, Artificial Sequence; identical to SEQ ID NO: 17212
  Cyclic GFR-binding peptide
  MOD_RES (2), (4): Xaa is C or S

SEQ ID NO: 60033 - protein, 27 aa, Artificial Sequence
  Cyclic GFR-binding peptide
  MOD_RES (26), (27): Xaa is C or S
EYQKYVVKDYEDIYLMSIPSLETPVXX

SEQ ID NO: 60034 - protein, 30 aa, Artificial Sequence
  Cyclic GFR-binding peptide
  MOD_RES (26), (27): Xaa is C or S
EYQKYVKPKRGVIYLISIPSLAQPVXXPAA

SEQ ID NO: 60035 - protein, 36 aa, Artificial Sequence; identical to SEQ ID NO: 17216
  Cyclic GFR-binding peptide
  MOD_RES (2), (4), (36): Xaa is C or S

SEQ ID NO: 60036 - protein, 20 aa, Artificial Sequence
  Cyclic GFR-binding peptide
RYKKLYTVVGKDFYLISIAN

SEQ ID NO: 60037 - protein, 23 aa, Artificial Sequence
  Cyclic GFR-binding peptide
MEYKFKVKPTRGVLYLISIPELD

SEQ ID NO: 60038 - protein, 30 aa, Artificial Sequence
  Cyclic GFR-binding peptide
  MOD_RES (30), (30): Xaa is C or S
VVMNEYKFKIVNSSDDLYLVSIPELKTPAX

SEQ ID NO: 60039 - protein, 26 aa, Artificial Sequence
  Cyclic GFR-binding peptide
RVIMEYKFKVKPKRGVLYLISIPELA

SEQ ID NO: 60040 - protein, 31 aa, Artificial Sequence; identical to SEQ ID NO: 17219
  Cyclic GFR-binding peptide
  MOD_RES (31), (31): Xaa is C or S

SEQ ID NO: 60041 - protein, 25 aa, Artificial Sequence
  Cyclic GFR-binding peptide
EYQKYIVNSSDDIYLVSIPSLKTPA

SEQ ID NO: 60042 - protein, 27 aa, Artificial Sequence
  Cyclic GFR-binding peptide
SKVIMEYQKYIKPTKGIIYLISIPSLD

SEQ ID NO: 60043 - protein, 24 aa, Artificial Sequence
  Cyclic GFR-binding peptide
VMDEYQKYVVKENEDIYLMSIPSL

SEQ ID NO: 60044 - protein, 37 aa, Artificial Sequence; identical to SEQ ID NO: 17224
  Cyclic GFR-binding peptide
  MOD_RES (1), (32), (33): Xaa is C or S

SEQ ID NO: 60045 - protein, 35 aa, Artificial Sequence
  Cyclic GFR-binding peptide
  MOD_RES (30), (30): Xaa is C or S
VVMNEYQKYIVNSSDDIYLVSIPSLKTPAXTPKTV

SEQ ID NO: 60046 - protein, 23 aa, Artificial Sequence
  Cyclic GFR-binding peptide
YHYKLYTVVGKDKYLISIPSLKT

SEQ ID NO: 60047 - protein, 41 aa, Artificial Sequence; identical to SEQ ID NO: 17233
  Cyclic GFR-binding peptide
  MOD_RES (1), (3), (35), (36): Xaa is C or S

SEQ ID NO: 60048 - protein, 26 aa, Artificial Sequence
  Cyclic GFR-binding peptide
NEYQKYIVNSSDDIYLVSIPSLQTPA

SEQ ID NO: 60049 - protein, 31 aa, Artificial Sequence
  Cyclic GFR-binding peptide
  MOD_RES (27), (28): Xaa is C or S
DEYKFKVVKENEDLYLMSIPELETPVXXAKP

SEQ ID NO: 60050 - protein, 22 aa, Artificial Sequence
  Cyclic GFR-binding peptide
MDRYKKLVVNNAADFYLISIAN

SEQ ID NO: 60051 - protein, 30 aa, Artificial Sequence
  Cyclic GFR-binding peptide
  MOD_RES (1), (3): Xaa is C or S
XGXAKVVMNEYKFKIVNNSSDLYLVSIPEL

SEQ ID NO: 60052 - protein, 31 aa, Artificial Sequence
  Cyclic GFR-binding peptide
  MOD_RES (29), (29): Xaa is C or S
VMNEYKFKIVNSSDDLYLVSIPELKTPAXTP

SEQ ID NO: 60053 - protein, 30 aa, Artificial Sequence
  Cyclic GFR-binding peptide
  MOD_RES (30), (30): Xaa is C or S
VAMGRYKKLYTVVGKDFYLISIANLKTPVX

SEQ ID NO: 60054 - protein, 30 aa, Artificial Sequence
  Cyclic GFR-binding peptide
  MOD_RES (2), (2): Xaa is C or S
GXAEVVMDYHYKLVVNNAADKYLISIPSLR

SEQ ID NO: 60055 - protein, 27 aa, Artificial Sequence
  Cyclic GFR-binding peptide
  MOD_RES (26), (27): Xaa is C or S
YHYKLYTVVGKDKYLISIPSLKTPVXX

SEQ ID NO: 60056 - protein, 31 aa, Artificial Sequence
  Cyclic GFR-binding peptide
  MOD_RES (27), (28): Xaa is C or S
DRYKKLVVNNAADFYLISIANLRAPVXXSAP

SEQ ID NO: 60057 - protein, 39 aa, Artificial Sequence; identical to SEQ ID NO: 17245
  Cyclic GFR-binding peptide
  MOD_RES (1), (34), (35): Xaa is C or S

SEQ ID NO: 60058 - protein, 30 aa, Artificial Sequence
  Cyclic GFR-binding peptide
  MOD_RES (30), (30): Xaa is C or S
VVMNEYQKYIVNSSDDIYLVSIPSLQTPAX

SEQ ID NO: 60059 - protein, 31 aa, Artificial Sequence
  Cyclic GFR-binding peptide
  MOD_RES (30), (31): Xaa is C or S
VAMGYHYKLYTVVGKDKYLISIPSLKTPVXX

SEQ ID NO: 60060 - protein, 30 aa, Artificial Sequence; identical to SEQ ID NO: 1991
  Cyclic GFR-binding peptide

SEQ ID NO: 60061 - protein, 36 aa, Artificial Sequence; identical to SEQ ID NO: 17247
  Cyclic GFR-binding peptide
  MOD_RES (1), (33), (34): Xaa is C or S

SEQ ID NO: 60062 - protein, 37 aa, Artificial Sequence; identical to SEQ ID NO: 17248
  Cyclic GFR-binding peptide
  MOD_RES (1), (3), (35), (36): Xaa is C or S

SEQ ID NO: 60063 - protein, 33 aa, Artificial Sequence
  Cyclic GFR-binding peptide
  MOD_RES (28), (29): Xaa is C or S
IMEYQKYIKPTKGIIYLISIPSLDQSVXXPSAS

SEQ ID NO: 60064 - protein, 26 aa, Artificial Sequence
  Cyclic GFR-binding peptide
MNEYQKYIVNNSSDIYLVSIPSLKTP

SEQ ID NO: 60065 - protein, 29 aa, Artificial Sequence
  Cyclic GFR-binding peptide
AAAAAAAAAEYQKYVVNNAADIYLISIPS

SEQ ID NO: 60066 - protein, 36 aa, Artificial Sequence; identical to SEQ ID NO: 17251
  Cyclic GFR-binding peptide
  MOD_RES (2), (35), (36): Xaa is C or S

SEQ ID NO: 60067 - protein, 32 aa, Artificial Sequence
  Cyclic GFR-binding peptide
  MOD_RES (28), (28): Xaa is C or S
MNEYQKYIVNSSDDIYLVSIPSLKTPAXTPKT

SEQ ID NO: 60068 - protein, 33 aa, Artificial Sequence
  Cyclic GFR-binding peptide
  MOD_RES (2), (4): Xaa is C or S
HXGXAKVVMNEYKFKIVNNSSDLYLVSIPELKT

SEQ ID NO: 60069 - protein, 31 aa, Artificial Sequence
  Cyclic GFR-binding peptide
  MOD_RES (2), (2): Xaa is C or S
GXSRVVMNEYKFKIVNSSDDLYLVSIPELKT

SEQ ID NO: 60070 - protein, 32 aa, Artificial Sequence; identical to SEQ ID NO: 17255
  Cyclic GFR-binding peptide
  MOD_RES (1), (1): Xaa is C or S

SEQ ID NO: 60071 - protein, 27 aa, Artificial Sequence
  Cyclic GFR-binding peptide
  MOD_RES (27), (27): Xaa is C or S
MEYKFKIKPTKGILYLISIPELDQSVX

SEQ ID NO: 60072 - protein, 26 aa, Artificial Sequence
  Cyclic GFR-binding peptide
GEVVMEEYQKYVVKDYEDIYLMSIPS

SEQ ID NO: 60073 - protein, 31 aa, Artificial Sequence
  Cyclic GFR-binding peptide
  MOD_RES (28), (29): Xaa is C or S
MNEYQKYIVNSSDDIYLVSIPSLKTPAXXPK

SEQ ID NO: 60074 - protein, 21 aa, Artificial Sequence
  Cyclic GFR-binding peptide
EYKFKIVNNSSDLYLVSIPEL

SEQ ID NO: 60075 - protein, 27 aa, Artificial Sequence
  Cyclic GFR-binding peptide
VIMEYKFKIKPTKGILYLISIPELDQS

SEQ ID NO: 60076 - protein, 30 aa, Artificial Sequence
  Cyclic GFR-binding peptide
VSMGEEYKFKTPVGMDDLYLVSIPELKTPV

SEQ ID NO: 60077 - protein, 29 aa, Artificial Sequence
  Cyclic GFR-binding peptide
  MOD_RES (27), (28): Xaa is C or S
NEYQKYIVNSSDDIYLVSIPSLQTPAXXP

SEQ ID NO: 60078 - protein, 25 aa, Artificial Sequence
  Cyclic GFR-binding peptide
SRVIMEYQKYVKPKRGVIYLISIPS

SEQ ID NO: 60079 - protein, 36 aa, Artificial Sequence; identical to SEQ ID NO: 17261
  Cyclic GFR-binding peptide
  MOD_RES (2), (4), (36): Xaa is C or S

SEQ ID NO: 60080 - protein, 37 aa, Artificial Sequence; identical to SEQ ID NO: 17264
  Cyclic GFR-binding peptide
  MOD_RES (32), (33): Xaa is C or S

SEQ ID NO: 60081 - protein, 35 aa, Artificial Sequence; identical to SEQ ID NO: 17265
  Cyclic GFR-binding peptide
  MOD_RES (2), (4): Xaa is C or S

SEQ ID NO: 60082 - protein, 32 aa, Artificial Sequence; identical to SEQ ID NO: 17266
  Cyclic GFR-binding peptide
  MOD_RES (31), (32): Xaa is C or S

SEQ ID NO: 60083 - protein, 26 aa, Artificial Sequence
  Cyclic GFR-binding peptide
MNEYKFKIVNSSDDLYLVSIPELQTP

SEQ ID NO: 60084 - protein, 39 aa, Artificial Sequence; identical to SEQ ID NO: 17267
  Cyclic GFR-binding peptide
  MOD_RES (1), (3), (35), (36): Xaa is C or S

SEQ ID NO: 60085 - protein, 37 aa, Artificial Sequence; identical to SEQ ID NO: 17270
  Cyclic GFR-binding peptide
  MOD_RES (1), (3), (35), (36): Xaa is C or S

SEQ ID NO: 60086 - protein, 33 aa, Artificial Sequence; identical to SEQ ID NO: 17271
  Cyclic GFR-binding peptide
  MOD_RES (31), (31): Xaa is C or S

SEQ ID NO: 60087 - protein, 26 aa, Artificial Sequence
  Cyclic GFR-binding peptide
GEVVMEEYKFKVVKDYEDLYLMSIPE

SEQ ID NO: 60088 - protein, 34 aa, Artificial Sequence
  Cyclic GFR-binding peptide
  MOD_RES (2), (4): Xaa is C or S
RXGXGEVVMDEYKFKVVKENEDLYLMSIPELETP

SEQ ID NO: 60089 - protein, 24 aa, Artificial Sequence
  Cyclic GFR-binding peptide
EYQKYVVKDYEDIYLMSIPSLETP

SEQ ID NO: 60090 - protein, 31 aa, Artificial Sequence
  Cyclic GFR-binding peptide
  MOD_RES (27), (28): Xaa is C or S
NEYKFKIVNNSSDLYLVSIPELKTPAXXAKP

SEQ ID NO: 60091 - protein, 26 aa, Artificial Sequence
  Cyclic GFR-binding peptide
EEYQKYVVKDYEDIYLMSIPSLETPV

SEQ ID NO: 60092 - protein, 20 aa, Artificial Sequence
  Cyclic GFR-binding peptide
YHYKLYTVVGKDKYLISIPS

SEQ ID NO: 60093 - protein, 31 aa, Artificial Sequence
  Cyclic GFR-binding peptide
  MOD_RES (1), (1): Xaa is C or S
XGEVVMDEYKFKVVKENEDLYLMSIPELETP

SEQ ID NO: 60094 - protein, 28 aa, Artificial Sequence
  Cyclic GFR-binding peptide
  MOD_RES (28), (28): Xaa is C or S
MDEYQKYVVKENEDIYLMSIPSLETPVX

SEQ ID NO: 60095 - protein, 22 aa, Artificial Sequence
  Cyclic GFR-binding peptide
EYKFKVKPTRGVLYLISIPELD

SEQ ID NO: 60096 - protein, 35 aa, Artificial Sequence
  Cyclic GFR-binding peptide
  MOD_RES (30), (31): Xaa is C or S
VVMNEYQKYIVNSSDDIYLVSIPSLQTPAXXPKPV

SEQ ID NO: 60097 - protein, 24 aa, Artificial Sequence
  Cyclic GFR-binding peptide
VVMEYQKYVKPTRGVIYLISIPSL

SEQ ID NO: 60098 - protein, 23 aa, Artificial Sequence
  Cyclic GFR-binding peptide
VMEEYKFKVVKDYEDLYLMSIPE

SEQ ID NO: 60099 - protein, 38 aa, Artificial Sequence; identical to SEQ ID NO: 17283
  Cyclic GFR-binding peptide
  MOD_RES (2), (4), (36), (37): Xaa is C or S

SEQ ID NO: 60100 - protein, 38 aa, Artificial Sequence; identical to SEQ ID NO: 17285
  Cyclic GFR-binding peptide
  MOD_RES (1), (3), (35), (36): Xaa is C or S

SEQ ID NO: 60101 - protein, 33 aa, Artificial Sequence; identical to SEQ ID NO: 17287
  Cyclic GFR-binding peptide
  MOD_RES (31), (32): Xaa is C or S

SEQ ID NO: 60102 - protein, 29 aa, Artificial Sequence
  Cyclic GFR-binding peptide
  MOD_RES (2), (2): Xaa is C or S
GXGEVVMDEYQKYVVKENEDIYLMSIPSL

SEQ ID NO: 60103 - protein, 34 aa, Artificial Sequence
  Cyclic GFR-binding peptide
  MOD_RES (29), (29): Xaa is C or S
VMNEYKFKIVNSSDDLYLVSIPELKTPAXTPKTV

SEQ ID NO: 60104 - protein, 28 aa, Artificial Sequence
  Cyclic GFR-binding peptide
  MOD_RES (2), (2): Xaa is C or S
GXARVVMNEYQKYIVNSSDDIYLVSIPS

SEQ ID NO: 60105 - protein, 36 aa, Artificial Sequence; identical to SEQ ID NO: 17290
  Cyclic GFR-binding peptide
  MOD_RES (2), (4), (36): Xaa is C or S

SEQ ID NO: 60106 - protein, 38 aa, Artificial Sequence; identical to SEQ ID NO: 17293
  Cyclic GFR-binding peptide
  MOD_RES (32), (33): Xaa is C or S

SEQ ID NO: 60107 - protein, 26 aa, Artificial Sequence
  Cyclic GFR-binding peptide
MEYQKYIKPTKGIIYLISIPSLDQSV

SEQ ID NO: 60108 - protein, 38 aa, Artificial Sequence; identical to SEQ ID NO: 17296
  Cyclic GFR-binding peptide
  MOD_RES (2), (34), (35): Xaa is C or S

SEQ ID NO: 60109 - protein, 27 aa, Artificial Sequence
  Cyclic GFR-binding peptide
GEVVMDEYQKYVVKENEDIYLMSIPSL

SEQ ID NO: 60110 - protein, 32 aa, Artificial Sequence
  Cyclic GFR-binding peptide
  MOD_RES (28), (29): Xaa is C or S
MNEYKFKIVNSSDDLYLVSIPELQTPAXXPKP

SEQ ID NO: 60111 - protein, 31 aa, Artificial Sequence
  Cyclic GFR-binding peptide
  MOD_RES (28), (29): Xaa is C or S
MDEYQKYVVKENEDIYLMSIPSLETPVXXAK

SEQ ID NO: 60112 - protein, 21 aa, Artificial Sequence
  Cyclic GFR-binding peptide
YHYKLVVNNAADKYLISIPSL

SEQ ID NO: 60113 - protein, 35 aa, Artificial Sequence
  Cyclic GFR-binding peptide
  MOD_RES (29), (30): Xaa is C or S
VVMEYKFKVKPTRGVLYLISIPELDQPVXXPSASA

SEQ ID NO: 60114 - protein, 26 aa, Artificial Sequence
  Cyclic GFR-binding peptide
DYHYKLVVNNAADKYLISIPSLRAPV

SEQ ID NO: 60115 - protein, 28 aa, Artificial Sequence
  Cyclic GFR-binding peptide
ESVAMGYHYKLYTVVGKDKYLISIPSLK

SEQ ID NO: 60116 - protein, 33 aa, Artificial Sequence; identical to SEQ ID NO: 17304
  Cyclic GFR-binding peptide
  MOD_RES (32), (33): Xaa is C or S

SEQ ID NO: 60117 - protein, 29 aa, Artificial Sequence
  Cyclic GFR-binding peptide
  MOD_RES (1), (1): Xaa is C or S
XGEVVMDEYQKYVVKENEDIYLMSIPSLE

SEQ ID NO: 60118 - protein, 32 aa, Artificial Sequence; identical to SEQ ID NO: 17306
  Cyclic GFR-binding peptide
  MOD_RES (32), (32): Xaa is C or S

SEQ ID NO: 60119 - protein, 29 aa, Artificial Sequence
  Cyclic GFR-binding peptide
  MOD_RES (1), (1): Xaa is C or S
XGEVVMDEYKFKVVKENEDLYLMSIPELE

SEQ ID NO: 60120 - protein, 30 aa, Artificial Sequence; identical to SEQ ID NO: 1997
  Cyclic GFR-binding peptide

SEQ ID NO: 60121 - protein, 34 aa, Artificial Sequence
  Cyclic GFR-binding peptide
  MOD_RES (2), (4): Xaa is C or S
RXGXESVAMGEYQKYYTVVGKDIYLISIPSLKTP

SEQ ID NO: 60122 - protein, 24 aa, Artificial Sequence
  Cyclic GFR-binding peptide
VVMDYHYKLVVNNAADKYLISIPS

SEQ ID NO: 60123 - protein, 32 aa, Artificial Sequence
  Cyclic GFR-binding peptide
  MOD_RES (31), (32): Xaa is C or S
VSMGEEYQKYTPVGMDDIYLVSIPSLKTPVXX

SEQ ID NO: 60124 - protein, 24 aa, Artificial Sequence
  Cyclic GFR-binding peptide
VMEYQKYVKPTRGVIYLISIPSLD

SEQ ID NO: 60125 - protein, 33 aa, Artificial Sequence
  Cyclic GFR-binding peptide
  MOD_RES (28), (28): Xaa is C or S
MNEYQKYIVNSSDDIYLVSIPSLKTPAXTPKTV

SEQ ID NO: 60126 - protein, 29 aa, Artificial Sequence
  Cyclic GFR-binding peptide
VAMGRYKKLYTVVGKDFYLISIANLKTPV

SEQ ID NO: 60127 - protein, 30 aa, Artificial Sequence
  Cyclic GFR-binding peptide
  MOD_RES (28), (29): Xaa is C or S
VMEYKFKVKPTRGVLYLISIPELDQPVXXP

SEQ ID NO: 60128 - protein, 28 aa, Artificial Sequence
  Cyclic GFR-binding peptide
  MOD_RES (2), (2): Xaa is C or S
KXSRVIMEYKFKVKPKRGVLYLISIPEL

SEQ ID NO: 60129 - protein, 34 aa, Artificial Sequence
  Cyclic GFR-binding peptide
  MOD_RES (30), (31): Xaa is C or S
VVMEEYQKYVVKDYEDIYLMSIPSLETPVXXAKP

SEQ ID NO: 60130 - protein, 29 aa, Artificial Sequence
  Cyclic GFR-binding peptide
  MOD_RES (1), (3): Xaa is C or S
XGXGEVVMDEYKFKVVKENEDLYLMSIPE

SEQ ID NO: 60131 - protein, 30 aa, Artificial Sequence
  Cyclic GFR-binding peptide
  MOD_RES (30), (30): Xaa is C or S
VAMGEYQKYYTVVGKDIYLISIPSLKTPVX

SEQ ID NO: 60132 - protein, 38 aa, Artificial Sequence
  Cyclic GFR-binding peptide
  MOD_RES (32), (33): Xaa is C or S
AVSMGEEYKFKTPVGMDDLYLVSIPELKTPVXXAKGVK

SEQ ID NO: 60133 - protein, 34 aa, Artificial Sequence
  Cyclic GFR-binding peptide
  MOD_RES (2), (4): Xaa is C or S
HXGXARVVMNEYKFKIVNSSDDLYLVSIPELQTP

SEQ ID NO: 60134 - protein, 41 aa, Artificial Sequence; identical to SEQ ID NO: 17322
  Cyclic GFR-binding peptide
  MOD_RES (1), (3), (35), (36): Xaa is C or S

SEQ ID NO: 60135 - protein, 26 aa, Artificial Sequence
  Cyclic GFR-binding peptide
VSMGEEYQKYTPVGMDDIYLVSIPSL

SEQ ID NO: 60136 - protein, 27 aa, Artificial Sequence
  Cyclic GFR-binding peptide
  MOD_RES (1), (1): Xaa is C or S
XSRVIMEYKFKVKPKRGVLYLISIPEL

SEQ ID NO: 60137 - protein, 29 aa, Artificial Sequence
  Cyclic GFR-binding peptide
VAMGEYQKYYTVVGKDIYLISIPSLKTPV

SEQ ID NO: 60138 - protein, 30 aa, Artificial Sequence
  Cyclic GFR-binding peptide
  MOD_RES (30), (30): Xaa is C or S
VAMGYHYKLYTVVGKDKYLISIPSLKTPVX

SEQ ID NO: 60139 - protein, 34 aa, Artificial Sequence; identical to SEQ ID NO: 17325
  Cyclic GFR-binding peptide
  MOD_RES (1), (3): Xaa is C or S

SEQ ID NO: 60140 - protein, 31 aa, Artificial Sequence
  Cyclic GFR-binding peptide
  MOD_RES (30), (31): Xaa is C or S
VVMNEYQKYIVNSSDDIYLVSIPSLQTPAXX

SEQ ID NO: 60141 - protein, 32 aa, Artificial Sequence; identical to SEQ ID NO: 17326
  Cyclic GFR-binding peptide
  MOD_RES (31), (32): Xaa is C or S

SEQ ID NO: 60142 - protein, 32 aa, Artificial Sequence; identical to SEQ ID NO: 17327
  Cyclic GFR-binding peptide
  MOD_RES (32), (32): Xaa is C or S

SEQ ID NO: 60143 - protein, 31 aa, Artificial Sequence
  Cyclic GFR-binding peptide
  MOD_RES (1), (3): Xaa is C or S
XGXAEVVMDYHYKLVVNNAADKYLISIPSLR

SEQ ID NO: 60144 - protein, 39 aa, Artificial Sequence; identical to SEQ ID NO: 17329
  Cyclic GFR-binding peptide
  MOD_RES (2), (34), (35): Xaa is C or S

SEQ ID NO: 60145 - protein, 31 aa, Artificial Sequence
  Cyclic GFR-binding peptide
  MOD_RES (2), (2): Xaa is C or S
GXGEVVMEEYKFKVVKDYEDLYLMSIPELET

SEQ ID NO: 60146 - protein, 30 aa, Artificial Sequence
  Cyclic GFR-binding peptide
AKVVMNEYQKYIVNNSSDIYLVSIPSLKTP

SEQ ID NO: 60147 - protein, 24 aa, Artificial Sequence
  Cyclic GFR-binding peptide
VVMEEYQKYVVKDYEDIYLMSIPS

SEQ ID NO: 60148 - protein, 36 aa, Artificial Sequence
  Cyclic GFR-binding peptide
  MOD_RES (31), (32): Xaa is C or S
VSMGEEYQKYTPVGMDDIYLVSIPSLKTPVXXAKGV

SEQ ID NO: 60149 - protein, 29 aa, Artificial Sequence
  Cyclic GFR-binding peptide
  MOD_RES (28), (29): Xaa is C or S
MDEYQKYVVKENEDIYLMSIPSLETPVXX

SEQ ID NO: 60150 - protein, 27 aa, Artificial Sequence
  Cyclic GFR-binding peptide
  MOD_RES (1), (1): Xaa is C or S
XGEVVMEEYKFKVVKDYEDLYLMSIPE

SEQ ID NO: 60151 - protein, 30 aa, Artificial Sequence; identical to SEQ ID NO: 17341
  Cyclic GFR-binding peptide

SEQ ID NO: 60152 - protein, 31 aa, Artificial Sequence; identical to SEQ ID NO: 17342
  Cyclic GFR-binding peptide

SEQ ID NO: 60153 - protein, 32 aa, Artificial Sequence
  Cyclic GFR-binding peptide
  MOD_RES (2), (4): Xaa is C or S
RXGXESVAMGRYKKLYTVVGKDFYLISIANLK

SEQ ID NO: 60154 - protein, 30 aa, Artificial Sequence
  Cyclic GFR-binding peptide
  MOD_RES (1), (3): Xaa is C or S
XGXGEVVMEEYKFKVVKDYEDLYLMSIPEL

SEQ ID NO: 60155 - protein, 30 aa, Artificial Sequence
  Cyclic GFR-binding peptide
  MOD_RES (1), (1): Xaa is C or S
XGEVVMDEYKFKVVKENEDLYLMSIPELET

SEQ ID NO: 60156 - protein, 35 aa, Artificial Sequence; identical to SEQ ID NO: 17344
  Cyclic GFR-binding peptide
  MOD_RES (2), (4): Xaa is C or S

SEQ ID NO: 60157 - protein, 29 aa, Artificial Sequence
  Cyclic GFR-binding peptide
  MOD_RES (2), (2): Xaa is C or S
GXEAVSMGEEYQKYTPVGMDDIYLVSIPS

SEQ ID NO: 60158 - protein, 20 aa, Artificial Sequence
  Cyclic GFR-binding peptide
EYKFKIVNSSDDLYLVSIPE

SEQ ID NO: 60159 - protein, 25 aa, Artificial Sequence
  Cyclic GFR-binding peptide
MNEYKFKIVNSSDDLYLVSIPELKT

SEQ ID NO: 60160 - protein, 34 aa, Artificial Sequence
  Cyclic GFR-binding peptide
  MOD_RES (29), (30): Xaa is C or S
VVMEYQKYVKPTRGVIYLISIPSLDQPVXXPSAS

SEQ ID NO: 60161 - protein, 25 aa, Artificial Sequence
  Cyclic GFR-binding peptide
KVVMEYKFKVKPTRGVLYLISIPEL

SEQ ID NO: 60162 - protein, 35 aa, Artificial Sequence; identical to SEQ ID NO: 17357
  Cyclic GFR-binding peptide
  MOD_RES (2), (4): Xaa is C or S

SEQ ID NO: 60163 - protein, 33 aa, Artificial Sequence; identical to SEQ ID NO: 17361
  Cyclic GFR-binding peptide
  MOD_RES (32), (33): Xaa is C or S

SEQ ID NO: 60164 - protein, 33 aa, Artificial Sequence; identical to SEQ ID NO: 17362
  Cyclic GFR-binding peptide
  MOD_RES (31), (32): Xaa is C or S

SEQ ID NO: 60165 - protein, 36 aa, Artificial Sequence; identical to SEQ ID NO: 17366
  Cyclic GFR-binding peptide
  MOD_RES (31), (32): Xaa is C or S

SEQ ID NO: 60166 - protein, 38 aa, Artificial Sequence
  Cyclic GFR-binding peptide
  MOD_RES (32), (33): Xaa is C or S
AVSMGEEYQKYTPVGMDDIYLVSIPSLKTPVXXAKGVK

SEQ ID NO: 60167 - protein, 28 aa, Artificial Sequence
  Cyclic GFR-binding peptide
  MOD_RES (26), (27): Xaa is C or S
EYKFKIVNSSDDLYLVSIPELQTPAXXP

SEQ ID NO: 60168 - protein, 34 aa, Artificial Sequence
  Cyclic GFR-binding peptide
  MOD_RES (28), (29): Xaa is C or S
MDEYKFKVVKENEDLYLMSIPELETPVXXAKPIK

SEQ ID NO: 60169 - protein, 37 aa, Artificial Sequence; identical to SEQ ID NO: 17372
  Cyclic GFR-binding peptide
  MOD_RES (1), (33), (34): Xaa is C or S

SEQ ID NO: 60170 - protein, 32 aa, Artificial Sequence
  Cyclic GFR-binding peptide
  MOD_RES (2), (4): Xaa is C or S
RXGXGEVVMEEYQKYVVKDYEDIYLMSIPSLE

SEQ ID NO: 60171 - protein, 29 aa, Artificial Sequence
  Cyclic GFR-binding peptide
  MOD_RES (29), (29): Xaa is C or S
VVMEYKFKVKPTRGVLYLISIPELDQPVX

SEQ ID NO: 60172 - protein, 35 aa, Artificial Sequence; identical to SEQ ID NO: 17374
  Cyclic GFR-binding peptide
  MOD_RES (31), (31): Xaa is C or S

SEQ ID NO: 60173 - protein, 37 aa, Artificial Sequence; identical to SEQ ID NO: 17375
  Cyclic GFR-binding peptide
  MOD_RES (2), (34), (35): Xaa is C or S

SEQ ID NO: 60174 - protein, 33 aa, Artificial Sequence; identical to SEQ ID NO: 17376
  Cyclic GFR-binding peptide
  MOD_RES (32), (33): Xaa is C or S

SEQ ID NO: 60175 - protein, 27 aa, Artificial Sequence
  Cyclic GFR-binding peptide
MEEYKFKVVKDYEDLYLMSIPELETPV

SEQ ID NO: 60176 - protein, 30 aa, Artificial Sequence
  Cyclic GFR-binding peptide
  MOD_RES (2), (2): Xaa is C or S
KXSRVIMEYQKYVKPKRGVIYLISIPSLAQ

SEQ ID NO: 60177 - protein, 31 aa, Artificial Sequence
  Cyclic GFR-binding peptide
  MOD_RES (2), (4): Xaa is C or S
SXKXSKVVMEYKFKVKPTRGVLYLISIPELD

SEQ ID NO: 60178 - protein, 36 aa, Artificial Sequence
  Cyclic GFR-binding peptide
  MOD_RES (30), (31): Xaa is C or S
VVMEEYKFKVVKDYEDLYLMSIPELETPVXXAKPIS

SEQ ID NO: 60179 - protein, 32 aa, Artificial Sequence; identical to SEQ ID NO: 17380
  Cyclic GFR-binding peptide
  MOD_RES (1), (1): Xaa is C or S

SEQ ID NO: 60180 - protein, 27 aa, Artificial Sequence
  Cyclic GFR-binding peptide
  MOD_RES (26), (27): Xaa is C or S
EYKFKVKPKRGVLYLISIPELAQPVXX

SEQ ID NO: 60181 - protein, 31 aa, Artificial Sequence
  Cyclic GFR-binding peptide
  MOD_RES (2), (2): Xaa is C or S
GXSRVVMNEYQKYIVNSSDDIYLVSIPSLKT

SEQ ID NO: 60182 - protein, 28 aa, Artificial Sequence
  Cyclic GFR-binding peptide
  MOD_RES (26), (27): Xaa is C or S
RYKKLYTVVGKDFYLISIANLKTPVXXA

SEQ ID NO: 60183 - protein, 23 aa, Artificial Sequence
  Cyclic GFR-binding peptide
MDEYQKYVVKENEDIYLMSIPSL

SEQ ID NO: 60184 - protein, 26 aa, Artificial Sequence
  Cyclic GFR-binding peptide
VAMGRYKKLYTVVGKDFYLISIANLK

SEQ ID NO: 60185 - protein, 25 aa, Artificial Sequence
  Cyclic GFR-binding peptide
RVVMNEYQKYIVNSSDDIYLVSIPS

SEQ ID NO: 60186 - protein, 35 aa, Artificial Sequence; identical to SEQ ID NO: 17388
  Cyclic GFR-binding peptide
  MOD_RES (31), (32): Xaa is C or S

SEQ ID NO: 60187 - protein, 25 aa, Artificial Sequence
  Cyclic GFR-binding peptide
MEEYKFKVVKDYEDLYLMSIPELET

SEQ ID NO: 60188 - protein, 29 aa, Artificial Sequence
  Cyclic GFR-binding peptide
AAAAAAAAAEYQKYVKPTRGVIYLISIPS

SEQ ID NO: 60189 - protein, 27 aa, Artificial Sequence
  Cyclic GFR-binding peptide
  MOD_RES (26), (26): Xaa is C or S
EYKFKIVNSSDDLYLVSIPELKTPAXT

SEQ ID NO: 60190 - protein, 36 aa, Artificial Sequence; identical to SEQ ID NO: 17394
  Cyclic GFR-binding peptide
  MOD_RES (1), (33), (34): Xaa is C or S

SEQ ID NO: 60191 - protein, 32 aa, Artificial Sequence; identical to SEQ ID NO: 17397
  Cyclic GFR-binding peptide
  MOD_RES (1), (1): Xaa is C or S

SEQ ID NO: 60192 - protein, 32 aa, Artificial Sequence
  Cyclic GFR-binding peptide
  MOD_RES (26), (27): Xaa is C or S
EYKFKTPVGMDDLYLVSIPELKTPVXXAKGVK

SEQ ID NO: 60193 - protein, 25 aa, Artificial Sequence
  Cyclic GFR-binding peptide
EVVMDEYQKYVVKENEDIYLMSIPS

SEQ ID NO: 60194 - protein, 30 aa, Artificial Sequence
  Cyclic GFR-binding peptide
  MOD_RES (27), (28): Xaa is C or S
EEYKFKTPVGMDDLYLVSIPELKTPVXXAK

SEQ ID NO: 60195 - protein, 28 aa, Artificial Sequence
  Cyclic GFR-binding peptide
  MOD_RES (1), (1): Xaa is C or S
XSRVVMNEYQKYIVNSSDDIYLVSIPSL

SEQ ID NO: 60196 - protein, 31 aa, Artificial Sequence
  Cyclic GFR-binding peptide
  MOD_RES (28), (29): Xaa is C or S
MEEYKFKVVKDYEDLYLMSIPELETPVXXAK

SEQ ID NO: 60197 - protein, 34 aa, Artificial Sequence; identical to SEQ ID NO: 17402
  Cyclic GFR-binding peptide
  MOD_RES (1), (3): Xaa is C or S

SEQ ID NO: 60198 - protein, 36 aa, Artificial Sequence; identical to SEQ ID NO: 17401
  Cyclic GFR-binding peptide
  MOD_RES (1), (33), (34): Xaa is C or S

SEQ ID NO: 60199 - protein, 33 aa, Artificial Sequence; identical to SEQ ID NO: 17404
  Cyclic GFR-binding peptide
  MOD_RES (2), (33): Xaa is C or S

SEQ ID NO: 60200 - protein, 35 aa, Artificial Sequence; identical to SEQ ID NO: 17405
  Cyclic GFR-binding peptide
  MOD_RES (31), (32): Xaa is C or S

SEQ ID NO: 60201 - protein, 25 aa, Artificial Sequence
  Cyclic GFR-binding peptide
VVMNEYQKYIVNSSDDIYLVSIPSL

SEQ ID NO: 60202 - protein, 39 aa, Artificial Sequence; identical to SEQ ID NO: 17408
  Cyclic GFR-binding peptide
  MOD_RES (1), (33), (34): Xaa is C or S

SEQ ID NO: 60203 - protein, 39 aa, Artificial Sequence; identical to SEQ ID NO: 17410
  Cyclic GFR-binding peptide
  MOD_RES (2), (4), (37), (38): Xaa is C or S

SEQ ID NO: 60204 - protein, 34 aa, Artificial Sequence; identical to SEQ ID NO: 17413
  Cyclic GFR-binding peptide
  MOD_RES (1), (33), (34): Xaa is C or S

SEQ ID NO: 60205 - protein, 34 aa, Artificial Sequence; identical to SEQ ID NO: 17414
  Cyclic GFR-binding peptide
  MOD_RES (31), (32): Xaa is C or S

SEQ ID NO: 60206 - protein, 31 aa, Artificial Sequence
  Cyclic GFR-binding peptide
  MOD_RES (1), (1): Xaa is C or S
XSRVVMNEYQKYIVNSSDDIYLVSIPSLKTP

SEQ ID NO: 60207 - protein, 24 aa, Artificial Sequence
  Cyclic GFR-binding peptide
VMEEYKFKVVKDYEDLYLMSIPEL

SEQ ID NO: 60208 - protein, 30 aa, Artificial Sequence
  Cyclic GFR-binding peptide
EAVSMGEEYKFKTPVGMDDLYLVSIPELKT

SEQ ID NO: 60209 - protein, 35 aa, Artificial Sequence
  Cyclic GFR-binding peptide
  MOD_RES (29), (30): Xaa is C or S
VMNEYKFKIVNSSDDLYLVSIPELQTPAXXPKPVT

SEQ ID NO: 60210 - protein, 30 aa, Artificial Sequence
  Cyclic GFR-binding peptide
  MOD_RES (26), (27): Xaa is C or S
EYKFKIKPTKGILYLISIPELDQSVXXPSA

SEQ ID NO: 60211 - protein, 30 aa, Artificial Sequence
  Cyclic GFR-binding peptide
  MOD_RES (28), (29): Xaa is C or S
IMEYQKYVKPKRGVIYLISIPSLAQPVXXP

SEQ ID NO: 60212 - protein, 23 aa, Artificial Sequence
  Cyclic GFR-binding peptide
VVMEYQKYVKPTRGVIYLISIPS

SEQ ID NO: 60213 - protein, 32 aa, Artificial Sequence
  Cyclic GFR-binding peptide
  MOD_RES (26), (27): Xaa is C or S
EYQKYIVNNSSDIYLVSIPSLKTPAXXAKPVA

SEQ ID NO: 60214 - protein, 31 aa, Artificial Sequence
  Cyclic GFR-binding peptide
  MOD_RES (26), (27): Xaa is C or S
EYKFKVVKENEDLYLMSIPELETPVXXAKPI

SEQ ID NO: 60215 - protein, 29 aa, Artificial Sequence
  Cyclic GFR-binding peptide
  MOD_RES (1), (1): Xaa is C or S
XSKVIMEYQKYIKPTKGIIYLISIPSLDQ

SEQ ID NO: 60216 - protein, 37 aa, Artificial Sequence; identical to SEQ ID NO: 17419
  Cyclic GFR-binding peptide
  MOD_RES (1), (3), (35), (36): Xaa is C or S

SEQ ID NO: 60217 - protein, 33 aa, Artificial Sequence
  Cyclic GFR-binding peptide
  MOD_RES (28), (29): Xaa is C or S
MDEYKFKVVKENEDLYLMSIPELETPVXXAKPI

SEQ ID NO: 60218 - protein, 37 aa, Artificial Sequence; identical to SEQ ID NO: 17422
  Cyclic GFR-binding peptide
  MOD_RES (2), (4), (35), (36): Xaa is C or S

SEQ ID NO: 60219 - protein, 24 aa, Artificial Sequence
  Cyclic GFR-binding peptide
MEYQKYVKPKRGVIYLISIPSLAQ

SEQ ID NO: 60220 - protein, 27 aa, Artificial Sequence
  Cyclic GFR-binding peptide
MDEYQKYVVKENEDIYLMSIPSLETPV

SEQ ID NO: 60221 - protein, 25 aa, Artificial Sequence
  Cyclic GFR-binding peptide
VMDRYKKLVVNNAADFYLISIANLR

SEQ ID NO: 60222 - protein, 32 aa, Artificial Sequence
  Cyclic GFR-binding peptide
  MOD_RES (29), (30): Xaa is C or S
MGEEYQKYTPVGMDDIYLVSIPSLKTPVXXAK

SEQ ID NO: 60223 - protein, 29 aa, Artificial Sequence
  Cyclic GFR-binding peptide
VVMEEYQKYVVKDYEDIYLMSIPSLETPV

SEQ ID NO: 60224 - protein, 36 aa, Artificial Sequence; identical to SEQ ID NO: 17428
  Cyclic GFR-binding peptide
  MOD_RES (32), (33): Xaa is C or S

SEQ ID NO: 60225 - protein, 28 aa, Artificial Sequence
  Cyclic GFR-binding peptide
  MOD_RES (26), (26): Xaa is C or S
EYQKYIVNSSDDIYLVSIPSLKTPAXTP

SEQ ID NO: 60226 - protein, 31 aa, Artificial Sequence
  Cyclic GFR-binding peptide
  MOD_RES (26), (27): Xaa is C or S
YHYKLVVNNAADKYLISIPSLRAPVXXSAPA

SEQ ID NO: 60227 - protein, 23 aa, Artificial Sequence
  Cyclic GFR-binding peptide
EYQKYYTVVGKDIYLISIPSLKT

SEQ ID NO: 60228 - protein, 25 aa, Artificial Sequence
  Cyclic GFR-binding peptide
RVIMEYKFKVKPKRGVLYLISIPEL

SEQ ID NO: 60229 - protein, 22 aa, Artificial Sequence
  Cyclic GFR-binding peptide
MEYKFKVKPKRGVLYLISIPEL

SEQ ID NO: 60230 - protein, 33 aa, Artificial Sequence; identical to SEQ ID NO: 17436
  Cyclic GFR-binding peptide
  MOD_RES (1), (33): Xaa is C or S

SEQ ID NO: 60231 - protein, 30 aa, Artificial Sequence
  Cyclic GFR-binding peptide
  MOD_RES (28), (29): Xaa is C or S
GEEYKFKTPVGMDDLYLVSIPELKTPVXXA

SEQ ID NO: 60232 - protein, 31 aa, Artificial Sequence
  Cyclic GFR-binding peptide
  MOD_RES (2), (4): Xaa is C or S
HXGXSRVVMNEYQKYIVNSSDDIYLVSIPSL

SEQ ID NO: 60233 - protein, 32 aa, Artificial Sequence; identical to SEQ ID NO: 17438
  Cyclic GFR-binding peptide
  MOD_RES (1), (1): Xaa is C or S

SEQ ID NO: 60234 - protein, 31 aa, Artificial Sequence
  Cyclic GFR-binding peptide
  MOD_RES (1), (1): Xaa is C or S
XESVAMGYHYKLYTVVGKDKYLISIPSLKTP

SEQ ID NO: 60235 - protein, 41 aa, Artificial Sequence; identical to SEQ ID NO: 17441
  Cyclic GFR-binding peptide
  MOD_RES (1), (3), (35), (36): Xaa is C or S

SEQ ID NO: 60236 - protein, 32 aa, Artificial Sequence
  Cyclic GFR-binding peptide
  MOD_RES (26), (27): Xaa is C or S
EYKFKVVNNAADLYLISIPELRAPVXXSAPAA

SEQ ID NO: 60237 - protein, 32 aa, Artificial Sequence
  Cyclic GFR-binding peptide
  MOD_RES (28), (29): Xaa is C or S
MDEYKFKVVNNAADLYLISIPELRAPVXXSAP

SEQ ID NO: 60238 - protein, 40 aa, Artificial Sequence; identical to SEQ ID NO: 17446
  Cyclic GFR-binding peptide
  MOD_RES (2), (4), (36), (37): Xaa is C or S

SEQ ID NO: 60239 - protein, 31 aa, Artificial Sequence
  Cyclic GFR-binding peptide
  MOD_RES (1), (3): Xaa is C or S
XGXSRVVMNEYQKYIVNSSDDIYLVSIPSLK

SEQ ID NO: 60240 - protein, 33 aa, Artificial Sequence
  Cyclic GFR-binding peptide
  MOD_RES (2), (2): Xaa is C or S
GXEAVSMGEEYKFKTPVGMDDLYLVSIPELKTP

SEQ ID NO: 60241 - protein, 33 aa, Artificial Sequence
  Cyclic GFR-binding peptide
  MOD_RES (27), (28): Xaa is C or S
GRYKKLYTVVGKDFYLISIANLKTPVXXAKSAK

SEQ ID NO: 60242 - protein, 39 aa, Artificial Sequence; identical to SEQ ID NO: 17451
  Cyclic GFR-binding peptide
  MOD_RES (1), (3), (35), (36): Xaa is C or S

SEQ ID NO: 60243 - protein, 29 aa, Artificial Sequence
  Cyclic GFR-binding peptide
GEVVMEEYQKYVVKDYEDIYLMSIPSLET

SEQ ID NO: 60244 - protein, 25 aa, Artificial Sequence
  Cyclic GFR-binding peptide
EYQKYVKPKRGVIYLISIPSLAQPV

SEQ ID NO: 60245 - protein, 27 aa, Artificial Sequence
  Cyclic GFR-binding peptide
  MOD_RES (27), (27): Xaa is C or S
EEYQKYVVKDYEDIYLMSIPSLETPVX

SEQ ID NO: 60246 - protein, 36 aa, Artificial Sequence; identical to SEQ ID NO: 17453
  Cyclic GFR-binding peptide
  MOD_RES (2), (4), (36): Xaa is C or S

SEQ ID NO: 60247 - protein, 30 aa, Artificial Sequence
  Cyclic GFR-binding peptide
  MOD_RES (28), (29): Xaa is C or S
IMEYKFKIKPTKGILYLISIPELDQSVXXP

SEQ ID NO: 60248 - protein, 34 aa, Artificial Sequence; identical to SEQ ID NO: 17455
  Cyclic GFR-binding peptide
  MOD_RES (2), (34): Xaa is C or S

SEQ ID NO: 60249 - protein, 31 aa, Artificial Sequence
  Cyclic GFR-binding peptide
  MOD_RES (2), (4): Xaa is C or S
RXGXGEVVMDEYQKYVVKENEDIYLMSIPSL

SEQ ID NO: 60250 - protein, 27 aa, Artificial Sequence
  Cyclic GFR-binding peptide
GEVVMEEYQKYVVKDYEDIYLMSIPSL

SEQ ID NO: 60251 - protein, 22 aa, Artificial Sequence
  Cyclic GFR-binding peptide
MDEYKFKVVKENEDLYLMSIPE

SEQ ID NO: 60252 - protein, 32 aa, Artificial Sequence; identical to SEQ ID NO: 17458
  Cyclic GFR-binding peptide
  MOD_RES (31), (31): Xaa is C or S

SEQ ID NO: 60253 - protein, 23 aa, Artificial Sequence
  Cyclic GFR-binding peptide
GEEYKFKTPVGMDDLYLVSIPEL

SEQ ID NO: 60254 - protein, 41 aa, Artificial Sequence; identical to SEQ ID NO: 17464
  Cyclic GFR-binding peptide
  MOD_RES (2), (4), (35), (36): Xaa is C or S

SEQ ID NO: 60255 - protein, 40 aa, Artificial Sequence; identical to SEQ ID NO: 17465
  Cyclic GFR-binding peptide
  MOD_RES (1), (3), (35), (36): Xaa is C or S

SEQ ID NO: 60256 - protein, 25 aa, Artificial Sequence
  Cyclic GFR-binding peptide
IMEYQKYIKPTKGIIYLISIPSLDQ

SEQ ID NO: 60257 - protein, 34 aa, Artificial Sequence
  Cyclic GFR-binding peptide
  MOD_RES (28), (29): Xaa is C or S
MNEYQKYIVNSSDDIYLVSIPSLQTPAXXPKPVT

SEQ ID NO: 60258 - protein, 32 aa, Artificial Sequence
  Cyclic GFR-binding peptide
  MOD_RES (30), (30): Xaa is C or S
VVMNEYQKYIVNSSDDIYLVSIPSLKTPAXTP

SEQ ID NO: 60259 - protein, 26 aa, Artificial Sequence
  Cyclic GFR-binding peptide
VAMGEYQKYYTVVGKDIYLISIPSLK

SEQ ID NO: 60260 - protein, 36 aa, Artificial Sequence; identical to SEQ ID NO: 17469
  Cyclic GFR-binding peptide
  MOD_RES (32), (33): Xaa is C or S

SEQ ID NO: 60261 - protein, 32 aa, Artificial Sequence; identical to SEQ ID NO: 17470
  Cyclic GFR-binding peptide

SEQ ID NO: 60262 - protein, 31 aa, Artificial Sequence
  Cyclic GFR-binding peptide
  MOD_RES (30), (31): Xaa is C or S
VVMNEYKFKIVNSSDDLYLVSIPELKTPAXX

SEQ ID NO: 60263 - protein, 32 aa, Artificial Sequence
  Cyclic GFR-binding peptide
  MOD_RES (27), (28): Xaa is C or S
EEYQKYVVKDYEDIYLMSIPSLETPVXXAKPI

SEQ ID NO: 60264 - protein, 33 aa, Artificial Sequence; identical to SEQ ID NO: 17477
  Cyclic GFR-binding peptide
  MOD_RES (2), (2): Xaa is C or S

SEQ ID NO: 60265 - protein, 27 aa, Artificial Sequence
  Cyclic GFR-binding peptide
AMGRYKKLYTVVGKDFYLISIANLKTP

SEQ ID NO: 60266 - protein, 31 aa, Artificial Sequence
  Cyclic GFR-binding peptide
  MOD_RES (2), (4): Xaa is C or S
RXGXAEVVMDEYKFKVVNNAADLYLISIPEL

SEQ ID NO: 60267 - protein, 27 aa, Artificial Sequence
  Cyclic GFR-binding peptide
MGRYKKLYTVVGKDFYLISIANLKTPV

SEQ ID NO: 60268 - protein, 28 aa, Artificial Sequence
  Cyclic GFR-binding peptide
VVMNEYKFKIVNSSDDLYLVSIPELKTP

SEQ ID NO: 60269 - protein, 34 aa, Artificial Sequence; identical to SEQ ID NO: 17484
  Cyclic GFR-binding peptide
  MOD_RES (2), (34): Xaa is C or S

SEQ ID NO: 60270 - protein, 23 aa, Artificial Sequence
  Cyclic GFR-binding peptide
MEEYKFKVVKDYEDLYLMSIPEL

SEQ ID NO: 60271 - protein, 37 aa, Artificial Sequence; identical to SEQ ID NO: 17488
  Cyclic GFR-binding peptide
  MOD_RES (2), (35), (36): Xaa is C or S

SEQ ID NO: 60272 - protein, 35 aa, Artificial Sequence; identical to SEQ ID NO: 17490
  Cyclic GFR-binding peptide
  MOD_RES (32), (33): Xaa is C or S

SEQ ID NO: 60273 - protein, 28 aa, Artificial Sequence
  Cyclic GFR-binding peptide
  MOD_RES (26), (27): Xaa is C or S
EYKFKVVKENEDLYLMSIPELETPVXXA

SEQ ID NO: 60274 - protein, 27 aa, Artificial Sequence
  Cyclic GFR-binding peptide
AMGYHYKLYTVVGKDKYLISIPSLKTP

SEQ ID NO: 60275 - protein, 35 aa, Artificial Sequence; identical to SEQ ID NO: 17495
  Cyclic GFR-binding peptide
  MOD_RES (2), (4): Xaa is C or S

SEQ ID NO: 60276 - protein, 26 aa, Artificial Sequence
  Cyclic GFR-binding peptide
KVVMNEYKFKIVNNSSDLYLVSIPEL

SEQ ID NO: 60277 - protein, 29 aa, Artificial Sequence
  Cyclic GFR-binding peptide
  MOD_RES (28), (29): Xaa is C or S
MGRYKKLYTVVGKDFYLISIANLKTPVXX

SEQ ID NO: 60278 - protein, 29 aa, Artificial Sequence
  Cyclic GFR-binding peptide
  MOD_RES (27), (28): Xaa is C or S
DYHYKLVVNNAADKYLISIPSLRAPVXXS

SEQ ID NO: 60279 - protein, 24 aa, Artificial Sequence
  Cyclic GFR-binding peptide
VMNEYQKYIVNNSSDIYLVSIPSL

SEQ ID NO: 60280 - protein, 34 aa, Artificial Sequence; identical to SEQ ID NO: 17498
  Cyclic GFR-binding peptide
  MOD_RES (1), (33), (34): Xaa is C or S

SEQ ID NO: 60281 - protein, 35 aa, Artificial Sequence; identical to SEQ ID NO: 17499
  Cyclic GFR-binding peptide
  MOD_RES (2), (33), (34): Xaa is C or S

SEQ ID NO: 60282 - protein, 32 aa, Artificial Sequence
  Cyclic GFR-binding peptide
  MOD_RES (26), (27): Xaa is C or S
EYQKYIKPTKGIIYLISIPSLDQSVXXPSASA

SEQ ID NO: 60283 - protein, 29 aa, Artificial Sequence
  Cyclic GFR-binding peptide
  MOD_RES (29), (29): Xaa is C or S
VMNEYKFKIVNNSSDLYLVSIPELKTPAX

SEQ ID NO: 60284 - protein, 38 aa, Artificial Sequence; identical to SEQ ID NO: 17502
  Cyclic GFR-binding peptide
  MOD_RES (2), (33), (34): Xaa is C or S

SEQ ID NO: 60285 - protein, 31 aa, Artificial Sequence; identical to SEQ ID NO: 17503
  Cyclic GFR-binding peptide
  MOD_RES (31), (31): Xaa is C or S

SEQ ID NO: 60286 - protein, 33 aa, Artificial Sequence; identical to SEQ ID NO: 17506
  Cyclic GFR-binding peptide
  MOD_RES (31), (32): Xaa is C or S

SEQ ID NO: 60287 - protein, 30 aa, Artificial Sequence
  Cyclic GFR-binding peptide
  MOD_RES (2), (4): Xaa is C or S
HXGXARVVMNEYQKYIVNSSDDIYLVSIPS

SEQ ID NO: 60288 - protein, 26 aa, Artificial Sequence
  Cyclic GFR-binding peptide
VMNEYQKYIVNSSDDIYLVSIPSLKT

SEQ ID NO: 60289 - protein, 28 aa, Artificial Sequence
  Cyclic GFR-binding peptide
  MOD_RES (1), (1): Xaa is C or S
XAEVVMDYHYKLVVNNAADKYLISIPSL

SEQ ID NO: 60290 - protein, 28 aa, Artificial Sequence
  Cyclic GFR-binding peptide
VMNEYQKYIVNSSDDIYLVSIPSLQTPA

SEQ ID NO: 60291 - protein, 35 aa, Artificial Sequence; identical to SEQ ID NO: 17509
  Cyclic GFR-binding peptide
  MOD_RES (1), (34), (35): Xaa is C or S

SEQ ID NO: 60292 - protein, 34 aa, Artificial Sequence; identical to SEQ ID NO: 17510
  Cyclic GFR-binding peptide
  MOD_RES (31), (32): Xaa is C or S

SEQ ID NO: 60293 - protein, 26 aa, Artificial Sequence
  Cyclic GFR-binding peptide
MGYHYKLYTVVGKDKYLISIPSLKTP

SEQ ID NO: 60294 - protein, 28 aa, Artificial Sequence
  Cyclic GFR-binding peptide
VIMEYQKYIKPTKGIIYLISIPSLDQSV

SEQ ID NO: 60295 - protein, 30 aa, Artificial Sequence
  Cyclic GFR-binding peptide
  MOD_RES (26), (27): Xaa is C or S
EYQKYYTVVGKDIYLISIPSLKTPVXXAKS

SEQ ID NO: 60296 - protein, 34 aa, Artificial Sequence; identical to SEQ ID NO: 17514
  Cyclic GFR-binding peptide
  MOD_RES (31), (32): Xaa is C or S

SEQ ID NO: 60297 - protein, 30 aa, Artificial Sequence
  Cyclic GFR-binding peptide
  MOD_RES (26), (27): Xaa is C or S
YHYKLVVNNAADKYLISIPSLRAPVXXSAP

SEQ ID NO: 60298 - protein, 39 aa, Artificial Sequence; identical to SEQ ID NO: 17521
  Cyclic GFR-binding peptide
  MOD_RES (1), (33), (34): Xaa is C or S

SEQ ID NO: 60299 - protein, 37 aa, Artificial Sequence; identical to SEQ ID NO: 17522
  Cyclic GFR-binding peptide
  MOD_RES (31), (32): Xaa is C or S

SEQ ID NO: 60300 - protein, 26 aa, Artificial Sequence
  Cyclic GFR-binding peptide
  MOD_RES (1), (1): Xaa is C or S
XSKVIMEYKFKIKPTKGILYLISIPE

SEQ ID NO: 60301 - protein, 39 aa, Artificial Sequence; identical to SEQ ID NO: 17526
  Cyclic GFR-binding peptide
  MOD_RES (1), (33), (34): Xaa is C or S

SEQ ID NO: 60302 - protein, 30 aa, Artificial Sequence
  Cyclic GFR-binding peptide
  MOD_RES (26), (27): Xaa is C or S
EYQKYIVNNSSDIYLVSIPSLKTPAXXAKP

SEQ ID NO: 60303 - protein, 33 aa, Artificial Sequence
  Cyclic GFR-binding peptide
  MOD_RES (30), (31): Xaa is C or S
VVMEEYQKYVVKDYEDIYLMSIPSLETPVXXAK

SEQ ID NO: 60304 - protein, 41 aa, Artificial Sequence; identical to SEQ ID NO: 17527
  Cyclic GFR-binding peptide
  MOD_RES (1), (3), (35): Xaa is C or S

SEQ ID NO: 60305 - protein, 38 aa, Artificial Sequence; identical to SEQ ID NO: 17528
  Cyclic GFR-binding peptide
  MOD_RES (1), (3), (35), (36): Xaa is C or S

SEQ ID NO: 60306 - protein, 31 aa, Artificial Sequence
  Cyclic GFR-binding peptide
  MOD_RES (28), (29): Xaa is C or S
IMEYQKYVKPKRGVIYLISIPSLAQPVXXPA

SEQ ID NO: 60307 - protein, 22 aa, Artificial Sequence
  Cyclic GFR-binding peptide
EYKFKVVKDYEDLYLMSIPELE

SEQ ID NO: 60308 - protein, 34 aa, Artificial Sequence; identical to SEQ ID NO: 17536
  Cyclic GFR-binding peptide
  MOD_RES (2), (4): Xaa is C or S

SEQ ID NO: 60309 - protein, 26 aa, Artificial Sequence
  Cyclic GFR-binding peptide
VVMEEYQKYVVKDYEDIYLMSIPSLE

SEQ ID NO: 60310 - protein, 39 aa, Artificial Sequence; identical to SEQ ID NO: 17542
  Cyclic GFR-binding peptide
  MOD_RES (1), (33), (34): Xaa is C or S

SEQ ID NO: 60311 - protein, 27 aa, Artificial Sequence
  Cyclic GFR-binding peptide
KVVMEYKFKVKPTRGVLYLISIPELDQ

SEQ ID NO: 60312 - protein, 42 aa, Artificial Sequence; identical to SEQ ID NO: 17547
  Cyclic GFR-binding peptide
  MOD_RES (2), (4), (36), (37): Xaa is C or S

SEQ ID NO: 60313 - protein, 23 aa, Artificial Sequence
  Cyclic GFR-binding peptide
GEYQKYYTVVGKDIYLISIPSLK

SEQ ID NO: 60314 - protein, 23 aa, Artificial Sequence
  Cyclic GFR-binding peptide
EYQKYIVNSSDDIYLVSIPSLKT

SEQ ID NO: 60315 - protein, 29 aa, Artificial Sequence
  Cyclic GFR-binding peptide
  MOD_RES (1), (1): Xaa is C or S
XAEVVMDYHYKLVVNNAADKYLISIPSLR

SEQ ID NO: 60316 - protein, 29 aa, Artificial Sequence
  Cyclic GFR-binding peptide
  MOD_RES (29), (29): Xaa is C or S
AMGRYKKLYTVVGKDFYLISIANLKTPVX

SEQ ID NO: 60317 - protein, 35 aa, Artificial Sequence; identical to SEQ ID NO: 17555
  Cyclic GFR-binding peptide
  MOD_RES (31), (32): Xaa is C or S

SEQ ID NO: 60318 - protein, 33 aa, Artificial Sequence
  Cyclic GFR-binding peptide
  MOD_RES (1), (3): Xaa is C or S
XGXARVVMNEYKFKIVNSSDDLYLVSIPELQTP

SEQ ID NO: 60319 - protein, 38 aa, Artificial Sequence; identical to SEQ ID NO: 17559
  Cyclic GFR-binding peptide
  MOD_RES (32), (33): Xaa is C or S

SEQ ID NO: 60320 - protein, 36 aa, Artificial Sequence; identical to SEQ ID NO: 17562
  Cyclic GFR-binding peptide
  MOD_RES (1), (3), (34), (35): Xaa is C or S

SEQ ID NO: 60321 - protein, 40 aa, Artificial Sequence; identical to SEQ ID NO: 17563
  Cyclic GFR-binding peptide
  MOD_RES (2), (4), (36), (37): Xaa is C or S

SEQ ID NO: 60322 - protein, 34 aa, Artificial Sequence; identical to SEQ ID NO: 17564
  Cyclic GFR-binding peptide
  MOD_RES (2), (34): Xaa is C or S

SEQ ID NO: 60323 - protein, 26 aa, Artificial Sequence
  Cyclic GFR-binding peptide
GEYQKYYTVVGKDIYLISIPSLKTPV

SEQ ID NO: 60324 - protein, 27 aa, Artificial Sequence
  Cyclic GFR-binding peptide
SRVIMEYQKYVKPKRGVIYLISIPSLA

SEQ ID NO: 60325 - protein, 34 aa, Artificial Sequence
  Cyclic GFR-binding peptide
  MOD_RES (30), (31): Xaa is C or S
SMGEEYQKYTPVGMDDIYLVSIPSLKTPVXXAKG

SEQ ID NO: 60326 - protein, 23 aa, Artificial Sequence
  Cyclic GFR-binding peptide
EYKFKVKPTRGVLYLISIPELDQ

SEQ ID NO: 60327 - protein, 30 aa, Artificial Sequence
  Cyclic GFR-binding peptide
  MOD_RES (2), (4): Xaa is C or S
RXGXESVAMGYHYKLYTVVGKDKYLISIPS

SEQ ID NO: 60328 - protein, 37 aa, Artificial Sequence; identical to SEQ ID NO: 17566
  Cyclic GFR-binding peptide
  MOD_RES (1), (34), (35): Xaa is C or S

SEQ ID NO: 60329 - protein, 26 aa, Artificial Sequence
  Cyclic GFR-binding peptide
VMNEYKFKIVNNSSDLYLVSIPELKT

SEQ ID NO: 60330 - protein, 28 aa, Artificial Sequence
  Cyclic GFR-binding peptide
  MOD_RES (27), (28): Xaa is C or S
GYHYKLYTVVGKDKYLISIPSLKTPVXX

SEQ ID NO: 60331 - protein, 32 aa, Artificial Sequence
  Cyclic GFR-binding peptide
  MOD_RES (26), (27): Xaa is C or S
EYQKYVKPTRGVIYLISIPSLDQPVXXPSASA

SEQ ID NO: 60332 - protein, 30 aa, Artificial Sequence
  Cyclic GFR-binding peptide
  MOD_RES (1), (3): Xaa is C or S
XKXSKVIMEYKFKIKPTKGILYLISIPELD

SEQ ID NO: 60333 - protein, 31 aa, Artificial Sequence; identical to SEQ ID NO: 17572
  Cyclic GFR-binding peptide
  MOD_RES (31), (31): Xaa is C or S

SEQ ID NO: 60334 - protein, 36 aa, Artificial Sequence; identical to SEQ ID NO: 17575
  Cyclic GFR-binding peptide
  MOD_RES (1), (33), (34): Xaa is C or S

SEQ ID NO: 60335 - protein, 36 aa, Artificial Sequence; identical to SEQ ID NO: 17576
  Cyclic GFR-binding peptide
  MOD_RES (31), (32): Xaa is C or S

SEQ ID NO: 60336 - protein, 30 aa, Artificial Sequence
  Cyclic GFR-binding peptide
  MOD_RES (1), (3): Xaa is C or S
XKXSKVVMEYQKYVKPTRGVIYLISIPSLD

SEQ ID NO: 60337 - protein, 36 aa, Artificial Sequence; identical to SEQ ID NO: 17578
  Cyclic GFR-binding peptide
  MOD_RES (31), (32): Xaa is C or S

SEQ ID NO: 60338 - protein, 27 aa, Artificial Sequence
  Cyclic GFR-binding peptide
EVVMEEYKFKVVKDYEDLYLMSIPELE

SEQ ID NO: 60339 - protein, 35 aa, Artificial Sequence; identical to SEQ ID NO: 17582
  Cyclic GFR-binding peptide
  MOD_RES (2), (34), (35): Xaa is C or S

SEQ ID NO: 60340 - protein, 28 aa, Artificial Sequence
  Cyclic GFR-binding peptide
RVVMNEYKFKIVNSSDDLYLVSIPELKT

SEQ ID NO: 60341 - protein, 28 aa, Artificial Sequence
  Cyclic GFR-binding peptide
  MOD_RES (28), (28): Xaa is C or S
GEEYKFKTPVGMDDLYLVSIPELKTPVX

SEQ ID NO: 60342 - protein, 39 aa, Artificial Sequence; identical to SEQ ID NO: 17583
  Cyclic GFR-binding peptide
  MOD_RES (1), (3), (35), (36): Xaa is C or S

SEQ ID NO: 60343 - protein, 21 aa, Artificial Sequence
  Cyclic GFR-binding peptide
EYKFKVVKDYEDLYLMSIPEL

SEQ ID NO: 60344 - protein, 35 aa, Artificial Sequence; identical to SEQ ID NO: 17586
  Cyclic GFR-binding peptide
  MOD_RES (2), (34), (35): Xaa is C or S

SEQ ID NO: 60345 - protein, 35 aa, Artificial Sequence; identical to SEQ ID NO: 17587
  Cyclic GFR-binding peptide
  MOD_RES (2), (34), (35): Xaa is C or S

SEQ ID NO: 60346 - protein, 33 aa, Artificial Sequence
  Cyclic GFR-binding peptide
  MOD_RES (28), (29): Xaa is C or S
MGRYKKLYTVVGKDFYLISIANLKTPVXXAKSA

SEQ ID NO: 60347 - protein, 39 aa, Artificial Sequence; identical to SEQ ID NO: 17590
  Cyclic GFR-binding peptide
  MOD_RES (2), (34), (35): Xaa is C or S

SEQ ID NO: 60348 - protein, 31 aa, Artificial Sequence; identical to SEQ ID NO: 17592
  Cyclic GFR-binding peptide
  MOD_RES (31), (31): Xaa is C or S

SEQ ID NO: 60349 - protein, 33 aa, Artificial Sequence
  Cyclic GFR-binding peptide
  MOD_RES (27), (27): Xaa is C or S
NEYQKYIVNSSDDIYLVSIPSLKTPAXTPKTVH

SEQ ID NO: 60350 - protein, 30 aa, Artificial Sequence
  Cyclic GFR-binding peptide
EAVSMGEEYQKYTPVGMDDIYLVSIPSLKT

SEQ ID NO: 60351 - protein, 34 aa, Artificial Sequence; identical to SEQ ID NO: 17602
  Cyclic GFR-binding peptide
  MOD_RES (32), (33): Xaa is C or S

SEQ ID NO: 60352 - protein, 36 aa, Artificial Sequence; identical to SEQ ID NO: 17604
  Cyclic GFR-binding peptide
  MOD_RES (2), (34), (35): Xaa is C or S

SEQ ID NO: 60353 - protein, 29 aa, Artificial Sequence
  Cyclic GFR-binding peptide
  MOD_RES (28), (29): Xaa is C or S
IMEYQKYVKPKRGVIYLISIPSLAQPVXX

SEQ ID NO: 60354 - protein, 20 aa, Artificial Sequence
  Cyclic GFR-binding peptide
EYKFKVKPKRGVLYLISIPE

SEQ ID NO: 60355 - protein, 29 aa, Artificial Sequence
  Cyclic GFR-binding peptide
  MOD_RES (29), (29): Xaa is C or S
MGEEYKFKTPVGMDDLYLVSIPELKTPVX

SEQ ID NO: 60356 - protein, 25 aa, Artificial Sequence
  Cyclic GFR-binding peptide
MDYHYKLVVNNAADKYLISIPSLRA

SEQ ID NO: 60357 - protein, 24 aa, Artificial Sequence
  Cyclic GFR-binding peptide
MEYKFKVKPKRGVLYLISIPELAQ

SEQ ID NO: 60358 - protein, 41 aa, Artificial Sequence; identical to SEQ ID NO: 17612
  Cyclic GFR-binding peptide
  MOD_RES (1), (3), (35): Xaa is C or S

SEQ ID NO: 60359 - protein, 34 aa, Artificial Sequence; identical to SEQ ID NO: 17618
  Cyclic GFR-binding peptide
  MOD_RES (32), (33): Xaa is C or S

SEQ ID NO: 60360 - protein, 33 aa, Artificial Sequence
  Cyclic GFR-binding peptide
  MOD_RES (30), (31): Xaa is C or S
VVMDRYKKLVVNNAADFYLISIANLRAPVXXSA

SEQ ID NO: 60361 - protein, 37 aa, Artificial Sequence; identical to SEQ ID NO: 17620
  Cyclic GFR-binding peptide
  MOD_RES (1), (3), (35), (36): Xaa is C or S

SEQ ID NO: 60362 - protein, 31 aa, Artificial Sequence
  Cyclic GFR-binding peptide
  MOD_RES (29), (30): Xaa is C or S
MGEEYKFKTPVGMDDLYLVSIPELKTPVXXA

SEQ ID NO: 60363 - protein, 26 aa, Artificial Sequence
  Cyclic GFR-binding peptide
VMDEYQKYVVKENEDIYLMSIPSLET

SEQ ID NO: 60364 - protein, 33 aa, Artificial Sequence; identical to SEQ ID NO: 17623
  Cyclic GFR-binding peptide
  MOD_RES (1), (33): Xaa is C or S

SEQ ID NO: 60365 - protein, 29 aa, Artificial Sequence
  Cyclic GFR-binding peptide
  MOD_RES (29), (29): Xaa is C or S
VIMEYKFKIKPTKGILYLISIPELDQSVX

SEQ ID NO: 60366 - protein, 34 aa, Artificial Sequence
  Cyclic GFR-binding peptide
  MOD_RES (2), (4): Xaa is C or S
HXGXSRVVMNEYQKYIVNSSDDIYLVSIPSLKTP

SEQ ID NO: 60367 - protein, 34 aa, Artificial Sequence; identical to SEQ ID NO: 17624
  Cyclic GFR-binding peptide
  MOD_RES (31), (32): Xaa is C or S

SEQ ID NO: 60368 - protein, 39 aa, Artificial Sequence; identical to SEQ ID NO: 17628
  Cyclic GFR-binding peptide
  MOD_RES (1), (3), (34), (35): Xaa is C or S

SEQ ID NO: 60369 - protein, 32 aa, Artificial Sequence
  Cyclic GFR-binding peptide
  MOD_RES (27), (28): Xaa is C or S
MEYKFKVKPKRGVLYLISIPELAQPVXXPAAS

SEQ ID NO: 60370 - protein, 36 aa, Artificial Sequence; identical to SEQ ID NO: 17631
  Cyclic GFR-binding peptide
  MOD_RES (1), (33), (34): Xaa is C or S

SEQ ID NO: 60371 - protein, 29 aa, Artificial Sequence
  Cyclic GFR-binding peptide
VSMGEEYQKYTPVGMDDIYLVSIPSLKTP

SEQ ID NO: 60372 - protein, 27 aa, Artificial Sequence
  Cyclic GFR-binding peptide
MGEYQKYYTVVGKDIYLISIPSLKTPV

SEQ ID NO: 60373 - protein, 25 aa, Artificial Sequence
  Cyclic GFR-binding peptide
VIMEYQKYIKPTKGIIYLISIPSLD

SEQ ID NO: 60374 - protein, 32 aa, Artificial Sequence; identical to SEQ ID NO: 17634
  Cyclic GFR-binding peptide
  MOD_RES (1), (1): Xaa is C or S

SEQ ID NO: 60375 - protein, 25 aa, Artificial Sequence
  Cyclic GFR-binding peptide
YHYKLYTVVGKDKYLISIPSLKTPV

SEQ ID NO: 60376 - protein, 34 aa, Artificial Sequence; identical to SEQ ID NO: 17639
  Cyclic GFR-binding peptide
  MOD_RES (33), (34): Xaa is C or S

SEQ ID NO: 60377 - protein, 29 aa, Artificial Sequence
  Cyclic GFR-binding peptide
  MOD_RES (2), (4): Xaa is C or S
SXKXSRVIMEYKFKVKPKRGVLYLISIPE

SEQ ID NO: 60378 - protein, 25 aa, Artificial Sequence
  Cyclic GFR-binding peptide
GRYKKLYTVVGKDFYLISIANLKTP

SEQ ID NO: 60379 - protein, 38 aa, Artificial Sequence; identical to SEQ ID NO: 17642
  Cyclic GFR-binding peptide
  MOD_RES (1), (3), (35): Xaa is C or S

SEQ ID NO: 60380 - protein, 31 aa, Artificial Sequence; identical to SEQ ID NO: 17643
  Cyclic GFR-binding peptide

SEQ ID NO: 60381 - protein, 28 aa, Artificial Sequence
  Cyclic GFR-binding peptide
  MOD_RES (26), (27): Xaa is C or S
EYKFKIKPTKGILYLISIPELDQSVXXP

SEQ ID NO: 60382 - protein, 30 aa, Artificial Sequence
  Cyclic GFR-binding peptide
  MOD_RES (1), (1): Xaa is C or S
XARVVMNEYKFKIVNSSDDLYLVSIPELQT

SEQ ID NO: 60383 - protein, 28 aa, Artificial Sequence
  Cyclic GFR-binding peptide
VVMNEYKFKIVNNSSDLYLVSIPELKTP

SEQ ID NO: 60384 - protein, 38 aa, Artificial Sequence; identical to SEQ ID NO: 17647
  Cyclic GFR-binding peptide
  MOD_RES (32), (33): Xaa is C or S

SEQ ID NO: 60385 - protein, 32 aa, Artificial Sequence
  Cyclic GFR-binding peptide
  MOD_RES (2), (4): Xaa is C or S
RXGXESVAMGYHYKLYTVVGKDKYLISIPSLK

SEQ ID NO: 60386 - protein, 35 aa, Artificial Sequence; identical to SEQ ID NO: 17648
  Cyclic GFR-binding peptide
  MOD_RES (31), (32): Xaa is C or S

SEQ ID NO: 60387 - protein, 25 aa, Artificial Sequence
  Cyclic GFR-binding peptide
GEEYQKYTPVGMDDIYLVSIPSLKT

SEQ ID NO: 60388 - protein, 31 aa, Artificial Sequence
  Cyclic GFR-binding peptide
  MOD_RES (2), (2): Xaa is C or S
GXAEVVMDEYKFKVVNNAADLYLISIPELRA

SEQ ID NO: 60389 - protein, 33 aa, Artificial Sequence
  Cyclic GFR-binding peptide
  MOD_RES (27), (28): Xaa is C or S
DYHYKLVVNNAADKYLISIPSLRAPVXXSAPAA

SEQ ID NO: 60390 - protein, 31 aa, Artificial Sequence; identical to SEQ ID NO: 17652
  Cyclic GFR-binding peptide

SEQ ID NO: 60391 - protein, 38 aa, Artificial Sequence; identical to SEQ ID NO: 17657
  Cyclic GFR-binding peptide
  MOD_RES (2), (34), (35): Xaa is C or S

SEQ ID NO: 60392 - protein, 40 aa, Artificial Sequence; identical to SEQ ID NO: 17658
  Cyclic GFR-binding peptide
  MOD_RES (2), (34), (35): Xaa is C or S

SEQ ID NO: 60393 - protein, 29 aa, Artificial Sequence
  Cyclic GFR-binding peptide
  MOD_RES (26), (27): Xaa is C or S
YHYKLVVNNAADKYLISIPSLRAPVXXSA

SEQ ID NO: 60394 - protein, 24 aa, Artificial Sequence
  Cyclic GFR-binding peptide
MDRYKKLVVNNAADFYLISIANLR

SEQ ID NO: 60395 - protein, 37 aa, Artificial Sequence; identical to SEQ ID NO: 17661
  Cyclic GFR-binding peptide
  MOD_RES (2), (34), (35): Xaa is C or S

SEQ ID NO: 60396 - protein, 26 aa, Artificial Sequence
  Cyclic GFR-binding peptide
  MOD_RES (26), (26): Xaa is C or S
YHYKLVVNNAADKYLISIPSLRAPVX

SEQ ID NO: 60397 - protein, 29 aa, Artificial Sequence
  Cyclic GFR-binding peptide
  MOD_RES (1), (3): Xaa is C or S
XGXGEVVMDEYQKYVVKENEDIYLMSIPS

SEQ ID NO: 60398 - protein, 28 aa, Artificial Sequence
  Cyclic GFR-binding peptide
  MOD_RES (28), (28): Xaa is C or S
IMEYQKYVKPKRGVIYLISIPSLAQPVX

SEQ ID NO: 60399 - protein, 37 aa, Artificial Sequence; identical to SEQ ID NO: 17670
  Cyclic GFR-binding peptide
  MOD_RES (31), (32): Xaa is C or S

SEQ ID NO: 60400 - protein, 32 aa, Artificial Sequence
  Cyclic GFR-binding peptide
  MOD_RES (30), (31): Xaa is C or S
VAMGEYQKYYTVVGKDIYLISIPSLKTPVXXA

SEQ ID NO: 60401 - protein, 39 aa, Artificial Sequence; identical to SEQ ID NO: 17675
  Cyclic GFR-binding peptide
  MOD_RES (2), (34), (35): Xaa is C or S

SEQ ID NO: 60402 - protein, 31 aa, Artificial Sequence
  Cyclic GFR-binding peptide
  MOD_RES (27), (27): Xaa is C or S
NEYKFKIVNSSDDLYLVSIPELKTPAXTPKT

SEQ ID NO: 60403 - protein, 27 aa, Artificial Sequence
  Cyclic GFR-binding peptide
  MOD_RES (26), (27): Xaa is C or S
EYKFKIVNNSSDLYLVSIPELKTPAXX

SEQ ID NO: 60404 - protein, 35 aa, Artificial Sequence; identical to SEQ ID NO: 17680
  Cyclic GFR-binding peptide
  MOD_RES (31), (32): Xaa is C or S

SEQ ID NO: 60405 - protein, 35 aa, Artificial Sequence
  Cyclic GFR-binding peptide
  MOD_RES (30), (31): Xaa is C or S
VAMGRYKKLYTVVGKDFYLISIANLKTPVXXAKSA

SEQ ID NO: 60406 - protein, 28 aa, Artificial Sequence
  Cyclic GFR-binding peptide
  MOD_RES (27), (28): Xaa is C or S
EEYQKYTPVGMDDIYLVSIPSLKTPVXX

SEQ ID NO: 60407 - protein, 30 aa, Artificial Sequence
  Cyclic GFR-binding peptide
GEVVMDEYQKYVVKENEDIYLMSIPSLETP

SEQ ID NO: 60408 - protein, 29 aa, Artificial Sequence
  Cyclic GFR-binding peptide
  MOD_RES (1), (1): Xaa is C or S
XGEVVMEEYQKYVVKDYEDIYLMSIPSLE

SEQ ID NO: 60409 - protein, 39 aa, Artificial Sequence; identical to SEQ ID NO: 17684
  Cyclic GFR-binding peptide
  MOD_RES (2), (4), (36), (37): Xaa is C or S

SEQ ID NO: 60410 - protein, 33 aa, Artificial Sequence; identical to SEQ ID NO: 17685
  Cyclic GFR-binding peptide
  MOD_RES (2), (2): Xaa is C or S

SEQ ID NO: 60411 - protein, 37 aa, Artificial Sequence; identical to SEQ ID NO: 17688
  Cyclic GFR-binding peptide
  MOD_RES (2), (4), (36), (37): Xaa is C or S

SEQ ID NO: 60412 - protein, 28 aa, Artificial Sequence
  Cyclic GFR-binding peptide
  MOD_RES (1), (1): Xaa is C or S
XGEVVMDEYQKYVVKENEDIYLMSIPSL

SEQ ID NO: 60413 - protein, 32 aa, Artificial Sequence
  Cyclic GFR-binding peptide
  MOD_RES (1), (3): Xaa is C or S
XGXGEVVMEEYKFKVVKDYEDLYLMSIPELET

SEQ ID NO: 60414 - protein, 28 aa, Artificial Sequence
  Cyclic GFR-binding peptide
  MOD_RES (2), (2): Xaa is C or S
GXAKVVMNEYKFKIVNNSSDLYLVSIPE

SEQ ID NO: 60415 - protein, 34 aa, Artificial Sequence; identical to SEQ ID NO: 17693
  Cyclic GFR-binding peptide
  MOD_RES (2), (33), (34): Xaa is C or S

SEQ ID NO: 60416 - protein, 32 aa, Artificial Sequence
  Cyclic GFR-binding peptide
  MOD_RES (28), (29): Xaa is C or S
MDRYKKLVVNNAADFYLISIANLRAPVXXSAP

SEQ ID NO: 60417 - protein, 35 aa, Artificial Sequence; identical to SEQ ID NO: 17700
  Cyclic GFR-binding peptide
  MOD_RES (2), (4), (35): Xaa is C or S

SEQ ID NO: 60418 - protein, 30 aa, Artificial Sequence
  Cyclic GFR-binding peptide
  MOD_RES (29), (30): Xaa is C or S
VMNEYQKYIVNSSDDIYLVSIPSLQTPAXX

SEQ ID NO: 60419 - protein, 33 aa, Artificial Sequence
  Cyclic GFR-binding peptide
  MOD_RES (27), (28): Xaa is C or S
NEYKFKIVNNSSDLYLVSIPELKTPAXXAKPVA

SEQ ID NO: 60420 - protein, 26 aa, Artificial Sequence
  Cyclic GFR-binding peptide
VMEEYKFKVVKDYEDLYLMSIPELET

SEQ ID NO: 60421 - protein, 33 aa, Artificial Sequence
  Cyclic GFR-binding peptide
  MOD_RES (2), (4): Xaa is C or S
RXGXAEVVMDEYKFKVVNNAADLYLISIPELRA

SEQ ID NO: 60422 - protein, 28 aa, Artificial Sequence
  Cyclic GFR-binding peptide
AVSMGEEYQKYTPVGMDDIYLVSIPSLK

SEQ ID NO: 60423 - protein, 40 aa, Artificial Sequence; identical to SEQ ID NO: 17702
  Cyclic GFR-binding peptide
  MOD_RES (2), (35), (36): Xaa is C or S

SEQ ID NO: 60424 - protein, 31 aa, Artificial Sequence
  Cyclic GFR-binding peptide
  MOD_RES (26), (27): Xaa is C or S
EYQKYVKPKRGVIYLISIPSLAQPVXXPAAS

SEQ ID NO: 60425 - protein, 34 aa, Artificial Sequence
  Cyclic GFR-binding peptide
  MOD_RES (29), (30): Xaa is C or S
AMGYHYKLYTVVGKDKYLISIPSLKTPVXXAKSA

SEQ ID NO: 60426 - protein, 29 aa, Artificial Sequence
  Cyclic GFR-binding peptide
KVVMEYQKYVKPTRGVIYLISIPSLDQPV

SEQ ID NO: 60427 - protein, 25 aa, Artificial Sequence
  Cyclic GFR-binding peptide
IMEYKFKIKPTKGILYLISIPELDQ

SEQ ID NO: 60428 - protein, 35 aa, Artificial Sequence
  Cyclic GFR-binding peptide
  MOD_RES (30), (31): Xaa is C or S
VVMDEYQKYVVKENEDIYLMSIPSLETPVXXAKPI

SEQ ID NO: 60429 - protein, 30 aa, Artificial Sequence
  Cyclic GFR-binding peptide
  MOD_RES (1), (3): Xaa is C or S
XGXAEVVMDRYKKLVVNNAADFYLISIANL

SEQ ID NO: 60430 - protein, 27 aa, Artificial Sequence
  Cyclic GFR-binding peptide
ARVVMNEYKFKIVNSSDDLYLVSIPEL

SEQ ID NO: 60431 - protein, 39 aa, Artificial Sequence; identical to SEQ ID NO: 17711
  Cyclic GFR-binding peptide
  MOD_RES (2), (34), (35): Xaa is C or S

SEQ ID NO: 60432 - protein, 31 aa, Artificial Sequence
  Cyclic GFR-binding peptide
  MOD_RES (2), (2): Xaa is C or S
KXSKVIMEYKFKIKPTKGILYLISIPELDQS

SEQ ID NO: 60433 - protein, 34 aa, Artificial Sequence
  Cyclic GFR-binding peptide
  MOD_RES (31), (32): Xaa is C or S
VSMGEEYKFKTPVGMDDLYLVSIPELKTPVXXAK

SEQ ID NO: 60434 - protein, 38 aa, Artificial Sequence; identical to SEQ ID NO: 17715
  Cyclic GFR-binding peptide
  MOD_RES (2), (4), (36), (37): Xaa is C or S

SEQ ID NO: 60435 - protein, 25 aa, Artificial Sequence
  Cyclic GFR-binding peptide
YHYKLVVNNAADKYLISIPSLRAPV

SEQ ID NO: 60436 - protein, 22 aa, Artificial Sequence
  Cyclic GFR-binding peptide
EEYKFKTPVGMDDLYLVSIPEL

SEQ ID NO: 60437 - protein, 35 aa, Artificial Sequence
  Cyclic GFR-binding peptide
  MOD_RES (30), (31): Xaa is C or S
VVMNEYKFKIVNSSDDLYLVSIPELQTPAXXPKPV

SEQ ID NO: 60438 - protein, 23 aa, Artificial Sequence
  Cyclic GFR-binding peptide
MEYQKYVKPKRGVIYLISIPSLA

SEQ ID NO: 60439 - protein, 29 aa, Artificial Sequence
  Cyclic GFR-binding peptide
  MOD_RES (28), (29): Xaa is C or S
MNEYQKYIVNNSSDIYLVSIPSLKTPAXX

SEQ ID NO: 60440 - protein, 26 aa, Artificial Sequence
  Cyclic GFR-binding peptide
GEVVMDEYQKYVVKENEDIYLMSIPS

SEQ ID NO: 60441 - protein, 31 aa, Artificial Sequence
  Cyclic GFR-binding peptide
  MOD_RES (2), (4): Xaa is C or S
HXGXAKVVMNEYKFKIVNNSSDLYLVSIPEL

SEQ ID NO: 60442 - protein, 25 aa, Artificial Sequence
  Cyclic GFR-binding peptide
MNEYKFKIVNSSDDLYLVSIPELQT

SEQ ID NO: 60443 - protein, 27 aa, Artificial Sequence
  Cyclic GFR-binding peptide
VVMNEYQKYIVNSSDDIYLVSIPSLQT

SEQ ID NO: 60444 - protein, 36 aa, Artificial Sequence; identical to SEQ ID NO: 17727
  Cyclic GFR-binding peptide
  MOD_RES (31), (32): Xaa is C or S

SEQ ID NO: 60445 - protein, 38 aa, Artificial Sequence; identical to SEQ ID NO: 17729
  Cyclic GFR-binding peptide
  MOD_RES (1), (33), (34): Xaa is C or S

SEQ ID NO: 60446 - protein, 28 aa, Artificial Sequence
  Cyclic GFR-binding peptide
VMDEYKFKVVNNAADLYLISIPELRAPV

SEQ ID NO: 60447 - protein, 30 aa, Artificial Sequence
  Cyclic GFR-binding peptide
  MOD_RES (2), (4): Xaa is C or S
HXGXSRVVMNEYKFKIVNSSDDLYLVSIPE

SEQ ID NO: 60448 - protein, 23 aa, Artificial Sequence
  Cyclic GFR-binding peptide
EYKFKTPVGMDDLYLVSIPELKT

SEQ ID NO: 60449 - protein, 34 aa, Artificial Sequence; identical to SEQ ID NO: 17731
  Cyclic GFR-binding peptide
  MOD_RES (1), (3): Xaa is C or S

SEQ ID NO: 60450 - protein, 29 aa, Artificial Sequence
  Cyclic GFR-binding peptide
  MOD_RES (26), (27): Xaa is C or S
EYKFKVVKENEDLYLMSIPELETPVXXAK

SEQ ID NO: 60451 - protein, 31 aa, Artificial Sequence
  Cyclic GFR-binding peptide
  MOD_RES (29), (30): Xaa is C or S
AMGRYKKLYTVVGKDFYLISIANLKTPVXXA

SEQ ID NO: 60452 - protein, 35 aa, Artificial Sequence
  Cyclic GFR-binding peptide
  MOD_RES (30), (31): Xaa is C or S
KVIMEYQKYIKPTKGIIYLISIPSLDQSVXXPSAS

SEQ ID NO: 60453 - protein, 36 aa, Artificial Sequence; identical to SEQ ID NO: 17740
  Cyclic GFR-binding peptide
  MOD_RES (1), (33), (34): Xaa is C or S

SEQ ID NO: 60454 - protein, 36 aa, Artificial Sequence; identical to SEQ ID NO: 17744
  Cyclic GFR-binding peptide
  MOD_RES (1), (3), (35), (36): Xaa is C or S

SEQ ID NO: 60455 - protein, 33 aa, Artificial Sequence; identical to SEQ ID NO: 17745
  Cyclic GFR-binding peptide
  MOD_RES (1), (33): Xaa is C or S

SEQ ID NO: 60456 - protein, 32 aa, Artificial Sequence
  Cyclic GFR-binding peptide
  MOD_RES (30), (31): Xaa is C or S
VAMGYHYKLYTVVGKDKYLISIPSLKTPVXXA

SEQ ID NO: 60457 - protein, 38 aa, Artificial Sequence; identical to SEQ ID NO: 17750
  Cyclic GFR-binding peptide
  MOD_RES (2), (35), (36): Xaa is C or S

SEQ ID NO: 60458 - protein, 26 aa, Artificial Sequence
  Cyclic GFR-binding peptide
MGEEYQKYTPVGMDDIYLVSIPSLKT

SEQ ID NO: 60459 - protein, 31 aa, Artificial Sequence; identical to SEQ ID NO: 17753
  Cyclic GFR-binding peptide
  MOD_RES (31), (31): Xaa is C or S

SEQ ID NO: 60460 - protein, 22 aa, Artificial Sequence
  Cyclic GFR-binding peptide
NEYKFKIVNSSDDLYLVSIPEL

SEQ ID NO: 60461 - protein, 29 aa, Artificial Sequence
  Cyclic GFR-binding peptide
  MOD_RES (1), (3): Xaa is C or S
XKXSKVVMEYKFKVKPTRGVLYLISIPEL

SEQ ID NO: 60462 - protein, 33 aa, Artificial Sequence
  Cyclic GFR-binding peptide
  MOD_RES (1), (3): Xaa is C or S
XGXEAVSMGEEYKFKTPVGMDDLYLVSIPELKT

SEQ ID NO: 60463 - protein, 21 aa, Artificial Sequence
  Cyclic GFR-binding peptide
MEYKFKVKPTRGVLYLISIPE

SEQ ID NO: 60464 - protein, 24 aa, Artificial Sequence
  Cyclic GFR-binding peptide
VVMDEYKFKVVNNAADLYLISIPE

SEQ ID NO: 60465 - protein, 27 aa, Artificial Sequence
  Cyclic GFR-binding peptide
VMEEYQKYVVKDYEDIYLMSIPSLETP

SEQ ID NO: 60466 - protein, 41 aa, Artificial Sequence; identical to SEQ ID NO: 17767
  Cyclic GFR-binding peptide
  MOD_RES (2), (4), (35), (36): Xaa is C or S

SEQ ID NO: 60467 - protein, 39 aa, Artificial Sequence; identical to SEQ ID NO: 17768
  Cyclic GFR-binding peptide
  MOD_RES (2), (4), (36), (37): Xaa is C or S

SEQ ID NO: 60468 - protein, 34 aa, Artificial Sequence; identical to SEQ ID NO: 17770
  Cyclic GFR-binding peptide
  MOD_RES (1), (3), (34): Xaa is C or S

SEQ ID NO: 60469 - protein, 34 aa, Artificial Sequence; identical to SEQ ID NO: 17771
  Cyclic GFR-binding peptide
  MOD_RES (1), (3): Xaa is C or S

SEQ ID NO: 60470 - protein, 41 aa, Artificial Sequence; identical to SEQ ID NO: 17773
  Cyclic GFR-binding peptide
  MOD_RES (2), (4), (36), (37): Xaa is C or S

SEQ ID NO: 60471 - protein, 33 aa, Artificial Sequence
  Cyclic GFR-binding peptide
  MOD_RES (1), (3): Xaa is C or S
XGXESVAMGYHYKLYTVVGKDKYLISIPSLKTP

SEQ ID NO: 60472 - protein, 29 aa, Artificial Sequence
  Cyclic GFR-binding peptide
AAAAAAAAAEYQKYTPVGMDDIYLVSIPS

SEQ ID NO: 60473 - protein, 31 aa, Artificial Sequence
  Cyclic GFR-binding peptide
  MOD_RES (26), (27): Xaa is C or S
EYKFKIKPTKGILYLISIPELDQSVXXPSAS

SEQ ID NO: 60474 - protein, 33 aa, Artificial Sequence
  Cyclic GFR-binding peptide
  MOD_RES (2), (4): Xaa is C or S
SXKXSKVVMEYKFKVKPTRGVLYLISIPELDQP

SEQ ID NO: 60475 - protein, 34 aa, Artificial Sequence
  Cyclic GFR-binding peptide
  MOD_RES (29), (30): Xaa is C or S
VMNEYKFKIVNNSSDLYLVSIPELKTPAXXAKPV

SEQ ID NO: 60476 - protein, 36 aa, Artificial Sequence; identical to SEQ ID NO: 17775
  Cyclic GFR-binding peptide
  MOD_RES (32), (33): Xaa is C or S

SEQ ID NO: 60477 - protein, 22 aa, Artificial Sequence
  Cyclic GFR-binding peptide
EYKFKIVNSSDDLYLVSIPELK

SEQ ID NO: 60478 - protein, 40 aa, Artificial Sequence; identical to SEQ ID NO: 17777
  Cyclic GFR-binding peptide
  MOD_RES (2), (4), (36), (37): Xaa is C or S

SEQ ID NO: 60479 - protein, 32 aa, Artificial Sequence; identical to SEQ ID NO: 17778
  Cyclic GFR-binding peptide
  MOD_RES (32), (32): Xaa is C or S

SEQ ID NO: 60480 - protein, 38 aa, Artificial Sequence; identical to SEQ ID NO: 17782
  Cyclic GFR-binding peptide
  MOD_RES (1), (33), (34): Xaa is C or S

SEQ ID NO: 60481 - protein, 25 aa, Artificial Sequence
  Cyclic GFR-binding peptide
SVAMGRYKKLYTVVGKDFYLISIAN

SEQ ID NO: 60482 - protein, 30 aa, Artificial Sequence
  Cyclic GFR-binding peptide
  MOD_RES (1), (3): Xaa is C or S
XGXARVVMNEYQKYIVNSSDDIYLVSIPSL

SEQ ID NO: 60483 - protein, 33 aa, Artificial Sequence
  Cyclic GFR-binding peptide
  MOD_RES (29), (30): Xaa is C or S
VMNEYQKYIVNSSDDIYLVSIPSLQTPAXXPKP

SEQ ID NO: 60484 - protein, 33 aa, Artificial Sequence; identical to SEQ ID NO: 17783
  Cyclic GFR-binding peptide
  MOD_RES (1), (1): Xaa is C or S

SEQ ID NO: 60485 - protein, 33 aa, Artificial Sequence
  Cyclic GFR-binding peptide
  MOD_RES (28), (29): Xaa is C or S
VMEYQKYVKPTRGVIYLISIPSLDQPVXXPSAS

SEQ ID NO: 60486 - protein, 28 aa, Artificial Sequence
  Cyclic GFR-binding peptide
  MOD_RES (2), (2): Xaa is C or S
KXSKVVMEYKFKVKPTRGVLYLISIPEL

SEQ ID NO: 60487 - protein, 33 aa, Artificial Sequence
  Cyclic GFR-binding peptide
  MOD_RES (30), (31): Xaa is C or S
VVMEEYKFKVVKDYEDLYLMSIPELETPVXXAK

SEQ ID NO: 60488 - protein, 26 aa, Artificial Sequence
  Cyclic GFR-binding peptide
SVAMGRYKKLYTVVGKDFYLISIANL

SEQ ID NO: 60489 - protein, 33 aa, Artificial Sequence
  Cyclic GFR-binding peptide
  MOD_RES (2), (4): Xaa is C or S
RXGXAEVVMDRYKKLVVNNAADFYLISIANLRA

SEQ ID NO: 60490 - protein, 32 aa, Artificial Sequence
  Cyclic GFR-binding peptide
  MOD_RES (1), (3): Xaa is C or S
XGXEAVSMGEEYQKYTPVGMDDIYLVSIPSLK

SEQ ID NO: 60491 - protein, 31 aa, Artificial Sequence
  Cyclic GFR-binding peptide
  MOD_RES (26), (27): Xaa is C or S
EYQKYTPVGMDDIYLVSIPSLKTPVXXAKGV

SEQ ID NO: 60492 - protein, 37 aa, Artificial Sequence; identical to SEQ ID NO: 17788
  Cyclic GFR-binding peptide
  MOD_RES (1), (3), (35), (36): Xaa is C or S

SEQ ID NO: 60493 - protein, 35 aa, Artificial Sequence; identical to SEQ ID NO: 17787
  Cyclic GFR-binding peptide
  MOD_RES (33), (34): Xaa is C or S

SEQ ID NO: 60494 - protein, 28 aa, Artificial Sequence
  Cyclic GFR-binding peptide
SRVIMEYQKYVKPKRGVIYLISIPSLAQ

SEQ ID NO: 60495 - protein, 41 aa, Artificial Sequence; identical to SEQ ID NO: 17789
  Cyclic GFR-binding peptide
  MOD_RES (1), (3), (36), (37): Xaa is C or S

SEQ ID NO: 60496 - protein, 42 aa, Artificial Sequence; identical to SEQ ID NO: 17792
  Cyclic GFR-binding peptide
  MOD_RES (2), (4), (36): Xaa is C or S

SEQ ID NO: 60497 - protein, 23 aa, Artificial Sequence
  Cyclic GFR-binding peptide
EEYQKYVVKDYEDIYLMSIPSLE

SEQ ID NO: 60498 - protein, 26 aa, Artificial Sequence
  Cyclic GFR-binding peptide
  MOD_RES (26), (26): Xaa is C or S
EYQKYVVKDYEDIYLMSIPSLETPVX

SEQ ID NO: 60499 - protein, 27 aa, Artificial Sequence
  Cyclic GFR-binding peptide
RVIMEYKFKVKPKRGVLYLISIPELAQ

SEQ ID NO: 60500 - protein, 26 aa, Artificial Sequence
  Cyclic GFR-binding peptide
  MOD_RES (26), (26): Xaa is C or S
RYKKLVVNNAADFYLISIANLRAPVX

SEQ ID NO: 60501 - protein, 38 aa, Artificial Sequence; identical to SEQ ID NO: 17796
  Cyclic GFR-binding peptide
  MOD_RES (1), (33): Xaa is C or S

SEQ ID NO: 60502 - protein, 40 aa, Artificial Sequence; identical to SEQ ID NO: 17801
  Cyclic GFR-binding peptide
  MOD_RES (2), (34), (35): Xaa is C or S

SEQ ID NO: 60503 - protein, 32 aa, Artificial Sequence
  Cyclic GFR-binding peptide
  MOD_RES (2), (4): Xaa is C or S
HXGXSRVVMNEYKFKIVNSSDDLYLVSIPELK

SEQ ID NO: 60504 - protein, 29 aa, Artificial Sequence
  Cyclic GFR-binding peptide
  MOD_RES (28), (29): Xaa is C or S
GEEYKFKTPVGMDDLYLVSIPELKTPVXX

SEQ ID NO: 60505 - protein, 31 aa, Artificial Sequence; identical to SEQ ID NO: 17802
  Cyclic GFR-binding peptide

SEQ ID NO: 60506 - protein, 34 aa, Artificial Sequence; identical to SEQ ID NO: 17803
  Cyclic GFR-binding peptide
  MOD_RES (1), (3): Xaa is C or S

SEQ ID NO: 60507 - protein, 29 aa, Artificial Sequence
  Cyclic GFR-binding peptide
  MOD_RES (28), (29): Xaa is C or S
MEEYKFKVVKDYEDLYLMSIPELETPVXX

SEQ ID NO: 60508 - protein, 26 aa, Artificial Sequence
  Cyclic GFR-binding peptide
MEYKFKIKPTKGILYLISIPELDQSV

SEQ ID NO: 60509 - protein, 23 aa, Artificial Sequence
  Cyclic GFR-binding peptide
NEYKFKIVNSSDDLYLVSIPELQ

SEQ ID NO: 60510 - protein, 33 aa, Artificial Sequence; identical to SEQ ID NO: 17808
  Cyclic GFR-binding peptide
  MOD_RES (2), (2): Xaa is C or S

SEQ ID NO: 60511 - protein, 28 aa, Artificial Sequence
  Cyclic GFR-binding peptide
  MOD_RES (28), (28): Xaa is C or S
MNEYQKYIVNNSSDIYLVSIPSLKTPAX

SEQ ID NO: 60512 - protein, 34 aa, Artificial Sequence; identical to SEQ ID NO: 17810
  Cyclic GFR-binding peptide
  MOD_RES (1), (33), (34): Xaa is C or S

SEQ ID NO: 60513 - protein, 27 aa, Artificial Sequence
  Cyclic GFR-binding peptide
AMGEYQKYYTVVGKDIYLISIPSLKTP

SEQ ID NO: 60514 - protein, 23 aa, Artificial Sequence
  Cyclic GFR-binding peptide
MGEYQKYYTVVGKDIYLISIPSL

SEQ ID NO: 60515 - protein, 30 aa, Artificial Sequence
  Cyclic GFR-binding peptide
  MOD_RES (2), (2): Xaa is C or S
KXSRVIMEYKFKVKPKRGVLYLISIPELAQ

SEQ ID NO: 60516 - protein, 31 aa, Artificial Sequence
  Cyclic GFR-binding peptide
  MOD_RES (2), (4): Xaa is C or S
RXGXEAVSMGEEYQKYTPVGMDDIYLVSIPS

SEQ ID NO: 60517 - protein, 29 aa, Artificial Sequence
  Cyclic GFR-binding peptide
  MOD_RES (29), (29): Xaa is C or S
AMGEYQKYYTVVGKDIYLISIPSLKTPVX

SEQ ID NO: 60518 - protein, 25 aa, Artificial Sequence
  Cyclic GFR-binding peptide
DEYKFKVVKENEDLYLMSIPELETP

SEQ ID NO: 60519 - protein, 27 aa, Artificial Sequence
  Cyclic GFR-binding peptide
EAVSMGEEYQKYTPVGMDDIYLVSIPS

SEQ ID NO: 60520 - protein, 31 aa, Artificial Sequence
  Cyclic GFR-binding peptide
  MOD_RES (1), (3): Xaa is C or S
XGXESVAMGYHYKLYTVVGKDKYLISIPSLK

SEQ ID NO: 60521 - protein, 25 aa, Artificial Sequence
  Cyclic GFR-binding peptide
VMEEYQKYVVKDYEDIYLMSIPSLE

SEQ ID NO: 60522 - protein, 37 aa, Artificial Sequence
  Cyclic GFR-binding peptide
  MOD_RES (31), (32): Xaa is C or S
VSMGEEYKFKTPVGMDDLYLVSIPELKTPVXXAKGVK

SEQ ID NO: 60523 - protein, 40 aa, Artificial Sequence; identical to SEQ ID NO: 17823
  Cyclic GFR-binding peptide
  MOD_RES (1), (3), (34), (35): Xaa is C or S

SEQ ID NO: 60524 - protein, 25 aa, Artificial Sequence
  Cyclic GFR-binding peptide
VVMNEYKFKIVNNSSDLYLVSIPEL

SEQ ID NO: 60525 - protein, 41 aa, Artificial Sequence; identical to SEQ ID NO: 17827
  Cyclic GFR-binding peptide
  MOD_RES (1), (3), (35), (36): Xaa is C or S

SEQ ID NO: 60526 - protein, 30 aa, Artificial Sequence
  Cyclic GFR-binding peptide
  MOD_RES (29), (30): Xaa is C or S
VMDEYKFKVVNNAADLYLISIPELRAPVXX

SEQ ID NO: 60527 - protein, 35 aa, Artificial Sequence; identical to SEQ ID NO: 17830
  Cyclic GFR-binding peptide
  MOD_RES (2), (34): Xaa is C or S

SEQ ID NO: 60528 - protein, 32 aa, Artificial Sequence
  Cyclic GFR-binding peptide
  MOD_RES (27), (28): Xaa is C or S
EEYKFKTPVGMDDLYLVSIPELKTPVXXAKGV

SEQ ID NO: 60529 - protein, 28 aa, Artificial Sequence
  Cyclic GFR-binding peptide
  MOD_RES (26), (27): Xaa is C or S
EYQKYVVKDYEDIYLMSIPSLETPVXXA

SEQ ID NO: 60530 - protein, 30 aa, Artificial Sequence
  Cyclic GFR-binding peptide
  MOD_RES (2), (2): Xaa is C or S
KXSKVVMEYQKYVKPTRGVIYLISIPSLDQ

SEQ ID NO: 60531 - protein, 31 aa, Artificial Sequence
  Cyclic GFR-binding peptide
  MOD_RES (30), (31): Xaa is C or S
VVMNEYQKYIVNSSDDIYLVSIPSLKTPAXX

SEQ ID NO: 60532 - protein, 31 aa, Artificial Sequence; identical to SEQ ID NO: 17835
  Cyclic GFR-binding peptide
  MOD_RES (31), (31): Xaa is C or S

SEQ ID NO: 60533 - protein, 31 aa, Artificial Sequence
  Cyclic GFR-binding peptide
  MOD_RES (2), (2): Xaa is C or S
GXARVVMNEYKFKIVNSSDDLYLVSIPELQT

SEQ ID NO: 60534 - protein, 31 aa, Artificial Sequence
  Cyclic GFR-binding peptide
  MOD_RES (2), (4): Xaa is C or S
HXGXARVVMNEYKFKIVNSSDDLYLVSIPEL

SEQ ID NO: 60535 - protein, 33 aa, Artificial Sequence; identical to SEQ ID NO: 17837
  Cyclic GFR-binding peptide
  MOD_RES (31), (32): Xaa is C or S

SEQ ID NO: 60536 - protein, 25 aa, Artificial Sequence
  Cyclic GFR-binding peptide
VSMGEEYKFKTPVGMDDLYLVSIPE

SEQ ID NO: 60537 - protein, 30 aa, Artificial Sequence
  Cyclic GFR-binding peptide
  MOD_RES (2), (4): Xaa is C or S
RXGXESVAMGRYKKLYTVVGKDFYLISIAN

SEQ ID NO: 60538 - protein, 35 aa, Artificial Sequence; identical to SEQ ID NO: 17842
  Cyclic GFR-binding peptide
  MOD_RES (1), (3), (35): Xaa is C or S

SEQ ID NO: 60539 - protein, 30 aa, Artificial Sequence; identical to SEQ ID NO: 17843
  Cyclic GFR-binding peptide

SEQ ID NO: 60540 - protein, 33 aa, Artificial Sequence
  Cyclic GFR-binding peptide
  MOD_RES (30), (31): Xaa is C or S
KVIMEYQKYIKPTKGIIYLISIPSLDQSVXXPS

SEQ ID NO: 60541 - protein, 26 aa, Artificial Sequence
  Cyclic GFR-binding peptide
EVVMEEYKFKVVKDYEDLYLMSIPEL

SEQ ID NO: 60542 - protein, 33 aa, Artificial Sequence
  Cyclic GFR-binding peptide
  MOD_RES (27), (28): Xaa is C or S
NEYQKYIVNSSDDIYLVSIPSLQTPAXXPKPVT

SEQ ID NO: 60543 - protein, 30 aa, Artificial Sequence
  Cyclic GFR-binding peptide
  MOD_RES (2), (4): Xaa is C or S
RXGXGEVVMEEYQKYVVKDYEDIYLMSIPS

SEQ ID NO: 60544 - protein, 27 aa, Artificial Sequence
  Cyclic GFR-binding peptide
SRVVMNEYKFKIVNSSDDLYLVSIPEL

SEQ ID NO: 60545 - protein, 33 aa, Artificial Sequence
  Cyclic GFR-binding peptide
  MOD_RES (29), (30): Xaa is C or S
MGEEYQKYTPVGMDDIYLVSIPSLKTPVXXAKG

SEQ ID NO: 60546 - protein, 23 aa, Artificial Sequence
  Cyclic GFR-binding peptide
AMGYHYKLYTVVGKDKYLISIPS

SEQ ID NO: 60547 - protein, 29 aa, Artificial Sequence
  Cyclic GFR-binding peptide
AAAAAAAAAEYKFKVVKDYEDLYLMSIPE

SEQ ID NO: 60548 - protein, 32 aa, Artificial Sequence
  Cyclic GFR-binding peptide
  MOD_RES (2), (2): Xaa is C or S
GXESVAMGEYQKYYTVVGKDIYLISIPSLKTP

SEQ ID NO: 60549 - protein, 31 aa, Artificial Sequence
  Cyclic GFR-binding peptide
  MOD_RES (27), (28): Xaa is C or S
DEYQKYVVKENEDIYLMSIPSLETPVXXAKP

SEQ ID NO: 60550 - protein, 34 aa, Artificial Sequence; identical to SEQ ID NO: 17854
  Cyclic GFR-binding peptide
  MOD_RES (1), (33), (34): Xaa is C or S

SEQ ID NO: 60551 - protein, 29 aa, Artificial Sequence
  Cyclic GFR-binding peptide
VVMNEYQKYIVNNSSDIYLVSIPSLKTPA

SEQ ID NO: 60552 - protein, 38 aa, Artificial Sequence; identical to SEQ ID NO: 17858
  Cyclic GFR-binding peptide
  MOD_RES (2), (34), (35): Xaa is C or S

SEQ ID NO: 60553 - protein, 24 aa, Artificial Sequence
  Cyclic GFR-binding peptide
YHYKLVVNNAADKYLISIPSLRAP

SEQ ID NO: 60554 - protein, 37 aa, Artificial Sequence; identical to SEQ ID NO: 17867
  Cyclic GFR-binding peptide
  MOD_RES (31), (32): Xaa is C or S

SEQ ID NO: 60555 - protein, 37 aa, Artificial Sequence; identical to SEQ ID NO: 17868
  Cyclic GFR-binding peptide
  MOD_RES (2), (4), (37): Xaa is C or S

SEQ ID NO: 60556 - protein, 23 aa, Artificial Sequence
  Cyclic GFR-binding peptide
MDRYKKLVVNNAADFYLISIANL

SEQ ID NO: 60557 - protein, 30 aa, Artificial Sequence
  Cyclic GFR-binding peptide
  MOD_RES (27), (28): Xaa is C or S
NEYKFKIVNSSDDLYLVSIPELKTPAXXPK

SEQ ID NO: 60558 - protein, 34 aa, Artificial Sequence
  Cyclic GFR-binding peptide
  MOD_RES (28), (29): Xaa is C or S
MDEYQKYVVKENEDIYLMSIPSLETPVXXAKPIK

SEQ ID NO: 60559 - protein, 36 aa, Artificial Sequence; identical to SEQ ID NO: 17873
  Cyclic GFR-binding peptide
  MOD_RES (32), (33): Xaa is C or S

SEQ ID NO: 60560 - protein, 30 aa, Artificial Sequence
  Cyclic GFR-binding peptide
AEVVMDRYKKLVVNNAADFYLISIANLRAP

SEQ ID NO: 60561 - protein, 31 aa, Artificial Sequence
  Cyclic GFR-binding peptide
  MOD_RES (26), (27): Xaa is C or S
RYKKLVVNNAADFYLISIANLRAPVXXSAPA

SEQ ID NO: 60562 - protein, 28 aa, Artificial Sequence
  Cyclic GFR-binding peptide
  MOD_RES (27), (28): Xaa is C or S
MEYKFKVKPKRGVLYLISIPELAQPVXX

SEQ ID NO: 60563 - protein, 31 aa, Artificial Sequence
  Cyclic GFR-binding peptide
  MOD_RES (1), (3): Xaa is C or S
XGXEAVSMGEEYKFKTPVGMDDLYLVSIPEL

SEQ ID NO: 60564 - protein, 22 aa, Artificial Sequence
  Cyclic GFR-binding peptide
EEYQKYTPVGMDDIYLVSIPSL

SEQ ID NO: 60565 - protein, 39 aa, Artificial Sequence; identical to SEQ ID NO: 17883
  Cyclic GFR-binding peptide
  MOD_RES (2), (4), (36), (37): Xaa is C or S

SEQ ID NO: 60566 - protein, 30 aa, Artificial Sequence
  Cyclic GFR-binding peptide
  MOD_RES (29), (30): Xaa is C or S
VIMEYQKYIKPTKGIIYLISIPSLDQSVXX

SEQ ID NO: 60567 - protein, 28 aa, Artificial Sequence
  Cyclic GFR-binding peptide
  MOD_RES (2), (2): Xaa is C or S
GXARVVMNEYKFKIVNSSDDLYLVSIPE

SEQ ID NO: 60568 - protein, 37 aa, Artificial Sequence; identical to SEQ ID NO: 17891
  Cyclic GFR-binding peptide
  MOD_RES (32), (33): Xaa is C or S

SEQ ID NO: 60569 - protein, 34 aa, Artificial Sequence
  Cyclic GFR-binding peptide
  MOD_RES (28), (29): Xaa is C or S
MDYHYKLVVNNAADKYLISIPSLRAPVXXSAPAA

SEQ ID NO: 60570 - protein, 27 aa, Artificial Sequence
  Cyclic GFR-binding peptide
MGEEYKFKTPVGMDDLYLVSIPELKTP

SEQ ID NO: 60571 - protein, 25 aa, Artificial Sequence
  Cyclic GFR-binding peptide
KVVMNEYKFKIVNNSSDLYLVSIPE

SEQ ID NO: 60572 - protein, 24 aa, Artificial Sequence
  Cyclic GFR-binding peptide
EYKFKIVNSSDDLYLVSIPELKTP

SEQ ID NO: 60573 - protein, 34 aa, Artificial Sequence; identical to SEQ ID NO: 17902
  Cyclic GFR-binding peptide
  MOD_RES (1), (33), (34): Xaa is C or S

SEQ ID NO: 60574 - protein, 23 aa, Artificial Sequence
  Cyclic GFR-binding peptide
VMDEYQKYVVKENEDIYLMSIPS

SEQ ID NO: 60575 - protein, 30 aa, Artificial Sequence
  Cyclic GFR-binding peptide
  MOD_RES (26), (27): Xaa is C or S
EYKFKIVNSSDDLYLVSIPELKTPAXXPKP

SEQ ID NO: 60576 - protein, 42 aa, Artificial Sequence; identical to SEQ ID NO: 17906
  Cyclic GFR-binding peptide
  MOD_RES (2), (4), (36), (37): Xaa is C or S

SEQ ID NO: 60577 - protein, 31 aa, Artificial Sequence
  Cyclic GFR-binding peptide
  MOD_RES (30), (31): Xaa is C or S
VVMDEYKFKVVNNAADLYLISIPELRAPVXX

SEQ ID NO: 60578 - protein, 22 aa, Artificial Sequence
  Cyclic GFR-binding peptide
MEYQKYIKPTKGIIYLISIPSL

SEQ ID NO: 60579 - protein, 23 aa, Artificial Sequence
  Cyclic GFR-binding peptide
EYQKYVVKENEDIYLMSIPSLET

SEQ ID NO: 60580 - protein, 25 aa, Artificial Sequence
  Cyclic GFR-binding peptide
DEYQKYVVKENEDIYLMSIPSLETP

SEQ ID NO: 60581 - protein, 36 aa, Artificial Sequence
  Cyclic GFR-binding peptide
  MOD_RES (30), (31): Xaa is C or S
KVIMEYQKYIKPTKGIIYLISIPSLDQSVXXPSASA

SEQ ID NO: 60582 - protein, 38 aa, Artificial Sequence; identical to SEQ ID NO: 17916
  Cyclic GFR-binding peptide
  MOD_RES (1), (3), (35), (36): Xaa is C or S

SEQ ID NO: 60583 - protein, 22 aa, Artificial Sequence
  Cyclic GFR-binding peptide
NEYQKYIVNSSDDIYLVSIPSL

SEQ ID NO: 60584 - protein, 34 aa, Artificial Sequence; identical to SEQ ID NO: 17918
  Cyclic GFR-binding peptide
  MOD_RES (2), (2): Xaa is C or S

SEQ ID NO: 60585 - protein, 23 aa, Artificial Sequence
  Cyclic GFR-binding peptide
VMNEYQKYIVNNSSDIYLVSIPS

SEQ ID NO: 60586 - protein, 35 aa, Artificial Sequence; identical to SEQ ID NO: 17923
  Cyclic GFR-binding peptide
  MOD_RES (31), (32): Xaa is C or S

SEQ ID NO: 60587 - protein, 27 aa, Artificial Sequence
  Cyclic GFR-binding peptide
KVVMNEYQKYIVNNSSDIYLVSIPSLK

SEQ ID NO: 60588 - protein, 22 aa, Artificial Sequence
  Cyclic GFR-binding peptide
MGRYKKLYTVVGKDFYLISIAN

SEQ ID NO: 60589 - protein, 34 aa, Artificial Sequence; identical to SEQ ID NO: 17928
  Cyclic GFR-binding peptide
  MOD_RES (31), (32): Xaa is C or S

SEQ ID NO: 60590 - protein, 26 aa, Artificial Sequence
  Cyclic GFR-binding peptide
MNEYQKYIVNSSDDIYLVSIPSLKTP

SEQ ID NO: 60591 - protein, 29 aa, Artificial Sequence
  Cyclic GFR-binding peptide
KVVMNEYQKYIVNNSSDIYLVSIPSLKTP

SEQ ID NO: 60592 - protein, 31 aa, Artificial Sequence
  Cyclic GFR-binding peptide
  MOD_RES (30), (31): Xaa is C or S
SMGEEYKFKTPVGMDDLYLVSIPELKTPVXX

SEQ ID NO: 60593 - protein, 27 aa, Artificial Sequence
  Cyclic GFR-binding peptide
  MOD_RES (27), (27): Xaa is C or S
NEYKFKIVNSSDDLYLVSIPELQTPAX

SEQ ID NO: 60594 - protein, 30 aa, Artificial Sequence
  Cyclic GFR-binding peptide
GEVVMEEYKFKVVKDYEDLYLMSIPELETP

SEQ ID NO: 60595 - protein, 29 aa, Artificial Sequence
  Cyclic GFR-binding peptide
  MOD_RES (27), (28): Xaa is C or S
EEYKFKVVKDYEDLYLMSIPELETPVXXA

SEQ ID NO: 60596 - protein, 28 aa, Artificial Sequence
  Cyclic GFR-binding peptide
SKVVMEYKFKVKPTRGVLYLISIPELDQ

SEQ ID NO: 60597 - protein, 28 aa, Artificial Sequence
  Cyclic GFR-binding peptide
VMNEYKFKIVNSSDDLYLVSIPELKTPA

SEQ ID NO: 60598 - protein, 31 aa, Artificial Sequence
  Cyclic GFR-binding peptide
  MOD_RES (1), (3): Xaa is C or S
XGXAEVVMDRYKKLVVNNAADFYLISIANLR

SEQ ID NO: 60599 - protein, 26 aa, Artificial Sequence
  Cyclic GFR-binding peptide
ARVVMNEYKFKIVNSSDDLYLVSIPE

SEQ ID NO: 60600 - protein, 30 aa, Artificial Sequence
  Cyclic GFR-binding peptide
  MOD_RES (28), (28): Xaa is C or S
MNEYKFKIVNSSDDLYLVSIPELKTPAXTP

SEQ ID NO: 60601 - protein, 27 aa, Artificial Sequence
  Cyclic GFR-binding peptide
  MOD_RES (27), (27): Xaa is C or S
GEYQKYYTVVGKDIYLISIPSLKTPVX

SEQ ID NO: 60602 - protein, 39 aa, Artificial Sequence; identical to SEQ ID NO: 17940
  Cyclic GFR-binding peptide
  MOD_RES (1), (3), (35), (36): Xaa is C or S

SEQ ID NO: 60603 - protein, 41 aa, Artificial Sequence; identical to SEQ ID NO: 17941
  Cyclic GFR-binding peptide
  MOD_RES (1), (3), (35), (36): Xaa is C or S

SEQ ID NO: 60604 - protein, 31 aa, Artificial Sequence
  Cyclic GFR-binding peptide
  MOD_RES (28), (29): Xaa is C or S
MNEYQKYIVNNSSDIYLVSIPSLKTPAXXAK

SEQ ID NO: 60605 - protein, 26 aa, Artificial Sequence
  Cyclic GFR-binding peptide
SRVVMNEYKFKIVNSSDDLYLVSIPE

SEQ ID NO: 60606 - protein, 29 aa, Artificial Sequence
  Cyclic GFR-binding peptide
AVSMGEEYKFKTPVGMDDLYLVSIPELKT

SEQ ID NO: 60607 - protein, 32 aa, Artificial Sequence
  Cyclic GFR-binding peptide
  MOD_RES (27), (28): Xaa is C or S
NEYKFKIVNSSDDLYLVSIPELKTPAXXPKPV

SEQ ID NO: 60608 - protein, 30 aa, Artificial Sequence
  Cyclic GFR-binding peptide
  MOD_RES (27), (28): Xaa is C or S
EEYQKYTPVGMDDIYLVSIPSLKTPVXXAK

SEQ ID NO: 60609 - protein, 26 aa, Artificial Sequence
  Cyclic GFR-binding peptide
SKVIMEYKFKIKPTKGILYLISIPEL

SEQ ID NO: 60610 - protein, 32 aa, Artificial Sequence
  Cyclic GFR-binding peptide
  MOD_RES (30), (31): Xaa is C or S
VVMNEYKFKIVNNSSDLYLVSIPELKTPAXXA

SEQ ID NO: 60611 - protein, 28 aa, Artificial Sequence
  Cyclic GFR-binding peptide
  MOD_RES (27), (28): Xaa is C or S
MEYKFKVKPTRGVLYLISIPELDQPVXX

SEQ ID NO: 60612 - protein, 35 aa, Artificial Sequence; identical to SEQ ID NO: 17952
  Cyclic GFR-binding peptide
  MOD_RES (1), (3), (34), (35): Xaa is C or S

SEQ ID NO: 60613 - protein, 25 aa, Artificial Sequence
  Cyclic GFR-binding peptide
NEYQKYIVNNSSDIYLVSIPSLKTP

SEQ ID NO: 60614 - protein, 25 aa, Artificial Sequence
  Cyclic GFR-binding peptide
EYKFKVVKENEDLYLMSIPELETPV

SEQ ID NO: 60615 - protein, 31 aa, Artificial Sequence
  Cyclic GFR-binding peptide
  MOD_RES (1), (3): Xaa is C or S
XGXSRVVMNEYKFKIVNSSDDLYLVSIPELK

SEQ ID NO: 60616 - protein, 30 aa, Artificial Sequence; identical to SEQ ID NO: 17957
  Cyclic GFR-binding peptide

SEQ ID NO: 60617 - protein, 24 aa, Artificial Sequence
  Cyclic GFR-binding peptide
MNEYQKYIVNNSSDIYLVSIPSLK

SEQ ID NO: 60618 - protein, 31 aa, Artificial Sequence
  Cyclic GFR-binding peptide
  MOD_RES (27), (28): Xaa is C or S
MEYKFKIKPTKGILYLISIPELDQSVXXPSA

SEQ ID NO: 60619 - protein, 30 aa, Artificial Sequence
  Cyclic GFR-binding peptide
  MOD_RES (1), (1): Xaa is C or S
XSRVVMNEYQKYIVNSSDDIYLVSIPSLKT

SEQ ID NO: 60620 - protein, 28 aa, Artificial Sequence
  Cyclic GFR-binding peptide
  MOD_RES (2), (2): Xaa is C or S
KXSKVVMEYQKYVKPTRGVIYLISIPSL

SEQ ID NO: 60621 - protein, 29 aa, Artificial Sequence
  Cyclic GFR-binding peptide
  MOD_RES (27), (28): Xaa is C or S
EEYQKYVVKDYEDIYLMSIPSLETPVXXA

SEQ ID NO: 60622 - protein, 37 aa, Artificial Sequence; identical to SEQ ID NO: 17960
  Cyclic GFR-binding peptide
  MOD_RES (31), (32): Xaa is C or S

SEQ ID NO: 60623 - protein, 30 aa, Artificial Sequence
  Cyclic GFR-binding peptide
  MOD_RES (1), (1): Xaa is C or S
XSRVIMEYQKYVKPKRGVIYLISIPSLAQP

SEQ ID NO: 60624 - protein, 28 aa, Artificial Sequence
  Cyclic GFR-binding peptide
KVIMEYQKYIKPTKGIIYLISIPSLDQS

SEQ ID NO: 60625 - protein, 24 aa, Artificial Sequence
  Cyclic GFR-binding peptide
EYKFKVVNNAADLYLISIPELRAP

SEQ ID NO: 60626 - protein, 38 aa, Artificial Sequence; identical to SEQ ID NO: 17964
  Cyclic GFR-binding peptide
  MOD_RES (1), (33): Xaa is C or S

SEQ ID NO: 60627 - protein, 27 aa, Artificial Sequence
  Cyclic GFR-binding peptide
RVIMEYQKYVKPKRGVIYLISIPSLAQ

SEQ ID NO: 60628 - protein, 31 aa, Artificial Sequence
  Cyclic GFR-binding peptide
  MOD_RES (28), (29): Xaa is C or S
MDYHYKLVVNNAADKYLISIPSLRAPVXXSA

SEQ ID NO: 60629 - protein, 22 aa, Artificial Sequence
  Cyclic GFR-binding peptide
EYKFKIVNSSDDLYLVSIPELQ

SEQ ID NO: 60630 - protein, 41 aa, Artificial Sequence; identical to SEQ ID NO: 17966
  Cyclic GFR-binding peptide
  MOD_RES (2), (4), (35), (36): Xaa is C or S

SEQ ID NO: 60631 - protein, 34 aa, Artificial Sequence; identical to SEQ ID NO: 17967
  Cyclic GFR-binding peptide
  MOD_RES (1), (33), (34): Xaa is C or S

SEQ ID NO: 60632 - protein, 27 aa, Artificial Sequence
  Cyclic GFR-binding peptide
  MOD_RES (1), (1): Xaa is C or S
XSKVVMEYQKYVKPTRGVIYLISIPSL

SEQ ID NO: 60633 - protein, 29 aa, Artificial Sequence
  Cyclic GFR-binding peptide
  MOD_RES (29), (29): Xaa is C or S
VMEEYQKYVVKDYEDIYLMSIPSLETPVX

SEQ ID NO: 60634 - protein, 27 aa, Artificial Sequence
  Cyclic GFR-binding peptide
VSMGEEYQKYTPVGMDDIYLVSIPSLK

SEQ ID NO: 60635 - protein, 33 aa, Artificial Sequence; identical to SEQ ID NO: 17970
  Cyclic GFR-binding peptide
  MOD_RES (1), (33): Xaa is C or S

SEQ ID NO: 60636 - protein, 25 aa, Artificial Sequence
  Cyclic GFR-binding peptide
NEYKFKIVNNSSDLYLVSIPELKTP

SEQ ID NO: 60637 - protein, 27 aa, Artificial Sequence
  Cyclic GFR-binding peptide
VMDRYKKLVVNNAADFYLISIANLRAP

SEQ ID NO: 60638 - protein, 31 aa, Artificial Sequence
  Cyclic GFR-binding peptide
  MOD_RES (27), (28): Xaa is C or S
MEYQKYIKPTKGIIYLISIPSLDQSVXXPSA

SEQ ID NO: 60639 - protein, 28 aa, Artificial Sequence
  Cyclic GFR-binding peptide
  MOD_RES (27), (28): Xaa is C or S
EEYKFKTPVGMDDLYLVSIPELKTPVXX

SEQ ID NO: 60640 - protein, 29 aa, Artificial Sequence
  Cyclic GFR-binding peptide
  MOD_RES (26), (27): Xaa is C or S
EYKFKIVNSSDDLYLVSIPELKTPAXXPK

SEQ ID NO: 60641 - protein, 41 aa, Artificial Sequence; identical to SEQ ID NO: 17976
  Cyclic GFR-binding peptide
  MOD_RES (1), (3), (35), (36): Xaa is C or S

SEQ ID NO: 60642 - protein, 29 aa, Artificial Sequence
  Cyclic GFR-binding peptide
  MOD_RES (2), (2): Xaa is C or S
KXSKVVMEYQKYVKPTRGVIYLISIPSLD

SEQ ID NO: 60643 - protein, 35 aa, Artificial Sequence; identical to SEQ ID NO: 17977
  Cyclic GFR-binding peptide
  MOD_RES (2), (34), (35): Xaa is C or S

SEQ ID NO: 60644 - protein, 37 aa, Artificial Sequence; identical to SEQ ID NO: 17979
  Cyclic GFR-binding peptide
  MOD_RES (2), (4), (36), (37): Xaa is C or S

SEQ ID NO: 60645 - protein, 25 aa, Artificial Sequence
  Cyclic GFR-binding peptide
EYQKYVVKDYEDIYLMSIPSLETPV

SEQ ID NO: 60646 - protein, 30 aa, Artificial Sequence
  Cyclic GFR-binding peptide
  MOD_RES (27), (28): Xaa is C or S
NEYQKYIVNSSDDIYLVSIPSLKTPAXXPK

SEQ ID NO: 60647 - protein, 32 aa, Artificial Sequence
  Cyclic GFR-binding peptide
  MOD_RES (27), (28): Xaa is C or S
MEYQKYVKPKRGVIYLISIPSLAQPVXXPAAS

SEQ ID NO: 60648 - protein, 34 aa, Artificial Sequence; identical to SEQ ID NO: 17985
  Cyclic GFR-binding peptide
  MOD_RES (2), (34): Xaa is C or S

SEQ ID NO: 60649 - protein, 36 aa, Artificial Sequence; identical to SEQ ID NO: 17986
  Cyclic GFR-binding peptide
  MOD_RES (32), (33): Xaa is C or S

SEQ ID NO: 60650 - protein, 21 aa, Artificial Sequence
  Cyclic GFR-binding peptide
RYKKLVVNNAADFYLISIANL

SEQ ID NO: 60651 - protein, 29 aa, Artificial Sequence
  Cyclic GFR-binding peptide
AAAAAAAAAEYKFKVVNNAADLYLISIPE

SEQ ID NO: 60652 - protein, 39 aa, Artificial Sequence; identical to SEQ ID NO: 17988
  Cyclic GFR-binding peptide
  MOD_RES (2), (4), (35), (36): Xaa is C or S

SEQ ID NO: 60653 - protein, 21 aa, Artificial Sequence
  Cyclic GFR-binding peptide
EYQKYYTVVGKDIYLISIPSL

SEQ ID NO: 60654 - protein, 29 aa, Artificial Sequence
  Cyclic GFR-binding peptide
  MOD_RES (26), (27): Xaa is C or S
YHYKLYTVVGKDKYLISIPSLKTPVXXAK

SEQ ID NO: 60655 - protein, 22 aa, Artificial Sequence
  Cyclic GFR-binding peptide
DEYQKYVVKENEDIYLMSIPSL

SEQ ID NO: 60656 - protein, 39 aa, Artificial Sequence; identical to SEQ ID NO: 17990
  Cyclic GFR-binding peptide
  MOD_RES (1), (3), (35), (36): Xaa is C or S

SEQ ID NO: 60657 - protein, 28 aa, Artificial Sequence
  Cyclic GFR-binding peptide
  MOD_RES (26), (27): Xaa is C or S
EYKFKVKPTRGVLYLISIPELDQPVXXP

SEQ ID NO: 60658 - protein, 34 aa, Artificial Sequence
  Cyclic GFR-binding peptide
  MOD_RES (30), (31): Xaa is C or S
VVMNEYQKYIVNNSSDIYLVSIPSLKTPAXXAKP

SEQ ID NO: 60659 - protein, 26 aa, Artificial Sequence
  Cyclic GFR-binding peptide
NEYKFKIVNSSDDLYLVSIPELQTPA

SEQ ID NO: 60660 - protein, 35 aa, Artificial Sequence
  Cyclic GFR-binding peptide
  MOD_RES (29), (30): Xaa is C or S
VMEEYKFKVVKDYEDLYLMSIPELETPVXXAKPIS

SEQ ID NO: 60661 - protein, 34 aa, Artificial Sequence
  Cyclic GFR-binding peptide
  MOD_RES (2), (4): Xaa is C or S
RXGXGEVVMEEYKFKVVKDYEDLYLMSIPELETP

SEQ ID NO: 60662 - protein, 33 aa, Artificial Sequence
  Cyclic GFR-binding peptide
  MOD_RES (30), (31): Xaa is C or S
VVMDYHYKLVVNNAADKYLISIPSLRAPVXXSA

SEQ ID NO: 60663 - protein, 27 aa, Artificial Sequence
  Cyclic GFR-binding peptide
VMDEYKFKVVKENEDLYLMSIPELETP

SEQ ID NO: 60664 - protein, 39 aa, Artificial Sequence; identical to SEQ ID NO: 17998
  Cyclic GFR-binding peptide
  MOD_RES (2), (4), (36): Xaa is C or S

SEQ ID NO: 60665 - protein, 26 aa, Artificial Sequence
  Cyclic GFR-binding peptide
AVSMGEEYKFKTPVGMDDLYLVSIPE

SEQ ID NO: 60666 - protein, 37 aa, Artificial Sequence; identical to SEQ ID NO: 18003
  Cyclic GFR-binding peptide
  MOD_RES (1), (3), (35), (36): Xaa is C or S

SEQ ID NO: 60667 - protein, 34 aa, Artificial Sequence; identical to SEQ ID NO: 18005
  Cyclic GFR-binding peptide
  MOD_RES (1), (34): Xaa is C or S

SEQ ID NO: 60668 - protein, 33 aa, Artificial Sequence; identical to SEQ ID NO: 18006
  Cyclic GFR-binding peptide
  MOD_RES (2), (2): Xaa is C or S

SEQ ID NO: 60669 - protein, 33 aa, Artificial Sequence; identical to SEQ ID NO: 18007
  Cyclic GFR-binding peptide
  MOD_RES (31), (32): Xaa is C or S

SEQ ID NO: 60670 - protein, 28 aa, Artificial Sequence
  Cyclic GFR-binding peptide
KVIMEYKFKIKPTKGILYLISIPELDQS

SEQ ID NO: 60671 - protein, 29 aa, Artificial Sequence
  Cyclic GFR-binding peptide
  MOD_RES (29), (29): Xaa is C or S
VMNEYQKYIVNSSDDIYLVSIPSLKTPAX

SEQ ID NO: 60672 - protein, 31 aa, Artificial Sequence
  Cyclic GFR-binding peptide
  MOD_RES (26), (27): Xaa is C or S
EYKFKVKPTRGVLYLISIPELDQPVXXPSAS

SEQ ID NO: 60673 - protein, 22 aa, Artificial Sequence
  Cyclic GFR-binding peptide
MEYKFKIKPTKGILYLISIPEL

SEQ ID NO: 60674 - protein, 31 aa, Artificial Sequence
  Cyclic GFR-binding peptide
  MOD_RES (28), (29): Xaa is C or S
IMEYKFKVKPKRGVLYLISIPELAQPVXXPA

SEQ ID NO: 60675 - protein, 31 aa, Artificial Sequence
  Cyclic GFR-binding peptide
  MOD_RES (2), (2): Xaa is C or S
GXESVAMGRYKKLYTVVGKDFYLISIANLKT

SEQ ID NO: 60676 - protein, 29 aa, Artificial Sequence
  Cyclic GFR-binding peptide
  MOD_RES (1), (3): Xaa is C or S
XKXSRVIMEYKFKVKPKRGVLYLISIPEL

SEQ ID NO: 60677 - protein, 35 aa, Artificial Sequence
  Cyclic GFR-binding peptide
  MOD_RES (29), (30): Xaa is C or S
AMGYHYKLYTVVGKDKYLISIPSLKTPVXXAKSAK

SEQ ID NO: 60678 - protein, 30 aa, Artificial Sequence
  Cyclic GFR-binding peptide
  MOD_RES (28), (29): Xaa is C or S
GEEYQKYTPVGMDDIYLVSIPSLKTPVXXA

SEQ ID NO: 60679 - protein, 34 aa, Artificial Sequence
  Cyclic GFR-binding peptide
  MOD_RES (30), (31): Xaa is C or S
SMGEEYKFKTPVGMDDLYLVSIPELKTPVXXAKG

SEQ ID NO: 60680 - protein, 39 aa, Artificial Sequence; identical to SEQ ID NO: 18021
  Cyclic GFR-binding peptide
  MOD_RES (1), (3), (35), (36): Xaa is C or S

SEQ ID NO: 60681 - protein, 38 aa, Artificial Sequence; identical to SEQ ID NO: 18024
  Cyclic GFR-binding peptide
  MOD_RES (1), (3), (35), (36): Xaa is C or S

SEQ ID NO: 60682 - protein, 29 aa, Artificial Sequence
  Cyclic GFR-binding peptide
VVMNEYKFKIVNNSSDLYLVSIPELKTPA

SEQ ID NO: 60683 - protein, 40 aa, Artificial Sequence; identical to SEQ ID NO: 18025
  Cyclic GFR-binding peptide
  MOD_RES (2), (34), (35): Xaa is C or S

SEQ ID NO: 60684 - protein, 36 aa, Artificial Sequence; identical to SEQ ID NO: 18028
  Cyclic GFR-binding peptide
  MOD_RES (2), (34), (35): Xaa is C or S

SEQ ID NO: 60685 - protein, 29 aa, Artificial Sequence
  Cyclic GFR-binding peptide
  MOD_RES (29), (29): Xaa is C or S
VMDEYKFKVVKENEDLYLMSIPELETPVX

SEQ ID NO: 60686 - protein, 25 aa, Artificial Sequence
  Cyclic GFR-binding peptide
VMEYKFKVKPTRGVLYLISIPELDQ

SEQ ID NO: 60687 - protein, 33 aa, Artificial Sequence
  Cyclic GFR-binding peptide
  MOD_RES (1), (3): Xaa is C or S
XGXARVVMNEYQKYIVNSSDDIYLVSIPSLQTP

SEQ ID NO: 60688 - protein, 35 aa, Artificial Sequence; identical to SEQ ID NO: 18034
  Cyclic GFR-binding peptide
  MOD_RES (2), (35): Xaa is C or S

SEQ ID NO: 60689 - protein, 32 aa, Artificial Sequence; identical to SEQ ID NO: 18039
  Cyclic GFR-binding peptide
  MOD_RES (31), (32): Xaa is C or S

SEQ ID NO: 60690 - protein, 36 aa, Artificial Sequence; identical to SEQ ID NO: 18041
  Cyclic GFR-binding peptide
  MOD_RES (2), (34), (35): Xaa is C or S

SEQ ID NO: 60691 - protein, 36 aa, Artificial Sequence; identical to SEQ ID NO: 18042
  Cyclic GFR-binding peptide
  MOD_RES (2), (34), (35): Xaa is C or S

SEQ ID NO: 60692 - protein, 25 aa, Artificial Sequence
  Cyclic GFR-binding peptide
VMNEYQKYIVNNSSDIYLVSIPSLK

SEQ ID NO: 60693 - protein, 36 aa, Artificial Sequence; identical to SEQ ID NO: 18045
  Cyclic GFR-binding peptide
  MOD_RES (1), (33): Xaa is C or S

SEQ ID NO: 60694 - protein, 39 aa, Artificial Sequence; identical to SEQ ID NO: 18047
  Cyclic GFR-binding peptide
  MOD_RES (1), (33), (34): Xaa is C or S

SEQ ID NO: 60695 - protein, 33 aa, Artificial Sequence; identical to SEQ ID NO: 18048
  Cyclic GFR-binding peptide
  MOD_RES (32), (33): Xaa is C or S

SEQ ID NO: 60696 - protein, 25 aa, Artificial Sequence
  Cyclic GFR-binding peptide
MEEYQKYVVKDYEDIYLMSIPSLET

SEQ ID NO: 60697 - protein, 30 aa, Artificial Sequence
  Cyclic GFR-binding peptide
  MOD_RES (30), (30): Xaa is C or S
KVVMEYQKYVKPTRGVIYLISIPSLDQPVX

SEQ ID NO: 60698 - protein, 27 aa, Artificial Sequence
  Cyclic GFR-binding peptide
AVSMGEEYKFKTPVGMDDLYLVSIPEL

SEQ ID NO: 60699 - protein, 31 aa, Artificial Sequence
  Cyclic GFR-binding peptide
  MOD_RES (2), (2): Xaa is C or S
KXSKVVMEYQKYVKPTRGVIYLISIPSLDQP

SEQ ID NO: 60700 - protein, 26 aa, Artificial Sequence
  Cyclic GFR-binding peptide
  MOD_RES (1), (1): Xaa is C or S
XSKVVMEYKFKVKPTRGVLYLISIPE

SEQ ID NO: 60701 - protein, 40 aa, Artificial Sequence; identical to SEQ ID NO: 18054
  Cyclic GFR-binding peptide
  MOD_RES (2), (34): Xaa is C or S

SEQ ID NO: 60702 - protein, 35 aa, Artificial Sequence; identical to SEQ ID NO: 18056
  Cyclic GFR-binding peptide
  MOD_RES (1), (3): Xaa is C or S

SEQ ID NO: 60703 - protein, 32 aa, Artificial Sequence
  Cyclic GFR-binding peptide
  MOD_RES (2), (2): Xaa is C or S
GXGEVVMEEYQKYVVKDYEDIYLMSIPSLETP

SEQ ID NO: 60704 - protein, 36 aa, Artificial Sequence; identical to SEQ ID NO: 18059
  Cyclic GFR-binding peptide
  MOD_RES (2), (34), (35): Xaa is C or S

SEQ ID NO: 60705 - protein, 30 aa, Artificial Sequence
  Cyclic GFR-binding peptide
  MOD_RES (1), (1): Xaa is C or S
XSRVVMNEYKFKIVNSSDDLYLVSIPELKT

SEQ ID NO: 60706 - protein, 21 aa, Artificial Sequence
  Cyclic GFR-binding peptide
EYQKYIKPTKGIIYLISIPSL

SEQ ID NO: 60707 - protein, 25 aa, Artificial Sequence
  Cyclic GFR-binding peptide
AMGYHYKLYTVVGKDKYLISIPSLK

SEQ ID NO: 60708 - protein, 31 aa, Artificial Sequence
  Cyclic GFR-binding peptide
  MOD_RES (2), (4): Xaa is C or S
RXGXESVAMGEYQKYYTVVGKDIYLISIPSL

SEQ ID NO: 60709 - protein, 23 aa, Artificial Sequence
  Cyclic GFR-binding peptide
MEYQKYVKPTRGVIYLISIPSLD

SEQ ID NO: 60710 - protein, 30 aa, Artificial Sequence
  Cyclic GFR-binding peptide
  MOD_RES (30), (30): Xaa is C or S
VVMNEYKFKIVNNSSDLYLVSIPELKTPAX

SEQ ID NO: 60711 - protein, 30 aa, Artificial Sequence
  Cyclic GFR-binding peptide
  MOD_RES (26), (27): Xaa is C or S
EYKFKVKPTRGVLYLISIPELDQPVXXPSA

SEQ ID NO: 60712 - protein, 31 aa, Artificial Sequence
  Cyclic GFR-binding peptide
  MOD_RES (2), (2): Xaa is C or S
KXSKVVMEYKFKVKPTRGVLYLISIPELDQP

SEQ ID NO: 60713 - protein, 33 aa, Artificial Sequence
  Cyclic GFR-binding peptide
  MOD_RES (29), (30): Xaa is C or S
VVMEYQKYVKPTRGVIYLISIPSLDQPVXXPSA

SEQ ID NO: 60714 - protein, 26 aa, Artificial Sequence
  Cyclic GFR-binding peptide
VIMEYKFKIKPTKGILYLISIPELDQ

SEQ ID NO: 60715 - protein, 31 aa, Artificial Sequence
  Cyclic GFR-binding peptide
  MOD_RES (1), (3): Xaa is C or S
XGXARVVMNEYKFKIVNSSDDLYLVSIPELQ

SEQ ID NO: 60716 - protein, 28 aa, Artificial Sequence
  Cyclic GFR-binding peptide
MGEEYQKYTPVGMDDIYLVSIPSLKTPV

SEQ ID NO: 60717 - protein, 32 aa, Artificial Sequence
  Cyclic GFR-binding peptide
  MOD_RES (30), (31): Xaa is C or S
RVIMEYKFKVKPKRGVLYLISIPELAQPVXXP

SEQ ID NO: 60718 - protein, 29 aa, Artificial Sequence
  Cyclic GFR-binding peptide
  MOD_RES (26), (26): Xaa is C or S
EYQKYIVNSSDDIYLVSIPSLKTPAXTPK

SEQ ID NO: 60719 - protein, 38 aa, Artificial Sequence; identical to SEQ ID NO: 18076
  Cyclic GFR-binding peptide
  MOD_RES (2), (4), (36), (37): Xaa is C or S

SEQ ID NO: 60720 - protein, 37 aa, Artificial Sequence; identical to SEQ ID NO: 18077
  Cyclic GFR-binding peptide
  MOD_RES (2), (4), (35), (36): Xaa is C or S

SEQ ID NO: 60721 - protein, 27 aa, Artificial Sequence
  Cyclic GFR-binding peptide
  MOD_RES (26), (27): Xaa is C or S
EYKFKVVNNAADLYLISIPELRAPVXX

SEQ ID NO: 60722 - protein, 33 aa, Artificial Sequence
  Cyclic GFR-binding peptide
  MOD_RES (27), (28): Xaa is C or S
NEYKFKIVNSSDDLYLVSIPELQTPAXXPKPVT

SEQ ID NO: 60723 - protein, 31 aa, Artificial Sequence; identical to SEQ ID NO: 18082
  Cyclic GFR-binding peptide
  MOD_RES (1), (1): Xaa is C or S

SEQ ID NO: 60724 - protein, 33 aa, Artificial Sequence; identical to SEQ ID NO: 18088
  Cyclic GFR-binding peptide
  MOD_RES (31), (32): Xaa is C or S

SEQ ID NO: 60725 - protein, 28 aa, Artificial Sequence
  Cyclic GFR-binding peptide
VVMNEYQKYIVNNSSDIYLVSIPSLKTP

SEQ ID NO: 60726 - protein, 24 aa, Artificial Sequence
  Cyclic GFR-binding peptide
GYHYKLYTVVGKDKYLISIPSLKT

SEQ ID NO: 60727 - protein, 33 aa, Artificial Sequence
  Cyclic GFR-binding peptide
  MOD_RES (2), (4): Xaa is C or S
RXGXAEVVMDYHYKLVVNNAADKYLISIPSLRA

SEQ ID NO: 60728 - protein, 25 aa, Artificial Sequence
  Cyclic GFR-binding peptide
RYKKLYTVVGKDFYLISIANLKTPV

SEQ ID NO: 60729 - protein, 41 aa, Artificial Sequence; identical to SEQ ID NO: 18095
  Cyclic GFR-binding peptide
  MOD_RES (2), (35), (36): Xaa is C or S

SEQ ID NO: 60730 - protein, 40 aa, Artificial Sequence; identical to SEQ ID NO: 18097
  Cyclic GFR-binding peptide
  MOD_RES (2), (4), (37), (38): Xaa is C or S

SEQ ID NO: 60731 - protein, 35 aa, Artificial Sequence
  Cyclic GFR-binding peptide
  MOD_RES (30), (31): Xaa is C or S
KVIMEYKFKIKPTKGILYLISIPELDQSVXXPSAS

SEQ ID NO: 60732 - protein, 28 aa, Artificial Sequence
  Cyclic GFR-binding peptide
EVVMEEYQKYVVKDYEDIYLMSIPSLET

SEQ ID NO: 60733 - protein, 29 aa, Artificial Sequence
  Cyclic GFR-binding peptide
  MOD_RES (2), (2): Xaa is C or S
KXSKVVMEYKFKVKPTRGVLYLISIPELD

SEQ ID NO: 60734 - protein, 37 aa, Artificial Sequence; identical to SEQ ID NO: 18101
  Cyclic GFR-binding peptide
  MOD_RES (31), (32): Xaa is C or S

SEQ ID NO: 60735 - protein, 34 aa, Artificial Sequence
  Cyclic GFR-binding peptide
  MOD_RES (30), (31): Xaa is C or S
VAMGEYQKYYTVVGKDIYLISIPSLKTPVXXAKS

SEQ ID NO: 60736 - protein, 41 aa, Artificial Sequence; identical to SEQ ID NO: 18103
  Cyclic GFR-binding peptide
  MOD_RES (1), (3), (35), (36): Xaa is C or S

SEQ ID NO: 60737 - protein, 31 aa, Artificial Sequence
  Cyclic GFR-binding peptide
  MOD_RES (2), (2): Xaa is C or S
GXAEVVMDRYKKLVVNNAADFYLISIANLRA

SEQ ID NO: 60738 - protein, 38 aa, Artificial Sequence; identical to SEQ ID NO: 18105
  Cyclic GFR-binding peptide
  MOD_RES (2), (4), (36), (37): Xaa is C or S

SEQ ID NO: 60739 - protein, 26 aa, Artificial Sequence
  Cyclic GFR-binding peptide
EVVMDEYQKYVVKENEDIYLMSIPSL

SEQ ID NO: 60740 - protein, 40 aa, Artificial Sequence; identical to SEQ ID NO: 18111
  Cyclic GFR-binding peptide
  MOD_RES (2), (4), (36), (37): Xaa is C or S

SEQ ID NO: 60741 - protein, 34 aa, Artificial Sequence
  Cyclic GFR-binding peptide
  MOD_RES (29), (30): Xaa is C or S
VMNEYQKYIVNSSDDIYLVSIPSLQTPAXXPKPV

SEQ ID NO: 60742 - protein, 33 aa, Artificial Sequence
  Cyclic GFR-binding peptide
  MOD_RES (28), (28): Xaa is C or S
MNEYKFKIVNSSDDLYLVSIPELKTPAXTPKTV

SEQ ID NO: 60743 - protein, 36 aa, Artificial Sequence; identical to SEQ ID NO: 18116
  Cyclic GFR-binding peptide
  MOD_RES (32), (33): Xaa is C or S

SEQ ID NO: 60744 - protein, 31 aa, Artificial Sequence
  Cyclic GFR-binding peptide
  MOD_RES (29), (30): Xaa is C or S
VIMEYQKYVKPKRGVIYLISIPSLAQPVXXP

SEQ ID NO: 60745 - protein, 26 aa, Artificial Sequence
  Cyclic GFR-binding peptide
MNEYQKYIVNSSDDIYLVSIPSLQTP

SEQ ID NO: 60746 - protein, 29 aa, Artificial Sequence
  Cyclic GFR-binding peptide
EVVMDRYKKLVVNNAADFYLISIANLRAP

SEQ ID NO: 60747 - protein, 34 aa, Artificial Sequence
  Cyclic GFR-binding peptide
  MOD_RES (29), (30): Xaa is C or S
VIMEYQKYIKPTKGIIYLISIPSLDQSVXXPSAS

SEQ ID NO: 60748 - protein, 33 aa, Artificial Sequence
  Cyclic GFR-binding peptide
  MOD_RES (29), (30): Xaa is C or S
VMNEYKFKIVNNSSDLYLVSIPELKTPAXXAKP

SEQ ID NO: 60749 - protein, 38 aa, Artificial Sequence; identical to SEQ ID NO: 18124
  Cyclic GFR-binding peptide
  MOD_RES (2), (34): Xaa is C or S

SEQ ID NO: 60750 - protein, 33 aa, Artificial Sequence
  Cyclic GFR-binding peptide
  MOD_RES (1), (3): Xaa is C or S
XGXSRVVMNEYQKYIVNSSDDIYLVSIPSLKTP

SEQ ID NO: 60751 - protein, 32 aa, Artificial Sequence
  Cyclic GFR-binding peptide
  MOD_RES (28), (29): Xaa is C or S
VMEYQKYVKPTRGVIYLISIPSLDQPVXXPSA

SEQ ID NO: 60752 - protein, 40 aa, Artificial Sequence; identical to SEQ ID NO: 18127
  Cyclic GFR-binding peptide
  MOD_RES (2), (4), (35), (36): Xaa is C or S

SEQ ID NO: 60753 - protein, 29 aa, Artificial Sequence
  Cyclic GFR-binding peptide
  MOD_RES (2), (2): Xaa is C or S
GXESVAMGEYQKYYTVVGKDIYLISIPSL

SEQ ID NO: 60754 - protein, 22 aa, Artificial Sequence
  Cyclic GFR-binding peptide
MDEYQKYVVKENEDIYLMSIPS

SEQ ID NO: 60755 - protein, 28 aa, Artificial Sequence
  Cyclic GFR-binding peptide
VVMDRYKKLVVNNAADFYLISIANLRAP

SEQ ID NO: 60756 - protein, 27 aa, Artificial Sequence
  Cyclic GFR-binding peptide
VVMEYKFKVKPTRGVLYLISIPELDQP

SEQ ID NO: 60757 - protein, 35 aa, Artificial Sequence; identical to SEQ ID NO: 15821
  Cyclic GFR-binding peptide
  MOD_RES (1), (33), (34): Xaa is C or S

SEQ ID NO: 60758 - protein, 24 aa, Artificial Sequence
  Cyclic GFR-binding peptide
VAMGEYQKYYTVVGKDIYLISIPS

SEQ ID NO: 60759 - protein, 28 aa, Artificial Sequence
  Cyclic GFR-binding peptide
  MOD_RES (26), (27): Xaa is C or S
EYKFKTPVGMDDLYLVSIPELKTPVXXA

SEQ ID NO: 60760 - protein, 32 aa, Artificial Sequence
  Cyclic GFR-binding peptide
  MOD_RES (2), (2): Xaa is C or S
GXGEVVMEEYKFKVVKDYEDLYLMSIPELETP

SEQ ID NO: 60761 - protein, 32 aa, Artificial Sequence
  Cyclic GFR-binding peptide
  MOD_RES (30), (31): Xaa is C or S
VAMGRYKKLYTVVGKDFYLISIANLKTPVXXA

SEQ ID NO: 60762 - protein, 25 aa, Artificial Sequence
  Cyclic GFR-binding peptide
MEYQKYVKPTRGVIYLISIPSLDQP

SEQ ID NO: 60763 - protein, 28 aa, Artificial Sequence
  Cyclic GFR-binding peptide
KVVMEYKFKVKPTRGVLYLISIPELDQP

SEQ ID NO: 60764 - protein, 24 aa, Artificial Sequence
  Cyclic GFR-binding peptide
VMDEYKFKVVKENEDLYLMSIPEL

SEQ ID NO: 60765 - protein, 33 aa, Artificial Sequence; identical to SEQ ID NO: 15826
  Cyclic GFR-binding peptide
  MOD_RES (31), (32): Xaa is C or S

SEQ ID NO: 60766 - protein, 32 aa, Artificial Sequence
  Cyclic GFR-binding peptide
  MOD_RES (2), (2): Xaa is C or S
GXSRVVMNEYKFKIVNSSDDLYLVSIPELKTP

SEQ ID NO: 60767 - protein, 40 aa, Artificial Sequence; identical to SEQ ID NO: 15831
  Cyclic GFR-binding peptide
  MOD_RES (2), (4), (36), (37): Xaa is C or S

SEQ ID NO: 60768 - protein, 35 aa, Artificial Sequence
  Cyclic GFR-binding peptide
  MOD_RES (29), (30): Xaa is C or S
VMDRYKKLVVNNAADFYLISIANLRAPVXXSAPAA

SEQ ID NO: 60769 - protein, 31 aa, Artificial Sequence
  Cyclic GFR-binding peptide
  MOD_RES (1), (3): Xaa is C or S
XGXGEVVMDEYQKYVVKENEDIYLMSIPSLE

SEQ ID NO: 60770 - protein, 36 aa, Artificial Sequence; identical to SEQ ID NO: 15833
  Cyclic GFR-binding peptide
  MOD_RES (31), (32): Xaa is C or S

SEQ ID NO: 60771 - protein, 29 aa, Artificial Sequence
  Cyclic GFR-binding peptide
AAAAAAAAAEYQKYVVKENEDIYLMSIPS

SEQ ID NO: 60772 - protein, 34 aa, Artificial Sequence; identical to SEQ ID NO: 15843
  Cyclic GFR-binding peptide
  MOD_RES (2), (34): Xaa is C or S

SEQ ID NO: 60773 - protein, 30 aa, Artificial Sequence; identical to SEQ ID NO: 15844
  Cyclic GFR-binding peptide

SEQ ID NO: 60774 - protein, 38 aa, Artificial Sequence; identical to SEQ ID NO: 15850
  Cyclic GFR-binding peptide
  MOD_RES (2), (4), (36): Xaa is C or S

SEQ ID NO: 60775 - protein, 37 aa, Artificial Sequence; identical to SEQ ID NO: 15851
  Cyclic GFR-binding peptide
  MOD_RES (31), (32): Xaa is C or S

SEQ ID NO: 60776 - protein, 32 aa, Artificial Sequence; identical to SEQ ID NO: 15854
  Cyclic GFR-binding peptide
  MOD_RES (1), (32): Xaa is C or S

SEQ ID NO: 60777 - protein, 37 aa, Artificial Sequence; identical to SEQ ID NO: 15856
  Cyclic GFR-binding peptide
  MOD_RES (1), (33), (34): Xaa is C or S

SEQ ID NO: 60778 - protein, 20 aa, Artificial Sequence
  Cyclic GFR-binding peptide
EYKFKVVKENEDLYLMSIPE

SEQ ID NO: 60779 - protein, 42 aa, Artificial Sequence; identical to SEQ ID NO: 15858
  Cyclic GFR-binding peptide
  MOD_RES (2), (4), (36), (37): Xaa is C or S

SEQ ID NO: 60780 - protein, 28 aa, Artificial Sequence
  Cyclic GFR-binding peptide
MGEEYKFKTPVGMDDLYLVSIPELKTPV

SEQ ID NO: 60781 - protein, 24 aa, Artificial Sequence
  Cyclic GFR-binding peptide
EYKFKIKPTKGILYLISIPELDQS

SEQ ID NO: 60782 - protein, 41 aa, Artificial Sequence; identical to SEQ ID NO: 15860
  Cyclic GFR-binding peptide
  MOD_RES (1), (3), (35), (36): Xaa is C or S

SEQ ID NO: 60783 - protein, 36 aa, Artificial Sequence; identical to SEQ ID NO: 15864
  Cyclic GFR-binding peptide
  MOD_RES (31), (31): Xaa is C or S

SEQ ID NO: 60784 - protein, 37 aa, Artificial Sequence; identical to SEQ ID NO: 15865
  Cyclic GFR-binding peptide
  MOD_RES (1), (33), (34): Xaa is C or S

SEQ ID NO: 60785 - protein, 25 aa, Artificial Sequence
  Cyclic GFR-binding peptide
RVIMEYQKYVKPKRGVIYLISIPSL

SEQ ID NO: 60786 - protein, 35 aa, Artificial Sequence; identical to SEQ ID NO: 15868
  Cyclic GFR-binding peptide
  MOD_RES (1), (32), (33): Xaa is C or S

SEQ ID NO: 60787 - protein, 27 aa, Artificial Sequence
  Cyclic GFR-binding peptide
  MOD_RES (1), (1): Xaa is C or S
XSKVIMEYKFKIKPTKGILYLISIPEL

SEQ ID NO: 60788 - protein, 41 aa, Artificial Sequence; identical to SEQ ID NO: 15870
  Cyclic GFR-binding peptide
  MOD_RES (2), (4), (36), (37): Xaa is C or S

SEQ ID NO: 60789 - protein, 31 aa, Artificial Sequence
  Cyclic GFR-binding peptide
  MOD_RES (27), (28): Xaa is C or S
EEYQKYTPVGMDDIYLVSIPSLKTPVXXAKG

SEQ ID NO: 60790 - protein, 29 aa, Artificial Sequence
  Cyclic GFR-binding peptide
ESVAMGYHYKLYTVVGKDKYLISIPSLKT

SEQ ID NO: 60791 - protein, 30 aa, Artificial Sequence
  Cyclic GFR-binding peptide
  MOD_RES (27), (28): Xaa is C or S
MEYQKYVKPKRGVIYLISIPSLAQPVXXPA

SEQ ID NO: 60792 - protein, 33 aa, Artificial Sequence; identical to SEQ ID NO: 15874
  Cyclic GFR-binding peptide
  MOD_RES (2), (2): Xaa is C or S

SEQ ID NO: 60793 - protein, 38 aa, Artificial Sequence; identical to SEQ ID NO: 15875
  Cyclic GFR-binding peptide
  MOD_RES (32), (33): Xaa is C or S

SEQ ID NO: 60794 - protein, 36 aa, Artificial Sequence
  Cyclic GFR-binding peptide
  MOD_RES (30), (31): Xaa is C or S
VVMDYHYKLVVNNAADKYLISIPSLRAPVXXSAPAA

SEQ ID NO: 60795 - protein, 32 aa, Artificial Sequence
  Cyclic GFR-binding peptide
  MOD_RES (27), (27): Xaa is C or S
NEYQKYIVNSSDDIYLVSIPSLKTPAXTPKTV

SEQ ID NO: 60796 - protein, 38 aa, Artificial Sequence; identical to SEQ ID NO: 15877
  Cyclic GFR-binding peptide
  MOD_RES (1), (3), (35), (36): Xaa is C or S

SEQ ID NO: 60797 - protein, 39 aa, Artificial Sequence; identical to SEQ ID NO: 15878
  Cyclic GFR-binding peptide
  MOD_RES (2), (4), (36), (37): Xaa is C or S

SEQ ID NO: 60798 - protein, 29 aa, Artificial Sequence
  Cyclic GFR-binding peptide
  MOD_RES (28), (29): Xaa is C or S
MGEYQKYYTVVGKDIYLISIPSLKTPVXX

SEQ ID NO: 60799 - protein, 35 aa, Artificial Sequence; identical to SEQ ID NO: 15881
  Cyclic GFR-binding peptide
  MOD_RES (1), (3), (35): Xaa is C or S

SEQ ID NO: 60800 - protein, 36 aa, Artificial Sequence; identical to SEQ ID NO: 15887
  Cyclic GFR-binding peptide
  MOD_RES (2), (34), (35): Xaa is C or S

SEQ ID NO: 60801 - protein, 32 aa, Artificial Sequence
  Cyclic GFR-binding peptide
  MOD_RES (26), (27): Xaa is C or S
EYQKYVKPKRGVIYLISIPSLAQPVXXPAASA

SEQ ID NO: 60802 - protein, 35 aa, Artificial Sequence
  Cyclic GFR-binding peptide
  MOD_RES (29), (30): Xaa is C or S
VMNEYQKYIVNSSDDIYLVSIPSLQTPAXXPKPVT

SEQ ID NO: 60803 - protein, 35 aa, Artificial Sequence
  Cyclic GFR-binding peptide
  MOD_RES (29), (30): Xaa is C or S
VMDEYKFKVVKENEDLYLMSIPELETPVXXAKPIK

SEQ ID NO: 60804 - protein, 31 aa, Artificial Sequence; identical to SEQ ID NO: 15890
  Cyclic GFR-binding peptide

SEQ ID NO: 60805 - protein, 25 aa, Artificial Sequence
  Cyclic GFR-binding peptide
EYKFKVVKDYEDLYLMSIPELETPV

SEQ ID NO: 60806 - protein, 34 aa, Artificial Sequence; identical to SEQ ID NO: 15895
  Cyclic GFR-binding peptide
  MOD_RES (31), (32): Xaa is C or S

SEQ ID NO: 60807 - protein, 37 aa, Artificial Sequence; identical to SEQ ID NO: 15897
  Cyclic GFR-binding peptide
  MOD_RES (2), (4), (36), (37): Xaa is C or S

SEQ ID NO: 60808 - protein, 33 aa, Artificial Sequence
  Cyclic GFR-binding peptide
  MOD_RES (1), (3): Xaa is C or S
XGXSRVVMNEYKFKIVNSSDDLYLVSIPELKTP

SEQ ID NO: 60809 - protein, 41 aa, Artificial Sequence; identical to SEQ ID NO: 15900
  Cyclic GFR-binding peptide
  MOD_RES (2), (4), (36), (37): Xaa is C or S

SEQ ID NO: 60810 - protein, 29 aa, Artificial Sequence
  Cyclic GFR-binding peptide
AKVVMNEYQKYIVNNSSDIYLVSIPSLKT

SEQ ID NO: 60811 - protein, 24 aa, Artificial Sequence
  Cyclic GFR-binding peptide
MEYQKYVKPTRGVIYLISIPSLDQ

SEQ ID NO: 60812 - protein, 33 aa, Artificial Sequence; identical to SEQ ID NO: 15908
  Cyclic GFR-binding peptide
  MOD_RES (31), (32): Xaa is C or S

SEQ ID NO: 60813 - protein, 30 aa, Artificial Sequence
  Cyclic GFR-binding peptide
  MOD_RES (2), (4): Xaa is C or S
RXGXAEVVMDEYKFKVVNNAADLYLISIPE

SEQ ID NO: 60814 - protein, 32 aa, Artificial Sequence
  Cyclic GFR-binding peptide
  MOD_RES (27), (28): Xaa is C or S
GRYKKLYTVVGKDFYLISIANLKTPVXXAKSA

SEQ ID NO: 60815 - protein, 31 aa, Artificial Sequence
  Cyclic GFR-binding peptide
  MOD_RES (26), (27): Xaa is C or S
EYQKYVVKENEDIYLMSIPSLETPVXXAKPI

SEQ ID NO: 60816 - protein, 29 aa, Artificial Sequence
  Cyclic GFR-binding peptide
  MOD_RES (26), (27): Xaa is C or S
RYKKLYTVVGKDFYLISIANLKTPVXXAK

SEQ ID NO: 60817 - protein, 27 aa, Artificial Sequence
  Cyclic GFR-binding peptide
MNEYQKYIVNNSSDIYLVSIPSLKTPA

SEQ ID NO: 60818 - protein, 24 aa, Artificial Sequence
  Cyclic GFR-binding peptide
IMEYKFKIKPTKGILYLISIPELD

SEQ ID NO: 60819 - protein, 26 aa, Artificial Sequence
  Cyclic GFR-binding peptide
VVMDEYQKYVVKENEDIYLMSIPSLE

SEQ ID NO: 60820 - protein, 34 aa, Artificial Sequence
  Cyclic GFR-binding peptide
  MOD_RES (28), (29): Xaa is C or S
IMEYKFKIKPTKGILYLISIPELDQSVXXPSASA

SEQ ID NO: 60821 - protein, 20 aa, Artificial Sequence
  Cyclic GFR-binding peptide
EYKFKVVNNAADLYLISIPE

SEQ ID NO: 60822 - protein, 31 aa, Artificial Sequence
  Cyclic GFR-binding peptide
  MOD_RES (27), (28): Xaa is C or S
DEYKFKVVNNAADLYLISIPELRAPVXXSAP

SEQ ID NO: 60823 - protein, 39 aa, Artificial Sequence; identical to SEQ ID NO: 15924
  Cyclic GFR-binding peptide
  MOD_RES (1), (3), (36), (37): Xaa is C or S

SEQ ID NO: 60824 - protein, 33 aa, Artificial Sequence
  Cyclic GFR-binding peptide
  MOD_RES (28), (29): Xaa is C or S
MDYHYKLVVNNAADKYLISIPSLRAPVXXSAPA

SEQ ID NO: 60825 - protein, 27 aa, Artificial Sequence
  Cyclic GFR-binding peptide
SVAMGEYQKYYTVVGKDIYLISIPSLK

SEQ ID NO: 60826 - protein, 29 aa, Artificial Sequence
  Cyclic GFR-binding peptide
GEVVMEEYKFKVVKDYEDLYLMSIPELET

SEQ ID NO: 60827 - protein, 30 aa, Artificial Sequence
  Cyclic GFR-binding peptide
AVSMGEEYQKYTPVGMDDIYLVSIPSLKTP

SEQ ID NO: 60828 - protein, 23 aa, Artificial Sequence
  Cyclic GFR-binding peptide
MEYKFKVKPKRGVLYLISIPELA

SEQ ID NO: 60829 - protein, 30 aa, Artificial Sequence
  Cyclic GFR-binding peptide
  MOD_RES (1), (3): Xaa is C or S
XGXESVAMGYHYKLYTVVGKDKYLISIPSL

SEQ ID NO: 60830 - protein, 33 aa, Artificial Sequence; identical to SEQ ID NO: 15937
  Cyclic GFR-binding peptide
  MOD_RES (2), (2): Xaa is C or S

SEQ ID NO: 60831 - protein, 30 aa, Artificial Sequence; identical to SEQ ID NO: 15942
  Cyclic GFR-binding peptide

SEQ ID NO: 60832 - protein, 23 aa, Artificial Sequence
  Cyclic GFR-binding peptide
MGEEYKFKTPVGMDDLYLVSIPE

SEQ ID NO: 60833 - protein, 27 aa, Artificial Sequence
  Cyclic GFR-binding peptide
  MOD_RES (27), (27): Xaa is C or S
NEYKFKIVNSSDDLYLVSIPELKTPAX

SEQ ID NO: 60834 - protein, 35 aa, Artificial Sequence; identical to SEQ ID NO: 15949
  Cyclic GFR-binding peptide
  MOD_RES (1), (3), (35): Xaa is C or S

SEQ ID NO: 60835 - protein, 37 aa, Artificial Sequence
  Cyclic GFR-binding peptide
  MOD_RES (32), (33): Xaa is C or S
AVSMGEEYKFKTPVGMDDLYLVSIPELKTPVXXAKGV

SEQ ID NO: 60836 - protein, 33 aa, Artificial Sequence
  Cyclic GFR-binding peptide
  MOD_RES (1), (3): Xaa is C or S
XGXEAVSMGEEYQKYTPVGMDDIYLVSIPSLKT

SEQ ID NO: 60837 - protein, 30 aa, Artificial Sequence
  Cyclic GFR-binding peptide
  MOD_RES (1), (3): Xaa is C or S
XKXSKVIMEYQKYIKPTKGIIYLISIPSLD

SEQ ID NO: 60838 - protein, 29 aa, Artificial Sequence
  Cyclic GFR-binding peptide
VSMGEEYKFKTPVGMDDLYLVSIPELKTP

SEQ ID NO: 60839 - protein, 30 aa, Artificial Sequence
  Cyclic GFR-binding peptide
  MOD_RES (27), (28): Xaa is C or S
NEYKFKIVNNSSDLYLVSIPELKTPAXXAK

SEQ ID NO: 60840 - protein, 38 aa, Artificial Sequence; identical to SEQ ID NO: 15960
  Cyclic GFR-binding peptide
  MOD_RES (1), (3), (35), (36): Xaa is C or S

SEQ ID NO: 60841 - protein, 33 aa, Artificial Sequence
  Cyclic GFR-binding peptide
  MOD_RES (29), (30): Xaa is C or S
VMDRYKKLVVNNAADFYLISIANLRAPVXXSAP

SEQ ID NO: 60842 - protein, 21 aa, Artificial Sequence
  Cyclic GFR-binding peptide
MEYKFKIKPTKGILYLISIPE

SEQ ID NO: 60843 - protein, 38 aa, Artificial Sequence; identical to SEQ ID NO: 15965
  Cyclic GFR-binding peptide
  MOD_RES (1), (3), (35), (36): Xaa is C or S

SEQ ID NO: 60844 - protein, 30 aa, Artificial Sequence
  Cyclic GFR-binding peptide
  MOD_RES (1), (1): Xaa is C or S
XSKVVMEYQKYVKPTRGVIYLISIPSLDQP

SEQ ID NO: 60845 - protein, 29 aa, Artificial Sequence
  Cyclic GFR-binding peptide
  MOD_RES (2), (2): Xaa is C or S
GXAEVVMDYHYKLVVNNAADKYLISIPSL

SEQ ID NO: 60846 - protein, 36 aa, Artificial Sequence; identical to SEQ ID NO: 15971
  Cyclic GFR-binding peptide
  MOD_RES (1), (32), (33): Xaa is C or S

SEQ ID NO: 60847 - protein, 31 aa, Artificial Sequence
  Cyclic GFR-binding peptide
  MOD_RES (30), (31): Xaa is C or S
VVMEEYKFKVVKDYEDLYLMSIPELETPVXX

SEQ ID NO: 60848 - protein, 35 aa, Artificial Sequence
  Cyclic GFR-binding peptide
  MOD_RES (30), (31): Xaa is C or S
VVMDEYKFKVVKENEDLYLMSIPELETPVXXAKPI

SEQ ID NO: 60849 - protein, 35 aa, Artificial Sequence; identical to SEQ ID NO: 15972
  Cyclic GFR-binding peptide
  MOD_RES (31), (32): Xaa is C or S

SEQ ID NO: 60850 - protein, 31 aa, Artificial Sequence
  Cyclic GFR-binding peptide
  MOD_RES (31), (31): Xaa is C or S
VSMGEEYQKYTPVGMDDIYLVSIPSLKTPVX

SEQ ID NO: 60851 - protein, 36 aa, Artificial Sequence; identical to SEQ ID NO: 15975
  Cyclic GFR-binding peptide
  MOD_RES (31), (32): Xaa is C or S

SEQ ID NO: 60852 - protein, 40 aa, Artificial Sequence; identical to SEQ ID NO: 15976
  Cyclic GFR-binding peptide
  MOD_RES (1), (3), (35), (36): Xaa is C or S

SEQ ID NO: 60853 - protein, 37 aa, Artificial Sequence; identical to SEQ ID NO: 15981
  Cyclic GFR-binding peptide
  MOD_RES (1), (3), (35): Xaa is C or S

SEQ ID NO: 60854 - protein, 27 aa, Artificial Sequence
  Cyclic GFR-binding peptide
GEEYKFKTPVGMDDLYLVSIPELKTPV

SEQ ID NO: 60855 - protein, 34 aa, Artificial Sequence
  Cyclic GFR-binding peptide
  MOD_RES (29), (30): Xaa is C or S
VVMEYKFKVKPTRGVLYLISIPELDQPVXXPSAS

SEQ ID NO: 60856 - protein, 37 aa, Artificial Sequence; identical to SEQ ID NO: 15982
  Cyclic GFR-binding peptide
  MOD_RES (2), (34): Xaa is C or S

SEQ ID NO: 60857 - protein, 32 aa, Artificial Sequence
  Cyclic GFR-binding peptide
  MOD_RES (2), (4): Xaa is C or S
RXGXEAVSMGEEYQKYTPVGMDDIYLVSIPSL

SEQ ID NO: 60858 - protein, 30 aa, Artificial Sequence
  Cyclic GFR-binding peptide
  MOD_RES (2), (2): Xaa is C or S
KXSKVVMEYKFKVKPTRGVLYLISIPELDQ

SEQ ID NO: 60859 - protein, 30 aa, Artificial Sequence
  Cyclic GFR-binding peptide
  MOD_RES (27), (28): Xaa is C or S
GYHYKLYTVVGKDKYLISIPSLKTPVXXAK

SEQ ID NO: 60860 - protein, 21 aa, Artificial Sequence
  Cyclic GFR-binding peptide
EYKFKTPVGMDDLYLVSIPEL

SEQ ID NO: 60861 - protein, 31 aa, Artificial Sequence
  Cyclic GFR-binding peptide
AVSMGEEYQKYTPVGMDDIYLVSIPSLKTPV

SEQ ID NO: 60862 - protein, 35 aa, Artificial Sequence; identical to SEQ ID NO: 15987
  Cyclic GFR-binding peptide
  MOD_RES (1), (33), (34): Xaa is C or S

SEQ ID NO: 60863 - protein, 27 aa, Artificial Sequence
  Cyclic GFR-binding peptide
RVVMNEYKFKIVNSSDDLYLVSIPELQ

SEQ ID NO: 60864 - protein, 39 aa, Artificial Sequence; identical to SEQ ID NO: 15990
  Cyclic GFR-binding peptide
  MOD_RES (2), (4), (36), (37): Xaa is C or S

SEQ ID NO: 60865 - protein, 29 aa, Artificial Sequence
  Cyclic GFR-binding peptide
  MOD_RES (26), (27): Xaa is C or S
EYKFKVKPKRGVLYLISIPELAQPVXXPA

SEQ ID NO: 60866 - protein, 38 aa, Artificial Sequence; identical to SEQ ID NO: 16007
  Cyclic GFR-binding peptide
  MOD_RES (2), (34), (35): Xaa is C or S

SEQ ID NO: 60867 - protein, 37 aa, Artificial Sequence; identical to SEQ ID NO: 16010
  Cyclic GFR-binding peptide
  MOD_RES (2), (4), (36), (37): Xaa is C or S

SEQ ID NO: 60868 - protein, 25 aa, Artificial Sequence
  Cyclic GFR-binding peptide
MDEYKFKVVNNAADLYLISIPELRA

SEQ ID NO: 60869 - protein, 28 aa, Artificial Sequence
  Cyclic GFR-binding peptide
AVSMGEEYKFKTPVGMDDLYLVSIPELK

SEQ ID NO: 60870 - protein, 37 aa, Artificial Sequence; identical to SEQ ID NO: 16011
  Cyclic GFR-binding peptide
  MOD_RES (2), (4), (35), (36): Xaa is C or S

SEQ ID NO: 60871 - protein, 33 aa, Artificial Sequence
  Cyclic GFR-binding peptide
  MOD_RES (27), (27): Xaa is C or S
NEYKFKIVNSSDDLYLVSIPELKTPAXTPKTVH

SEQ ID NO: 60872 - protein, 30 aa, Artificial Sequence
  Cyclic GFR-binding peptide
  MOD_RES (29), (30): Xaa is C or S
VMDEYKFKVVKENEDLYLMSIPELETPVXX

SEQ ID NO: 60873 - protein, 35 aa, Artificial Sequence; identical to SEQ ID NO: 16014
  Cyclic GFR-binding peptide
  MOD_RES (32), (33): Xaa is C or S

SEQ ID NO: 60874 - protein, 23 aa, Artificial Sequence
  Cyclic GFR-binding peptide
VMDRYKKLVVNNAADFYLISIAN

SEQ ID NO: 60875 - protein, 29 aa, Artificial Sequence
  Cyclic GFR-binding peptide
  MOD_RES (26), (27): Xaa is C or S
EYKFKIVNSSDDLYLVSIPELQTPAXXPK

SEQ ID NO: 60876 - protein, 23 aa, Artificial Sequence
  Cyclic GFR-binding peptide
MGRYKKLYTVVGKDFYLISIANL

SEQ ID NO: 60877 - protein, 36 aa, Artificial Sequence; identical to SEQ ID NO: 16021
  Cyclic GFR-binding peptide
  MOD_RES (32), (32): Xaa is C or S

SEQ ID NO: 60878 - protein, 24 aa, Artificial Sequence
  Cyclic GFR-binding peptide
VAMGYHYKLYTVVGKDKYLISIPS

SEQ ID NO: 60879 - protein, 29 aa, Artificial Sequence
  Cyclic GFR-binding peptide
  MOD_RES (27), (28): Xaa is C or S
NEYKFKIVNSSDDLYLVSIPELQTPAXXP

SEQ ID NO: 60880 - protein, 41 aa, Artificial Sequence; identical to SEQ ID NO: 16022
  Cyclic GFR-binding peptide
  MOD_RES (2), (4), (36), (37): Xaa is C or S

SEQ ID NO: 60881 - protein, 38 aa, Artificial Sequence; identical to SEQ ID NO: 16023
  Cyclic GFR-binding peptide
  MOD_RES (1), (3), (36), (37): Xaa is C or S

SEQ ID NO: 60882 - protein, 40 aa, Artificial Sequence; identical to SEQ ID NO: 16025
  Cyclic GFR-binding peptide
  MOD_RES (2), (4), (36), (37): Xaa is C or S

SEQ ID NO: 60883 - protein, 34 aa, Artificial Sequence; identical to SEQ ID NO: 16026
  Cyclic GFR-binding peptide
  MOD_RES (32), (33): Xaa is C or S

SEQ ID NO: 60884 - protein, 29 aa, Artificial Sequence
  Cyclic GFR-binding peptide
  MOD_RES (28), (29): Xaa is C or S
MDRYKKLVVNNAADFYLISIANLRAPVXX

SEQ ID NO: 60885 - protein, 25 aa, Artificial Sequence
  Cyclic GFR-binding peptide
EYKFKIVNNSSDLYLVSIPELKTPA

SEQ ID NO: 60886 - protein, 41 aa, Artificial Sequence; identical to SEQ ID NO: 16029
  Cyclic GFR-binding peptide
  MOD_RES (2), (4), (37), (38): Xaa is C or S

SEQ ID NO: 60887 - protein, 36 aa, Artificial Sequence; identical to SEQ ID NO: 16031
  Cyclic GFR-binding peptide
  MOD_RES (2), (4), (36): Xaa is C or S

SEQ ID NO: 60888 - protein, 27 aa, Artificial Sequence
  Cyclic GFR-binding peptide
SRVVMNEYQKYIVNSSDDIYLVSIPSL

SEQ ID NO: 60889 - protein, 26 aa, Artificial Sequence
  Cyclic GFR-binding peptide
MDYHYKLVVNNAADKYLISIPSLRAP

SEQ ID NO: 60890 - protein, 30 aa, Artificial Sequence; identical to SEQ ID NO: 16032
  Cyclic GFR-binding peptide

SEQ ID NO: 60891 - protein, 33 aa, Artificial Sequence
  Cyclic GFR-binding peptide
  MOD_RES (27), (28): Xaa is C or S
EEYQKYVVKDYEDIYLMSIPSLETPVXXAKPIS

SEQ ID NO: 60892 - protein, 32 aa, Artificial Sequence
  Cyclic GFR-binding peptide
  MOD_RES (2), (4): Xaa is C or S
SXKXSKVVMEYKFKVKPTRGVLYLISIPELDQ

SEQ ID NO: 60893 - protein, 32 aa, Artificial Sequence
  Cyclic GFR-binding peptide
  MOD_RES (1), (3): Xaa is C or S
XGXESVAMGYHYKLYTVVGKDKYLISIPSLKT

SEQ ID NO: 60894 - protein, 42 aa, Artificial Sequence; identical to SEQ ID NO: 16034
  Cyclic GFR-binding peptide
  MOD_RES (2), (4), (37), (38): Xaa is C or S

SEQ ID NO: 60895 - protein, 33 aa, Artificial Sequence; identical to SEQ ID NO: 16036
  Cyclic GFR-binding peptide
  MOD_RES (32), (33): Xaa is C or S

SEQ ID NO: 60896 - protein, 30 aa, Artificial Sequence
  Cyclic GFR-binding peptide
  MOD_RES (1), (3): Xaa is C or S
XGXGEVVMDEYQKYVVKENEDIYLMSIPSL

SEQ ID NO: 60897 - protein, 28 aa, Artificial Sequence
  Cyclic GFR-binding peptide
  MOD_RES (26), (27): Xaa is C or S
YHYKLVVNNAADKYLISIPSLRAPVXXS

SEQ ID NO: 60898 - protein, 34 aa, Artificial Sequence
  Cyclic GFR-binding peptide
  MOD_RES (29), (30): Xaa is C or S
VMNEYKFKIVNSSDDLYLVSIPELQTPAXXPKPV

SEQ ID NO: 60899 - protein, 30 aa, Artificial Sequence
  Cyclic GFR-binding peptide
  MOD_RES (30), (30): Xaa is C or S
VVMNEYQKYIVNNSSDIYLVSIPSLKTPAX

SEQ ID NO: 60900 - protein, 37 aa, Artificial Sequence; identical to SEQ ID NO: 16040
  Cyclic GFR-binding peptide
  MOD_RES (2), (4), (36): Xaa is C or S

SEQ ID NO: 60901 - protein, 34 aa, Artificial Sequence; identical to SEQ ID NO: 16042
  Cyclic GFR-binding peptide
  MOD_RES (31), (32): Xaa is C or S

SEQ ID NO: 60902 - protein, 27 aa, Artificial Sequence
  Cyclic GFR-binding peptide
ARVVMNEYQKYIVNSSDDIYLVSIPSL

SEQ ID NO: 60903 - protein, 37 aa, Artificial Sequence; identical to SEQ ID NO: 16047
  Cyclic GFR-binding peptide
  MOD_RES (1), (33), (34): Xaa is C or S

SEQ ID NO: 60904 - protein, 28 aa, Artificial Sequence
  Cyclic GFR-binding peptide
VMDEYQKYVVKENEDIYLMSIPSLETPV

SEQ ID NO: 60905 - protein, 29 aa, Artificial Sequence
  Cyclic GFR-binding peptide
  MOD_RES (27), (28): Xaa is C or S
GRYKKLYTVVGKDFYLISIANLKTPVXXA

SEQ ID NO: 60906 - protein, 35 aa, Artificial Sequence; identical to SEQ ID NO: 16050
  Cyclic GFR-binding peptide
  MOD_RES (31), (32): Xaa is C or S

SEQ ID NO: 60907 - protein, 24 aa, Artificial Sequence
  Cyclic GFR-binding peptide
MNEYKFKIVNNSSDLYLVSIPELK

SEQ ID NO: 60908 - protein, 26 aa, Artificial Sequence
  Cyclic GFR-binding peptide
VMNEYKFKIVNSSDDLYLVSIPELQT

SEQ ID NO: 60909 - protein, 25 aa, Artificial Sequence
  Cyclic GFR-binding peptide
SVAMGEYQKYYTVVGKDIYLISIPS

SEQ ID NO: 60910 - protein, 29 aa, Artificial Sequence
  Cyclic GFR-binding peptide
  MOD_RES (1), (1): Xaa is C or S
XAKVVMNEYQKYIVNNSSDIYLVSIPSLK

SEQ ID NO: 60911 - protein, 30 aa, Artificial Sequence
  Cyclic GFR-binding peptide
ARVVMNEYQKYIVNSSDDIYLVSIPSLQTP

SEQ ID NO: 60912 - protein, 28 aa, Artificial Sequence
  Cyclic GFR-binding peptide
  MOD_RES (1), (1): Xaa is C or S
XGEVVMDEYKFKVVKENEDLYLMSIPEL

SEQ ID NO: 60913 - protein, 34 aa, Artificial Sequence
  Cyclic GFR-binding peptide
  MOD_RES (2), (4): Xaa is C or S
RXGXAEVVMDRYKKLVVNNAADFYLISIANLRAP

SEQ ID NO: 60914 - protein, 28 aa, Artificial Sequence
  Cyclic GFR-binding peptide
ARVVMNEYKFKIVNSSDDLYLVSIPELQ

SEQ ID NO: 60915 - protein, 29 aa, Artificial Sequence
  Cyclic GFR-binding peptide
  MOD_RES (2), (2): Xaa is C or S
GXSRVVMNEYKFKIVNSSDDLYLVSIPEL

SEQ ID NO: 60916 - protein, 27 aa, Artificial Sequence
  Cyclic GFR-binding peptide
MDEYKFKVVNNAADLYLISIPELRAPV

SEQ ID NO: 60917 - protein, 35 aa, Artificial Sequence; identical to SEQ ID NO: 16060
  Cyclic GFR-binding peptide
  MOD_RES (2), (4): Xaa is C or S

SEQ ID NO: 60918 - protein, 40 aa, Artificial Sequence; identical to SEQ ID NO: 16061
  Cyclic GFR-binding peptide
  MOD_RES (1), (3), (35), (36): Xaa is C or S

SEQ ID NO: 60919 - protein, 30 aa, Artificial Sequence
  Cyclic GFR-binding peptide
  MOD_RES (30), (30): Xaa is C or S
VVMDEYQKYVVKENEDIYLMSIPSLETPVX

SEQ ID NO: 60920 - protein, 34 aa, Artificial Sequence
  Cyclic GFR-binding peptide
  MOD_RES (28), (29): Xaa is C or S
MNEYKFKIVNNSSDLYLVSIPELKTPAXXAKPVA

SEQ ID NO: 60921 - protein, 28 aa, Artificial Sequence
  Cyclic GFR-binding peptide
  MOD_RES (28), (28): Xaa is C or S
MGYHYKLYTVVGKDKYLISIPSLKTPVX

SEQ ID NO: 60922 - protein, 35 aa, Artificial Sequence; identical to SEQ ID NO: 16065
  Cyclic GFR-binding peptide
  MOD_RES (32), (33): Xaa is C or S

SEQ ID NO: 60923 - protein, 38 aa, Artificial Sequence; identical to SEQ ID NO: 16070
  Cyclic GFR-binding peptide
  MOD_RES (2), (4), (36), (37): Xaa is C or S

SEQ ID NO: 60924 - protein, 32 aa, Artificial Sequence
  Cyclic GFR-binding peptide
  MOD_RES (28), (29): Xaa is C or S
MNEYKFKIVNSSDDLYLVSIPELKTPAXXPKP

SEQ ID NO: 60925 - protein, 27 aa, Artificial Sequence
  Cyclic GFR-binding peptide
MNEYKFKIVNNSSDLYLVSIPELKTPA

SEQ ID NO: 60926 - protein, 41 aa, Artificial Sequence; identical to SEQ ID NO: 16073
  Cyclic GFR-binding peptide
  MOD_RES (2), (4), (37), (38): Xaa is C or S

SEQ ID NO: 60927 - protein, 25 aa, Artificial Sequence
  Cyclic GFR-binding peptide
MEYQKYIKPTKGIIYLISIPSLDQS

SEQ ID NO: 60928 - protein, 34 aa, Artificial Sequence; identical to SEQ ID NO: 16081
  Cyclic GFR-binding peptide
  MOD_RES (32), (33): Xaa is C or S

SEQ ID NO: 60929 - protein, 29 aa, Artificial Sequence
  Cyclic GFR-binding peptide
  MOD_RES (27), (28): Xaa is C or S
DRYKKLVVNNAADFYLISIANLRAPVXXS

SEQ ID NO: 60930 - protein, 26 aa, Artificial Sequence
  Cyclic GFR-binding peptide
NEYKFKIVNSSDDLYLVSIPELKTPA

SEQ ID NO: 60931 - protein, 30 aa, Artificial Sequence
  Cyclic GFR-binding peptide
  MOD_RES (1), (1): Xaa is C or S
XAKVVMNEYKFKIVNNSSDLYLVSIPELKT

SEQ ID NO: 60932 - protein, 25 aa, Artificial Sequence
  Cyclic GFR-binding peptide
EYQKYTPVGMDDIYLVSIPSLKTPV

SEQ ID NO: 60933 - protein, 40 aa, Artificial Sequence; identical to SEQ ID NO: 16087
  Cyclic GFR-binding peptide
  MOD_RES (1), (3), (34), (35): Xaa is C or S

SEQ ID NO: 60934 - protein, 32 aa, Artificial Sequence
  Cyclic GFR-binding peptide
  MOD_RES (1), (3): Xaa is C or S
XGXGEVVMEEYQKYVVKDYEDIYLMSIPSLET

SEQ ID NO: 60935 - protein, 28 aa, Artificial Sequence
  Cyclic GFR-binding peptide
  MOD_RES (1), (1): Xaa is C or S
XGEVVMEEYKFKVVKDYEDLYLMSIPEL

SEQ ID NO: 60936 - protein, 32 aa, Artificial Sequence
  Cyclic GFR-binding peptide
  MOD_RES (2), (2): Xaa is C or S
GXAEVVMDYHYKLVVNNAADKYLISIPSLRAP

SEQ ID NO: 60937 - protein, 35 aa, Artificial Sequence; identical to SEQ ID NO: 16089
  Cyclic GFR-binding peptide
  MOD_RES (1), (3), (35): Xaa is C or S

SEQ ID NO: 60938 - protein, 32 aa, Artificial Sequence
  Cyclic GFR-binding peptide
  MOD_RES (2), (4): Xaa is C or S
RXGXEAVSMGEEYKFKTPVGMDDLYLVSIPEL

SEQ ID NO: 60939 - protein, 30 aa, Artificial Sequence
  Cyclic GFR-binding peptide
  MOD_RES (30), (30): Xaa is C or S
KVVMEYKFKVKPTRGVLYLISIPELDQPVX

SEQ ID NO: 60940 - protein, 29 aa, Artificial Sequence
  Cyclic GFR-binding peptide
  MOD_RES (26), (27): Xaa is C or S
EYKFKVVNNAADLYLISIPELRAPVXXSA

SEQ ID NO: 60941 - protein, 32 aa, Artificial Sequence
  Cyclic GFR-binding peptide
  MOD_RES (1), (3): Xaa is C or S
XKXSRVIMEYKFKVKPKRGVLYLISIPELAQP

SEQ ID NO: 60942 - protein, 32 aa, Artificial Sequence
  Cyclic GFR-binding peptide
  MOD_RES (26), (27): Xaa is C or S
EYQKYIVNSSDDIYLVSIPSLQTPAXXPKPVT

SEQ ID NO: 60943 - protein, 36 aa, Artificial Sequence; identical to SEQ ID NO: 16092
  Cyclic GFR-binding peptide
  MOD_RES (31), (32): Xaa is C or S

SEQ ID NO: 60944 - protein, 28 aa, Artificial Sequence
  Cyclic GFR-binding peptide
VIMEYKFKIKPTKGILYLISIPELDQSV

SEQ ID NO: 60945 - protein, 26 aa, Artificial Sequence
  Cyclic GFR-binding peptide
  MOD_RES (26), (26): Xaa is C or S
EYQKYIKPTKGIIYLISIPSLDQSVX

SEQ ID NO: 60946 - protein, 32 aa, Artificial Sequence
  Cyclic GFR-binding peptide
  MOD_RES (2), (4): Xaa is C or S
SXKXSKVIMEYQKYIKPTKGIIYLISIPSLDQ

SEQ ID NO: 60947 - protein, 37 aa, Artificial Sequence; identical to SEQ ID NO: 16099
  Cyclic GFR-binding peptide
  MOD_RES (1), (32), (33): Xaa is C or S

SEQ ID NO: 60948 - protein, 33 aa, Artificial Sequence
  Cyclic GFR-binding peptide
  MOD_RES (1), (3): Xaa is C or S
XGXESVAMGEYQKYYTVVGKDIYLISIPSLKTP

SEQ ID NO: 60949 - protein, 35 aa, Artificial Sequence; identical to SEQ ID NO: 16101
  Cyclic GFR-binding peptide
  MOD_RES (31), (32): Xaa is C or S

SEQ ID NO: 60950 - protein, 29 aa, Artificial Sequence
  Cyclic GFR-binding peptide
  MOD_RES (2), (4): Xaa is C or S
SXKXSKVVMEYKFKVKPTRGVLYLISIPE

SEQ ID NO: 60951 - protein, 31 aa, Artificial Sequence
  Cyclic GFR-binding peptide
  MOD_RES (30), (31): Xaa is C or S
SMGEEYQKYTPVGMDDIYLVSIPSLKTPVXX

SEQ ID NO: 60952 - protein, 30 aa, Artificial Sequence
  Cyclic GFR-binding peptide
  MOD_RES (29), (30): Xaa is C or S
VMEEYQKYVVKDYEDIYLMSIPSLETPVXX

SEQ ID NO: 60953 - protein, 29 aa, Artificial Sequence
  Cyclic GFR-binding peptide
  MOD_RES (2), (2): Xaa is C or S
KXSKVIMEYKFKIKPTKGILYLISIPELD

SEQ ID NO: 60954 - protein, 38 aa, Artificial Sequence; identical to SEQ ID NO: 16109
  Cyclic GFR-binding peptide
  MOD_RES (1), (32), (33): Xaa is C or S

SEQ ID NO: 60955 - protein, 27 aa, Artificial Sequence
  Cyclic GFR-binding peptide
  MOD_RES (1), (1): Xaa is C or S
XGEVVMEEYQKYVVKDYEDIYLMSIPS

SEQ ID NO: 60956 - protein, 35 aa, Artificial Sequence
  Cyclic GFR-binding peptide
  MOD_RES (30), (31): Xaa is C or S
VVMNEYQKYIVNSSDDIYLVSIPSLKTPAXXPKPV

SEQ ID NO: 60957 - protein, 39 aa, Artificial Sequence; identical to SEQ ID NO: 16115
  Cyclic GFR-binding peptide
  MOD_RES (2), (4), (36), (37): Xaa is C or S

SEQ ID NO: 60958 - protein, 34 aa, Artificial Sequence; identical to SEQ ID NO: 16119
  Cyclic GFR-binding peptide
  MOD_RES (31), (32): Xaa is C or S

SEQ ID NO: 60959 - protein, 29 aa, Artificial Sequence
  Cyclic GFR-binding peptide
EVVMDEYQKYVVKENEDIYLMSIPSLETP

SEQ ID NO: 60960 - protein, 27 aa, Artificial Sequence
  Cyclic GFR-binding peptide
SKVVMEYQKYVKPTRGVIYLISIPSLD

SEQ ID NO: 60961 - protein, 34 aa, Artificial Sequence; identical to SEQ ID NO: 16123
  Cyclic GFR-binding peptide
  MOD_RES (2), (34): Xaa is C or S

SEQ ID NO: 60962 - protein, 36 aa, Artificial Sequence; identical to SEQ ID NO: 16124
  Cyclic GFR-binding peptide
  MOD_RES (2), (34), (35): Xaa is C or S

SEQ ID NO: 60963 - protein, 24 aa, Artificial Sequence
  Cyclic GFR-binding peptide
EYKFKIVNSSDDLYLVSIPELQTP

SEQ ID NO: 60964 - protein, 32 aa, Artificial Sequence; identical to SEQ ID NO: 16128
  Cyclic GFR-binding peptide
  MOD_RES (31), (32): Xaa is C or S

SEQ ID NO: 60965 - protein, 25 aa, Artificial Sequence
  Cyclic GFR-binding peptide
MGEEYQKYTPVGMDDIYLVSIPSLK

SEQ ID NO: 60966 - protein, 33 aa, Artificial Sequence; identical to SEQ ID NO: 16133
  Cyclic GFR-binding peptide
  MOD_RES (32), (33): Xaa is C or S

SEQ ID NO: 60967 - protein, 22 aa, Artificial Sequence
  Cyclic GFR-binding peptide
GRYKKLYTVVGKDFYLISIANL

SEQ ID NO: 60968 - protein, 23 aa, Artificial Sequence
  Cyclic GFR-binding peptide
MNEYKFKIVNNSSDLYLVSIPEL

SEQ ID NO: 60969 - protein, 42 aa, Artificial Sequence; identical to SEQ ID NO: 16136
  Cyclic GFR-binding peptide
  MOD_RES (1), (3), (36), (37): Xaa is C or S

SEQ ID NO: 60970 - protein, 34 aa, Artificial Sequence
  Cyclic GFR-binding peptide
  MOD_RES (28), (29): Xaa is C or S
IMEYKFKVKPKRGVLYLISIPELAQPVXXPAASA

SEQ ID NO: 60971 - protein, 35 aa, Artificial Sequence; identical to SEQ ID NO: 16140
  Cyclic GFR-binding peptide
  MOD_RES (1), (33), (34): Xaa is C or S

SEQ ID NO: 60972 - protein, 40 aa, Artificial Sequence; identical to SEQ ID NO: 16142
  Cyclic GFR-binding peptide
  MOD_RES (2), (4), (36), (37): Xaa is C or S

SEQ ID NO: 60973 - protein, 22 aa, Artificial Sequence
  Cyclic GFR-binding peptide
MNEYKFKIVNNSSDLYLVSIPE

SEQ ID NO: 60974 - protein, 34 aa, Artificial Sequence; identical to SEQ ID NO: 16145
  Cyclic GFR-binding peptide
  MOD_RES (2), (34): Xaa is C or S

SEQ ID NO: 60975 - protein, 33 aa, Artificial Sequence
  Cyclic GFR-binding peptide
  MOD_RES (30), (30): Xaa is C or S
VVMNEYQKYIVNSSDDIYLVSIPSLKTPAXTPK

SEQ ID NO: 60976 - protein, 31 aa, Artificial Sequence
  Cyclic GFR-binding peptide
  MOD_RES (26), (27): Xaa is C or S
EYKFKIVNNSSDLYLVSIPELKTPAXXAKPV

SEQ ID NO: 60977 - protein, 22 aa, Artificial Sequence
  Cyclic GFR-binding peptide
YHYKLYTVVGKDKYLISIPSLK

SEQ ID NO: 60978 - protein, 31 aa, Artificial Sequence
  Cyclic GFR-binding peptide
  MOD_RES (27), (28): Xaa is C or S
NEYKFKIVNSSDDLYLVSIPELQTPAXXPKP

SEQ ID NO: 60979 - protein, 25 aa, Artificial Sequence
  Cyclic GFR-binding peptide
VVMNEYKFKIVNSSDDLYLVSIPEL

SEQ ID NO: 60980 - protein, 37 aa, Artificial Sequence; identical to SEQ ID NO: 16151
  Cyclic GFR-binding peptide
  MOD_RES (1), (33), (34): Xaa is C or S

SEQ ID NO: 60981 - protein, 26 aa, Artificial Sequence
  Cyclic GFR-binding peptide
VMEYQKYVKPTRGVIYLISIPSLDQP

SEQ ID NO: 60982 - protein, 26 aa, Artificial Sequence
  Cyclic GFR-binding peptide
SMGEEYQKYTPVGMDDIYLVSIPSLK

SEQ ID NO: 60983 - protein, 31 aa, Artificial Sequence
  Cyclic GFR-binding peptide
  MOD_RES (26), (27): Xaa is C or S
EYQKYVVKDYEDIYLMSIPSLETPVXXAKPI

SEQ ID NO: 60984 - protein, 28 aa, Artificial Sequence
  Cyclic GFR-binding peptide
AMGYHYKLYTVVGKDKYLISIPSLKTPV

SEQ ID NO: 60985 - protein, 22 aa, Artificial Sequence
  Cyclic GFR-binding peptide
DEYKFKVVKENEDLYLMSIPEL

SEQ ID NO: 60986 - protein, 23 aa, Artificial Sequence
  Cyclic GFR-binding peptide
IMEYQKYIKPTKGIIYLISIPSL

SEQ ID NO: 60987 - protein, 40 aa, Artificial Sequence; identical to SEQ ID NO: 16156
  Cyclic GFR-binding peptide
  MOD_RES (1), (3), (35), (36): Xaa is C or S

SEQ ID NO: 60988 - protein, 37 aa, Artificial Sequence; identical to SEQ ID NO: 16158
  Cyclic GFR-binding peptide
  MOD_RES (32), (33): Xaa is C or S

SEQ ID NO: 60989 - protein, 28 aa, Artificial Sequence
  Cyclic GFR-binding peptide
  MOD_RES (1), (3): Xaa is C or S
XKXSRVIMEYKFKVKPKRGVLYLISIPE

SEQ ID NO: 60990 - protein, 35 aa, Artificial Sequence
  Cyclic GFR-binding peptide
  MOD_RES (30), (31): Xaa is C or S
VVMNEYKFKIVNNSSDLYLVSIPELKTPAXXAKPV

SEQ ID NO: 60991 - protein, 41 aa, Artificial Sequence; identical to SEQ ID NO: 16160
  Cyclic GFR-binding peptide
  MOD_RES (2), (4), (36), (37): Xaa is C or S

SEQ ID NO: 60992 - protein, 33 aa, Artificial Sequence
  Cyclic GFR-binding peptide
  MOD_RES (30), (31): Xaa is C or S
VVMDEYKFKVVKENEDLYLMSIPELETPVXXAK

SEQ ID NO: 60993 - protein, 31 aa, Artificial Sequence; identical to SEQ ID NO: 16162
  Cyclic GFR-binding peptide
  MOD_RES (31), (31): Xaa is C or S

SEQ ID NO: 60994 - protein, 24 aa, Artificial Sequence
  Cyclic GFR-binding peptide
VVMDEYQKYVVKENEDIYLMSIPS

SEQ ID NO: 60995 - protein, 30 aa, Artificial Sequence
  Cyclic GFR-binding peptide
  MOD_RES (29), (30): Xaa is C or S
VIMEYKFKVKPKRGVLYLISIPELAQPVXX

SEQ ID NO: 60996 - protein, 30 aa, Artificial Sequence
  Cyclic GFR-binding peptide
  MOD_RES (2), (2): Xaa is C or S
GXGEVVMEEYQKYVVKDYEDIYLMSIPSLE

SEQ ID NO: 60997 - protein, 25 aa, Artificial Sequence
  Cyclic GFR-binding peptide
EYKFKVVNNAADLYLISIPELRAPV

SEQ ID NO: 60998 - protein, 27 aa, Artificial Sequence
  Cyclic GFR-binding peptide
  MOD_RES (26), (27): Xaa is C or S
EYKFKVVKENEDLYLMSIPELETPVXX

SEQ ID NO: 60999 - protein, 33 aa, Artificial Sequence; identical to SEQ ID NO: 16170
  Cyclic GFR-binding peptide
  MOD_RES (32), (33): Xaa is C or S

SEQ ID NO: 61000 - protein, 39 aa, Artificial Sequence; identical to SEQ ID NO: 16171
  Cyclic GFR-binding peptide
  MOD_RES (1), (3), (34), (35): Xaa is C or S

SEQ ID NO: 61001 - protein, 37 aa, Artificial Sequence; identical to SEQ ID NO: 16173
  Cyclic GFR-binding peptide
  MOD_RES (32), (33): Xaa is C or S

SEQ ID NO: 61002 - protein, 37 aa, Artificial Sequence; identical to SEQ ID NO: 16174
  Cyclic GFR-binding peptide
  MOD_RES (31), (32): Xaa is C or S

SEQ ID NO: 61003 - protein, 38 aa, Artificial Sequence; identical to SEQ ID NO: 16178
  Cyclic GFR-binding peptide
  MOD_RES (2), (4), (36): Xaa is C or S

SEQ ID NO: 61004 - protein, 25 aa, Artificial Sequence
  Cyclic GFR-binding peptide
KVIMEYKFKIKPTKGILYLISIPEL

SEQ ID NO: 61005 - protein, 35 aa, Artificial Sequence; identical to SEQ ID NO: 16184
  Cyclic GFR-binding peptide
  MOD_RES (32), (33): Xaa is C or S

SEQ ID NO: 61006 - protein, 22 aa, Artificial Sequence
  Cyclic GFR-binding peptide
MDEYKFKVVNNAADLYLISIPE

SEQ ID NO: 61007 - protein, 35 aa, Artificial Sequence; identical to SEQ ID NO: 16186
  Cyclic GFR-binding peptide
  MOD_RES (32), (33): Xaa is C or S

SEQ ID NO: 61008 - protein, 26 aa, Artificial Sequence
  Cyclic GFR-binding peptide
VSMGEEYKFKTPVGMDDLYLVSIPEL

SEQ ID NO: 61009 - protein, 35 aa, Artificial Sequence
  Cyclic GFR-binding peptide
  MOD_RES (30), (30): Xaa is C or S
VVMNEYKFKIVNSSDDLYLVSIPELKTPAXTPKTV

SEQ ID NO: 61010 - protein, 33 aa, Artificial Sequence
  Cyclic GFR-binding peptide
  MOD_RES (29), (30): Xaa is C or S
VIMEYKFKVKPKRGVLYLISIPELAQPVXXPAA

SEQ ID NO: 61011 - protein, 33 aa, Artificial Sequence
  Cyclic GFR-binding peptide
  MOD_RES (1), (3): Xaa is C or S
XGXESVAMGRYKKLYTVVGKDFYLISIANLKTP

SEQ ID NO: 61012 - protein, 34 aa, Artificial Sequence; identical to SEQ ID NO: 16195
  Cyclic GFR-binding peptide
  MOD_RES (1), (33): Xaa is C or S

SEQ ID NO: 61013 - protein, 20 aa, Artificial Sequence
  Cyclic GFR-binding peptide
EYKFKVVKDYEDLYLMSIPE

SEQ ID NO: 61014 - protein, 30 aa, Artificial Sequence
  Cyclic GFR-binding peptide
  MOD_RES (2), (2): Xaa is C or S
GXSRVVMNEYQKYIVNSSDDIYLVSIPSLK

SEQ ID NO: 61015 - protein, 29 aa, Artificial Sequence
  Cyclic GFR-binding peptide
  MOD_RES (1), (3): Xaa is C or S
XGXGEVVMEEYKFKVVKDYEDLYLMSIPE

SEQ ID NO: 61016 - protein, 39 aa, Artificial Sequence; identical to SEQ ID NO: 16201
  Cyclic GFR-binding peptide
  MOD_RES (2), (34), (35): Xaa is C or S

SEQ ID NO: 61017 - protein, 40 aa, Artificial Sequence; identical to SEQ ID NO: 16203
  Cyclic GFR-binding peptide
  MOD_RES (2), (4), (36), (37): Xaa is C or S

SEQ ID NO: 61018 - protein, 30 aa, Artificial Sequence
  Cyclic GFR-binding peptide
  MOD_RES (27), (28): Xaa is C or S
EEYQKYVVKDYEDIYLMSIPSLETPVXXAK

SEQ ID NO: 61019 - protein, 29 aa, Artificial Sequence
  Cyclic GFR-binding peptide
  MOD_RES (27), (28): Xaa is C or S
EEYKFKTPVGMDDLYLVSIPELKTPVXXA

SEQ ID NO: 61020 - protein, 23 aa, Artificial Sequence
  Cyclic GFR-binding peptide
VVMEYKFKVKPTRGVLYLISIPE

SEQ ID NO: 61021 - protein, 35 aa, Artificial Sequence; identical to SEQ ID NO: 16207
  Cyclic GFR-binding peptide
  MOD_RES (1), (3), (35): Xaa is C or S

SEQ ID NO: 61022 - protein, 25 aa, Artificial Sequence
  Cyclic GFR-binding peptide
AMGEYQKYYTVVGKDIYLISIPSLK

SEQ ID NO: 61023 - protein, 36 aa, Artificial Sequence; identical to SEQ ID NO: 16209
  Cyclic GFR-binding peptide
  MOD_RES (1), (3), (35), (36): Xaa is C or S

SEQ ID NO: 61024 - protein, 36 aa, Artificial Sequence; identical to SEQ ID NO: 16210
  Cyclic GFR-binding peptide
  MOD_RES (2), (4), (35), (36): Xaa is C or S

SEQ ID NO: 61025 - protein, 24 aa, Artificial Sequence
  Cyclic GFR-binding peptide
VMEEYQKYVVKDYEDIYLMSIPSL

SEQ ID NO: 61026 - protein, 32 aa, Artificial Sequence
  Cyclic GFR-binding peptide
  MOD_RES (29), (30): Xaa is C or S
VMEEYKFKVVKDYEDLYLMSIPELETPVXXAK

SEQ ID NO: 61027 - protein, 36 aa, Artificial Sequence; identical to SEQ ID NO: 16212
  Cyclic GFR-binding peptide
  MOD_RES (1), (3), (35), (36): Xaa is C or S

SEQ ID NO: 61028 - protein, 37 aa, Artificial Sequence; identical to SEQ ID NO: 16218
  Cyclic GFR-binding peptide
  MOD_RES (1), (3), (35), (36): Xaa is C or S

SEQ ID NO: 61029 - protein, 25 aa, Artificial Sequence
  Cyclic GFR-binding peptide
VVMEYQKYVKPTRGVIYLISIPSLD

SEQ ID NO: 61030 - protein, 30 aa, Artificial Sequence
  Cyclic GFR-binding peptide
  MOD_RES (2), (2): Xaa is C or S
GXESVAMGRYKKLYTVVGKDFYLISIANLK

SEQ ID NO: 61031 - protein, 29 aa, Artificial Sequence
  Cyclic GFR-binding peptide
SKVIMEYQKYIKPTKGIIYLISIPSLDQS

SEQ ID NO: 61032 - protein, 26 aa, Artificial Sequence
  Cyclic GFR-binding peptide
VVMEEYKFKVVKDYEDLYLMSIPELE

SEQ ID NO: 61033 - protein, 28 aa, Artificial Sequence
  Cyclic GFR-binding peptide
EVVMDEYQKYVVKENEDIYLMSIPSLET

SEQ ID NO: 61034 - protein, 27 aa, Artificial Sequence
  Cyclic GFR-binding peptide
  MOD_RES (2), (2): Xaa is C or S
KXSKVIMEYKFKIKPTKGILYLISIPE

SEQ ID NO: 61035 - protein, 38 aa, Artificial Sequence; identical to SEQ ID NO: 16226
  Cyclic GFR-binding peptide
  MOD_RES (1), (3), (35): Xaa is C or S

SEQ ID NO: 61036 - protein, 31 aa, Artificial Sequence
  Cyclic GFR-binding peptide
  MOD_RES (26), (27): Xaa is C or S
EYQKYIKPTKGIIYLISIPSLDQSVXXPSAS

SEQ ID NO: 61037 - protein, 27 aa, Artificial Sequence
  Cyclic GFR-binding peptide
VVMNEYKFKIVNSSDDLYLVSIPELKT

SEQ ID NO: 61038 - protein, 24 aa, Artificial Sequence
  Cyclic GFR-binding peptide
VMDYHYKLVVNNAADKYLISIPSL

SEQ ID NO: 61039 - protein, 27 aa, Artificial Sequence
  Cyclic GFR-binding peptide
VVMEEYQKYVVKDYEDIYLMSIPSLET

SEQ ID NO: 61040 - protein, 28 aa, Artificial Sequence
  Cyclic GFR-binding peptide
RVIMEYKFKVKPKRGVLYLISIPELAQP

SEQ ID NO: 61041 - protein, 31 aa, Artificial Sequence
  Cyclic GFR-binding peptide
  MOD_RES (29), (30): Xaa is C or S
VMNEYQKYIVNNSSDIYLVSIPSLKTPAXXA

SEQ ID NO: 61042 - protein, 37 aa, Artificial Sequence; identical to SEQ ID NO: 16235
  Cyclic GFR-binding peptide
  MOD_RES (32), (33): Xaa is C or S

SEQ ID NO: 61043 - protein, 33 aa, Artificial Sequence; identical to SEQ ID NO: 16237
  Cyclic GFR-binding peptide
  MOD_RES (1), (32), (33): Xaa is C or S

SEQ ID NO: 61044 - protein, 26 aa, Artificial Sequence
  Cyclic GFR-binding peptide
AKVVMNEYQKYIVNNSSDIYLVSIPS

SEQ ID NO: 61045 - protein, 29 aa, Artificial Sequence
  Cyclic GFR-binding peptide
  MOD_RES (26), (27): Xaa is C or S
RYKKLVVNNAADFYLISIANLRAPVXXSA

SEQ ID NO: 61046 - protein, 30 aa, Artificial Sequence
  Cyclic GFR-binding peptide
  MOD_RES (26), (27): Xaa is C or S
EYKFKTPVGMDDLYLVSIPELKTPVXXAKG

SEQ ID NO: 61047 - protein, 32 aa, Artificial Sequence; identical to SEQ ID NO: 16238
  Cyclic GFR-binding peptide
  MOD_RES (2), (2): Xaa is C or S

SEQ ID NO: 61048 - protein, 32 aa, Artificial Sequence
  Cyclic GFR-binding peptide
  MOD_RES (28), (29): Xaa is C or S
MNEYQKYIVNSSDDIYLVSIPSLKTPAXXPKP

SEQ ID NO: 61049 - protein, 35 aa, Artificial Sequence
  Cyclic GFR-binding peptide
  MOD_RES (29), (29): Xaa is C or S
VMNEYQKYIVNSSDDIYLVSIPSLKTPAXTPKTVH

SEQ ID NO: 61050 - protein, 40 aa, Artificial Sequence; identical to SEQ ID NO: 16240
  Cyclic GFR-binding peptide
  MOD_RES (2), (34), (35): Xaa is C or S

SEQ ID NO: 61051 - protein, 36 aa, Artificial Sequence; identical to SEQ ID NO: 16241
  Cyclic GFR-binding peptide
  MOD_RES (33), (34): Xaa is C or S

SEQ ID NO: 61052 - protein, 31 aa, Artificial Sequence
  Cyclic GFR-binding peptide
  MOD_RES (1), (1): Xaa is C or S
XEAVSMGEEYQKYTPVGMDDIYLVSIPSLKT

SEQ ID NO: 61053 - protein, 31 aa, Artificial Sequence
  Cyclic GFR-binding peptide
  MOD_RES (30), (31): Xaa is C or S
VVMDEYQKYVVKENEDIYLMSIPSLETPVXX

SEQ ID NO: 61054 - protein, 21 aa, Artificial Sequence
  Cyclic GFR-binding peptide
NEYQKYIVNSSDDIYLVSIPS

SEQ ID NO: 61055 - protein, 42 aa, Artificial Sequence; identical to SEQ ID NO: 16245
  Cyclic GFR-binding peptide
  MOD_RES (2), (4), (36), (37): Xaa is C or S

SEQ ID NO: 61056 - protein, 22 aa, Artificial Sequence
  Cyclic GFR-binding peptide
EYKFKTPVGMDDLYLVSIPELK

SEQ ID NO: 61057 - protein, 29 aa, Artificial Sequence
  Cyclic GFR-binding peptide
  MOD_RES (2), (2): Xaa is C or S
GXSRVVMNEYQKYIVNSSDDIYLVSIPSL

SEQ ID NO: 61058 - protein, 27 aa, Artificial Sequence
  Cyclic GFR-binding peptide
  MOD_RES (1), (1): Xaa is C or S
XAKVVMNEYKFKIVNNSSDLYLVSIPE

SEQ ID NO: 61059 - protein, 30 aa, Artificial Sequence
  Cyclic GFR-binding peptide
  MOD_RES (27), (28): Xaa is C or S
MEYKFKVKPTRGVLYLISIPELDQPVXXPS

SEQ ID NO: 61060 - protein, 36 aa, Artificial Sequence; identical to SEQ ID NO: 16254
  Cyclic GFR-binding peptide
  MOD_RES (32), (33): Xaa is C or S

SEQ ID NO: 61061 - protein, 32 aa, Artificial Sequence; identical to SEQ ID NO: 16256
  Cyclic GFR-binding peptide
  MOD_RES (31), (32): Xaa is C or S

SEQ ID NO: 61062 - protein, 39 aa, Artificial Sequence; identical to SEQ ID NO: 16257
  Cyclic GFR-binding peptide
  MOD_RES (1), (33): Xaa is C or S

SEQ ID NO: 61063 - protein, 36 aa, Artificial Sequence; identical to SEQ ID NO: 16259
  Cyclic GFR-binding peptide
  MOD_RES (31), (32): Xaa is C or S

SEQ ID NO: 61064 - protein, 27 aa, Artificial Sequence
  Cyclic GFR-binding peptide
KVIMEYKFKIKPTKGILYLISIPELDQ

SEQ ID NO: 61065 - protein, 28 aa, Artificial Sequence
  Cyclic GFR-binding peptide
VVMNEYQKYIVNSSDDIYLVSIPSLQTP

SEQ ID NO: 61066 - protein, 33 aa, Artificial Sequence; identical to SEQ ID NO: 16267
  Cyclic GFR-binding peptide
  MOD_RES (1), (3): Xaa is C or S

SEQ ID NO: 61067 - protein, 36 aa, Artificial Sequence; identical to SEQ ID NO: 16268
  Cyclic GFR-binding peptide
  MOD_RES (2), (4), (36): Xaa is C or S

SEQ ID NO: 61068 - protein, 32 aa, Artificial Sequence
  Cyclic GFR-binding peptide
  MOD_RES (27), (28): Xaa is C or S
DYHYKLVVNNAADKYLISIPSLRAPVXXSAPA

SEQ ID NO: 61069 - protein, 32 aa, Artificial Sequence; identical to SEQ ID NO: 16271
  Cyclic GFR-binding peptide
  MOD_RES (32), (32): Xaa is C or S

SEQ ID NO: 61070 - protein, 42 aa, Artificial Sequence; identical to SEQ ID NO: 16272
  Cyclic GFR-binding peptide
  MOD_RES (2), (4), (37), (38): Xaa is C or S

SEQ ID NO: 61071 - protein, 35 aa, Artificial Sequence; identical to SEQ ID NO: 16273
  Cyclic GFR-binding peptide
  MOD_RES (2), (4): Xaa is C or S

SEQ ID NO: 61072 - protein, 28 aa, Artificial Sequence
  Cyclic GFR-binding peptide
  MOD_RES (1), (1): Xaa is C or S
XSKVVMEYKFKVKPTRGVLYLISIPELD

SEQ ID NO: 61073 - protein, 27 aa, Artificial Sequence
  Cyclic GFR-binding peptide
  MOD_RES (26), (27): Xaa is C or S
EYQKYIVNSSDDIYLVSIPSLKTPAXX

SEQ ID NO: 61074 - protein, 30 aa, Artificial Sequence
  Cyclic GFR-binding peptide
  MOD_RES (30), (30): Xaa is C or S
SMGEEYQKYTPVGMDDIYLVSIPSLKTPVX

SEQ ID NO: 61075 - protein, 34 aa, Artificial Sequence; identical to SEQ ID NO: 16276
  Cyclic GFR-binding peptide
  MOD_RES (1), (32), (33): Xaa is C or S

SEQ ID NO: 61076 - protein, 32 aa, Artificial Sequence; identical to SEQ ID NO: 16278
  Cyclic GFR-binding peptide
  MOD_RES (32), (32): Xaa is C or S

SEQ ID NO: 61077 - protein, 33 aa, Artificial Sequence; identical to SEQ ID NO: 16284
  Cyclic GFR-binding peptide
  MOD_RES (32), (33): Xaa is C or S

SEQ ID NO: 61078 - protein, 28 aa, Artificial Sequence
  Cyclic GFR-binding peptide
  MOD_RES (2), (2): Xaa is C or S
GXAEVVMDYHYKLVVNNAADKYLISIPS

SEQ ID NO: 61079 - protein, 35 aa, Artificial Sequence; identical to SEQ ID NO: 16288
  Cyclic GFR-binding peptide
  MOD_RES (32), (33): Xaa is C or S

SEQ ID NO: 61080 - protein, 37 aa, Artificial Sequence; identical to SEQ ID NO: 16289
  Cyclic GFR-binding peptide
  MOD_RES (2), (4), (36), (37): Xaa is C or S

SEQ ID NO: 61081 - protein, 25 aa, Artificial Sequence
  Cyclic GFR-binding peptide
EYQKYVKPTRGVIYLISIPSLDQPV

SEQ ID NO: 61082 - protein, 36 aa, Artificial Sequence; identical to SEQ ID NO: 16291
  Cyclic GFR-binding peptide
  MOD_RES (2), (34), (35): Xaa is C or S

SEQ ID NO: 61083 - protein, 30 aa, Artificial Sequence
  Cyclic GFR-binding peptide
  MOD_RES (1), (1): Xaa is C or S
XGEVVMDEYQKYVVKENEDIYLMSIPSLET

SEQ ID NO: 61084 - protein, 27 aa, Artificial Sequence
  Cyclic GFR-binding peptide
  MOD_RES (27), (27): Xaa is C or S
DEYQKYVVKENEDIYLMSIPSLETPVX

SEQ ID NO: 61085 - protein, 42 aa, Artificial Sequence; identical to SEQ ID NO: 16294
  Cyclic GFR-binding peptide
  MOD_RES (2), (4), (36), (37): Xaa is C or S

SEQ ID NO: 61086 - protein, 28 aa, Artificial Sequence
  Cyclic GFR-binding peptide
VVMDEYQKYVVKENEDIYLMSIPSLETP

SEQ ID NO: 61087 - protein, 38 aa, Artificial Sequence; identical to SEQ ID NO: 16297
  Cyclic GFR-binding peptide
  MOD_RES (2), (35), (36): Xaa is C or S

SEQ ID NO: 61088 - protein, 31 aa, Artificial Sequence
  Cyclic GFR-binding peptide
  MOD_RES (29), (29): Xaa is C or S
VMNEYQKYIVNSSDDIYLVSIPSLKTPAXTP

SEQ ID NO: 61089 - protein, 31 aa, Artificial Sequence
  Cyclic GFR-binding peptide
  MOD_RES (27), (28): Xaa is C or S
GRYKKLYTVVGKDFYLISIANLKTPVXXAKS

SEQ ID NO: 61090 - protein, 27 aa, Artificial Sequence
  Cyclic GFR-binding peptide
IMEYQKYIKPTKGIIYLISIPSLDQSV

SEQ ID NO: 61091 - protein, 35 aa, Artificial Sequence; identical to SEQ ID NO: 16300
  Cyclic GFR-binding peptide
  MOD_RES (2), (4): Xaa is C or S

SEQ ID NO: 61092 - protein, 29 aa, Artificial Sequence
  Cyclic GFR-binding peptide
  MOD_RES (26), (27): Xaa is C or S
EYQKYIKPTKGIIYLISIPSLDQSVXXPS

SEQ ID NO: 61093 - protein, 40 aa, Artificial Sequence; identical to SEQ ID NO: 16304
  Cyclic GFR-binding peptide
  MOD_RES (2), (34), (35): Xaa is C or S

SEQ ID NO: 61094 - protein, 21 aa, Artificial Sequence
  Cyclic GFR-binding peptide
DEYQKYVVKENEDIYLMSIPS

SEQ ID NO: 61095 - protein, 31 aa, Artificial Sequence
  Cyclic GFR-binding peptide
  MOD_RES (1), (1): Xaa is C or S
XESVAMGRYKKLYTVVGKDFYLISIANLKTP

SEQ ID NO: 61096 - protein, 40 aa, Artificial Sequence; identical to SEQ ID NO: 16307
  Cyclic GFR-binding peptide
  MOD_RES (1), (34), (35): Xaa is C or S

SEQ ID NO: 61097 - protein, 39 aa, Artificial Sequence; identical to SEQ ID NO: 16308
  Cyclic GFR-binding peptide
  MOD_RES (2), (4), (36), (37): Xaa is C or S

SEQ ID NO: 61098 - protein, 30 aa, Artificial Sequence
  Cyclic GFR-binding peptide
AKVVMNEYKFKIVNNSSDLYLVSIPELKTP

SEQ ID NO: 61099 - protein, 31 aa, Artificial Sequence
  Cyclic GFR-binding peptide
  MOD_RES (2), (2): Xaa is C or S
KXSRVIMEYKFKVKPKRGVLYLISIPELAQP

SEQ ID NO: 61100 - protein, 26 aa, Artificial Sequence
  Cyclic GFR-binding peptide
IMEYKFKVKPKRGVLYLISIPELAQP

SEQ ID NO: 61101 - protein, 38 aa, Artificial Sequence; identical to SEQ ID NO: 16312
  Cyclic GFR-binding peptide
  MOD_RES (32), (33): Xaa is C or S

SEQ ID NO: 61102 - protein, 34 aa, Artificial Sequence
  Cyclic GFR-binding peptide
  MOD_RES (29), (30): Xaa is C or S
MGEEYQKYTPVGMDDIYLVSIPSLKTPVXXAKGV

SEQ ID NO: 61103 - protein, 28 aa, Artificial Sequence
  Cyclic GFR-binding peptide
  MOD_RES (1), (1): Xaa is C or S
XEAVSMGEEYKFKTPVGMDDLYLVSIPE

SEQ ID NO: 61104 - protein, 31 aa, Artificial Sequence
  Cyclic GFR-binding peptide
  MOD_RES (30), (31): Xaa is C or S
VAMGRYKKLYTVVGKDFYLISIANLKTPVXX

SEQ ID NO: 61105 - protein, 28 aa, Artificial Sequence
  Cyclic GFR-binding peptide
  MOD_RES (2), (2): Xaa is C or S
GXESVAMGYHYKLYTVVGKDKYLISIPS

SEQ ID NO: 61106 - protein, 37 aa, Artificial Sequence; identical to SEQ ID NO: 16320
  Cyclic GFR-binding peptide
  MOD_RES (1), (33), (34): Xaa is C or S

SEQ ID NO: 61107 - protein, 32 aa, Artificial Sequence
  Cyclic GFR-binding peptide
  MOD_RES (28), (29): Xaa is C or S
VMEYKFKVKPTRGVLYLISIPELDQPVXXPSA

SEQ ID NO: 61108 - protein, 28 aa, Artificial Sequence
  Cyclic GFR-binding peptide
  MOD_RES (1), (1): Xaa is C or S
XAEVVMDRYKKLVVNNAADFYLISIANL

SEQ ID NO: 61109 - protein, 25 aa, Artificial Sequence
  Cyclic GFR-binding peptide
EVVMDRYKKLVVNNAADFYLISIAN

SEQ ID NO: 61110 - protein, 37 aa, Artificial Sequence
  Cyclic GFR-binding peptide
  MOD_RES (31), (32): Xaa is C or S
VSMGEEYQKYTPVGMDDIYLVSIPSLKTPVXXAKGVK

SEQ ID NO: 61111 - protein, 25 aa, Artificial Sequence
  Cyclic GFR-binding peptide
GEYQKYYTVVGKDIYLISIPSLKTP

SEQ ID NO: 61112 - protein, 35 aa, Artificial Sequence; identical to SEQ ID NO: 16326
  Cyclic GFR-binding peptide
  MOD_RES (1), (3), (34), (35): Xaa is C or S

SEQ ID NO: 61113 - protein, 34 aa, Artificial Sequence; identical to SEQ ID NO: 16327
  Cyclic GFR-binding peptide
  MOD_RES (1), (3), (34): Xaa is C or S

SEQ ID NO: 61114 - protein, 30 aa, Artificial Sequence
  Cyclic GFR-binding peptide
  MOD_RES (26), (26): Xaa is C or S
EYKFKIVNSSDDLYLVSIPELKTPAXTPKT

SEQ ID NO: 61115 - protein, 27 aa, Artificial Sequence
  Cyclic GFR-binding peptide
  MOD_RES (1), (1): Xaa is C or S
XESVAMGEYQKYYTVVGKDIYLISIPS

SEQ ID NO: 61116 - protein, 34 aa, Artificial Sequence; identical to SEQ ID NO: 16330
  Cyclic GFR-binding peptide
  MOD_RES (1), (32), (33): Xaa is C or S

SEQ ID NO: 61117 - protein, 33 aa, Artificial Sequence
  Cyclic GFR-binding peptide
  MOD_RES (29), (30): Xaa is C or S
AMGEYQKYYTVVGKDIYLISIPSLKTPVXXAKS

SEQ ID NO: 61118 - protein, 23 aa, Artificial Sequence
  Cyclic GFR-binding peptide
NEYQKYIVNSSDDIYLVSIPSLQ

SEQ ID NO: 61119 - protein, 32 aa, Artificial Sequence
  Cyclic GFR-binding peptide
  MOD_RES (29), (30): Xaa is C or S
VIMEYKFKIKPTKGILYLISIPELDQSVXXPS

SEQ ID NO: 61120 - protein, 27 aa, Artificial Sequence
  Cyclic GFR-binding peptide
GEVVMEEYKFKVVKDYEDLYLMSIPEL

SEQ ID NO: 61121 - protein, 29 aa, Artificial Sequence
  Cyclic GFR-binding peptide
  MOD_RES (1), (1): Xaa is C or S
XAEVVMDRYKKLVVNNAADFYLISIANLR

SEQ ID NO: 61122 - protein, 33 aa, Artificial Sequence; identical to SEQ ID NO: 16336
  Cyclic GFR-binding peptide
  MOD_RES (2), (2): Xaa is C or S

SEQ ID NO: 61123 - protein, 22 aa, Artificial Sequence
  Cyclic GFR-binding peptide
MEEYQKYVVKDYEDIYLMSIPS

SEQ ID NO: 61124 - protein, 30 aa, Artificial Sequence
  Cyclic GFR-binding peptide
  MOD_RES (28), (29): Xaa is C or S
MGYHYKLYTVVGKDKYLISIPSLKTPVXXA

SEQ ID NO: 61125 - protein, 27 aa, Artificial Sequence
  Cyclic GFR-binding peptide
VIMEYQKYIKPTKGIIYLISIPSLDQS

SEQ ID NO: 61126 - protein, 31 aa, Artificial Sequence
  Cyclic GFR-binding peptide
  MOD_RES (28), (29): Xaa is C or S
MNEYQKYIVNSSDDIYLVSIPSLQTPAXXPK

SEQ ID NO: 61127 - protein, 25 aa, Artificial Sequence
  Cyclic GFR-binding peptide
MDEYQKYVVKENEDIYLMSIPSLET

SEQ ID NO: 61128 - protein, 35 aa, Artificial Sequence; identical to SEQ ID NO: 16341
  Cyclic GFR-binding peptide
  MOD_RES (2), (34), (35): Xaa is C or S

SEQ ID NO: 61129 - protein, 25 aa, Artificial Sequence
  Cyclic GFR-binding peptide
EYKFKIVNSSDDLYLVSIPELQTPA

SEQ ID NO: 61130 - protein, 26 aa, Artificial Sequence
  Cyclic GFR-binding peptide
NEYQKYIVNSSDDIYLVSIPSLKTPA

SEQ ID NO: 61131 - protein, 34 aa, Artificial Sequence
  Cyclic GFR-binding peptide
  MOD_RES (30), (31): Xaa is C or S
VVMDRYKKLVVNNAADFYLISIANLRAPVXXSAP

SEQ ID NO: 61132 - protein, 24 aa, Artificial Sequence
  Cyclic GFR-binding peptide
IMEYQKYIKPTKGIIYLISIPSLD

SEQ ID NO: 61133 - protein, 37 aa, Artificial Sequence; identical to SEQ ID NO: 16347
  Cyclic GFR-binding peptide
  MOD_RES (2), (33), (34): Xaa is C or S

SEQ ID NO: 61134 - protein, 28 aa, Artificial Sequence
  Cyclic GFR-binding peptide
VSMGEEYKFKTPVGMDDLYLVSIPELKT

SEQ ID NO: 61135 - protein, 34 aa, Artificial Sequence; identical to SEQ ID NO: 16348
  Cyclic GFR-binding peptide
  MOD_RES (1), (33), (34): Xaa is C or S

SEQ ID NO: 61136 - protein, 32 aa, Artificial Sequence
  Cyclic GFR-binding peptide
  MOD_RES (27), (28): Xaa is C or S
DEYKFKVVNNAADLYLISIPELRAPVXXSAPA

SEQ ID NO: 61137 - protein, 40 aa, Artificial Sequence; identical to SEQ ID NO: 16349
  Cyclic GFR-binding peptide
  MOD_RES (2), (4), (35), (36): Xaa is C or S

SEQ ID NO: 61138 - protein, 34 aa, Artificial Sequence; identical to SEQ ID NO: 16351
  Cyclic GFR-binding peptide
  MOD_RES (2), (34): Xaa is C or S

SEQ ID NO: 61139 - protein, 31 aa, Artificial Sequence
  Cyclic GFR-binding peptide
  MOD_RES (26), (27): Xaa is C or S
EYKFKIVNSSDDLYLVSIPELQTPAXXPKPV

SEQ ID NO: 61140 - protein, 38 aa, Artificial Sequence; identical to SEQ ID NO: 16352
  Cyclic GFR-binding peptide
  MOD_RES (1), (33), (34): Xaa is C or S

SEQ ID NO: 61141 - protein, 31 aa, Artificial Sequence
  Cyclic GFR-binding peptide
  MOD_RES (2), (2): Xaa is C or S
GXEAVSMGEEYKFKTPVGMDDLYLVSIPELK

SEQ ID NO: 61142 - protein, 33 aa, Artificial Sequence
  Cyclic GFR-binding peptide
  MOD_RES (30), (31): Xaa is C or S
VAMGEYQKYYTVVGKDIYLISIPSLKTPVXXAK

SEQ ID NO: 61143 - protein, 25 aa, Artificial Sequence
  Cyclic GFR-binding peptide
DRYKKLVVNNAADFYLISIANLRAP

SEQ ID NO: 61144 - protein, 23 aa, Artificial Sequence
  Cyclic GFR-binding peptide
IMEYKFKVKPKRGVLYLISIPEL

SEQ ID NO: 61145 - protein, 32 aa, Artificial Sequence
  Cyclic GFR-binding peptide
  MOD_RES (26), (27): Xaa is C or S
YHYKLVVNNAADKYLISIPSLRAPVXXSAPAA

SEQ ID NO: 61146 - protein, 31 aa, Artificial Sequence
  Cyclic GFR-binding peptide
  MOD_RES (26), (27): Xaa is C or S
EYQKYYTVVGKDIYLISIPSLKTPVXXAKSA

SEQ ID NO: 61147 - protein, 30 aa, Artificial Sequence
  Cyclic GFR-binding peptide
  MOD_RES (30), (30): Xaa is C or S
VVMEEYKFKVVKDYEDLYLMSIPELETPVX

SEQ ID NO: 61148 - protein, 34 aa, Artificial Sequence; identical to SEQ ID NO: 16353
  Cyclic GFR-binding peptide
  MOD_RES (1), (3): Xaa is C or S

SEQ ID NO: 61149 - protein, 33 aa, Artificial Sequence; identical to SEQ ID NO: 16354
  Cyclic GFR-binding peptide
  MOD_RES (1), (33): Xaa is C or S

SEQ ID NO: 61150 - protein, 34 aa, Artificial Sequence; identical to SEQ ID NO: 16355
  Cyclic GFR-binding peptide
  MOD_RES (1), (3): Xaa is C or S

SEQ ID NO: 61151 - protein, 32 aa, Artificial Sequence; identical to SEQ ID NO: 16358
  Cyclic GFR-binding peptide
  MOD_RES (31), (32): Xaa is C or S

SEQ ID NO: 61152 - protein, 24 aa, Artificial Sequence
  Cyclic GFR-binding peptide
VMDEYKFKVVNNAADLYLISIPEL

SEQ ID NO: 61153 - protein, 31 aa, Artificial Sequence
  Cyclic GFR-binding peptide
  MOD_RES (28), (29): Xaa is C or S
VMEYKFKVKPTRGVLYLISIPELDQPVXXPS

SEQ ID NO: 61154 - protein, 24 aa, Artificial Sequence
  Cyclic GFR-binding peptide
MDEYKFKVVNNAADLYLISIPELR

SEQ ID NO: 61155 - protein, 38 aa, Artificial Sequence; identical to SEQ ID NO: 16360
  Cyclic GFR-binding peptide
  MOD_RES (1), (3), (35), (36): Xaa is C or S

SEQ ID NO: 61156 - protein, 25 aa, Artificial Sequence
  Cyclic GFR-binding peptide
SKVIMEYKFKIKPTKGILYLISIPE

SEQ ID NO: 61157 - protein, 35 aa, Artificial Sequence
  Cyclic GFR-binding peptide
  MOD_RES (29), (30): Xaa is C or S
VVMEYQKYVKPTRGVIYLISIPSLDQPVXXPSASA

SEQ ID NO: 61158 - protein, 30 aa, Artificial Sequence
  Cyclic GFR-binding peptide
  MOD_RES (1), (1): Xaa is C or S
XGEVVMEEYQKYVVKDYEDIYLMSIPSLET

SEQ ID NO: 61159 - protein, 37 aa, Artificial Sequence; identical to SEQ ID NO: 16368
  Cyclic GFR-binding peptide
  MOD_RES (31), (32): Xaa is C or S

SEQ ID NO: 61160 - protein, 39 aa, Artificial Sequence; identical to SEQ ID NO: 16369
  Cyclic GFR-binding peptide
  MOD_RES (33), (34): Xaa is C or S

SEQ ID NO: 61161 - protein, 31 aa, Artificial Sequence
  Cyclic GFR-binding peptide
  MOD_RES (27), (28): Xaa is C or S
DYHYKLVVNNAADKYLISIPSLRAPVXXSAP

SEQ ID NO: 61162 - protein, 24 aa, Artificial Sequence
  Cyclic GFR-binding peptide
EYKFKVVKENEDLYLMSIPELETP

SEQ ID NO: 61163 - protein, 34 aa, Artificial Sequence; identical to SEQ ID NO: 16372
  Cyclic GFR-binding peptide
  MOD_RES (1), (34): Xaa is C or S

SEQ ID NO: 61164 - protein, 34 aa, Artificial Sequence
  Cyclic GFR-binding peptide
  MOD_RES (28), (29): Xaa is C or S
IMEYQKYIKPTKGIIYLISIPSLDQSVXXPSASA

SEQ ID NO: 61165 - protein, 32 aa, Artificial Sequence
  Cyclic GFR-binding peptide
  MOD_RES (1), (3): Xaa is C or S
XKXSKVIMEYKFKIKPTKGILYLISIPELDQS

SEQ ID NO: 61166 - protein, 22 aa, Artificial Sequence
  Cyclic GFR-binding peptide
IMEYKFKIKPTKGILYLISIPE

SEQ ID NO: 61167 - protein, 35 aa, Artificial Sequence; identical to SEQ ID NO: 16374
  Cyclic GFR-binding peptide
  MOD_RES (1), (33), (34): Xaa is C or S

SEQ ID NO: 61168 - protein, 36 aa, Artificial Sequence; identical to SEQ ID NO: 16381
  Cyclic GFR-binding peptide
  MOD_RES (2), (4), (36): Xaa is C or S

SEQ ID NO: 61169 - protein, 42 aa, Artificial Sequence; identical to SEQ ID NO: 16385
  Cyclic GFR-binding peptide
  MOD_RES (1), (3), (36), (37): Xaa is C or S

SEQ ID NO: 61170 - protein, 38 aa, Artificial Sequence; identical to SEQ ID NO: 16386
  Cyclic GFR-binding peptide
  MOD_RES (1), (33), (34): Xaa is C or S

SEQ ID NO: 61171 - protein, 31 aa, Artificial Sequence
  Cyclic GFR-binding peptide
  MOD_RES (1), (3): Xaa is C or S
XKXSKVVMEYQKYVKPTRGVIYLISIPSLDQ

SEQ ID NO: 61172 - protein, 37 aa, Artificial Sequence; identical to SEQ ID NO: 16388
  Cyclic GFR-binding peptide
  MOD_RES (31), (32): Xaa is C or S

SEQ ID NO: 61173 - protein, 32 aa, Artificial Sequence
  Cyclic GFR-binding peptide
  MOD_RES (2), (2): Xaa is C or S
GXARVVMNEYKFKIVNSSDDLYLVSIPELQTP

SEQ ID NO: 61174 - protein, 26 aa, Artificial Sequence
  Cyclic GFR-binding peptide
VVMEYQKYVKPTRGVIYLISIPSLDQ

SEQ ID NO: 61175 - protein, 26 aa, Artificial Sequence
  Cyclic GFR-binding peptide
MNEYKFKIVNSSDDLYLVSIPELKTP

SEQ ID NO: 61176 - protein, 29 aa, Artificial Sequence
  Cyclic GFR-binding peptide
  MOD_RES (26), (27): Xaa is C or S
EYKFKIVNNSSDLYLVSIPELKTPAXXAK

SEQ ID NO: 61177 - protein, 37 aa, Artificial Sequence; identical to SEQ ID NO: 16392
  Cyclic GFR-binding peptide
  MOD_RES (1), (3), (34), (35): Xaa is C or S

SEQ ID NO: 61178 - protein, 30 aa, Artificial Sequence
  Cyclic GFR-binding peptide
  MOD_RES (1), (1): Xaa is C or S
XAEVVMDEYKFKVVNNAADLYLISIPELRA

SEQ ID NO: 61179 - protein, 20 aa, Artificial Sequence
  Cyclic GFR-binding peptide
EYKFKIVNNSSDLYLVSIPE

SEQ ID NO: 61180 - protein, 33 aa, Artificial Sequence; identical to SEQ ID NO: 16400
  Cyclic GFR-binding peptide
  MOD_RES (1), (33): Xaa is C or S

SEQ ID NO: 61181 - protein, 39 aa, Artificial Sequence; identical to SEQ ID NO: 16402
  Cyclic GFR-binding peptide
  MOD_RES (2), (35), (36): Xaa is C or S

SEQ ID NO: 61182 - protein, 31 aa, Artificial Sequence
  Cyclic GFR-binding peptide
  MOD_RES (29), (30): Xaa is C or S
VMEEYKFKVVKDYEDLYLMSIPELETPVXXA

SEQ ID NO: 61183 - protein, 35 aa, Artificial Sequence; identical to SEQ ID NO: 16405
  Cyclic GFR-binding peptide
  MOD_RES (31), (32): Xaa is C or S

SEQ ID NO: 61184 - protein, 30 aa, Artificial Sequence
  Cyclic GFR-binding peptide
  MOD_RES (1), (1): Xaa is C or S
XEAVSMGEEYKFKTPVGMDDLYLVSIPELK

SEQ ID NO: 61185 - protein, 31 aa, Artificial Sequence
  Cyclic GFR-binding peptide
  MOD_RES (30), (31): Xaa is C or S
KVVMEYKFKVKPTRGVLYLISIPELDQPVXX

SEQ ID NO: 61186 - protein, 38 aa, Artificial Sequence; identical to SEQ ID NO: 16407
  Cyclic GFR-binding peptide
  MOD_RES (32), (32): Xaa is C or S

SEQ ID NO: 61187 - protein, 20 aa, Artificial Sequence
  Cyclic GFR-binding peptide
EYQKYTPVGMDDIYLVSIPS

SEQ ID NO: 61188 - protein, 31 aa, Artificial Sequence
  Cyclic GFR-binding peptide
  MOD_RES (1), (1): Xaa is C or S
XARVVMNEYQKYIVNSSDDIYLVSIPSLQTP

SEQ ID NO: 61189 - protein, 20 aa, Artificial Sequence
  Cyclic GFR-binding peptide
EYQKYIVNSSDDIYLVSIPS

SEQ ID NO: 61190 - protein, 26 aa, Artificial Sequence
  Cyclic GFR-binding peptide
VMDYHYKLVVNNAADKYLISIPSLRA

SEQ ID NO: 61191 - protein, 21 aa, Artificial Sequence
  Cyclic GFR-binding peptide
EYKFKIKPTKGILYLISIPEL

SEQ ID NO: 61192 - protein, 22 aa, Artificial Sequence
  Cyclic GFR-binding peptide
DEYKFKVVNNAADLYLISIPEL

SEQ ID NO: 61193 - protein, 39 aa, Artificial Sequence; identical to SEQ ID NO: 16416
  Cyclic GFR-binding peptide
  MOD_RES (2), (4), (36), (37): Xaa is C or S

SEQ ID NO: 61194 - protein, 37 aa, Artificial Sequence; identical to SEQ ID NO: 16417
  Cyclic GFR-binding peptide
  MOD_RES (2), (34), (35): Xaa is C or S

SEQ ID NO: 61195 - protein, 28 aa, Artificial Sequence
  Cyclic GFR-binding peptide
SKVIMEYKFKIKPTKGILYLISIPELDQ

SEQ ID NO: 61196 - protein, 30 aa, Artificial Sequence; identical to SEQ ID NO: 1995
  Cyclic GFR-binding peptide

SEQ ID NO: 61197 - protein, 37 aa, Artificial Sequence; identical to SEQ ID NO: 16424
  Cyclic GFR-binding peptide
  MOD_RES (1), (3), (34), (35): Xaa is C or S

SEQ ID NO: 61198 - protein, 23 aa, Artificial Sequence
  Cyclic GFR-binding peptide
VIMEYKFKVKPKRGVLYLISIPE

SEQ ID NO: 61199 - protein, 36 aa, Artificial Sequence
  Cyclic GFR-binding peptide
  MOD_RES (30), (30): Xaa is C or S
VVMNEYQKYIVNSSDDIYLVSIPSLKTPAXTPKTVH

SEQ ID NO: 61200 - protein, 36 aa, Artificial Sequence; identical to SEQ ID NO: 16426
  Cyclic GFR-binding peptide
  MOD_RES (31), (32): Xaa is C or S

SEQ ID NO: 61201 - protein, 40 aa, Artificial Sequence; identical to SEQ ID NO: 16427
  Cyclic GFR-binding peptide
  MOD_RES (2), (4), (36): Xaa is C or S

SEQ ID NO: 61202 - protein, 29 aa, Artificial Sequence
  Cyclic GFR-binding peptide
VVMNEYKFKIVNSSDDLYLVSIPELQTPA

SEQ ID NO: 61203 - protein, 25 aa, Artificial Sequence
  Cyclic GFR-binding peptide
SKVVMEYKFKVKPTRGVLYLISIPE

SEQ ID NO: 61204 - protein, 26 aa, Artificial Sequence
  Cyclic GFR-binding peptide
VMNEYKFKIVNSSDDLYLVSIPELKT

SEQ ID NO: 61205 - protein, 27 aa, Artificial Sequence
  Cyclic GFR-binding peptide
  MOD_RES (26), (27): Xaa is C or S
EYQKYVKPKRGVIYLISIPSLAQPVXX

SEQ ID NO: 61206 - protein, 31 aa, Artificial Sequence
  Cyclic GFR-binding peptide
  MOD_RES (1), (3): Xaa is C or S
XKXSRVIMEYQKYVKPKRGVIYLISIPSLAQ

SEQ ID NO: 61207 - protein, 24 aa, Artificial Sequence
  Cyclic GFR-binding peptide
VMNEYKFKIVNSSDDLYLVSIPEL

SEQ ID NO: 61208 - protein, 24 aa, Artificial Sequence
  Cyclic GFR-binding peptide
VMNEYKFKIVNNSSDLYLVSIPEL

SEQ ID NO: 61209 - protein, 30 aa, Artificial Sequence
  Cyclic GFR-binding peptide
  MOD_RES (2), (4): Xaa is C or S
SXKXSKVVMEYKFKVKPTRGVLYLISIPEL

SEQ ID NO: 61210 - protein, 28 aa, Artificial Sequence
  Cyclic GFR-binding peptide
GEVVMDEYKFKVVKENEDLYLMSIPELE

SEQ ID NO: 61211 - protein, 34 aa, Artificial Sequence
  Cyclic GFR-binding peptide
  MOD_RES (29), (30): Xaa is C or S
VMEEYQKYVVKDYEDIYLMSIPSLETPVXXAKPI

SEQ ID NO: 61212 - protein, 29 aa, Artificial Sequence
  Cyclic GFR-binding peptide
  MOD_RES (1), (3): Xaa is C or S
XGXESVAMGYHYKLYTVVGKDKYLISIPS

SEQ ID NO: 61213 - protein, 25 aa, Artificial Sequence
  Cyclic GFR-binding peptide
RYKKLVVNNAADFYLISIANLRAPV

SEQ ID NO: 61214 - protein, 25 aa, Artificial Sequence
  Cyclic GFR-binding peptide
GEEYKFKTPVGMDDLYLVSIPELKT

SEQ ID NO: 61215 - protein, 26 aa, Artificial Sequence
  Cyclic GFR-binding peptide
DEYQKYVVKENEDIYLMSIPSLETPV

SEQ ID NO: 61216 - protein, 34 aa, Artificial Sequence; identical to SEQ ID NO: 16439
  Cyclic GFR-binding peptide
  MOD_RES (31), (32): Xaa is C or S

SEQ ID NO: 61217 - protein, 39 aa, Artificial Sequence; identical to SEQ ID NO: 16440
  Cyclic GFR-binding peptide
  MOD_RES (1), (33), (34): Xaa is C or S

SEQ ID NO: 61218 - protein, 36 aa, Artificial Sequence; identical to SEQ ID NO: 16441
  Cyclic GFR-binding peptide
  MOD_RES (2), (4): Xaa is C or S

SEQ ID NO: 61219 - protein, 29 aa, Artificial Sequence
  Cyclic GFR-binding peptide
  MOD_RES (1), (3): Xaa is C or S
XGXAKVVMNEYKFKIVNNSSDLYLVSIPE

SEQ ID NO: 61220 - protein, 25 aa, Artificial Sequence
  Cyclic GFR-binding peptide
KVVMEYQKYVKPTRGVIYLISIPSL

SEQ ID NO: 61221 - protein, 28 aa, Artificial Sequence
  Cyclic GFR-binding peptide
ESVAMGRYKKLYTVVGKDFYLISIANLK

SEQ ID NO: 61222 - protein, 24 aa, Artificial Sequence
  Cyclic GFR-binding peptide
EYQKYVKPTRGVIYLISIPSLDQP

SEQ ID NO: 61223 - protein, 32 aa, Artificial Sequence
  Cyclic GFR-binding peptide
  MOD_RES (30), (31): Xaa is C or S
KVVMEYKFKVKPTRGVLYLISIPELDQPVXXP

SEQ ID NO: 61224 - protein, 39 aa, Artificial Sequence; identical to SEQ ID NO: 16448
  Cyclic GFR-binding peptide
  MOD_RES (2), (34), (35): Xaa is C or S

SEQ ID NO: 61225 - protein, 28 aa, Artificial Sequence
  Cyclic GFR-binding peptide
  MOD_RES (26), (27): Xaa is C or S
YHYKLYTVVGKDKYLISIPSLKTPVXXA

SEQ ID NO: 61226 - protein, 27 aa, Artificial Sequence
  Cyclic GFR-binding peptide
EVVMDEYKFKVVNNAADLYLISIPELR

SEQ ID NO: 61227 - protein, 25 aa, Artificial Sequence
  Cyclic GFR-binding peptide
EEYQKYTPVGMDDIYLVSIPSLKTP

SEQ ID NO: 61228 - protein, 32 aa, Artificial Sequence
  Cyclic GFR-binding peptide
  MOD_RES (30), (31): Xaa is C or S
SMGEEYQKYTPVGMDDIYLVSIPSLKTPVXXA

SEQ ID NO: 61229 - protein, 33 aa, Artificial Sequence; identical to SEQ ID NO: 16453
  Cyclic GFR-binding peptide
  MOD_RES (33), (33): Xaa is C or S

SEQ ID NO: 61230 - protein, 23 aa, Artificial Sequence
  Cyclic GFR-binding peptide
VIMEYQKYIKPTKGIIYLISIPS

SEQ ID NO: 61231 - protein, 31 aa, Artificial Sequence
  Cyclic GFR-binding peptide
  MOD_RES (2), (4): Xaa is C or S
SXKXSKVIMEYQKYIKPTKGIIYLISIPSLD

SEQ ID NO: 61232 - protein, 30 aa, Artificial Sequence
  Cyclic GFR-binding peptide
ESVAMGEYQKYYTVVGKDIYLISIPSLKTP

SEQ ID NO: 61233 - protein, 42 aa, Artificial Sequence; identical to SEQ ID NO: 16458
  Cyclic GFR-binding peptide
  MOD_RES (2), (4), (36), (37): Xaa is C or S

SEQ ID NO: 61234 - protein, 40 aa, Artificial Sequence; identical to SEQ ID NO: 16463
  Cyclic GFR-binding peptide
  MOD_RES (1), (3), (34), (35): Xaa is C or S

SEQ ID NO: 61235 - protein, 30 aa, Artificial Sequence
  Cyclic GFR-binding peptide
  MOD_RES (2), (2): Xaa is C or S
GXESVAMGYHYKLYTVVGKDKYLISIPSLK

SEQ ID NO: 61236 - protein, 33 aa, Artificial Sequence
  Cyclic GFR-binding peptide
  MOD_RES (27), (28): Xaa is C or S
DEYKFKVVKENEDLYLMSIPELETPVXXAKPIK

SEQ ID NO: 61237 - protein, 27 aa, Artificial Sequence
  Cyclic GFR-binding peptide
  MOD_RES (1), (1): Xaa is C or S
XARVVMNEYKFKIVNSSDDLYLVSIPE

SEQ ID NO: 61238 - protein, 34 aa, Artificial Sequence; identical to SEQ ID NO: 16472
  Cyclic GFR-binding peptide
  MOD_RES (2), (34): Xaa is C or S

SEQ ID NO: 61239 - protein, 38 aa, Artificial Sequence; identical to SEQ ID NO: 16474
  Cyclic GFR-binding peptide
  MOD_RES (1), (3), (36), (37): Xaa is C or S

SEQ ID NO: 61240 - protein, 32 aa, Artificial Sequence
  Cyclic GFR-binding peptide
  MOD_RES (30), (31): Xaa is C or S
VVMEEYKFKVVKDYEDLYLMSIPELETPVXXA

SEQ ID NO: 61241 - protein, 31 aa, Artificial Sequence; identical to SEQ ID NO: 16476
  Cyclic GFR-binding peptide

SEQ ID NO: 61242 - protein, 32 aa, Artificial Sequence
  Cyclic GFR-binding peptide
  MOD_RES (2), (2): Xaa is C or S
GXEAVSMGEEYQKYTPVGMDDIYLVSIPSLKT

SEQ ID NO: 61243 - protein, 35 aa, Artificial Sequence
  Cyclic GFR-binding peptide
  MOD_RES (31), (32): Xaa is C or S
VSMGEEYQKYTPVGMDDIYLVSIPSLKTPVXXAKG

SEQ ID NO: 61244 - protein, 29 aa, Artificial Sequence
  Cyclic GFR-binding peptide
AAAAAAAAAEYQKYIKPTKGIIYLISIPS

SEQ ID NO: 61245 - protein, 32 aa, Artificial Sequence; identical to SEQ ID NO: 16488
  Cyclic GFR-binding peptide
  MOD_RES (31), (32): Xaa is C or S

SEQ ID NO: 61246 - protein, 41 aa, Artificial Sequence; identical to SEQ ID NO: 16489
  Cyclic GFR-binding peptide
  MOD_RES (2), (4), (36), (37): Xaa is C or S

SEQ ID NO: 61247 - protein, 35 aa, Artificial Sequence; identical to SEQ ID NO: 16490
  Cyclic GFR-binding peptide
  MOD_RES (1), (33), (34): Xaa is C or S

SEQ ID NO: 61248 - protein, 24 aa, Artificial Sequence
  Cyclic GFR-binding peptide
MEYKFKVKPTRGVLYLISIPELDQ

SEQ ID NO: 61249 - protein, 22 aa, Artificial Sequence
  Cyclic GFR-binding peptide
DYHYKLVVNNAADKYLISIPSL

SEQ ID NO: 61250 - protein, 32 aa, Artificial Sequence
  Cyclic GFR-binding peptide
  MOD_RES (27), (28): Xaa is C or S
EEYKFKVVKDYEDLYLMSIPELETPVXXAKPI

SEQ ID NO: 61251 - protein, 33 aa, Artificial Sequence
  Cyclic GFR-binding peptide
  MOD_RES (30), (31): Xaa is C or S
VVMNEYKFKIVNNSSDLYLVSIPELKTPAXXAK

SEQ ID NO: 61252 - protein, 29 aa, Artificial Sequence
  Cyclic GFR-binding peptide
  MOD_RES (27), (28): Xaa is C or S
MEYKFKIKPTKGILYLISIPELDQSVXXP

SEQ ID NO: 61253 - protein, 27 aa, Artificial Sequence
  Cyclic GFR-binding peptide
ESVAMGYHYKLYTVVGKDKYLISIPSL

SEQ ID NO: 61254 - protein, 38 aa, Artificial Sequence; identical to SEQ ID NO: 16494
  Cyclic GFR-binding peptide
  MOD_RES (2), (34), (35): Xaa is C or S

SEQ ID NO: 61255 - protein, 28 aa, Artificial Sequence
  Cyclic GFR-binding peptide
EVVMDYHYKLVVNNAADKYLISIPSLRA

SEQ ID NO: 61256 - protein, 31 aa, Artificial Sequence
  Cyclic GFR-binding peptide
  MOD_RES (29), (30): Xaa is C or S
VMNEYKFKIVNSSDDLYLVSIPELQTPAXXP

SEQ ID NO: 61257 - protein, 24 aa, Artificial Sequence
  Cyclic GFR-binding peptide
VAMGRYKKLYTVVGKDFYLISIAN

SEQ ID NO: 61258 - protein, 33 aa, Artificial Sequence
  Cyclic GFR-binding peptide
  MOD_RES (30), (31): Xaa is C or S
VVMNEYQKYIVNSSDDIYLVSIPSLKTPAXXPK

SEQ ID NO: 61259 - protein, 24 aa, Artificial Sequence
  Cyclic GFR-binding peptide
SMGEEYKFKTPVGMDDLYLVSIPE

SEQ ID NO: 61260 - protein, 32 aa, Artificial Sequence
  Cyclic GFR-binding peptide
  MOD_RES (27), (28): Xaa is C or S
MEYQKYVKPTRGVIYLISIPSLDQPVXXPSAS

SEQ ID NO: 61261 - protein, 29 aa, Artificial Sequence
  Cyclic GFR-binding peptide
  MOD_RES (28), (29): Xaa is C or S
MNEYKFKIVNNSSDLYLVSIPELKTPAXX

SEQ ID NO: 61262 - protein, 38 aa, Artificial Sequence; identical to SEQ ID NO: 16497
  Cyclic GFR-binding peptide
  MOD_RES (2), (33), (34): Xaa is C or S

SEQ ID NO: 61263 - protein, 28 aa, Artificial Sequence
  Cyclic GFR-binding peptide
SMGEEYQKYTPVGMDDIYLVSIPSLKTP

SEQ ID NO: 61264 - protein, 33 aa, Artificial Sequence
  Cyclic GFR-binding peptide
  MOD_RES (2), (4): Xaa is C or S
SXKXSRVIMEYKFKVKPKRGVLYLISIPELAQP

SEQ ID NO: 61265 - protein, 33 aa, Artificial Sequence
  Cyclic GFR-binding peptide
  MOD_RES (28), (29): Xaa is C or S
MDEYQKYVVKENEDIYLMSIPSLETPVXXAKPI

SEQ ID NO: 61266 - protein, 34 aa, Artificial Sequence
  Cyclic GFR-binding peptide
  MOD_RES (32), (33): Xaa is C or S
AVSMGEEYQKYTPVGMDDIYLVSIPSLKTPVXXA

SEQ ID NO: 61267 - protein, 31 aa, Artificial Sequence
  Cyclic GFR-binding peptide
  MOD_RES (2), (4): Xaa is C or S
SXKXSRVIMEYKFKVKPKRGVLYLISIPELA

SEQ ID NO: 61268 - protein, 35 aa, Artificial Sequence
  Cyclic GFR-binding peptide
  MOD_RES (30), (31): Xaa is C or S
VVMDRYKKLVVNNAADFYLISIANLRAPVXXSAPA

SEQ ID NO: 61269 - protein, 29 aa, Artificial Sequence
  Cyclic GFR-binding peptide
  MOD_RES (1), (1): Xaa is C or S
XARVVMNEYQKYIVNSSDDIYLVSIPSLQ

SEQ ID NO: 61270 - protein, 30 aa, Artificial Sequence
  Cyclic GFR-binding peptide
  MOD_RES (28), (29): Xaa is C or S
MDEYQKYVVKENEDIYLMSIPSLETPVXXA

SEQ ID NO: 61271 - protein, 28 aa, Artificial Sequence
  Cyclic GFR-binding peptide
  MOD_RES (27), (28): Xaa is C or S
DEYKFKVVNNAADLYLISIPELRAPVXX

SEQ ID NO: 61272 - protein, 34 aa, Artificial Sequence; identical to SEQ ID NO: 16507
  Cyclic GFR-binding peptide
  MOD_RES (32), (33): Xaa is C or S

SEQ ID NO: 61273 - protein, 39 aa, Artificial Sequence; identical to SEQ ID NO: 16509
  Cyclic GFR-binding peptide
  MOD_RES (1), (3), (35), (36): Xaa is C or S

SEQ ID NO: 61274 - protein, 22 aa, Artificial Sequence
  Cyclic GFR-binding peptide
EYQKYIKPTKGIIYLISIPSLD

SEQ ID NO: 61275 - protein, 35 aa, Artificial Sequence
  Cyclic GFR-binding peptide
  MOD_RES (29), (30): Xaa is C or S
VMNEYQKYIVNSSDDIYLVSIPSLKTPAXXPKPVY

SEQ ID NO: 61276 - protein, 28 aa, Artificial Sequence
  Cyclic GFR-binding peptide
  MOD_RES (1), (3): Xaa is C or S
XKXSKVIMEYQKYIKPTKGIIYLISIPS

SEQ ID NO: 61277 - protein, 36 aa, Artificial Sequence; identical to SEQ ID NO: 16512
  Cyclic GFR-binding peptide
  MOD_RES (1), (33), (34): Xaa is C or S

SEQ ID NO: 61278 - protein, 34 aa, Artificial Sequence
  Cyclic GFR-binding peptide
  MOD_RES (29), (30): Xaa is C or S
VMNEYKFKIVNSSDDLYLVSIPELKTPAXXPKPV

SEQ ID NO: 61279 - protein, 22 aa, Artificial Sequence
  Cyclic GFR-binding peptide
MEYQKYVKPTRGVIYLISIPSL

SEQ ID NO: 61280 - protein, 23 aa, Artificial Sequence
  Cyclic GFR-binding peptide
DEYQKYVVKENEDIYLMSIPSLE

SEQ ID NO: 61281 - protein, 25 aa, Artificial Sequence
  Cyclic GFR-binding peptide
EEYQKYVVKDYEDIYLMSIPSLETP

SEQ ID NO: 61282 - protein, 40 aa, Artificial Sequence; identical to SEQ ID NO: 16521
  Cyclic GFR-binding peptide
  MOD_RES (1), (3), (35): Xaa is C or S

SEQ ID NO: 61283 - protein, 22 aa, Artificial Sequence
  Cyclic GFR-binding peptide
NEYQKYIVNNSSDIYLVSIPSL

SEQ ID NO: 61284 - protein, 36 aa, Artificial Sequence; identical to SEQ ID NO: 16522
  Cyclic GFR-binding peptide
  MOD_RES (1), (33), (34): Xaa is C or S

SEQ ID NO: 61285 - protein, 32 aa, Artificial Sequence
  Cyclic GFR-binding peptide
  MOD_RES (28), (29): Xaa is C or S
MGYHYKLYTVVGKDKYLISIPSLKTPVXXAKS

SEQ ID NO: 61286 - protein, 34 aa, Artificial Sequence; identical to SEQ ID NO: 16526
  Cyclic GFR-binding peptide
  MOD_RES (2), (33), (34): Xaa is C or S

SEQ ID NO: 61287 - protein, 24 aa, Artificial Sequence
  Cyclic GFR-binding peptide
EYQKYIVNSSDDIYLVSIPSLKTP

SEQ ID NO: 61288 - protein, 28 aa, Artificial Sequence
  Cyclic GFR-binding peptide
  MOD_RES (2), (2): Xaa is C or S
GXGEVVMEEYKFKVVKDYEDLYLMSIPE

SEQ ID NO: 61289 - protein, 32 aa, Artificial Sequence
  Cyclic GFR-binding peptide
  MOD_RES (26), (27): Xaa is C or S
EYQKYVVKDYEDIYLMSIPSLETPVXXAKPIS

SEQ ID NO: 61290 - protein, 32 aa, Artificial Sequence
  Cyclic GFR-binding peptide
  MOD_RES (2), (2): Xaa is C or S
GXSRVVMNEYQKYIVNSSDDIYLVSIPSLKTP

SEQ ID NO: 61291 - protein, 35 aa, Artificial Sequence; identical to SEQ ID NO: 16529
  Cyclic GFR-binding peptide
  MOD_RES (2), (34), (35): Xaa is C or S

SEQ ID NO: 61292 - protein, 31 aa, Artificial Sequence
  Cyclic GFR-binding peptide
  MOD_RES (30), (30): Xaa is C or S
VVMNEYQKYIVNSSDDIYLVSIPSLKTPAXT

SEQ ID NO: 61293 - protein, 35 aa, Artificial Sequence; identical to SEQ ID NO: 16532
  Cyclic GFR-binding peptide
  MOD_RES (2), (33), (34): Xaa is C or S

SEQ ID NO: 61294 - protein, 29 aa, Artificial Sequence
  Cyclic GFR-binding peptide
  MOD_RES (2), (4): Xaa is C or S
SXKXSRVIMEYQKYVKPKRGVIYLISIPS

SEQ ID NO: 61295 - protein, 31 aa, Artificial Sequence
  Cyclic GFR-binding peptide
  MOD_RES (29), (30): Xaa is C or S
VMDEYKFKVVKENEDLYLMSIPELETPVXXA

SEQ ID NO: 61296 - protein, 32 aa, Artificial Sequence; identical to SEQ ID NO: 16535
  Cyclic GFR-binding peptide
  MOD_RES (1), (1): Xaa is C or S

SEQ ID NO: 61297 - protein, 32 aa, Artificial Sequence
  Cyclic GFR-binding peptide
  MOD_RES (1), (3): Xaa is C or S
XGXAEVVMDRYKKLVVNNAADFYLISIANLRA

SEQ ID NO: 61298 - protein, 25 aa, Artificial Sequence
  Cyclic GFR-binding peptide
VVMEYKFKVKPTRGVLYLISIPELD

SEQ ID NO: 61299 - protein, 26 aa, Artificial Sequence
  Cyclic GFR-binding peptide
DRYKKLVVNNAADFYLISIANLRAPV

SEQ ID NO: 61300 - protein, 21 aa, Artificial Sequence
  Cyclic GFR-binding peptide
MEYKFKVKPKRGVLYLISIPE

SEQ ID NO: 61301 - protein, 30 aa, Artificial Sequence
  Cyclic GFR-binding peptide
  MOD_RES (26), (27): Xaa is C or S
EYQKYVKPTRGVIYLISIPSLDQPVXXPSA

SEQ ID NO: 61302 - protein, 25 aa, Artificial Sequence
  Cyclic GFR-binding peptide
EVVMEEYKFKVVKDYEDLYLMSIPE

SEQ ID NO: 61303 - protein, 29 aa, Artificial Sequence
  Cyclic GFR-binding peptide
SRVVMNEYQKYIVNSSDDIYLVSIPSLKT

SEQ ID NO: 61304 - protein, 34 aa, Artificial Sequence; identical to SEQ ID NO: 16539
  Cyclic GFR-binding peptide
  MOD_RES (31), (32): Xaa is C or S

SEQ ID NO: 61305 - protein, 38 aa, Artificial Sequence; identical to SEQ ID NO: 16540
  Cyclic GFR-binding peptide
  MOD_RES (2), (34), (35): Xaa is C or S

SEQ ID NO: 61306 - protein, 39 aa, Artificial Sequence; identical to SEQ ID NO: 16541
  Cyclic GFR-binding peptide
  MOD_RES (1), (33), (34): Xaa is C or S

SEQ ID NO: 61307 - protein, 39 aa, Artificial Sequence; identical to SEQ ID NO: 16542
  Cyclic GFR-binding peptide
  MOD_RES (1), (3), (34), (35): Xaa is C or S

SEQ ID NO: 61308 - protein, 26 aa, Artificial Sequence
  Cyclic GFR-binding peptide
VIMEYKFKVKPKRGVLYLISIPELAQ

SEQ ID NO: 61309 - protein, 37 aa, Artificial Sequence; identical to SEQ ID NO: 16547
  Cyclic GFR-binding peptide
  MOD_RES (31), (32): Xaa is C or S

SEQ ID NO: 61310 - protein, 24 aa, Artificial Sequence
  Cyclic GFR-binding peptide
EEYQKYTPVGMDDIYLVSIPSLKT

SEQ ID NO: 61311 - protein, 36 aa, Artificial Sequence
  Cyclic GFR-binding peptide
  MOD_RES (32), (33): Xaa is C or S
AVSMGEEYKFKTPVGMDDLYLVSIPELKTPVXXAKG

SEQ ID NO: 61312 - protein, 37 aa, Artificial Sequence; identical to SEQ ID NO: 16553
  Cyclic GFR-binding peptide
  MOD_RES (2), (4), (36), (37): Xaa is C or S

SEQ ID NO: 61313 - protein, 36 aa, Artificial Sequence; identical to SEQ ID NO: 16558
  Cyclic GFR-binding peptide
  MOD_RES (1), (3), (35): Xaa is C or S

SEQ ID NO: 61314 - protein, 28 aa, Artificial Sequence
  Cyclic GFR-binding peptide
VVMEEYKFKVVKDYEDLYLMSIPELETP

SEQ ID NO: 61315 - protein, 35 aa, Artificial Sequence
  Cyclic GFR-binding peptide
  MOD_RES (29), (30): Xaa is C or S
AMGEYQKYYTVVGKDIYLISIPSLKTPVXXAKSAK

SEQ ID NO: 61316 - protein, 29 aa, Artificial Sequence
  Cyclic GFR-binding peptide
AAAAAAAAARYKKLVVNNAADFYLISIAN

SEQ ID NO: 61317 - protein, 34 aa, Artificial Sequence; identical to SEQ ID NO: 16563
  Cyclic GFR-binding peptide
  MOD_RES (32), (33): Xaa is C or S

SEQ ID NO: 61318 - protein, 40 aa, Artificial Sequence; identical to SEQ ID NO: 16568
  Cyclic GFR-binding peptide
  MOD_RES (2), (34), (35): Xaa is C or S

SEQ ID NO: 61319 - protein, 39 aa, Artificial Sequence; identical to SEQ ID NO: 16570
  Cyclic GFR-binding peptide
  MOD_RES (1), (3), (35), (36): Xaa is C or S

SEQ ID NO: 61320 - protein, 29 aa, Artificial Sequence
  Cyclic GFR-binding peptide
  MOD_RES (29), (29): Xaa is C or S
VMNEYQKYIVNNSSDIYLVSIPSLKTPAX

SEQ ID NO: 61321 - protein, 35 aa, Artificial Sequence; identical to SEQ ID NO: 16574
  Cyclic GFR-binding peptide
  MOD_RES (32), (33): Xaa is C or S

SEQ ID NO: 61322 - protein, 25 aa, Artificial Sequence
  Cyclic GFR-binding peptide
EYKFKVKPKRGVLYLISIPELAQPV

SEQ ID NO: 61323 - protein, 30 aa, Artificial Sequence
  Cyclic GFR-binding peptide
  MOD_RES (2), (2): Xaa is C or S
GXARVVMNEYQKYIVNSSDDIYLVSIPSLQ

SEQ ID NO: 61324 - protein, 31 aa, Artificial Sequence
  Cyclic GFR-binding peptide
  MOD_RES (27), (28): Xaa is C or S
EEYKFKVVKDYEDLYLMSIPELETPVXXAKP

SEQ ID NO: 61325 - protein, 25 aa, Artificial Sequence
  Cyclic GFR-binding peptide
MNEYQKYIVNSSDDIYLVSIPSLQT

SEQ ID NO: 61326 - protein, 27 aa, Artificial Sequence
  Cyclic GFR-binding peptide
MDRYKKLVVNNAADFYLISIANLRAPV

SEQ ID NO: 61327 - protein, 29 aa, Artificial Sequence
  Cyclic GFR-binding peptide
SMGEEYKFKTPVGMDDLYLVSIPELKTPV

SEQ ID NO: 61328 - protein, 26 aa, Artificial Sequence
  Cyclic GFR-binding peptide
EVVMDEYKFKVVNNAADLYLISIPEL

SEQ ID NO: 61329 - protein, 25 aa, Artificial Sequence
  Cyclic GFR-binding peptide
MEYKFKVKPTRGVLYLISIPELDQP

SEQ ID NO: 61330 - protein, 32 aa, Artificial Sequence
  Cyclic GFR-binding peptide
  MOD_RES (1), (3): Xaa is C or S
XGXESVAMGRYKKLYTVVGKDFYLISIANLKT

SEQ ID NO: 61331 - protein, 30 aa, Artificial Sequence
  Cyclic GFR-binding peptide
  MOD_RES (1), (1): Xaa is C or S
XESVAMGEYQKYYTVVGKDIYLISIPSLKT

SEQ ID NO: 61332 - protein, 34 aa, Artificial Sequence; identical to SEQ ID NO: 16580
  Cyclic GFR-binding peptide
  MOD_RES (31), (32): Xaa is C or S

SEQ ID NO: 61333 - protein, 34 aa, Artificial Sequence; identical to SEQ ID NO: 16584
  Cyclic GFR-binding peptide
  MOD_RES (1), (3): Xaa is C or S

SEQ ID NO: 61334 - protein, 40 aa, Artificial Sequence; identical to SEQ ID NO: 16585
  Cyclic GFR-binding peptide
  MOD_RES (2), (34): Xaa is C or S

SEQ ID NO: 61335 - protein, 38 aa, Artificial Sequence; identical to SEQ ID NO: 16587
  Cyclic GFR-binding peptide
  MOD_RES (32), (33): Xaa is C or S

SEQ ID NO: 61336 - protein, 35 aa, Artificial Sequence; identical to SEQ ID NO: 16592
  Cyclic GFR-binding peptide
  MOD_RES (2), (34), (35): Xaa is C or S

SEQ ID NO: 61337 - protein, 27 aa, Artificial Sequence
  Cyclic GFR-binding peptide
  MOD_RES (2), (2): Xaa is C or S
KXSRVIMEYQKYVKPKRGVIYLISIPS

SEQ ID NO: 61338 - protein, 36 aa, Artificial Sequence; identical to SEQ ID NO: 16594
  Cyclic GFR-binding peptide
  MOD_RES (32), (33): Xaa is C or S

SEQ ID NO: 61339 - protein, 27 aa, Artificial Sequence
  Cyclic GFR-binding peptide
KVVMEYQKYVKPTRGVIYLISIPSLDQ

SEQ ID NO: 61340 - protein, 37 aa, Artificial Sequence; identical to SEQ ID NO: 16597
  Cyclic GFR-binding peptide
  MOD_RES (1), (3), (34), (35): Xaa is C or S

SEQ ID NO: 61341 - protein, 33 aa, Artificial Sequence
  Cyclic GFR-binding peptide
  MOD_RES (2), (4): Xaa is C or S
RXGXESVAMGYHYKLYTVVGKDKYLISIPSLKT

SEQ ID NO: 61342 - protein, 35 aa, Artificial Sequence; identical to SEQ ID NO: 16598
  Cyclic GFR-binding peptide
  MOD_RES (1), (3), (35): Xaa is C or S

SEQ ID NO: 61343 - protein, 27 aa, Artificial Sequence
  Cyclic GFR-binding peptide
  MOD_RES (27), (27): Xaa is C or S
MEYQKYIKPTKGIIYLISIPSLDQSVX

SEQ ID NO: 61344 - protein, 32 aa, Artificial Sequence
  Cyclic GFR-binding peptide
  MOD_RES (27), (28): Xaa is C or S
NEYKFKIVNNSSDLYLVSIPELKTPAXXAKPV

SEQ ID NO: 61345 - protein, 32 aa, Artificial Sequence
  Cyclic GFR-binding peptide
  MOD_RES (26), (27): Xaa is C or S
EYQKYYTVVGKDIYLISIPSLKTPVXXAKSAK

SEQ ID NO: 61346 - protein, 38 aa, Artificial Sequence; identical to SEQ ID NO: 16602
  Cyclic GFR-binding peptide
  MOD_RES (2), (4), (36), (37): Xaa is C or S

SEQ ID NO: 61347 - protein, 27 aa, Artificial Sequence
  Cyclic GFR-binding peptide
  MOD_RES (26), (26): Xaa is C or S
EYQKYIVNSSDDIYLVSIPSLKTPAXT

SEQ ID NO: 61348 - protein, 28 aa, Artificial Sequence
  Cyclic GFR-binding peptide
VIMEYQKYVKPKRGVIYLISIPSLAQPV

SEQ ID NO: 61349 - protein, 24 aa, Artificial Sequence
  Cyclic GFR-binding peptide
EYQKYTPVGMDDIYLVSIPSLKTP

SEQ ID NO: 61350 - protein, 36 aa, Artificial Sequence; identical to SEQ ID NO: 16608
  Cyclic GFR-binding peptide
  MOD_RES (31), (32): Xaa is C or S

SEQ ID NO: 61351 - protein, 35 aa, Artificial Sequence; identical to SEQ ID NO: 16609
  Cyclic GFR-binding peptide
  MOD_RES (1), (3), (34), (35): Xaa is C or S

SEQ ID NO: 61352 - protein, 21 aa, Artificial Sequence
  Cyclic GFR-binding peptide
YHYKLYTVVGKDKYLISIPSL

SEQ ID NO: 61353 - protein, 35 aa, Artificial Sequence
  Cyclic GFR-binding peptide
  MOD_RES (29), (29): Xaa is C or S
VMNEYKFKIVNSSDDLYLVSIPELKTPAXTPKTVH

SEQ ID NO: 61354 - protein, 29 aa, Artificial Sequence
  Cyclic GFR-binding peptide
  MOD_RES (2), (2): Xaa is C or S
GXGEVVMEEYKFKVVKDYEDLYLMSIPEL

SEQ ID NO: 61355 - protein, 32 aa, Artificial Sequence
  Cyclic GFR-binding peptide
  MOD_RES (28), (29): Xaa is C or S
MEEYQKYVVKDYEDIYLMSIPSLETPVXXAKP

SEQ ID NO: 61356 - protein, 30 aa, Artificial Sequence
  Cyclic GFR-binding peptide
  MOD_RES (27), (28): Xaa is C or S
MEYKFKVKPKRGVLYLISIPELAQPVXXPA

SEQ ID NO: 61357 - protein, 32 aa, Artificial Sequence
  Cyclic GFR-binding peptide
  MOD_RES (29), (30): Xaa is C or S
VMNEYQKYIVNNSSDIYLVSIPSLKTPAXXAK

SEQ ID NO: 61358 - protein, 31 aa, Artificial Sequence
  Cyclic GFR-binding peptide
  MOD_RES (29), (30): Xaa is C or S
VMEEYQKYVVKDYEDIYLMSIPSLETPVXXA

SEQ ID NO: 61359 - protein, 26 aa, Artificial Sequence
  Cyclic GFR-binding peptide
EVVMDYHYKLVVNNAADKYLISIPSL

SEQ ID NO: 61360 - protein, 37 aa, Artificial Sequence; identical to SEQ ID NO: 16621
  Cyclic GFR-binding peptide
  MOD_RES (2), (4), (37): Xaa is C or S

SEQ ID NO: 61361 - protein, 26 aa, Artificial Sequence
  Cyclic GFR-binding peptide
VVMNEYQKYIVNSSDDIYLVSIPSLQ

SEQ ID NO: 61362 - protein, 30 aa, Artificial Sequence
  Cyclic GFR-binding peptide
  MOD_RES (27), (28): Xaa is C or S
DEYQKYVVKENEDIYLMSIPSLETPVXXAK

SEQ ID NO: 61363 - protein, 26 aa, Artificial Sequence
  Cyclic GFR-binding peptide
AMGRYKKLYTVVGKDFYLISIANLKT

SEQ ID NO: 61364 - protein, 27 aa, Artificial Sequence
  Cyclic GFR-binding peptide
  MOD_RES (1), (1): Xaa is C or S
XGEVVMDEYQKYVVKENEDIYLMSIPS

SEQ ID NO: 61365 - protein, 37 aa, Artificial Sequence; identical to SEQ ID NO: 16625
  Cyclic GFR-binding peptide
  MOD_RES (1), (32), (33): Xaa is C or S

SEQ ID NO: 61366 - protein, 32 aa, Artificial Sequence; identical to SEQ ID NO: 16626
  Cyclic GFR-binding peptide
  MOD_RES (1), (1): Xaa is C or S

SEQ ID NO: 61367 - protein, 36 aa, Artificial Sequence
  Cyclic GFR-binding peptide
  MOD_RES (30), (31): Xaa is C or S
VVMDEYQKYVVKENEDIYLMSIPSLETPVXXAKPIK

SEQ ID NO: 61368 - protein, 32 aa, Artificial Sequence; identical to SEQ ID NO: 16633
  Cyclic GFR-binding peptide
  MOD_RES (1), (32): Xaa is C or S

SEQ ID NO: 61369 - protein, 33 aa, Artificial Sequence
  Cyclic GFR-binding peptide
  MOD_RES (1), (3): Xaa is C or S
XGXGEVVMEEYQKYVVKDYEDIYLMSIPSLETP

SEQ ID NO: 61370 - protein, 30 aa, Artificial Sequence
  Cyclic GFR-binding peptide
  MOD_RES (29), (30): Xaa is C or S
VIMEYQKYVKPKRGVIYLISIPSLAQPVXX

SEQ ID NO: 61371 - protein, 41 aa, Artificial Sequence; identical to SEQ ID NO: 16634
  Cyclic GFR-binding peptide
  MOD_RES (2), (4), (36), (37): Xaa is C or S

SEQ ID NO: 61372 - protein, 27 aa, Artificial Sequence
  Cyclic GFR-binding peptide
EAVSMGEEYKFKTPVGMDDLYLVSIPE

SEQ ID NO: 61373 - protein, 32 aa, Artificial Sequence; identical to SEQ ID NO: 16638
  Cyclic GFR-binding peptide
  MOD_RES (31), (32): Xaa is C or S

SEQ ID NO: 61374 - protein, 34 aa, Artificial Sequence; identical to SEQ ID NO: 16640
  Cyclic GFR-binding peptide
  MOD_RES (33), (34): Xaa is C or S

SEQ ID NO: 61375 - protein, 31 aa, Artificial Sequence
  Cyclic GFR-binding peptide
  MOD_RES (29), (30): Xaa is C or S
VIMEYQKYIKPTKGIIYLISIPSLDQSVXXP

SEQ ID NO: 61376 - protein, 29 aa, Artificial Sequence
  Cyclic GFR-binding peptide
  MOD_RES (28), (29): Xaa is C or S
GEEYQKYTPVGMDDIYLVSIPSLKTPVXX

SEQ ID NO: 61377 - protein, 28 aa, Artificial Sequence
  Cyclic GFR-binding peptide
VVMDEYKFKVVNNAADLYLISIPELRAP

SEQ ID NO: 61378 - protein, 30 aa, Artificial Sequence
  Cyclic GFR-binding peptide
  MOD_RES (26), (27): Xaa is C or S
EYQKYVVKENEDIYLMSIPSLETPVXXAKP

SEQ ID NO: 61379 - protein, 32 aa, Artificial Sequence
  Cyclic GFR-binding peptide
  MOD_RES (26), (27): Xaa is C or S
EYKFKIVNNSSDLYLVSIPELKTPAXXAKPVA

SEQ ID NO: 61380 - protein, 33 aa, Artificial Sequence
  Cyclic GFR-binding peptide
  MOD_RES (2), (4): Xaa is C or S
HXGXARVVMNEYKFKIVNSSDDLYLVSIPELQT

SEQ ID NO: 61381 - protein, 32 aa, Artificial Sequence
  Cyclic GFR-binding peptide
  MOD_RES (28), (29): Xaa is C or S
MNEYQKYIVNSSDDIYLVSIPSLQTPAXXPKP

SEQ ID NO: 61382 - protein, 28 aa, Artificial Sequence
  Cyclic GFR-binding peptide
  MOD_RES (27), (28): Xaa is C or S
DYHYKLVVNNAADKYLISIPSLRAPVXX

SEQ ID NO: 61383 - protein, 27 aa, Artificial Sequence
  Cyclic GFR-binding peptide
AKVVMNEYQKYIVNNSSDIYLVSIPSL

SEQ ID NO: 61384 - protein, 31 aa, Artificial Sequence
  Cyclic GFR-binding peptide
EAVSMGEEYKFKTPVGMDDLYLVSIPELKTP

SEQ ID NO: 61385 - protein, 30 aa, Artificial Sequence
  Cyclic GFR-binding peptide
  MOD_RES (1), (3): Xaa is C or S
XGXSRVVMNEYKFKIVNSSDDLYLVSIPEL

SEQ ID NO: 61386 - protein, 33 aa, Artificial Sequence
  Cyclic GFR-binding peptide
  MOD_RES (30), (31): Xaa is C or S
VAMGYHYKLYTVVGKDKYLISIPSLKTPVXXAK

SEQ ID NO: 61387 - protein, 23 aa, Artificial Sequence
  Cyclic GFR-binding peptide
MDEYKFKVVNNAADLYLISIPEL

SEQ ID NO: 61388 - protein, 28 aa, Artificial Sequence
  Cyclic GFR-binding peptide
  MOD_RES (28), (28): Xaa is C or S
IMEYKFKVKPKRGVLYLISIPELAQPVX

SEQ ID NO: 61389 - protein, 30 aa, Artificial Sequence
  Cyclic GFR-binding peptide
  MOD_RES (28), (28): Xaa is C or S
MNEYQKYIVNSSDDIYLVSIPSLKTPAXTP

SEQ ID NO: 61390 - protein, 35 aa, Artificial Sequence; identical to SEQ ID NO: 16663
  Cyclic GFR-binding peptide
  MOD_RES (1), (32), (33): Xaa is C or S

SEQ ID NO: 61391 - protein, 32 aa, Artificial Sequence; identical to SEQ ID NO: 16666
  Cyclic GFR-binding peptide
  MOD_RES (2), (2): Xaa is C or S

SEQ ID NO: 61392 - protein, 38 aa, Artificial Sequence; identical to SEQ ID NO: 16670
  Cyclic GFR-binding peptide
  MOD_RES (2), (4), (36), (37): Xaa is C or S

SEQ ID NO: 61393 - protein, 30 aa, Artificial Sequence
  Cyclic GFR-binding peptide
  MOD_RES (26), (27): Xaa is C or S
EYQKYVVKDYEDIYLMSIPSLETPVXXAKP

SEQ ID NO: 61394 - protein, 38 aa, Artificial Sequence; identical to SEQ ID NO: 16671
  Cyclic GFR-binding peptide
  MOD_RES (1), (32), (33): Xaa is C or S

SEQ ID NO: 61395 - protein, 26 aa, Artificial Sequence
  Cyclic GFR-binding peptide
  MOD_RES (26), (26): Xaa is C or S
EYQKYIVNSSDDIYLVSIPSLQTPAX

SEQ ID NO: 61396 - protein, 36 aa, Artificial Sequence; identical to SEQ ID NO: 16672
  Cyclic GFR-binding peptide
  MOD_RES (31), (32): Xaa is C or S

SEQ ID NO: 61397 - protein, 32 aa, Artificial Sequence
  Cyclic GFR-binding peptide
  MOD_RES (1), (3): Xaa is C or S
XGXESVAMGEYQKYYTVVGKDIYLISIPSLKT

SEQ ID NO: 61398 - protein, 38 aa, Artificial Sequence; identical to SEQ ID NO: 16673
  Cyclic GFR-binding peptide
  MOD_RES (32), (33): Xaa is C or S

SEQ ID NO: 61399 - protein, 33 aa, Artificial Sequence
  Cyclic GFR-binding peptide
  MOD_RES (2), (4): Xaa is C or S
HXGXARVVMNEYQKYIVNSSDDIYLVSIPSLQT

SEQ ID NO: 61400 - protein, 37 aa, Artificial Sequence; identical to SEQ ID NO: 16677
  Cyclic GFR-binding peptide
  MOD_RES (1), (32), (33): Xaa is C or S

SEQ ID NO: 61401 - protein, 27 aa, Artificial Sequence
  Cyclic GFR-binding peptide
VVMDYHYKLVVNNAADKYLISIPSLRA

SEQ ID NO: 61402 - protein, 23 aa, Artificial Sequence
  Cyclic GFR-binding peptide
MEYKFKIKPTKGILYLISIPELD

SEQ ID NO: 61403 - protein, 39 aa, Artificial Sequence; identical to SEQ ID NO: 16678
  Cyclic GFR-binding peptide
  MOD_RES (1), (3), (35), (36): Xaa is C or S

SEQ ID NO: 61404 - protein, 31 aa, Artificial Sequence
  Cyclic GFR-binding peptide
  MOD_RES (2), (2): Xaa is C or S
GXGEVVMEEYQKYVVKDYEDIYLMSIPSLET

SEQ ID NO: 61405 - protein, 24 aa, Artificial Sequence
  Cyclic GFR-binding peptide
VVMEEYKFKVVKDYEDLYLMSIPE

SEQ ID NO: 61406 - protein, 37 aa, Artificial Sequence; identical to SEQ ID NO: 16680
  Cyclic GFR-binding peptide
  MOD_RES (1), (3), (35), (36): Xaa is C or S

SEQ ID NO: 61407 - protein, 37 aa, Artificial Sequence; identical to SEQ ID NO: 16682
  Cyclic GFR-binding peptide
  MOD_RES (31), (32): Xaa is C or S

SEQ ID NO: 61408 - protein, 29 aa, Artificial Sequence
  Cyclic GFR-binding peptide
  MOD_RES (2), (2): Xaa is C or S
KXSRVIMEYQKYVKPKRGVIYLISIPSLA

SEQ ID NO: 61409 - protein, 37 aa, Artificial Sequence; identical to SEQ ID NO: 16684
  Cyclic GFR-binding peptide
  MOD_RES (1), (3), (35), (36): Xaa is C or S

SEQ ID NO: 61410 - protein, 23 aa, Artificial Sequence
  Cyclic GFR-binding peptide
IMEYKFKIKPTKGILYLISIPEL

SEQ ID NO: 61411 - protein, 31 aa, Artificial Sequence; identical to SEQ ID NO: 16685
  Cyclic GFR-binding peptide

SEQ ID NO: 61412 - protein, 25 aa, Artificial Sequence
  Cyclic GFR-binding peptide
AMGRYKKLYTVVGKDFYLISIANLK

SEQ ID NO: 61413 - protein, 38 aa, Artificial Sequence; identical to SEQ ID NO: 16686
  Cyclic GFR-binding peptide
  MOD_RES (2), (4), (36), (37): Xaa is C or S

SEQ ID NO: 61414 - protein, 24 aa, Artificial Sequence
  Cyclic GFR-binding peptide
VVMNEYQKYIVNSSDDIYLVSIPS

SEQ ID NO: 61415 - protein, 22 aa, Artificial Sequence
  Cyclic GFR-binding peptide
MNEYQKYIVNNSSDIYLVSIPS

SEQ ID NO: 61416 - protein, 36 aa, Artificial Sequence
  Cyclic GFR-binding peptide
  MOD_RES (30), (31): Xaa is C or S
VVMNEYKFKIVNSSDDLYLVSIPELKTPAXXPKPVY

SEQ ID NO: 61417 - protein, 28 aa, Artificial Sequence
  Cyclic GFR-binding peptide
  MOD_RES (28), (28): Xaa is C or S
MDEYKFKVVKENEDLYLMSIPELETPVX

SEQ ID NO: 61418 - protein, 37 aa, Artificial Sequence; identical to SEQ ID NO: 16692
  Cyclic GFR-binding peptide
  MOD_RES (32), (33): Xaa is C or S

SEQ ID NO: 61419 - protein, 23 aa, Artificial Sequence
  Cyclic GFR-binding peptide
NEYKFKIVNNSSDLYLVSIPELK

SEQ ID NO: 61420 - protein, 26 aa, Artificial Sequence
  Cyclic GFR-binding peptide
VMEYKFKVKPTRGVLYLISIPELDQP

SEQ ID NO: 61421 - protein, 31 aa, Artificial Sequence
  Cyclic GFR-binding peptide
  MOD_RES (28), (28): Xaa is C or S
MNEYQKYIVNSSDDIYLVSIPSLKTPAXTPK

SEQ ID NO: 61422 - protein, 36 aa, Artificial Sequence; identical to SEQ ID NO: 16702
  Cyclic GFR-binding peptide
  MOD_RES (2), (4), (35), (36): Xaa is C or S

SEQ ID NO: 61423 - protein, 33 aa, Artificial Sequence
  Cyclic GFR-binding peptide
  MOD_RES (27), (28): Xaa is C or S
EEYKFKVVKDYEDLYLMSIPELETPVXXAKPIS

SEQ ID NO: 61424 - protein, 29 aa, Artificial Sequence
  Cyclic GFR-binding peptide
  MOD_RES (28), (29): Xaa is C or S
MEEYQKYVVKDYEDIYLMSIPSLETPVXX

SEQ ID NO: 61425 - protein, 35 aa, Artificial Sequence; identical to SEQ ID NO: 16706
  Cyclic GFR-binding peptide
  MOD_RES (2), (4), (35): Xaa is C or S

SEQ ID NO: 61426 - protein, 24 aa, Artificial Sequence
  Cyclic GFR-binding peptide
VIMEYKFKIKPTKGILYLISIPEL

SEQ ID NO: 61427 - protein, 31 aa, Artificial Sequence; identical to SEQ ID NO: 16708
  Cyclic GFR-binding peptide

SEQ ID NO: 61428 - protein, 29 aa, Artificial Sequence
  Cyclic GFR-binding peptide
SKVVMEYKFKVKPTRGVLYLISIPELDQP

SEQ ID NO: 61429 - protein, 21 aa, Artificial Sequence
  Cyclic GFR-binding peptide
GRYKKLYTVVGKDFYLISIAN

SEQ ID NO: 61430 - protein, 41 aa, Artificial Sequence; identical to SEQ ID NO: 16711
  Cyclic GFR-binding peptide
  MOD_RES (2), (4), (35), (36): Xaa is C or S

SEQ ID NO: 61431 - protein, 31 aa, Artificial Sequence
  Cyclic GFR-binding peptide
  MOD_RES (30), (31): Xaa is C or S
VVMNEYKFKIVNNSSDLYLVSIPELKTPAXX

SEQ ID NO: 61432 - protein, 39 aa, Artificial Sequence; identical to SEQ ID NO: 16718
  Cyclic GFR-binding peptide
  MOD_RES (2), (4), (36), (37): Xaa is C or S

SEQ ID NO: 61433 - protein, 30 aa, Artificial Sequence
  Cyclic GFR-binding peptide
  MOD_RES (2), (4): Xaa is C or S
SXKXSKVIMEYQKYIKPTKGIIYLISIPSL

SEQ ID NO: 61434 - protein, 32 aa, Artificial Sequence
  Cyclic GFR-binding peptide
  MOD_RES (2), (2): Xaa is C or S
GXAEVVMDRYKKLVVNNAADFYLISIANLRAP

SEQ ID NO: 61435 - protein, 24 aa, Artificial Sequence
  Cyclic GFR-binding peptide
MGRYKKLYTVVGKDFYLISIANLK

SEQ ID NO: 61436 - protein, 40 aa, Artificial Sequence; identical to SEQ ID NO: 16725
  Cyclic GFR-binding peptide
  MOD_RES (1), (3), (35), (36): Xaa is C or S

SEQ ID NO: 61437 - protein, 27 aa, Artificial Sequence
  Cyclic GFR-binding peptide
  MOD_RES (27), (27): Xaa is C or S
NEYQKYIVNNSSDIYLVSIPSLKTPAX

SEQ ID NO: 61438 - protein, 40 aa, Artificial Sequence; identical to SEQ ID NO: 16727
  Cyclic GFR-binding peptide
  MOD_RES (2), (4), (36), (37): Xaa is C or S

SEQ ID NO: 61439 - protein, 28 aa, Artificial Sequence
  Cyclic GFR-binding peptide
KVVMNEYQKYIVNNSSDIYLVSIPSLKT

SEQ ID NO: 61440 - protein, 35 aa, Artificial Sequence; identical to SEQ ID NO: 16730
  Cyclic GFR-binding peptide
  MOD_RES (31), (32): Xaa is C or S

SEQ ID NO: 61441 - protein, 37 aa, Artificial Sequence; identical to SEQ ID NO: 16731
  Cyclic GFR-binding peptide
  MOD_RES (1), (33): Xaa is C or S

SEQ ID NO: 61442 - protein, 38 aa, Artificial Sequence; identical to SEQ ID NO: 16732
  Cyclic GFR-binding peptide
  MOD_RES (1), (3), (35), (36): Xaa is C or S

SEQ ID NO: 61443 - protein, 37 aa, Artificial Sequence; identical to SEQ ID NO: 16734
  Cyclic GFR-binding peptide
  MOD_RES (1), (3), (35), (36): Xaa is C or S

SEQ ID NO: 61444 - protein, 35 aa, Artificial Sequence; identical to SEQ ID NO: 16736
  Cyclic GFR-binding peptide
  MOD_RES (31), (31): Xaa is C or S

SEQ ID NO: 61445 - protein, 31 aa, Artificial Sequence
  Cyclic GFR-binding peptide
  MOD_RES (30), (30): Xaa is C or S
VVMNEYKFKIVNSSDDLYLVSIPELKTPAXT

SEQ ID NO: 61446 - protein, 33 aa, Artificial Sequence
  Cyclic GFR-binding peptide
  MOD_RES (31), (32): Xaa is C or S
VSMGEEYKFKTPVGMDDLYLVSIPELKTPVXXA

SEQ ID NO: 61447 - protein, 23 aa, Artificial Sequence
  Cyclic GFR-binding peptide
AMGEYQKYYTVVGKDIYLISIPS

SEQ ID NO: 61448 - protein, 30 aa, Artificial Sequence
  Cyclic GFR-binding peptide
  MOD_RES (2), (4): Xaa is C or S
RXGXESVAMGEYQKYYTVVGKDIYLISIPS

SEQ ID NO: 61449 - protein, 31 aa, Artificial Sequence
  Cyclic GFR-binding peptide
  MOD_RES (29), (30): Xaa is C or S
VIMEYKFKIKPTKGILYLISIPELDQSVXXP

SEQ ID NO: 61450 - protein, 40 aa, Artificial Sequence; identical to SEQ ID NO: 16742
  Cyclic GFR-binding peptide
  MOD_RES (1), (3), (35), (36): Xaa is C or S

SEQ ID NO: 61451 - protein, 36 aa, Artificial Sequence; identical to SEQ ID NO: 16743
  Cyclic GFR-binding peptide
  MOD_RES (31), (32): Xaa is C or S

SEQ ID NO: 61452 - protein, 29 aa, Artificial Sequence
  Cyclic GFR-binding peptide
RVIMEYQKYVKPKRGVIYLISIPSLAQPV

SEQ ID NO: 61453 - protein, 26 aa, Artificial Sequence
  Cyclic GFR-binding peptide
ESVAMGYHYKLYTVVGKDKYLISIPS

SEQ ID NO: 61454 - protein, 35 aa, Artificial Sequence
  Cyclic GFR-binding peptide
  MOD_RES (29), (30): Xaa is C or S
VMNEYKFKIVNSSDDLYLVSIPELKTPAXXPKPVY

SEQ ID NO: 61455 - protein, 34 aa, Artificial Sequence
  Cyclic GFR-binding peptide
  MOD_RES (30), (31): Xaa is C or S
VVMDYHYKLVVNNAADKYLISIPSLRAPVXXSAP

SEQ ID NO: 61456 - protein, 32 aa, Artificial Sequence
  Cyclic GFR-binding peptide
  MOD_RES (2), (4): Xaa is C or S
RXGXAEVVMDEYKFKVVNNAADLYLISIPELR

SEQ ID NO: 61457 - protein, 31 aa, Artificial Sequence
  Cyclic GFR-binding peptide
  MOD_RES (28), (29): Xaa is C or S
MNEYKFKIVNSSDDLYLVSIPELQTPAXXPK

SEQ ID NO: 61458 - protein, 42 aa, Artificial Sequence; identical to SEQ ID NO: 16747
  Cyclic GFR-binding peptide
  MOD_RES (2), (4), (36), (37): Xaa is C or S

SEQ ID NO: 61459 - protein, 32 aa, Artificial Sequence; identical to SEQ ID NO: 16749
  Cyclic GFR-binding peptide
  MOD_RES (1), (1): Xaa is C or S

SEQ ID NO: 61460 - protein, 30 aa, Artificial Sequence
  Cyclic GFR-binding peptide
  MOD_RES (27), (28): Xaa is C or S
NEYQKYIVNSSDDIYLVSIPSLQTPAXXPK

SEQ ID NO: 61461 - protein, 28 aa, Artificial Sequence
  Cyclic GFR-binding peptide
  MOD_RES (1), (1): Xaa is C or S
XEAVSMGEEYQKYTPVGMDDIYLVSIPS

SEQ ID NO: 61462 - protein, 30 aa, Artificial Sequence
  Cyclic GFR-binding peptide
  MOD_RES (27), (28): Xaa is C or S
MEYQKYVKPTRGVIYLISIPSLDQPVXXPS

SEQ ID NO: 61463 - protein, 29 aa, Artificial Sequence
  Cyclic GFR-binding peptide
  MOD_RES (29), (29): Xaa is C or S
VIMEYKFKVKPKRGVLYLISIPELAQPVX

SEQ ID NO: 61464 - protein, 29 aa, Artificial Sequence
  Cyclic GFR-binding peptide
  MOD_RES (2), (4): Xaa is C or S
SXKXSKVIMEYQKYIKPTKGIIYLISIPS

SEQ ID NO: 61465 - protein, 25 aa, Artificial Sequence
  Cyclic GFR-binding peptide
VSMGEEYQKYTPVGMDDIYLVSIPS

SEQ ID NO: 61466 - protein, 39 aa, Artificial Sequence; identical to SEQ ID NO: 16752
  Cyclic GFR-binding peptide
  MOD_RES (2), (33), (34): Xaa is C or S

SEQ ID NO: 61467 - protein, 25 aa, Artificial Sequence
  Cyclic GFR-binding peptide
VVMDEYKFKVVKENEDLYLMSIPEL

SEQ ID NO: 61468 - protein, 27 aa, Artificial Sequence
  Cyclic GFR-binding peptide
  MOD_RES (27), (27): Xaa is C or S
DRYKKLVVNNAADFYLISIANLRAPVX

SEQ ID NO: 61469 - protein, 39 aa, Artificial Sequence; identical to SEQ ID NO: 16757
  Cyclic GFR-binding peptide
  MOD_RES (2), (33), (34): Xaa is C or S

SEQ ID NO: 61470 - protein, 34 aa, Artificial Sequence; identical to SEQ ID NO: 16761
  Cyclic GFR-binding peptide
  MOD_RES (31), (32): Xaa is C or S

SEQ ID NO: 61471 - protein, 40 aa, Artificial Sequence; identical to SEQ ID NO: 16762
  Cyclic GFR-binding peptide
  MOD_RES (2), (4), (36): Xaa is C or S

SEQ ID NO: 61472 - protein, 26 aa, Artificial Sequence
  Cyclic GFR-binding peptide
SRVIMEYQKYVKPKRGVIYLISIPSL

SEQ ID NO: 61473 - protein, 34 aa, Artificial Sequence; identical to SEQ ID NO: 16766
  Cyclic GFR-binding peptide
  MOD_RES (2), (4): Xaa is C or S

SEQ ID NO: 61474 - protein, 33 aa, Artificial Sequence
  Cyclic GFR-binding peptide
  MOD_RES (27), (28): Xaa is C or S
GYHYKLYTVVGKDKYLISIPSLKTPVXXAKSAK

SEQ ID NO: 61475 - protein, 26 aa, Artificial Sequence
  Cyclic GFR-binding peptide
VVMDEYKFKVVNNAADLYLISIPELR

SEQ ID NO: 61476 - protein, 38 aa, Artificial Sequence; identical to SEQ ID NO: 16769
  Cyclic GFR-binding peptide
  MOD_RES (2), (34), (35): Xaa is C or S

SEQ ID NO: 61477 - protein, 36 aa, Artificial Sequence; identical to SEQ ID NO: 16770
  Cyclic GFR-binding peptide
  MOD_RES (1), (3), (35), (36): Xaa is C or S

SEQ ID NO: 61478 - protein, 27 aa, Artificial Sequence
  Cyclic GFR-binding peptide
VVMDRYKKLVVNNAADFYLISIANLRA

SEQ ID NO: 61479 - protein, 22 aa, Artificial Sequence
  Cyclic GFR-binding peptide
RYKKLYTVVGKDFYLISIANLK

SEQ ID NO: 61480 - protein, 27 aa, Artificial Sequence
  Cyclic GFR-binding peptide
  MOD_RES (1), (1): Xaa is C or S
XSKVVMEYKFKVKPTRGVLYLISIPEL

SEQ ID NO: 61481 - protein, 32 aa, Artificial Sequence
  Cyclic GFR-binding peptide
  MOD_RES (29), (30): Xaa is C or S
VIMEYQKYVKPKRGVIYLISIPSLAQPVXXPA

SEQ ID NO: 61482 - protein, 33 aa, Artificial Sequence
  Cyclic GFR-binding peptide
  MOD_RES (30), (31): Xaa is C or S
KVVMEYKFKVKPTRGVLYLISIPELDQPVXXPS

SEQ ID NO: 61483 - protein, 32 aa, Artificial Sequence
  Cyclic GFR-binding peptide
  MOD_RES (27), (28): Xaa is C or S
NEYQKYIVNSSDDIYLVSIPSLQTPAXXPKPV

SEQ ID NO: 61484 - protein, 30 aa, Artificial Sequence
  Cyclic GFR-binding peptide
  MOD_RES (27), (28): Xaa is C or S
MEYKFKIKPTKGILYLISIPELDQSVXXPS

SEQ ID NO: 61485 - protein, 36 aa, Artificial Sequence; identical to SEQ ID NO: 16783
  Cyclic GFR-binding peptide
  MOD_RES (32), (33): Xaa is C or S

SEQ ID NO: 61486 - protein, 36 aa, Artificial Sequence; identical to SEQ ID NO: 16784
  Cyclic GFR-binding peptide
  MOD_RES (31), (32): Xaa is C or S

SEQ ID NO: 61487 - protein, 33 aa, Artificial Sequence
  Cyclic GFR-binding peptide
  MOD_RES (28), (29): Xaa is C or S
IMEYKFKIKPTKGILYLISIPELDQSVXXPSAS

SEQ ID NO: 61488 - protein, 27 aa, Artificial Sequence
  Cyclic GFR-binding peptide
  MOD_RES (26), (27): Xaa is C or S
EYQKYIVNSSDDIYLVSIPSLQTPAXX

SEQ ID NO: 61489 - protein, 31 aa, Artificial Sequence
  Cyclic GFR-binding peptide
  MOD_RES (26), (27): Xaa is C or S
EYKFKVKPKRGVLYLISIPELAQPVXXPAAS

SEQ ID NO: 61490 - protein, 34 aa, Artificial Sequence; identical to SEQ ID NO: 16787
  Cyclic GFR-binding peptide
  MOD_RES (2), (34): Xaa is C or S

SEQ ID NO: 61491 - protein, 36 aa, Artificial Sequence; identical to SEQ ID NO: 16790
  Cyclic GFR-binding peptide
  MOD_RES (32), (33): Xaa is C or S

SEQ ID NO: 61492 - protein, 21 aa, Artificial Sequence
  Cyclic GFR-binding peptide
DEYKFKVVKENEDLYLMSIPE

SEQ ID NO: 61493 - protein, 28 aa, Artificial Sequence
  Cyclic GFR-binding peptide
  MOD_RES (26), (27): Xaa is C or S
EYKFKIVNSSDDLYLVSIPELKTPAXXP

SEQ ID NO: 61494 - protein, 28 aa, Artificial Sequence
  Cyclic GFR-binding peptide
  MOD_RES (2), (2): Xaa is C or S
GXSRVVMNEYKFKIVNSSDDLYLVSIPE

SEQ ID NO: 61495 - protein, 29 aa, Artificial Sequence
  Cyclic GFR-binding peptide
  MOD_RES (26), (27): Xaa is C or S
EYKFKTPVGMDDLYLVSIPELKTPVXXAK

SEQ ID NO: 61496 - protein, 27 aa, Artificial Sequence
  Cyclic GFR-binding peptide
  MOD_RES (26), (27): Xaa is C or S
EYQKYVKPTRGVIYLISIPSLDQPVXX

SEQ ID NO: 61497 - protein, 25 aa, Artificial Sequence
  Cyclic GFR-binding peptide
NEYKFKIVNSSDDLYLVSIPELQTP

SEQ ID NO: 61498 - protein, 37 aa, Artificial Sequence; identical to SEQ ID NO: 16800
  Cyclic GFR-binding peptide
  MOD_RES (2), (34), (35): Xaa is C or S

SEQ ID NO: 61499 - protein, 27 aa, Artificial Sequence
  Cyclic GFR-binding peptide
EVVMDYHYKLVVNNAADKYLISIPSLR

SEQ ID NO: 61500 - protein, 23 aa, Artificial Sequence
  Cyclic GFR-binding peptide
VIMEYQKYVKPKRGVIYLISIPS

SEQ ID NO: 61501 - protein, 30 aa, Artificial Sequence
  Cyclic GFR-binding peptide
  MOD_RES (30), (30): Xaa is C or S
VVMNEYQKYIVNSSDDIYLVSIPSLKTPAX

SEQ ID NO: 61502 - protein, 30 aa, Artificial Sequence
  Cyclic GFR-binding peptide
  MOD_RES (27), (28): Xaa is C or S
NEYQKYIVNNSSDIYLVSIPSLKTPAXXAK

SEQ ID NO: 61503 - protein, 36 aa, Artificial Sequence
  Cyclic GFR-binding peptide
  MOD_RES (30), (31): Xaa is C or S
SMGEEYKFKTPVGMDDLYLVSIPELKTPVXXAKGVK

SEQ ID NO: 61504 - protein, 38 aa, Artificial Sequence; identical to SEQ ID NO: 16807
  Cyclic GFR-binding peptide
  MOD_RES (2), (4), (37), (38): Xaa is C or S

SEQ ID NO: 61505 - protein, 32 aa, Artificial Sequence
  Cyclic GFR-binding peptide
  MOD_RES (26), (27): Xaa is C or S
EYKFKVKPTRGVLYLISIPELDQPVXXPSASA

SEQ ID NO: 61506 - protein, 30 aa, Artificial Sequence
  Cyclic GFR-binding peptide
  MOD_RES (30), (30): Xaa is C or S
VVMDEYKFKVVNNAADLYLISIPELRAPVX

SEQ ID NO: 61507 - protein, 29 aa, Artificial Sequence
  Cyclic GFR-binding peptide
  MOD_RES (28), (29): Xaa is C or S
IMEYKFKIKPTKGILYLISIPELDQSVXX

SEQ ID NO: 61508 - protein, 32 aa, Artificial Sequence; identical to SEQ ID NO: 16811
  Cyclic GFR-binding peptide
  MOD_RES (1), (1): Xaa is C or S

SEQ ID NO: 61509 - protein, 31 aa, Artificial Sequence
  Cyclic GFR-binding peptide
  MOD_RES (1), (1): Xaa is C or S
XAKVVMNEYQKYIVNNSSDIYLVSIPSLKTP

SEQ ID NO: 61510 - protein, 34 aa, Artificial Sequence
  Cyclic GFR-binding peptide
  MOD_RES (28), (29): Xaa is C or S
MEEYQKYVVKDYEDIYLMSIPSLETPVXXAKPIS

SEQ ID NO: 61511 - protein, 37 aa, Artificial Sequence; identical to SEQ ID NO: 16813
  Cyclic GFR-binding peptide
  MOD_RES (32), (33): Xaa is C or S

SEQ ID NO: 61512 - protein, 30 aa, Artificial Sequence
  Cyclic GFR-binding peptide
SRVVMNEYKFKIVNSSDDLYLVSIPELKTP

SEQ ID NO: 61513 - protein, 28 aa, Artificial Sequence
  Cyclic GFR-binding peptide
GEVVMEEYQKYVVKDYEDIYLMSIPSLE

SEQ ID NO: 61514 - protein, 24 aa, Artificial Sequence
  Cyclic GFR-binding peptide
KVIMEYQKYIKPTKGIIYLISIPS

SEQ ID NO: 61515 - protein, 23 aa, Artificial Sequence
  Cyclic GFR-binding peptide
VMNEYQKYIVNSSDDIYLVSIPS

SEQ ID NO: 61516 - protein, 23 aa, Artificial Sequence
  Cyclic GFR-binding peptide
MNEYQKYIVNNSSDIYLVSIPSL

SEQ ID NO: 61517 - protein, 34 aa, Artificial Sequence
  Cyclic GFR-binding peptide
  MOD_RES (29), (30): Xaa is C or S
VMDEYKFKVVKENEDLYLMSIPELETPVXXAKPI

SEQ ID NO: 61518 - protein, 27 aa, Artificial Sequence
  Cyclic GFR-binding peptide
  MOD_RES (26), (27): Xaa is C or S
EYQKYTPVGMDDIYLVSIPSLKTPVXX

SEQ ID NO: 61519 - protein, 32 aa, Artificial Sequence
  Cyclic GFR-binding peptide
  MOD_RES (29), (30): Xaa is C or S
VMDRYKKLVVNNAADFYLISIANLRAPVXXSA

SEQ ID NO: 61520 - protein, 31 aa, Artificial Sequence
  Cyclic GFR-binding peptide
  MOD_RES (1), (3): Xaa is C or S
XGXAKVVMNEYKFKIVNNSSDLYLVSIPELK

SEQ ID NO: 61521 - protein, 27 aa, Artificial Sequence
  Cyclic GFR-binding peptide
VVMNEYKFKIVNNSSDLYLVSIPELKT

SEQ ID NO: 61522 - protein, 36 aa, Artificial Sequence; identical to SEQ ID NO: 16821
  Cyclic GFR-binding peptide
  MOD_RES (2), (4), (36): Xaa is C or S

SEQ ID NO: 61523 - protein, 30 aa, Artificial Sequence
  Cyclic GFR-binding peptide
  MOD_RES (28), (29): Xaa is C or S
MDYHYKLVVNNAADKYLISIPSLRAPVXXS

SEQ ID NO: 61524 - protein, 23 aa, Artificial Sequence
  Cyclic GFR-binding peptide
MEEYQKYVVKDYEDIYLMSIPSL

SEQ ID NO: 61525 - protein, 32 aa, Artificial Sequence
  Cyclic GFR-binding peptide
  MOD_RES (2), (2): Xaa is C or S
GXARVVMNEYQKYIVNSSDDIYLVSIPSLQTP

SEQ ID NO: 61526 - protein, 34 aa, Artificial Sequence
  Cyclic GFR-binding peptide
  MOD_RES (28), (28): Xaa is C or S
MNEYQKYIVNSSDDIYLVSIPSLKTPAXTPKTVH

SEQ ID NO: 61527 - protein, 32 aa, Artificial Sequence
  Cyclic GFR-binding peptide
  MOD_RES (2), (2): Xaa is C or S
GXAEVVMDEYKFKVVNNAADLYLISIPELRAP

SEQ ID NO: 61528 - protein, 39 aa, Artificial Sequence; identical to SEQ ID NO: 16830
  Cyclic GFR-binding peptide
  MOD_RES (2), (34), (35): Xaa is C or S

SEQ ID NO: 61529 - protein, 29 aa, Artificial Sequence
  Cyclic GFR-binding peptide
  MOD_RES (1), (3): Xaa is C or S
XKXSKVIMEYQKYIKPTKGIIYLISIPSL

SEQ ID NO: 61530 - protein, 33 aa, Artificial Sequence
  Cyclic GFR-binding peptide
  MOD_RES (29), (30): Xaa is C or S
AMGYHYKLYTVVGKDKYLISIPSLKTPVXXAKS

SEQ ID NO: 61531 - protein, 34 aa, Artificial Sequence
  Cyclic GFR-binding peptide
  MOD_RES (28), (29): Xaa is C or S
MNEYQKYIVNNSSDIYLVSIPSLKTPAXXAKPVA

SEQ ID NO: 61532 - protein, 32 aa, Artificial Sequence; identical to SEQ ID NO: 16836
  Cyclic GFR-binding peptide
  MOD_RES (31), (32): Xaa is C or S

SEQ ID NO: 61533 - protein, 23 aa, Artificial Sequence
  Cyclic GFR-binding peptide
GEEYQKYTPVGMDDIYLVSIPSL

SEQ ID NO: 61534 - protein, 30 aa, Artificial Sequence
  Cyclic GFR-binding peptide
  MOD_RES (27), (28): Xaa is C or S
MEYQKYIKPTKGIIYLISIPSLDQSVXXPS

SEQ ID NO: 61535 - protein, 28 aa, Artificial Sequence
  Cyclic GFR-binding peptide
SRVVMNEYKFKIVNSSDDLYLVSIPELK

SEQ ID NO: 61536 - protein, 32 aa, Artificial Sequence; identical to SEQ ID NO: 16843
  Cyclic GFR-binding peptide
  MOD_RES (2), (2): Xaa is C or S

SEQ ID NO: 61537 - protein, 33 aa, Artificial Sequence
  Cyclic GFR-binding peptide
  MOD_RES (29), (29): Xaa is C or S
VMNEYQKYIVNSSDDIYLVSIPSLKTPAXTPKT

SEQ ID NO: 61538 - protein, 24 aa, Artificial Sequence
  Cyclic GFR-binding peptide
NEYKFKIVNSSDDLYLVSIPELQT

SEQ ID NO: 61539 - protein, 32 aa, Artificial Sequence
  Cyclic GFR-binding peptide
  MOD_RES (29), (30): Xaa is C or S
VMNEYKFKIVNNSSDLYLVSIPELKTPAXXAK

SEQ ID NO: 61540 - protein, 29 aa, Artificial Sequence
  Cyclic GFR-binding peptide
  MOD_RES (1), (1): Xaa is C or S
XSRVVMNEYKFKIVNSSDDLYLVSIPELK

SEQ ID NO: 61541 - protein, 21 aa, Artificial Sequence
  Cyclic GFR-binding peptide
NEYKFKIVNSSDDLYLVSIPE

SEQ ID NO: 61542 - protein, 38 aa, Artificial Sequence; identical to SEQ ID NO: 16851
  Cyclic GFR-binding peptide
  MOD_RES (2), (34), (35): Xaa is C or S

SEQ ID NO: 61543 - protein, 27 aa, Artificial Sequence
  Cyclic GFR-binding peptide
EVVMEEYQKYVVKDYEDIYLMSIPSLE

SEQ ID NO: 61544 - protein, 27 aa, Artificial Sequence
  Cyclic GFR-binding peptide
IMEYKFKIKPTKGILYLISIPELDQSV

SEQ ID NO: 61545 - protein, 29 aa, Artificial Sequence
  Cyclic GFR-binding peptide
  MOD_RES (1), (1): Xaa is C or S
XESVAMGRYKKLYTVVGKDFYLISIANLK

SEQ ID NO: 61546 - protein, 36 aa, Artificial Sequence; identical to SEQ ID NO: 16853
  Cyclic GFR-binding peptide
  MOD_RES (32), (33): Xaa is C or S

SEQ ID NO: 61547 - protein, 34 aa, Artificial Sequence
  Cyclic GFR-binding peptide
  MOD_RES (29), (30): Xaa is C or S
VMDRYKKLVVNNAADFYLISIANLRAPVXXSAPA

SEQ ID NO: 61548 - protein, 29 aa, Artificial Sequence
  Cyclic GFR-binding peptide
  MOD_RES (1), (1): Xaa is C or S
XESVAMGYHYKLYTVVGKDKYLISIPSLK

SEQ ID NO: 61549 - protein, 33 aa, Artificial Sequence; identical to SEQ ID NO: 16856
  Cyclic GFR-binding peptide
  MOD_RES (2), (33): Xaa is C or S

SEQ ID NO: 61550 - protein, 32 aa, Artificial Sequence
  Cyclic GFR-binding peptide
  MOD_RES (26), (27): Xaa is C or S
EYQKYVVKENEDIYLMSIPSLETPVXXAKPIK

SEQ ID NO: 61551 - protein, 41 aa, Artificial Sequence; identical to SEQ ID NO: 16860
  Cyclic GFR-binding peptide
  MOD_RES (2), (4), (36): Xaa is C or S

SEQ ID NO: 61552 - protein, 29 aa, Artificial Sequence
  Cyclic GFR-binding peptide
  MOD_RES (2), (2): Xaa is C or S
GXESVAMGRYKKLYTVVGKDFYLISIANL

SEQ ID NO: 61553 - protein, 31 aa, Artificial Sequence
  Cyclic GFR-binding peptide
  MOD_RES (1), (3): Xaa is C or S
XGXGEVVMEEYKFKVVKDYEDLYLMSIPELE

SEQ ID NO: 61554 - protein, 23 aa, Artificial Sequence
  Cyclic GFR-binding peptide
EYQKYIVNSSDDIYLVSIPSLQT

SEQ ID NO: 61555 - protein, 26 aa, Artificial Sequence
  Cyclic GFR-binding peptide
  MOD_RES (26), (26): Xaa is C or S
EYQKYVKPKRGVIYLISIPSLAQPVX

SEQ ID NO: 61556 - protein, 28 aa, Artificial Sequence
  Cyclic GFR-binding peptide
  MOD_RES (28), (28): Xaa is C or S
MNEYQKYIVNSSDDIYLVSIPSLQTPAX

SEQ ID NO: 61557 - protein, 39 aa, Artificial Sequence; identical to SEQ ID NO: 16866
  Cyclic GFR-binding peptide
  MOD_RES (1), (3), (36), (37): Xaa is C or S

SEQ ID NO: 61558 - protein, 31 aa, Artificial Sequence
  Cyclic GFR-binding peptide
  MOD_RES (26), (27): Xaa is C or S
EYKFKIVNSSDDLYLVSIPELKTPAXXPKPV

SEQ ID NO: 61559 - protein, 26 aa, Artificial Sequence
  Cyclic GFR-binding peptide
NEYQKYIVNNSSDIYLVSIPSLKTPA

SEQ ID NO: 61560 - protein, 28 aa, Artificial Sequence
  Cyclic GFR-binding peptide
  MOD_RES (28), (28): Xaa is C or S
VMEYKFKVKPTRGVLYLISIPELDQPVX

SEQ ID NO: 61561 - protein, 32 aa, Artificial Sequence
  Cyclic GFR-binding peptide
  MOD_RES (2), (4): Xaa is C or S
RXGXGEVVMDEYKFKVVKENEDLYLMSIPELE

SEQ ID NO: 61562 - protein, 30 aa, Artificial Sequence
  Cyclic GFR-binding peptide
  MOD_RES (28), (29): Xaa is C or S
IMEYKFKVKPKRGVLYLISIPELAQPVXXP

SEQ ID NO: 61563 - protein, 30 aa, Artificial Sequence
  Cyclic GFR-binding peptide
  MOD_RES (2), (2): Xaa is C or S
GXGEVVMEEYKFKVVKDYEDLYLMSIPELE

SEQ ID NO: 61564 - protein, 27 aa, Artificial Sequence
  Cyclic GFR-binding peptide
  MOD_RES (26), (27): Xaa is C or S
EYKFKVVKDYEDLYLMSIPELETPVXX

SEQ ID NO: 61565 - protein, 27 aa, Artificial Sequence
  Cyclic GFR-binding peptide
MDEYKFKVVKENEDLYLMSIPELETPV

SEQ ID NO: 61566 - protein, 27 aa, Artificial Sequence
  Cyclic GFR-binding peptide
GEEYQKYTPVGMDDIYLVSIPSLKTPV

SEQ ID NO: 61567 - protein, 34 aa, Artificial Sequence
  Cyclic GFR-binding peptide
  MOD_RES (29), (30): Xaa is C or S
VMEEYKFKVVKDYEDLYLMSIPELETPVXXAKPI

SEQ ID NO: 61568 - protein, 36 aa, Artificial Sequence; identical to SEQ ID NO: 16872
  Cyclic GFR-binding peptide
  MOD_RES (1), (3), (36): Xaa is C or S

SEQ ID NO: 61569 - protein, 29 aa, Artificial Sequence
  Cyclic GFR-binding peptide
  MOD_RES (29), (29): Xaa is C or S
VMDYHYKLVVNNAADKYLISIPSLRAPVX

SEQ ID NO: 61570 - protein, 33 aa, Artificial Sequence
  Cyclic GFR-binding peptide
  MOD_RES (2), (4): Xaa is C or S
RXGXEAVSMGEEYQKYTPVGMDDIYLVSIPSLK

SEQ ID NO: 61571 - protein, 24 aa, Artificial Sequence
  Cyclic GFR-binding peptide
EEYQKYVVKDYEDIYLMSIPSLET

SEQ ID NO: 61572 - protein, 34 aa, Artificial Sequence
  Cyclic GFR-binding peptide
  MOD_RES (28), (29): Xaa is C or S
MGYHYKLYTVVGKDKYLISIPSLKTPVXXAKSAK

SEQ ID NO: 61573 - protein, 36 aa, Artificial Sequence; identical to SEQ ID NO: 16875
  Cyclic GFR-binding peptide
  MOD_RES (31), (32): Xaa is C or S

SEQ ID NO: 61574 - protein, 29 aa, Artificial Sequence
  Cyclic GFR-binding peptide
  MOD_RES (27), (28): Xaa is C or S
GYHYKLYTVVGKDKYLISIPSLKTPVXXA

SEQ ID NO: 61575 - protein, 32 aa, Artificial Sequence
  Cyclic GFR-binding peptide
  MOD_RES (2), (4): Xaa is C or S
RXGXGEVVMDEYQKYVVKENEDIYLMSIPSLE

SEQ ID NO: 61576 - protein, 36 aa, Artificial Sequence
  Cyclic GFR-binding peptide
  MOD_RES (30), (31): Xaa is C or S
RVIMEYQKYVKPKRGVIYLISIPSLAQPVXXPAASA

SEQ ID NO: 61577 - protein, 22 aa, Artificial Sequence
  Cyclic GFR-binding peptide
MEEYKFKVVKDYEDLYLMSIPE

SEQ ID NO: 61578 - protein, 28 aa, Artificial Sequence
  Cyclic GFR-binding peptide
RVVMNEYQKYIVNSSDDIYLVSIPSLQT

SEQ ID NO: 61579 - protein, 36 aa, Artificial Sequence
  Cyclic GFR-binding peptide
  MOD_RES (30), (31): Xaa is C or S
SMGEEYQKYTPVGMDDIYLVSIPSLKTPVXXAKGVK

SEQ ID NO: 61580 - protein, 23 aa, Artificial Sequence
  Cyclic GFR-binding peptide
MDEYKFKVVKENEDLYLMSIPEL

SEQ ID NO: 61581 - protein, 33 aa, Artificial Sequence; identical to SEQ ID NO: 16884
  Cyclic GFR-binding peptide
  MOD_RES (31), (32): Xaa is C or S

SEQ ID NO: 61582 - protein, 32 aa, Artificial Sequence
  Cyclic GFR-binding peptide
  MOD_RES (1), (3): Xaa is C or S
XGXARVVMNEYQKYIVNSSDDIYLVSIPSLQT

SEQ ID NO: 61583 - protein, 36 aa, Artificial Sequence; identical to SEQ ID NO: 16893
  Cyclic GFR-binding peptide
  MOD_RES (1), (3), (36): Xaa is C or S

SEQ ID NO: 61584 - protein, 22 aa, Artificial Sequence
  Cyclic GFR-binding peptide
EEYQKYVVKDYEDIYLMSIPSL

SEQ ID NO: 61585 - protein, 31 aa, Artificial Sequence
  Cyclic GFR-binding peptide
  MOD_RES (27), (28): Xaa is C or S
EEYKFKTPVGMDDLYLVSIPELKTPVXXAKG

SEQ ID NO: 61586 - protein, 31 aa, Artificial Sequence
  Cyclic GFR-binding peptide
  MOD_RES (28), (29): Xaa is C or S
VMEYQKYVKPTRGVIYLISIPSLDQPVXXPS

SEQ ID NO: 61587 - protein, 36 aa, Artificial Sequence; identical to SEQ ID NO: 16900
  Cyclic GFR-binding peptide
  MOD_RES (32), (33): Xaa is C or S

SEQ ID NO: 61588 - protein, 38 aa, Artificial Sequence; identical to SEQ ID NO: 16902
  Cyclic GFR-binding peptide
  MOD_RES (2), (4), (35), (36): Xaa is C or S

SEQ ID NO: 61589 - protein, 30 aa, Artificial Sequence
  Cyclic GFR-binding peptide
  MOD_RES (29), (29): Xaa is C or S
VMNEYKFKIVNSSDDLYLVSIPELKTPAXT

SEQ ID NO: 61590 - protein, 29 aa, Artificial Sequence
  Cyclic GFR-binding peptide
SVAMGRYKKLYTVVGKDFYLISIANLKTP

SEQ ID NO: 61591 - protein, 39 aa, Artificial Sequence; identical to SEQ ID NO: 16904
  Cyclic GFR-binding peptide
  MOD_RES (1), (3), (35): Xaa is C or S

SEQ ID NO: 61592 - protein, 21 aa, Artificial Sequence
  Cyclic GFR-binding peptide
EEYKFKTPVGMDDLYLVSIPE

SEQ ID NO: 61593 - protein, 35 aa, Artificial Sequence; identical to SEQ ID NO: 16908
  Cyclic GFR-binding peptide
  MOD_RES (31), (32): Xaa is C or S

SEQ ID NO: 61594 - protein, 26 aa, Artificial Sequence
  Cyclic GFR-binding peptide
SRVVMNEYQKYIVNSSDDIYLVSIPS

SEQ ID NO: 61595 - protein, 27 aa, Artificial Sequence
  Cyclic GFR-binding peptide
MEEYQKYVVKDYEDIYLMSIPSLETPV

SEQ ID NO: 61596 - protein, 31 aa, Artificial Sequence
  Cyclic GFR-binding peptide
  MOD_RES (2), (2): Xaa is C or S
GXGEVVMDEYKFKVVKENEDLYLMSIPELET

SEQ ID NO: 61597 - protein, 26 aa, Artificial Sequence
  Cyclic GFR-binding peptide
ARVVMNEYQKYIVNSSDDIYLVSIPS

SEQ ID NO: 61598 - protein, 31 aa, Artificial Sequence
  Cyclic GFR-binding peptide
  MOD_RES (1), (3): Xaa is C or S
XKXSKVIMEYKFKIKPTKGILYLISIPELDQ

SEQ ID NO: 61599 - protein, 30 aa, Artificial Sequence
  Cyclic GFR-binding peptide
AEVVMDEYKFKVVNNAADLYLISIPELRAP

SEQ ID NO: 61600 - protein, 29 aa, Artificial Sequence
  Cyclic GFR-binding peptide
  MOD_RES (1), (1): Xaa is C or S
XSRVIMEYKFKVKPKRGVLYLISIPELAQ

SEQ ID NO: 61601 - protein, 27 aa, Artificial Sequence
  Cyclic GFR-binding peptide
VMDYHYKLVVNNAADKYLISIPSLRAP

SEQ ID NO: 61602 - protein, 28 aa, Artificial Sequence
  Cyclic GFR-binding peptide
SRVIMEYKFKVKPKRGVLYLISIPELAQ

SEQ ID NO: 61603 - protein, 30 aa, Artificial Sequence
  Cyclic GFR-binding peptide
  MOD_RES (1), (3): Xaa is C or S
XGXAEVVMDEYKFKVVNNAADLYLISIPEL

SEQ ID NO: 61604 - protein, 29 aa, Artificial Sequence
  Cyclic GFR-binding peptide
  MOD_RES (28), (29): Xaa is C or S
MNEYQKYIVNSSDDIYLVSIPSLKTPAXX

SEQ ID NO: 61605 - protein, 33 aa, Artificial Sequence
  Cyclic GFR-binding peptide
  MOD_RES (2), (4): Xaa is C or S
HXGXSRVVMNEYQKYIVNSSDDIYLVSIPSLKT

SEQ ID NO: 61606 - protein, 31 aa, Artificial Sequence; identical to SEQ ID NO: 16919
  Cyclic GFR-binding peptide
  MOD_RES (31), (31): Xaa is C or S

SEQ ID NO: 61607 - protein, 29 aa, Artificial Sequence
  Cyclic GFR-binding peptide
AAAAAAAAAYHYKLVVNNAADKYLISIPS

SEQ ID NO: 61608 - protein, 30 aa, Artificial Sequence
  Cyclic GFR-binding peptide
  MOD_RES (30), (30): Xaa is C or S
RVIMEYKFKVKPKRGVLYLISIPELAQPVX

SEQ ID NO: 61609 - protein, 33 aa, Artificial Sequence
  Cyclic GFR-binding peptide
  MOD_RES (32), (33): Xaa is C or S
AVSMGEEYKFKTPVGMDDLYLVSIPELKTPVXX

SEQ ID NO: 61610 - protein, 31 aa, Artificial Sequence
  Cyclic GFR-binding peptide
  MOD_RES (30), (31): Xaa is C or S
VVMNEYQKYIVNNSSDIYLVSIPSLKTPAXX

SEQ ID NO: 61611 - protein, 31 aa, Artificial Sequence
  Cyclic GFR-binding peptide
  MOD_RES (1), (1): Xaa is C or S
XEAVSMGEEYKFKTPVGMDDLYLVSIPELKT

SEQ ID NO: 61612 - protein, 24 aa, Artificial Sequence
  Cyclic GFR-binding peptide
EYQKYIVNNSSDIYLVSIPSLKTP

SEQ ID NO: 61613 - protein, 32 aa, Artificial Sequence; identical to SEQ ID NO: 16929
  Cyclic GFR-binding peptide
  MOD_RES (31), (32): Xaa is C or S

SEQ ID NO: 61614 - protein, 37 aa, Artificial Sequence; identical to SEQ ID NO: 16930
  Cyclic GFR-binding peptide
  MOD_RES (1), (33), (34): Xaa is C or S

SEQ ID NO: 61615 - protein, 34 aa, Artificial Sequence; identical to SEQ ID NO: 16931
  Cyclic GFR-binding peptide
  MOD_RES (2), (34): Xaa is C or S

SEQ ID NO: 61616 - protein, 31 aa, Artificial Sequence
  Cyclic GFR-binding peptide
  MOD_RES (2), (4): Xaa is C or S
RXGXGEVVMEEYQKYVVKDYEDIYLMSIPSL

SEQ ID NO: 61617 - protein, 36 aa, Artificial Sequence; identical to SEQ ID NO: 16933
  Cyclic GFR-binding peptide
  MOD_RES (1), (3), (35), (36): Xaa is C or S

SEQ ID NO: 61618 - protein, 32 aa, Artificial Sequence
  Cyclic GFR-binding peptide
  MOD_RES (27), (28): Xaa is C or S
NEYQKYIVNNSSDIYLVSIPSLKTPAXXAKPV

SEQ ID NO: 61619 - protein, 28 aa, Artificial Sequence
  Cyclic GFR-binding peptide
  MOD_RES (2), (2): Xaa is C or S
GXAEVVMDEYKFKVVNNAADLYLISIPE

SEQ ID NO: 61620 - protein, 36 aa, Artificial Sequence; identical to SEQ ID NO: 16934
  Cyclic GFR-binding peptide
  MOD_RES (1), (33), (34): Xaa is C or S

SEQ ID NO: 61621 - protein, 42 aa, Artificial Sequence; identical to SEQ ID NO: 16935
  Cyclic GFR-binding peptide
  MOD_RES (2), (4), (36), (37): Xaa is C or S

SEQ ID NO: 61622 - protein, 32 aa, Artificial Sequence
  Cyclic GFR-binding peptide
  MOD_RES (26), (27): Xaa is C or S
RYKKLVVNNAADFYLISIANLRAPVXXSAPAA

SEQ ID NO: 61623 - protein, 36 aa, Artificial Sequence; identical to SEQ ID NO: 16936
  Cyclic GFR-binding peptide
  MOD_RES (1), (3), (35), (36): Xaa is C or S

SEQ ID NO: 61624 - protein, 29 aa, Artificial Sequence
  Cyclic GFR-binding peptide
  MOD_RES (1), (1): Xaa is C or S
XSRVVMNEYQKYIVNSSDDIYLVSIPSLK

SEQ ID NO: 61625 - protein, 41 aa, Artificial Sequence; identical to SEQ ID NO: 16938
  Cyclic GFR-binding peptide
  MOD_RES (1), (3), (35), (36): Xaa is C or S

SEQ ID NO: 61626 - protein, 31 aa, Artificial Sequence
  Cyclic GFR-binding peptide
  MOD_RES (2), (2): Xaa is C or S
GXESVAMGYHYKLYTVVGKDKYLISIPSLKT

SEQ ID NO: 61627 - protein, 29 aa, Artificial Sequence
  Cyclic GFR-binding peptide
  MOD_RES (1), (3): Xaa is C or S
XGXSRVVMNEYQKYIVNSSDDIYLVSIPS

SEQ ID NO: 61628 - protein, 26 aa, Artificial Sequence
  Cyclic GFR-binding peptide
  MOD_RES (1), (1): Xaa is C or S
XSKVVMEYQKYVKPTRGVIYLISIPS

SEQ ID NO: 61629 - protein, 36 aa, Artificial Sequence; identical to SEQ ID NO: 16940
  Cyclic GFR-binding peptide
  MOD_RES (1), (33), (34): Xaa is C or S

SEQ ID NO: 61630 - protein, 28 aa, Artificial Sequence
  Cyclic GFR-binding peptide
  MOD_RES (1), (1): Xaa is C or S
XAEVVMDEYKFKVVNNAADLYLISIPEL

SEQ ID NO: 61631 - protein, 33 aa, Artificial Sequence; identical to SEQ ID NO: 16941
  Cyclic GFR-binding peptide
  MOD_RES (32), (33): Xaa is C or S

SEQ ID NO: 61632 - protein, 24 aa, Artificial Sequence
  Cyclic GFR-binding peptide
EYQKYVKPKRGVIYLISIPSLAQP

SEQ ID NO: 61633 - protein, 33 aa, Artificial Sequence
  Cyclic GFR-binding peptide
  MOD_RES (1), (3): Xaa is C or S
XGXAKVVMNEYQKYIVNNSSDIYLVSIPSLKTP

SEQ ID NO: 61634 - protein, 34 aa, Artificial Sequence
  Cyclic GFR-binding peptide
  MOD_RES (30), (31): Xaa is C or S
KVIMEYQKYIKPTKGIIYLISIPSLDQSVXXPSA

SEQ ID NO: 61635 - protein, 24 aa, Artificial Sequence
  Cyclic GFR-binding peptide
VVMDRYKKLVVNNAADFYLISIAN

SEQ ID NO: 61636 - protein, 31 aa, Artificial Sequence
  Cyclic GFR-binding peptide
  MOD_RES (2), (2): Xaa is C or S
GXESVAMGEYQKYYTVVGKDIYLISIPSLKT

SEQ ID NO: 61637 - protein, 34 aa, Artificial Sequence; identical to SEQ ID NO: 16949
  Cyclic GFR-binding peptide
  MOD_RES (1), (3): Xaa is C or S

SEQ ID NO: 61638 - protein, 24 aa, Artificial Sequence
  Cyclic GFR-binding peptide
EYKFKVVKDYEDLYLMSIPELETP

SEQ ID NO: 61639 - protein, 37 aa, Artificial Sequence; identical to SEQ ID NO: 16952
  Cyclic GFR-binding peptide
  MOD_RES (2), (4), (35), (36): Xaa is C or S

SEQ ID NO: 61640 - protein, 36 aa, Artificial Sequence; identical to SEQ ID NO: 16953
  Cyclic GFR-binding peptide
  MOD_RES (32), (33): Xaa is C or S

SEQ ID NO: 61641 - protein, 32 aa, Artificial Sequence; identical to SEQ ID NO: 16957
  Cyclic GFR-binding peptide
  MOD_RES (1), (32): Xaa is C or S

SEQ ID NO: 61642 - protein, 37 aa, Artificial Sequence; identical to SEQ ID NO: 16959
  Cyclic GFR-binding peptide
  MOD_RES (2), (34), (35): Xaa is C or S

SEQ ID NO: 61643 - protein, 33 aa, Artificial Sequence; identical to SEQ ID NO: 16960
  Cyclic GFR-binding peptide
  MOD_RES (2), (33): Xaa is C or S

SEQ ID NO: 61644 - protein, 31 aa, Artificial Sequence
  Cyclic GFR-binding peptide
  MOD_RES (2), (4): Xaa is C or S
RXGXGEVVMEEYKFKVVKDYEDLYLMSIPEL

SEQ ID NO: 61645 - protein, 30 aa, Artificial Sequence
  Cyclic GFR-binding peptide
  MOD_RES (27), (28): Xaa is C or S
DEYKFKVVKENEDLYLMSIPELETPVXXAK

SEQ ID NO: 61646 - protein, 22 aa, Artificial Sequence
  Cyclic GFR-binding peptide
EYKFKVVKENEDLYLMSIPELE

SEQ ID NO: 61647 - protein, 25 aa, Artificial Sequence
  Cyclic GFR-binding peptide
MEYKFKIKPTKGILYLISIPELDQS

SEQ ID NO: 61648 - protein, 27 aa, Artificial Sequence
  Cyclic GFR-binding peptide
AVSMGEEYQKYTPVGMDDIYLVSIPSL

SEQ ID NO: 61649 - protein, 28 aa, Artificial Sequence
  Cyclic GFR-binding peptide
  MOD_RES (28), (28): Xaa is C or S
MDYHYKLVVNNAADKYLISIPSLRAPVX

SEQ ID NO: 61650 - protein, 30 aa, Artificial Sequence; identical to SEQ ID NO: 1934
  Cyclic GFR-binding peptide

SEQ ID NO: 61651 - protein, 32 aa, Artificial Sequence
  Cyclic GFR-binding peptide
  MOD_RES (30), (31): Xaa is C or S
KVVMEYQKYVKPTRGVIYLISIPSLDQPVXXP

SEQ ID NO: 61652 - protein, 27 aa, Artificial Sequence
  Cyclic GFR-binding peptide
VMNEYKFKIVNSSDDLYLVSIPELQTP

SEQ ID NO: 61653 - protein, 33 aa, Artificial Sequence
  Cyclic GFR-binding peptide
  MOD_RES (29), (30): Xaa is C or S
VIMEYQKYVKPKRGVIYLISIPSLAQPVXXPAA

SEQ ID NO: 61654 - protein, 31 aa, Artificial Sequence
  Cyclic GFR-binding peptide
  MOD_RES (1), (3): Xaa is C or S
XKXSRVIMEYKFKVKPKRGVLYLISIPELAQ

SEQ ID NO: 61655 - protein, 35 aa, Artificial Sequence; identical to SEQ ID NO: 16965
  Cyclic GFR-binding peptide
  MOD_RES (31), (32): Xaa is C or S

SEQ ID NO: 61656 - protein, 32 aa, Artificial Sequence
  Cyclic GFR-binding peptide
  MOD_RES (29), (30): Xaa is C or S
VIMEYKFKVKPKRGVLYLISIPELAQPVXXPA

SEQ ID NO: 61657 - protein, 24 aa, Artificial Sequence
  Cyclic GFR-binding peptide
EEYKFKVVKDYEDLYLMSIPELET

SEQ ID NO: 61658 - protein, 29 aa, Artificial Sequence
  Cyclic GFR-binding peptide
SVAMGYHYKLYTVVGKDKYLISIPSLKTP

SEQ ID NO: 61659 - protein, 25 aa, Artificial Sequence
  Cyclic GFR-binding peptide
EVVMEEYQKYVVKDYEDIYLMSIPS

SEQ ID NO: 61660 - protein, 28 aa, Artificial Sequence
  Cyclic GFR-binding peptide
  MOD_RES (1), (1): Xaa is C or S
XSRVIMEYQKYVKPKRGVIYLISIPSLA

SEQ ID NO: 61661 - protein, 30 aa, Artificial Sequence
  Cyclic GFR-binding peptide
  MOD_RES (28), (29): Xaa is C or S
MDRYKKLVVNNAADFYLISIANLRAPVXXS

SEQ ID NO: 61662 - protein, 29 aa, Artificial Sequence
  Cyclic GFR-binding peptide
  MOD_RES (28), (28): Xaa is C or S
MNEYQKYIVNSSDDIYLVSIPSLKTPAXT

SEQ ID NO: 61663 - protein, 30 aa, Artificial Sequence
  Cyclic GFR-binding peptide
  MOD_RES (29), (30): Xaa is C or S
MGEEYKFKTPVGMDDLYLVSIPELKTPVXX

SEQ ID NO: 61664 - protein, 35 aa, Artificial Sequence; identical to SEQ ID NO: 16970
  Cyclic GFR-binding peptide
  MOD_RES (1), (3), (35): Xaa is C or S

SEQ ID NO: 61665 - protein, 30 aa, Artificial Sequence
  Cyclic GFR-binding peptide
  MOD_RES (26), (27): Xaa is C or S
YHYKLYTVVGKDKYLISIPSLKTPVXXAKS

SEQ ID NO: 61666 - protein, 34 aa, Artificial Sequence; identical to SEQ ID NO: 16971
  Cyclic GFR-binding peptide
  MOD_RES (1), (33), (34): Xaa is C or S

SEQ ID NO: 61667 - protein, 31 aa, Artificial Sequence
  Cyclic GFR-binding peptide
  MOD_RES (29), (30): Xaa is C or S
VVMEYKFKVKPTRGVLYLISIPELDQPVXXP

SEQ ID NO: 61668 - protein, 30 aa, Artificial Sequence
  Cyclic GFR-binding peptide
  MOD_RES (1), (3): Xaa is C or S
XKXSKVVMEYKFKVKPTRGVLYLISIPELD

SEQ ID NO: 61669 - protein, 34 aa, Artificial Sequence
  Cyclic GFR-binding peptide
  MOD_RES (30), (31): Xaa is C or S
RVIMEYQKYVKPKRGVIYLISIPSLAQPVXXPAA

SEQ ID NO: 61670 - protein, 34 aa, Artificial Sequence
  Cyclic GFR-binding peptide
  MOD_RES (2), (4): Xaa is C or S
RXGXAEVVMDEYKFKVVNNAADLYLISIPELRAP

SEQ ID NO: 61671 - protein, 34 aa, Artificial Sequence
  Cyclic GFR-binding peptide
  MOD_RES (2), (4): Xaa is C or S
HXGXARVVMNEYQKYIVNSSDDIYLVSIPSLQTP

SEQ ID NO: 61672 - protein, 29 aa, Artificial Sequence
  Cyclic GFR-binding peptide
  MOD_RES (28), (28): Xaa is C or S
MNEYKFKIVNSSDDLYLVSIPELKTPAXT

SEQ ID NO: 61673 - protein, 38 aa, Artificial Sequence; identical to SEQ ID NO: 16986
  Cyclic GFR-binding peptide
  MOD_RES (32), (33): Xaa is C or S

SEQ ID NO: 61674 - protein, 26 aa, Artificial Sequence
  Cyclic GFR-binding peptide
AEVVMDYHYKLVVNNAADKYLISIPS

SEQ ID NO: 61675 - protein, 27 aa, Artificial Sequence
  Cyclic GFR-binding peptide
  MOD_RES (27), (27): Xaa is C or S
GYHYKLYTVVGKDKYLISIPSLKTPVX

SEQ ID NO: 61676 - protein, 41 aa, Artificial Sequence; identical to SEQ ID NO: 16988
  Cyclic GFR-binding peptide
  MOD_RES (1), (3), (35), (36): Xaa is C or S

SEQ ID NO: 61677 - protein, 31 aa, Artificial Sequence
  Cyclic GFR-binding peptide
  MOD_RES (1), (1): Xaa is C or S
XGEVVMEEYKFKVVKDYEDLYLMSIPELETP

SEQ ID NO: 61678 - protein, 34 aa, Artificial Sequence
  Cyclic GFR-binding peptide
  MOD_RES (32), (33): Xaa is C or S
AVSMGEEYKFKTPVGMDDLYLVSIPELKTPVXXA

SEQ ID NO: 61679 - protein, 39 aa, Artificial Sequence; identical to SEQ ID NO: 16990
  Cyclic GFR-binding peptide
  MOD_RES (1), (33), (34): Xaa is C or S

SEQ ID NO: 61680 - protein, 42 aa, Artificial Sequence; identical to SEQ ID NO: 16991
  Cyclic GFR-binding peptide
  MOD_RES (2), (4), (36), (37): Xaa is C or S

SEQ ID NO: 61681 - protein, 34 aa, Artificial Sequence
  Cyclic GFR-binding peptide
  MOD_RES (2), (4): Xaa is C or S
RXGXGEVVMDEYQKYVVKENEDIYLMSIPSLETP

SEQ ID NO: 61682 - protein, 35 aa, Artificial Sequence; identical to SEQ ID NO: 16996
  Cyclic GFR-binding peptide
  MOD_RES (31), (32): Xaa is C or S

SEQ ID NO: 61683 - protein, 31 aa, Artificial Sequence
  Cyclic GFR-binding peptide
  MOD_RES (26), (27): Xaa is C or S
EYQKYIVNNSSDIYLVSIPSLKTPAXXAKPV

SEQ ID NO: 61684 - protein, 30 aa, Artificial Sequence
  Cyclic GFR-binding peptide
GEVVMDEYKFKVVKENEDLYLMSIPELETP

SEQ ID NO: 61685 - protein, 33 aa, Artificial Sequence; identical to SEQ ID NO: 17000
  Cyclic GFR-binding peptide
  MOD_RES (2), (2): Xaa is C or S

SEQ ID NO: 61686 - protein, 33 aa, Artificial Sequence; identical to SEQ ID NO: 17001
  Cyclic GFR-binding peptide
  MOD_RES (31), (32): Xaa is C or S

SEQ ID NO: 61687 - protein, 34 aa, Artificial Sequence; identical to SEQ ID NO: 17002
  Cyclic GFR-binding peptide
  MOD_RES (31), (32): Xaa is C or S

SEQ ID NO: 61688 - protein, 28 aa, Artificial Sequence
  Cyclic GFR-binding peptide
VVMEEYQKYVVKDYEDIYLMSIPSLETP

SEQ ID NO: 61689 - protein, 26 aa, Artificial Sequence
  Cyclic GFR-binding peptide
EVVMEEYQKYVVKDYEDIYLMSIPSL

SEQ ID NO: 61690 - protein, 34 aa, Artificial Sequence
  Cyclic GFR-binding peptide
  MOD_RES (28), (29): Xaa is C or S
MNEYQKYIVNSSDDIYLVSIPSLKTPAXXPKPVY

SEQ ID NO: 61691 - protein, 33 aa, Artificial Sequence
  Cyclic GFR-binding peptide
  MOD_RES (29), (30): Xaa is C or S
VMNEYQKYIVNNSSDIYLVSIPSLKTPAXXAKP

SEQ ID NO: 61692 - protein, 25 aa, Artificial Sequence
  Cyclic GFR-binding peptide
VVMDRYKKLVVNNAADFYLISIANL

SEQ ID NO: 61693 - protein, 41 aa, Artificial Sequence; identical to SEQ ID NO: 17006
  Cyclic GFR-binding peptide
  MOD_RES (2), (4), (35), (36): Xaa is C or S

SEQ ID NO: 61694 - protein, 27 aa, Artificial Sequence
  Cyclic GFR-binding peptide
  MOD_RES (26), (27): Xaa is C or S
EYKFKIVNSSDDLYLVSIPELKTPAXX

SEQ ID NO: 61695 - protein, 33 aa, Artificial Sequence
  Cyclic GFR-binding peptide
  MOD_RES (28), (29): Xaa is C or S
MNEYKFKIVNNSSDLYLVSIPELKTPAXXAKPV

SEQ ID NO: 61696 - protein, 29 aa, Artificial Sequence
  Cyclic GFR-binding peptide
  MOD_RES (2), (2): Xaa is C or S
GXAKVVMNEYQKYIVNNSSDIYLVSIPSL

SEQ ID NO: 61697 - protein, 31 aa, Artificial Sequence
  Cyclic GFR-binding peptide
  MOD_RES (1), (3): Xaa is C or S
XGXGEVVMEEYQKYVVKDYEDIYLMSIPSLE

SEQ ID NO: 61698 - protein, 38 aa, Artificial Sequence; identical to SEQ ID NO: 17010
  Cyclic GFR-binding peptide
  MOD_RES (2), (4), (36), (37): Xaa is C or S

SEQ ID NO: 61699 - protein, 32 aa, Artificial Sequence; identical to SEQ ID NO: 17011
  Cyclic GFR-binding peptide
  MOD_RES (31), (32): Xaa is C or S

SEQ ID NO: 61700 - protein, 21 aa, Artificial Sequence
  Cyclic GFR-binding peptide
NEYQKYIVNNSSDIYLVSIPS

SEQ ID NO: 61701 - protein, 30 aa, Artificial Sequence; identical to SEQ ID NO: 1996
  Cyclic GFR-binding peptide

SEQ ID NO: 61702 - protein, 37 aa, Artificial Sequence; identical to SEQ ID NO: 17016
  Cyclic GFR-binding peptide
  MOD_RES (1), (33), (34): Xaa is C or S

SEQ ID NO: 61703 - protein, 26 aa, Artificial Sequence
  Cyclic GFR-binding peptide
NEYKFKIVNNSSDLYLVSIPELKTPA

SEQ ID NO: 61704 - protein, 36 aa, Artificial Sequence
  Cyclic GFR-binding peptide
  MOD_RES (30), (31): Xaa is C or S
VAMGEYQKYYTVVGKDIYLISIPSLKTPVXXAKSAK

SEQ ID NO: 61705 - protein, 36 aa, Artificial Sequence; identical to SEQ ID NO: 17023
  Cyclic GFR-binding peptide
  MOD_RES (1), (33), (34): Xaa is C or S

SEQ ID NO: 61706 - protein, 26 aa, Artificial Sequence
  Cyclic GFR-binding peptide
KVIMEYQKYIKPTKGIIYLISIPSLD

SEQ ID NO: 61707 - protein, 30 aa, Artificial Sequence
  Cyclic GFR-binding peptide
  MOD_RES (2), (4): Xaa is C or S
SXKXSRVIMEYKFKVKPKRGVLYLISIPEL

SEQ ID NO: 61708 - protein, 30 aa, Artificial Sequence
  Cyclic GFR-binding peptide
  MOD_RES (28), (29): Xaa is C or S
MNEYQKYIVNSSDDIYLVSIPSLQTPAXXP

SEQ ID NO: 61709 - protein, 32 aa, Artificial Sequence
  Cyclic GFR-binding peptide
  MOD_RES (28), (28): Xaa is C or S
MNEYKFKIVNSSDDLYLVSIPELKTPAXTPKT

SEQ ID NO: 61710 - protein, 32 aa, Artificial Sequence
  Cyclic GFR-binding peptide
  MOD_RES (1), (3): Xaa is C or S
XGXAKVVMNEYKFKIVNNSSDLYLVSIPELKT

SEQ ID NO: 61711 - protein, 31 aa, Artificial Sequence; identical to SEQ ID NO: 17026
  Cyclic GFR-binding peptide
  MOD_RES (31), (31): Xaa is C or S

SEQ ID NO: 61712 - protein, 25 aa, Artificial Sequence
  Cyclic GFR-binding peptide
NEYQKYIVNSSDDIYLVSIPSLQTP

SEQ ID NO: 61713 - protein, 22 aa, Artificial Sequence
  Cyclic GFR-binding peptide
MEYKFKVKPTRGVLYLISIPEL

SEQ ID NO: 61714 - protein, 33 aa, Artificial Sequence
  Cyclic GFR-binding peptide
  MOD_RES (27), (28): Xaa is C or S
DEYQKYVVKENEDIYLMSIPSLETPVXXAKPIK

SEQ ID NO: 61715 - protein, 29 aa, Artificial Sequence
  Cyclic GFR-binding peptide
  MOD_RES (26), (27): Xaa is C or S
EYQKYIVNSSDDIYLVSIPSLKTPAXXPK

SEQ ID NO: 61716 - protein, 36 aa, Artificial Sequence; identical to SEQ ID NO: 17031
  Cyclic GFR-binding peptide
  MOD_RES (2), (34), (35): Xaa is C or S

SEQ ID NO: 61717 - protein, 32 aa, Artificial Sequence
  Cyclic GFR-binding peptide
  MOD_RES (1), (1): Xaa is C or S
XEAVSMGEEYQKYTPVGMDDIYLVSIPSLKTP

SEQ ID NO: 61718 - protein, 27 aa, Artificial Sequence
  Cyclic GFR-binding peptide
AKVVMNEYKFKIVNNSSDLYLVSIPEL

SEQ ID NO: 61719 - protein, 35 aa, Artificial Sequence
  Cyclic GFR-binding peptide
  MOD_RES (31), (32): Xaa is C or S
VSMGEEYKFKTPVGMDDLYLVSIPELKTPVXXAKG

SEQ ID NO: 61720 - protein, 24 aa, Artificial Sequence
  Cyclic GFR-binding peptide
IMEYQKYVKPKRGVIYLISIPSLA

SEQ ID NO: 61721 - protein, 33 aa, Artificial Sequence
  Cyclic GFR-binding peptide
  MOD_RES (1), (3): Xaa is C or S
XGXGEVVMDEYKFKVVKENEDLYLMSIPELETP

SEQ ID NO: 61722 - protein, 29 aa, Artificial Sequence
  Cyclic GFR-binding peptide
  MOD_RES (27), (28): Xaa is C or S
NEYKFKIVNNSSDLYLVSIPELKTPAXXA

SEQ ID NO: 61723 - protein, 22 aa, Artificial Sequence
  Cyclic GFR-binding peptide
EYKFKIVNNSSDLYLVSIPELK

SEQ ID NO: 61724 - protein, 24 aa, Artificial Sequence
  Cyclic GFR-binding peptide
IMEYKFKVKPKRGVLYLISIPELA

SEQ ID NO: 61725 - protein, 40 aa, Artificial Sequence; identical to SEQ ID NO: 17047
  Cyclic GFR-binding peptide
  MOD_RES (1), (3), (34), (35): Xaa is C or S

SEQ ID NO: 61726 - protein, 31 aa, Artificial Sequence
  Cyclic GFR-binding peptide
  MOD_RES (27), (28): Xaa is C or S
NEYQKYIVNSSDDIYLVSIPSLQTPAXXPKP

SEQ ID NO: 61727 - protein, 34 aa, Artificial Sequence
  Cyclic GFR-binding peptide
  MOD_RES (2), (4): Xaa is C or S
RXGXESVAMGYHYKLYTVVGKDKYLISIPSLKTP

SEQ ID NO: 61728 - protein, 30 aa, Artificial Sequence; identical to SEQ ID NO: 17050
  Cyclic GFR-binding peptide

SEQ ID NO: 61729 - protein, 30 aa, Artificial Sequence
  Cyclic GFR-binding peptide
  MOD_RES (29), (30): Xaa is C or S
VIMEYKFKIKPTKGILYLISIPELDQSVXX

SEQ ID NO: 61730 - protein, 30 aa, Artificial Sequence
  Cyclic GFR-binding peptide
  MOD_RES (28), (29): Xaa is C or S
MNEYKFKIVNSSDDLYLVSIPELQTPAXXP

SEQ ID NO: 61731 - protein, 27 aa, Artificial Sequence
  Cyclic GFR-binding peptide
VVMDEYKFKVVNNAADLYLISIPELRA

SEQ ID NO: 61732 - protein, 36 aa, Artificial Sequence; identical to SEQ ID NO: 17052
  Cyclic GFR-binding peptide
  MOD_RES (1), (3), (35), (36): Xaa is C or S

SEQ ID NO: 61733 - protein, 38 aa, Artificial Sequence; identical to SEQ ID NO: 17054
  Cyclic GFR-binding peptide
  MOD_RES (1), (3), (35), (36): Xaa is C or S

SEQ ID NO: 61734 - protein, 25 aa, Artificial Sequence
  Cyclic GFR-binding peptide
EEYKFKTPVGMDDLYLVSIPELKTP

SEQ ID NO: 61735 - protein, 29 aa, Artificial Sequence
  Cyclic GFR-binding peptide
  MOD_RES (29), (29): Xaa is C or S
VMDEYKFKVVNNAADLYLISIPELRAPVX

SEQ ID NO: 61736 - protein, 25 aa, Artificial Sequence
  Cyclic GFR-binding peptide
MEYQKYVKPKRGVIYLISIPSLAQP

SEQ ID NO: 61737 - protein, 28 aa, Artificial Sequence
  Cyclic GFR-binding peptide
  MOD_RES (1), (3): Xaa is C or S
XKXSKVVMEYQKYVKPTRGVIYLISIPS

SEQ ID NO: 61738 - protein, 23 aa, Artificial Sequence
  Cyclic GFR-binding peptide
MDYHYKLVVNNAADKYLISIPSL

SEQ ID NO: 61739 - protein, 29 aa, Artificial Sequence
  Cyclic GFR-binding peptide
  MOD_RES (1), (1): Xaa is C or S
XSKVIMEYKFKIKPTKGILYLISIPELDQ

SEQ ID NO: 61740 - protein, 34 aa, Artificial Sequence; identical to SEQ ID NO: 17062
  Cyclic GFR-binding peptide
  MOD_RES (32), (33): Xaa is C or S

SEQ ID NO: 61741 - protein, 35 aa, Artificial Sequence; identical to SEQ ID NO: 17064
  Cyclic GFR-binding peptide
  MOD_RES (2), (33), (34): Xaa is C or S

SEQ ID NO: 61742 - protein, 25 aa, Artificial Sequence
  Cyclic GFR-binding peptide
VMDEYKFKVVNNAADLYLISIPELR

SEQ ID NO: 61743 - protein, 41 aa, Artificial Sequence; identical to SEQ ID NO: 17067
  Cyclic GFR-binding peptide
  MOD_RES (2), (4), (36), (37): Xaa is C or S

SEQ ID NO: 61744 - protein, 31 aa, Artificial Sequence; identical to SEQ ID NO: 17069
  Cyclic GFR-binding peptide
  MOD_RES (31), (31): Xaa is C or S

SEQ ID NO: 61745 - protein, 23 aa, Artificial Sequence
  Cyclic GFR-binding peptide
VMNEYKFKIVNNSSDLYLVSIPE

SEQ ID NO: 61746 - protein, 32 aa, Artificial Sequence
  Cyclic GFR-binding peptide
  MOD_RES (31), (32): Xaa is C or S
VSMGEEYKFKTPVGMDDLYLVSIPELKTPVXX

SEQ ID NO: 61747 - protein, 24 aa, Artificial Sequence
  Cyclic GFR-binding peptide
MNEYKFKIVNSSDDLYLVSIPELK

SEQ ID NO: 61748 - protein, 33 aa, Artificial Sequence
  Cyclic GFR-binding peptide
  MOD_RES (28), (29): Xaa is C or S
IMEYKFKVKPKRGVLYLISIPELAQPVXXPAAS

SEQ ID NO: 61749 - protein, 34 aa, Artificial Sequence; identical to SEQ ID NO: 17077
  Cyclic GFR-binding peptide
  MOD_RES (31), (32): Xaa is C or S

SEQ ID NO: 61750 - protein, 38 aa, Artificial Sequence; identical to SEQ ID NO: 17078
  Cyclic GFR-binding peptide
  MOD_RES (2), (4), (35), (36): Xaa is C or S

SEQ ID NO: 61751 - protein, 35 aa, Artificial Sequence; identical to SEQ ID NO: 17080
  Cyclic GFR-binding peptide
  MOD_RES (2), (35): Xaa is C or S

SEQ ID NO: 61752 - protein, 43 aa, Artificial Sequence; identical to SEQ ID NO: 17082
  Cyclic GFR-binding peptide
  MOD_RES (2), (4), (37), (38): Xaa is C or S

SEQ ID NO: 61753 - protein, 32 aa, Artificial Sequence
  Cyclic GFR-binding peptide
  MOD_RES (30), (31): Xaa is C or S
SMGEEYKFKTPVGMDDLYLVSIPELKTPVXXA

SEQ ID NO: 61754 - protein, 40 aa, Artificial Sequence; identical to SEQ ID NO: 17084
  Cyclic GFR-binding peptide
  MOD_RES (2), (34), (35): Xaa is C or S

SEQ ID NO: 61755 - protein, 26 aa, Artificial Sequence
  Cyclic GFR-binding peptide
  MOD_RES (26), (26): Xaa is C or S
EYKFKTPVGMDDLYLVSIPELKTPVX

SEQ ID NO: 61756 - protein, 26 aa, Artificial Sequence
  Cyclic GFR-binding peptide
  MOD_RES (26), (26): Xaa is C or S
EYKFKVKPTRGVLYLISIPELDQPVX

SEQ ID NO: 61757 - protein, 32 aa, Artificial Sequence
  Cyclic GFR-binding peptide
  MOD_RES (2), (4): Xaa is C or S
RXGXGEVVMEEYKFKVVKDYEDLYLMSIPELE

SEQ ID NO: 61758 - protein, 29 aa, Artificial Sequence
  Cyclic GFR-binding peptide
  MOD_RES (29), (29): Xaa is C or S
VIMEYQKYVKPKRGVIYLISIPSLAQPVX

SEQ ID NO: 61759 - protein, 34 aa, Artificial Sequence
  Cyclic GFR-binding peptide
  MOD_RES (28), (29): Xaa is C or S
MNEYKFKIVNSSDDLYLVSIPELKTPAXXPKPVY

SEQ ID NO: 61760 - protein, 40 aa, Artificial Sequence; identical to SEQ ID NO: 17094
  Cyclic GFR-binding peptide
  MOD_RES (1), (3), (35), (36): Xaa is C or S

SEQ ID NO: 61761 - protein, 32 aa, Artificial Sequence
  Cyclic GFR-binding peptide
  MOD_RES (27), (28): Xaa is C or S
GYHYKLYTVVGKDKYLISIPSLKTPVXXAKSA

SEQ ID NO: 61762 - protein, 30 aa, Artificial Sequence
  Cyclic GFR-binding peptide
  MOD_RES (28), (29): Xaa is C or S
IMEYQKYIKPTKGIIYLISIPSLDQSVXXP

SEQ ID NO: 61763 - protein, 34 aa, Artificial Sequence
  Cyclic GFR-binding peptide
  MOD_RES (29), (30): Xaa is C or S
MGEEYKFKTPVGMDDLYLVSIPELKTPVXXAKGV

SEQ ID NO: 61764 - protein, 31 aa, Artificial Sequence
  Cyclic GFR-binding peptide
  MOD_RES (27), (28): Xaa is C or S
EEYQKYVVKDYEDIYLMSIPSLETPVXXAKP

SEQ ID NO: 61765 - protein, 33 aa, Artificial Sequence
  Cyclic GFR-binding peptide
  MOD_RES (28), (29): Xaa is C or S
MNEYQKYIVNNSSDIYLVSIPSLKTPAXXAKPV

SEQ ID NO: 61766 - protein, 28 aa, Artificial Sequence
  Cyclic GFR-binding peptide
AEVVMDRYKKLVVNNAADFYLISIANLR

SEQ ID NO: 61767 - protein, 28 aa, Artificial Sequence
  Cyclic GFR-binding peptide
  MOD_RES (26), (27): Xaa is C or S
EYQKYVKPTRGVIYLISIPSLDQPVXXP

SEQ ID NO: 61768 - protein, 29 aa, Artificial Sequence
  Cyclic GFR-binding peptide
  MOD_RES (26), (27): Xaa is C or S
EYKFKIKPTKGILYLISIPELDQSVXXPS

SEQ ID NO: 61769 - protein, 35 aa, Artificial Sequence; identical to SEQ ID NO: 17105
  Cyclic GFR-binding peptide
  MOD_RES (31), (32): Xaa is C or S

SEQ ID NO: 61770 - protein, 26 aa, Artificial Sequence
  Cyclic GFR-binding peptide
GEVVMDEYKFKVVKENEDLYLMSIPE

SEQ ID NO: 61771 - protein, 31 aa, Artificial Sequence; identical to SEQ ID NO: 17107
  Cyclic GFR-binding peptide
  MOD_RES (31), (31): Xaa is C or S

SEQ ID NO: 61772 - protein, 34 aa, Artificial Sequence; identical to SEQ ID NO: 17109
  Cyclic GFR-binding peptide
  MOD_RES (31), (31): Xaa is C or S

SEQ ID NO: 61773 - protein, 33 aa, Artificial Sequence; identical to SEQ ID NO: 17111
  Cyclic GFR-binding peptide
  MOD_RES (32), (33): Xaa is C or S

SEQ ID NO: 61774 - protein, 37 aa, Artificial Sequence; identical to SEQ ID NO: 17112
  Cyclic GFR-binding peptide
  MOD_RES (32), (33): Xaa is C or S

SEQ ID NO: 61775 - protein, 29 aa, Artificial Sequence
  Cyclic GFR-binding peptide
  MOD_RES (2), (2): Xaa is C or S
GXGEVVMEEYQKYVVKDYEDIYLMSIPSL

SEQ ID NO: 61776 - protein, 30 aa, Artificial Sequence
  Cyclic GFR-binding peptide
  MOD_RES (2), (4): Xaa is C or S
RXGXAEVVMDRYKKLVVNNAADFYLISIAN

SEQ ID NO: 61777 - protein, 37 aa, Artificial Sequence; identical to SEQ ID NO: 17113
  Cyclic GFR-binding peptide
  MOD_RES (2), (4), (36), (37): Xaa is C or S

SEQ ID NO: 61778 - protein, 38 aa, Artificial Sequence; identical to SEQ ID NO: 17115
  Cyclic GFR-binding peptide
  MOD_RES (32), (33): Xaa is C or S

SEQ ID NO: 61779 - protein, 41 aa, Artificial Sequence; identical to SEQ ID NO: 17118
  Cyclic GFR-binding peptide
  MOD_RES (2), (4), (36): Xaa is C or S

SEQ ID NO: 61780 - protein, 29 aa, Artificial Sequence
  Cyclic GFR-binding peptide
  MOD_RES (1), (3): Xaa is C or S
XGXAEVVMDRYKKLVVNNAADFYLISIAN

SEQ ID NO: 61781 - protein, 31 aa, Artificial Sequence
  Cyclic GFR-binding peptide
  MOD_RES (26), (27): Xaa is C or S
EYQKYIVNSSDDIYLVSIPSLQTPAXXPKPV

SEQ ID NO: 61782 - protein, 30 aa, Artificial Sequence
  Cyclic GFR-binding peptide
  MOD_RES (29), (30): Xaa is C or S
VMNEYQKYIVNSSDDIYLVSIPSLKTPAXX

SEQ ID NO: 61783 - protein, 20 aa, Artificial Sequence
  Cyclic GFR-binding peptide
EYQKYIVNNSSDIYLVSIPS

SEQ ID NO: 61784 - protein, 34 aa, Artificial Sequence; identical to SEQ ID NO: 17122
  Cyclic GFR-binding peptide
  MOD_RES (1), (3): Xaa is C or S

SEQ ID NO: 61785 - protein, 31 aa, Artificial Sequence
  Cyclic GFR-binding peptide
  MOD_RES (2), (4): Xaa is C or S
RXGXEAVSMGEEYKFKTPVGMDDLYLVSIPE

SEQ ID NO: 61786 - protein, 24 aa, Artificial Sequence
  Cyclic GFR-binding peptide
SMGEEYQKYTPVGMDDIYLVSIPS

SEQ ID NO: 61787 - protein, 38 aa, Artificial Sequence; identical to SEQ ID NO: 17124
  Cyclic GFR-binding peptide
  MOD_RES (2), (34), (35): Xaa is C or S

SEQ ID NO: 61788 - protein, 32 aa, Artificial Sequence; identical to SEQ ID NO: 17125
  Cyclic GFR-binding peptide
  MOD_RES (31), (32): Xaa is C or S

SEQ ID NO: 61789 - protein, 23 aa, Artificial Sequence
  Cyclic GFR-binding peptide
VMEYQKYVKPTRGVIYLISIPSL

SEQ ID NO: 61790 - protein, 24 aa, Artificial Sequence
  Cyclic GFR-binding peptide
VVMNEYQKYIVNNSSDIYLVSIPS

SEQ ID NO: 61791 - protein, 22 aa, Artificial Sequence
  Cyclic GFR-binding peptide
EYQKYVKPKRGVIYLISIPSLA

SEQ ID NO: 61792 - protein, 34 aa, Artificial Sequence; identical to SEQ ID NO: 17129
  Cyclic GFR-binding peptide
  MOD_RES (1), (3), (34): Xaa is C or S

SEQ ID NO: 61793 - protein, 30 aa, Artificial Sequence
  Cyclic GFR-binding peptide
  MOD_RES (26), (27): Xaa is C or S
RYKKLYTVVGKDFYLISIANLKTPVXXAKS

SEQ ID NO: 61794 - protein, 40 aa, Artificial Sequence; identical to SEQ ID NO: 17130
  Cyclic GFR-binding peptide
  MOD_RES (2), (4), (35), (36): Xaa is C or S

SEQ ID NO: 61795 - protein, 21 aa, Artificial Sequence
  Cyclic GFR-binding peptide
EYKFKIVNSSDDLYLVSIPEL

SEQ ID NO: 61796 - protein, 39 aa, Artificial Sequence; identical to SEQ ID NO: 17132
  Cyclic GFR-binding peptide
  MOD_RES (2), (4), (36), (37): Xaa is C or S

SEQ ID NO: 61797 - protein, 29 aa, Artificial Sequence
  Cyclic GFR-binding peptide
EVVMDEYKFKVVNNAADLYLISIPELRAP

SEQ ID NO: 61798 - protein, 32 aa, Artificial Sequence
  Cyclic GFR-binding peptide
  MOD_RES (29), (30): Xaa is C or S
AMGEYQKYYTVVGKDIYLISIPSLKTPVXXAK

SEQ ID NO: 61799 - protein, 28 aa, Artificial Sequence
  Cyclic GFR-binding peptide
EVVMDEYKFKVVNNAADLYLISIPELRA

SEQ ID NO: 61800 - protein, 27 aa, Artificial Sequence
  Cyclic GFR-binding peptide
  MOD_RES (26), (27): Xaa is C or S
EYQKYVVKENEDIYLMSIPSLETPVXX

SEQ ID NO: 61801 - protein, 29 aa, Artificial Sequence
  Cyclic GFR-binding peptide
  MOD_RES (2), (2): Xaa is C or S
GXAEVVMDRYKKLVVNNAADFYLISIANL

SEQ ID NO: 61802 - protein, 36 aa, Artificial Sequence
  Cyclic GFR-binding peptide
  MOD_RES (30), (31): Xaa is C or S
KVVMEYQKYVKPTRGVIYLISIPSLDQPVXXPSASA

SEQ ID NO: 61803 - protein, 36 aa, Artificial Sequence
  Cyclic GFR-binding peptide
  MOD_RES (30), (31): Xaa is C or S
VAMGYHYKLYTVVGKDKYLISIPSLKTPVXXAKSAK

SEQ ID NO: 61804 - protein, 27 aa, Artificial Sequence
  Cyclic GFR-binding peptide
  MOD_RES (1), (1): Xaa is C or S
XGEVVMDEYKFKVVKENEDLYLMSIPE

SEQ ID NO: 61805 - protein, 41 aa, Artificial Sequence; identical to SEQ ID NO: 17141
  Cyclic GFR-binding peptide
  MOD_RES (2), (4), (35), (36): Xaa is C or S

SEQ ID NO: 61806 - protein, 34 aa, Artificial Sequence; identical to SEQ ID NO: 17142
  Cyclic GFR-binding peptide
  MOD_RES (32), (33): Xaa is C or S

SEQ ID NO: 61807 - protein, 35 aa, Artificial Sequence
  Cyclic GFR-binding peptide
  MOD_RES (30), (31): Xaa is C or S
VVMDYHYKLVVNNAADKYLISIPSLRAPVXXSAPA

SEQ ID NO: 61808 - protein, 37 aa, Artificial Sequence; identical to SEQ ID NO: 17146
  Cyclic GFR-binding peptide
  MOD_RES (32), (33): Xaa is C or S

SEQ ID NO: 61809 - protein, 40 aa, Artificial Sequence; identical to SEQ ID NO: 17147
  Cyclic GFR-binding peptide
  MOD_RES (2), (4), (36), (37): Xaa is C or S

SEQ ID NO: 61810 - protein, 28 aa, Artificial Sequence
  Cyclic GFR-binding peptide
EVVMEEYKFKVVKDYEDLYLMSIPELET

SEQ ID NO: 61811 - protein, 30 aa, Artificial Sequence
  Cyclic GFR-binding peptide
  MOD_RES (27), (28): Xaa is C or S
DYHYKLVVNNAADKYLISIPSLRAPVXXSA

SEQ ID NO: 61812 - protein, 26 aa, Artificial Sequence
  Cyclic GFR-binding peptide
VVMDYHYKLVVNNAADKYLISIPSLR

SEQ ID NO: 61813 - protein, 35 aa, Artificial Sequence; identical to SEQ ID NO: 17155
  Cyclic GFR-binding peptide
  MOD_RES (2), (34), (35): Xaa is C or S

SEQ ID NO: 61814 - protein, 34 aa, Artificial Sequence; identical to SEQ ID NO: 17156
  Cyclic GFR-binding peptide
  MOD_RES (1), (33), (34): Xaa is C or S

SEQ ID NO: 61815 - protein, 33 aa, Artificial Sequence
  Cyclic GFR-binding peptide
  MOD_RES (1), (3): Xaa is C or S
XGXAEVVMDRYKKLVVNNAADFYLISIANLRAP

SEQ ID NO: 61816 - protein, 29 aa, Artificial Sequence
  Cyclic GFR-binding peptide
  MOD_RES (1), (1): Xaa is C or S
XSKVVMEYQKYVKPTRGVIYLISIPSLDQ

SEQ ID NO: 61817 - protein, 27 aa, Artificial Sequence
  Cyclic GFR-binding peptide
  MOD_RES (1), (1): Xaa is C or S
XESVAMGYHYKLYTVVGKDKYLISIPS

SEQ ID NO: 61818 - protein, 31 aa, Artificial Sequence
  Cyclic GFR-binding peptide
  MOD_RES (29), (30): Xaa is C or S
VMDRYKKLVVNNAADFYLISIANLRAPVXXS

SEQ ID NO: 61819 - protein, 36 aa, Artificial Sequence; identical to SEQ ID NO: 17162
  Cyclic GFR-binding peptide
  MOD_RES (31), (32): Xaa is C or S

SEQ ID NO: 61820 - protein, 25 aa, Artificial Sequence
  Cyclic GFR-binding peptide
EYQKYYTVVGKDIYLISIPSLKTPV

SEQ ID NO: 61821 - protein, 27 aa, Artificial Sequence
  Cyclic GFR-binding peptide
  MOD_RES (27), (27): Xaa is C or S
NEYKFKIVNNSSDLYLVSIPELKTPAX

SEQ ID NO: 61822 - protein, 38 aa, Artificial Sequence; identical to SEQ ID NO: 17170
  Cyclic GFR-binding peptide
  MOD_RES (1), (3), (35), (36): Xaa is C or S

SEQ ID NO: 61823 - protein, 36 aa, Artificial Sequence; identical to SEQ ID NO: 17171
  Cyclic GFR-binding peptide
  MOD_RES (2), (33), (34): Xaa is C or S

SEQ ID NO: 61824 - protein, 32 aa, Artificial Sequence
  Cyclic GFR-binding peptide
  MOD_RES (2), (2): Xaa is C or S
GXAKVVMNEYQKYIVNNSSDIYLVSIPSLKTP

SEQ ID NO: 61825 - protein, 26 aa, Artificial Sequence
  Cyclic GFR-binding peptide
MGRYKKLYTVVGKDFYLISIANLKTP

SEQ ID NO: 61826 - protein, 38 aa, Artificial Sequence; identical to SEQ ID NO: 17173
  Cyclic GFR-binding peptide
  MOD_RES (2), (4), (36), (37): Xaa is C or S

SEQ ID NO: 61827 - protein, 39 aa, Artificial Sequence; identical to SEQ ID NO: 17178
  Cyclic GFR-binding peptide
  MOD_RES (1), (3), (35), (36): Xaa is C or S

SEQ ID NO: 61828 - protein, 23 aa, Artificial Sequence
  Cyclic GFR-binding peptide
DRYKKLVVNNAADFYLISIANLR

SEQ ID NO: 61829 - protein, 23 aa, Artificial Sequence
  Cyclic GFR-binding peptide
EYQKYVVKDYEDIYLMSIPSLET

SEQ ID NO: 61830 - protein, 28 aa, Artificial Sequence
  Cyclic GFR-binding peptide
RVVMNEYQKYIVNSSDDIYLVSIPSLKT

SEQ ID NO: 61831 - protein, 24 aa, Artificial Sequence
  Cyclic GFR-binding peptide
EYQKYVVKENEDIYLMSIPSLETP

SEQ ID NO: 61832 - protein, 24 aa, Artificial Sequence
  Cyclic GFR-binding peptide
MEYKFKIKPTKGILYLISIPELDQ

SEQ ID NO: 61833 - protein, 33 aa, Artificial Sequence; identical to SEQ ID NO: 17187
  Cyclic GFR-binding peptide
  MOD_RES (1), (3): Xaa is C or S

SEQ ID NO: 61834 - protein, 26 aa, Artificial Sequence
  Cyclic GFR-binding peptide
VVMEYKFKVKPTRGVLYLISIPELDQ

SEQ ID NO: 61835 - protein, 36 aa, Artificial Sequence; identical to SEQ ID NO: 17188
  Cyclic GFR-binding peptide
  MOD_RES (31), (32): Xaa is C or S

SEQ ID NO: 61836 - protein, 38 aa, Artificial Sequence; identical to SEQ ID NO: 17189
  Cyclic GFR-binding peptide
  MOD_RES (1), (33), (34): Xaa is C or S

SEQ ID NO: 61837 - protein, 27 aa, Artificial Sequence
  Cyclic GFR-binding peptide
KVVMNEYKFKIVNNSSDLYLVSIPELK

SEQ ID NO: 61838 - protein, 41 aa, Artificial Sequence; identical to SEQ ID NO: 17192
  Cyclic GFR-binding peptide
  MOD_RES (2), (4), (36), (37): Xaa is C or S

SEQ ID NO: 61839 - protein, 35 aa, Artificial Sequence; identical to SEQ ID NO: 17194
  Cyclic GFR-binding peptide
  MOD_RES (1), (32), (33): Xaa is C or S

SEQ ID NO: 61840 - protein, 33 aa, Artificial Sequence
  Cyclic GFR-binding peptide
  MOD_RES (28), (29): Xaa is C or S
MNEYQKYIVNSSDDIYLVSIPSLQTPAXXPKPV

SEQ ID NO: 61841 - protein, 32 aa, Artificial Sequence
  Cyclic GFR-binding peptide
  MOD_RES (28), (29): Xaa is C or S
GEEYKFKTPVGMDDLYLVSIPELKTPVXXAKG

SEQ ID NO: 61842 - protein, 32 aa, Artificial Sequence
  Cyclic GFR-binding peptide
  MOD_RES (2), (2): Xaa is C or S
GXESVAMGRYKKLYTVVGKDFYLISIANLKTP

SEQ ID NO: 61843 - protein, 39 aa, Artificial Sequence; identical to SEQ ID NO: 17201
  Cyclic GFR-binding peptide
  MOD_RES (2), (34), (35): Xaa is C or S

SEQ ID NO: 61844 - protein, 28 aa, Artificial Sequence
  Cyclic GFR-binding peptide
AMGEYQKYYTVVGKDIYLISIPSLKTPV

SEQ ID NO: 61845 - protein, 29 aa, Artificial Sequence
  Cyclic GFR-binding peptide
RVVMNEYQKYIVNSSDDIYLVSIPSLKTP

SEQ ID NO: 61846 - protein, 27 aa, Artificial Sequence
  Cyclic GFR-binding peptide
  MOD_RES (27), (27): Xaa is C or S
DEYKFKVVNNAADLYLISIPELRAPVX

SEQ ID NO: 61847 - protein, 21 aa, Artificial Sequence
  Cyclic GFR-binding peptide
EYQKYVVKDYEDIYLMSIPSL

SEQ ID NO: 61848 - protein, 29 aa, Artificial Sequence
  Cyclic GFR-binding peptide
  MOD_RES (27), (28): Xaa is C or S
DEYKFKVVKENEDLYLMSIPELETPVXXA

SEQ ID NO: 61849 - protein, 31 aa, Artificial Sequence
  Cyclic GFR-binding peptide
  MOD_RES (30), (31): Xaa is C or S
KVIMEYQKYIKPTKGIIYLISIPSLDQSVXX

SEQ ID NO: 61850 - protein, 29 aa, Artificial Sequence
  Cyclic GFR-binding peptide
ARVVMNEYQKYIVNSSDDIYLVSIPSLQT

SEQ ID NO: 61851 - protein, 35 aa, Artificial Sequence; identical to SEQ ID NO: 17213
  Cyclic GFR-binding peptide
  MOD_RES (2), (34), (35): Xaa is C or S

SEQ ID NO: 61852 - protein, 25 aa, Artificial Sequence
  Cyclic GFR-binding peptide
EYKFKVKPTRGVLYLISIPELDQPV

SEQ ID NO: 61853 - protein, 26 aa, Artificial Sequence
  Cyclic GFR-binding peptide
VMDRYKKLVVNNAADFYLISIANLRA

SEQ ID NO: 61854 - protein, 29 aa, Artificial Sequence
  Cyclic GFR-binding peptide
  MOD_RES (28), (29): Xaa is C or S
MDEYKFKVVKENEDLYLMSIPELETPVXX

SEQ ID NO: 61855 - protein, 35 aa, Artificial Sequence
  Cyclic GFR-binding peptide
  MOD_RES (29), (30): Xaa is C or S
VIMEYKFKVKPKRGVLYLISIPELAQPVXXPAASA

SEQ ID NO: 61856 - protein, 33 aa, Artificial Sequence
  Cyclic GFR-binding peptide
  MOD_RES (2), (4): Xaa is C or S
HXGXAKVVMNEYQKYIVNNSSDIYLVSIPSLKT

SEQ ID NO: 61857 - protein, 31 aa, Artificial Sequence
  Cyclic GFR-binding peptide
EAVSMGEEYQKYTPVGMDDIYLVSIPSLKTP

SEQ ID NO: 61858 - protein, 32 aa, Artificial Sequence
  Cyclic GFR-binding peptide
  MOD_RES (1), (3): Xaa is C or S
XKXSKVVMEYQKYVKPTRGVIYLISIPSLDQP

SEQ ID NO: 61859 - protein, 23 aa, Artificial Sequence
  Cyclic GFR-binding peptide
VMEYKFKVKPTRGVLYLISIPEL

SEQ ID NO: 61860 - protein, 33 aa, Artificial Sequence
  Cyclic GFR-binding peptide
  MOD_RES (28), (29): Xaa is C or S
MNEYKFKIVNSSDDLYLVSIPELQTPAXXPKPV

SEQ ID NO: 61861 - protein, 33 aa, Artificial Sequence
  Cyclic GFR-binding peptide
  MOD_RES (29), (30): Xaa is C or S
VMDEYQKYVVKENEDIYLMSIPSLETPVXXAKP

SEQ ID NO: 61862 - protein, 25 aa, Artificial Sequence
  Cyclic GFR-binding peptide
KVVMNEYQKYIVNNSSDIYLVSIPS

SEQ ID NO: 61863 - protein, 36 aa, Artificial Sequence; identical to SEQ ID NO: 17228
  Cyclic GFR-binding peptide
  MOD_RES (2), (4), (36): Xaa is C or S

SEQ ID NO: 61864 - protein, 26 aa, Artificial Sequence
  Cyclic GFR-binding peptide
MEYQKYVKPTRGVIYLISIPSLDQPV

SEQ ID NO: 61865 - protein, 34 aa, Artificial Sequence; identical to SEQ ID NO: 17229
  Cyclic GFR-binding peptide
  MOD_RES (31), (32): Xaa is C or S

SEQ ID NO: 61866 - protein, 33 aa, Artificial Sequence; identical to SEQ ID NO: 17230
  Cyclic GFR-binding peptide
  MOD_RES (2), (33): Xaa is C or S

SEQ ID NO: 61867 - protein, 37 aa, Artificial Sequence; identical to SEQ ID NO: 17231
  Cyclic GFR-binding peptide
  MOD_RES (33), (34): Xaa is C or S

SEQ ID NO: 61868 - protein, 33 aa, Artificial Sequence; identical to SEQ ID NO: 17232
  Cyclic GFR-binding peptide
  MOD_RES (1), (33): Xaa is C or S

SEQ ID NO: 61869 - protein, 31 aa, Artificial Sequence; identical to SEQ ID NO: 17235
  Cyclic GFR-binding peptide
  MOD_RES (31), (31): Xaa is C or S

SEQ ID NO: 61870 - protein, 33 aa, Artificial Sequence
  Cyclic GFR-binding peptide
  MOD_RES (30), (31): Xaa is C or S
VVMNEYKFKIVNSSDDLYLVSIPELKTPAXXPK

SEQ ID NO: 61871 - protein, 33 aa, Artificial Sequence; identical to SEQ ID NO: 17237
  Cyclic GFR-binding peptide
  MOD_RES (1), (33): Xaa is C or S

SEQ ID NO: 61872 - protein, 41 aa, Artificial Sequence; identical to SEQ ID NO: 17242
  Cyclic GFR-binding peptide
  MOD_RES (1), (3), (36), (37): Xaa is C or S

SEQ ID NO: 61873 - protein, 33 aa, Artificial Sequence
  Cyclic GFR-binding peptide
  MOD_RES (30), (31): Xaa is C or S
VVMNEYQKYIVNSSDDIYLVSIPSLQTPAXXPK

SEQ ID NO: 61874 - protein, 31 aa, Artificial Sequence
  Cyclic GFR-binding peptide
  MOD_RES (26), (26): Xaa is C or S
EYKFKIVNSSDDLYLVSIPELKTPAXTPKTV

SEQ ID NO: 61875 - protein, 33 aa, Artificial Sequence
  Cyclic GFR-binding peptide
  MOD_RES (30), (31): Xaa is C or S
SMGEEYQKYTPVGMDDIYLVSIPSLKTPVXXAK

SEQ ID NO: 61876 - protein, 34 aa, Artificial Sequence; identical to SEQ ID NO: 17244
  Cyclic GFR-binding peptide
  MOD_RES (2), (33), (34): Xaa is C or S

SEQ ID NO: 61877 - protein, 36 aa, Artificial Sequence; identical to SEQ ID NO: 17246
  Cyclic GFR-binding peptide
  MOD_RES (1), (33), (34): Xaa is C or S

SEQ ID NO: 61878 - protein, 35 aa, Artificial Sequence
  Cyclic GFR-binding peptide
  MOD_RES (30), (31): Xaa is C or S
RVIMEYKFKVKPKRGVLYLISIPELAQPVXXPAAS

SEQ ID NO: 61879 - protein, 37 aa, Artificial Sequence; identical to SEQ ID NO: 17250
  Cyclic GFR-binding peptide
  MOD_RES (32), (32): Xaa is C or S

SEQ ID NO: 61880 - protein, 38 aa, Artificial Sequence; identical to SEQ ID NO: 17249
  Cyclic GFR-binding peptide
  MOD_RES (2), (34), (35): Xaa is C or S

SEQ ID NO: 61881 - protein, 34 aa, Artificial Sequence
  Cyclic GFR-binding peptide
  MOD_RES (31), (32): Xaa is C or S
VSMGEEYQKYTPVGMDDIYLVSIPSLKTPVXXAK

SEQ ID NO: 61882 - protein, 33 aa, Artificial Sequence
  Cyclic GFR-binding peptide
  MOD_RES (29), (30): Xaa is C or S
VIMEYKFKIKPTKGILYLISIPELDQSVXXPSA

SEQ ID NO: 61883 - protein, 34 aa, Artificial Sequence
  Cyclic GFR-binding peptide
  MOD_RES (28), (28): Xaa is C or S
MNEYKFKIVNSSDDLYLVSIPELKTPAXTPKTVH

SEQ ID NO: 61884 - protein, 28 aa, Artificial Sequence
  Cyclic GFR-binding peptide
  MOD_RES (26), (27): Xaa is C or S
EYQKYIKPTKGIIYLISIPSLDQSVXXP

SEQ ID NO: 61885 - protein, 24 aa, Artificial Sequence
  Cyclic GFR-binding peptide
GEEYKFKTPVGMDDLYLVSIPELK

SEQ ID NO: 61886 - protein, 33 aa, Artificial Sequence
  Cyclic GFR-binding peptide
  MOD_RES (30), (31): Xaa is C or S
VAMGRYKKLYTVVGKDFYLISIANLKTPVXXAK

SEQ ID NO: 61887 - protein, 37 aa, Artificial Sequence; identical to SEQ ID NO: 17262
  Cyclic GFR-binding peptide
  MOD_RES (1), (33): Xaa is C or S

SEQ ID NO: 61888 - protein, 26 aa, Artificial Sequence
  Cyclic GFR-binding peptide
VVMNEYKFKIVNSSDDLYLVSIPELK

SEQ ID NO: 61889 - protein, 27 aa, Artificial Sequence
  Cyclic GFR-binding peptide
ESVAMGRYKKLYTVVGKDFYLISIANL

SEQ ID NO: 61890 - protein, 37 aa, Artificial Sequence; identical to SEQ ID NO: 17268
  Cyclic GFR-binding peptide
  MOD_RES (31), (32): Xaa is C or S

SEQ ID NO: 61891 - protein, 34 aa, Artificial Sequence; identical to SEQ ID NO: 17274
  Cyclic GFR-binding peptide
  MOD_RES (1), (3): Xaa is C or S

SEQ ID NO: 61892 - protein, 25 aa, Artificial Sequence
  Cyclic GFR-binding peptide
MDRYKKLVVNNAADFYLISIANLRA

SEQ ID NO: 61893 - protein, 33 aa, Artificial Sequence; identical to SEQ ID NO: 17275
  Cyclic GFR-binding peptide
  MOD_RES (32), (33): Xaa is C or S

SEQ ID NO: 61894 - protein, 21 aa, Artificial Sequence
  Cyclic GFR-binding peptide
EEYQKYTPVGMDDIYLVSIPS

SEQ ID NO: 61895 - protein, 26 aa, Artificial Sequence
  Cyclic GFR-binding peptide
DEYKFKVVNNAADLYLISIPELRAPV

SEQ ID NO: 61896 - protein, 28 aa, Artificial Sequence
  Cyclic GFR-binding peptide
VVMEYKFKVKPTRGVLYLISIPELDQPV

SEQ ID NO: 61897 - protein, 28 aa, Artificial Sequence
  Cyclic GFR-binding peptide
  MOD_RES (27), (28): Xaa is C or S
MEYKFKIKPTKGILYLISIPELDQSVXX

SEQ ID NO: 61898 - protein, 31 aa, Artificial Sequence
  Cyclic GFR-binding peptide
  MOD_RES (29), (30): Xaa is C or S
VMNEYQKYIVNSSDDIYLVSIPSLQTPAXXP

SEQ ID NO: 61899 - protein, 36 aa, Artificial Sequence; identical to SEQ ID NO: 17278
  Cyclic GFR-binding peptide
  MOD_RES (2), (4), (35), (36): Xaa is C or S

SEQ ID NO: 61900 - protein, 29 aa, Artificial Sequence
  Cyclic GFR-binding peptide
  MOD_RES (1), (1): Xaa is C or S
XEAVSMGEEYQKYTPVGMDDIYLVSIPSL

SEQ ID NO: 61901 - protein, 28 aa, Artificial Sequence
  Cyclic GFR-binding peptide
  MOD_RES (1), (3): Xaa is C or S
XKXSRVIMEYQKYVKPKRGVIYLISIPS

SEQ ID NO: 61902 - protein, 29 aa, Artificial Sequence
  Cyclic GFR-binding peptide
GEVVMDEYQKYVVKENEDIYLMSIPSLET

SEQ ID NO: 61903 - protein, 35 aa, Artificial Sequence; identical to SEQ ID NO: 17279
  Cyclic GFR-binding peptide
  MOD_RES (2), (4), (35): Xaa is C or S

SEQ ID NO: 61904 - protein, 30 aa, Artificial Sequence
  Cyclic GFR-binding peptide
  MOD_RES (2), (2): Xaa is C or S
GXGEVVMDEYKFKVVKENEDLYLMSIPELE

SEQ ID NO: 61905 - protein, 29 aa, Artificial Sequence
  Cyclic GFR-binding peptide
  MOD_RES (28), (29): Xaa is C or S
MDEYKFKVVNNAADLYLISIPELRAPVXX

SEQ ID NO: 61906 - protein, 39 aa, Artificial Sequence; identical to SEQ ID NO: 17286
  Cyclic GFR-binding peptide
  MOD_RES (2), (33), (34): Xaa is C or S

SEQ ID NO: 61907 - protein, 31 aa, Artificial Sequence
  Cyclic GFR-binding peptide
  MOD_RES (27), (28): Xaa is C or S
MEYKFKVKPKRGVLYLISIPELAQPVXXPAA

SEQ ID NO: 61908 - protein, 30 aa, Artificial Sequence; identical to SEQ ID NO: 21029
  Cyclic GFR-binding peptide

SEQ ID NO: 61909 - protein, 28 aa, Artificial Sequence
  Cyclic GFR-binding peptide
  MOD_RES (27), (28): Xaa is C or S
EEYKFKVVKDYEDLYLMSIPELETPVXX

SEQ ID NO: 61910 - protein, 27 aa, Artificial Sequence
  Cyclic GFR-binding peptide
  MOD_RES (26), (27): Xaa is C or S
EYQKYIVNNSSDIYLVSIPSLKTPAXX

SEQ ID NO: 61911 - protein, 33 aa, Artificial Sequence; identical to SEQ ID NO: 17298
  Cyclic GFR-binding peptide
  MOD_RES (2), (2): Xaa is C or S

SEQ ID NO: 61912 - protein, 36 aa, Artificial Sequence; identical to SEQ ID NO: 17299
  Cyclic GFR-binding peptide
  MOD_RES (1), (34), (35): Xaa is C or S

SEQ ID NO: 61913 - protein, 38 aa, Artificial Sequence; identical to SEQ ID NO: 17300
  Cyclic GFR-binding peptide
  MOD_RES (1), (33), (34): Xaa is C or S

SEQ ID NO: 61914 - protein, 26 aa, Artificial Sequence
  Cyclic GFR-binding peptide
RVVMNEYKFKIVNSSDDLYLVSIPEL

SEQ ID NO: 61915 - protein, 29 aa, Artificial Sequence
  Cyclic GFR-binding peptide
  MOD_RES (2), (2): Xaa is C or S
GXARVVMNEYQKYIVNSSDDIYLVSIPSL

SEQ ID NO: 61916 - protein, 29 aa, Artificial Sequence
  Cyclic GFR-binding peptide
ESVAMGRYKKLYTVVGKDFYLISIANLKT

SEQ ID NO: 61917 - protein, 27 aa, Artificial Sequence
  Cyclic GFR-binding peptide
ESVAMGEYQKYYTVVGKDIYLISIPSL

SEQ ID NO: 61918 - protein, 30 aa, Artificial Sequence
  Cyclic GFR-binding peptide
  MOD_RES (30), (30): Xaa is C or S
KVIMEYQKYIKPTKGIIYLISIPSLDQSVX

SEQ ID NO: 61919 - protein, 31 aa, Artificial Sequence
  Cyclic GFR-binding peptide
  MOD_RES (2), (4): Xaa is C or S
RXGXESVAMGYHYKLYTVVGKDKYLISIPSL

SEQ ID NO: 61920 - protein, 34 aa, Artificial Sequence; identical to SEQ ID NO: 17305
  Cyclic GFR-binding peptide
  MOD_RES (1), (3): Xaa is C or S

SEQ ID NO: 61921 - protein, 30 aa, Artificial Sequence
  Cyclic GFR-binding peptide
  MOD_RES (1), (1): Xaa is C or S
XSKVIMEYQKYIKPTKGIIYLISIPSLDQS

SEQ ID NO: 61922 - protein, 30 aa, Artificial Sequence
  Cyclic GFR-binding peptide
ESVAMGYHYKLYTVVGKDKYLISIPSLKTP

SEQ ID NO: 61923 - protein, 40 aa, Artificial Sequence; identical to SEQ ID NO: 17311
  Cyclic GFR-binding peptide
  MOD_RES (1), (3), (36), (37): Xaa is C or S

SEQ ID NO: 61924 - protein, 38 aa, Artificial Sequence; identical to SEQ ID NO: 17312
  Cyclic GFR-binding peptide
  MOD_RES (1), (3), (34), (35): Xaa is C or S

SEQ ID NO: 61925 - protein, 32 aa, Artificial Sequence
  Cyclic GFR-binding peptide
  MOD_RES (30), (31): Xaa is C or S
VVMDEYQKYVVKENEDIYLMSIPSLETPVXXA

SEQ ID NO: 61926 - protein, 27 aa, Artificial Sequence
  Cyclic GFR-binding peptide
VMDEYQKYVVKENEDIYLMSIPSLETP

SEQ ID NO: 61927 - protein, 34 aa, Artificial Sequence; identical to SEQ ID NO: 17315
  Cyclic GFR-binding peptide
  MOD_RES (2), (4): Xaa is C or S

SEQ ID NO: 61928 - protein, 29 aa, Artificial Sequence
  Cyclic GFR-binding peptide
  MOD_RES (1), (3): Xaa is C or S
XGXSRVVMNEYKFKIVNSSDDLYLVSIPE

SEQ ID NO: 61929 - protein, 29 aa, Artificial Sequence
  Cyclic GFR-binding peptide
  MOD_RES (28), (29): Xaa is C or S
VMEYQKYVKPTRGVIYLISIPSLDQPVXX

SEQ ID NO: 61930 - protein, 26 aa, Artificial Sequence
  Cyclic GFR-binding peptide
  MOD_RES (1), (1): Xaa is C or S
XSKVIMEYQKYIKPTKGIIYLISIPS

SEQ ID NO: 61931 - protein, 29 aa, Artificial Sequence
  Cyclic GFR-binding peptide
  MOD_RES (2), (2): Xaa is C or S
GXARVVMNEYKFKIVNSSDDLYLVSIPEL

SEQ ID NO: 61932 - protein, 38 aa, Artificial Sequence; identical to SEQ ID NO: 17324
  Cyclic GFR-binding peptide
  MOD_RES (1), (33), (34): Xaa is C or S

SEQ ID NO: 61933 - protein, 29 aa, Artificial Sequence
  Cyclic GFR-binding peptide
  MOD_RES (27), (28): Xaa is C or S
EEYQKYTPVGMDDIYLVSIPSLKTPVXXA

SEQ ID NO: 61934 - protein, 28 aa, Artificial Sequence
  Cyclic GFR-binding peptide
AKVVMNEYQKYIVNNSSDIYLVSIPSLK

SEQ ID NO: 61935 - protein, 31 aa, Artificial Sequence; identical to SEQ ID NO: 17330
  Cyclic GFR-binding peptide

SEQ ID NO: 61936 - protein, 35 aa, Artificial Sequence; identical to SEQ ID NO: 17331
  Cyclic GFR-binding peptide
  MOD_RES (2), (4): Xaa is C or S

SEQ ID NO: 61937 - protein, 23 aa, Artificial Sequence
  Cyclic GFR-binding peptide
MGEEYQKYTPVGMDDIYLVSIPS

SEQ ID NO: 61938 - protein, 38 aa, Artificial Sequence; identical to SEQ ID NO: 17334
  Cyclic GFR-binding peptide
  MOD_RES (1), (33), (34): Xaa is C or S

SEQ ID NO: 61939 - protein, 31 aa, Artificial Sequence
  Cyclic GFR-binding peptide
  MOD_RES (28), (29): Xaa is C or S
MGYHYKLYTVVGKDKYLISIPSLKTPVXXAK

SEQ ID NO: 61940 - protein, 32 aa, Artificial Sequence
  Cyclic GFR-binding peptide
  MOD_RES (28), (29): Xaa is C or S
MNEYQKYIVNNSSDIYLVSIPSLKTPAXXAKP

SEQ ID NO: 61941 - protein, 26 aa, Artificial Sequence
  Cyclic GFR-binding peptide
SKVIMEYQKYIKPTKGIIYLISIPSL

SEQ ID NO: 61942 - protein, 28 aa, Artificial Sequence
  Cyclic GFR-binding peptide
  MOD_RES (28), (28): Xaa is C or S
MDEYKFKVVNNAADLYLISIPELRAPVX

SEQ ID NO: 61943 - protein, 28 aa, Artificial Sequence
  Cyclic GFR-binding peptide
VMNEYKFKIVNNSSDLYLVSIPELKTPA

SEQ ID NO: 61944 - protein, 34 aa, Artificial Sequence
  Cyclic GFR-binding peptide
  MOD_RES (28), (29): Xaa is C or S
MEEYKFKVVKDYEDLYLMSIPELETPVXXAKPIS

SEQ ID NO: 61945 - protein, 37 aa, Artificial Sequence; identical to SEQ ID NO: 17336
  Cyclic GFR-binding peptide
  MOD_RES (2), (34), (35): Xaa is C or S

SEQ ID NO: 61946 - protein, 36 aa, Artificial Sequence; identical to SEQ ID NO: 17337
  Cyclic GFR-binding peptide
  MOD_RES (1), (3), (35): Xaa is C or S

SEQ ID NO: 61947 - protein, 27 aa, Artificial Sequence
  Cyclic GFR-binding peptide
MGYHYKLYTVVGKDKYLISIPSLKTPV

SEQ ID NO: 61948 - protein, 29 aa, Artificial Sequence
  Cyclic GFR-binding peptide
  MOD_RES (28), (29): Xaa is C or S
IMEYQKYIKPTKGIIYLISIPSLDQSVXX

SEQ ID NO: 61949 - protein, 30 aa, Artificial Sequence
  Cyclic GFR-binding peptide
  MOD_RES (28), (29): Xaa is C or S
MNEYKFKIVNNSSDLYLVSIPELKTPAXXA

SEQ ID NO: 61950 - protein, 41 aa, Artificial Sequence; identical to SEQ ID NO: 17345
  Cyclic GFR-binding peptide
  MOD_RES (2), (4), (36), (37): Xaa is C or S

SEQ ID NO: 61951 - protein, 26 aa, Artificial Sequence
  Cyclic GFR-binding peptide
EVVMDEYKFKVVKENEDLYLMSIPEL

SEQ ID NO: 61952 - protein, 26 aa, Artificial Sequence
  Cyclic GFR-binding peptide
MDEYQKYVVKENEDIYLMSIPSLETP

SEQ ID NO: 61953 - protein, 26 aa, Artificial Sequence
  Cyclic GFR-binding peptide
GYHYKLYTVVGKDKYLISIPSLKTPV

SEQ ID NO: 61954 - protein, 31 aa, Artificial Sequence; identical to SEQ ID NO: 17346
  Cyclic GFR-binding peptide
  MOD_RES (31), (31): Xaa is C or S

SEQ ID NO: 61955 - protein, 35 aa, Artificial Sequence; identical to SEQ ID NO: 17348
  Cyclic GFR-binding peptide
  MOD_RES (1), (3), (34), (35): Xaa is C or S

SEQ ID NO: 61956 - protein, 36 aa, Artificial Sequence; identical to SEQ ID NO: 17349
  Cyclic GFR-binding peptide
  MOD_RES (2), (33), (34): Xaa is C or S

SEQ ID NO: 61957 - protein, 33 aa, Artificial Sequence
  Cyclic GFR-binding peptide
  MOD_RES (29), (30): Xaa is C or S
VMEEYKFKVVKDYEDLYLMSIPELETPVXXAKP

SEQ ID NO: 61958 - protein, 39 aa, Artificial Sequence; identical to SEQ ID NO: 17351
  Cyclic GFR-binding peptide
  MOD_RES (1), (33), (34): Xaa is C or S

SEQ ID NO: 61959 - protein, 29 aa, Artificial Sequence
  Cyclic GFR-binding peptide
  MOD_RES (1), (3): Xaa is C or S
XGXARVVMNEYQKYIVNSSDDIYLVSIPS

SEQ ID NO: 61960 - protein, 32 aa, Artificial Sequence
  Cyclic GFR-binding peptide
  MOD_RES (30), (31): Xaa is C or S
VVMNEYKFKIVNSSDDLYLVSIPELQTPAXXP

SEQ ID NO: 61961 - protein, 33 aa, Artificial Sequence; identical to SEQ ID NO: 17358
  Cyclic GFR-binding peptide
  MOD_RES (33), (33): Xaa is C or S

SEQ ID NO: 61962 - protein, 28 aa, Artificial Sequence
  Cyclic GFR-binding peptide
VAMGEYQKYYTVVGKDIYLISIPSLKTP

SEQ ID NO: 61963 - protein, 25 aa, Artificial Sequence
  Cyclic GFR-binding peptide
SVAMGYHYKLYTVVGKDKYLISIPS

SEQ ID NO: 61964 - protein, 38 aa, Artificial Sequence; identical to SEQ ID NO: 17363
  Cyclic GFR-binding peptide
  MOD_RES (32), (33): Xaa is C or S

SEQ ID NO: 61965 - protein, 29 aa, Artificial Sequence
  Cyclic GFR-binding peptide
  MOD_RES (1), (1): Xaa is C or S
XAKVVMNEYKFKIVNNSSDLYLVSIPELK

SEQ ID NO: 61966 - protein, 26 aa, Artificial Sequence
  Cyclic GFR-binding peptide
VVMNEYKFKIVNSSDDLYLVSIPELQ

SEQ ID NO: 61967 - protein, 29 aa, Artificial Sequence
  Cyclic GFR-binding peptide
AAAAAAAAAEYKFKIVNNSSDLYLVSIPE

SEQ ID NO: 61968 - protein, 27 aa, Artificial Sequence
  Cyclic GFR-binding peptide
  MOD_RES (1), (1): Xaa is C or S
XSRVVMNEYKFKIVNSSDDLYLVSIPE

SEQ ID NO: 61969 - protein, 23 aa, Artificial Sequence
  Cyclic GFR-binding peptide
EYQKYIVNNSSDIYLVSIPSLKT

SEQ ID NO: 61970 - protein, 29 aa, Artificial Sequence
  Cyclic GFR-binding peptide
  MOD_RES (1), (3): Xaa is C or S
XKXSKVVMEYQKYVKPTRGVIYLISIPSL

SEQ ID NO: 61971 - protein, 32 aa, Artificial Sequence
  Cyclic GFR-binding peptide
  MOD_RES (27), (28): Xaa is C or S
NEYKFKIVNSSDDLYLVSIPELQTPAXXPKPV

SEQ ID NO: 61972 - protein, 27 aa, Artificial Sequence
  Cyclic GFR-binding peptide
  MOD_RES (27), (27): Xaa is C or S
MEYQKYVKPTRGVIYLISIPSLDQPVX

SEQ ID NO: 61973 - protein, 38 aa, Artificial Sequence; identical to SEQ ID NO: 17389
  Cyclic GFR-binding peptide
  MOD_RES (1), (33), (34): Xaa is C or S

SEQ ID NO: 61974 - protein, 32 aa, Artificial Sequence; identical to SEQ ID NO: 17391
  Cyclic GFR-binding peptide
  MOD_RES (32), (32): Xaa is C or S

SEQ ID NO: 61975 - protein, 29 aa, Artificial Sequence
  Cyclic GFR-binding peptide
SRVIMEYQKYVKPKRGVIYLISIPSLAQP

SEQ ID NO: 61976 - protein, 21 aa, Artificial Sequence
  Cyclic GFR-binding peptide
MEYQKYIKPTKGIIYLISIPS

SEQ ID NO: 61977 - protein, 25 aa, Artificial Sequence
  Cyclic GFR-binding peptide
VMNEYKFKIVNSSDDLYLVSIPELQ

SEQ ID NO: 61978 - protein, 25 aa, Artificial Sequence
  Cyclic GFR-binding peptide
VMNEYQKYIVNSSDDIYLVSIPSLK

SEQ ID NO: 61979 - protein, 28 aa, Artificial Sequence
  Cyclic GFR-binding peptide
KVVMEYQKYVKPTRGVIYLISIPSLDQP

SEQ ID NO: 61980 - protein, 36 aa, Artificial Sequence; identical to SEQ ID NO: 17399
  Cyclic GFR-binding peptide
  MOD_RES (1), (33), (34): Xaa is C or S

SEQ ID NO: 61981 - protein, 36 aa, Artificial Sequence
  Cyclic GFR-binding peptide
  MOD_RES (30), (31): Xaa is C or S
VVMNEYKFKIVNSSDDLYLVSIPELQTPAXXPKPVT

SEQ ID NO: 61982 - protein, 32 aa, Artificial Sequence; identical to SEQ ID NO: 17400
  Cyclic GFR-binding peptide
  MOD_RES (2), (2): Xaa is C or S

SEQ ID NO: 61983 - protein, 31 aa, Artificial Sequence
  Cyclic GFR-binding peptide
  MOD_RES (28), (28): Xaa is C or S
MNEYKFKIVNSSDDLYLVSIPELKTPAXTPK

SEQ ID NO: 61984 - protein, 33 aa, Artificial Sequence; identical to SEQ ID NO: 17403
  Cyclic GFR-binding peptide
  MOD_RES (1), (32), (33): Xaa is C or S

SEQ ID NO: 61985 - protein, 33 aa, Artificial Sequence
  Cyclic GFR-binding peptide
  MOD_RES (2), (4): Xaa is C or S
RXGXGEVVMDEYKFKVVKENEDLYLMSIPELET

SEQ ID NO: 61986 - protein, 29 aa, Artificial Sequence
  Cyclic GFR-binding peptide
KVIMEYQKYIKPTKGIIYLISIPSLDQSV

SEQ ID NO: 61987 - protein, 27 aa, Artificial Sequence
  Cyclic GFR-binding peptide
MNEYKFKIVNSSDDLYLVSIPELKTPA

SEQ ID NO: 61988 - protein, 29 aa, Artificial Sequence
  Cyclic GFR-binding peptide
  MOD_RES (27), (28): Xaa is C or S
MEYQKYVKPTRGVIYLISIPSLDQPVXXP

SEQ ID NO: 61989 - protein, 30 aa, Artificial Sequence
  Cyclic GFR-binding peptide
  MOD_RES (1), (1): Xaa is C or S
XGEVVMEEYKFKVVKDYEDLYLMSIPELET

SEQ ID NO: 61990 - protein, 33 aa, Artificial Sequence; identical to SEQ ID NO: 17415
  Cyclic GFR-binding peptide
  MOD_RES (31), (32): Xaa is C or S

SEQ ID NO: 61991 - protein, 32 aa, Artificial Sequence
  Cyclic GFR-binding peptide
  MOD_RES (27), (28): Xaa is C or S
MEYKFKIKPTKGILYLISIPELDQSVXXPSAS

SEQ ID NO: 61992 - protein, 28 aa, Artificial Sequence
  Cyclic GFR-binding peptide
  MOD_RES (2), (2): Xaa is C or S
GXESVAMGRYKKLYTVVGKDFYLISIAN

SEQ ID NO: 61993 - protein, 37 aa, Artificial Sequence; identical to SEQ ID NO: 17420
  Cyclic GFR-binding peptide
  MOD_RES (2), (34), (35): Xaa is C or S

SEQ ID NO: 61994 - protein, 30 aa, Artificial Sequence
  Cyclic GFR-binding peptide
  MOD_RES (30), (30): Xaa is C or S
VVMDEYKFKVVKENEDLYLMSIPELETPVX

SEQ ID NO: 61995 - protein, 30 aa, Artificial Sequence
  Cyclic GFR-binding peptide
  MOD_RES (29), (30): Xaa is C or S
VMDYHYKLVVNNAADKYLISIPSLRAPVXX

SEQ ID NO: 61996 - protein, 32 aa, Artificial Sequence
  Cyclic GFR-binding peptide
  MOD_RES (1), (3): Xaa is C or S
XGXSRVVMNEYKFKIVNSSDDLYLVSIPELKT

SEQ ID NO: 61997 - protein, 32 aa, Artificial Sequence
  Cyclic GFR-binding peptide
  MOD_RES (29), (30): Xaa is C or S
VMEEYQKYVVKDYEDIYLMSIPSLETPVXXAK

SEQ ID NO: 61998 - protein, 25 aa, Artificial Sequence
  Cyclic GFR-binding peptide
VMEEYKFKVVKDYEDLYLMSIPELE

SEQ ID NO: 61999 - protein, 32 aa, Artificial Sequence; identical to SEQ ID NO: 17434
  Cyclic GFR-binding peptide
  MOD_RES (32), (32): Xaa is C or S

SEQ ID NO: 62000 - protein, 27 aa, Artificial Sequence
  Cyclic GFR-binding peptide
VVMDEYQKYVVKENEDIYLMSIPSLET

SEQ ID NO: 62001 - protein, 31 aa, Artificial Sequence
  Cyclic GFR-binding peptide
  MOD_RES (30), (31): Xaa is C or S
VAMGEYQKYYTVVGKDIYLISIPSLKTPVXX

SEQ ID NO: 62002 - protein, 31 aa, Artificial Sequence
  Cyclic GFR-binding peptide
  MOD_RES (27), (28): Xaa is C or S
MEYKFKVKPTRGVLYLISIPELDQPVXXPSA

SEQ ID NO: 62003 - protein, 23 aa, Artificial Sequence
  Cyclic GFR-binding peptide
MNEYKFKIVNSSDDLYLVSIPEL

SEQ ID NO: 62004 - protein, 27 aa, Artificial Sequence
  Cyclic GFR-binding peptide
SRVIMEYKFKVKPKRGVLYLISIPELA

SEQ ID NO: 62005 - protein, 35 aa, Artificial Sequence
  Cyclic GFR-binding peptide
  MOD_RES (30), (31): Xaa is C or S
SMGEEYKFKTPVGMDDLYLVSIPELKTPVXXAKGV

SEQ ID NO: 62006 - protein, 33 aa, Artificial Sequence
  Cyclic GFR-binding peptide
  MOD_RES (29), (30): Xaa is C or S
MGEEYKFKTPVGMDDLYLVSIPELKTPVXXAKG

SEQ ID NO: 62007 - protein, 35 aa, Artificial Sequence
  Cyclic GFR-binding peptide
  MOD_RES (30), (31): Xaa is C or S
KVVMEYKFKVKPTRGVLYLISIPELDQPVXXPSAS

SEQ ID NO: 62008 - protein, 36 aa, Artificial Sequence; identical to SEQ ID NO: 17440
  Cyclic GFR-binding peptide
  MOD_RES (2), (34): Xaa is C or S

SEQ ID NO: 62009 - protein, 39 aa, Artificial Sequence; identical to SEQ ID NO: 17442
  Cyclic GFR-binding peptide
  MOD_RES (1), (33): Xaa is C or S

SEQ ID NO: 62010 - protein, 34 aa, Artificial Sequence; identical to SEQ ID NO: 17447
  Cyclic GFR-binding peptide
  MOD_RES (2), (34): Xaa is C or S

SEQ ID NO: 62011 - protein, 28 aa, Artificial Sequence
  Cyclic GFR-binding peptide
VAMGRYKKLYTVVGKDFYLISIANLKTP

SEQ ID NO: 62012 - protein, 22 aa, Artificial Sequence
  Cyclic GFR-binding peptide
MNEYQKYIVNSSDDIYLVSIPS

SEQ ID NO: 62013 - protein, 32 aa, Artificial Sequence
  Cyclic GFR-binding peptide
  MOD_RES (27), (27): Xaa is C or S
NEYKFKIVNSSDDLYLVSIPELKTPAXTPKTV

SEQ ID NO: 62014 - protein, 32 aa, Artificial Sequence; identical to SEQ ID NO: 17450
  Cyclic GFR-binding peptide
  MOD_RES (32), (32): Xaa is C or S

SEQ ID NO: 62015 - protein, 34 aa, Artificial Sequence; identical to SEQ ID NO: 17454
  Cyclic GFR-binding peptide
  MOD_RES (2), (34): Xaa is C or S

SEQ ID NO: 62016 - protein, 30 aa, Artificial Sequence
  Cyclic GFR-binding peptide
  MOD_RES (27), (28): Xaa is C or S
NEYKFKIVNSSDDLYLVSIPELQTPAXXPK

SEQ ID NO: 62017 - protein, 30 aa, Artificial Sequence; identical to SEQ ID NO: 17456
  Cyclic GFR-binding peptide

SEQ ID NO: 62018 - protein, 29 aa, Artificial Sequence
  Cyclic GFR-binding peptide
  MOD_RES (2), (2): Xaa is C or S
GXAEVVMDEYKFKVVNNAADLYLISIPEL

SEQ ID NO: 62019 - protein, 36 aa, Artificial Sequence; identical to SEQ ID NO: 17457
  Cyclic GFR-binding peptide
  MOD_RES (2), (4), (36): Xaa is C or S

SEQ ID NO: 62020 - protein, 29 aa, Artificial Sequence
  Cyclic GFR-binding peptide
  MOD_RES (26), (27): Xaa is C or S
EYQKYTPVGMDDIYLVSIPSLKTPVXXAK

SEQ ID NO: 62021 - protein, 29 aa, Artificial Sequence
  Cyclic GFR-binding peptide
  MOD_RES (27), (28): Xaa is C or S
DEYKFKVVNNAADLYLISIPELRAPVXXS

SEQ ID NO: 62022 - protein, 39 aa, Artificial Sequence; identical to SEQ ID NO: 17460
  Cyclic GFR-binding peptide
  MOD_RES (1), (3), (35), (36): Xaa is C or S

SEQ ID NO: 62023 - protein, 28 aa, Artificial Sequence
  Cyclic GFR-binding peptide
  MOD_RES (28), (28): Xaa is C or S
MNEYKFKIVNSSDDLYLVSIPELQTPAX

SEQ ID NO: 62024 - protein, 34 aa, Artificial Sequence; identical to SEQ ID NO: 17467
  Cyclic GFR-binding peptide
  MOD_RES (31), (32): Xaa is C or S

SEQ ID NO: 62025 - protein, 23 aa, Artificial Sequence
  Cyclic GFR-binding peptide
YHYKLVVNNAADKYLISIPSLRA

SEQ ID NO: 62026 - protein, 25 aa, Artificial Sequence
  Cyclic GFR-binding peptide
EYKFKIKPTKGILYLISIPELDQSV

SEQ ID NO: 62027 - protein, 28 aa, Artificial Sequence
  Cyclic GFR-binding peptide
AEVVMDEYKFKVVNNAADLYLISIPELR

SEQ ID NO: 62028 - protein, 34 aa, Artificial Sequence
  Cyclic GFR-binding peptide
  MOD_RES (29), (30): Xaa is C or S
VMNEYQKYIVNSSDDIYLVSIPSLKTPAXXPKPV

SEQ ID NO: 62029 - protein, 34 aa, Artificial Sequence; identical to SEQ ID NO: 17479
  Cyclic GFR-binding peptide
  MOD_RES (2), (34): Xaa is C or S

SEQ ID NO: 62030 - protein, 31 aa, Artificial Sequence
  Cyclic GFR-binding peptide
  MOD_RES (27), (28): Xaa is C or S
MEYQKYVKPKRGVIYLISIPSLAQPVXXPAA

SEQ ID NO: 62031 - protein, 35 aa, Artificial Sequence; identical to SEQ ID NO: 17481
  Cyclic GFR-binding peptide
  MOD_RES (1), (33): Xaa is C or S

SEQ ID NO: 62032 - protein, 25 aa, Artificial Sequence
  Cyclic GFR-binding peptide
MGRYKKLYTVVGKDFYLISIANLKT

SEQ ID NO: 62033 - protein, 42 aa, Artificial Sequence; identical to SEQ ID NO: 17485
  Cyclic GFR-binding peptide
  MOD_RES (2), (4), (36), (37): Xaa is C or S

SEQ ID NO: 62034 - protein, 33 aa, Artificial Sequence; identical to SEQ ID NO: 17487
  Cyclic GFR-binding peptide
  MOD_RES (31), (32): Xaa is C or S

SEQ ID NO: 62035 - protein, 23 aa, Artificial Sequence
  Cyclic GFR-binding peptide
NEYKFKIVNSSDDLYLVSIPELK

SEQ ID NO: 62036 - protein, 29 aa, Artificial Sequence
  Cyclic GFR-binding peptide
VVMDEYKFKVVKENEDLYLMSIPELETPV

SEQ ID NO: 62037 - protein, 35 aa, Artificial Sequence; identical to SEQ ID NO: 17489
  Cyclic GFR-binding peptide
  MOD_RES (31), (32): Xaa is C or S

SEQ ID NO: 62038 - protein, 22 aa, Artificial Sequence
  Cyclic GFR-binding peptide
GEEYQKYTPVGMDDIYLVSIPS

SEQ ID NO: 62039 - protein, 34 aa, Artificial Sequence
  Cyclic GFR-binding peptide
  MOD_RES (1), (3): Xaa is C or S
XGXEAVSMGEEYQKYTPVGMDDIYLVSIPSLKTP

SEQ ID NO: 62040 - protein, 38 aa, Artificial Sequence; identical to SEQ ID NO: 17496
  Cyclic GFR-binding peptide
  MOD_RES (1), (34), (35): Xaa is C or S

SEQ ID NO: 62041 - protein, 29 aa, Artificial Sequence
  Cyclic GFR-binding peptide
AAAAAAAAAEYQKYIVNSSDDIYLVSIPS

SEQ ID NO: 62042 - protein, 33 aa, Artificial Sequence; identical to SEQ ID NO: 17497
  Cyclic GFR-binding peptide
  MOD_RES (32), (33): Xaa is C or S

SEQ ID NO: 62043 - protein, 20 aa, Artificial Sequence
  Cyclic GFR-binding peptide
EYQKYVKPKRGVIYLISIPS

SEQ ID NO: 62044 - protein, 33 aa, Artificial Sequence
  Cyclic GFR-binding peptide
  MOD_RES (2), (4): Xaa is C or S
SXKXSKVIMEYQKYIKPTKGIIYLISIPSLDQS

SEQ ID NO: 62045 - protein, 26 aa, Artificial Sequence
  Cyclic GFR-binding peptide
MEEYKFKVVKDYEDLYLMSIPELETP

SEQ ID NO: 62046 - protein, 38 aa, Artificial Sequence; identical to SEQ ID NO: 17501
  Cyclic GFR-binding peptide
  MOD_RES (1), (33), (34): Xaa is C or S

SEQ ID NO: 62047 - protein, 30 aa, Artificial Sequence
  Cyclic GFR-binding peptide
  MOD_RES (1), (3): Xaa is C or S
XGXESVAMGEYQKYYTVVGKDIYLISIPSL

SEQ ID NO: 62048 - protein, 25 aa, Artificial Sequence
  Cyclic GFR-binding peptide
VMDYHYKLVVNNAADKYLISIPSLR

SEQ ID NO: 62049 - protein, 25 aa, Artificial Sequence
  Cyclic GFR-binding peptide
MGEYQKYYTVVGKDIYLISIPSLKT

SEQ ID NO: 62050 - protein, 34 aa, Artificial Sequence
  Cyclic GFR-binding peptide
  MOD_RES (30), (31): Xaa is C or S
VVMDEYKFKVVKENEDLYLMSIPELETPVXXAKP

SEQ ID NO: 62051 - protein, 25 aa, Artificial Sequence
  Cyclic GFR-binding peptide
VVMDEYKFKVVNNAADLYLISIPEL

SEQ ID NO: 62052 - protein, 39 aa, Artificial Sequence; identical to SEQ ID NO: 17507
  Cyclic GFR-binding peptide
  MOD_RES (1), (3), (35), (36): Xaa is C or S

SEQ ID NO: 62053 - protein, 29 aa, Artificial Sequence
  Cyclic GFR-binding peptide
  MOD_RES (29), (29): Xaa is C or S
VMNEYQKYIVNSSDDIYLVSIPSLQTPAX

SEQ ID NO: 62054 - protein, 36 aa, Artificial Sequence; identical to SEQ ID NO: 17508
  Cyclic GFR-binding peptide
  MOD_RES (2), (34), (35): Xaa is C or S

SEQ ID NO: 62055 - protein, 32 aa, Artificial Sequence
  Cyclic GFR-binding peptide
  MOD_RES (1), (3): Xaa is C or S
XKXSKVVMEYKFKVKPTRGVLYLISIPELDQP

SEQ ID NO: 62056 - protein, 31 aa, Artificial Sequence; identical to SEQ ID NO: 17511
  Cyclic GFR-binding peptide
  MOD_RES (31), (31): Xaa is C or S

SEQ ID NO: 62057 - protein, 24 aa, Artificial Sequence
  Cyclic GFR-binding peptide
AMGRYKKLYTVVGKDFYLISIANL

SEQ ID NO: 62058 - protein, 28 aa, Artificial Sequence
  Cyclic GFR-binding peptide
AKVVMNEYKFKIVNNSSDLYLVSIPELK

SEQ ID NO: 62059 - protein, 25 aa, Artificial Sequence
  Cyclic GFR-binding peptide
VIMEYKFKVKPKRGVLYLISIPELA

SEQ ID NO: 62060 - protein, 26 aa, Artificial Sequence
  Cyclic GFR-binding peptide
KVVMEYKFKVKPTRGVLYLISIPELD

SEQ ID NO: 62061 - protein, 30 aa, Artificial Sequence
  Cyclic GFR-binding peptide
  MOD_RES (27), (28): Xaa is C or S
GRYKKLYTVVGKDFYLISIANLKTPVXXAK

SEQ ID NO: 62062 - protein, 32 aa, Artificial Sequence
  Cyclic GFR-binding peptide
  MOD_RES (29), (30): Xaa is C or S
VMDEYKFKVVKENEDLYLMSIPELETPVXXAK

SEQ ID NO: 62063 - protein, 23 aa, Artificial Sequence
  Cyclic GFR-binding peptide
MEYQKYIKPTKGIIYLISIPSLD

SEQ ID NO: 62064 - protein, 39 aa, Artificial Sequence; identical to SEQ ID NO: 17516
  Cyclic GFR-binding peptide
  MOD_RES (2), (4), (36), (37): Xaa is C or S

SEQ ID NO: 62065 - protein, 29 aa, Artificial Sequence
  Cyclic GFR-binding peptide
  MOD_RES (28), (29): Xaa is C or S
MNEYKFKIVNSSDDLYLVSIPELKTPAXX

SEQ ID NO: 62066 - protein, 22 aa, Artificial Sequence
  Cyclic GFR-binding peptide
EYKFKVVNNAADLYLISIPELR

SEQ ID NO: 62067 - protein, 25 aa, Artificial Sequence
  Cyclic GFR-binding peptide
EYKFKTPVGMDDLYLVSIPELKTPV

SEQ ID NO: 62068 - protein, 26 aa, Artificial Sequence
  Cyclic GFR-binding peptide
VVMDEYKFKVVKENEDLYLMSIPELE

SEQ ID NO: 62069 - protein, 28 aa, Artificial Sequence
  Cyclic GFR-binding peptide
  MOD_RES (28), (28): Xaa is C or S
IMEYQKYIKPTKGIIYLISIPSLDQSVX

SEQ ID NO: 62070 - protein, 36 aa, Artificial Sequence; identical to SEQ ID NO: 17524
  Cyclic GFR-binding peptide
  MOD_RES (1), (33), (34): Xaa is C or S

SEQ ID NO: 62071 - protein, 22 aa, Artificial Sequence
  Cyclic GFR-binding peptide
IMEYQKYVKPKRGVIYLISIPS

SEQ ID NO: 62072 - protein, 34 aa, Artificial Sequence
  Cyclic GFR-binding peptide
  MOD_RES (28), (29): Xaa is C or S
MDEYKFKVVNNAADLYLISIPELRAPVXXSAPAA

SEQ ID NO: 62073 - protein, 31 aa, Artificial Sequence
  Cyclic GFR-binding peptide
  MOD_RES (30), (31): Xaa is C or S
VVMEEYQKYVVKDYEDIYLMSIPSLETPVXX

SEQ ID NO: 62074 - protein, 26 aa, Artificial Sequence
  Cyclic GFR-binding peptide
  MOD_RES (26), (26): Xaa is C or S
EYQKYIVNNSSDIYLVSIPSLKTPAX

SEQ ID NO: 62075 - protein, 36 aa, Artificial Sequence; identical to SEQ ID NO: 17534
  Cyclic GFR-binding peptide
  MOD_RES (2), (4), (36): Xaa is C or S

SEQ ID NO: 62076 - protein, 21 aa, Artificial Sequence
  Cyclic GFR-binding peptide
DYHYKLVVNNAADKYLISIPS

SEQ ID NO: 62077 - protein, 38 aa, Artificial Sequence; identical to SEQ ID NO: 17540
  Cyclic GFR-binding peptide
  MOD_RES (2), (4), (35), (36): Xaa is C or S

SEQ ID NO: 62078 - protein, 36 aa, Artificial Sequence; identical to SEQ ID NO: 17543
  Cyclic GFR-binding peptide
  MOD_RES (1), (3), (35), (36): Xaa is C or S

SEQ ID NO: 62079 - protein, 39 aa, Artificial Sequence; identical to SEQ ID NO: 17544
  Cyclic GFR-binding peptide
  MOD_RES (2), (34), (35): Xaa is C or S

SEQ ID NO: 62080 - protein, 37 aa, Artificial Sequence; identical to SEQ ID NO: 17545
  Cyclic GFR-binding peptide
  MOD_RES (2), (34), (35): Xaa is C or S

SEQ ID NO: 62081 - protein, 33 aa, Artificial Sequence
  Cyclic GFR-binding peptide
  MOD_RES (1), (3): Xaa is C or S
XGXAEVVMDEYKFKVVNNAADLYLISIPELRAP

SEQ ID NO: 62082 - protein, 28 aa, Artificial Sequence
  Cyclic GFR-binding peptide
  MOD_RES (28), (28): Xaa is C or S
VMEYQKYVKPTRGVIYLISIPSLDQPVX

SEQ ID NO: 62083 - protein, 32 aa, Artificial Sequence
  Cyclic GFR-binding peptide
  MOD_RES (30), (31): Xaa is C or S
VVMDEYKFKVVKENEDLYLMSIPELETPVXXA

SEQ ID NO: 62084 - protein, 32 aa, Artificial Sequence
  Cyclic GFR-binding peptide
  MOD_RES (1), (3): Xaa is C or S
XGXARVVMNEYKFKIVNSSDDLYLVSIPELQT

SEQ ID NO: 62085 - protein, 24 aa, Artificial Sequence
  Cyclic GFR-binding peptide
DRYKKLVVNNAADFYLISIANLRA

SEQ ID NO: 62086 - protein, 23 aa, Artificial Sequence
  Cyclic GFR-binding peptide
EYKFKVVNNAADLYLISIPELRA

SEQ ID NO: 62087 - protein, 30 aa, Artificial Sequence
  Cyclic GFR-binding peptide
  MOD_RES (2), (4): Xaa is C or S
HXGXARVVMNEYKFKIVNSSDDLYLVSIPE

SEQ ID NO: 62088 - protein, 34 aa, Artificial Sequence
  Cyclic GFR-binding peptide
  MOD_RES (30), (31): Xaa is C or S
KVVMEYQKYVKPTRGVIYLISIPSLDQPVXXPSA

SEQ ID NO: 62089 - protein, 21 aa, Artificial Sequence
  Cyclic GFR-binding peptide
EEYQKYVVKDYEDIYLMSIPS

SEQ ID NO: 62090 - protein, 33 aa, Artificial Sequence; identical to SEQ ID NO: 17565
  Cyclic GFR-binding peptide
  MOD_RES (31), (32): Xaa is C or S

SEQ ID NO: 62091 - protein, 32 aa, Artificial Sequence
  Cyclic GFR-binding peptide
  MOD_RES (30), (31): Xaa is C or S
VVMDEYKFKVVNNAADLYLISIPELRAPVXXS

SEQ ID NO: 62092 - protein, 26 aa, Artificial Sequence
  Cyclic GFR-binding peptide
VVMDRYKKLVVNNAADFYLISIANLR

SEQ ID NO: 62093 - protein, 22 aa, Artificial Sequence
  Cyclic GFR-binding peptide
MDYHYKLVVNNAADKYLISIPS

SEQ ID NO: 62094 - protein, 39 aa, Artificial Sequence; identical to SEQ ID NO: 17569
  Cyclic GFR-binding peptide
  MOD_RES (1), (33), (34): Xaa is C or S

SEQ ID NO: 62095 - protein, 27 aa, Artificial Sequence
  Cyclic GFR-binding peptide
RVVMNEYQKYIVNSSDDIYLVSIPSLQ

SEQ ID NO: 62096 - protein, 32 aa, Artificial Sequence
  Cyclic GFR-binding peptide
  MOD_RES (27), (28): Xaa is C or S
MEYQKYIKPTKGIIYLISIPSLDQSVXXPSAS

SEQ ID NO: 62097 - protein, 29 aa, Artificial Sequence
  Cyclic GFR-binding peptide
  MOD_RES (26), (27): Xaa is C or S
EYKFKVVKDYEDLYLMSIPELETPVXXAK

SEQ ID NO: 62098 - protein, 36 aa, Artificial Sequence; identical to SEQ ID NO: 17580
  Cyclic GFR-binding peptide
  MOD_RES (1), (3), (35), (36): Xaa is C or S

SEQ ID NO: 62099 - protein, 27 aa, Artificial Sequence
  Cyclic GFR-binding peptide
VMNEYQKYIVNSSDDIYLVSIPSLKTP

SEQ ID NO: 62100 - protein, 34 aa, Artificial Sequence
  Cyclic GFR-binding peptide
  MOD_RES (2), (4): Xaa is C or S
RXGXEAVSMGEEYKFKTPVGMDDLYLVSIPELKT

SEQ ID NO: 62101 - protein, 36 aa, Artificial Sequence; identical to SEQ ID NO: 17581
  Cyclic GFR-binding peptide
  MOD_RES (2), (34), (35): Xaa is C or S

SEQ ID NO: 62102 - protein, 25 aa, Artificial Sequence
  Cyclic GFR-binding peptide
MNEYQKYIVNNSSDIYLVSIPSLKT

SEQ ID NO: 62103 - protein, 29 aa, Artificial Sequence
  Cyclic GFR-binding peptide
  MOD_RES (28), (29): Xaa is C or S
MNEYKFKIVNSSDDLYLVSIPELQTPAXX

SEQ ID NO: 62104 - protein, 35 aa, Artificial Sequence; identical to SEQ ID NO: 17589
  Cyclic GFR-binding peptide
  MOD_RES (2), (34), (35): Xaa is C or S

SEQ ID NO: 62105 - protein, 36 aa, Artificial Sequence; identical to SEQ ID NO: 17591
  Cyclic GFR-binding peptide
  MOD_RES (31), (32): Xaa is C or S

SEQ ID NO: 62106 - protein, 33 aa, Artificial Sequence
  Cyclic GFR-binding peptide
  MOD_RES (27), (28): Xaa is C or S
DEYKFKVVNNAADLYLISIPELRAPVXXSAPAA

SEQ ID NO: 62107 - protein, 35 aa, Artificial Sequence; identical to SEQ ID NO: 17593
  Cyclic GFR-binding peptide
  MOD_RES (1), (3), (35): Xaa is C or S

SEQ ID NO: 62108 - protein, 32 aa, Artificial Sequence; identical to SEQ ID NO: 17594
  Cyclic GFR-binding peptide

SEQ ID NO: 62109 - protein, 25 aa, Artificial Sequence
  Cyclic GFR-binding peptide
EYKFKIVNSSDDLYLVSIPELKTPA

SEQ ID NO: 62110 - protein, 36 aa, Artificial Sequence
  Cyclic GFR-binding peptide
  MOD_RES (30), (31): Xaa is C or S
VAMGRYKKLYTVVGKDFYLISIANLKTPVXXAKSAK

SEQ ID NO: 62111 - protein, 36 aa, Artificial Sequence; identical to SEQ ID NO: 17597
  Cyclic GFR-binding peptide
  MOD_RES (2), (4), (36): Xaa is C or S

SEQ ID NO: 62112 - protein, 29 aa, Artificial Sequence
  Cyclic GFR-binding peptide
  MOD_RES (27), (28): Xaa is C or S
MEYKFKVKPTRGVLYLISIPELDQPVXXP

SEQ ID NO: 62113 - protein, 32 aa, Artificial Sequence; identical to SEQ ID NO: 17601
  Cyclic GFR-binding peptide
  MOD_RES (31), (32): Xaa is C or S

SEQ ID NO: 62114 - protein, 35 aa, Artificial Sequence; identical to SEQ ID NO: 17607
  Cyclic GFR-binding peptide
  MOD_RES (31), (32): Xaa is C or S

SEQ ID NO: 62115 - protein, 29 aa, Artificial Sequence
  Cyclic GFR-binding peptide
  MOD_RES (27), (28): Xaa is C or S
MEYKFKVKPKRGVLYLISIPELAQPVXXP

SEQ ID NO: 62116 - protein, 26 aa, Artificial Sequence
  Cyclic GFR-binding peptide
MEYKFKVKPTRGVLYLISIPELDQPV

SEQ ID NO: 62117 - protein, 35 aa, Artificial Sequence; identical to SEQ ID NO: 17610
  Cyclic GFR-binding peptide
  MOD_RES (1), (33): Xaa is C or S

SEQ ID NO: 62118 - protein, 28 aa, Artificial Sequence
  Cyclic GFR-binding peptide
  MOD_RES (27), (28): Xaa is C or S
NEYQKYIVNSSDDIYLVSIPSLQTPAXX

SEQ ID NO: 62119 - protein, 39 aa, Artificial Sequence; identical to SEQ ID NO: 17611
  Cyclic GFR-binding peptide
  MOD_RES (1), (33), (34): Xaa is C or S

SEQ ID NO: 62120 - protein, 20 aa, Artificial Sequence
  Cyclic GFR-binding peptide
EYKFKVKPTRGVLYLISIPE

SEQ ID NO: 62121 - protein, 31 aa, Artificial Sequence
  Cyclic GFR-binding peptide
  MOD_RES (26), (27): Xaa is C or S
EYKFKVVKDYEDLYLMSIPELETPVXXAKPI

SEQ ID NO: 62122 - protein, 29 aa, Artificial Sequence
  Cyclic GFR-binding peptide
  MOD_RES (29), (29): Xaa is C or S
VVMEYQKYVKPTRGVIYLISIPSLDQPVX

SEQ ID NO: 62123 - protein, 37 aa, Artificial Sequence; identical to SEQ ID NO: 17616
  Cyclic GFR-binding peptide
  MOD_RES (1), (32), (33): Xaa is C or S

SEQ ID NO: 62124 - protein, 27 aa, Artificial Sequence
  Cyclic GFR-binding peptide
  MOD_RES (26), (27): Xaa is C or S
EYKFKTPVGMDDLYLVSIPELKTPVXX

SEQ ID NO: 62125 - protein, 23 aa, Artificial Sequence
  Cyclic GFR-binding peptide
VMDYHYKLVVNNAADKYLISIPS

SEQ ID NO: 62126 - protein, 29 aa, Artificial Sequence
  Cyclic GFR-binding peptide
  MOD_RES (29), (29): Xaa is C or S
VMEEYKFKVVKDYEDLYLMSIPELETPVX

SEQ ID NO: 62127 - protein, 24 aa, Artificial Sequence
  Cyclic GFR-binding peptide
EYQKYYTVVGKDIYLISIPSLKTP

SEQ ID NO: 62128 - protein, 34 aa, Artificial Sequence; identical to SEQ ID NO: 17627
  Cyclic GFR-binding peptide
  MOD_RES (32), (33): Xaa is C or S

SEQ ID NO: 62129 - protein, 27 aa, Artificial Sequence
  Cyclic GFR-binding peptide
  MOD_RES (1), (1): Xaa is C or S
XSRVIMEYQKYVKPKRGVIYLISIPSL

SEQ ID NO: 62130 - protein, 35 aa, Artificial Sequence; identical to SEQ ID NO: 17633
  Cyclic GFR-binding peptide
  MOD_RES (2), (4), (35): Xaa is C or S

SEQ ID NO: 62131 - protein, 34 aa, Artificial Sequence
  Cyclic GFR-binding peptide
  MOD_RES (28), (29): Xaa is C or S
MDRYKKLVVNNAADFYLISIANLRAPVXXSAPAA

SEQ ID NO: 62132 - protein, 35 aa, Artificial Sequence; identical to SEQ ID NO: 17635
  Cyclic GFR-binding peptide
  MOD_RES (1), (3), (35): Xaa is C or S

SEQ ID NO: 62133 - protein, 29 aa, Artificial Sequence
  Cyclic GFR-binding peptide
  MOD_RES (1), (3): Xaa is C or S
XGXGEVVMEEYQKYVVKDYEDIYLMSIPS

SEQ ID NO: 62134 - protein, 34 aa, Artificial Sequence; identical to SEQ ID NO: 17636
  Cyclic GFR-binding peptide
  MOD_RES (31), (32): Xaa is C or S

SEQ ID NO: 62135 - protein, 29 aa, Artificial Sequence
  Cyclic GFR-binding peptide
AAAAAAAAAEYKFKIVNSSDDLYLVSIPE

SEQ ID NO: 62136 - protein, 36 aa, Artificial Sequence; identical to SEQ ID NO: 17637
  Cyclic GFR-binding peptide
  MOD_RES (2), (4), (35), (36): Xaa is C or S

SEQ ID NO: 62137 - protein, 26 aa, Artificial Sequence
  Cyclic GFR-binding peptide
MGEYQKYYTVVGKDIYLISIPSLKTP

SEQ ID NO: 62138 - protein, 28 aa, Artificial Sequence
  Cyclic GFR-binding peptide
  MOD_RES (1), (3): Xaa is C or S
XKXSKVVMEYKFKVKPTRGVLYLISIPE

SEQ ID NO: 62139 - protein, 39 aa, Artificial Sequence; identical to SEQ ID NO: 17641
  Cyclic GFR-binding peptide
  MOD_RES (2), (4), (36), (37): Xaa is C or S

SEQ ID NO: 62140 - protein, 30 aa, Artificial Sequence
  Cyclic GFR-binding peptide
  MOD_RES (30), (30): Xaa is C or S
VVMDRYKKLVVNNAADFYLISIANLRAPVX

SEQ ID NO: 62141 - protein, 28 aa, Artificial Sequence
  Cyclic GFR-binding peptide
  MOD_RES (26), (27): Xaa is C or S
EYKFKVKPKRGVLYLISIPELAQPVXXP

SEQ ID NO: 62142 - protein, 33 aa, Artificial Sequence
  Cyclic GFR-binding peptide
  MOD_RES (2), (2): Xaa is C or S
GXEAVSMGEEYQKYTPVGMDDIYLVSIPSLKTP

SEQ ID NO: 62143 - protein, 22 aa, Artificial Sequence
  Cyclic GFR-binding peptide
VMEYKFKVKPTRGVLYLISIPE

SEQ ID NO: 62144 - protein, 29 aa, Artificial Sequence
  Cyclic GFR-binding peptide
AKVVMNEYKFKIVNNSSDLYLVSIPELKT

SEQ ID NO: 62145 - protein, 32 aa, Artificial Sequence; identical to SEQ ID NO: 17650
  Cyclic GFR-binding peptide
  MOD_RES (1), (32): Xaa is C or S

SEQ ID NO: 62146 - protein, 37 aa, Artificial Sequence; identical to SEQ ID NO: 17653
  Cyclic GFR-binding peptide
  MOD_RES (1), (33), (34): Xaa is C or S

SEQ ID NO: 62147 - protein, 29 aa, Artificial Sequence
  Cyclic GFR-binding peptide
  MOD_RES (1), (1): Xaa is C or S
XSRVIMEYQKYVKPKRGVIYLISIPSLAQ

SEQ ID NO: 62148 - protein, 34 aa, Artificial Sequence
  Cyclic GFR-binding peptide
  MOD_RES (30), (31): Xaa is C or S
KVVMEYKFKVKPTRGVLYLISIPELDQPVXXPSA

SEQ ID NO: 62149 - protein, 32 aa, Artificial Sequence; identical to SEQ ID NO: 17662
  Cyclic GFR-binding peptide
  MOD_RES (31), (32): Xaa is C or S

SEQ ID NO: 62150 - protein, 20 aa, Artificial Sequence
  Cyclic GFR-binding peptide
YHYKLVVNNAADKYLISIPS

SEQ ID NO: 62151 - protein, 33 aa, Artificial Sequence; identical to SEQ ID NO: 17663
  Cyclic GFR-binding peptide
  MOD_RES (1), (33): Xaa is C or S

SEQ ID NO: 62152 - protein, 32 aa, Artificial Sequence
  Cyclic GFR-binding peptide
  MOD_RES (2), (4): Xaa is C or S
HXGXAKVVMNEYKFKIVNNSSDLYLVSIPELK

SEQ ID NO: 62153 - protein, 38 aa, Artificial Sequence; identical to SEQ ID NO: 17669
  Cyclic GFR-binding peptide
  MOD_RES (1), (3), (34), (35): Xaa is C or S

SEQ ID NO: 62154 - protein, 24 aa, Artificial Sequence
  Cyclic GFR-binding peptide
GEYQKYYTVVGKDIYLISIPSLKT

SEQ ID NO: 62155 - protein, 32 aa, Artificial Sequence
  Cyclic GFR-binding peptide
  MOD_RES (1), (3): Xaa is C or S
XGXGEVVMDEYKFKVVKENEDLYLMSIPELET

SEQ ID NO: 62156 - protein, 29 aa, Artificial Sequence
  Cyclic GFR-binding peptide
  MOD_RES (26), (27): Xaa is C or S
EYQKYVKPTRGVIYLISIPSLDQPVXXPS

SEQ ID NO: 62157 - protein, 33 aa, Artificial Sequence; identical to SEQ ID NO: 17676
  Cyclic GFR-binding peptide
  MOD_RES (1), (33): Xaa is C or S

SEQ ID NO: 62158 - protein, 20 aa, Artificial Sequence
  Cyclic GFR-binding peptide
EYQKYYTVVGKDIYLISIPS

SEQ ID NO: 62159 - protein, 26 aa, Artificial Sequence
  Cyclic GFR-binding peptide
MEYKFKVKPKRGVLYLISIPELAQPV

SEQ ID NO: 62160 - protein, 28 aa, Artificial Sequence
  Cyclic GFR-binding peptide
  MOD_RES (2), (2): Xaa is C or S
GXESVAMGEYQKYYTVVGKDIYLISIPS

SEQ ID NO: 62161 - protein, 28 aa, Artificial Sequence
  Cyclic GFR-binding peptide
VMDRYKKLVVNNAADFYLISIANLRAPV

SEQ ID NO: 62162 - protein, 21 aa, Artificial Sequence
  Cyclic GFR-binding peptide
EYQKYVKPTRGVIYLISIPSL

SEQ ID NO: 62163 - protein, 27 aa, Artificial Sequence
  Cyclic GFR-binding peptide
  MOD_RES (27), (27): Xaa is C or S
NEYQKYIVNSSDDIYLVSIPSLKTPAX

SEQ ID NO: 62164 - protein, 39 aa, Artificial Sequence; identical to SEQ ID NO: 17686
  Cyclic GFR-binding peptide
  MOD_RES (1), (3), (35): Xaa is C or S

SEQ ID NO: 62165 - protein, 34 aa, Artificial Sequence
  Cyclic GFR-binding peptide
  MOD_RES (30), (31): Xaa is C or S
VVMNEYQKYIVNSSDDIYLVSIPSLQTPAXXPKP

SEQ ID NO: 62166 - protein, 36 aa, Artificial Sequence; identical to SEQ ID NO: 17691
  Cyclic GFR-binding peptide
  MOD_RES (1), (3), (35), (36): Xaa is C or S

SEQ ID NO: 62167 - protein, 31 aa, Artificial Sequence
  Cyclic GFR-binding peptide
  MOD_RES (28), (29): Xaa is C or S
MDRYKKLVVNNAADFYLISIANLRAPVXXSA

SEQ ID NO: 62168 - protein, 25 aa, Artificial Sequence
  Cyclic GFR-binding peptide
MEYKFKVKPKRGVLYLISIPELAQP

SEQ ID NO: 62169 - protein, 35 aa, Artificial Sequence; identical to SEQ ID NO: 17694
  Cyclic GFR-binding peptide
  MOD_RES (1), (3), (35): Xaa is C or S

SEQ ID NO: 62170 - protein, 24 aa, Artificial Sequence
  Cyclic GFR-binding peptide
MEEYKFKVVKDYEDLYLMSIPELE

SEQ ID NO: 62171 - protein, 30 aa, Artificial Sequence
  Cyclic GFR-binding peptide
  MOD_RES (1), (3): Xaa is C or S
XGXESVAMGRYKKLYTVVGKDFYLISIANL

SEQ ID NO: 62172 - protein, 28 aa, Artificial Sequence
  Cyclic GFR-binding peptide
  MOD_RES (1), (1): Xaa is C or S
XSKVIMEYKFKIKPTKGILYLISIPELD

SEQ ID NO: 62173 - protein, 27 aa, Artificial Sequence
  Cyclic GFR-binding peptide
  MOD_RES (2), (2): Xaa is C or S
KXSKVVMEYKFKVKPTRGVLYLISIPE

SEQ ID NO: 62174 - protein, 37 aa, Artificial Sequence; identical to SEQ ID NO: 17704
  Cyclic GFR-binding peptide
  MOD_RES (2), (33), (34): Xaa is C or S

SEQ ID NO: 62175 - protein, 27 aa, Artificial Sequence
  Cyclic GFR-binding peptide
  MOD_RES (26), (27): Xaa is C or S
EYKFKIVNSSDDLYLVSIPELQTPAXX

SEQ ID NO: 62176 - protein, 29 aa, Artificial Sequence
  Cyclic GFR-binding peptide
AAAAAAAAAEYKFKVKPKRGVLYLISIPE

SEQ ID NO: 62177 - protein, 39 aa, Artificial Sequence; identical to SEQ ID NO: 17706
  Cyclic GFR-binding peptide
  MOD_RES (1), (33), (34): Xaa is C or S

SEQ ID NO: 62178 - protein, 31 aa, Artificial Sequence
  Cyclic GFR-binding peptide
  MOD_RES (1), (3): Xaa is C or S
XGXEAVSMGEEYQKYTPVGMDDIYLVSIPSL

SEQ ID NO: 62179 - protein, 30 aa, Artificial Sequence
  Cyclic GFR-binding peptide
  MOD_RES (1), (1): Xaa is C or S
XSKVIMEYKFKIKPTKGILYLISIPELDQS

SEQ ID NO: 62180 - protein, 28 aa, Artificial Sequence
  Cyclic GFR-binding peptide
  MOD_RES (26), (27): Xaa is C or S
EYQKYIVNSSDDIYLVSIPSLKTPAXXP

SEQ ID NO: 62181 - protein, 29 aa, Artificial Sequence
  Cyclic GFR-binding peptide
AAAAAAAAAEYQKYYTVVGKDIYLISIPS

SEQ ID NO: 62182 - protein, 33 aa, Artificial Sequence; identical to SEQ ID NO: 17708
  Cyclic GFR-binding peptide
  MOD_RES (31), (31): Xaa is C or S

SEQ ID NO: 62183 - protein, 27 aa, Artificial Sequence
  Cyclic GFR-binding peptide
VMDEYKFKVVNNAADLYLISIPELRAP

SEQ ID NO: 62184 - protein, 23 aa, Artificial Sequence
  Cyclic GFR-binding peptide
MNEYQKYIVNSSDDIYLVSIPSL

SEQ ID NO: 62185 - protein, 24 aa, Artificial Sequence
  Cyclic GFR-binding peptide
GRYKKLYTVVGKDFYLISIANLKT

SEQ ID NO: 62186 - protein, 37 aa, Artificial Sequence; identical to SEQ ID NO: 17712
  Cyclic GFR-binding peptide
  MOD_RES (2), (4), (36): Xaa is C or S

SEQ ID NO: 62187 - protein, 28 aa, Artificial Sequence
  Cyclic GFR-binding peptide
VMNEYKFKIVNSSDDLYLVSIPELQTPA

SEQ ID NO: 62188 - protein, 39 aa, Artificial Sequence; identical to SEQ ID NO: 17714
  Cyclic GFR-binding peptide
  MOD_RES (2), (4), (36), (37): Xaa is C or S

SEQ ID NO: 62189 - protein, 26 aa, Artificial Sequence
  Cyclic GFR-binding peptide
AKVVMNEYKFKIVNNSSDLYLVSIPE

SEQ ID NO: 62190 - protein, 35 aa, Artificial Sequence; identical to SEQ ID NO: 17716
  Cyclic GFR-binding peptide
  MOD_RES (32), (33): Xaa is C or S

SEQ ID NO: 62191 - protein, 34 aa, Artificial Sequence; identical to SEQ ID NO: 17719
  Cyclic GFR-binding peptide
  MOD_RES (1), (33), (34): Xaa is C or S

SEQ ID NO: 62192 - protein, 32 aa, Artificial Sequence
  Cyclic GFR-binding peptide
  MOD_RES (2), (2): Xaa is C or S
GXGEVVMDEYKFKVVKENEDLYLMSIPELETP

SEQ ID NO: 62193 - protein, 25 aa, Artificial Sequence
  Cyclic GFR-binding peptide
VVMDYHYKLVVNNAADKYLISIPSL

SEQ ID NO: 62194 - protein, 37 aa, Artificial Sequence; identical to SEQ ID NO: 17721
  Cyclic GFR-binding peptide
  MOD_RES (32), (32): Xaa is C or S

SEQ ID NO: 62195 - protein, 23 aa, Artificial Sequence
  Cyclic GFR-binding peptide
EYKFKIVNSSDDLYLVSIPELKT

SEQ ID NO: 62196 - protein, 31 aa, Artificial Sequence
  Cyclic GFR-binding peptide
  MOD_RES (2), (4): Xaa is C or S
HXGXAKVVMNEYQKYIVNNSSDIYLVSIPSL

SEQ ID NO: 62197 - protein, 35 aa, Artificial Sequence; identical to SEQ ID NO: 17724
  Cyclic GFR-binding peptide
  MOD_RES (32), (33): Xaa is C or S

SEQ ID NO: 62198 - protein, 29 aa, Artificial Sequence
  Cyclic GFR-binding peptide
  MOD_RES (2), (2): Xaa is C or S
KXSKVIMEYQKYIKPTKGIIYLISIPSLD

SEQ ID NO: 62199 - protein, 33 aa, Artificial Sequence
  Cyclic GFR-binding peptide
  MOD_RES (29), (30): Xaa is C or S
AMGRYKKLYTVVGKDFYLISIANLKTPVXXAKS

SEQ ID NO: 62200 - protein, 37 aa, Artificial Sequence; identical to SEQ ID NO: 17730
  Cyclic GFR-binding peptide
  MOD_RES (1), (33), (34): Xaa is C or S

SEQ ID NO: 62201 - protein, 32 aa, Artificial Sequence
  Cyclic GFR-binding peptide
  MOD_RES (1), (1): Xaa is C or S
XEAVSMGEEYKFKTPVGMDDLYLVSIPELKTP

SEQ ID NO: 62202 - protein, 25 aa, Artificial Sequence
  Cyclic GFR-binding peptide
EVVMDEYKFKVVNNAADLYLISIPE

SEQ ID NO: 62203 - protein, 35 aa, Artificial Sequence; identical to SEQ ID NO: 17733
  Cyclic GFR-binding peptide
  MOD_RES (1), (32), (33): Xaa is C or S

SEQ ID NO: 62204 - protein, 33 aa, Artificial Sequence
  Cyclic GFR-binding peptide
  MOD_RES (1), (3): Xaa is C or S
XGXAEVVMDYHYKLVVNNAADKYLISIPSLRAP

SEQ ID NO: 62205 - protein, 29 aa, Artificial Sequence
  Cyclic GFR-binding peptide
AAAAAAAAAEYKFKVVKENEDLYLMSIPE

SEQ ID NO: 62206 - protein, 34 aa, Artificial Sequence; identical to SEQ ID NO: 17735
  Cyclic GFR-binding peptide
  MOD_RES (2), (34): Xaa is C or S

SEQ ID NO: 62207 - protein, 23 aa, Artificial Sequence
  Cyclic GFR-binding peptide
VMDEYKFKVVKENEDLYLMSIPE

SEQ ID NO: 62208 - protein, 28 aa, Artificial Sequence
  Cyclic GFR-binding peptide
  MOD_RES (2), (2): Xaa is C or S
GXSRVVMNEYQKYIVNSSDDIYLVSIPS

SEQ ID NO: 62209 - protein, 34 aa, Artificial Sequence; identical to SEQ ID NO: 17736
  Cyclic GFR-binding peptide
  MOD_RES (1), (32), (33): Xaa is C or S

SEQ ID NO: 62210 - protein, 28 aa, Artificial Sequence
  Cyclic GFR-binding peptide
  MOD_RES (26), (27): Xaa is C or S
EYQKYVVKENEDIYLMSIPSLETPVXXA

SEQ ID NO: 62211 - protein, 33 aa, Artificial Sequence; identical to SEQ ID NO: 17743
  Cyclic GFR-binding peptide
  MOD_RES (31), (32): Xaa is C or S

SEQ ID NO: 62212 - protein, 29 aa, Artificial Sequence
  Cyclic GFR-binding peptide
EVVMDEYKFKVVKENEDLYLMSIPELETP

SEQ ID NO: 62213 - protein, 38 aa, Artificial Sequence; identical to SEQ ID NO: 17748
  Cyclic GFR-binding peptide
  MOD_RES (1), (33), (34): Xaa is C or S

SEQ ID NO: 62214 - protein, 34 aa, Artificial Sequence; identical to SEQ ID NO: 17752
  Cyclic GFR-binding peptide
  MOD_RES (1), (33), (34): Xaa is C or S

SEQ ID NO: 62215 - protein, 32 aa, Artificial Sequence
  Cyclic GFR-binding peptide
  MOD_RES (30), (31): Xaa is C or S
VVMNEYKFKIVNSSDDLYLVSIPELKTPAXXP

SEQ ID NO: 62216 - protein, 36 aa, Artificial Sequence; identical to SEQ ID NO: 17754
  Cyclic GFR-binding peptide
  MOD_RES (1), (3), (34), (35): Xaa is C or S

SEQ ID NO: 62217 - protein, 30 aa, Artificial Sequence
  Cyclic GFR-binding peptide
  MOD_RES (27), (28): Xaa is C or S
GEYQKYYTVVGKDIYLISIPSLKTPVXXAK

SEQ ID NO: 62218 - protein, 28 aa, Artificial Sequence
  Cyclic GFR-binding peptide
  MOD_RES (27), (28): Xaa is C or S
GRYKKLYTVVGKDFYLISIANLKTPVXX

SEQ ID NO: 62219 - protein, 26 aa, Artificial Sequence
  Cyclic GFR-binding peptide
ESVAMGRYKKLYTVVGKDFYLISIAN

SEQ ID NO: 62220 - protein, 31 aa, Artificial Sequence; identical to SEQ ID NO: 17757
  Cyclic GFR-binding peptide
  MOD_RES (1), (1): Xaa is C or S

SEQ ID NO: 62221 - protein, 24 aa, Artificial Sequence
  Cyclic GFR-binding peptide
EYKFKIVNNSSDLYLVSIPELKTP

SEQ ID NO: 62222 - protein, 22 aa, Artificial Sequence
  Cyclic GFR-binding peptide
VMEYQKYVKPTRGVIYLISIPS

SEQ ID NO: 62223 - protein, 33 aa, Artificial Sequence; identical to SEQ ID NO: 17758
  Cyclic GFR-binding peptide
  MOD_RES (1), (32), (33): Xaa is C or S

SEQ ID NO: 62224 - protein, 30 aa, Artificial Sequence
  Cyclic GFR-binding peptide
SRVVMNEYQKYIVNSSDDIYLVSIPSLKTP

SEQ ID NO: 62225 - protein, 31 aa, Artificial Sequence
  Cyclic GFR-binding peptide
  MOD_RES (26), (27): Xaa is C or S
EYQKYIVNSSDDIYLVSIPSLKTPAXXPKPV

SEQ ID NO: 62226 - protein, 32 aa, Artificial Sequence
  Cyclic GFR-binding peptide
  MOD_RES (1), (3): Xaa is C or S
XGXEAVSMGEEYKFKTPVGMDDLYLVSIPELK

SEQ ID NO: 62227 - protein, 34 aa, Artificial Sequence
  Cyclic GFR-binding peptide
  MOD_RES (29), (30): Xaa is C or S
VIMEYKFKIKPTKGILYLISIPELDQSVXXPSAS

SEQ ID NO: 62228 - protein, 28 aa, Artificial Sequence
  Cyclic GFR-binding peptide
GEVVMEEYKFKVVKDYEDLYLMSIPELE

SEQ ID NO: 62229 - protein, 26 aa, Artificial Sequence
  Cyclic GFR-binding peptide
VMEEYQKYVVKDYEDIYLMSIPSLET

SEQ ID NO: 62230 - protein, 29 aa, Artificial Sequence
  Cyclic GFR-binding peptide
EVVMDYHYKLVVNNAADKYLISIPSLRAP

SEQ ID NO: 62231 - protein, 31 aa, Artificial Sequence
  Cyclic GFR-binding peptide
  MOD_RES (29), (30): Xaa is C or S
VIMEYKFKVKPKRGVLYLISIPELAQPVXXP

SEQ ID NO: 62232 - protein, 36 aa, Artificial Sequence; identical to SEQ ID NO: 17780
  Cyclic GFR-binding peptide
  MOD_RES (2), (33), (34): Xaa is C or S

SEQ ID NO: 62233 - protein, 37 aa, Artificial Sequence; identical to SEQ ID NO: 17781
  Cyclic GFR-binding peptide
  MOD_RES (1), (33), (34): Xaa is C or S

SEQ ID NO: 62234 - protein, 32 aa, Artificial Sequence
  Cyclic GFR-binding peptide
  MOD_RES (2), (4): Xaa is C or S
RXGXESVAMGEYQKYYTVVGKDIYLISIPSLK

SEQ ID NO: 62235 - protein, 31 aa, Artificial Sequence
  Cyclic GFR-binding peptide
  MOD_RES (1), (1): Xaa is C or S
XGEVVMEEYQKYVVKDYEDIYLMSIPSLETP

SEQ ID NO: 62236 - protein, 29 aa, Artificial Sequence
  Cyclic GFR-binding peptide
  MOD_RES (2), (2): Xaa is C or S
GXEAVSMGEEYKFKTPVGMDDLYLVSIPE

SEQ ID NO: 62237 - protein, 35 aa, Artificial Sequence
  Cyclic GFR-binding peptide
  MOD_RES (29), (30): Xaa is C or S
VMEEYQKYVVKDYEDIYLMSIPSLETPVXXAKPIS

SEQ ID NO: 62238 - protein, 32 aa, Artificial Sequence
  Cyclic GFR-binding peptide
  MOD_RES (29), (30): Xaa is C or S
MGEEYKFKTPVGMDDLYLVSIPELKTPVXXAK

SEQ ID NO: 62239 - protein, 35 aa, Artificial Sequence; identical to SEQ ID NO: 17786
  Cyclic GFR-binding peptide
  MOD_RES (32), (33): Xaa is C or S

SEQ ID NO: 62240 - protein, 25 aa, Artificial Sequence
  Cyclic GFR-binding peptide
IMEYKFKVKPKRGVLYLISIPELAQ

SEQ ID NO: 62241 - protein, 28 aa, Artificial Sequence
  Cyclic GFR-binding peptide
  MOD_RES (26), (26): Xaa is C or S
EYKFKIVNSSDDLYLVSIPELKTPAXTP

SEQ ID NO: 62242 - protein, 22 aa, Artificial Sequence
  Cyclic GFR-binding peptide
EYQKYVVKENEDIYLMSIPSLE

SEQ ID NO: 62243 - protein, 34 aa, Artificial Sequence
  Cyclic GFR-binding peptide
  MOD_RES (30), (31): Xaa is C or S
VVMDEYKFKVVNNAADLYLISIPELRAPVXXSAP

SEQ ID NO: 62244 - protein, 42 aa, Artificial Sequence; identical to SEQ ID NO: 17791
  Cyclic GFR-binding peptide
  MOD_RES (2), (4), (36): Xaa is C or S

SEQ ID NO: 62245 - protein, 31 aa, Artificial Sequence
  Cyclic GFR-binding peptide
  MOD_RES (1), (1): Xaa is C or S
XAEVVMDRYKKLVVNNAADFYLISIANLRAP

SEQ ID NO: 62246 - protein, 31 aa, Artificial Sequence
  Cyclic GFR-binding peptide
  MOD_RES (1), (1): Xaa is C or S
XAEVVMDYHYKLVVNNAADKYLISIPSLRAP

SEQ ID NO: 62247 - protein, 24 aa, Artificial Sequence
  Cyclic GFR-binding peptide
MEEYQKYVVKDYEDIYLMSIPSLE

SEQ ID NO: 62248 - protein, 40 aa, Artificial Sequence; identical to SEQ ID NO: 17794
  Cyclic GFR-binding peptide
  MOD_RES (2), (4), (35), (36): Xaa is C or S

SEQ ID NO: 62249 - protein, 30 aa, Artificial Sequence
  Cyclic GFR-binding peptide
ARVVMNEYKFKIVNSSDDLYLVSIPELQTP

SEQ ID NO: 62250 - protein, 32 aa, Artificial Sequence
  Cyclic GFR-binding peptide
  MOD_RES (2), (2): Xaa is C or S
GXAKVVMNEYKFKIVNNSSDLYLVSIPELKTP

SEQ ID NO: 62251 - protein, 35 aa, Artificial Sequence
  Cyclic GFR-binding peptide
  MOD_RES (30), (31): Xaa is C or S
VVMEEYQKYVVKDYEDIYLMSIPSLETPVXXAKPI

SEQ ID NO: 62252 - protein, 30 aa, Artificial Sequence; identical to SEQ ID NO: 17797
  Cyclic GFR-binding peptide

SEQ ID NO: 62253 - protein, 30 aa, Artificial Sequence
  Cyclic GFR-binding peptide
  MOD_RES (29), (30): Xaa is C or S
VMDRYKKLVVNNAADFYLISIANLRAPVXX

SEQ ID NO: 62254 - protein, 39 aa, Artificial Sequence; identical to SEQ ID NO: 17798
  Cyclic GFR-binding peptide
  MOD_RES (2), (4), (35), (36): Xaa is C or S

SEQ ID NO: 62255 - protein, 38 aa, Artificial Sequence; identical to SEQ ID NO: 17800
  Cyclic GFR-binding peptide
  MOD_RES (33), (34): Xaa is C or S

SEQ ID NO: 62256 - protein, 26 aa, Artificial Sequence
  Cyclic GFR-binding peptide
  MOD_RES (1), (1): Xaa is C or S
XSRVIMEYKFKVKPKRGVLYLISIPE

SEQ ID NO: 62257 - protein, 32 aa, Artificial Sequence
  Cyclic GFR-binding peptide
  MOD_RES (2), (2): Xaa is C or S
GXESVAMGYHYKLYTVVGKDKYLISIPSLKTP

SEQ ID NO: 62258 - protein, 29 aa, Artificial Sequence
  Cyclic GFR-binding peptide
  MOD_RES (2), (4): Xaa is C or S
SXKXSKVIMEYKFKIKPTKGILYLISIPE

SEQ ID NO: 62259 - protein, 29 aa, Artificial Sequence
  Cyclic GFR-binding peptide
AAAAAAAAAEYQKYIVNNSSDIYLVSIPS

SEQ ID NO: 62260 - protein, 21 aa, Artificial Sequence
  Cyclic GFR-binding peptide
EEYKFKVVKDYEDLYLMSIPE

SEQ ID NO: 62261 - protein, 34 aa, Artificial Sequence; identical to SEQ ID NO: 17812
  Cyclic GFR-binding peptide
  MOD_RES (31), (32): Xaa is C or S

SEQ ID NO: 62262 - protein, 36 aa, Artificial Sequence; identical to SEQ ID NO: 17811
  Cyclic GFR-binding peptide
  MOD_RES (1), (32), (33): Xaa is C or S

SEQ ID NO: 62263 - protein, 36 aa, Artificial Sequence; identical to SEQ ID NO: 17814
  Cyclic GFR-binding peptide
  MOD_RES (1), (33), (34): Xaa is C or S

SEQ ID NO: 62264 - protein, 30 aa, Artificial Sequence
  Cyclic GFR-binding peptide
  MOD_RES (30), (30): Xaa is C or S
KVIMEYKFKIKPTKGILYLISIPELDQSVX

SEQ ID NO: 62265 - protein, 23 aa, Artificial Sequence
  Cyclic GFR-binding peptide
NEYQKYIVNSSDDIYLVSIPSLK

SEQ ID NO: 62266 - protein, 38 aa, Artificial Sequence; identical to SEQ ID NO: 17818
  Cyclic GFR-binding peptide
  MOD_RES (1), (32), (33): Xaa is C or S

SEQ ID NO: 62267 - protein, 36 aa, Artificial Sequence; identical to SEQ ID NO: 17820
  Cyclic GFR-binding peptide
  MOD_RES (2), (4), (36): Xaa is C or S

SEQ ID NO: 62268 - protein, 34 aa, Artificial Sequence; identical to SEQ ID NO: 17821
  Cyclic GFR-binding peptide
  MOD_RES (32), (33): Xaa is C or S

SEQ ID NO: 62269 - protein, 28 aa, Artificial Sequence
  Cyclic GFR-binding peptide
KVVMNEYKFKIVNNSSDLYLVSIPELKT

SEQ ID NO: 62270 - protein, 29 aa, Artificial Sequence
  Cyclic GFR-binding peptide
KVIMEYKFKIKPTKGILYLISIPELDQSV

SEQ ID NO: 62271 - protein, 21 aa, Artificial Sequence
  Cyclic GFR-binding peptide
RYKKLYTVVGKDFYLISIANL

SEQ ID NO: 62272 - protein, 36 aa, Artificial Sequence
  Cyclic GFR-binding peptide
  MOD_RES (30), (31): Xaa is C or S
VVMNEYQKYIVNNSSDIYLVSIPSLKTPAXXAKPVA

SEQ ID NO: 62273 - protein, 30 aa, Artificial Sequence
  Cyclic GFR-binding peptide
  MOD_RES (2), (4): Xaa is C or S
RXGXGEVVMEEYKFKVVKDYEDLYLMSIPE

SEQ ID NO: 62274 - protein, 36 aa, Artificial Sequence; identical to SEQ ID NO: 17832
  Cyclic GFR-binding peptide
  MOD_RES (1), (32), (33): Xaa is C or S

SEQ ID NO: 62275 - protein, 35 aa, Artificial Sequence; identical to SEQ ID NO: 17834
  Cyclic GFR-binding peptide
  MOD_RES (1), (32), (33): Xaa is C or S

SEQ ID NO: 62276 - protein, 31 aa, Artificial Sequence
  Cyclic GFR-binding peptide
  MOD_RES (1), (3): Xaa is C or S
XKXSKVIMEYQKYIKPTKGIIYLISIPSLDQ

SEQ ID NO: 62277 - protein, 40 aa, Artificial Sequence; identical to SEQ ID NO: 17838
  Cyclic GFR-binding peptide
  MOD_RES (1), (3), (35), (36): Xaa is C or S

SEQ ID NO: 62278 - protein, 29 aa, Artificial Sequence
  Cyclic GFR-binding peptide
VVMDRYKKLVVNNAADFYLISIANLRAPV

SEQ ID NO: 62279 - protein, 26 aa, Artificial Sequence
  Cyclic GFR-binding peptide
VMDEYKFKVVKENEDLYLMSIPELET

SEQ ID NO: 62280 - protein, 24 aa, Artificial Sequence
  Cyclic GFR-binding peptide
DEYKFKVVKENEDLYLMSIPELET

SEQ ID NO: 62281 - protein, 39 aa, Artificial Sequence; identical to SEQ ID NO: 17841
  Cyclic GFR-binding peptide
  MOD_RES (2), (4), (36), (37): Xaa is C or S

SEQ ID NO: 62282 - protein, 33 aa, Artificial Sequence
  Cyclic GFR-binding peptide
  MOD_RES (27), (28): Xaa is C or S
MEYKFKVKPTRGVLYLISIPELDQPVXXPSASA

SEQ ID NO: 62283 - protein, 36 aa, Artificial Sequence; identical to SEQ ID NO: 17844
  Cyclic GFR-binding peptide
  MOD_RES (1), (33), (34): Xaa is C or S

SEQ ID NO: 62284 - protein, 38 aa, Artificial Sequence; identical to SEQ ID NO: 17845
  Cyclic GFR-binding peptide
  MOD_RES (32), (33): Xaa is C or S

SEQ ID NO: 62285 - protein, 33 aa, Artificial Sequence
  Cyclic GFR-binding peptide
  MOD_RES (29), (30): Xaa is C or S
VMNEYQKYIVNSSDDIYLVSIPSLKTPAXXPKP

SEQ ID NO: 62286 - protein, 37 aa, Artificial Sequence; identical to SEQ ID NO: 17847
  Cyclic GFR-binding peptide
  MOD_RES (1), (3), (35), (36): Xaa is C or S

SEQ ID NO: 62287 - protein, 38 aa, Artificial Sequence; identical to SEQ ID NO: 17846
  Cyclic GFR-binding peptide
  MOD_RES (1), (3), (35), (36): Xaa is C or S

SEQ ID NO: 62288 - protein, 28 aa, Artificial Sequence
  Cyclic GFR-binding peptide
  MOD_RES (26), (27): Xaa is C or S
EYKFKVVNNAADLYLISIPELRAPVXXS

SEQ ID NO: 62289 - protein, 31 aa, Artificial Sequence; identical to SEQ ID NO: 17850
  Cyclic GFR-binding peptide

SEQ ID NO: 62290 - protein, 36 aa, Artificial Sequence
  Cyclic GFR-binding peptide
  MOD_RES (30), (31): Xaa is C or S
VVMDRYKKLVVNNAADFYLISIANLRAPVXXSAPAA

SEQ ID NO: 62291 - protein, 23 aa, Artificial Sequence
  Cyclic GFR-binding peptide
EEYQKYTPVGMDDIYLVSIPSLK

SEQ ID NO: 62292 - protein, 33 aa, Artificial Sequence
  Cyclic GFR-binding peptide
  MOD_RES (29), (30): Xaa is C or S
VVMEYKFKVKPTRGVLYLISIPELDQPVXXPSA

SEQ ID NO: 62293 - protein, 37 aa, Artificial Sequence; identical to SEQ ID NO: 17852
  Cyclic GFR-binding peptide
  MOD_RES (32), (33): Xaa is C or S

SEQ ID NO: 62294 - protein, 29 aa, Artificial Sequence
  Cyclic GFR-binding peptide
  MOD_RES (29), (29): Xaa is C or S
VMDEYQKYVVKENEDIYLMSIPSLETPVX

SEQ ID NO: 62295 - protein, 33 aa, Artificial Sequence
  Cyclic GFR-binding peptide
  MOD_RES (29), (30): Xaa is C or S
VMNEYKFKIVNSSDDLYLVSIPELQTPAXXPKP

SEQ ID NO: 62296 - protein, 32 aa, Artificial Sequence
  Cyclic GFR-binding peptide
  MOD_RES (26), (27): Xaa is C or S
EYKFKVKPKRGVLYLISIPELAQPVXXPAASA

SEQ ID NO: 62297 - protein, 31 aa, Artificial Sequence; identical to SEQ ID NO: 17857
  Cyclic GFR-binding peptide

SEQ ID NO: 62298 - protein, 32 aa, Artificial Sequence
  Cyclic GFR-binding peptide
  MOD_RES (1), (3): Xaa is C or S
XGXAKVVMNEYQKYIVNNSSDIYLVSIPSLKT

SEQ ID NO: 62299 - protein, 28 aa, Artificial Sequence
  Cyclic GFR-binding peptide
  MOD_RES (26), (27): Xaa is C or S
RYKKLVVNNAADFYLISIANLRAPVXXS

SEQ ID NO: 62300 - protein, 28 aa, Artificial Sequence
  Cyclic GFR-binding peptide
VAMGYHYKLYTVVGKDKYLISIPSLKTP

SEQ ID NO: 62301 - protein, 35 aa, Artificial Sequence; identical to SEQ ID NO: 17862
  Cyclic GFR-binding peptide
  MOD_RES (2), (4): Xaa is C or S

SEQ ID NO: 62302 - protein, 34 aa, Artificial Sequence; identical to SEQ ID NO: 17864
  Cyclic GFR-binding peptide
  MOD_RES (2), (34): Xaa is C or S

SEQ ID NO: 62303 - protein, 35 aa, Artificial Sequence
  Cyclic GFR-binding peptide
  MOD_RES (32), (33): Xaa is C or S
AVSMGEEYKFKTPVGMDDLYLVSIPELKTPVXXAK

SEQ ID NO: 62304 - protein, 28 aa, Artificial Sequence
  Cyclic GFR-binding peptide
  MOD_RES (26), (27): Xaa is C or S
EYQKYYTVVGKDIYLISIPSLKTPVXXA

SEQ ID NO: 62305 - protein, 30 aa, Artificial Sequence
  Cyclic GFR-binding peptide
  MOD_RES (1), (1): Xaa is C or S
XAEVVMDYHYKLVVNNAADKYLISIPSLRA

SEQ ID NO: 62306 - protein, 30 aa, Artificial Sequence
  Cyclic GFR-binding peptide
  MOD_RES (29), (30): Xaa is C or S
AMGYHYKLYTVVGKDKYLISIPSLKTPVXX

SEQ ID NO: 62307 - protein, 38 aa, Artificial Sequence; identical to SEQ ID NO: 17869
  Cyclic GFR-binding peptide
  MOD_RES (1), (32), (33): Xaa is C or S

SEQ ID NO: 62308 - protein, 31 aa, Artificial Sequence; identical to SEQ ID NO: 17870
  Cyclic GFR-binding peptide
  MOD_RES (31), (31): Xaa is C or S

SEQ ID NO: 62309 - protein, 25 aa, Artificial Sequence
  Cyclic GFR-binding peptide
VIMEYKFKIKPTKGILYLISIPELD

SEQ ID NO: 62310 - protein, 36 aa, Artificial Sequence; identical to SEQ ID NO: 17871
  Cyclic GFR-binding peptide
  MOD_RES (2), (4): Xaa is C or S

SEQ ID NO: 62311 - protein, 26 aa, Artificial Sequence
  Cyclic GFR-binding peptide
  MOD_RES (26), (26): Xaa is C or S
EYQKYVVKENEDIYLMSIPSLETPVX

SEQ ID NO: 62312 - protein, 32 aa, Artificial Sequence; identical to SEQ ID NO: 17875
  Cyclic GFR-binding peptide
  MOD_RES (31), (31): Xaa is C or S

SEQ ID NO: 62313 - protein, 22 aa, Artificial Sequence
  Cyclic GFR-binding peptide
IMEYQKYIKPTKGIIYLISIPS

SEQ ID NO: 62314 - protein, 34 aa, Artificial Sequence
  Cyclic GFR-binding peptide
  MOD_RES (28), (29): Xaa is C or S
GEEYKFKTPVGMDDLYLVSIPELKTPVXXAKGVK

SEQ ID NO: 62315 - protein, 34 aa, Artificial Sequence; identical to SEQ ID NO: 17878
  Cyclic GFR-binding peptide
  MOD_RES (1), (33): Xaa is C or S

SEQ ID NO: 62316 - protein, 22 aa, Artificial Sequence
  Cyclic GFR-binding peptide
IMEYKFKVKPKRGVLYLISIPE

SEQ ID NO: 62317 - protein, 27 aa, Artificial Sequence
  Cyclic GFR-binding peptide
  MOD_RES (27), (27): Xaa is C or S
MEYKFKVKPKRGVLYLISIPELAQPVX

SEQ ID NO: 62318 - protein, 31 aa, Artificial Sequence; identical to SEQ ID NO: 17879
  Cyclic GFR-binding peptide
  MOD_RES (31), (31): Xaa is C or S

SEQ ID NO: 62319 - protein, 27 aa, Artificial Sequence
  Cyclic GFR-binding peptide
EVVMDEYKFKVVKENEDLYLMSIPELE

SEQ ID NO: 62320 - protein, 26 aa, Artificial Sequence
  Cyclic GFR-binding peptide
SVAMGYHYKLYTVVGKDKYLISIPSL

SEQ ID NO: 62321 - protein, 27 aa, Artificial Sequence
  Cyclic GFR-binding peptide
VMEEYKFKVVKDYEDLYLMSIPELETP

SEQ ID NO: 62322 - protein, 35 aa, Artificial Sequence
  Cyclic GFR-binding peptide
  MOD_RES (2), (4): Xaa is C or S
RXGXEAVSMGEEYKFKTPVGMDDLYLVSIPELKTP

SEQ ID NO: 62323 - protein, 37 aa, Artificial Sequence; identical to SEQ ID NO: 17882
  Cyclic GFR-binding peptide
  MOD_RES (32), (33): Xaa is C or S

SEQ ID NO: 62324 - protein, 27 aa, Artificial Sequence
  Cyclic GFR-binding peptide
SMGEEYQKYTPVGMDDIYLVSIPSLKT

SEQ ID NO: 62325 - protein, 29 aa, Artificial Sequence
  Cyclic GFR-binding peptide
AAAAAAAAAEYKFKYTVVGKDLYLISIPE

SEQ ID NO: 62326 - protein, 36 aa, Artificial Sequence; identical to SEQ ID NO: 17889
  Cyclic GFR-binding peptide
  MOD_RES (1), (34), (35): Xaa is C or S

SEQ ID NO: 62327 - protein, 25 aa, Artificial Sequence
  Cyclic GFR-binding peptide
SKVIMEYQKYIKPTKGIIYLISIPS

SEQ ID NO: 62328 - protein, 32 aa, Artificial Sequence
  Cyclic GFR-binding peptide
  MOD_RES (28), (29): Xaa is C or S
MDYHYKLVVNNAADKYLISIPSLRAPVXXSAP

SEQ ID NO: 62329 - protein, 32 aa, Artificial Sequence
  Cyclic GFR-binding peptide
  MOD_RES (1), (3): Xaa is C or S
XGXGEVVMDEYQKYVVKENEDIYLMSIPSLET

SEQ ID NO: 62330 - protein, 34 aa, Artificial Sequence
  Cyclic GFR-binding peptide
  MOD_RES (30), (31): Xaa is C or S
VVMNEYKFKIVNSSDDLYLVSIPELKTPAXXPKP

SEQ ID NO: 62331 - protein, 30 aa, Artificial Sequence
  Cyclic GFR-binding peptide
  MOD_RES (2), (2): Xaa is C or S
GXARVVMNEYKFKIVNSSDDLYLVSIPELQ

SEQ ID NO: 62332 - protein, 33 aa, Artificial Sequence; identical to SEQ ID NO: 17898
  Cyclic GFR-binding peptide
  MOD_RES (2), (2): Xaa is C or S

SEQ ID NO: 62333 - protein, 37 aa, Artificial Sequence; identical to SEQ ID NO: 17899
  Cyclic GFR-binding peptide
  MOD_RES (2), (4), (36), (37): Xaa is C or S

SEQ ID NO: 62334 - protein, 40 aa, Artificial Sequence; identical to SEQ ID NO: 17900
  Cyclic GFR-binding peptide
  MOD_RES (2), (34), (35): Xaa is C or S

SEQ ID NO: 62335 - protein, 39 aa, Artificial Sequence; identical to SEQ ID NO: 17903
  Cyclic GFR-binding peptide
  MOD_RES (2), (34), (35): Xaa is C or S

SEQ ID NO: 62336 - protein, 31 aa, Artificial Sequence
  Cyclic GFR-binding peptide
  MOD_RES (30), (31): Xaa is C or S
RVIMEYKFKVKPKRGVLYLISIPELAQPVXX

SEQ ID NO: 62337 - protein, 29 aa, Artificial Sequence
  Cyclic GFR-binding peptide
  MOD_RES (1), (1): Xaa is C or S
XSKVVMEYKFKVKPTRGVLYLISIPELDQ

SEQ ID NO: 62338 - protein, 35 aa, Artificial Sequence; identical to SEQ ID NO: 17904
  Cyclic GFR-binding peptide
  MOD_RES (1), (33), (34): Xaa is C or S

SEQ ID NO: 62339 - protein, 30 aa, Artificial Sequence; identical to SEQ ID NO: 17907
  Cyclic GFR-binding peptide

SEQ ID NO: 62340 - protein, 29 aa, Artificial Sequence
  Cyclic GFR-binding peptide
VVMDYHYKLVVNNAADKYLISIPSLRAPV

SEQ ID NO: 62341 - protein, 36 aa, Artificial Sequence; identical to SEQ ID NO: 17908
  Cyclic GFR-binding peptide
  MOD_RES (2), (33), (34): Xaa is C or S

SEQ ID NO: 62342 - protein, 26 aa, Artificial Sequence
  Cyclic GFR-binding peptide
  MOD_RES (26), (26): Xaa is C or S
EYKFKIKPTKGILYLISIPELDQSVX

SEQ ID NO: 62343 - protein, 35 aa, Artificial Sequence
  Cyclic GFR-binding peptide
  MOD_RES (30), (31): Xaa is C or S
VVMEEYKFKVVKDYEDLYLMSIPELETPVXXAKPI

SEQ ID NO: 62344 - protein, 27 aa, Artificial Sequence
  Cyclic GFR-binding peptide
RVVMNEYQKYIVNSSDDIYLVSIPSLK

SEQ ID NO: 62345 - protein, 31 aa, Artificial Sequence
  Cyclic GFR-binding peptide
  MOD_RES (27), (28): Xaa is C or S
MEYQKYVKPTRGVIYLISIPSLDQPVXXPSA

SEQ ID NO: 62346 - protein, 33 aa, Artificial Sequence
  Cyclic GFR-binding peptide
  MOD_RES (28), (29): Xaa is C or S
MGYHYKLYTVVGKDKYLISIPSLKTPVXXAKSA

SEQ ID NO: 62347 - protein, 27 aa, Artificial Sequence
  Cyclic GFR-binding peptide
  MOD_RES (27), (27): Xaa is C or S
EEYKFKTPVGMDDLYLVSIPELKTPVX

SEQ ID NO: 62348 - protein, 36 aa, Artificial Sequence; identical to SEQ ID NO: 17915
  Cyclic GFR-binding peptide
  MOD_RES (1), (3), (35), (36): Xaa is C or S

SEQ ID NO: 62349 - protein, 28 aa, Artificial Sequence
  Cyclic GFR-binding peptide
  MOD_RES (1), (1): Xaa is C or S
XESVAMGEYQKYYTVVGKDIYLISIPSL

SEQ ID NO: 62350 - protein, 37 aa, Artificial Sequence; identical to SEQ ID NO: 17917
  Cyclic GFR-binding peptide
  MOD_RES (31), (31): Xaa is C or S

SEQ ID NO: 62351 - protein, 26 aa, Artificial Sequence
  Cyclic GFR-binding peptide
MEYQKYVKPKRGVIYLISIPSLAQPV

SEQ ID NO: 62352 - protein, 30 aa, Artificial Sequence
  Cyclic GFR-binding peptide
  MOD_RES (1), (1): Xaa is C or S
XAEVVMDRYKKLVVNNAADFYLISIANLRA

SEQ ID NO: 62353 - protein, 35 aa, Artificial Sequence; identical to SEQ ID NO: 17919
  Cyclic GFR-binding peptide
  MOD_RES (1), (33), (34): Xaa is C or S

SEQ ID NO: 62354 - protein, 38 aa, Artificial Sequence; identical to SEQ ID NO: 17921
  Cyclic GFR-binding peptide
  MOD_RES (2), (4), (35), (36): Xaa is C or S

SEQ ID NO: 62355 - protein, 35 aa, Artificial Sequence; identical to SEQ ID NO: 17922
  Cyclic GFR-binding peptide
  MOD_RES (1), (33), (34): Xaa is C or S

SEQ ID NO: 62356 - protein, 24 aa, Artificial Sequence
  Cyclic GFR-binding peptide
VVMNEYKFKIVNNSSDLYLVSIPE

SEQ ID NO: 62357 - protein, 28 aa, Artificial Sequence
  Cyclic GFR-binding peptide
EAVSMGEEYKFKTPVGMDDLYLVSIPEL

SEQ ID NO: 62358 - protein, 32 aa, Artificial Sequence; identical to SEQ ID NO: 17927
  Cyclic GFR-binding peptide
  MOD_RES (1), (1): Xaa is C or S

SEQ ID NO: 62359 - protein, 32 aa, Artificial Sequence; identical to SEQ ID NO: 17929
  Cyclic GFR-binding peptide
  MOD_RES (32), (32): Xaa is C or S

SEQ ID NO: 62360 - protein, 28 aa, Artificial Sequence
  Cyclic GFR-binding peptide
VMEEYQKYVVKDYEDIYLMSIPSLETPV

SEQ ID NO: 62361 - protein, 23 aa, Artificial Sequence
  Cyclic GFR-binding peptide
IMEYQKYVKPKRGVIYLISIPSL

SEQ ID NO: 62362 - protein, 29 aa, Artificial Sequence
  Cyclic GFR-binding peptide
  MOD_RES (29), (29): Xaa is C or S
VMNEYKFKIVNSSDDLYLVSIPELKTPAX

SEQ ID NO: 62363 - protein, 23 aa, Artificial Sequence
  Cyclic GFR-binding peptide
EYKFKVKPKRGVLYLISIPELAQ

SEQ ID NO: 62364 - protein, 32 aa, Artificial Sequence
  Cyclic GFR-binding peptide
  MOD_RES (27), (28): Xaa is C or S
DEYKFKVVKENEDLYLMSIPELETPVXXAKPI

SEQ ID NO: 62365 - protein, 37 aa, Artificial Sequence; identical to SEQ ID NO: 17933
  Cyclic GFR-binding peptide
  MOD_RES (1), (3), (34), (35): Xaa is C or S

SEQ ID NO: 62366 - protein, 23 aa, Artificial Sequence
  Cyclic GFR-binding peptide
RYKKLVVNNAADFYLISIANLRA

SEQ ID NO: 62367 - protein, 28 aa, Artificial Sequence
  Cyclic GFR-binding peptide
  MOD_RES (27), (28): Xaa is C or S
GEYQKYYTVVGKDIYLISIPSLKTPVXX

SEQ ID NO: 62368 - protein, 21 aa, Artificial Sequence
  Cyclic GFR-binding peptide
EYKFKVKPKRGVLYLISIPEL

SEQ ID NO: 62369 - protein, 30 aa, Artificial Sequence
  Cyclic GFR-binding peptide
  MOD_RES (27), (28): Xaa is C or S
EEYKFKVVKDYEDLYLMSIPELETPVXXAK

SEQ ID NO: 62370 - protein, 27 aa, Artificial Sequence
  Cyclic GFR-binding peptide
VVMEYQKYVKPTRGVIYLISIPSLDQP

SEQ ID NO: 62371 - protein, 28 aa, Artificial Sequence
  Cyclic GFR-binding peptide
  MOD_RES (27), (28): Xaa is C or S
NEYKFKIVNSSDDLYLVSIPELQTPAXX

SEQ ID NO: 62372 - protein, 34 aa, Artificial Sequence
  Cyclic GFR-binding peptide
  MOD_RES (28), (29): Xaa is C or S
IMEYQKYVKPKRGVIYLISIPSLAQPVXXPAASA

SEQ ID NO: 62373 - protein, 36 aa, Artificial Sequence; identical to SEQ ID NO: 17936
  Cyclic GFR-binding peptide
  MOD_RES (32), (33): Xaa is C or S

SEQ ID NO: 62374 - protein, 35 aa, Artificial Sequence; identical to SEQ ID NO: 17939
  Cyclic GFR-binding peptide
  MOD_RES (32), (33): Xaa is C or S

SEQ ID NO: 62375 - protein, 26 aa, Artificial Sequence
  Cyclic GFR-binding peptide
VMNEYQKYIVNNSSDIYLVSIPSLKT

SEQ ID NO: 62376 - protein, 24 aa, Artificial Sequence
  Cyclic GFR-binding peptide
NEYKFKIVNNSSDLYLVSIPELKT

SEQ ID NO: 62377 - protein, 36 aa, Artificial Sequence; identical to SEQ ID NO: 17945
  Cyclic GFR-binding peptide
  MOD_RES (1), (3), (35), (36): Xaa is C or S

SEQ ID NO: 62378 - protein, 37 aa, Artificial Sequence; identical to SEQ ID NO: 17951
  Cyclic GFR-binding peptide
  MOD_RES (32), (33): Xaa is C or S

SEQ ID NO: 62379 - protein, 27 aa, Artificial Sequence
  Cyclic GFR-binding peptide
  MOD_RES (27), (27): Xaa is C or S
MEYKFKVKPTRGVLYLISIPELDQPVX

SEQ ID NO: 62380 - protein, 30 aa, Artificial Sequence
  Cyclic GFR-binding peptide
  MOD_RES (29), (30): Xaa is C or S
VMNEYKFKIVNNSSDLYLVSIPELKTPAXX

SEQ ID NO: 62381 - protein, 24 aa, Artificial Sequence
  Cyclic GFR-binding peptide
GEEYQKYTPVGMDDIYLVSIPSLK

SEQ ID NO: 62382 - protein, 24 aa, Artificial Sequence
  Cyclic GFR-binding peptide
MDYHYKLVVNNAADKYLISIPSLR

SEQ ID NO: 62383 - protein, 33 aa, Artificial Sequence
  Cyclic GFR-binding peptide
  MOD_RES (32), (33): Xaa is C or S
AVSMGEEYQKYTPVGMDDIYLVSIPSLKTPVXX

SEQ ID NO: 62384 - protein, 28 aa, Artificial Sequence
  Cyclic GFR-binding peptide
  MOD_RES (2), (2): Xaa is C or S
KXSKVIMEYQKYIKPTKGIIYLISIPSL

SEQ ID NO: 62385 - protein, 30 aa, Artificial Sequence
  Cyclic GFR-binding peptide
  MOD_RES (2), (2): Xaa is C or S
GXAKVVMNEYQKYIVNNSSDIYLVSIPSLK

SEQ ID NO: 62386 - protein, 33 aa, Artificial Sequence; identical to SEQ ID NO: 17956
  Cyclic GFR-binding peptide
  MOD_RES (31), (32): Xaa is C or S

SEQ ID NO: 62387 - protein, 25 aa, Artificial Sequence
  Cyclic GFR-binding peptide
MDEYKFKVVKENEDLYLMSIPELET

SEQ ID NO: 62388 - protein, 32 aa, Artificial Sequence; identical to SEQ ID NO: 17959
  Cyclic GFR-binding peptide
  MOD_RES (32), (32): Xaa is C or S

SEQ ID NO: 62389 - protein, 32 aa, Artificial Sequence
  Cyclic GFR-binding peptide
  MOD_RES (28), (29): Xaa is C or S
MEEYKFKVVKDYEDLYLMSIPELETPVXXAKP

SEQ ID NO: 62390 - protein, 24 aa, Artificial Sequence
  Cyclic GFR-binding peptide
EYKFKTPVGMDDLYLVSIPELKTP

SEQ ID NO: 62391 - protein, 30 aa, Artificial Sequence
  Cyclic GFR-binding peptide
  MOD_RES (2), (2): Xaa is C or S
KXSKVIMEYKFKIKPTKGILYLISIPELDQ

SEQ ID NO: 62392 - protein, 25 aa, Artificial Sequence
  Cyclic GFR-binding peptide
VMDEYQKYVVKENEDIYLMSIPSLE

SEQ ID NO: 62393 - protein, 22 aa, Artificial Sequence
  Cyclic GFR-binding peptide
RYKKLVVNNAADFYLISIANLR

SEQ ID NO: 62394 - protein, 32 aa, Artificial Sequence; identical to SEQ ID NO: 17965
  Cyclic GFR-binding peptide
  MOD_RES (31), (32): Xaa is C or S

SEQ ID NO: 62395 - protein, 27 aa, Artificial Sequence
  Cyclic GFR-binding peptide
  MOD_RES (26), (27): Xaa is C or S
EYKFKIKPTKGILYLISIPELDQSVXX

SEQ ID NO: 62396 - protein, 25 aa, Artificial Sequence
  Cyclic GFR-binding peptide
VMNEYKFKIVNNSSDLYLVSIPELK

SEQ ID NO: 62397 - protein, 24 aa, Artificial Sequence
  Cyclic GFR-binding peptide
NEYQKYIVNNSSDIYLVSIPSLKT

SEQ ID NO: 62398 - protein, 37 aa, Artificial Sequence; identical to SEQ ID NO: 17968
  Cyclic GFR-binding peptide
  MOD_RES (2), (4), (36), (37): Xaa is C or S

SEQ ID NO: 62399 - protein, 36 aa, Artificial Sequence; identical to SEQ ID NO: 17969
  Cyclic GFR-binding peptide
  MOD_RES (31), (31): Xaa is C or S

SEQ ID NO: 62400 - protein, 30 aa, Artificial Sequence
  Cyclic GFR-binding peptide
  MOD_RES (1), (3): Xaa is C or S
XKXSRVIMEYQKYVKPKRGVIYLISIPSLA

SEQ ID NO: 62401 - protein, 33 aa, Artificial Sequence; identical to SEQ ID NO: 17971
  Cyclic GFR-binding peptide
  MOD_RES (31), (32): Xaa is C or S

SEQ ID NO: 62402 - protein, 39 aa, Artificial Sequence; identical to SEQ ID NO: 17972
  Cyclic GFR-binding peptide
  MOD_RES (2), (34), (35): Xaa is C or S

SEQ ID NO: 62403 - protein, 38 aa, Artificial Sequence; identical to SEQ ID NO: 17973
  Cyclic GFR-binding peptide
  MOD_RES (1), (34), (35): Xaa is C or S

SEQ ID NO: 62404 - protein, 28 aa, Artificial Sequence
  Cyclic GFR-binding peptide
  MOD_RES (2), (2): Xaa is C or S
GXGEVVMDEYQKYVVKENEDIYLMSIPS

SEQ ID NO: 62405 - protein, 29 aa, Artificial Sequence
  Cyclic GFR-binding peptide
AEVVMDYHYKLVVNNAADKYLISIPSLRA

SEQ ID NO: 62406 - protein, 24 aa, Artificial Sequence
  Cyclic GFR-binding peptide
RVIMEYKFKVKPKRGVLYLISIPE

SEQ ID NO: 62407 - protein, 33 aa, Artificial Sequence
  Cyclic GFR-binding peptide
  MOD_RES (27), (28): Xaa is C or S
DRYKKLVVNNAADFYLISIANLRAPVXXSAPAA

SEQ ID NO: 62408 - protein, 31 aa, Artificial Sequence
  Cyclic GFR-binding peptide
AVSMGEEYKFKTPVGMDDLYLVSIPELKTPV

SEQ ID NO: 62409 - protein, 33 aa, Artificial Sequence; identical to SEQ ID NO: 17981
  Cyclic GFR-binding peptide
  MOD_RES (2), (2): Xaa is C or S

SEQ ID NO: 62410 - protein, 32 aa, Artificial Sequence; identical to SEQ ID NO: 17982
  Cyclic GFR-binding peptide
  MOD_RES (1), (32): Xaa is C or S

SEQ ID NO: 62411 - protein, 20 aa, Artificial Sequence
  Cyclic GFR-binding peptide
EYQKYIKPTKGIIYLISIPS

SEQ ID NO: 62412 - protein, 30 aa, Artificial Sequence
  Cyclic GFR-binding peptide
  MOD_RES (28), (29): Xaa is C or S
MDEYKFKVVKENEDLYLMSIPELETPVXXA

SEQ ID NO: 62413 - protein, 36 aa, Artificial Sequence
  Cyclic GFR-binding peptide
  MOD_RES (30), (31): Xaa is C or S
VVMNEYKFKIVNNSSDLYLVSIPELKTPAXXAKPVA

SEQ ID NO: 62414 - protein, 26 aa, Artificial Sequence
  Cyclic GFR-binding peptide
VVMNEYKFKIVNNSSDLYLVSIPELK

SEQ ID NO: 62415 - protein, 26 aa, Artificial Sequence
  Cyclic GFR-binding peptide
AMGYHYKLYTVVGKDKYLISIPSLKT

SEQ ID NO: 62416 - protein, 32 aa, Artificial Sequence
  Cyclic GFR-binding peptide
  MOD_RES (26), (27): Xaa is C or S
EYQKYTPVGMDDIYLVSIPSLKTPVXXAKGVK

SEQ ID NO: 62417 - protein, 26 aa, Artificial Sequence
  Cyclic GFR-binding peptide
VMNEYQKYIVNSSDDIYLVSIPSLQT

SEQ ID NO: 62418 - protein, 28 aa, Artificial Sequence
  Cyclic GFR-binding peptide
VMDEYKFKVVKENEDLYLMSIPELETPV

SEQ ID NO: 62419 - protein, 25 aa, Artificial Sequence
  Cyclic GFR-binding peptide
SRVIMEYKFKVKPKRGVLYLISIPE

SEQ ID NO: 62420 - protein, 38 aa, Artificial Sequence; identical to SEQ ID NO: 17991
  Cyclic GFR-binding peptide
  MOD_RES (1), (33), (34): Xaa is C or S

SEQ ID NO: 62421 - protein, 33 aa, Artificial Sequence
  Cyclic GFR-binding peptide
  MOD_RES (30), (30): Xaa is C or S
VVMNEYKFKIVNSSDDLYLVSIPELKTPAXTPK

SEQ ID NO: 62422 - protein, 28 aa, Artificial Sequence
  Cyclic GFR-binding peptide
  MOD_RES (1), (1): Xaa is C or S
XAKVVMNEYQKYIVNNSSDIYLVSIPSL

SEQ ID NO: 62423 - protein, 25 aa, Artificial Sequence
  Cyclic GFR-binding peptide
GYHYKLYTVVGKDKYLISIPSLKTP

SEQ ID NO: 62424 - protein, 24 aa, Artificial Sequence
  Cyclic GFR-binding peptide
DEYQKYVVKENEDIYLMSIPSLET

SEQ ID NO: 62425 - protein, 34 aa, Artificial Sequence
  Cyclic GFR-binding peptide
  MOD_RES (30), (31): Xaa is C or S
RVIMEYKFKVKPKRGVLYLISIPELAQPVXXPAA

SEQ ID NO: 62426 - protein, 28 aa, Artificial Sequence
  Cyclic GFR-binding peptide
VMNEYQKYIVNSSDDIYLVSIPSLKTPA

SEQ ID NO: 62427 - protein, 29 aa, Artificial Sequence
  Cyclic GFR-binding peptide
  MOD_RES (2), (2): Xaa is C or S
GXESVAMGYHYKLYTVVGKDKYLISIPSL

SEQ ID NO: 62428 - protein, 30 aa, Artificial Sequence
  Cyclic GFR-binding peptide
  MOD_RES (29), (30): Xaa is C or S
VMNEYKFKIVNSSDDLYLVSIPELQTPAXX

SEQ ID NO: 62429 - protein, 29 aa, Artificial Sequence
  Cyclic GFR-binding peptide
  MOD_RES (27), (28): Xaa is C or S
NEYQKYIVNSSDDIYLVSIPSLKTPAXXP

SEQ ID NO: 62430 - protein, 29 aa, Artificial Sequence
  Cyclic GFR-binding peptide
RVVMNEYQKYIVNSSDDIYLVSIPSLQTP

SEQ ID NO: 62431 - protein, 30 aa, Artificial Sequence
  Cyclic GFR-binding peptide
VSMGEEYQKYTPVGMDDIYLVSIPSLKTPV

SEQ ID NO: 62432 - protein, 29 aa, Artificial Sequence
  Cyclic GFR-binding peptide
  MOD_RES (1), (3): Xaa is C or S
XGXAKVVMNEYQKYIVNNSSDIYLVSIPS

SEQ ID NO: 62433 - protein, 27 aa, Artificial Sequence
  Cyclic GFR-binding peptide
  MOD_RES (27), (27): Xaa is C or S
EEYQKYTPVGMDDIYLVSIPSLKTPVX

SEQ ID NO: 62434 - protein, 27 aa, Artificial Sequence
  Cyclic GFR-binding peptide
MGEEYQKYTPVGMDDIYLVSIPSLKTP

SEQ ID NO: 62435 - protein, 35 aa, Artificial Sequence; identical to SEQ ID NO: 18008
  Cyclic GFR-binding peptide
  MOD_RES (1), (3): Xaa is C or S

SEQ ID NO: 62436 - protein, 32 aa, Artificial Sequence; identical to SEQ ID NO: 18009
  Cyclic GFR-binding peptide
  MOD_RES (1), (1): Xaa is C or S

SEQ ID NO: 62437 - protein, 38 aa, Artificial Sequence; identical to SEQ ID NO: 18010
  Cyclic GFR-binding peptide
  MOD_RES (1), (33), (34): Xaa is C or S

SEQ ID NO: 62438 - protein, 26 aa, Artificial Sequence
  Cyclic GFR-binding peptide
SKVVMEYQKYVKPTRGVIYLISIPSL

SEQ ID NO: 62439 - protein, 26 aa, Artificial Sequence
  Cyclic GFR-binding peptide
  MOD_RES (26), (26): Xaa is C or S
EYQKYYTVVGKDIYLISIPSLKTPVX

SEQ ID NO: 62440 - protein, 39 aa, Artificial Sequence; identical to SEQ ID NO: 18016
  Cyclic GFR-binding peptide
  MOD_RES (1), (3), (34), (35): Xaa is C or S

SEQ ID NO: 62441 - protein, 33 aa, Artificial Sequence; identical to SEQ ID NO: 18017
  Cyclic GFR-binding peptide
  MOD_RES (32), (32): Xaa is C or S

SEQ ID NO: 62442 - protein, 32 aa, Artificial Sequence; identical to SEQ ID NO: 18019
  Cyclic GFR-binding peptide
  MOD_RES (1), (1): Xaa is C or S

SEQ ID NO: 62443 - protein, 23 aa, Artificial Sequence
  Cyclic GFR-binding peptide
VMEEYQKYVVKDYEDIYLMSIPS

SEQ ID NO: 62444 - protein, 35 aa, Artificial Sequence; identical to SEQ ID NO: 18022
  Cyclic GFR-binding peptide
  MOD_RES (31), (32): Xaa is C or S

SEQ ID NO: 62445 - protein, 37 aa, Artificial Sequence; identical to SEQ ID NO: 18023
  Cyclic GFR-binding peptide
  MOD_RES (2), (34), (35): Xaa is C or S

SEQ ID NO: 62446 - protein, 22 aa, Artificial Sequence
  Cyclic GFR-binding peptide
MGYHYKLYTVVGKDKYLISIPS

SEQ ID NO: 62447 - protein, 36 aa, Artificial Sequence; identical to SEQ ID NO: 18026
  Cyclic GFR-binding peptide
  MOD_RES (1), (3), (34), (35): Xaa is C or S

SEQ ID NO: 62448 - protein, 33 aa, Artificial Sequence; identical to SEQ ID NO: 18029
  Cyclic GFR-binding peptide
  MOD_RES (32), (33): Xaa is C or S

SEQ ID NO: 62449 - protein, 36 aa, Artificial Sequence; identical to SEQ ID NO: 18031
  Cyclic GFR-binding peptide
  MOD_RES (2), (33), (34): Xaa is C or S

SEQ ID NO: 62450 - protein, 24 aa, Artificial Sequence
  Cyclic GFR-binding peptide
RVIMEYQKYVKPKRGVIYLISIPS

SEQ ID NO: 62451 - protein, 29 aa, Artificial Sequence
  Cyclic GFR-binding peptide
  MOD_RES (2), (2): Xaa is C or S
GXAKVVMNEYKFKIVNNSSDLYLVSIPEL

SEQ ID NO: 62452 - protein, 29 aa, Artificial Sequence
  Cyclic GFR-binding peptide
  MOD_RES (1), (3): Xaa is C or S
XKXSKVIMEYKFKIKPTKGILYLISIPEL

SEQ ID NO: 62453 - protein, 35 aa, Artificial Sequence; identical to SEQ ID NO: 18035
  Cyclic GFR-binding peptide
  MOD_RES (2), (4), (35): Xaa is C or S

SEQ ID NO: 62454 - protein, 24 aa, Artificial Sequence
  Cyclic GFR-binding peptide
VVMEYKFKVKPTRGVLYLISIPEL

SEQ ID NO: 62455 - protein, 30 aa, Artificial Sequence
  Cyclic GFR-binding peptide
  MOD_RES (2), (2): Xaa is C or S
GXGEVVMDEYQKYVVKENEDIYLMSIPSLE

SEQ ID NO: 62456 - protein, 36 aa, Artificial Sequence; identical to SEQ ID NO: 18037
  Cyclic GFR-binding peptide
  MOD_RES (32), (33): Xaa is C or S

SEQ ID NO: 62457 - protein, 37 aa, Artificial Sequence; identical to SEQ ID NO: 18038
  Cyclic GFR-binding peptide
  MOD_RES (2), (34): Xaa is C or S

SEQ ID NO: 62458 - protein, 21 aa, Artificial Sequence
  Cyclic GFR-binding peptide
EYKFKVVKENEDLYLMSIPEL

SEQ ID NO: 62459 - protein, 33 aa, Artificial Sequence
  Cyclic GFR-binding peptide
  MOD_RES (30), (31): Xaa is C or S
SMGEEYKFKTPVGMDDLYLVSIPELKTPVXXAK

SEQ ID NO: 62460 - protein, 32 aa, Artificial Sequence
  Cyclic GFR-binding peptide
  MOD_RES (26), (26): Xaa is C or S
EYKFKIVNSSDDLYLVSIPELKTPAXTPKTVH

SEQ ID NO: 62461 - protein, 32 aa, Artificial Sequence
  Cyclic GFR-binding peptide
  MOD_RES (26), (27): Xaa is C or S
EYKFKIVNSSDDLYLVSIPELQTPAXXPKPVT

SEQ ID NO: 62462 - protein, 39 aa, Artificial Sequence; identical to SEQ ID NO: 18046
  Cyclic GFR-binding peptide
  MOD_RES (1), (3), (35), (36): Xaa is C or S

SEQ ID NO: 62463 - protein, 31 aa, Artificial Sequence
  Cyclic GFR-binding peptide
  MOD_RES (2), (4): Xaa is C or S
SXKXSRVIMEYQKYVKPKRGVIYLISIPSLA

SEQ ID NO: 62464 - protein, 27 aa, Artificial Sequence
  Cyclic GFR-binding peptide
  MOD_RES (27), (27): Xaa is C or S
MEYQKYVKPKRGVIYLISIPSLAQPVX

SEQ ID NO: 62465 - protein, 39 aa, Artificial Sequence; identical to SEQ ID NO: 18050
  Cyclic GFR-binding peptide
  MOD_RES (2), (34), (35): Xaa is C or S

SEQ ID NO: 62466 - protein, 30 aa, Artificial Sequence
  Cyclic GFR-binding peptide
  MOD_RES (2), (2): Xaa is C or S
GXSRVVMNEYKFKIVNSSDDLYLVSIPELK

SEQ ID NO: 62467 - protein, 37 aa, Artificial Sequence; identical to SEQ ID NO: 18053
  Cyclic GFR-binding peptide
  MOD_RES (2), (4), (36), (37): Xaa is C or S

SEQ ID NO: 62468 - protein, 25 aa, Artificial Sequence
  Cyclic GFR-binding peptide
RVVMNEYKFKIVNSSDDLYLVSIPE

SEQ ID NO: 62469 - protein, 26 aa, Artificial Sequence
  Cyclic GFR-binding peptide
  MOD_RES (26), (26): Xaa is C or S
EYKFKIVNSSDDLYLVSIPELQTPAX

SEQ ID NO: 62470 - protein, 30 aa, Artificial Sequence
  Cyclic GFR-binding peptide
  MOD_RES (2), (2): Xaa is C or S
GXEAVSMGEEYQKYTPVGMDDIYLVSIPSL

SEQ ID NO: 62471 - protein, 29 aa, Artificial Sequence
  Cyclic GFR-binding peptide
  MOD_RES (1), (1): Xaa is C or S
XAEVVMDEYKFKVVNNAADLYLISIPELR

SEQ ID NO: 62472 - protein, 32 aa, Artificial Sequence
  Cyclic GFR-binding peptide
  MOD_RES (26), (27): Xaa is C or S
EYKFKIVNSSDDLYLVSIPELKTPAXXPKPVY

SEQ ID NO: 62473 - protein, 22 aa, Artificial Sequence
  Cyclic GFR-binding peptide
MNEYKFKIVNSSDDLYLVSIPE

SEQ ID NO: 62474 - protein, 39 aa, Artificial Sequence; identical to SEQ ID NO: 18058
  Cyclic GFR-binding peptide
  MOD_RES (1), (33), (34): Xaa is C or S

SEQ ID NO: 62475 - protein, 29 aa, Artificial Sequence
  Cyclic GFR-binding peptide
  MOD_RES (29), (29): Xaa is C or S
MGEEYQKYTPVGMDDIYLVSIPSLKTPVX

SEQ ID NO: 62476 - protein, 31 aa, Artificial Sequence; identical to SEQ ID NO: 18060
  Cyclic GFR-binding peptide
  MOD_RES (31), (31): Xaa is C or S

SEQ ID NO: 62477 - protein, 28 aa, Artificial Sequence
  Cyclic GFR-binding peptide
  MOD_RES (2), (2): Xaa is C or S
KXSKVIMEYKFKIKPTKGILYLISIPEL

SEQ ID NO: 62478 - protein, 32 aa, Artificial Sequence
  Cyclic GFR-binding peptide
  MOD_RES (30), (31): Xaa is C or S
VVMNEYQKYIVNSSDDIYLVSIPSLKTPAXXP

SEQ ID NO: 62479 - protein, 34 aa, Artificial Sequence
  Cyclic GFR-binding peptide
  MOD_RES (29), (30): Xaa is C or S
VMDYHYKLVVNNAADKYLISIPSLRAPVXXSAPA

SEQ ID NO: 62480 - protein, 34 aa, Artificial Sequence
  Cyclic GFR-binding peptide
  MOD_RES (30), (31): Xaa is C or S
VVMNEYQKYIVNSSDDIYLVSIPSLKTPAXXPKP

SEQ ID NO: 62481 - protein, 30 aa, Artificial Sequence
  Cyclic GFR-binding peptide
  MOD_RES (1), (1): Xaa is C or S
XEAVSMGEEYQKYTPVGMDDIYLVSIPSLK

SEQ ID NO: 62482 - protein, 34 aa, Artificial Sequence
  Cyclic GFR-binding peptide
  MOD_RES (2), (4): Xaa is C or S
HXGXSRVVMNEYKFKIVNSSDDLYLVSIPELKTP

SEQ ID NO: 62483 - protein, 32 aa, Artificial Sequence
  Cyclic GFR-binding peptide
  MOD_RES (32), (32): Xaa is C or S
AVSMGEEYQKYTPVGMDDIYLVSIPSLKTPVX

SEQ ID NO: 62484 - protein, 40 aa, Artificial Sequence; identical to SEQ ID NO: 18065
  Cyclic GFR-binding peptide
  MOD_RES (1), (3), (35), (36): Xaa is C or S

SEQ ID NO: 62485 - protein, 35 aa, Artificial Sequence; identical to SEQ ID NO: 18067
  Cyclic GFR-binding peptide
  MOD_RES (1), (3), (35): Xaa is C or S

SEQ ID NO: 62486 - protein, 30 aa, Artificial Sequence
  Cyclic GFR-binding peptide
  MOD_RES (26), (27): Xaa is C or S
EYKFKVVKDYEDLYLMSIPELETPVXXAKP

SEQ ID NO: 62487 - protein, 33 aa, Artificial Sequence
  Cyclic GFR-binding peptide
  MOD_RES (28), (29): Xaa is C or S
MEEYKFKVVKDYEDLYLMSIPELETPVXXAKPI

SEQ ID NO: 62488 - protein, 29 aa, Artificial Sequence
  Cyclic GFR-binding peptide
  MOD_RES (1), (1): Xaa is C or S
XEAVSMGEEYKFKTPVGMDDLYLVSIPEL

SEQ ID NO: 62489 - protein, 32 aa, Artificial Sequence; identical to SEQ ID NO: 18071
  Cyclic GFR-binding peptide
  MOD_RES (31), (32): Xaa is C or S

SEQ ID NO: 62490 - protein, 35 aa, Artificial Sequence; identical to SEQ ID NO: 18072
  Cyclic GFR-binding peptide
  MOD_RES (2), (4): Xaa is C or S

SEQ ID NO: 62491 - protein, 20 aa, Artificial Sequence
  Cyclic GFR-binding peptide
RYKKLVVNNAADFYLISIAN

SEQ ID NO: 62492 - protein, 39 aa, Artificial Sequence; identical to SEQ ID NO: 18078
  Cyclic GFR-binding peptide
  MOD_RES (2), (4), (36), (37): Xaa is C or S

SEQ ID NO: 62493 - protein, 26 aa, Artificial Sequence
  Cyclic GFR-binding peptide
IMEYQKYVKPKRGVIYLISIPSLAQP

SEQ ID NO: 62494 - protein, 39 aa, Artificial Sequence; identical to SEQ ID NO: 18081
  Cyclic GFR-binding peptide
  MOD_RES (1), (33), (34): Xaa is C or S

SEQ ID NO: 62495 - protein, 26 aa, Artificial Sequence
  Cyclic GFR-binding peptide
EEYQKYTPVGMDDIYLVSIPSLKTPV

SEQ ID NO: 62496 - protein, 31 aa, Artificial Sequence
  Cyclic GFR-binding peptide
  MOD_RES (30), (31): Xaa is C or S
RVIMEYQKYVKPKRGVIYLISIPSLAQPVXX

SEQ ID NO: 62497 - protein, 32 aa, Artificial Sequence; identical to SEQ ID NO: 18084
  Cyclic GFR-binding peptide
  MOD_RES (31), (32): Xaa is C or S

SEQ ID NO: 62498 - protein, 27 aa, Artificial Sequence
  Cyclic GFR-binding peptide
AEVVMDYHYKLVVNNAADKYLISIPSL

SEQ ID NO: 62499 - protein, 39 aa, Artificial Sequence; identical to SEQ ID NO: 18087
  Cyclic GFR-binding peptide
  MOD_RES (2), (4), (36): Xaa is C or S

SEQ ID NO: 62500 - protein, 30 aa, Artificial Sequence
  Cyclic GFR-binding peptide
  MOD_RES (30), (30): Xaa is C or S
VVMDYHYKLVVNNAADKYLISIPSLRAPVX

SEQ ID NO: 62501 - protein, 28 aa, Artificial Sequence
  Cyclic GFR-binding peptide
SVAMGRYKKLYTVVGKDFYLISIANLKT

SEQ ID NO: 62502 - protein, 31 aa, Artificial Sequence; identical to SEQ ID NO: 18092
  Cyclic GFR-binding peptide
  MOD_RES (1), (1): Xaa is C or S

SEQ ID NO: 62503 - protein, 36 aa, Artificial Sequence; identical to SEQ ID NO: 18094
  Cyclic GFR-binding peptide
  MOD_RES (1), (3), (35), (36): Xaa is C or S

SEQ ID NO: 62504 - protein, 34 aa, Artificial Sequence
  Cyclic GFR-binding peptide
  MOD_RES (29), (30): Xaa is C or S
VMNEYQKYIVNNSSDIYLVSIPSLKTPAXXAKPV

SEQ ID NO: 62505 - protein, 39 aa, Artificial Sequence; identical to SEQ ID NO: 18098
  Cyclic GFR-binding peptide
  MOD_RES (2), (35), (36): Xaa is C or S

SEQ ID NO: 62506 - protein, 32 aa, Artificial Sequence
  Cyclic GFR-binding peptide
  MOD_RES (29), (30): Xaa is C or S
AMGRYKKLYTVVGKDFYLISIANLKTPVXXAK

SEQ ID NO: 62507 - protein, 27 aa, Artificial Sequence
  Cyclic GFR-binding peptide
SMGEEYKFKTPVGMDDLYLVSIPELKT

SEQ ID NO: 62508 - protein, 38 aa, Artificial Sequence; identical to SEQ ID NO: 18108
  Cyclic GFR-binding peptide
  MOD_RES (1), (3), (35), (36): Xaa is C or S

SEQ ID NO: 62509 - protein, 33 aa, Artificial Sequence; identical to SEQ ID NO: 18112
  Cyclic GFR-binding peptide
  MOD_RES (32), (33): Xaa is C or S

SEQ ID NO: 62510 - protein, 38 aa, Artificial Sequence; identical to SEQ ID NO: 18113
  Cyclic GFR-binding peptide
  MOD_RES (2), (4), (36), (37): Xaa is C or S

SEQ ID NO: 62511 - protein, 37 aa, Artificial Sequence; identical to SEQ ID NO: 18114
  Cyclic GFR-binding peptide
  MOD_RES (2), (4), (36), (37): Xaa is C or S

SEQ ID NO: 62512 - protein, 38 aa, Artificial Sequence; identical to SEQ ID NO: 18115
  Cyclic GFR-binding peptide
  MOD_RES (2), (4), (37), (38): Xaa is C or S

SEQ ID NO: 62513 - protein, 34 aa, Artificial Sequence; identical to SEQ ID NO: 18118
  Cyclic GFR-binding peptide
  MOD_RES (1), (3): Xaa is C or S

SEQ ID NO: 62514 - protein, 34 aa, Artificial Sequence; identical to SEQ ID NO: 18119
  Cyclic GFR-binding peptide
  MOD_RES (31), (32): Xaa is C or S

SEQ ID NO: 62515 - protein, 30 aa, Artificial Sequence; identical to SEQ ID NO: 18120
  Cyclic GFR-binding peptide

SEQ ID NO: 62516 - protein, 28 aa, Artificial Sequence
  Cyclic GFR-binding peptide
AEVVMDYHYKLVVNNAADKYLISIPSLR

SEQ ID NO: 62517 - protein, 40 aa, Artificial Sequence; identical to SEQ ID NO: 18121
  Cyclic GFR-binding peptide
  MOD_RES (2), (34), (35): Xaa is C or S

SEQ ID NO: 62518 - protein, 34 aa, Artificial Sequence; identical to SEQ ID NO: 18123
  Cyclic GFR-binding peptide
  MOD_RES (32), (32): Xaa is C or S

SEQ ID NO: 62519 - protein, 25 aa, Artificial Sequence
  Cyclic GFR-binding peptide
VAMGYHYKLYTVVGKDKYLISIPSL

SEQ ID NO: 62520 - protein, 30 aa, Artificial Sequence
  Cyclic GFR-binding peptide
  MOD_RES (2), (2): Xaa is C or S
KXSKVIMEYQKYIKPTKGIIYLISIPSLDQ

SEQ ID NO: 62521 - protein, 27 aa, Artificial Sequence
  Cyclic GFR-binding peptide
  MOD_RES (26), (27): Xaa is C or S
EYQKYYTVVGKDIYLISIPSLKTPVXX

SEQ ID NO: 62522 - protein, 37 aa, Artificial Sequence; identical to SEQ ID NO: 18128
  Cyclic GFR-binding peptide
  MOD_RES (31), (32): Xaa is C or S

SEQ ID NO: 62523 - protein, 28 aa, Artificial Sequence
  Cyclic GFR-binding peptide
  MOD_RES (1), (1): Xaa is C or S
XAKVVMNEYKFKIVNNSSDLYLVSIPEL

SEQ ID NO: 62524 - protein, 37 aa, Artificial Sequence; identical to SEQ ID NO: 18129
  Cyclic GFR-binding peptide
  MOD_RES (2), (34), (35): Xaa is C or S

SEQ ID NO: 62525 - protein, 35 aa, Artificial Sequence
  Cyclic GFR-binding peptide
  MOD_RES (5), (6): Xaa is C or S
SASPXXVPQDLSPISILYIVGRTPKVYKQYEMVVK

SEQ ID NO: 62526 - protein, 40 aa, Artificial Sequence; identical to SEQ ID NO: 18134
  Cyclic GFR-binding peptide
  MOD_RES (4), (5), (37), (39): Xaa is C or S

SEQ ID NO: 62527 - protein, 32 aa, Artificial Sequence; identical to SEQ ID NO: 18136
  Cyclic GFR-binding peptide
  MOD_RES (1), (2): Xaa is C or S

SEQ ID NO: 62528 - protein, 31 aa, Artificial Sequence
  Cyclic GFR-binding peptide
  MOD_RES (31), (31): Xaa is C or S
PTKLSPISILYIDKGVVTYYKQYEGMAVSEX

SEQ ID NO: 62529 - protein, 29 aa, Artificial Sequence
  Cyclic GFR-binding peptide
  MOD_RES (4), (4): Xaa is C or S
KPTXAPTKLEPISVLYLDDSSNVIKFKYE

SEQ ID NO: 62530 - protein, 22 aa, Artificial Sequence
  Cyclic GFR-binding peptide
KLSPISVLYIDDSSNVIYKQYE

SEQ ID NO: 62531 - protein, 28 aa, Artificial Sequence
  Cyclic GFR-binding peptide
VPTELEPISMLYLDEYDKVVKFKYEEMV

SEQ ID NO: 62532 - protein, 37 aa, Artificial Sequence; identical to SEQ ID NO: 18142
  Cyclic GFR-binding peptide
  MOD_RES (4), (5), (36): Xaa is C or S

SEQ ID NO: 62533 - protein, 32 aa, Artificial Sequence
  Cyclic GFR-binding peptide
  MOD_RES (4), (5): Xaa is C or S
ASPXXVSQDLSPISILYIIGKTPKIYKQYEMI

SEQ ID NO: 62534 - protein, 34 aa, Artificial Sequence; identical to SEQ ID NO: 18147
  Cyclic GFR-binding peptide
  MOD_RES (1), (2), (34): Xaa is C or S

SEQ ID NO: 62535 - protein, 24 aa, Artificial Sequence
  Cyclic GFR-binding peptide
ELEPISMLYLDENEKVVKFKYEDM

SEQ ID NO: 62536 - protein, 35 aa, Artificial Sequence; identical to SEQ ID NO: 18151
  Cyclic GFR-binding peptide
  MOD_RES (1), (33), (35): Xaa is C or S

SEQ ID NO: 62537 - protein, 31 aa, Artificial Sequence; identical to SEQ ID NO: 18153
  Cyclic GFR-binding peptide
  MOD_RES (1), (1): Xaa is C or S

SEQ ID NO: 62538 - protein, 24 aa, Artificial Sequence
  Cyclic GFR-binding peptide
TKLEPISVLYLDDSSNVIKFKYEN

SEQ ID NO: 62539 - protein, 42 aa, Artificial Sequence; identical to SEQ ID NO: 18157
  Cyclic GFR-binding peptide
  MOD_RES (6), (7), (39), (41): Xaa is C or S

SEQ ID NO: 62540 - protein, 23 aa, Artificial Sequence
  Cyclic GFR-binding peptide
KLEPISVLYLDDMGVPTKFKYEE

SEQ ID NO: 62541 - protein, 32 aa, Artificial Sequence
  Cyclic GFR-binding peptide
  MOD_RES (4), (5): Xaa is C or S
ASPXXVSQDLEPISILYLIGKTPKIKFKYEMI

SEQ ID NO: 62542 - protein, 36 aa, Artificial Sequence; identical to SEQ ID NO: 18159
  Cyclic GFR-binding peptide
  MOD_RES (5), (6): Xaa is C or S

SEQ ID NO: 62543 - protein, 26 aa, Artificial Sequence
  Cyclic GFR-binding peptide
QDLSPISILYIIGKTPKIYKQYEMIV

SEQ ID NO: 62544 - protein, 25 aa, Artificial Sequence
  Cyclic GFR-binding peptide
ELEPISMLYLDENEKVVKFKYEDMV

SEQ ID NO: 62545 - protein, 41 aa, Artificial Sequence; identical to SEQ ID NO: 18165
  Cyclic GFR-binding peptide
  MOD_RES (6), (7), (39), (41): Xaa is C or S

SEQ ID NO: 62546 - protein, 31 aa, Artificial Sequence
  Cyclic GFR-binding peptide
  MOD_RES (1), (2): Xaa is C or S
XXVPARLNAISILYFDAANNVVLKKYRDMVV

SEQ ID NO: 62547 - protein, 24 aa, Artificial Sequence
  Cyclic GFR-binding peptide
ELSPISMLYIDENEKVVYKQYEDM

SEQ ID NO: 62548 - protein, 40 aa, Artificial Sequence; identical to SEQ ID NO: 18167
  Cyclic GFR-binding peptide
  MOD_RES (5), (6), (38), (40): Xaa is C or S

SEQ ID NO: 62549 - protein, 27 aa, Artificial Sequence
  Cyclic GFR-binding peptide
TKLSPISILYKDKGVVTYLKYHYGMAV

SEQ ID NO: 62550 - protein, 26 aa, Artificial Sequence
  Cyclic GFR-binding peptide
  MOD_RES (1), (1): Xaa is C or S
XVPARLEPISILYLDAANNVVKFKYE

SEQ ID NO: 62551 - protein, 37 aa, Artificial Sequence; identical to SEQ ID NO: 18173
  Cyclic GFR-binding peptide
  MOD_RES (3), (4), (36): Xaa is C or S

SEQ ID NO: 62552 - protein, 26 aa, Artificial Sequence
  Cyclic GFR-binding peptide
SPISILYIDKGVVTYYKQYEGMAVSE

SEQ ID NO: 62553 - protein, 26 aa, Artificial Sequence
  Cyclic GFR-binding peptide
KLSPISVLYIDSSNNVIYKQYENMVV

SEQ ID NO: 62554 - protein, 34 aa, Artificial Sequence
  Cyclic GFR-binding peptide
  MOD_RES (6), (7): Xaa is C or S
ASASPXXVPQDLEPISILYLVGRTPKVKFKYEMV

SEQ ID NO: 62555 - protein, 29 aa, Artificial Sequence
  Cyclic GFR-binding peptide
  MOD_RES (29), (29): Xaa is C or S
KLSPISILYIDKGVVTYYKQYEGMAVSEX

SEQ ID NO: 62556 - protein, 36 aa, Artificial Sequence
  Cyclic GFR-binding peptide
  MOD_RES (6), (7): Xaa is C or S
TVPKPXXAPTQLSPISVLYIDDSSNVIYKQYENMVV

SEQ ID NO: 62557 - protein, 27 aa, Artificial Sequence
  Cyclic GFR-binding peptide
APTQLSPISVLYIDDSSNVIYKQYENM

SEQ ID NO: 62558 - protein, 33 aa, Artificial Sequence; identical to SEQ ID NO: 18184
  Cyclic GFR-binding peptide
  MOD_RES (1), (33): Xaa is C or S

SEQ ID NO: 62559 - protein, 30 aa, Artificial Sequence
  Cyclic GFR-binding peptide
  MOD_RES (27), (29): Xaa is C or S
SPISILYKDAANNVVLKYHYDMVVEAXGXR

SEQ ID NO: 62560 - protein, 36 aa, Artificial Sequence; identical to SEQ ID NO: 18185
  Cyclic GFR-binding peptide
  MOD_RES (1), (2), (33), (35): Xaa is C or S

SEQ ID NO: 62561 - protein, 23 aa, Artificial Sequence
  Cyclic GFR-binding peptide
ELEPISMLYLDEYDKVVKFKYEE

SEQ ID NO: 62562 - protein, 30 aa, Artificial Sequence
  Cyclic GFR-binding peptide
PTKLNAISILYFDKGVVTYLKKYRGMAVSE

SEQ ID NO: 62563 - protein, 29 aa, Artificial Sequence
  Cyclic GFR-binding peptide
  MOD_RES (3), (4): Xaa is C or S
KAXXVPTELSPISMLYIDENEKVVYKQYE

SEQ ID NO: 62564 - protein, 29 aa, Artificial Sequence
  Cyclic GFR-binding peptide
EPISILYLVGRTPKVKFKYEAAAAAAAAA

SEQ ID NO: 62565 - protein, 25 aa, Artificial Sequence
  Cyclic GFR-binding peptide
PTKLEPISVLYLDDSSNVIKFKYEN

SEQ ID NO: 62566 - protein, 41 aa, Artificial Sequence; identical to SEQ ID NO: 18191
  Cyclic GFR-binding peptide
  MOD_RES (6), (7), (39), (41): Xaa is C or S

SEQ ID NO: 62567 - protein, 31 aa, Artificial Sequence
  Cyclic GFR-binding peptide
  MOD_RES (3), (4): Xaa is C or S
KAXXVPTKLEPISVLYLDDMGVPTKFKYEEG

SEQ ID NO: 62568 - protein, 23 aa, Artificial Sequence
  Cyclic GFR-binding peptide
TKLEPISVLYLDSSNNVIKFKYE

SEQ ID NO: 62569 - protein, 34 aa, Artificial Sequence; identical to SEQ ID NO: 18197
  Cyclic GFR-binding peptide
  MOD_RES (32), (34): Xaa is C or S

SEQ ID NO: 62570 - protein, 32 aa, Artificial Sequence
  Cyclic GFR-binding peptide
  MOD_RES (3), (4): Xaa is C or S
KPXXAPTQLSPISVLYIDDSSNVIYKQYENMV

SEQ ID NO: 62571 - protein, 28 aa, Artificial Sequence
  Cyclic GFR-binding peptide
QDLSPISILYIVGRTPKVYKQYEMVVKS

SEQ ID NO: 62572 - protein, 28 aa, Artificial Sequence
  Cyclic GFR-binding peptide
  MOD_RES (28), (28): Xaa is C or S
LSPISILYKDKGVVTYLKYHYGMAVSEX

SEQ ID NO: 62573 - protein, 30 aa, Artificial Sequence
  Cyclic GFR-binding peptide
  MOD_RES (30), (30): Xaa is C or S
TKLNAISILYFDKGVVTYLKKYRGMAVSEX

SEQ ID NO: 62574 - protein, 40 aa, Artificial Sequence; identical to SEQ ID NO: 18205
  Cyclic GFR-binding peptide
  MOD_RES (5), (6), (38), (40): Xaa is C or S

SEQ ID NO: 62575 - protein, 30 aa, Artificial Sequence
  Cyclic GFR-binding peptide
  MOD_RES (2), (3): Xaa is C or S
AXXVPTELSPISMLYIDEYDKVVYKQYEEM

SEQ ID NO: 62576 - protein, 32 aa, Artificial Sequence
  Cyclic GFR-binding peptide
  MOD_RES (4), (5): Xaa is C or S
SKAXXVPTKLSPISILYIDKGVVTYYKQYEGM

SEQ ID NO: 62577 - protein, 37 aa, Artificial Sequence; identical to SEQ ID NO: 18208
  Cyclic GFR-binding peptide
  MOD_RES (3), (4), (36): Xaa is C or S

SEQ ID NO: 62578 - protein, 31 aa, Artificial Sequence
  Cyclic GFR-binding peptide
  MOD_RES (4), (5): Xaa is C or S
PKPXXAPTKLEPISVLYLDDSSNVIKFKYEN

SEQ ID NO: 62579 - protein, 38 aa, Artificial Sequence; identical to SEQ ID NO: 18210
  Cyclic GFR-binding peptide
  MOD_RES (4), (5), (37): Xaa is C or S

SEQ ID NO: 62580 - protein, 23 aa, Artificial Sequence
  Cyclic GFR-binding peptide
TELEPISMLYLDENEKVVKFKYE

SEQ ID NO: 62581 - protein, 34 aa, Artificial Sequence
  Cyclic GFR-binding peptide
  MOD_RES (4), (5): Xaa is C or S
PKAXXVPTELEPISMLYLDEYDKVVKFKYEEMVV

SEQ ID NO: 62582 - protein, 24 aa, Artificial Sequence
  Cyclic GFR-binding peptide
LSPISILYIVGRKPKVYKQYEMIV

SEQ ID NO: 62583 - protein, 22 aa, Artificial Sequence
  Cyclic GFR-binding peptide
LSPISILYIDKGVVTYYKQYEG

SEQ ID NO: 62584 - protein, 33 aa, Artificial Sequence
  Cyclic GFR-binding peptide
  MOD_RES (5), (6): Xaa is C or S
IPKAXXVPTELSPISMLYIDEYDKVVYKQYEEM

SEQ ID NO: 62585 - protein, 42 aa, Artificial Sequence; identical to SEQ ID NO: 18216
  Cyclic GFR-binding peptide
  MOD_RES (6), (7), (39), (41): Xaa is C or S

SEQ ID NO: 62586 - protein, 38 aa, Artificial Sequence; identical to SEQ ID NO: 18217
  Cyclic GFR-binding peptide
  MOD_RES (3), (4), (36), (38): Xaa is C or S

SEQ ID NO: 62587 - protein, 25 aa, Artificial Sequence
  Cyclic GFR-binding peptide
QLSPISVLYIDDSSNVIYKQYENMV

SEQ ID NO: 62588 - protein, 27 aa, Artificial Sequence
  Cyclic GFR-binding peptide
VPQALSPISILYIVGRKPKVYKQYEMI

SEQ ID NO: 62589 - protein, 31 aa, Artificial Sequence
  Cyclic GFR-binding peptide
  MOD_RES (2), (3): Xaa is C or S
PXXAPTKLSPISVLYIDDSSNVIYKQYENMV

SEQ ID NO: 62590 - protein, 35 aa, Artificial Sequence; identical to SEQ ID NO: 18226
  Cyclic GFR-binding peptide
  MOD_RES (1), (2), (34): Xaa is C or S

SEQ ID NO: 62591 - protein, 33 aa, Artificial Sequence
  Cyclic GFR-binding peptide
  MOD_RES (3), (4): Xaa is C or S
SPXXVSQDLEPISILYLIGKTPKIKFKYEMIVK

SEQ ID NO: 62592 - protein, 22 aa, Artificial Sequence
  Cyclic GFR-binding peptide
DLEPISILYLIGKTPKIKFKYE

SEQ ID NO: 62593 - protein, 34 aa, Artificial Sequence
  Cyclic GFR-binding peptide
  MOD_RES (31), (33): Xaa is C or S
PTKLNAISILYFDKGVVTYLKKYRGMAVSEXGXR

SEQ ID NO: 62594 - protein, 26 aa, Artificial Sequence
  Cyclic GFR-binding peptide
KLSPISVLYIDDSSNVIYKQYENMVV

SEQ ID NO: 62595 - protein, 41 aa, Artificial Sequence; identical to SEQ ID NO: 18228
  Cyclic GFR-binding peptide
  MOD_RES (5), (6), (38), (40): Xaa is C or S

SEQ ID NO: 62596 - protein, 37 aa, Artificial Sequence; identical to SEQ ID NO: 18232
  Cyclic GFR-binding peptide
  MOD_RES (3), (35), (37): Xaa is C or S

SEQ ID NO: 62597 - protein, 31 aa, Artificial Sequence
  Cyclic GFR-binding peptide
  MOD_RES (5), (5): Xaa is C or S
TKPTXAPTKLSPISVLYIDDSSNVIYKQYEN

SEQ ID NO: 62598 - protein, 35 aa, Artificial Sequence; identical to SEQ ID NO: 18244
  Cyclic GFR-binding peptide
  MOD_RES (2), (34): Xaa is C or S

SEQ ID NO: 62599 - protein, 31 aa, Artificial Sequence
  Cyclic GFR-binding peptide
  MOD_RES (3), (4): Xaa is C or S
KAXXVPTKLSPISVLYIDDMGVPTYKQYEEG

SEQ ID NO: 62600 - protein, 25 aa, Artificial Sequence
  Cyclic GFR-binding peptide
VSQDLSPISILYIIGKTPKIYKQYE

SEQ ID NO: 62601 - protein, 35 aa, Artificial Sequence
  Cyclic GFR-binding peptide
  MOD_RES (6), (7): Xaa is C or S
ASASPXXVSQDLEPISILYLIGKTPKIKFKYEMIV

SEQ ID NO: 62602 - protein, 37 aa, Artificial Sequence; identical to SEQ ID NO: 18251
  Cyclic GFR-binding peptide
  MOD_RES (6), (7): Xaa is C or S

SEQ ID NO: 62603 - protein, 30 aa, Artificial Sequence
  Cyclic GFR-binding peptide
  MOD_RES (30), (30): Xaa is C or S
PQDLEPISILYLVGRTPKVKFKYEMVVKSX

SEQ ID NO: 62604 - protein, 26 aa, Artificial Sequence
  Cyclic GFR-binding peptide
VPTELEPISMLYLDEYDKVVKFKYEE

SEQ ID NO: 62605 - protein, 34 aa, Artificial Sequence
  Cyclic GFR-binding peptide
  MOD_RES (31), (33): Xaa is C or S
PTELSPISMLYIDEYDKVVYKQYEEMVVEGXGXR

SEQ ID NO: 62606 - protein, 32 aa, Artificial Sequence; identical to SEQ ID NO: 18253
  Cyclic GFR-binding peptide
  MOD_RES (1), (2): Xaa is C or S

SEQ ID NO: 62607 - protein, 33 aa, Artificial Sequence
  Cyclic GFR-binding peptide
  MOD_RES (5), (6): Xaa is C or S
VPKPXXAPTKLSPISVLYIDDSSNVIYKQYENM

SEQ ID NO: 62608 - protein, 39 aa, Artificial Sequence; identical to SEQ ID NO: 18257
  Cyclic GFR-binding peptide
  MOD_RES (4), (5), (37), (39): Xaa is C or S

SEQ ID NO: 62609 - protein, 28 aa, Artificial Sequence
  Cyclic GFR-binding peptide
ELSPISMLYIDENEKVVYKQYEDMVVEG

SEQ ID NO: 62610 - protein, 34 aa, Artificial Sequence; identical to SEQ ID NO: 18263
  Cyclic GFR-binding peptide
  MOD_RES (3), (4): Xaa is C or S

SEQ ID NO: 62611 - protein, 35 aa, Artificial Sequence; identical to SEQ ID NO: 18265
  Cyclic GFR-binding peptide
  MOD_RES (1), (2), (35): Xaa is C or S

SEQ ID NO: 62612 - protein, 28 aa, Artificial Sequence
  Cyclic GFR-binding peptide
VPQDLSPISILYIVGRTPKVYKQYEMVV

SEQ ID NO: 62613 - protein, 30 aa, Artificial Sequence; identical to SEQ ID NO: 894
  Cyclic GFR-binding peptide

SEQ ID NO: 62614 - protein, 29 aa, Artificial Sequence
  Cyclic GFR-binding peptide
EPISVLYLDDMGVPTKFKYEAAAAAAAAA

SEQ ID NO: 62615 - protein, 33 aa, Artificial Sequence
  Cyclic GFR-binding peptide
  MOD_RES (4), (5): Xaa is C or S
PASXXVPARLEPISILYLDAANNVVKFKYEDMV

SEQ ID NO: 62616 - protein, 30 aa, Artificial Sequence
  Cyclic GFR-binding peptide
  MOD_RES (28), (30): Xaa is C or S
LSPISILYKDAANNVVLKYHYDMVVEAXGX

SEQ ID NO: 62617 - protein, 37 aa, Artificial Sequence; identical to SEQ ID NO: 18274
  Cyclic GFR-binding peptide
  MOD_RES (1), (2), (34), (36): Xaa is C or S

SEQ ID NO: 62618 - protein, 25 aa, Artificial Sequence
  Cyclic GFR-binding peptide
LSPISILYIDKGVVTYYKQYEGMAV

SEQ ID NO: 62619 - protein, 35 aa, Artificial Sequence; identical to SEQ ID NO: 18276
  Cyclic GFR-binding peptide
  MOD_RES (1), (2), (33), (35): Xaa is C or S

SEQ ID NO: 62620 - protein, 36 aa, Artificial Sequence; identical to SEQ ID NO: 18286
  Cyclic GFR-binding peptide
  MOD_RES (1), (33), (35): Xaa is C or S

SEQ ID NO: 62621 - protein, 32 aa, Artificial Sequence
  Cyclic GFR-binding peptide
  MOD_RES (3), (4): Xaa is C or S
SPXXVPQDLSPISILYIVGRTPKVYKQYEMVV

SEQ ID NO: 62622 - protein, 29 aa, Artificial Sequence
  Cyclic GFR-binding peptide
SPISILYIVGRKPKVYKQYEAAAAAAAAA

SEQ ID NO: 62623 - protein, 29 aa, Artificial Sequence
  Cyclic GFR-binding peptide
  MOD_RES (1), (1): Xaa is C or S
XAPTQLEPISVLYLDDSSNVIKFKYENMV

SEQ ID NO: 62624 - protein, 29 aa, Artificial Sequence
  Cyclic GFR-binding peptide
TKLEPISVLYLDDSSNVIKFKYENMVVRS

SEQ ID NO: 62625 - protein, 31 aa, Artificial Sequence
  Cyclic GFR-binding peptide
  MOD_RES (3), (4): Xaa is C or S
ASXXVPARLEPISILYLDAANNVVKFKYEDM

SEQ ID NO: 62626 - protein, 31 aa, Artificial Sequence
  Cyclic GFR-binding peptide
  MOD_RES (30), (30): Xaa is C or S
KLSPISVLYIDDMGVPTYKQYEEGMSVAEXG

SEQ ID NO: 62627 - protein, 36 aa, Artificial Sequence; identical to SEQ ID NO: 18296
  Cyclic GFR-binding peptide
  MOD_RES (1), (33), (35): Xaa is C or S

SEQ ID NO: 62628 - protein, 39 aa, Artificial Sequence; identical to SEQ ID NO: 18298
  Cyclic GFR-binding peptide
  MOD_RES (3), (4), (36), (38): Xaa is C or S

SEQ ID NO: 62629 - protein, 27 aa, Artificial Sequence
  Cyclic GFR-binding peptide
  MOD_RES (1), (1): Xaa is C or S
XVPTKLNAISILYFDKGVVTYLKKYRG

SEQ ID NO: 62630 - protein, 35 aa, Artificial Sequence
  Cyclic GFR-binding peptide
  MOD_RES (6), (7): Xaa is C or S
AAPASXXVPARLEPISILYLDAANNVVKFKYEDMV

SEQ ID NO: 62631 - protein, 33 aa, Artificial Sequence
  Cyclic GFR-binding peptide
  MOD_RES (31), (33): Xaa is C or S
PTELEPISMLYLDEYDKVVKFKYEEMVVEGXGX

SEQ ID NO: 62632 - protein, 30 aa, Artificial Sequence; identical to SEQ ID NO: 897
  Cyclic GFR-binding peptide

SEQ ID NO: 62633 - protein, 36 aa, Artificial Sequence; identical to SEQ ID NO: 18306
  Cyclic GFR-binding peptide
  MOD_RES (1), (33), (35): Xaa is C or S

SEQ ID NO: 62634 - protein, 28 aa, Artificial Sequence
  Cyclic GFR-binding peptide
APTKLSPISVLYIDSSNNVIYKQYENMV

SEQ ID NO: 62635 - protein, 38 aa, Artificial Sequence; identical to SEQ ID NO: 18314
  Cyclic GFR-binding peptide
  MOD_RES (4), (5), (36), (38): Xaa is C or S

SEQ ID NO: 62636 - protein, 28 aa, Artificial Sequence
  Cyclic GFR-binding peptide
PTKLSPISVLYIDDSSNVIYKQYENMVV

SEQ ID NO: 62637 - protein, 22 aa, Artificial Sequence
  Cyclic GFR-binding peptide
ELSPISMLYIDEYDKVVYKQYE

SEQ ID NO: 62638 - protein, 41 aa, Artificial Sequence; identical to SEQ ID NO: 18317
  Cyclic GFR-binding peptide
  MOD_RES (5), (6), (38), (40): Xaa is C or S

SEQ ID NO: 62639 - protein, 30 aa, Artificial Sequence
  Cyclic GFR-binding peptide
  MOD_RES (27), (29): Xaa is C or S
SPISMLYIDENEKVVYKQYEDMVVEGXGXR

SEQ ID NO: 62640 - protein, 38 aa, Artificial Sequence; identical to SEQ ID NO: 18320
  Cyclic GFR-binding peptide
  MOD_RES (6), (7): Xaa is C or S

SEQ ID NO: 62641 - protein, 26 aa, Artificial Sequence
  Cyclic GFR-binding peptide
NAISILYFDAANNVVLKKYRDMVVEA

SEQ ID NO: 62642 - protein, 31 aa, Artificial Sequence
  Cyclic GFR-binding peptide
  MOD_RES (30), (30): Xaa is C or S
SQDLSPISILYIIGKTPKIYKQYEMIVKSXK

SEQ ID NO: 62643 - protein, 32 aa, Artificial Sequence
  Cyclic GFR-binding peptide
  MOD_RES (29), (31): Xaa is C or S
KLSPISVLYIDDSSNVIYKQYENMVVRSXGXH

SEQ ID NO: 62644 - protein, 21 aa, Artificial Sequence
  Cyclic GFR-binding peptide
LEPISILYLVGRTPKVKFKYE

SEQ ID NO: 62645 - protein, 30 aa, Artificial Sequence
  Cyclic GFR-binding peptide
  MOD_RES (27), (29): Xaa is C or S
SPISVLYIDDSSNVIYKQYENMVVRSXGXH

SEQ ID NO: 62646 - protein, 28 aa, Artificial Sequence
  Cyclic GFR-binding peptide
  MOD_RES (2), (3): Xaa is C or S
PXXAPTQLSPISVLYIDDSSNVIYKQYE

SEQ ID NO: 62647 - protein, 39 aa, Artificial Sequence; identical to SEQ ID NO: 18329
  Cyclic GFR-binding peptide
  MOD_RES (5), (6), (38): Xaa is C or S

SEQ ID NO: 62648 - protein, 36 aa, Artificial Sequence; identical to SEQ ID NO: 18331
  Cyclic GFR-binding peptide
  MOD_RES (2), (3), (35): Xaa is C or S

SEQ ID NO: 62649 - protein, 37 aa, Artificial Sequence; identical to SEQ ID NO: 18332
  Cyclic GFR-binding peptide
  MOD_RES (2), (3), (34), (36): Xaa is C or S

SEQ ID NO: 62650 - protein, 29 aa, Artificial Sequence
  Cyclic GFR-binding peptide
VPQDLEPISILYLVGRTPKVKFKYEMVVK

SEQ ID NO: 62651 - protein, 36 aa, Artificial Sequence
  Cyclic GFR-binding peptide
  MOD_RES (4), (5): Xaa is C or S
GKAXXVPTKLSPISVLYIDDMGVPTYKQYEEGMSVA

SEQ ID NO: 62652 - protein, 31 aa, Artificial Sequence
  Cyclic GFR-binding peptide
  MOD_RES (4), (5): Xaa is C or S
PKAXXAPTKLSPISVLYIDSSNNVIYKQYEN

SEQ ID NO: 62653 - protein, 27 aa, Artificial Sequence
  Cyclic GFR-binding peptide
VPQALEPISILYLVGRKPKVKFKYEMI

SEQ ID NO: 62654 - protein, 32 aa, Artificial Sequence
  Cyclic GFR-binding peptide
  MOD_RES (2), (3): Xaa is C or S
PXXAPTQLSPISVLYIDDSSNVIYKQYENMVV

SEQ ID NO: 62655 - protein, 30 aa, Artificial Sequence
  Cyclic GFR-binding peptide
  MOD_RES (4), (5): Xaa is C or S
PKAXXAPTKLEPISVLYLDSSNNVIKFKYE

SEQ ID NO: 62656 - protein, 25 aa, Artificial Sequence
  Cyclic GFR-binding peptide
SPISILYIVGRTPKVYKQYEMVVKS

SEQ ID NO: 62657 - protein, 30 aa, Artificial Sequence
  Cyclic GFR-binding peptide
  MOD_RES (2), (3): Xaa is C or S
PXXAPTKLEPISVLYLDDSSNVIKFKYENM

SEQ ID NO: 62658 - protein, 25 aa, Artificial Sequence
  Cyclic GFR-binding peptide
KLEPISVLYLDDSSNVIKFKYENMV

SEQ ID NO: 62659 - protein, 31 aa, Artificial Sequence
  Cyclic GFR-binding peptide
  MOD_RES (2), (3): Xaa is C or S
PXXVPQDLSPISILYIVGRTPKVYKQYEMVV

SEQ ID NO: 62660 - protein, 28 aa, Artificial Sequence
  Cyclic GFR-binding peptide
KLSPISVLYIDDSSNVIYKQYENMVVRS

SEQ ID NO: 62661 - protein, 40 aa, Artificial Sequence; identical to SEQ ID NO: 18349
  Cyclic GFR-binding peptide
  MOD_RES (5), (6), (38), (40): Xaa is C or S

SEQ ID NO: 62662 - protein, 29 aa, Artificial Sequence
  Cyclic GFR-binding peptide
  MOD_RES (2), (3): Xaa is C or S
PXXVPQALSPISILYIVGRKPKVYKQYEM

SEQ ID NO: 62663 - protein, 31 aa, Artificial Sequence; identical to SEQ ID NO: 18350
  Cyclic GFR-binding peptide

SEQ ID NO: 62664 - protein, 31 aa, Artificial Sequence; identical to SEQ ID NO: 18357
  Cyclic GFR-binding peptide

SEQ ID NO: 62665 - protein, 33 aa, Artificial Sequence; identical to SEQ ID NO: 18356
  Cyclic GFR-binding peptide
  MOD_RES (1), (33): Xaa is C or S

SEQ ID NO: 62666 - protein, 37 aa, Artificial Sequence; identical to SEQ ID NO: 18358
  Cyclic GFR-binding peptide
  MOD_RES (5), (6): Xaa is C or S

SEQ ID NO: 62667 - protein, 33 aa, Artificial Sequence
  Cyclic GFR-binding peptide
  MOD_RES (5), (6): Xaa is C or S
VPKPXXAPTKLEPISVLYLDDSSNVIKFKYENM

SEQ ID NO: 62668 - protein, 26 aa, Artificial Sequence
  Cyclic GFR-binding peptide
VPTKLEPISVLYLDDMGVPTKFKYEE

SEQ ID NO: 62669 - protein, 28 aa, Artificial Sequence
  Cyclic GFR-binding peptide
  MOD_RES (28), (28): Xaa is C or S
LEPISVLYLDDSSNVIKFKYENMVVRSX

SEQ ID NO: 62670 - protein, 31 aa, Artificial Sequence
  Cyclic GFR-binding peptide
  MOD_RES (3), (4): Xaa is C or S
KAXXAPTKLEPISVLYLDSSNNVIKFKYENM

SEQ ID NO: 62671 - protein, 33 aa, Artificial Sequence
  Cyclic GFR-binding peptide
  MOD_RES (6), (7): Xaa is C or S
ASAAPXXVPQALSPISILYIVGRKPKVYKQYEM

SEQ ID NO: 62672 - protein, 32 aa, Artificial Sequence
  Cyclic GFR-binding peptide
  MOD_RES (2), (3): Xaa is C or S
SXXVPARLSPISILYKDAANNVVLKYHYDMVV

SEQ ID NO: 62673 - protein, 26 aa, Artificial Sequence
  Cyclic GFR-binding peptide
DLSPISILYIVGRTPKVYKQYEMVVK

SEQ ID NO: 62674 - protein, 32 aa, Artificial Sequence
  Cyclic GFR-binding peptide
  MOD_RES (31), (31): Xaa is C or S
TKLEPISVLYLDDMGVPTKFKYEEGMSVAEXG

SEQ ID NO: 62675 - protein, 23 aa, Artificial Sequence
  Cyclic GFR-binding peptide
TQLEPISVLYLDDSSNVIKFKYE

SEQ ID NO: 62676 - protein, 38 aa, Artificial Sequence; identical to SEQ ID NO: 18379
  Cyclic GFR-binding peptide
  MOD_RES (4), (5), (37): Xaa is C or S

SEQ ID NO: 62677 - protein, 32 aa, Artificial Sequence; identical to SEQ ID NO: 18380
  Cyclic GFR-binding peptide
  MOD_RES (1), (2): Xaa is C or S

SEQ ID NO: 62678 - protein, 31 aa, Artificial Sequence
  Cyclic GFR-binding peptide
  MOD_RES (5), (6): Xaa is C or S
SASPXXVPQDLSPISILYIVGRTPKVYKQYE

SEQ ID NO: 62679 - protein, 22 aa, Artificial Sequence
  Cyclic GFR-binding peptide
DLSPISILYIVGRTPKVYKQYE

SEQ ID NO: 62680 - protein, 34 aa, Artificial Sequence
  Cyclic GFR-binding peptide
  MOD_RES (4), (5): Xaa is C or S
PKAXXVPTELSPISMLYIDENEKVVYKQYEDMVV

SEQ ID NO: 62681 - protein, 34 aa, Artificial Sequence
  Cyclic GFR-binding peptide
  MOD_RES (4), (5): Xaa is C or S
SKAXXVPTKLSPISILYKDKGVVTYLKYHYGMAV

SEQ ID NO: 62682 - protein, 20 aa, Artificial Sequence
  Cyclic GFR-binding peptide
EPISVLYLDDMGVPTKFKYE

SEQ ID NO: 62683 - protein, 27 aa, Artificial Sequence
  Cyclic GFR-binding peptide
PTQLSPISVLYIDDSSNVIYKQYENMV

SEQ ID NO: 62684 - protein, 32 aa, Artificial Sequence
  Cyclic GFR-binding peptide
  MOD_RES (6), (7): Xaa is C or S
KIPKAXXVPTELEPISMLYLDENEKVVKFKYE

SEQ ID NO: 62685 - protein, 35 aa, Artificial Sequence; identical to SEQ ID NO: 18390
  Cyclic GFR-binding peptide
  MOD_RES (3), (4), (35): Xaa is C or S

SEQ ID NO: 62686 - protein, 21 aa, Artificial Sequence
  Cyclic GFR-binding peptide
NAISILYFDAANNVVLKKYRD

SEQ ID NO: 62687 - protein, 26 aa, Artificial Sequence
  Cyclic GFR-binding peptide
  MOD_RES (1), (1): Xaa is C or S
XAPTKLEPISVLYLDSSNNVIKFKYE

SEQ ID NO: 62688 - protein, 27 aa, Artificial Sequence
  Cyclic GFR-binding peptide
  MOD_RES (27), (27): Xaa is C or S
NAISILYFDKGVVTYLKKYRGMAVSEX

SEQ ID NO: 62689 - protein, 33 aa, Artificial Sequence; identical to SEQ ID NO: 18394
  Cyclic GFR-binding peptide
  MOD_RES (1), (32): Xaa is C or S

SEQ ID NO: 62690 - protein, 24 aa, Artificial Sequence
  Cyclic GFR-binding peptide
EPISVLYLDDSSNVIKFKYENMVV

SEQ ID NO: 62691 - protein, 33 aa, Artificial Sequence
  Cyclic GFR-binding peptide
  MOD_RES (3), (4): Xaa is C or S
SPXXVPQDLSPISILYIVGRTPKVYKQYEMVVK

SEQ ID NO: 62692 - protein, 37 aa, Artificial Sequence; identical to SEQ ID NO: 18395
  Cyclic GFR-binding peptide
  MOD_RES (5), (6), (37): Xaa is C or S

SEQ ID NO: 62693 - protein, 32 aa, Artificial Sequence
  Cyclic GFR-binding peptide
  MOD_RES (3), (4): Xaa is C or S
ASXXVPARLSPISILYKDAANNVVLKYHYDMV

SEQ ID NO: 62694 - protein, 34 aa, Artificial Sequence; identical to SEQ ID NO: 18396
  Cyclic GFR-binding peptide
  MOD_RES (32), (34): Xaa is C or S

SEQ ID NO: 62695 - protein, 29 aa, Artificial Sequence
  Cyclic GFR-binding peptide
VPTELSPISMLYIDENEKVVYKQYEDMVV

SEQ ID NO: 62696 - protein, 28 aa, Artificial Sequence
  Cyclic GFR-binding peptide
  MOD_RES (1), (1): Xaa is C or S
XVPARLNAISILYFDAANNVVLKKYRDM

SEQ ID NO: 62697 - protein, 32 aa, Artificial Sequence
  Cyclic GFR-binding peptide
  MOD_RES (3), (3): Xaa is C or S
PTXAPTKLEPISVLYLDDSSNVIKFKYENMVV

SEQ ID NO: 62698 - protein, 31 aa, Artificial Sequence
  Cyclic GFR-binding peptide
  MOD_RES (1), (2): Xaa is C or S
XXVPQDLSPISILYIVGRTPKVYKQYEMVVK

SEQ ID NO: 62699 - protein, 30 aa, Artificial Sequence; identical to SEQ ID NO: 18402
  Cyclic GFR-binding peptide

SEQ ID NO: 62700 - protein, 35 aa, Artificial Sequence; identical to SEQ ID NO: 18403
  Cyclic GFR-binding peptide
  MOD_RES (2), (3): Xaa is C or S

SEQ ID NO: 62701 - protein, 29 aa, Artificial Sequence
  Cyclic GFR-binding peptide
PQDLSPISILYIVGRTPKVYKQYEMVVKS

SEQ ID NO: 62702 - protein, 32 aa, Artificial Sequence
  Cyclic GFR-binding peptide
  MOD_RES (4), (5): Xaa is C or S
PKAXXVPTELSPISMLYIDENEKVVYKQYEDM

SEQ ID NO: 62703 - protein, 36 aa, Artificial Sequence; identical to SEQ ID NO: 18407
  Cyclic GFR-binding peptide
  MOD_RES (1), (2), (34), (36): Xaa is C or S

SEQ ID NO: 62704 - protein, 34 aa, Artificial Sequence; identical to SEQ ID NO: 18409
  Cyclic GFR-binding peptide
  MOD_RES (3), (4): Xaa is C or S

SEQ ID NO: 62705 - protein, 27 aa, Artificial Sequence
  Cyclic GFR-binding peptide
  MOD_RES (26), (26): Xaa is C or S
SPISILYIVGRTPKVYKQYEMVVKSXK

SEQ ID NO: 62706 - protein, 33 aa, Artificial Sequence; identical to SEQ ID NO: 18410
  Cyclic GFR-binding peptide
  MOD_RES (31), (33): Xaa is C or S

SEQ ID NO: 62707 - protein, 33 aa, Artificial Sequence; identical to SEQ ID NO: 18412
  Cyclic GFR-binding peptide
  MOD_RES (1), (33): Xaa is C or S

SEQ ID NO: 62708 - protein, 28 aa, Artificial Sequence
  Cyclic GFR-binding peptide
  MOD_RES (1), (2): Xaa is C or S
XXVSQDLSPISILYIIGKTPKIYKQYEM

SEQ ID NO: 62709 - protein, 32 aa, Artificial Sequence
  Cyclic GFR-binding peptide
  MOD_RES (6), (7): Xaa is C or S
ASASPXXVSQDLEPISILYLIGKTPKIKFKYE

SEQ ID NO: 62710 - protein, 30 aa, Artificial Sequence
  Cyclic GFR-binding peptide
  MOD_RES (1), (2): Xaa is C or S
XXVPQDLEPISILYLVGRTPKVKFKYEMVV

SEQ ID NO: 62711 - protein, 30 aa, Artificial Sequence
  Cyclic GFR-binding peptide
  MOD_RES (2), (3): Xaa is C or S
PXXAPTKLSPISVLYIDDSSNVIYKQYENM

SEQ ID NO: 62712 - protein, 27 aa, Artificial Sequence
  Cyclic GFR-binding peptide
  MOD_RES (27), (27): Xaa is C or S
SPISVLYIDDSSNVIYKQYENMVVRSX

SEQ ID NO: 62713 - protein, 34 aa, Artificial Sequence; identical to SEQ ID NO: 18422
  Cyclic GFR-binding peptide
  MOD_RES (1), (2), (33): Xaa is C or S

SEQ ID NO: 62714 - protein, 28 aa, Artificial Sequence
  Cyclic GFR-binding peptide
  MOD_RES (2), (3): Xaa is C or S
AXXAPTKLSPISVLYIDSSNNVIYKQYE

SEQ ID NO: 62715 - protein, 35 aa, Artificial Sequence; identical to SEQ ID NO: 18428
  Cyclic GFR-binding peptide
  MOD_RES (1), (2), (34): Xaa is C or S

SEQ ID NO: 62716 - protein, 38 aa, Artificial Sequence; identical to SEQ ID NO: 18429
  Cyclic GFR-binding peptide
  MOD_RES (4), (5), (36), (38): Xaa is C or S

SEQ ID NO: 62717 - protein, 29 aa, Artificial Sequence
  Cyclic GFR-binding peptide
  MOD_RES (2), (3): Xaa is C or S
PXXAPTKLEPISVLYLDDSSNVIKFKYEN

SEQ ID NO: 62718 - protein, 31 aa, Artificial Sequence
  Cyclic GFR-binding peptide
  MOD_RES (1), (1): Xaa is C or S
XVPTKLEPISVLYLDDMGVPTKFKYEEGMSV

SEQ ID NO: 62719 - protein, 32 aa, Artificial Sequence
  Cyclic GFR-binding peptide
  MOD_RES (29), (31): Xaa is C or S
RLNAISILYFDAANNVVLKKYRDMVVEAXGXR

SEQ ID NO: 62720 - protein, 28 aa, Artificial Sequence
  Cyclic GFR-binding peptide
  MOD_RES (2), (3): Xaa is C or S
PXXVPQALSPISILYIVGRKPKVYKQYE

SEQ ID NO: 62721 - protein, 27 aa, Artificial Sequence
  Cyclic GFR-binding peptide
VPQDLSPISILYIVGRTPKVYKQYEMV

SEQ ID NO: 62722 - protein, 32 aa, Artificial Sequence
  Cyclic GFR-binding peptide
  MOD_RES (3), (4): Xaa is C or S
KAXXVPTELSPISMLYIDENEKVVYKQYEDMV

SEQ ID NO: 62723 - protein, 25 aa, Artificial Sequence
  Cyclic GFR-binding peptide
ALSPISILYIVGRKPKVYKQYEMIV

SEQ ID NO: 62724 - protein, 29 aa, Artificial Sequence
  Cyclic GFR-binding peptide
  MOD_RES (28), (28): Xaa is C or S
ALEPISILYLVGRKPKVKFKYEMIVRSXK

SEQ ID NO: 62725 - protein, 31 aa, Artificial Sequence
  Cyclic GFR-binding peptide
  MOD_RES (28), (30): Xaa is C or S
DLEPISILYLIGKTPKIKFKYEMIVKSXKXS

SEQ ID NO: 62726 - protein, 36 aa, Artificial Sequence; identical to SEQ ID NO: 18437
  Cyclic GFR-binding peptide
  MOD_RES (1), (2), (34), (36): Xaa is C or S

SEQ ID NO: 62727 - protein, 27 aa, Artificial Sequence
  Cyclic GFR-binding peptide
TELEPISMLYLDENEKVVKFKYEDMVV

SEQ ID NO: 62728 - protein, 40 aa, Artificial Sequence; identical to SEQ ID NO: 18438
  Cyclic GFR-binding peptide
  MOD_RES (6), (7), (38), (40): Xaa is C or S

SEQ ID NO: 62729 - protein, 40 aa, Artificial Sequence; identical to SEQ ID NO: 18439
  Cyclic GFR-binding peptide
  MOD_RES (6), (7), (39): Xaa is C or S

SEQ ID NO: 62730 - protein, 27 aa, Artificial Sequence
  Cyclic GFR-binding peptide
  MOD_RES (1), (1): Xaa is C or S
XVPTELEPISMLYLDEYDKVVKFKYEE

SEQ ID NO: 62731 - protein, 29 aa, Artificial Sequence
  Cyclic GFR-binding peptide
PTQLEPISVLYLDDSSNVIKFKYENMVVR

SEQ ID NO: 62732 - protein, 27 aa, Artificial Sequence
  Cyclic GFR-binding peptide
TQLEPISVLYLDDSSNVIKFKYENMVV

SEQ ID NO: 62733 - protein, 28 aa, Artificial Sequence
  Cyclic GFR-binding peptide
  MOD_RES (28), (28): Xaa is C or S
DLSPISILYIVGRTPKVYKQYEMVVKSX

SEQ ID NO: 62734 - protein, 40 aa, Artificial Sequence; identical to SEQ ID NO: 18441
  Cyclic GFR-binding peptide
  MOD_RES (4), (5), (37), (39): Xaa is C or S

SEQ ID NO: 62735 - protein, 23 aa, Artificial Sequence
  Cyclic GFR-binding peptide
RLSPISILYKDAANNVVLKYHYD

SEQ ID NO: 62736 - protein, 36 aa, Artificial Sequence; identical to SEQ ID NO: 18444
  Cyclic GFR-binding peptide
  MOD_RES (5), (6): Xaa is C or S

SEQ ID NO: 62737 - protein, 30 aa, Artificial Sequence
  Cyclic GFR-binding peptide
  MOD_RES (28), (30): Xaa is C or S
LEPISMLYLDENEKVVKFKYEDMVVEGXGX

SEQ ID NO: 62738 - protein, 29 aa, Artificial Sequence
  Cyclic GFR-binding peptide
  MOD_RES (1), (1): Xaa is C or S
XVPTKLSPISILYKDKGVVTYLKYHYGMA

SEQ ID NO: 62739 - protein, 32 aa, Artificial Sequence
  Cyclic GFR-binding peptide
  MOD_RES (29), (31): Xaa is C or S
QDLSPISILYIVGRTPKVYKQYEMVVKSXKXS

SEQ ID NO: 62740 - protein, 30 aa, Artificial Sequence
  Cyclic GFR-binding peptide
  MOD_RES (4), (5): Xaa is C or S
PKAXXVPTELEPISMLYLDENEKVVKFKYE

SEQ ID NO: 62741 - protein, 33 aa, Artificial Sequence
  Cyclic GFR-binding peptide
  MOD_RES (6), (7): Xaa is C or S
ASASPXXVPQDLSPISILYIVGRTPKVYKQYEM

SEQ ID NO: 62742 - protein, 32 aa, Artificial Sequence
  Cyclic GFR-binding peptide
  MOD_RES (4), (5): Xaa is C or S
PKAXXVPTELEPISMLYLDENEKVVKFKYEDM

SEQ ID NO: 62743 - protein, 29 aa, Artificial Sequence
  Cyclic GFR-binding peptide
TELEPISMLYLDENEKVVKFKYEDMVVEG

SEQ ID NO: 62744 - protein, 34 aa, Artificial Sequence; identical to SEQ ID NO: 18451
  Cyclic GFR-binding peptide
  MOD_RES (2), (3), (34): Xaa is C or S

SEQ ID NO: 62745 - protein, 35 aa, Artificial Sequence; identical to SEQ ID NO: 18455
  Cyclic GFR-binding peptide
  MOD_RES (2), (3), (35): Xaa is C or S

SEQ ID NO: 62746 - protein, 29 aa, Artificial Sequence
  Cyclic GFR-binding peptide
  MOD_RES (2), (3): Xaa is C or S
AXXAPTKLSPISVLYIDSSNNVIYKQYEN

SEQ ID NO: 62747 - protein, 29 aa, Artificial Sequence
  Cyclic GFR-binding peptide
TKLSPISILYIDKGVVTYYKQYEGMAVSE

SEQ ID NO: 62748 - protein, 28 aa, Artificial Sequence
  Cyclic GFR-binding peptide
  MOD_RES (1), (1): Xaa is C or S
XVPTELEPISMLYLDEYDKVVKFKYEEM

SEQ ID NO: 62749 - protein, 36 aa, Artificial Sequence; identical to SEQ ID NO: 18466
  Cyclic GFR-binding peptide
  MOD_RES (4), (5), (36): Xaa is C or S

SEQ ID NO: 62750 - protein, 27 aa, Artificial Sequence
  Cyclic GFR-binding peptide
QDLSPISILYIIGKTPKIYKQYEMIVK

SEQ ID NO: 62751 - protein, 41 aa, Artificial Sequence; identical to SEQ ID NO: 18467
  Cyclic GFR-binding peptide
  MOD_RES (5), (6), (38), (40): Xaa is C or S

SEQ ID NO: 62752 - protein, 37 aa, Artificial Sequence; identical to SEQ ID NO: 18469
  Cyclic GFR-binding peptide
  MOD_RES (2), (3), (36): Xaa is C or S

SEQ ID NO: 62753 - protein, 35 aa, Artificial Sequence; identical to SEQ ID NO: 18471
  Cyclic GFR-binding peptide
  MOD_RES (2), (3), (35): Xaa is C or S

SEQ ID NO: 62754 - protein, 35 aa, Artificial Sequence
  Cyclic GFR-binding peptide
  MOD_RES (6), (7): Xaa is C or S
ASAAPXXVPQALSPISILYIVGRKPKVYKQYEMIV

SEQ ID NO: 62755 - protein, 31 aa, Artificial Sequence
  Cyclic GFR-binding peptide
  MOD_RES (28), (30): Xaa is C or S
LSPISVLYIDDSSNVIYKQYENMVVRAXGXH

SEQ ID NO: 62756 - protein, 22 aa, Artificial Sequence
  Cyclic GFR-binding peptide
LSPISILYIVGRKPKVYKQYEM

SEQ ID NO: 62757 - protein, 30 aa, Artificial Sequence
  Cyclic GFR-binding peptide
  MOD_RES (2), (3): Xaa is C or S
AXXVPTKLSPISILYIDKGVVTYYKQYEGM

SEQ ID NO: 62758 - protein, 37 aa, Artificial Sequence; identical to SEQ ID NO: 18477
  Cyclic GFR-binding peptide
  MOD_RES (6), (7): Xaa is C or S

SEQ ID NO: 62759 - protein, 39 aa, Artificial Sequence; identical to SEQ ID NO: 18478
  Cyclic GFR-binding peptide
  MOD_RES (6), (7), (39): Xaa is C or S

SEQ ID NO: 62760 - protein, 33 aa, Artificial Sequence
  Cyclic GFR-binding peptide
  MOD_RES (5), (6): Xaa is C or S
APASXXVPARLNAISILYFDAANNVVLKKYRDM

SEQ ID NO: 62761 - protein, 30 aa, Artificial Sequence
  Cyclic GFR-binding peptide
  MOD_RES (28), (30): Xaa is C or S
ALEPISILYLVGRKPKVKFKYEMIVRSXKX

SEQ ID NO: 62762 - protein, 25 aa, Artificial Sequence
  Cyclic GFR-binding peptide
LNAISILYFDKGVVTYLKKYRGMAV

SEQ ID NO: 62763 - protein, 33 aa, Artificial Sequence; identical to SEQ ID NO: 18487
  Cyclic GFR-binding peptide
  MOD_RES (1), (33): Xaa is C or S

SEQ ID NO: 62764 - protein, 34 aa, Artificial Sequence
  Cyclic GFR-binding peptide
  MOD_RES (4), (5): Xaa is C or S
PKPXXAPTQLEPISVLYLDDSSNVIKFKYENMVV

SEQ ID NO: 62765 - protein, 29 aa, Artificial Sequence
  Cyclic GFR-binding peptide
  MOD_RES (3), (4): Xaa is C or S
KAXXVPTELSPISMLYIDEYDKVVYKQYE

SEQ ID NO: 62766 - protein, 36 aa, Artificial Sequence
  Cyclic GFR-binding peptide
  MOD_RES (6), (7): Xaa is C or S
SIPKAXXVPTELSPISMLYIDEYDKVVYKQYEEMVV

SEQ ID NO: 62767 - protein, 20 aa, Artificial Sequence
  Cyclic GFR-binding peptide
EPISILYLIGKTPKIKFKYE

SEQ ID NO: 62768 - protein, 22 aa, Artificial Sequence
  Cyclic GFR-binding peptide
RLSPISILYKDAANNVVLKYHY

SEQ ID NO: 62769 - protein, 37 aa, Artificial Sequence; identical to SEQ ID NO: 18494
  Cyclic GFR-binding peptide
  MOD_RES (3), (4), (35), (37): Xaa is C or S

SEQ ID NO: 62770 - protein, 30 aa, Artificial Sequence
  Cyclic GFR-binding peptide
  MOD_RES (4), (5): Xaa is C or S
ASPXXVSQDLSPISILYIIGKTPKIYKQYE

SEQ ID NO: 62771 - protein, 30 aa, Artificial Sequence
  Cyclic GFR-binding peptide
  MOD_RES (4), (5): Xaa is C or S
PKPXXAPTQLEPISVLYLDDSSNVIKFKYE

SEQ ID NO: 62772 - protein, 35 aa, Artificial Sequence
  Cyclic GFR-binding peptide
  MOD_RES (5), (6): Xaa is C or S
APASXXVPARLEPISILYLDAANNVVKFKYEDMVV

SEQ ID NO: 62773 - protein, 27 aa, Artificial Sequence
  Cyclic GFR-binding peptide
PTKLEPISVLYLDSSNNVIKFKYENMV

SEQ ID NO: 62774 - protein, 29 aa, Artificial Sequence
  Cyclic GFR-binding peptide
VPTKLSPISVLYIDDMGVPTYKQYEEGMS

SEQ ID NO: 62775 - protein, 23 aa, Artificial Sequence
  Cyclic GFR-binding peptide
QDLSPISILYIVGRTPKVYKQYE

SEQ ID NO: 62776 - protein, 41 aa, Artificial Sequence; identical to SEQ ID NO: 18503
  Cyclic GFR-binding peptide
  MOD_RES (6), (7), (39), (41): Xaa is C or S

SEQ ID NO: 62777 - protein, 39 aa, Artificial Sequence; identical to SEQ ID NO: 18504
  Cyclic GFR-binding peptide
  MOD_RES (4), (5), (36), (38): Xaa is C or S

SEQ ID NO: 62778 - protein, 26 aa, Artificial Sequence
  Cyclic GFR-binding peptide
EPISILYLDAANNVVKFKYEDMVVEA

SEQ ID NO: 62779 - protein, 35 aa, Artificial Sequence; identical to SEQ ID NO: 18509
  Cyclic GFR-binding peptide
  MOD_RES (3), (4): Xaa is C or S

SEQ ID NO: 62780 - protein, 38 aa, Artificial Sequence; identical to SEQ ID NO: 18510
  Cyclic GFR-binding peptide
  MOD_RES (5), (6), (38): Xaa is C or S

SEQ ID NO: 62781 - protein, 39 aa, Artificial Sequence; identical to SEQ ID NO: 18511
  Cyclic GFR-binding peptide
  MOD_RES (6), (7), (38): Xaa is C or S

SEQ ID NO: 62782 - protein, 29 aa, Artificial Sequence
  Cyclic GFR-binding peptide
SPISMLYIDEYDKVVYKQYEAAAAAAAAA

SEQ ID NO: 62783 - protein, 32 aa, Artificial Sequence
  Cyclic GFR-binding peptide
  MOD_RES (5), (6): Xaa is C or S
IPKAXXVPTELSPISMLYIDENEKVVYKQYED

SEQ ID NO: 62784 - protein, 35 aa, Artificial Sequence; identical to SEQ ID NO: 18512
  Cyclic GFR-binding peptide
  MOD_RES (3), (4): Xaa is C or S

SEQ ID NO: 62785 - protein, 26 aa, Artificial Sequence
  Cyclic GFR-binding peptide
  MOD_RES (1), (1): Xaa is C or S
XVPQALEPISILYLVGRKPKVKFKYE

SEQ ID NO: 62786 - protein, 33 aa, Artificial Sequence
  Cyclic GFR-binding peptide
  MOD_RES (6), (7): Xaa is C or S
ASASPXXVSQDLEPISILYLIGKTPKIKFKYEM

SEQ ID NO: 62787 - protein, 34 aa, Artificial Sequence
  Cyclic GFR-binding peptide
  MOD_RES (31), (33): Xaa is C or S
TKLSPISVLYIDDMGVPTYKQYEEGMSVAEXGXR

SEQ ID NO: 62788 - protein, 29 aa, Artificial Sequence
  Cyclic GFR-binding peptide
VPTELEPISMLYLDEYDKVVKFKYEEMVV

SEQ ID NO: 62789 - protein, 37 aa, Artificial Sequence; identical to SEQ ID NO: 18518
  Cyclic GFR-binding peptide
  MOD_RES (3), (4), (36): Xaa is C or S

SEQ ID NO: 62790 - protein, 35 aa, Artificial Sequence; identical to SEQ ID NO: 18520
  Cyclic GFR-binding peptide
  MOD_RES (4), (5): Xaa is C or S

SEQ ID NO: 62791 - protein, 37 aa, Artificial Sequence; identical to SEQ ID NO: 18525
  Cyclic GFR-binding peptide
  MOD_RES (2), (3), (34), (36): Xaa is C or S

SEQ ID NO: 62792 - protein, 26 aa, Artificial Sequence
  Cyclic GFR-binding peptide
SQDLSPISILYIIGKTPKIYKQYEMI

SEQ ID NO: 62793 - protein, 35 aa, Artificial Sequence
  Cyclic GFR-binding peptide
  MOD_RES (5), (6): Xaa is C or S
SAAPXXVPQALSPISILYIVGRKPKVYKQYEMIVR

SEQ ID NO: 62794 - protein, 32 aa, Artificial Sequence
  Cyclic GFR-binding peptide
  MOD_RES (29), (31): Xaa is C or S
QDLEPISILYLIGKTPKIKFKYEMIVKSXKXS

SEQ ID NO: 62795 - protein, 30 aa, Artificial Sequence
  Cyclic GFR-binding peptide
  MOD_RES (4), (4): Xaa is C or S
KPTXAPTKLEPISVLYLDDSSNVIKFKYEN

SEQ ID NO: 62796 - protein, 24 aa, Artificial Sequence
  Cyclic GFR-binding peptide
ARLEPISILYLDAANNVVKFKYED

SEQ ID NO: 62797 - protein, 32 aa, Artificial Sequence
  Cyclic GFR-binding peptide
  MOD_RES (31), (31): Xaa is C or S
PTELSPISMLYIDENEKVVYKQYEDMVVEGXG

SEQ ID NO: 62798 - protein, 34 aa, Artificial Sequence
  Cyclic GFR-binding peptide
  MOD_RES (31), (33): Xaa is C or S
PTKLEPISVLYLDSSNNVIKFKYENMVVKAXGXH

SEQ ID NO: 62799 - protein, 23 aa, Artificial Sequence
  Cyclic GFR-binding peptide
QDLEPISILYLIGKTPKIKFKYE

SEQ ID NO: 62800 - protein, 37 aa, Artificial Sequence; identical to SEQ ID NO: 18535
  Cyclic GFR-binding peptide
  MOD_RES (4), (5), (37): Xaa is C or S

SEQ ID NO: 62801 - protein, 33 aa, Artificial Sequence; identical to SEQ ID NO: 18537
  Cyclic GFR-binding peptide
  MOD_RES (1), (2): Xaa is C or S

SEQ ID NO: 62802 - protein, 29 aa, Artificial Sequence
  Cyclic GFR-binding peptide
  MOD_RES (1), (1): Xaa is C or S
XVSQDLSPISILYIIGKTPKIYKQYEMIV

SEQ ID NO: 62803 - protein, 30 aa, Artificial Sequence
  Cyclic GFR-binding peptide
  MOD_RES (1), (2): Xaa is C or S
XXVPTKLSPISILYIDKGVVTYYKQYEGMA

SEQ ID NO: 62804 - protein, 33 aa, Artificial Sequence
  Cyclic GFR-binding peptide
  MOD_RES (4), (5): Xaa is C or S
PKAXXVPTELSPISMLYIDEYDKVVYKQYEEMV

SEQ ID NO: 62805 - protein, 34 aa, Artificial Sequence; identical to SEQ ID NO: 18539
  Cyclic GFR-binding peptide
  MOD_RES (2), (3), (34): Xaa is C or S

SEQ ID NO: 62806 - protein, 20 aa, Artificial Sequence
  Cyclic GFR-binding peptide
SPISILYIVGRTPKVYKQYE

SEQ ID NO: 62807 - protein, 26 aa, Artificial Sequence
  Cyclic GFR-binding peptide
VPTKLNAISILYFDKGVVTYLKKYRG

SEQ ID NO: 62808 - protein, 26 aa, Artificial Sequence
  Cyclic GFR-binding peptide
LEPISILYLVGRKPKVKFKYEMIVRS

SEQ ID NO: 62809 - protein, 33 aa, Artificial Sequence; identical to SEQ ID NO: 18540
  Cyclic GFR-binding peptide
  MOD_RES (32), (32): Xaa is C or S

SEQ ID NO: 62810 - protein, 23 aa, Artificial Sequence
  Cyclic GFR-binding peptide
TELEPISMLYLDEYDKVVKFKYE

SEQ ID NO: 62811 - protein, 32 aa, Artificial Sequence
  Cyclic GFR-binding peptide
  MOD_RES (2), (3): Xaa is C or S
SXXVPARLNAISILYFDAANNVVLKKYRDMVV

SEQ ID NO: 62812 - protein, 21 aa, Artificial Sequence
  Cyclic GFR-binding peptide
LEPISILYLDAANNVVKFKYE

SEQ ID NO: 62813 - protein, 28 aa, Artificial Sequence
  Cyclic GFR-binding peptide
TQLEPISVLYLDDSSNVIKFKYENMVVR

SEQ ID NO: 62814 - protein, 37 aa, Artificial Sequence; identical to SEQ ID NO: 18548
  Cyclic GFR-binding peptide
  MOD_RES (5), (6): Xaa is C or S

SEQ ID NO: 62815 - protein, 32 aa, Artificial Sequence
  Cyclic GFR-binding peptide
  MOD_RES (4), (4): Xaa is C or S
KPTXAPTKLEPISVLYLDDSSNVIKFKYENMV

SEQ ID NO: 62816 - protein, 24 aa, Artificial Sequence
  Cyclic GFR-binding peptide
EPISMLYLDENEKVVKFKYEDMVV

SEQ ID NO: 62817 - protein, 24 aa, Artificial Sequence
  Cyclic GFR-binding peptide
PQDLEPISILYLVGRTPKVKFKYE

SEQ ID NO: 62818 - protein, 31 aa, Artificial Sequence; identical to SEQ ID NO: 18551
  Cyclic GFR-binding peptide
  MOD_RES (1), (1): Xaa is C or S

SEQ ID NO: 62819 - protein, 25 aa, Artificial Sequence
  Cyclic GFR-binding peptide
SPISILYKDAANNVVLKYHYDMVVE

SEQ ID NO: 62820 - protein, 23 aa, Artificial Sequence
  Cyclic GFR-binding peptide
KLNAISILYFDKGVVTYLKKYRG

SEQ ID NO: 62821 - protein, 37 aa, Artificial Sequence; identical to SEQ ID NO: 18555
  Cyclic GFR-binding peptide
  MOD_RES (3), (4), (36): Xaa is C or S

SEQ ID NO: 62822 - protein, 26 aa, Artificial Sequence
  Cyclic GFR-binding peptide
  MOD_RES (1), (1): Xaa is C or S
XAPTKLEPISVLYLDDSSNVIKFKYE

SEQ ID NO: 62823 - protein, 41 aa, Artificial Sequence; identical to SEQ ID NO: 18556
  Cyclic GFR-binding peptide
  MOD_RES (5), (6), (38), (40): Xaa is C or S

SEQ ID NO: 62824 - protein, 31 aa, Artificial Sequence
  Cyclic GFR-binding peptide
  MOD_RES (2), (3): Xaa is C or S
AXXVPTKLSPISVLYIDDMGVPTYKQYEEGM

SEQ ID NO: 62825 - protein, 32 aa, Artificial Sequence
  Cyclic GFR-binding peptide
  MOD_RES (29), (31): Xaa is C or S
KLSPISVLYIDSSNNVIYKQYENMVVKAXGXH

SEQ ID NO: 62826 - protein, 27 aa, Artificial Sequence
  Cyclic GFR-binding peptide
PTKLEPISVLYLDDSSNVIKFKYENMV

SEQ ID NO: 62827 - protein, 30 aa, Artificial Sequence
  Cyclic GFR-binding peptide
  MOD_RES (1), (2): Xaa is C or S
XXVPTKLSPISVLYIDDMGVPTYKQYEEGM

SEQ ID NO: 62828 - protein, 26 aa, Artificial Sequence
  Cyclic GFR-binding peptide
  MOD_RES (1), (1): Xaa is C or S
XVPTKLNAISILYFDKGVVTYLKKYR

SEQ ID NO: 62829 - protein, 31 aa, Artificial Sequence
  Cyclic GFR-binding peptide
  MOD_RES (2), (3): Xaa is C or S
AXXVPTKLSPISILYIDKGVVTYYKQYEGMA

SEQ ID NO: 62830 - protein, 40 aa, Artificial Sequence; identical to SEQ ID NO: 18563
  Cyclic GFR-binding peptide
  MOD_RES (5), (6), (38), (40): Xaa is C or S

SEQ ID NO: 62831 - protein, 31 aa, Artificial Sequence
  Cyclic GFR-binding peptide
  MOD_RES (29), (31): Xaa is C or S
QLSPISVLYIDDSSNVIYKQYENMVVRAXGX

SEQ ID NO: 62832 - protein, 23 aa, Artificial Sequence
  Cyclic GFR-binding peptide
LSPISILYKDKGVVTYLKYHYGM

SEQ ID NO: 62833 - protein, 37 aa, Artificial Sequence; identical to SEQ ID NO: 18564
  Cyclic GFR-binding peptide
  MOD_RES (2), (3), (35), (37): Xaa is C or S

SEQ ID NO: 62834 - protein, 27 aa, Artificial Sequence
  Cyclic GFR-binding peptide
DLEPISILYLVGRTPKVKFKYEMVVKS

SEQ ID NO: 62835 - protein, 31 aa, Artificial Sequence
  Cyclic GFR-binding peptide
  MOD_RES (28), (30): Xaa is C or S
LNAISILYFDKGVVTYLKKYRGMAVSEXGXR

SEQ ID NO: 62836 - protein, 31 aa, Artificial Sequence
  Cyclic GFR-binding peptide
  MOD_RES (5), (6): Xaa is C or S
VGKAXXVPTKLEPISVLYLDDMGVPTKFKYE

SEQ ID NO: 62837 - protein, 26 aa, Artificial Sequence
  Cyclic GFR-binding peptide
PARLNAISILYFDAANNVVLKKYRDM

SEQ ID NO: 62838 - protein, 35 aa, Artificial Sequence; identical to SEQ ID NO: 18572
  Cyclic GFR-binding peptide
  MOD_RES (1), (2), (33), (35): Xaa is C or S

SEQ ID NO: 62839 - protein, 37 aa, Artificial Sequence; identical to SEQ ID NO: 18575
  Cyclic GFR-binding peptide
  MOD_RES (6), (7): Xaa is C or S

SEQ ID NO: 62840 - protein, 27 aa, Artificial Sequence
  Cyclic GFR-binding peptide
ELSPISMLYIDENEKVVYKQYEDMVVE

SEQ ID NO: 62841 - protein, 31 aa, Artificial Sequence
  Cyclic GFR-binding peptide
  MOD_RES (4), (5): Xaa is C or S
SKAXXVPTKLSPISILYIDKGVVTYYKQYEG

SEQ ID NO: 62842 - protein, 24 aa, Artificial Sequence
  Cyclic GFR-binding peptide
LSPISILYKDKGVVTYLKYHYGMA

SEQ ID NO: 62843 - protein, 39 aa, Artificial Sequence; identical to SEQ ID NO: 18577
  Cyclic GFR-binding peptide
  MOD_RES (6), (38): Xaa is C or S

SEQ ID NO: 62844 - protein, 34 aa, Artificial Sequence
  Cyclic GFR-binding peptide
  MOD_RES (5), (6): Xaa is C or S
ASKAXXVPTKLNAISILYFDKGVVTYLKKYRGMA

SEQ ID NO: 62845 - protein, 37 aa, Artificial Sequence; identical to SEQ ID NO: 18582
  Cyclic GFR-binding peptide
  MOD_RES (2), (3), (35), (37): Xaa is C or S

SEQ ID NO: 62846 - protein, 38 aa, Artificial Sequence; identical to SEQ ID NO: 18586
  Cyclic GFR-binding peptide
  MOD_RES (2), (3), (35), (37): Xaa is C or S

SEQ ID NO: 62847 - protein, 35 aa, Artificial Sequence; identical to SEQ ID NO: 18587
  Cyclic GFR-binding peptide
  MOD_RES (32), (34): Xaa is C or S

SEQ ID NO: 62848 - protein, 38 aa, Artificial Sequence; identical to SEQ ID NO: 18589
  Cyclic GFR-binding peptide
  MOD_RES (3), (4), (35), (37): Xaa is C or S

SEQ ID NO: 62849 - protein, 39 aa, Artificial Sequence; identical to SEQ ID NO: 18592
  Cyclic GFR-binding peptide
  MOD_RES (6), (7): Xaa is C or S

SEQ ID NO: 62850 - protein, 26 aa, Artificial Sequence
  Cyclic GFR-binding peptide
LSPISILYIDKGVVTYYKQYEGMAVS

SEQ ID NO: 62851 - protein, 32 aa, Artificial Sequence
  Cyclic GFR-binding peptide
  MOD_RES (29), (31): Xaa is C or S
QLSPISVLYIDDSSNVIYKQYENMVVRAXGXH

SEQ ID NO: 62852 - protein, 37 aa, Artificial Sequence; identical to SEQ ID NO: 18597
  Cyclic GFR-binding peptide
  MOD_RES (4), (5), (37): Xaa is C or S

SEQ ID NO: 62853 - protein, 32 aa, Artificial Sequence
  Cyclic GFR-binding peptide
  MOD_RES (2), (3): Xaa is C or S
AXXVPTELSPISMLYIDEYDKVVYKQYEEMVV

SEQ ID NO: 62854 - protein, 33 aa, Artificial Sequence; identical to SEQ ID NO: 18602
  Cyclic GFR-binding peptide
  MOD_RES (1), (2): Xaa is C or S

SEQ ID NO: 62855 - protein, 24 aa, Artificial Sequence
  Cyclic GFR-binding peptide
QLEPISVLYLDDSSNVIKFKYENM

SEQ ID NO: 62856 - protein, 33 aa, Artificial Sequence
  Cyclic GFR-binding peptide
  MOD_RES (30), (32): Xaa is C or S
TKLSPISILYIDKGVVTYYKQYEGMAVSEXGXR

SEQ ID NO: 62857 - protein, 28 aa, Artificial Sequence
  Cyclic GFR-binding peptide
TKLSPISILYIDKGVVTYYKQYEGMAVS

SEQ ID NO: 62858 - protein, 42 aa, Artificial Sequence; identical to SEQ ID NO: 18608
  Cyclic GFR-binding peptide
  MOD_RES (6), (7), (39), (41): Xaa is C or S

SEQ ID NO: 62859 - protein, 36 aa, Artificial Sequence
  Cyclic GFR-binding peptide
  MOD_RES (6), (7): Xaa is C or S
KIPKAXXVPTELEPISMLYLDENEKVVKFKYEDMVV

SEQ ID NO: 62860 - protein, 28 aa, Artificial Sequence
  Cyclic GFR-binding peptide
  MOD_RES (1), (2): Xaa is C or S
XXVPQDLSPISILYIVGRTPKVYKQYEM

SEQ ID NO: 62861 - protein, 31 aa, Artificial Sequence
  Cyclic GFR-binding peptide
  MOD_RES (1), (2): Xaa is C or S
XXAPTQLEPISVLYLDDSSNVIKFKYENMVV

SEQ ID NO: 62862 - protein, 34 aa, Artificial Sequence; identical to SEQ ID NO: 18614
  Cyclic GFR-binding peptide
  MOD_RES (1), (2), (34): Xaa is C or S

SEQ ID NO: 62863 - protein, 40 aa, Artificial Sequence; identical to SEQ ID NO: 18615
  Cyclic GFR-binding peptide
  MOD_RES (4), (5), (37), (39): Xaa is C or S

SEQ ID NO: 62864 - protein, 28 aa, Artificial Sequence
  Cyclic GFR-binding peptide
VPTKLNAISILYFDKGVVTYLKKYRGMA

SEQ ID NO: 62865 - protein, 32 aa, Artificial Sequence
  Cyclic GFR-binding peptide
  MOD_RES (29), (31): Xaa is C or S
QLEPISVLYLDDSSNVIKFKYENMVVRAXGXH

SEQ ID NO: 62866 - protein, 32 aa, Artificial Sequence
  Cyclic GFR-binding peptide
  MOD_RES (3), (4): Xaa is C or S
KPXXAPTKLEPISVLYLDDSSNVIKFKYENMV

SEQ ID NO: 62867 - protein, 31 aa, Artificial Sequence
  Cyclic GFR-binding peptide
  MOD_RES (29), (31): Xaa is C or S
RLEPISILYLDAANNVVKFKYEDMVVEAXGX

SEQ ID NO: 62868 - protein, 31 aa, Artificial Sequence
  Cyclic GFR-binding peptide
  MOD_RES (3), (4): Xaa is C or S
KAXXVPTKLSPISILYIDKGVVTYYKQYEGM

SEQ ID NO: 62869 - protein, 27 aa, Artificial Sequence
  Cyclic GFR-binding peptide
  MOD_RES (27), (27): Xaa is C or S
LSPISILYIIGKTPKIYKQYEMIVKSX

SEQ ID NO: 62870 - protein, 22 aa, Artificial Sequence
  Cyclic GFR-binding peptide
KLSPISVLYIDSSNNVIYKQYE

SEQ ID NO: 62871 - protein, 33 aa, Artificial Sequence
  Cyclic GFR-binding peptide
  MOD_RES (6), (7): Xaa is C or S
KVGKAXXVPTKLSPISVLYIDDMGVPTYKQYEE

SEQ ID NO: 62872 - protein, 26 aa, Artificial Sequence
  Cyclic GFR-binding peptide
PTKLEPISVLYLDDMGVPTKFKYEEG

SEQ ID NO: 62873 - protein, 38 aa, Artificial Sequence; identical to SEQ ID NO: 18618
  Cyclic GFR-binding peptide
  MOD_RES (2), (3), (35), (37): Xaa is C or S

SEQ ID NO: 62874 - protein, 32 aa, Artificial Sequence
  Cyclic GFR-binding peptide
  MOD_RES (4), (5): Xaa is C or S
AAPXXVPQALSPISILYIVGRKPKVYKQYEMI

SEQ ID NO: 62875 - protein, 32 aa, Artificial Sequence
  Cyclic GFR-binding peptide
  MOD_RES (6), (7): Xaa is C or S
SIPKAXXVPTELEPISMLYLDEYDKVVKFKYE

SEQ ID NO: 62876 - protein, 32 aa, Artificial Sequence; identical to SEQ ID NO: 18623
  Cyclic GFR-binding peptide
  MOD_RES (1), (1): Xaa is C or S

SEQ ID NO: 62877 - protein, 33 aa, Artificial Sequence
  Cyclic GFR-binding peptide
  MOD_RES (30), (32): Xaa is C or S
TELSPISMLYIDENEKVVYKQYEDMVVEGXGXR

SEQ ID NO: 62878 - protein, 36 aa, Artificial Sequence; identical to SEQ ID NO: 18625
  Cyclic GFR-binding peptide
  MOD_RES (2), (3), (35): Xaa is C or S

SEQ ID NO: 62879 - protein, 40 aa, Artificial Sequence; identical to SEQ ID NO: 18630
  Cyclic GFR-binding peptide
  MOD_RES (6), (7), (38), (40): Xaa is C or S

SEQ ID NO: 62880 - protein, 29 aa, Artificial Sequence
  Cyclic GFR-binding peptide
  MOD_RES (2), (3): Xaa is C or S
AXXVPTKLSPISILYIDKGVVTYYKQYEG

SEQ ID NO: 62881 - protein, 23 aa, Artificial Sequence
  Cyclic GFR-binding peptide
TKLSPISVLYIDDMGVPTYKQYE

SEQ ID NO: 62882 - protein, 27 aa, Artificial Sequence
  Cyclic GFR-binding peptide
  MOD_RES (1), (2): Xaa is C or S
XXVPQDLEPISILYLVGRTPKVKFKYE

SEQ ID NO: 62883 - protein, 33 aa, Artificial Sequence
  Cyclic GFR-binding peptide
  MOD_RES (31), (33): Xaa is C or S
PTKLEPISVLYLDSSNNVIKFKYENMVVKAXGX

SEQ ID NO: 62884 - protein, 36 aa, Artificial Sequence; identical to SEQ ID NO: 18633
  Cyclic GFR-binding peptide
  MOD_RES (5), (6): Xaa is C or S

SEQ ID NO: 62885 - protein, 26 aa, Artificial Sequence
  Cyclic GFR-binding peptide
TKLSPISILYIDKGVVTYYKQYEGMA

SEQ ID NO: 62886 - protein, 27 aa, Artificial Sequence
  Cyclic GFR-binding peptide
TKLSPISILYIDKGVVTYYKQYEGMAV

SEQ ID NO: 62887 - protein, 36 aa, Artificial Sequence; identical to SEQ ID NO: 18634
  Cyclic GFR-binding peptide
  MOD_RES (1), (2), (33), (35): Xaa is C or S

SEQ ID NO: 62888 - protein, 38 aa, Artificial Sequence; identical to SEQ ID NO: 18637
  Cyclic GFR-binding peptide
  MOD_RES (2), (3), (35), (37): Xaa is C or S

SEQ ID NO: 62889 - protein, 22 aa, Artificial Sequence
  Cyclic GFR-binding peptide
KLSPISILYIDKGVVTYYKQYE

SEQ ID NO: 62890 - protein, 29 aa, Artificial Sequence
  Cyclic GFR-binding peptide
ARLEPISILYLDAANNVVKFKYEDMVVEA

SEQ ID NO: 62891 - protein, 31 aa, Artificial Sequence
  Cyclic GFR-binding peptide
  MOD_RES (28), (30): Xaa is C or S
LEPISVLYLDDSSNVIKFKYENMVVRSXGXH

SEQ ID NO: 62892 - protein, 25 aa, Artificial Sequence
  Cyclic GFR-binding peptide
LSPISILYIIGKTPKIYKQYEMIVK

SEQ ID NO: 62893 - protein, 40 aa, Artificial Sequence; identical to SEQ ID NO: 18641
  Cyclic GFR-binding peptide
  MOD_RES (5), (6), (39): Xaa is C or S

SEQ ID NO: 62894 - protein, 31 aa, Artificial Sequence
  Cyclic GFR-binding peptide
  MOD_RES (28), (30): Xaa is C or S
LEPISMLYLDENEKVVKFKYEDMVVEGXGXR

SEQ ID NO: 62895 - protein, 27 aa, Artificial Sequence
  Cyclic GFR-binding peptide
TKLNAISILYFDKGVVTYLKKYRGMAV

SEQ ID NO: 62896 - protein, 38 aa, Artificial Sequence; identical to SEQ ID NO: 18644
  Cyclic GFR-binding peptide
  MOD_RES (4), (5), (37): Xaa is C or S

SEQ ID NO: 62897 - protein, 32 aa, Artificial Sequence
  Cyclic GFR-binding peptide
  MOD_RES (2), (3): Xaa is C or S
PXXVSQDLSPISILYIIGKTPKIYKQYEMIVK

SEQ ID NO: 62898 - protein, 32 aa, Artificial Sequence
  Cyclic GFR-binding peptide
  MOD_RES (6), (7): Xaa is C or S
KASKAXXVPTKLSPISILYKDKGVVTYLKYHY

SEQ ID NO: 62899 - protein, 21 aa, Artificial Sequence
  Cyclic GFR-binding peptide
EPISVLYLDSSNNVIKFKYEN

SEQ ID NO: 62900 - protein, 33 aa, Artificial Sequence
  Cyclic GFR-binding peptide
  MOD_RES (4), (5): Xaa is C or S
PKPXXAPTKLEPISVLYLDDSSNVIKFKYENMV

SEQ ID NO: 62901 - protein, 27 aa, Artificial Sequence
  Cyclic GFR-binding peptide
  MOD_RES (26), (26): Xaa is C or S
SPISILYIIGKTPKIYKQYEMIVKSXK

SEQ ID NO: 62902 - protein, 38 aa, Artificial Sequence; identical to SEQ ID NO: 18646
  Cyclic GFR-binding peptide
  MOD_RES (4), (5), (36), (38): Xaa is C or S

SEQ ID NO: 62903 - protein, 30 aa, Artificial Sequence
  Cyclic GFR-binding peptide
  MOD_RES (27), (29): Xaa is C or S
LEPISILYLIGKTPKIKFKYEMIVKSXKXS

SEQ ID NO: 62904 - protein, 33 aa, Artificial Sequence
  Cyclic GFR-binding peptide
  MOD_RES (4), (5): Xaa is C or S
ASPXXVSQDLSPISILYIIGKTPKIYKQYEMIV

SEQ ID NO: 62905 - protein, 37 aa, Artificial Sequence; identical to SEQ ID NO: 18650
  Cyclic GFR-binding peptide
  MOD_RES (1), (2), (35), (37): Xaa is C or S

SEQ ID NO: 62906 - protein, 31 aa, Artificial Sequence
  Cyclic GFR-binding peptide
  MOD_RES (30), (30): Xaa is C or S
TKLSPISVLYIDSSNNVIYKQYENMVVKAXG

SEQ ID NO: 62907 - protein, 37 aa, Artificial Sequence; identical to SEQ ID NO: 18651
  Cyclic GFR-binding peptide
  MOD_RES (1), (2), (35), (37): Xaa is C or S

SEQ ID NO: 62908 - protein, 28 aa, Artificial Sequence
  Cyclic GFR-binding peptide
  MOD_RES (27), (27): Xaa is C or S
EPISMLYLDENEKVVKFKYEDMVVEGXG

SEQ ID NO: 62909 - protein, 22 aa, Artificial Sequence
  Cyclic GFR-binding peptide
ALEPISILYLVGRKPKVKFKYE

SEQ ID NO: 62910 - protein, 25 aa, Artificial Sequence
  Cyclic GFR-binding peptide
QDLSPISILYIVGRTPKVYKQYEMV

SEQ ID NO: 62911 - protein, 32 aa, Artificial Sequence; identical to SEQ ID NO: 18658
  Cyclic GFR-binding peptide
  MOD_RES (1), (1): Xaa is C or S

SEQ ID NO: 62912 - protein, 32 aa, Artificial Sequence
  Cyclic GFR-binding peptide
  MOD_RES (5), (6): Xaa is C or S
ASKAXXVPTKLSPISILYIDKGVVTYYKQYEG

SEQ ID NO: 62913 - protein, 33 aa, Artificial Sequence
  Cyclic GFR-binding peptide
  MOD_RES (6), (7): Xaa is C or S
YVPKPXXAPTKLSPISVLYIDDSSNVIYKQYEN

SEQ ID NO: 62914 - protein, 27 aa, Artificial Sequence
  Cyclic GFR-binding peptide
  MOD_RES (27), (27): Xaa is C or S
SPISVLYIDDSSNVIYKQYENMVVRAX

SEQ ID NO: 62915 - protein, 39 aa, Artificial Sequence; identical to SEQ ID NO: 18662
  Cyclic GFR-binding peptide
  MOD_RES (5), (6), (37), (39): Xaa is C or S

SEQ ID NO: 62916 - protein, 31 aa, Artificial Sequence
  Cyclic GFR-binding peptide
  MOD_RES (6), (6): Xaa is C or S
VTKPTXAPTKLSPISVLYIDDSSNVIYKQYE

SEQ ID NO: 62917 - protein, 24 aa, Artificial Sequence
  Cyclic GFR-binding peptide
QDLSPISILYIIGKTPKIYKQYEM

SEQ ID NO: 62918 - protein, 33 aa, Artificial Sequence
  Cyclic GFR-binding peptide
  MOD_RES (4), (5): Xaa is C or S
PKAXXVPTELEPISMLYLDENEKVVKFKYEDMV

SEQ ID NO: 62919 - protein, 23 aa, Artificial Sequence
  Cyclic GFR-binding peptide
RLEPISILYLDAANNVVKFKYED

SEQ ID NO: 62920 - protein, 24 aa, Artificial Sequence
  Cyclic GFR-binding peptide
LNAISILYFDAANNVVLKKYRDMV

SEQ ID NO: 62921 - protein, 30 aa, Artificial Sequence
  Cyclic GFR-binding peptide
  MOD_RES (4), (5): Xaa is C or S
PASXXVPARLEPISILYLDAANNVVKFKYE

SEQ ID NO: 62922 - protein, 31 aa, Artificial Sequence
  Cyclic GFR-binding peptide
  MOD_RES (3), (4): Xaa is C or S
SPXXVSQDLEPISILYLIGKTPKIKFKYEMI

SEQ ID NO: 62923 - protein, 35 aa, Artificial Sequence; identical to SEQ ID NO: 18668
  Cyclic GFR-binding peptide
  MOD_RES (2), (3), (34): Xaa is C or S

SEQ ID NO: 62924 - protein, 30 aa, Artificial Sequence
  Cyclic GFR-binding peptide
  MOD_RES (2), (3): Xaa is C or S
AXXVPTELEPISMLYLDEYDKVVKFKYEEM

SEQ ID NO: 62925 - protein, 30 aa, Artificial Sequence
  Cyclic GFR-binding peptide
  MOD_RES (1), (2): Xaa is C or S
XXAPTKLEPISVLYLDDSSNVIKFKYENMV

SEQ ID NO: 62926 - protein, 39 aa, Artificial Sequence; identical to SEQ ID NO: 18669
  Cyclic GFR-binding peptide
  MOD_RES (4), (5), (37), (39): Xaa is C or S

SEQ ID NO: 62927 - protein, 26 aa, Artificial Sequence
  Cyclic GFR-binding peptide
DLEPISILYLIGKTPKIKFKYEMIVK

SEQ ID NO: 62928 - protein, 26 aa, Artificial Sequence
  Cyclic GFR-binding peptide
TKLEPISVLYLDDMGVPTKFKYEEGM

SEQ ID NO: 62929 - protein, 28 aa, Artificial Sequence
  Cyclic GFR-binding peptide
  MOD_RES (1), (2): Xaa is C or S
XXVPTELSPISMLYIDENEKVVYKQYED

SEQ ID NO: 62930 - protein, 30 aa, Artificial Sequence
  Cyclic GFR-binding peptide
  MOD_RES (30), (30): Xaa is C or S
TQLSPISVLYIDDSSNVIYKQYENMVVRAX

SEQ ID NO: 62931 - protein, 34 aa, Artificial Sequence; identical to SEQ ID NO: 18677
  Cyclic GFR-binding peptide
  MOD_RES (31), (33): Xaa is C or S

SEQ ID NO: 62932 - protein, 32 aa, Artificial Sequence; identical to SEQ ID NO: 18678
  Cyclic GFR-binding peptide
  MOD_RES (1), (1): Xaa is C or S

SEQ ID NO: 62933 - protein, 35 aa, Artificial Sequence; identical to SEQ ID NO: 18682
  Cyclic GFR-binding peptide
  MOD_RES (4), (5): Xaa is C or S

SEQ ID NO: 62934 - protein, 32 aa, Artificial Sequence; identical to SEQ ID NO: 18683
  Cyclic GFR-binding peptide
  MOD_RES (1), (1): Xaa is C or S

SEQ ID NO: 62935 - protein, 32 aa, Artificial Sequence
  Cyclic GFR-binding peptide
  MOD_RES (5), (6): Xaa is C or S
VGKAXXVPTKLSPISVLYIDDMGVPTYKQYEE

SEQ ID NO: 62936 - protein, 29 aa, Artificial Sequence
  Cyclic GFR-binding peptide
EPISILYLIGKTPKIKFKYEAAAAAAAAA

SEQ ID NO: 62937 - protein, 36 aa, Artificial Sequence; identical to SEQ ID NO: 18689
  Cyclic GFR-binding peptide
  MOD_RES (3), (4), (35): Xaa is C or S

SEQ ID NO: 62938 - protein, 27 aa, Artificial Sequence
  Cyclic GFR-binding peptide
  MOD_RES (27), (27): Xaa is C or S
SPISVLYIDSSNNVIYKQYENMVVKAX

SEQ ID NO: 62939 - protein, 27 aa, Artificial Sequence
  Cyclic GFR-binding peptide
LEPISMLYLDENEKVVKFKYEDMVVEG

SEQ ID NO: 62940 - protein, 32 aa, Artificial Sequence
  Cyclic GFR-binding peptide
  MOD_RES (30), (32): Xaa is C or S
ARLEPISILYLDAANNVVKFKYEDMVVEAXGX

SEQ ID NO: 62941 - protein, 33 aa, Artificial Sequence
  Cyclic GFR-binding peptide
  MOD_RES (2), (3): Xaa is C or S
AXXVPTKLSPISVLYIDDMGVPTYKQYEEGMSV

SEQ ID NO: 62942 - protein, 26 aa, Artificial Sequence
  Cyclic GFR-binding peptide
  MOD_RES (1), (1): Xaa is C or S
XVPTELEPISMLYLDENEKVVKFKYE

SEQ ID NO: 62943 - protein, 27 aa, Artificial Sequence
  Cyclic GFR-binding peptide
APTQLEPISVLYLDDSSNVIKFKYENM

SEQ ID NO: 62944 - protein, 28 aa, Artificial Sequence
  Cyclic GFR-binding peptide
  MOD_RES (1), (1): Xaa is C or S
XVPTKLSPISILYIDKGVVTYYKQYEGM

SEQ ID NO: 62945 - protein, 39 aa, Artificial Sequence; identical to SEQ ID NO: 18701
  Cyclic GFR-binding peptide
  MOD_RES (5), (6), (37), (39): Xaa is C or S

SEQ ID NO: 62946 - protein, 32 aa, Artificial Sequence; identical to SEQ ID NO: 18705
  Cyclic GFR-binding peptide
  MOD_RES (31), (31): Xaa is C or S

SEQ ID NO: 62947 - protein, 35 aa, Artificial Sequence; identical to SEQ ID NO: 18706
  Cyclic GFR-binding peptide
  MOD_RES (4), (5): Xaa is C or S

SEQ ID NO: 62948 - protein, 34 aa, Artificial Sequence
  Cyclic GFR-binding peptide
  MOD_RES (6), (7): Xaa is C or S
ASASPXXVPQDLSPISILYIVGRTPKVYKQYEMV

SEQ ID NO: 62949 - protein, 42 aa, Artificial Sequence; identical to SEQ ID NO: 18709
  Cyclic GFR-binding peptide
  MOD_RES (6), (7), (39), (41): Xaa is C or S

SEQ ID NO: 62950 - protein, 36 aa, Artificial Sequence; identical to SEQ ID NO: 18711
  Cyclic GFR-binding peptide
  MOD_RES (2), (3), (35): Xaa is C or S

SEQ ID NO: 62951 - protein, 28 aa, Artificial Sequence
  Cyclic GFR-binding peptide
  MOD_RES (1), (1): Xaa is C or S
XVPTKLNAISILYFDKGVVTYLKKYRGM

SEQ ID NO: 62952 - protein, 34 aa, Artificial Sequence; identical to SEQ ID NO: 18715
  Cyclic GFR-binding peptide
  MOD_RES (2), (3), (34): Xaa is C or S

SEQ ID NO: 62953 - protein, 30 aa, Artificial Sequence
  Cyclic GFR-binding peptide
  MOD_RES (28), (30): Xaa is C or S
LEPISVLYLDDSSNVIKFKYENMVVRAXGX

SEQ ID NO: 62954 - protein, 32 aa, Artificial Sequence
  Cyclic GFR-binding peptide
  MOD_RES (30), (32): Xaa is C or S
PQALSPISILYIVGRKPKVYKQYEMIVRSXKX

SEQ ID NO: 62955 - protein, 32 aa, Artificial Sequence
  Cyclic GFR-binding peptide
  MOD_RES (6), (7): Xaa is C or S
YVPKPXXAPTKLSPISVLYIDDSSNVIYKQYE

SEQ ID NO: 62956 - protein, 34 aa, Artificial Sequence; identical to SEQ ID NO: 18722
  Cyclic GFR-binding peptide
  MOD_RES (32), (34): Xaa is C or S

SEQ ID NO: 62957 - protein, 30 aa, Artificial Sequence
  Cyclic GFR-binding peptide
  MOD_RES (28), (30): Xaa is C or S
EPISVLYLDDMGVPTKFKYEEGMSVAEXGX

SEQ ID NO: 62958 - protein, 34 aa, Artificial Sequence; identical to SEQ ID NO: 18726
  Cyclic GFR-binding peptide
  MOD_RES (4), (4): Xaa is C or S

SEQ ID NO: 62959 - protein, 27 aa, Artificial Sequence
  Cyclic GFR-binding peptide
PTKLSPISVLYIDSSNNVIYKQYENMV

SEQ ID NO: 62960 - protein, 31 aa, Artificial Sequence
  Cyclic GFR-binding peptide
  MOD_RES (5), (6): Xaa is C or S
ASKAXXVPTKLSPISILYKDKGVVTYLKYHY

SEQ ID NO: 62961 - protein, 30 aa, Artificial Sequence; identical to SEQ ID NO: 18733
  Cyclic GFR-binding peptide

SEQ ID NO: 62962 - protein, 33 aa, Artificial Sequence; identical to SEQ ID NO: 18734
  Cyclic GFR-binding peptide
  MOD_RES (1), (2), (33): Xaa is C or S

SEQ ID NO: 62963 - protein, 26 aa, Artificial Sequence
  Cyclic GFR-binding peptide
LEPISILYLVGRTPKVKFKYEMVVKS

SEQ ID NO: 62964 - protein, 21 aa, Artificial Sequence
  Cyclic GFR-binding peptide
SPISILYIDKGVVTYYKQYEG

SEQ ID NO: 62965 - protein, 39 aa, Artificial Sequence; identical to SEQ ID NO: 18735
  Cyclic GFR-binding peptide
  MOD_RES (5), (6), (39): Xaa is C or S

SEQ ID NO: 62966 - protein, 28 aa, Artificial Sequence
  Cyclic GFR-binding peptide
  MOD_RES (1), (1): Xaa is C or S
XAPTKLEPISVLYLDDSSNVIKFKYENM

SEQ ID NO: 62967 - protein, 27 aa, Artificial Sequence
  Cyclic GFR-binding peptide
RLNAISILYFDAANNVVLKKYRDMVVE

SEQ ID NO: 62968 - protein, 21 aa, Artificial Sequence
  Cyclic GFR-binding peptide
LSPISILYIVGRKPKVYKQYE

SEQ ID NO: 62969 - protein, 31 aa, Artificial Sequence
  Cyclic GFR-binding peptide
  MOD_RES (29), (31): Xaa is C or S
KLSPISVLYIDSSNNVIYKQYENMVVKAXGX

SEQ ID NO: 62970 - protein, 38 aa, Artificial Sequence; identical to SEQ ID NO: 18742
  Cyclic GFR-binding peptide
  MOD_RES (5), (6), (37): Xaa is C or S

SEQ ID NO: 62971 - protein, 27 aa, Artificial Sequence
  Cyclic GFR-binding peptide
LEPISILYLDAANNVVKFKYEDMVVEA

SEQ ID NO: 62972 - protein, 28 aa, Artificial Sequence
  Cyclic GFR-binding peptide
  MOD_RES (1), (1): Xaa is C or S
XVPTKLSPISVLYIDDMGVPTYKQYEEG

SEQ ID NO: 62973 - protein, 27 aa, Artificial Sequence
  Cyclic GFR-binding peptide
LNAISILYFDAANNVVLKKYRDMVVEA

SEQ ID NO: 62974 - protein, 35 aa, Artificial Sequence; identical to SEQ ID NO: 18744
  Cyclic GFR-binding peptide
  MOD_RES (2), (3), (35): Xaa is C or S

SEQ ID NO: 62975 - protein, 29 aa, Artificial Sequence
  Cyclic GFR-binding peptide
  MOD_RES (1), (2): Xaa is C or S
XXAPTQLSPISVLYIDDSSNVIYKQYENM

SEQ ID NO: 62976 - protein, 28 aa, Artificial Sequence
  Cyclic GFR-binding peptide
  MOD_RES (1), (2): Xaa is C or S
XXAPTKLEPISVLYLDDSSNVIKFKYEN

SEQ ID NO: 62977 - protein, 25 aa, Artificial Sequence
  Cyclic GFR-binding peptide
TKLEPISVLYLDSSNNVIKFKYENM

SEQ ID NO: 62978 - protein, 37 aa, Artificial Sequence; identical to SEQ ID NO: 18745
  Cyclic GFR-binding peptide
  MOD_RES (3), (4), (36): Xaa is C or S

SEQ ID NO: 62979 - protein, 30 aa, Artificial Sequence
  Cyclic GFR-binding peptide
  MOD_RES (28), (30): Xaa is C or S
LSPISVLYIDDSSNVIYKQYENMVVRSXGX

SEQ ID NO: 62980 - protein, 35 aa, Artificial Sequence; identical to SEQ ID NO: 18749
  Cyclic GFR-binding peptide
  MOD_RES (4), (5): Xaa is C or S

SEQ ID NO: 62981 - protein, 33 aa, Artificial Sequence
  Cyclic GFR-binding peptide
  MOD_RES (30), (32): Xaa is C or S
TELSPISMLYIDEYDKVVYKQYEEMVVEGXGXR

SEQ ID NO: 62982 - protein, 28 aa, Artificial Sequence
  Cyclic GFR-binding peptide
PTELEPISMLYLDENEKVVKFKYEDMVV

SEQ ID NO: 62983 - protein, 41 aa, Artificial Sequence; identical to SEQ ID NO: 18756
  Cyclic GFR-binding peptide
  MOD_RES (6), (7), (39), (41): Xaa is C or S

SEQ ID NO: 62984 - protein, 37 aa, Artificial Sequence; identical to SEQ ID NO: 18757
  Cyclic GFR-binding peptide
  MOD_RES (6), (7): Xaa is C or S

SEQ ID NO: 62985 - protein, 28 aa, Artificial Sequence
  Cyclic GFR-binding peptide
  MOD_RES (28), (28): Xaa is C or S
DLSPISILYIIGKTPKIYKQYEMIVKSX

SEQ ID NO: 62986 - protein, 30 aa, Artificial Sequence
  Cyclic GFR-binding peptide
  MOD_RES (4), (5): Xaa is C or S
GKAXXVPTKLSPISVLYIDDMGVPTYKQYE

SEQ ID NO: 62987 - protein, 22 aa, Artificial Sequence
  Cyclic GFR-binding peptide
QLSPISVLYIDDSSNVIYKQYE

SEQ ID NO: 62988 - protein, 37 aa, Artificial Sequence; identical to SEQ ID NO: 18759
  Cyclic GFR-binding peptide
  MOD_RES (6), (7): Xaa is C or S

SEQ ID NO: 62989 - protein, 27 aa, Artificial Sequence
  Cyclic GFR-binding peptide
KLEPISVLYLDDMGVPTKFKYEEGMSV

SEQ ID NO: 62990 - protein, 32 aa, Artificial Sequence; identical to SEQ ID NO: 18766
  Cyclic GFR-binding peptide
  MOD_RES (1), (1): Xaa is C or S

SEQ ID NO: 62991 - protein, 29 aa, Artificial Sequence
  Cyclic GFR-binding peptide
PTKLEPISVLYLDDSSNVIKFKYENMVVR

SEQ ID NO: 62992 - protein, 37 aa, Artificial Sequence
  Cyclic GFR-binding peptide
  MOD_RES (5), (6): Xaa is C or S
VGKAXXVPTKLSPISVLYIDDMGVPTYKQYEEGMSVA

SEQ ID NO: 62993 - protein, 27 aa, Artificial Sequence
  Cyclic GFR-binding peptide
  MOD_RES (1), (2): Xaa is C or S
XXVSQDLSPISILYIIGKTPKIYKQYE

SEQ ID NO: 62994 - protein, 29 aa, Artificial Sequence
  Cyclic GFR-binding peptide
PTELSPISMLYIDEYDKVVYKQYEEMVVE

SEQ ID NO: 62995 - protein, 32 aa, Artificial Sequence
  Cyclic GFR-binding peptide
  MOD_RES (5), (6): Xaa is C or S
APASXXVPARLNAISILYFDAANNVVLKKYRD

SEQ ID NO: 62996 - protein, 36 aa, Artificial Sequence; identical to SEQ ID NO: 18776
  Cyclic GFR-binding peptide
  MOD_RES (1), (2), (35): Xaa is C or S

SEQ ID NO: 62997 - protein, 38 aa, Artificial Sequence; identical to SEQ ID NO: 18779
  Cyclic GFR-binding peptide
  MOD_RES (3), (4), (36), (38): Xaa is C or S

SEQ ID NO: 62998 - protein, 37 aa, Artificial Sequence; identical to SEQ ID NO: 18780
  Cyclic GFR-binding peptide
  MOD_RES (4), (5), (37): Xaa is C or S

SEQ ID NO: 62999 - protein, 21 aa, Artificial Sequence
  Cyclic GFR-binding peptide
LSPISVLYIDSSNNVIYKQYE

SEQ ID NO: 63000 - protein, 24 aa, Artificial Sequence
  Cyclic GFR-binding peptide
KLSPISILYKDKGVVTYLKYHYGM

SEQ ID NO: 63001 - protein, 31 aa, Artificial Sequence
  Cyclic GFR-binding peptide
  MOD_RES (2), (3): Xaa is C or S
AXXVPTELSPISMLYIDENEKVVYKQYEDMV

SEQ ID NO: 63002 - protein, 37 aa, Artificial Sequence; identical to SEQ ID NO: 18782
  Cyclic GFR-binding peptide
  MOD_RES (4), (5), (36): Xaa is C or S

SEQ ID NO: 63003 - protein, 36 aa, Artificial Sequence
  Cyclic GFR-binding peptide
  MOD_RES (6), (7): Xaa is C or S
ASASPXXVPQDLEPISILYLVGRTPKVKFKYEMVVK

SEQ ID NO: 63004 - protein, 33 aa, Artificial Sequence; identical to SEQ ID NO: 18783
  Cyclic GFR-binding peptide
  MOD_RES (2), (3): Xaa is C or S

SEQ ID NO: 63005 - protein, 38 aa, Artificial Sequence; identical to SEQ ID NO: 18785
  Cyclic GFR-binding peptide
  MOD_RES (5), (6), (38): Xaa is C or S

SEQ ID NO: 63006 - protein, 29 aa, Artificial Sequence
  Cyclic GFR-binding peptide
PTKLEPISVLYLDSSNNVIKFKYENMVVK

SEQ ID NO: 63007 - protein, 27 aa, Artificial Sequence
  Cyclic GFR-binding peptide
  MOD_RES (27), (27): Xaa is C or S
EPISILYLDAANNVVKFKYEDMVVEAX

SEQ ID NO: 63008 - protein, 35 aa, Artificial Sequence; identical to SEQ ID NO: 18791
  Cyclic GFR-binding peptide
  MOD_RES (4), (4): Xaa is C or S

SEQ ID NO: 63009 - protein, 28 aa, Artificial Sequence
  Cyclic GFR-binding peptide
  MOD_RES (1), (2): Xaa is C or S
XXVPTELSPISMLYIDEYDKVVYKQYEE

SEQ ID NO: 63010 - protein, 31 aa, Artificial Sequence
  Cyclic GFR-binding peptide
  MOD_RES (5), (6): Xaa is C or S
ASKAXXVPTKLNAISILYFDKGVVTYLKKYR

SEQ ID NO: 63011 - protein, 33 aa, Artificial Sequence
  Cyclic GFR-binding peptide
  MOD_RES (3), (4): Xaa is C or S
KPXXAPTQLEPISVLYLDDSSNVIKFKYENMVV

SEQ ID NO: 63012 - protein, 35 aa, Artificial Sequence; identical to SEQ ID NO: 18798
  Cyclic GFR-binding peptide
  MOD_RES (32), (34): Xaa is C or S

SEQ ID NO: 63013 - protein, 30 aa, Artificial Sequence
  Cyclic GFR-binding peptide
  MOD_RES (1), (1): Xaa is C or S
XAPTQLEPISVLYLDDSSNVIKFKYENMVV

SEQ ID NO: 63014 - protein, 28 aa, Artificial Sequence
  Cyclic GFR-binding peptide
LSPISVLYIDDMGVPTYKQYEEGMSVAE

SEQ ID NO: 63015 - protein, 26 aa, Artificial Sequence
  Cyclic GFR-binding peptide
  MOD_RES (1), (1): Xaa is C or S
XVPTKLSPISVLYIDDMGVPTYKQYE

SEQ ID NO: 63016 - protein, 40 aa, Artificial Sequence; identical to SEQ ID NO: 18805
  Cyclic GFR-binding peptide
  MOD_RES (5), (6), (38), (40): Xaa is C or S

SEQ ID NO: 63017 - protein, 27 aa, Artificial Sequence
  Cyclic GFR-binding peptide
  MOD_RES (27), (27): Xaa is C or S
SPISILYKDAANNVVLKYHYDMVVEAX

SEQ ID NO: 63018 - protein, 40 aa, Artificial Sequence; identical to SEQ ID NO: 18808
  Cyclic GFR-binding peptide
  MOD_RES (5), (6), (38), (40): Xaa is C or S

SEQ ID NO: 63019 - protein, 28 aa, Artificial Sequence
  Cyclic GFR-binding peptide
  MOD_RES (1), (1): Xaa is C or S
XAPTKLSPISVLYIDDSSNVIYKQYENM

SEQ ID NO: 63020 - protein, 29 aa, Artificial Sequence
  Cyclic GFR-binding peptide
  MOD_RES (3), (4): Xaa is C or S
KAXXVPTKLSPISILYIDKGVVTYYKQYE

SEQ ID NO: 63021 - protein, 35 aa, Artificial Sequence
  Cyclic GFR-binding peptide
  MOD_RES (5), (6): Xaa is C or S
VPKAXXAPTKLSPISVLYIDSSNNVIYKQYENMVV

SEQ ID NO: 63022 - protein, 35 aa, Artificial Sequence
  Cyclic GFR-binding peptide
  MOD_RES (6), (7): Xaa is C or S
AAPASXXVPARLSPISILYKDAANNVVLKYHYDMV

SEQ ID NO: 63023 - protein, 32 aa, Artificial Sequence; identical to SEQ ID NO: 18812
  Cyclic GFR-binding peptide
  MOD_RES (32), (32): Xaa is C or S

SEQ ID NO: 63024 - protein, 35 aa, Artificial Sequence
  Cyclic GFR-binding peptide
  MOD_RES (6), (7): Xaa is C or S
AVPKAXXAPTKLSPISVLYIDSSNNVIYKQYENMV

SEQ ID NO: 63025 - protein, 36 aa, Artificial Sequence; identical to SEQ ID NO: 18815
  Cyclic GFR-binding peptide
  MOD_RES (2), (3), (35): Xaa is C or S

SEQ ID NO: 63026 - protein, 32 aa, Artificial Sequence
  Cyclic GFR-binding peptide
  MOD_RES (3), (4): Xaa is C or S
KAXXVPTKLSPISILYKDKGVVTYLKYHYGMA

SEQ ID NO: 63027 - protein, 36 aa, Artificial Sequence; identical to SEQ ID NO: 18818
  Cyclic GFR-binding peptide
  MOD_RES (3), (35): Xaa is C or S

SEQ ID NO: 63028 - protein, 25 aa, Artificial Sequence
  Cyclic GFR-binding peptide
VPTELSPISMLYIDENEKVVYKQYE

SEQ ID NO: 63029 - protein, 32 aa, Artificial Sequence; identical to SEQ ID NO: 18820
  Cyclic GFR-binding peptide
  MOD_RES (32), (32): Xaa is C or S

SEQ ID NO: 63030 - protein, 35 aa, Artificial Sequence
  Cyclic GFR-binding peptide
  MOD_RES (32), (34): Xaa is C or S
PTKLSPISVLYIDDMGVPTYKQYEEGMSVAEXGXR

SEQ ID NO: 63031 - protein, 29 aa, Artificial Sequence
  Cyclic GFR-binding peptide
  MOD_RES (3), (3): Xaa is C or S
PTXAPTKLEPISVLYLDDSSNVIKFKYEN

SEQ ID NO: 63032 - protein, 34 aa, Artificial Sequence
  Cyclic GFR-binding peptide
  MOD_RES (6), (6): Xaa is C or S
VTKPTXAPTKLSPISVLYIDDSSNVIYKQYENMV

SEQ ID NO: 63033 - protein, 31 aa, Artificial Sequence; identical to SEQ ID NO: 18826
  Cyclic GFR-binding peptide
  MOD_RES (1), (1): Xaa is C or S

SEQ ID NO: 63034 - protein, 37 aa, Artificial Sequence; identical to SEQ ID NO: 18827
  Cyclic GFR-binding peptide
  MOD_RES (4), (5), (36): Xaa is C or S

SEQ ID NO: 63035 - protein, 33 aa, Artificial Sequence
  Cyclic GFR-binding peptide
  MOD_RES (3), (4): Xaa is C or S
KAXXVPTELSPISMLYIDENEKVVYKQYEDMVV

SEQ ID NO: 63036 - protein, 34 aa, Artificial Sequence
  Cyclic GFR-binding peptide
  MOD_RES (31), (33): Xaa is C or S
PTKLSPISVLYIDSSNNVIYKQYENMVVKAXGXH

SEQ ID NO: 63037 - protein, 34 aa, Artificial Sequence; identical to SEQ ID NO: 18829
  Cyclic GFR-binding peptide
  MOD_RES (1), (2), (33): Xaa is C or S

SEQ ID NO: 63038 - protein, 34 aa, Artificial Sequence
  Cyclic GFR-binding peptide
  MOD_RES (5), (6): Xaa is C or S
SAAPXXVPQALEPISILYLVGRKPKVKFKYEMIV

SEQ ID NO: 63039 - protein, 41 aa, Artificial Sequence; identical to SEQ ID NO: 18830
  Cyclic GFR-binding peptide
  MOD_RES (5), (6), (38), (40): Xaa is C or S

SEQ ID NO: 63040 - protein, 35 aa, Artificial Sequence; identical to SEQ ID NO: 18832
  Cyclic GFR-binding peptide
  MOD_RES (2), (3), (35): Xaa is C or S

SEQ ID NO: 63041 - protein, 25 aa, Artificial Sequence
  Cyclic GFR-binding peptide
PARLEPISILYLDAANNVVKFKYED

SEQ ID NO: 63042 - protein, 31 aa, Artificial Sequence
  Cyclic GFR-binding peptide
  MOD_RES (4), (5): Xaa is C or S
PKPXXAPTKLSPISVLYIDDSSNVIYKQYEN

SEQ ID NO: 63043 - protein, 35 aa, Artificial Sequence; identical to SEQ ID NO: 18836
  Cyclic GFR-binding peptide
  MOD_RES (32), (34): Xaa is C or S

SEQ ID NO: 63044 - protein, 28 aa, Artificial Sequence
  Cyclic GFR-binding peptide
TKLSPISVLYIDDMGVPTYKQYEEGMSV

SEQ ID NO: 63045 - protein, 40 aa, Artificial Sequence; identical to SEQ ID NO: 18837
  Cyclic GFR-binding peptide
  MOD_RES (4), (5), (37), (39): Xaa is C or S

SEQ ID NO: 63046 - protein, 28 aa, Artificial Sequence
  Cyclic GFR-binding peptide
  MOD_RES (28), (28): Xaa is C or S
LSPISMLYIDEYDKVVYKQYEEMVVEGX

SEQ ID NO: 63047 - protein, 29 aa, Artificial Sequence
  Cyclic GFR-binding peptide
  MOD_RES (27), (29): Xaa is C or S
LSPISILYIVGRKPKVYKQYEMIVRSXKX

SEQ ID NO: 63048 - protein, 25 aa, Artificial Sequence
  Cyclic GFR-binding peptide
QALSPISILYIVGRKPKVYKQYEMI

SEQ ID NO: 63049 - protein, 34 aa, Artificial Sequence
  Cyclic GFR-binding peptide
  MOD_RES (6), (7): Xaa is C or S
KASKAXXVPTKLSPISILYIDKGVVTYYKQYEGM

SEQ ID NO: 63050 - protein, 30 aa, Artificial Sequence
  Cyclic GFR-binding peptide
  MOD_RES (4), (5): Xaa is C or S
PKPXXAPTKLSPISVLYIDDSSNVIYKQYE

SEQ ID NO: 63051 - protein, 32 aa, Artificial Sequence
  Cyclic GFR-binding peptide
  MOD_RES (3), (4): Xaa is C or S
ASXXVPARLEPISILYLDAANNVVKFKYEDMV

SEQ ID NO: 63052 - protein, 23 aa, Artificial Sequence
  Cyclic GFR-binding peptide
QALSPISILYIVGRKPKVYKQYE

SEQ ID NO: 63053 - protein, 36 aa, Artificial Sequence; identical to SEQ ID NO: 18845
  Cyclic GFR-binding peptide
  MOD_RES (2), (3), (35): Xaa is C or S

SEQ ID NO: 63054 - protein, 38 aa, Artificial Sequence; identical to SEQ ID NO: 18846
  Cyclic GFR-binding peptide
  MOD_RES (2), (3), (35), (37): Xaa is C or S

SEQ ID NO: 63055 - protein, 35 aa, Artificial Sequence; identical to SEQ ID NO: 18849
  Cyclic GFR-binding peptide
  MOD_RES (2), (3), (35): Xaa is C or S

SEQ ID NO: 63056 - protein, 24 aa, Artificial Sequence
  Cyclic GFR-binding peptide
ARLSPISILYKDAANNVVLKYHYD

SEQ ID NO: 63057 - protein, 35 aa, Artificial Sequence; identical to SEQ ID NO: 18850
  Cyclic GFR-binding peptide
  MOD_RES (3), (4): Xaa is C or S

SEQ ID NO: 63058 - protein, 31 aa, Artificial Sequence
  Cyclic GFR-binding peptide
  MOD_RES (1), (2): Xaa is C or S
XXVPARLSPISILYKDAANNVVLKYHYDMVV

SEQ ID NO: 63059 - protein, 26 aa, Artificial Sequence
  Cyclic GFR-binding peptide
SPISVLYIDDMGVPTYKQYEEGMSVA

SEQ ID NO: 63060 - protein, 36 aa, Artificial Sequence; identical to SEQ ID NO: 18855
  Cyclic GFR-binding peptide
  MOD_RES (1), (2), (34), (36): Xaa is C or S

SEQ ID NO: 63061 - protein, 34 aa, Artificial Sequence; identical to SEQ ID NO: 18860
  Cyclic GFR-binding peptide
  MOD_RES (2), (3): Xaa is C or S

SEQ ID NO: 63062 - protein, 27 aa, Artificial Sequence
  Cyclic GFR-binding peptide
KLSPISILYKDKGVVTYLKYHYGMAVS

SEQ ID NO: 63063 - protein, 35 aa, Artificial Sequence; identical to SEQ ID NO: 18864
  Cyclic GFR-binding peptide
  MOD_RES (1), (33), (35): Xaa is C or S

SEQ ID NO: 63064 - protein, 33 aa, Artificial Sequence; identical to SEQ ID NO: 18866
  Cyclic GFR-binding peptide
  MOD_RES (32), (32): Xaa is C or S

SEQ ID NO: 63065 - protein, 36 aa, Artificial Sequence; identical to SEQ ID NO: 18869
  Cyclic GFR-binding peptide
  MOD_RES (2), (3), (34), (36): Xaa is C or S

SEQ ID NO: 63066 - protein, 35 aa, Artificial Sequence; identical to SEQ ID NO: 18871
  Cyclic GFR-binding peptide
  MOD_RES (1), (32), (34): Xaa is C or S

SEQ ID NO: 63067 - protein, 29 aa, Artificial Sequence
  Cyclic GFR-binding peptide
  MOD_RES (27), (29): Xaa is C or S
SPISILYKDAANNVVLKYHYDMVVEAXGX

SEQ ID NO: 63068 - protein, 22 aa, Artificial Sequence
  Cyclic GFR-binding peptide
LNAISILYFDAANNVVLKKYRD

SEQ ID NO: 63069 - protein, 34 aa, Artificial Sequence
  Cyclic GFR-binding peptide
  MOD_RES (5), (6): Xaa is C or S
SAAPXXVPQALSPISILYIVGRKPKVYKQYEMIV

SEQ ID NO: 63070 - protein, 22 aa, Artificial Sequence
  Cyclic GFR-binding peptide
LSPISILYKDKGVVTYLKYHYG

SEQ ID NO: 63071 - protein, 35 aa, Artificial Sequence; identical to SEQ ID NO: 18881
  Cyclic GFR-binding peptide
  MOD_RES (2), (3), (35): Xaa is C or S

SEQ ID NO: 63072 - protein, 29 aa, Artificial Sequence
  Cyclic GFR-binding peptide
APTKLSPISVLYIDDSSNVIYKQYENMVV

SEQ ID NO: 63073 - protein, 30 aa, Artificial Sequence
  Cyclic GFR-binding peptide
  MOD_RES (2), (3): Xaa is C or S
AXXVPTKLNAISILYFDKGVVTYLKKYRGM

SEQ ID NO: 63074 - protein, 39 aa, Artificial Sequence; identical to SEQ ID NO: 18890
  Cyclic GFR-binding peptide
  MOD_RES (6), (7), (38): Xaa is C or S

SEQ ID NO: 63075 - protein, 24 aa, Artificial Sequence
  Cyclic GFR-binding peptide
LEPISVLYLDDMGVPTKFKYEEGM

SEQ ID NO: 63076 - protein, 34 aa, Artificial Sequence
  Cyclic GFR-binding peptide
  MOD_RES (5), (6): Xaa is C or S
IPKAXXVPTELSPISMLYIDENEKVVYKQYEDMV

SEQ ID NO: 63077 - protein, 25 aa, Artificial Sequence
  Cyclic GFR-binding peptide
LEPISVLYLDDMGVPTKFKYEEGMS

SEQ ID NO: 63078 - protein, 25 aa, Artificial Sequence
  Cyclic GFR-binding peptide
PTKLSPISVLYIDDSSNVIYKQYEN

SEQ ID NO: 63079 - protein, 40 aa, Artificial Sequence; identical to SEQ ID NO: 18891
  Cyclic GFR-binding peptide
  MOD_RES (6), (7), (39): Xaa is C or S

SEQ ID NO: 63080 - protein, 36 aa, Artificial Sequence; identical to SEQ ID NO: 18900
  Cyclic GFR-binding peptide
  MOD_RES (3), (4): Xaa is C or S

SEQ ID NO: 63081 - protein, 30 aa, Artificial Sequence
  Cyclic GFR-binding peptide
PTKLEPISVLYLDDMGVPTKFKYEEGMSVA

SEQ ID NO: 63082 - protein, 24 aa, Artificial Sequence
  Cyclic GFR-binding peptide
TKLSPISVLYIDDSSNVIYKQYEN

SEQ ID NO: 63083 - protein, 39 aa, Artificial Sequence; identical to SEQ ID NO: 18902
  Cyclic GFR-binding peptide
  MOD_RES (2), (3), (36), (38): Xaa is C or S

SEQ ID NO: 63084 - protein, 29 aa, Artificial Sequence
  Cyclic GFR-binding peptide
PTKLSPISILYIDKGVVTYYKQYEGMAVS

SEQ ID NO: 63085 - protein, 40 aa, Artificial Sequence; identical to SEQ ID NO: 18908
  Cyclic GFR-binding peptide
  MOD_RES (6), (38), (40): Xaa is C or S

SEQ ID NO: 63086 - protein, 27 aa, Artificial Sequence
  Cyclic GFR-binding peptide
  MOD_RES (27), (27): Xaa is C or S
NAISILYFDAANNVVLKKYRDMVVEAX

SEQ ID NO: 63087 - protein, 26 aa, Artificial Sequence
  Cyclic GFR-binding peptide
  MOD_RES (1), (1): Xaa is C or S
XVPTKLSPISILYKDKGVVTYLKYHY

SEQ ID NO: 63088 - protein, 29 aa, Artificial Sequence
  Cyclic GFR-binding peptide
  MOD_RES (27), (29): Xaa is C or S
EPISILYLDAANNVVKFKYEDMVVEAXGX

SEQ ID NO: 63089 - protein, 29 aa, Artificial Sequence
  Cyclic GFR-binding peptide
  MOD_RES (3), (4): Xaa is C or S
KAXXAPTKLSPISVLYIDSSNNVIYKQYE

SEQ ID NO: 63090 - protein, 39 aa, Artificial Sequence; identical to SEQ ID NO: 18915
  Cyclic GFR-binding peptide
  MOD_RES (4), (5), (36), (38): Xaa is C or S

SEQ ID NO: 63091 - protein, 31 aa, Artificial Sequence
  Cyclic GFR-binding peptide
  MOD_RES (29), (31): Xaa is C or S
QDLEPISILYLVGRTPKVKFKYEMVVKSXKX

SEQ ID NO: 63092 - protein, 31 aa, Artificial Sequence
  Cyclic GFR-binding peptide
  MOD_RES (2), (3): Xaa is C or S
SXXVPARLSPISILYKDAANNVVLKYHYDMV

SEQ ID NO: 63093 - protein, 28 aa, Artificial Sequence
  Cyclic GFR-binding peptide
PQALSPISILYIVGRKPKVYKQYEMIVR

SEQ ID NO: 63094 - protein, 31 aa, Artificial Sequence
  Cyclic GFR-binding peptide
  MOD_RES (30), (30): Xaa is C or S
PQALSPISILYIVGRKPKVYKQYEMIVRSXK

SEQ ID NO: 63095 - protein, 31 aa, Artificial Sequence
  Cyclic GFR-binding peptide
  MOD_RES (4), (5): Xaa is C or S
SKAXXVPTKLSPISILYKDKGVVTYLKYHYG

SEQ ID NO: 63096 - protein, 33 aa, Artificial Sequence; identical to SEQ ID NO: 18924
  Cyclic GFR-binding peptide
  MOD_RES (2), (3): Xaa is C or S

SEQ ID NO: 63097 - protein, 26 aa, Artificial Sequence
  Cyclic GFR-binding peptide
  MOD_RES (26), (26): Xaa is C or S
SPISILYIVGRKPKVYKQYEMIVRSX

SEQ ID NO: 63098 - protein, 27 aa, Artificial Sequence
  Cyclic GFR-binding peptide
PQALSPISILYIVGRKPKVYKQYEMIV

SEQ ID NO: 63099 - protein, 37 aa, Artificial Sequence; identical to SEQ ID NO: 18926
  Cyclic GFR-binding peptide
  MOD_RES (4), (5), (37): Xaa is C or S

SEQ ID NO: 63100 - protein, 33 aa, Artificial Sequence
  Cyclic GFR-binding peptide
  MOD_RES (4), (5): Xaa is C or S
PASXXVPARLSPISILYKDAANNVVLKYHYDMV

SEQ ID NO: 63101 - protein, 29 aa, Artificial Sequence
  Cyclic GFR-binding peptide
  MOD_RES (27), (29): Xaa is C or S
SPISILYIDKGVVTYYKQYEGMAVSEXGX

SEQ ID NO: 63102 - protein, 29 aa, Artificial Sequence
  Cyclic GFR-binding peptide
TQLEPISVLYLDDSSNVIKFKYENMVVRA

SEQ ID NO: 63103 - protein, 35 aa, Artificial Sequence
  Cyclic GFR-binding peptide
  MOD_RES (5), (6): Xaa is C or S
VGKAXXVPTKLSPISVLYIDDMGVPTYKQYEEGMS

SEQ ID NO: 63104 - protein, 38 aa, Artificial Sequence; identical to SEQ ID NO: 18927
  Cyclic GFR-binding peptide
  MOD_RES (5), (6): Xaa is C or S

SEQ ID NO: 63105 - protein, 31 aa, Artificial Sequence; identical to SEQ ID NO: 18931
  Cyclic GFR-binding peptide
  MOD_RES (31), (31): Xaa is C or S

SEQ ID NO: 63106 - protein, 24 aa, Artificial Sequence
  Cyclic GFR-binding peptide
EPISILYLIGKTPKIKFKYEMIVK

SEQ ID NO: 63107 - protein, 33 aa, Artificial Sequence
  Cyclic GFR-binding peptide
  MOD_RES (3), (4): Xaa is C or S
ASXXVPARLEPISILYLDAANNVVKFKYEDMVV

SEQ ID NO: 63108 - protein, 38 aa, Artificial Sequence; identical to SEQ ID NO: 18934
  Cyclic GFR-binding peptide
  MOD_RES (6), (7): Xaa is C or S

SEQ ID NO: 63109 - protein, 24 aa, Artificial Sequence
  Cyclic GFR-binding peptide
EPISILYLVGRTPKVKFKYEMVVK

SEQ ID NO: 63110 - protein, 32 aa, Artificial Sequence; identical to SEQ ID NO: 18936
  Cyclic GFR-binding peptide
  MOD_RES (1), (2): Xaa is C or S

SEQ ID NO: 63111 - protein, 29 aa, Artificial Sequence
  Cyclic GFR-binding peptide
  MOD_RES (1), (2): Xaa is C or S
XXVPQALEPISILYLVGRKPKVKFKYEMI

SEQ ID NO: 63112 - protein, 28 aa, Artificial Sequence
  Cyclic GFR-binding peptide
QLSPISVLYIDDSSNVIYKQYENMVVRA

SEQ ID NO: 63113 - protein, 33 aa, Artificial Sequence; identical to SEQ ID NO: 18939
  Cyclic GFR-binding peptide
  MOD_RES (1), (33): Xaa is C or S

SEQ ID NO: 63114 - protein, 33 aa, Artificial Sequence; identical to SEQ ID NO: 18940
  Cyclic GFR-binding peptide
  MOD_RES (2), (3): Xaa is C or S

SEQ ID NO: 63115 - protein, 25 aa, Artificial Sequence
  Cyclic GFR-binding peptide
PARLSPISILYKDAANNVVLKYHYD

SEQ ID NO: 63116 - protein, 31 aa, Artificial Sequence
  Cyclic GFR-binding peptide
  MOD_RES (29), (31): Xaa is C or S
KLSPISILYIDKGVVTYYKQYEGMAVSEXGX

SEQ ID NO: 63117 - protein, 24 aa, Artificial Sequence
  Cyclic GFR-binding peptide
LSPISVLYIDDSSNVIYKQYENMV

SEQ ID NO: 63118 - protein, 25 aa, Artificial Sequence
  Cyclic GFR-binding peptide
LSPISMLYIDENEKVVYKQYEDMVV

SEQ ID NO: 63119 - protein, 31 aa, Artificial Sequence; identical to SEQ ID NO: 18948
  Cyclic GFR-binding peptide
  MOD_RES (1), (1): Xaa is C or S

SEQ ID NO: 63120 - protein, 40 aa, Artificial Sequence; identical to SEQ ID NO: 18949
  Cyclic GFR-binding peptide
  MOD_RES (6), (7), (39): Xaa is C or S

SEQ ID NO: 63121 - protein, 28 aa, Artificial Sequence
  Cyclic GFR-binding peptide
  MOD_RES (1), (1): Xaa is C or S
XAPTKLEPISVLYLDSSNNVIKFKYENM

SEQ ID NO: 63122 - protein, 34 aa, Artificial Sequence; identical to SEQ ID NO: 18951
  Cyclic GFR-binding peptide
  MOD_RES (2), (3): Xaa is C or S

SEQ ID NO: 63123 - protein, 35 aa, Artificial Sequence; identical to SEQ ID NO: 18953
  Cyclic GFR-binding peptide
  MOD_RES (1), (2), (34): Xaa is C or S

SEQ ID NO: 63124 - protein, 30 aa, Artificial Sequence
  Cyclic GFR-binding peptide
  MOD_RES (2), (3): Xaa is C or S
SXXVPARLEPISILYLDAANNVVKFKYEDM

SEQ ID NO: 63125 - protein, 38 aa, Artificial Sequence; identical to SEQ ID NO: 18958
  Cyclic GFR-binding peptide
  MOD_RES (3), (4), (35), (37): Xaa is C or S

SEQ ID NO: 63126 - protein, 33 aa, Artificial Sequence; identical to SEQ ID NO: 18961
  Cyclic GFR-binding peptide
  MOD_RES (2), (3): Xaa is C or S

SEQ ID NO: 63127 - protein, 30 aa, Artificial Sequence
  Cyclic GFR-binding peptide
  MOD_RES (29), (29): Xaa is C or S
KLEPISVLYLDSSNNVIKFKYENMVVKAXG

SEQ ID NO: 63128 - protein, 29 aa, Artificial Sequence
  Cyclic GFR-binding peptide
  MOD_RES (1), (2): Xaa is C or S
XXVPTKLSPISILYKDKGVVTYLKYHYGM

SEQ ID NO: 63129 - protein, 33 aa, Artificial Sequence
  Cyclic GFR-binding peptide
  MOD_RES (5), (6): Xaa is C or S
APASXXVPARLEPISILYLDAANNVVKFKYEDM

SEQ ID NO: 63130 - protein, 34 aa, Artificial Sequence; identical to SEQ ID NO: 18965
  Cyclic GFR-binding peptide
  MOD_RES (1), (32), (34): Xaa is C or S

SEQ ID NO: 63131 - protein, 36 aa, Artificial Sequence; identical to SEQ ID NO: 18966
  Cyclic GFR-binding peptide
  MOD_RES (5), (5): Xaa is C or S

SEQ ID NO: 63132 - protein, 34 aa, Artificial Sequence; identical to SEQ ID NO: 18967
  Cyclic GFR-binding peptide
  MOD_RES (2), (3): Xaa is C or S

SEQ ID NO: 63133 - protein, 33 aa, Artificial Sequence; identical to SEQ ID NO: 18970
  Cyclic GFR-binding peptide
  MOD_RES (32), (32): Xaa is C or S

SEQ ID NO: 63134 - protein, 32 aa, Artificial Sequence
  Cyclic GFR-binding peptide
  MOD_RES (7), (7): Xaa is C or S
HVTKPTXAPTKLSPISVLYIDDSSNVIYKQYE

SEQ ID NO: 63135 - protein, 34 aa, Artificial Sequence
  Cyclic GFR-binding peptide
  MOD_RES (5), (5): Xaa is C or S
TKPTXAPTKLEPISVLYLDDSSNVIKFKYENMVV

SEQ ID NO: 63136 - protein, 34 aa, Artificial Sequence; identical to SEQ ID NO: 18976
  Cyclic GFR-binding peptide
  MOD_RES (2), (3): Xaa is C or S

SEQ ID NO: 63137 - protein, 32 aa, Artificial Sequence
  Cyclic GFR-binding peptide
  MOD_RES (3), (4): Xaa is C or S
KPXXAPTKLSPISVLYIDDSSNVIYKQYENMV

SEQ ID NO: 63138 - protein, 24 aa, Artificial Sequence
  Cyclic GFR-binding peptide
SQDLSPISILYIIGKTPKIYKQYE

SEQ ID NO: 63139 - protein, 36 aa, Artificial Sequence; identical to SEQ ID NO: 18980
  Cyclic GFR-binding peptide
  MOD_RES (2), (3), (34), (36): Xaa is C or S

SEQ ID NO: 63140 - protein, 30 aa, Artificial Sequence
  Cyclic GFR-binding peptide
  MOD_RES (1), (1): Xaa is C or S
XVPTKLEPISVLYLDDMGVPTKFKYEEGMS

SEQ ID NO: 63141 - protein, 33 aa, Artificial Sequence
  Cyclic GFR-binding peptide
  MOD_RES (30), (32): Xaa is C or S
PQALSPISILYIVGRKPKVYKQYEMIVRSXKXS

SEQ ID NO: 63142 - protein, 30 aa, Artificial Sequence
  Cyclic GFR-binding peptide
  MOD_RES (27), (29): Xaa is C or S
EPISMLYLDENEKVVKFKYEDMVVEGXGXR

SEQ ID NO: 63143 - protein, 34 aa, Artificial Sequence
  Cyclic GFR-binding peptide
  MOD_RES (6), (7): Xaa is C or S
KVGKAXXVPTKLSPISVLYIDDMGVPTYKQYEEG

SEQ ID NO: 63144 - protein, 30 aa, Artificial Sequence
  Cyclic GFR-binding peptide
  MOD_RES (29), (29): Xaa is C or S
LEPISVLYLDDMGVPTKFKYEEGMSVAEXG

SEQ ID NO: 63145 - protein, 34 aa, Artificial Sequence; identical to SEQ ID NO: 18986
  Cyclic GFR-binding peptide
  MOD_RES (1), (2), (34): Xaa is C or S

SEQ ID NO: 63146 - protein, 29 aa, Artificial Sequence
  Cyclic GFR-binding peptide
ARLNAISILYFDAANNVVLKKYRDMVVEA

SEQ ID NO: 63147 - protein, 32 aa, Artificial Sequence; identical to SEQ ID NO: 18993
  Cyclic GFR-binding peptide
  MOD_RES (1), (2): Xaa is C or S

SEQ ID NO: 63148 - protein, 28 aa, Artificial Sequence
  Cyclic GFR-binding peptide
  MOD_RES (1), (2): Xaa is C or S
XXVPTELEPISMLYLDENEKVVKFKYED

SEQ ID NO: 63149 - protein, 24 aa, Artificial Sequence
  Cyclic GFR-binding peptide
LSPISILYIDKGVVTYYKQYEGMA

SEQ ID NO: 63150 - protein, 33 aa, Artificial Sequence; identical to SEQ ID NO: 18999
  Cyclic GFR-binding peptide
  MOD_RES (33), (33): Xaa is C or S

SEQ ID NO: 63151 - protein, 25 aa, Artificial Sequence
  Cyclic GFR-binding peptide
LSPISVLYIDDMGVPTYKQYEEGMS

SEQ ID NO: 63152 - protein, 25 aa, Artificial Sequence
  Cyclic GFR-binding peptide
APTQLSPISVLYIDDSSNVIYKQYE

SEQ ID NO: 63153 - protein, 30 aa, Artificial Sequence
  Cyclic GFR-binding peptide
  MOD_RES (28), (30): Xaa is C or S
SPISVLYIDDMGVPTYKQYEEGMSVAEXGX

SEQ ID NO: 63154 - protein, 35 aa, Artificial Sequence; identical to SEQ ID NO: 19003
  Cyclic GFR-binding peptide
  MOD_RES (2), (3), (35): Xaa is C or S

SEQ ID NO: 63155 - protein, 28 aa, Artificial Sequence
  Cyclic GFR-binding peptide
  MOD_RES (1), (1): Xaa is C or S
XVSQDLEPISILYLIGKTPKIKFKYEMI

SEQ ID NO: 63156 - protein, 30 aa, Artificial Sequence
  Cyclic GFR-binding peptide
  MOD_RES (29), (29): Xaa is C or S
RLNAISILYFDAANNVVLKKYRDMVVEAXG

SEQ ID NO: 63157 - protein, 30 aa, Artificial Sequence
  Cyclic GFR-binding peptide
  MOD_RES (3), (4): Xaa is C or S
ASXXVPARLNAISILYFDAANNVVLKKYRD

SEQ ID NO: 63158 - protein, 33 aa, Artificial Sequence
  Cyclic GFR-binding peptide
  MOD_RES (3), (4): Xaa is C or S
KAXXAPTKLSPISVLYIDSSNNVIYKQYENMVV

SEQ ID NO: 63159 - protein, 23 aa, Artificial Sequence
  Cyclic GFR-binding peptide
KLSPISILYKDKGVVTYLKYHYG

SEQ ID NO: 63160 - protein, 30 aa, Artificial Sequence
  Cyclic GFR-binding peptide
  MOD_RES (30), (30): Xaa is C or S
TKLSPISVLYIDSSNNVIYKQYENMVVKAX

SEQ ID NO: 63161 - protein, 33 aa, Artificial Sequence; identical to SEQ ID NO: 19007
  Cyclic GFR-binding peptide
  MOD_RES (1), (2), (33): Xaa is C or S

SEQ ID NO: 63162 - protein, 33 aa, Artificial Sequence
  Cyclic GFR-binding peptide
  MOD_RES (30), (32): Xaa is C or S
TELEPISMLYLDEYDKVVKFKYEEMVVEGXGXR

SEQ ID NO: 63163 - protein, 37 aa, Artificial Sequence; identical to SEQ ID NO: 19011
  Cyclic GFR-binding peptide
  MOD_RES (2), (3), (35), (37): Xaa is C or S

SEQ ID NO: 63164 - protein, 31 aa, Artificial Sequence
  Cyclic GFR-binding peptide
  MOD_RES (3), (4): Xaa is C or S
KAXXVPTELEPISMLYLDENEKVVKFKYEDM

SEQ ID NO: 63165 - protein, 36 aa, Artificial Sequence
  Cyclic GFR-binding peptide
  MOD_RES (6), (7): Xaa is C or S
ASAAPXXVPQALEPISILYLVGRKPKVKFKYEMIVR

SEQ ID NO: 63166 - protein, 33 aa, Artificial Sequence; identical to SEQ ID NO: 19013
  Cyclic GFR-binding peptide
  MOD_RES (2), (3): Xaa is C or S

SEQ ID NO: 63167 - protein, 35 aa, Artificial Sequence
  Cyclic GFR-binding peptide
  MOD_RES (3), (4): Xaa is C or S
KAXXVPTKLSPISVLYIDDMGVPTYKQYEEGMSVA

SEQ ID NO: 63168 - protein, 34 aa, Artificial Sequence
  Cyclic GFR-binding peptide
  MOD_RES (5), (6): Xaa is C or S
APASXXVPARLEPISILYLDAANNVVKFKYEDMV

SEQ ID NO: 63169 - protein, 30 aa, Artificial Sequence
  Cyclic GFR-binding peptide
  MOD_RES (5), (5): Xaa is C or S
TKPTXAPTKLSPISVLYIDDSSNVIYKQYE

SEQ ID NO: 63170 - protein, 23 aa, Artificial Sequence
  Cyclic GFR-binding peptide
EPISILYLDAANNVVKFKYEDMV

SEQ ID NO: 63171 - protein, 27 aa, Artificial Sequence
  Cyclic GFR-binding peptide
VPQDLEPISILYLVGRTPKVKFKYEMV

SEQ ID NO: 63172 - protein, 37 aa, Artificial Sequence; identical to SEQ ID NO: 19022
  Cyclic GFR-binding peptide
  MOD_RES (2), (3), (35), (37): Xaa is C or S

SEQ ID NO: 63173 - protein, 26 aa, Artificial Sequence
  Cyclic GFR-binding peptide
  MOD_RES (1), (1): Xaa is C or S
XVPTELEPISMLYLDEYDKVVKFKYE

SEQ ID NO: 63174 - protein, 38 aa, Artificial Sequence; identical to SEQ ID NO: 19027
  Cyclic GFR-binding peptide
  MOD_RES (4), (5), (37): Xaa is C or S

SEQ ID NO: 63175 - protein, 30 aa, Artificial Sequence
  Cyclic GFR-binding peptide
  MOD_RES (4), (5): Xaa is C or S
PASXXVPARLNAISILYFDAANNVVLKKYR

SEQ ID NO: 63176 - protein, 23 aa, Artificial Sequence
  Cyclic GFR-binding peptide
TKLNAISILYFDKGVVTYLKKYR

SEQ ID NO: 63177 - protein, 36 aa, Artificial Sequence; identical to SEQ ID NO: 19033
  Cyclic GFR-binding peptide
  MOD_RES (4), (5), (36): Xaa is C or S

SEQ ID NO: 63178 - protein, 23 aa, Artificial Sequence
  Cyclic GFR-binding peptide
ELEPISMLYLDENEKVVKFKYED

SEQ ID NO: 63179 - protein, 41 aa, Artificial Sequence; identical to SEQ ID NO: 19035
  Cyclic GFR-binding peptide
  MOD_RES (6), (7), (39), (41): Xaa is C or S

SEQ ID NO: 63180 - protein, 37 aa, Artificial Sequence; identical to SEQ ID NO: 19036
  Cyclic GFR-binding peptide
  MOD_RES (6), (7): Xaa is C or S

SEQ ID NO: 63181 - protein, 29 aa, Artificial Sequence
  Cyclic GFR-binding peptide
  MOD_RES (3), (4): Xaa is C or S
SPXXVPQDLEPISILYLVGRTPKVKFKYE

SEQ ID NO: 63182 - protein, 39 aa, Artificial Sequence; identical to SEQ ID NO: 19038
  Cyclic GFR-binding peptide
  MOD_RES (5), (6), (38): Xaa is C or S

SEQ ID NO: 63183 - protein, 35 aa, Artificial Sequence; identical to SEQ ID NO: 19041
  Cyclic GFR-binding peptide
  MOD_RES (1), (2), (34): Xaa is C or S

SEQ ID NO: 63184 - protein, 20 aa, Artificial Sequence
  Cyclic GFR-binding peptide
SPISMLYIDENEKVVYKQYE

SEQ ID NO: 63185 - protein, 33 aa, Artificial Sequence
  Cyclic GFR-binding peptide
  MOD_RES (6), (7): Xaa is C or S
YVPKPXXAPTKLEPISVLYLDDSSNVIKFKYEN

SEQ ID NO: 63186 - protein, 32 aa, Artificial Sequence
  Cyclic GFR-binding peptide
  MOD_RES (1), (1): Xaa is C or S
XVPTKLEPISVLYLDDMGVPTKFKYEEGMSVA

SEQ ID NO: 63187 - protein, 29 aa, Artificial Sequence
  Cyclic GFR-binding peptide
SPISILYKDKGVVTYLKYHYAAAAAAAAA

SEQ ID NO: 63188 - protein, 41 aa, Artificial Sequence; identical to SEQ ID NO: 19060
  Cyclic GFR-binding peptide
  MOD_RES (6), (7), (40): Xaa is C or S

SEQ ID NO: 63189 - protein, 31 aa, Artificial Sequence
  Cyclic GFR-binding peptide
  MOD_RES (31), (31): Xaa is C or S
PTELSPISMLYIDENEKVVYKQYEDMVVEGX

SEQ ID NO: 63190 - protein, 35 aa, Artificial Sequence
  Cyclic GFR-binding peptide
  MOD_RES (6), (7): Xaa is C or S
KVGKAXXVPTKLEPISVLYLDDMGVPTKFKYEEGM

SEQ ID NO: 63191 - protein, 40 aa, Artificial Sequence; identical to SEQ ID NO: 19070
  Cyclic GFR-binding peptide
  MOD_RES (6), (7), (39): Xaa is C or S

SEQ ID NO: 63192 - protein, 32 aa, Artificial Sequence
  Cyclic GFR-binding peptide
  MOD_RES (5), (6): Xaa is C or S
SASPXXVPQDLEPISILYLVGRTPKVKFKYEM

SEQ ID NO: 63193 - protein, 38 aa, Artificial Sequence; identical to SEQ ID NO: 19071
  Cyclic GFR-binding peptide
  MOD_RES (6), (7), (38): Xaa is C or S

SEQ ID NO: 63194 - protein, 33 aa, Artificial Sequence
  Cyclic GFR-binding peptide
  MOD_RES (31), (33): Xaa is C or S
PTELSPISMLYIDENEKVVYKQYEDMVVEGXGX

SEQ ID NO: 63195 - protein, 31 aa, Artificial Sequence
  Cyclic GFR-binding peptide
  MOD_RES (28), (30): Xaa is C or S
LSPISILYKDAANNVVLKYHYDMVVEAXGXR

SEQ ID NO: 63196 - protein, 22 aa, Artificial Sequence
  Cyclic GFR-binding peptide
EPISVLYLDDMGVPTKFKYEEG

SEQ ID NO: 63197 - protein, 31 aa, Artificial Sequence; identical to SEQ ID NO: 19077
  Cyclic GFR-binding peptide

SEQ ID NO: 63198 - protein, 29 aa, Artificial Sequence
  Cyclic GFR-binding peptide
  MOD_RES (2), (3): Xaa is C or S
PXXVSQDLSPISILYIIGKTPKIYKQYEM

SEQ ID NO: 63199 - protein, 31 aa, Artificial Sequence
  Cyclic GFR-binding peptide
  MOD_RES (29), (31): Xaa is C or S
ELEPISMLYLDENEKVVKFKYEDMVVEGXGX

SEQ ID NO: 63200 - protein, 38 aa, Artificial Sequence; identical to SEQ ID NO: 19084
  Cyclic GFR-binding peptide
  MOD_RES (2), (3), (35), (37): Xaa is C or S

SEQ ID NO: 63201 - protein, 32 aa, Artificial Sequence
  Cyclic GFR-binding peptide
  MOD_RES (3), (4): Xaa is C or S
SPXXVPQDLEPISILYLVGRTPKVKFKYEMVV

SEQ ID NO: 63202 - protein, 33 aa, Artificial Sequence
  Cyclic GFR-binding peptide
  MOD_RES (5), (6): Xaa is C or S
SASPXXVPQDLEPISILYLVGRTPKVKFKYEMV

SEQ ID NO: 63203 - protein, 33 aa, Artificial Sequence
  Cyclic GFR-binding peptide
  MOD_RES (30), (32): Xaa is C or S
TKLEPISVLYLDDSSNVIKFKYENMVVRSXGXH

SEQ ID NO: 63204 - protein, 26 aa, Artificial Sequence
  Cyclic GFR-binding peptide
QALSPISILYIVGRKPKVYKQYEMIV

SEQ ID NO: 63205 - protein, 31 aa, Artificial Sequence; identical to SEQ ID NO: 19086
  Cyclic GFR-binding peptide
  MOD_RES (31), (31): Xaa is C or S

SEQ ID NO: 63206 - protein, 32 aa, Artificial Sequence
  Cyclic GFR-binding peptide
  MOD_RES (4), (5): Xaa is C or S
AAPXXVPQALEPISILYLVGRKPKVKFKYEMI

SEQ ID NO: 63207 - protein, 34 aa, Artificial Sequence; identical to SEQ ID NO: 19087
  Cyclic GFR-binding peptide
  MOD_RES (33), (33): Xaa is C or S

SEQ ID NO: 63208 - protein, 35 aa, Artificial Sequence; identical to SEQ ID NO: 19088
  Cyclic GFR-binding peptide
  MOD_RES (1), (2), (34): Xaa is C or S

SEQ ID NO: 63209 - protein, 28 aa, Artificial Sequence
  Cyclic GFR-binding peptide
  MOD_RES (2), (3): Xaa is C or S
AXXVPTKLSPISVLYIDDMGVPTYKQYE

SEQ ID NO: 63210 - protein, 28 aa, Artificial Sequence
  Cyclic GFR-binding peptide
  MOD_RES (1), (1): Xaa is C or S
XVPTELSPISMLYIDEYDKVVYKQYEEM

SEQ ID NO: 63211 - protein, 33 aa, Artificial Sequence; identical to SEQ ID NO: 19091
  Cyclic GFR-binding peptide
  MOD_RES (1), (32): Xaa is C or S

SEQ ID NO: 63212 - protein, 30 aa, Artificial Sequence
  Cyclic GFR-binding peptide
  MOD_RES (2), (2): Xaa is C or S
TXAPTKLSPISVLYIDDSSNVIYKQYENMV

SEQ ID NO: 63213 - protein, 35 aa, Artificial Sequence; identical to SEQ ID NO: 19100
  Cyclic GFR-binding peptide
  MOD_RES (32), (34): Xaa is C or S

SEQ ID NO: 63214 - protein, 29 aa, Artificial Sequence
  Cyclic GFR-binding peptide
  MOD_RES (28), (28): Xaa is C or S
LEPISMLYLDENEKVVKFKYEDMVVEGXG

SEQ ID NO: 63215 - protein, 33 aa, Artificial Sequence; identical to SEQ ID NO: 19101
  Cyclic GFR-binding peptide
  MOD_RES (32), (32): Xaa is C or S

SEQ ID NO: 63216 - protein, 25 aa, Artificial Sequence
  Cyclic GFR-binding peptide
LSPISMLYIDEYDKVVYKQYEEMVV

SEQ ID NO: 63217 - protein, 29 aa, Artificial Sequence
  Cyclic GFR-binding peptide
TKLSPISVLYIDDMGVPTYKQYEEGMSVA

SEQ ID NO: 63218 - protein, 28 aa, Artificial Sequence
  Cyclic GFR-binding peptide
PTKLEPISVLYLDDMGVPTKFKYEEGMS

SEQ ID NO: 63219 - protein, 23 aa, Artificial Sequence
  Cyclic GFR-binding peptide
NAISILYFDKGVVTYLKKYRGMA

SEQ ID NO: 63220 - protein, 24 aa, Artificial Sequence
  Cyclic GFR-binding peptide
PTKLSPISILYKDKGVVTYLKYHY

SEQ ID NO: 63221 - protein, 31 aa, Artificial Sequence
  Cyclic GFR-binding peptide
  MOD_RES (2), (3): Xaa is C or S
AXXAPTKLEPISVLYLDSSNNVIKFKYENMV

SEQ ID NO: 63222 - protein, 33 aa, Artificial Sequence
  Cyclic GFR-binding peptide
  MOD_RES (6), (7): Xaa is C or S
ASASPXXVSQDLSPISILYIIGKTPKIYKQYEM

SEQ ID NO: 63223 - protein, 30 aa, Artificial Sequence
  Cyclic GFR-binding peptide
  MOD_RES (1), (2): Xaa is C or S
XXVPTKLNAISILYFDKGVVTYLKKYRGMA

SEQ ID NO: 63224 - protein, 30 aa, Artificial Sequence; identical to SEQ ID NO: 19111
  Cyclic GFR-binding peptide

SEQ ID NO: 63225 - protein, 39 aa, Artificial Sequence; identical to SEQ ID NO: 19113
  Cyclic GFR-binding peptide
  MOD_RES (4), (5), (36), (38): Xaa is C or S

SEQ ID NO: 63226 - protein, 35 aa, Artificial Sequence; identical to SEQ ID NO: 19114
  Cyclic GFR-binding peptide
  MOD_RES (2), (3), (35): Xaa is C or S

SEQ ID NO: 63227 - protein, 26 aa, Artificial Sequence
  Cyclic GFR-binding peptide
  MOD_RES (1), (1): Xaa is C or S
XVPQDLSPISILYIVGRTPKVYKQYE

SEQ ID NO: 63228 - protein, 26 aa, Artificial Sequence
  Cyclic GFR-binding peptide
PARLEPISILYLDAANNVVKFKYEDM

SEQ ID NO: 63229 - protein, 27 aa, Artificial Sequence
  Cyclic GFR-binding peptide
DLEPISILYLIGKTPKIKFKYEMIVKS

SEQ ID NO: 63230 - protein, 25 aa, Artificial Sequence
  Cyclic GFR-binding peptide
LEPISMLYLDEYDKVVKFKYEEMVV

SEQ ID NO: 63231 - protein, 28 aa, Artificial Sequence
  Cyclic GFR-binding peptide
  MOD_RES (2), (2): Xaa is C or S
TXAPTKLEPISVLYLDDSSNVIKFKYEN

SEQ ID NO: 63232 - protein, 35 aa, Artificial Sequence; identical to SEQ ID NO: 19120
  Cyclic GFR-binding peptide
  MOD_RES (32), (34): Xaa is C or S

SEQ ID NO: 63233 - protein, 26 aa, Artificial Sequence
  Cyclic GFR-binding peptide
PTELSPISMLYIDEYDKVVYKQYEEM

SEQ ID NO: 63234 - protein, 28 aa, Artificial Sequence
  Cyclic GFR-binding peptide
  MOD_RES (1), (2): Xaa is C or S
XXAPTKLSPISVLYIDSSNNVIYKQYEN

SEQ ID NO: 63235 - protein, 29 aa, Artificial Sequence
  Cyclic GFR-binding peptide
  MOD_RES (26), (28): Xaa is C or S
SPISILYIVGRTPKVYKQYEMVVKSXKXS

SEQ ID NO: 63236 - protein, 34 aa, Artificial Sequence
  Cyclic GFR-binding peptide
  MOD_RES (4), (5): Xaa is C or S
ASPXXVSQDLEPISILYLIGKTPKIKFKYEMIVK

SEQ ID NO: 63237 - protein, 32 aa, Artificial Sequence
  Cyclic GFR-binding peptide
  MOD_RES (4), (5): Xaa is C or S
SKAXXVPTKLNAISILYFDKGVVTYLKKYRGM

SEQ ID NO: 63238 - protein, 35 aa, Artificial Sequence
  Cyclic GFR-binding peptide
  MOD_RES (6), (7): Xaa is C or S
AVPKAXXAPTKLEPISVLYLDSSNNVIKFKYENMV

SEQ ID NO: 63239 - protein, 36 aa, Artificial Sequence; identical to SEQ ID NO: 19126
  Cyclic GFR-binding peptide
  MOD_RES (5), (6): Xaa is C or S

SEQ ID NO: 63240 - protein, 30 aa, Artificial Sequence
  Cyclic GFR-binding peptide
  MOD_RES (29), (29): Xaa is C or S
RLEPISILYLDAANNVVKFKYEDMVVEAXG

SEQ ID NO: 63241 - protein, 30 aa, Artificial Sequence
  Cyclic GFR-binding peptide
  MOD_RES (27), (29): Xaa is C or S
LSPISILYIVGRTPKVYKQYEMVVKSXKXS

SEQ ID NO: 63242 - protein, 29 aa, Artificial Sequence
  Cyclic GFR-binding peptide
  MOD_RES (1), (2): Xaa is C or S
XXVPQDLEPISILYLVGRTPKVKFKYEMV

SEQ ID NO: 63243 - protein, 28 aa, Artificial Sequence
  Cyclic GFR-binding peptide
  MOD_RES (2), (2): Xaa is C or S
TXAPTKLSPISVLYIDDSSNVIYKQYEN

SEQ ID NO: 63244 - protein, 23 aa, Artificial Sequence
  Cyclic GFR-binding peptide
EPISILYLIGKTPKIKFKYEMIV

SEQ ID NO: 63245 - protein, 30 aa, Artificial Sequence
  Cyclic GFR-binding peptide
PTELSPISMLYIDEYDKVVYKQYEEMVVEG

SEQ ID NO: 63246 - protein, 30 aa, Artificial Sequence
  Cyclic GFR-binding peptide
  MOD_RES (30), (30): Xaa is C or S
PQALEPISILYLVGRKPKVKFKYEMIVRSX

SEQ ID NO: 63247 - protein, 35 aa, Artificial Sequence; identical to SEQ ID NO: 19135
  Cyclic GFR-binding peptide
  MOD_RES (1), (33), (35): Xaa is C or S

SEQ ID NO: 63248 - protein, 22 aa, Artificial Sequence
  Cyclic GFR-binding peptide
LEPISVLYLDSSNNVIKFKYEN

SEQ ID NO: 63249 - protein, 30 aa, Artificial Sequence
  Cyclic GFR-binding peptide
  MOD_RES (2), (3): Xaa is C or S
PXXVPQDLSPISILYIVGRTPKVYKQYEMV

SEQ ID NO: 63250 - protein, 21 aa, Artificial Sequence
  Cyclic GFR-binding peptide
SPISILYIVGRKPKVYKQYEM

SEQ ID NO: 63251 - protein, 31 aa, Artificial Sequence
  Cyclic GFR-binding peptide
  MOD_RES (1), (2): Xaa is C or S
XXVSQDLEPISILYLIGKTPKIKFKYEMIVK

SEQ ID NO: 63252 - protein, 32 aa, Artificial Sequence; identical to SEQ ID NO: 19143
  Cyclic GFR-binding peptide
  MOD_RES (1), (1): Xaa is C or S

SEQ ID NO: 63253 - protein, 30 aa, Artificial Sequence
  Cyclic GFR-binding peptide
  MOD_RES (1), (1): Xaa is C or S
XVPQALSPISILYIVGRKPKVYKQYEMIVR

SEQ ID NO: 63254 - protein, 37 aa, Artificial Sequence; identical to SEQ ID NO: 19146
  Cyclic GFR-binding peptide
  MOD_RES (7), (7): Xaa is C or S

SEQ ID NO: 63255 - protein, 35 aa, Artificial Sequence; identical to SEQ ID NO: 19149
  Cyclic GFR-binding peptide
  MOD_RES (3), (4): Xaa is C or S

SEQ ID NO: 63256 - protein, 40 aa, Artificial Sequence; identical to SEQ ID NO: 19150
  Cyclic GFR-binding peptide
  MOD_RES (6), (7), (39): Xaa is C or S

SEQ ID NO: 63257 - protein, 29 aa, Artificial Sequence
  Cyclic GFR-binding peptide
KLEPISVLYLDDMGVPTKFKYEEGMSVAE

SEQ ID NO: 63258 - protein, 34 aa, Artificial Sequence
  Cyclic GFR-binding peptide
  MOD_RES (6), (7): Xaa is C or S
KASKAXXVPTKLNAISILYFDKGVVTYLKKYRGM

SEQ ID NO: 63259 - protein, 40 aa, Artificial Sequence; identical to SEQ ID NO: 19152
  Cyclic GFR-binding peptide
  MOD_RES (5), (6), (37), (39): Xaa is C or S

SEQ ID NO: 63260 - protein, 25 aa, Artificial Sequence
  Cyclic GFR-binding peptide
APTKLSPISVLYIDSSNNVIYKQYE

SEQ ID NO: 63261 - protein, 28 aa, Artificial Sequence
  Cyclic GFR-binding peptide
  MOD_RES (1), (2): Xaa is C or S
XXAPTKLEPISVLYLDSSNNVIKFKYEN

SEQ ID NO: 63262 - protein, 36 aa, Artificial Sequence; identical to SEQ ID NO: 19158
  Cyclic GFR-binding peptide
  MOD_RES (5), (6): Xaa is C or S

SEQ ID NO: 63263 - protein, 25 aa, Artificial Sequence
  Cyclic GFR-binding peptide
EPISMLYLDENEKVVKFKYEDMVVE

SEQ ID NO: 63264 - protein, 31 aa, Artificial Sequence
  Cyclic GFR-binding peptide
  MOD_RES (31), (31): Xaa is C or S
PTKLEPISVLYLDSSNNVIKFKYENMVVKAX

SEQ ID NO: 63265 - protein, 26 aa, Artificial Sequence
  Cyclic GFR-binding peptide
KLEPISVLYLDDMGVPTKFKYEEGMS

SEQ ID NO: 63266 - protein, 26 aa, Artificial Sequence
  Cyclic GFR-binding peptide
LNAISILYFDAANNVVLKKYRDMVVE

SEQ ID NO: 63267 - protein, 30 aa, Artificial Sequence
  Cyclic GFR-binding peptide
  MOD_RES (27), (29): Xaa is C or S
LSPISILYIVGRKPKVYKQYEMIVRSXKXS

SEQ ID NO: 63268 - protein, 24 aa, Artificial Sequence
  Cyclic GFR-binding peptide
QLSPISVLYIDDSSNVIYKQYENM

SEQ ID NO: 63269 - protein, 37 aa, Artificial Sequence; identical to SEQ ID NO: 19169
  Cyclic GFR-binding peptide
  MOD_RES (4), (5), (37): Xaa is C or S

SEQ ID NO: 63270 - protein, 34 aa, Artificial Sequence; identical to SEQ ID NO: 19170
  Cyclic GFR-binding peptide
  MOD_RES (1), (2), (33): Xaa is C or S

SEQ ID NO: 63271 - protein, 29 aa, Artificial Sequence
  Cyclic GFR-binding peptide
VPARLEPISILYLDAANNVVKFKYEDMVV

SEQ ID NO: 63272 - protein, 42 aa, Artificial Sequence; identical to SEQ ID NO: 19173
  Cyclic GFR-binding peptide
  MOD_RES (6), (7), (39), (41): Xaa is C or S

SEQ ID NO: 63273 - protein, 38 aa, Artificial Sequence; identical to SEQ ID NO: 19174
  Cyclic GFR-binding peptide
  MOD_RES (5), (6), (37): Xaa is C or S

SEQ ID NO: 63274 - protein, 30 aa, Artificial Sequence; identical to SEQ ID NO: 898
  Cyclic GFR-binding peptide

SEQ ID NO: 63275 - protein, 26 aa, Artificial Sequence
  Cyclic GFR-binding peptide
PTELEPISMLYLDENEKVVKFKYEDM

SEQ ID NO: 63276 - protein, 39 aa, Artificial Sequence; identical to SEQ ID NO: 19179
  Cyclic GFR-binding peptide
  MOD_RES (5), (6), (38): Xaa is C or S

SEQ ID NO: 63277 - protein, 26 aa, Artificial Sequence
  Cyclic GFR-binding peptide
ALSPISILYIVGRKPKVYKQYEMIVR

SEQ ID NO: 63278 - protein, 30 aa, Artificial Sequence
  Cyclic GFR-binding peptide
  MOD_RES (4), (5): Xaa is C or S
AAPXXVPQALEPISILYLVGRKPKVKFKYE

SEQ ID NO: 63279 - protein, 34 aa, Artificial Sequence; identical to SEQ ID NO: 19180
  Cyclic GFR-binding peptide
  MOD_RES (3), (4): Xaa is C or S

SEQ ID NO: 63280 - protein, 33 aa, Artificial Sequence
  Cyclic GFR-binding peptide
  MOD_RES (30), (32): Xaa is C or S
SQDLEPISILYLIGKTPKIKFKYEMIVKSXKXS

SEQ ID NO: 63281 - protein, 34 aa, Artificial Sequence
  Cyclic GFR-binding peptide
  MOD_RES (4), (5): Xaa is C or S
SKAXXVPTKLNAISILYFDKGVVTYLKKYRGMAV

SEQ ID NO: 63282 - protein, 29 aa, Artificial Sequence
  Cyclic GFR-binding peptide
VPQALEPISILYLVGRKPKVKFKYEMIVR

SEQ ID NO: 63283 - protein, 24 aa, Artificial Sequence
  Cyclic GFR-binding peptide
SPISILYIVGRTPKVYKQYEMVVK

SEQ ID NO: 63284 - protein, 40 aa, Artificial Sequence; identical to SEQ ID NO: 19182
  Cyclic GFR-binding peptide
  MOD_RES (4), (5), (37), (39): Xaa is C or S

SEQ ID NO: 63285 - protein, 33 aa, Artificial Sequence; identical to SEQ ID NO: 19186
  Cyclic GFR-binding peptide
  MOD_RES (2), (3): Xaa is C or S

SEQ ID NO: 63286 - protein, 41 aa, Artificial Sequence; identical to SEQ ID NO: 19189
  Cyclic GFR-binding peptide
  MOD_RES (5), (6), (38), (40): Xaa is C or S

SEQ ID NO: 63287 - protein, 35 aa, Artificial Sequence
  Cyclic GFR-binding peptide
  MOD_RES (6), (7): Xaa is C or S
ASASPXXVSQDLSPISILYIIGKTPKIYKQYEMIV

SEQ ID NO: 63288 - protein, 26 aa, Artificial Sequence
  Cyclic GFR-binding peptide
SQDLEPISILYLIGKTPKIKFKYEMI

SEQ ID NO: 63289 - protein, 28 aa, Artificial Sequence
  Cyclic GFR-binding peptide
  MOD_RES (28), (28): Xaa is C or S
LEPISVLYLDDSSNVIKFKYENMVVRAX

SEQ ID NO: 63290 - protein, 36 aa, Artificial Sequence
  Cyclic GFR-binding peptide
  MOD_RES (6), (7): Xaa is C or S
YVPKPXXAPTKLSPISVLYIDDSSNVIYKQYENMVV

SEQ ID NO: 63291 - protein, 37 aa, Artificial Sequence; identical to SEQ ID NO: 19193
  Cyclic GFR-binding peptide
  MOD_RES (1), (2), (34), (36): Xaa is C or S

SEQ ID NO: 63292 - protein, 39 aa, Artificial Sequence; identical to SEQ ID NO: 19195
  Cyclic GFR-binding peptide
  MOD_RES (4), (5), (37), (39): Xaa is C or S

SEQ ID NO: 63293 - protein, 23 aa, Artificial Sequence
  Cyclic GFR-binding peptide
EPISVLYLDDSSNVIKFKYENMV

SEQ ID NO: 63294 - protein, 29 aa, Artificial Sequence
  Cyclic GFR-binding peptide
  MOD_RES (1), (2): Xaa is C or S
XXVPARLSPISILYKDAANNVVLKYHYDM

SEQ ID NO: 63295 - protein, 35 aa, Artificial Sequence
  Cyclic GFR-binding peptide
  MOD_RES (6), (7): Xaa is C or S
KASKAXXVPTKLNAISILYFDKGVVTYLKKYRGMA

SEQ ID NO: 63296 - protein, 25 aa, Artificial Sequence
  Cyclic GFR-binding peptide
TKLSPISVLYIDDSSNVIYKQYENM

SEQ ID NO: 63297 - protein, 29 aa, Artificial Sequence
  Cyclic GFR-binding peptide
  MOD_RES (3), (4): Xaa is C or S
APXXVPQALSPISILYIVGRKPKVYKQYE

SEQ ID NO: 63298 - protein, 28 aa, Artificial Sequence
  Cyclic GFR-binding peptide
TELEPISMLYLDENEKVVKFKYEDMVVE

SEQ ID NO: 63299 - protein, 37 aa, Artificial Sequence; identical to SEQ ID NO: 19198
  Cyclic GFR-binding peptide
  MOD_RES (3), (4), (36): Xaa is C or S

SEQ ID NO: 63300 - protein, 40 aa, Artificial Sequence; identical to SEQ ID NO: 19201
  Cyclic GFR-binding peptide
  MOD_RES (3), (4), (37), (39): Xaa is C or S

SEQ ID NO: 63301 - protein, 33 aa, Artificial Sequence
  Cyclic GFR-binding peptide
  MOD_RES (5), (5): Xaa is C or S
TKPTXAPTKLEPISVLYLDDSSNVIKFKYENMV

SEQ ID NO: 63302 - protein, 37 aa, Artificial Sequence; identical to SEQ ID NO: 19203
  Cyclic GFR-binding peptide
  MOD_RES (6), (7): Xaa is C or S

SEQ ID NO: 63303 - protein, 31 aa, Artificial Sequence
  Cyclic GFR-binding peptide
  MOD_RES (3), (4): Xaa is C or S
KAXXVPTELSPISMLYIDEYDKVVYKQYEEM

SEQ ID NO: 63304 - protein, 28 aa, Artificial Sequence
  Cyclic GFR-binding peptide
ARLNAISILYFDAANNVVLKKYRDMVVE

SEQ ID NO: 63305 - protein, 35 aa, Artificial Sequence
  Cyclic GFR-binding peptide
  MOD_RES (5), (6): Xaa is C or S
ASKAXXVPTKLSPISILYIDKGVVTYYKQYEGMAV

SEQ ID NO: 63306 - protein, 32 aa, Artificial Sequence; identical to SEQ ID NO: 19210
  Cyclic GFR-binding peptide
  MOD_RES (1), (32): Xaa is C or S

SEQ ID NO: 63307 - protein, 27 aa, Artificial Sequence
  Cyclic GFR-binding peptide
VPARLSPISILYKDAANNVVLKYHYDM

SEQ ID NO: 63308 - protein, 38 aa, Artificial Sequence; identical to SEQ ID NO: 19211
  Cyclic GFR-binding peptide
  MOD_RES (6), (7): Xaa is C or S

SEQ ID NO: 63309 - protein, 30 aa, Artificial Sequence
  Cyclic GFR-binding peptide
  MOD_RES (4), (4): Xaa is C or S
KPTXAPTKLSPISVLYIDDSSNVIYKQYEN

SEQ ID NO: 63310 - protein, 33 aa, Artificial Sequence; identical to SEQ ID NO: 19213
  Cyclic GFR-binding peptide
  MOD_RES (32), (32): Xaa is C or S

SEQ ID NO: 63311 - protein, 31 aa, Artificial Sequence
  Cyclic GFR-binding peptide
  MOD_RES (30), (30): Xaa is C or S
TKLEPISVLYLDSSNNVIKFKYENMVVKAXG

SEQ ID NO: 63312 - protein, 34 aa, Artificial Sequence; identical to SEQ ID NO: 19219
  Cyclic GFR-binding peptide
  MOD_RES (3), (3): Xaa is C or S

SEQ ID NO: 63313 - protein, 27 aa, Artificial Sequence
  Cyclic GFR-binding peptide
  MOD_RES (26), (26): Xaa is C or S
EPISILYLVGRKPKVKFKYEMIVRSXK

SEQ ID NO: 63314 - protein, 26 aa, Artificial Sequence
  Cyclic GFR-binding peptide
VPTELEPISMLYLDENEKVVKFKYED

SEQ ID NO: 63315 - protein, 34 aa, Artificial Sequence
  Cyclic GFR-binding peptide
  MOD_RES (6), (7): Xaa is C or S
TVPKPXXAPTQLEPISVLYLDDSSNVIKFKYENM

SEQ ID NO: 63316 - protein, 29 aa, Artificial Sequence
  Cyclic GFR-binding peptide
  MOD_RES (2), (3): Xaa is C or S
AXXVPTELSPISMLYIDENEKVVYKQYED

SEQ ID NO: 63317 - protein, 28 aa, Artificial Sequence
  Cyclic GFR-binding peptide
  MOD_RES (1), (2): Xaa is C or S
XXVPARLNAISILYFDAANNVVLKKYRD

SEQ ID NO: 63318 - protein, 27 aa, Artificial Sequence
  Cyclic GFR-binding peptide
PQALEPISILYLVGRKPKVKFKYEMIV

SEQ ID NO: 63319 - protein, 32 aa, Artificial Sequence; identical to SEQ ID NO: 19227
  Cyclic GFR-binding peptide
  MOD_RES (31), (31): Xaa is C or S

SEQ ID NO: 63320 - protein, 37 aa, Artificial Sequence; identical to SEQ ID NO: 19228
  Cyclic GFR-binding peptide
  MOD_RES (3), (4), (37): Xaa is C or S

SEQ ID NO: 63321 - protein, 26 aa, Artificial Sequence
  Cyclic GFR-binding peptide
PTKLSPISVLYIDDMGVPTYKQYEEG

SEQ ID NO: 63322 - protein, 21 aa, Artificial Sequence
  Cyclic GFR-binding peptide
LSPISVLYIDDSSNVIYKQYE

SEQ ID NO: 63323 - protein, 21 aa, Artificial Sequence
  Cyclic GFR-binding peptide
LSPISVLYIDDMGVPTYKQYE

SEQ ID NO: 63324 - protein, 35 aa, Artificial Sequence; identical to SEQ ID NO: 19229
  Cyclic GFR-binding peptide
  MOD_RES (1), (2), (34): Xaa is C or S

SEQ ID NO: 63325 - protein, 31 aa, Artificial Sequence
  Cyclic GFR-binding peptide
  MOD_RES (2), (3): Xaa is C or S
AXXVPTKLSPISILYKDKGVVTYLKYHYGMA

SEQ ID NO: 63326 - protein, 31 aa, Artificial Sequence
  Cyclic GFR-binding peptide
  MOD_RES (3), (4): Xaa is C or S
SPXXVSQDLSPISILYIIGKTPKIYKQYEMI

SEQ ID NO: 63327 - protein, 28 aa, Artificial Sequence
  Cyclic GFR-binding peptide
  MOD_RES (2), (3): Xaa is C or S
AXXVPTELEPISMLYLDEYDKVVKFKYE

SEQ ID NO: 63328 - protein, 37 aa, Artificial Sequence; identical to SEQ ID NO: 19235
  Cyclic GFR-binding peptide
  MOD_RES (1), (2), (34), (36): Xaa is C or S

SEQ ID NO: 63329 - protein, 35 aa, Artificial Sequence; identical to SEQ ID NO: 19236
  Cyclic GFR-binding peptide
  MOD_RES (1), (33), (35): Xaa is C or S

SEQ ID NO: 63330 - protein, 37 aa, Artificial Sequence; identical to SEQ ID NO: 19238
  Cyclic GFR-binding peptide
  MOD_RES (4), (5), (36): Xaa is C or S

SEQ ID NO: 63331 - protein, 34 aa, Artificial Sequence; identical to SEQ ID NO: 19240
  Cyclic GFR-binding peptide
  MOD_RES (1), (32), (34): Xaa is C or S

SEQ ID NO: 63332 - protein, 36 aa, Artificial Sequence
  Cyclic GFR-binding peptide
  MOD_RES (5), (6): Xaa is C or S
VGKAXXVPTKLEPISVLYLDDMGVPTKFKYEEGMSV

SEQ ID NO: 63333 - protein, 28 aa, Artificial Sequence
  Cyclic GFR-binding peptide
  MOD_RES (27), (27): Xaa is C or S
SPISVLYIDSSNNVIYKQYENMVVKAXG

SEQ ID NO: 63334 - protein, 36 aa, Artificial Sequence
  Cyclic GFR-binding peptide
  MOD_RES (6), (7): Xaa is C or S
AAPASXXVPARLEPISILYLDAANNVVKFKYEDMVV

SEQ ID NO: 63335 - protein, 31 aa, Artificial Sequence
  Cyclic GFR-binding peptide
  MOD_RES (28), (30): Xaa is C or S
DLSPISILYIVGRTPKVYKQYEMVVKSXKXS

SEQ ID NO: 63336 - protein, 32 aa, Artificial Sequence
  Cyclic GFR-binding peptide
  MOD_RES (4), (5): Xaa is C or S
PKAXXAPTKLEPISVLYLDSSNNVIKFKYENM

SEQ ID NO: 63337 - protein, 28 aa, Artificial Sequence
  Cyclic GFR-binding peptide
VPARLSPISILYKDAANNVVLKYHYDMV

SEQ ID NO: 63338 - protein, 26 aa, Artificial Sequence
  Cyclic GFR-binding peptide
LSPISVLYIDDSSNVIYKQYENMVVR

SEQ ID NO: 63339 - protein, 34 aa, Artificial Sequence; identical to SEQ ID NO: 19251
  Cyclic GFR-binding peptide
  MOD_RES (1), (32), (34): Xaa is C or S

SEQ ID NO: 63340 - protein, 29 aa, Artificial Sequence
  Cyclic GFR-binding peptide
  MOD_RES (3), (4): Xaa is C or S
KPXXAPTQLSPISVLYIDDSSNVIYKQYE

SEQ ID NO: 63341 - protein, 30 aa, Artificial Sequence
  Cyclic GFR-binding peptide
  MOD_RES (27), (29): Xaa is C or S
SPISVLYIDSSNNVIYKQYENMVVKAXGXH

SEQ ID NO: 63342 - protein, 24 aa, Artificial Sequence
  Cyclic GFR-binding peptide
LSPISILYIIGKTPKIYKQYEMIV

SEQ ID NO: 63343 - protein, 32 aa, Artificial Sequence
  Cyclic GFR-binding peptide
  MOD_RES (3), (4): Xaa is C or S
KPXXAPTQLEPISVLYLDDSSNVIKFKYENMV

SEQ ID NO: 63344 - protein, 29 aa, Artificial Sequence
  Cyclic GFR-binding peptide
SQDLEPISILYLIGKTPKIKFKYEMIVKS

SEQ ID NO: 63345 - protein, 33 aa, Artificial Sequence
  Cyclic GFR-binding peptide
  MOD_RES (3), (4): Xaa is C or S
APXXVPQALSPISILYIVGRKPKVYKQYEMIVR

SEQ ID NO: 63346 - protein, 31 aa, Artificial Sequence; identical to SEQ ID NO: 19256
  Cyclic GFR-binding peptide
  MOD_RES (31), (31): Xaa is C or S

SEQ ID NO: 63347 - protein, 33 aa, Artificial Sequence; identical to SEQ ID NO: 19257
  Cyclic GFR-binding peptide
  MOD_RES (31), (33): Xaa is C or S

SEQ ID NO: 63348 - protein, 32 aa, Artificial Sequence
  Cyclic GFR-binding peptide
  MOD_RES (6), (7): Xaa is C or S
KASKAXXVPTKLNAISILYFDKGVVTYLKKYR

SEQ ID NO: 63349 - protein, 31 aa, Artificial Sequence
  Cyclic GFR-binding peptide
  MOD_RES (3), (4): Xaa is C or S
KPXXAPTKLEPISVLYLDDSSNVIKFKYENM

SEQ ID NO: 63350 - protein, 32 aa, Artificial Sequence
  Cyclic GFR-binding peptide
  MOD_RES (30), (32): Xaa is C or S
TKLSPISVLYIDDSSNVIYKQYENMVVRSXGX

SEQ ID NO: 63351 - protein, 30 aa, Artificial Sequence
  Cyclic GFR-binding peptide
  MOD_RES (2), (3): Xaa is C or S
AXXAPTKLSPISVLYIDSSNNVIYKQYENM

SEQ ID NO: 63352 - protein, 33 aa, Artificial Sequence
  Cyclic GFR-binding peptide
  MOD_RES (6), (7): Xaa is C or S
ASAAPXXVPQALEPISILYLVGRKPKVKFKYEM

SEQ ID NO: 63353 - protein, 24 aa, Artificial Sequence
  Cyclic GFR-binding peptide
DLEPISILYLVGRTPKVKFKYEMV

SEQ ID NO: 63354 - protein, 33 aa, Artificial Sequence; identical to SEQ ID NO: 19266
  Cyclic GFR-binding peptide
  MOD_RES (31), (33): Xaa is C or S

SEQ ID NO: 63355 - protein, 40 aa, Artificial Sequence; identical to SEQ ID NO: 19267
  Cyclic GFR-binding peptide
  MOD_RES (4), (5), (37), (39): Xaa is C or S

SEQ ID NO: 63356 - protein, 33 aa, Artificial Sequence; identical to SEQ ID NO: 19268
  Cyclic GFR-binding peptide
  MOD_RES (2), (2): Xaa is C or S

SEQ ID NO: 63357 - protein, 31 aa, Artificial Sequence
  Cyclic GFR-binding peptide
  MOD_RES (30), (30): Xaa is C or S
ARLSPISILYKDAANNVVLKYHYDMVVEAXG

SEQ ID NO: 63358 - protein, 30 aa, Artificial Sequence
  Cyclic GFR-binding peptide
  MOD_RES (27), (29): Xaa is C or S
EPISVLYLDSSNNVIKFKYENMVVKAXGXH

SEQ ID NO: 63359 - protein, 27 aa, Artificial Sequence
  Cyclic GFR-binding peptide
KLNAISILYFDKGVVTYLKKYRGMAVS

SEQ ID NO: 63360 - protein, 39 aa, Artificial Sequence; identical to SEQ ID NO: 19273
  Cyclic GFR-binding peptide
  MOD_RES (6), (38): Xaa is C or S

SEQ ID NO: 63361 - protein, 28 aa, Artificial Sequence
  Cyclic GFR-binding peptide
VPQALEPISILYLVGRKPKVKFKYEMIV

SEQ ID NO: 63362 - protein, 33 aa, Artificial Sequence
  Cyclic GFR-binding peptide
  MOD_RES (30), (32): Xaa is C or S
TKLNAISILYFDKGVVTYLKKYRGMAVSEXGXR

SEQ ID NO: 63363 - protein, 31 aa, Artificial Sequence
  Cyclic GFR-binding peptide
  MOD_RES (28), (30): Xaa is C or S
LNAISILYFDAANNVVLKKYRDMVVEAXGXR

SEQ ID NO: 63364 - protein, 24 aa, Artificial Sequence
  Cyclic GFR-binding peptide
LSPISVLYIDDMGVPTYKQYEEGM

SEQ ID NO: 63365 - protein, 32 aa, Artificial Sequence
  Cyclic GFR-binding peptide
  MOD_RES (30), (32): Xaa is C or S
SQDLSPISILYIIGKTPKIYKQYEMIVKSXKX

SEQ ID NO: 63366 - protein, 30 aa, Artificial Sequence
  Cyclic GFR-binding peptide
  MOD_RES (4), (5): Xaa is C or S
PKPXXAPTQLSPISVLYIDDSSNVIYKQYE

SEQ ID NO: 63367 - protein, 25 aa, Artificial Sequence
  Cyclic GFR-binding peptide
LSPISVLYIDSSNNVIYKQYENMVV

SEQ ID NO: 63368 - protein, 29 aa, Artificial Sequence
  Cyclic GFR-binding peptide
  MOD_RES (29), (29): Xaa is C or S
QLEPISVLYLDDSSNVIKFKYENMVVRAX

SEQ ID NO: 63369 - protein, 29 aa, Artificial Sequence
  Cyclic GFR-binding peptide
KLSPISVLYIDDMGVPTYKQYEEGMSVAE

SEQ ID NO: 63370 - protein, 29 aa, Artificial Sequence
  Cyclic GFR-binding peptide
  MOD_RES (27), (29): Xaa is C or S
EPISVLYLDDSSNVIKFKYENMVVRAXGX

SEQ ID NO: 63371 - protein, 22 aa, Artificial Sequence
  Cyclic GFR-binding peptide
LEPISMLYLDEYDKVVKFKYEE

SEQ ID NO: 63372 - protein, 32 aa, Artificial Sequence
  Cyclic GFR-binding peptide
  MOD_RES (2), (3): Xaa is C or S
AXXAPTKLSPISVLYIDSSNNVIYKQYENMVV

SEQ ID NO: 63373 - protein, 22 aa, Artificial Sequence
  Cyclic GFR-binding peptide
KLSPISVLYIDDMGVPTYKQYE

SEQ ID NO: 63374 - protein, 37 aa, Artificial Sequence; identical to SEQ ID NO: 19281
  Cyclic GFR-binding peptide
  MOD_RES (3), (4), (35), (37): Xaa is C or S

SEQ ID NO: 63375 - protein, 31 aa, Artificial Sequence
  Cyclic GFR-binding peptide
  MOD_RES (30), (30): Xaa is C or S
TELSPISMLYIDENEKVVYKQYEDMVVEGXG

SEQ ID NO: 63376 - protein, 30 aa, Artificial Sequence
  Cyclic GFR-binding peptide
  MOD_RES (28), (30): Xaa is C or S
LSPISMLYIDEYDKVVYKQYEEMVVEGXGX

SEQ ID NO: 63377 - protein, 38 aa, Artificial Sequence; identical to SEQ ID NO: 19286
  Cyclic GFR-binding peptide
  MOD_RES (7), (7): Xaa is C or S

SEQ ID NO: 63378 - protein, 33 aa, Artificial Sequence; identical to SEQ ID NO: 19288
  Cyclic GFR-binding peptide
  MOD_RES (1), (2), (33): Xaa is C or S

SEQ ID NO: 63379 - protein, 21 aa, Artificial Sequence
  Cyclic GFR-binding peptide
LSPISMLYIDENEKVVYKQYE

SEQ ID NO: 63380 - protein, 26 aa, Artificial Sequence
  Cyclic GFR-binding peptide
  MOD_RES (1), (1): Xaa is C or S
XAPTKLSPISVLYIDDSSNVIYKQYE

SEQ ID NO: 63381 - protein, 32 aa, Artificial Sequence
  Cyclic GFR-binding peptide
  MOD_RES (4), (4): Xaa is C or S
KPTXAPTKLSPISVLYIDDSSNVIYKQYENMV

SEQ ID NO: 63382 - protein, 35 aa, Artificial Sequence; identical to SEQ ID NO: 19294
  Cyclic GFR-binding peptide
  MOD_RES (2), (3), (34): Xaa is C or S

SEQ ID NO: 63383 - protein, 31 aa, Artificial Sequence
  Cyclic GFR-binding peptide
  MOD_RES (30), (30): Xaa is C or S
TQLSPISVLYIDDSSNVIYKQYENMVVRAXG

SEQ ID NO: 63384 - protein, 31 aa, Artificial Sequence
  Cyclic GFR-binding peptide
  MOD_RES (5), (6): Xaa is C or S
APASXXVPARLEPISILYLDAANNVVKFKYE

SEQ ID NO: 63385 - protein, 38 aa, Artificial Sequence; identical to SEQ ID NO: 19297
  Cyclic GFR-binding peptide
  MOD_RES (4), (5), (37): Xaa is C or S

SEQ ID NO: 63386 - protein, 30 aa, Artificial Sequence
  Cyclic GFR-binding peptide
  MOD_RES (1), (2): Xaa is C or S
XXVPTELEPISMLYLDEYDKVVKFKYEEMV

SEQ ID NO: 63387 - protein, 30 aa, Artificial Sequence
  Cyclic GFR-binding peptide
  MOD_RES (1), (2): Xaa is C or S
XXVPQDLSPISILYIVGRTPKVYKQYEMVV

SEQ ID NO: 63388 - protein, 38 aa, Artificial Sequence; identical to SEQ ID NO: 19299
  Cyclic GFR-binding peptide
  MOD_RES (6), (7): Xaa is C or S

SEQ ID NO: 63389 - protein, 32 aa, Artificial Sequence; identical to SEQ ID NO: 19301
  Cyclic GFR-binding peptide
  MOD_RES (32), (32): Xaa is C or S

SEQ ID NO: 63390 - protein, 31 aa, Artificial Sequence
  Cyclic GFR-binding peptide
  MOD_RES (1), (2): Xaa is C or S
XXVPTELEPISMLYLDENEKVVKFKYEDMVV

SEQ ID NO: 63391 - protein, 34 aa, Artificial Sequence
  Cyclic GFR-binding peptide
  MOD_RES (32), (34): Xaa is C or S
PTKLEPISVLYLDDMGVPTKFKYEEGMSVAEXGX

SEQ ID NO: 63392 - protein, 35 aa, Artificial Sequence; identical to SEQ ID NO: 19304
  Cyclic GFR-binding peptide
  MOD_RES (4), (4): Xaa is C or S

SEQ ID NO: 63393 - protein, 31 aa, Artificial Sequence
  Cyclic GFR-binding peptide
  MOD_RES (3), (4): Xaa is C or S
KAXXVPTKLNAISILYFDKGVVTYLKKYRGM

SEQ ID NO: 63394 - protein, 38 aa, Artificial Sequence; identical to SEQ ID NO: 19305
  Cyclic GFR-binding peptide
  MOD_RES (5), (6), (37): Xaa is C or S

SEQ ID NO: 63395 - protein, 28 aa, Artificial Sequence
  Cyclic GFR-binding peptide
KLSPISILYIDKGVVTYYKQYEGMAVSE

SEQ ID NO: 63396 - protein, 36 aa, Artificial Sequence; identical to SEQ ID NO: 19309
  Cyclic GFR-binding peptide
  MOD_RES (4), (5): Xaa is C or S

SEQ ID NO: 63397 - protein, 29 aa, Artificial Sequence
  Cyclic GFR-binding peptide
APTKLEPISVLYLDDSSNVIKFKYENMVV

SEQ ID NO: 63398 - protein, 33 aa, Artificial Sequence
  Cyclic GFR-binding peptide
  MOD_RES (6), (7): Xaa is C or S
KVGKAXXVPTKLEPISVLYLDDMGVPTKFKYEE

SEQ ID NO: 63399 - protein, 38 aa, Artificial Sequence; identical to SEQ ID NO: 19310
  Cyclic GFR-binding peptide
  MOD_RES (4), (5), (36), (38): Xaa is C or S

SEQ ID NO: 63400 - protein, 29 aa, Artificial Sequence
  Cyclic GFR-binding peptide
  MOD_RES (1), (1): Xaa is C or S
XVPARLNAISILYFDAANNVVLKKYRDMV

SEQ ID NO: 63401 - protein, 31 aa, Artificial Sequence
  Cyclic GFR-binding peptide
  MOD_RES (2), (3): Xaa is C or S
SXXVPARLEPISILYLDAANNVVKFKYEDMV

SEQ ID NO: 63402 - protein, 29 aa, Artificial Sequence
  Cyclic GFR-binding peptide
PQALEPISILYLVGRKPKVKFKYEMIVRS

SEQ ID NO: 63403 - protein, 33 aa, Artificial Sequence
  Cyclic GFR-binding peptide
  MOD_RES (5), (6): Xaa is C or S
SAAPXXVPQALSPISILYIVGRKPKVYKQYEMI

SEQ ID NO: 63404 - protein, 28 aa, Artificial Sequence
  Cyclic GFR-binding peptide
  MOD_RES (26), (28): Xaa is C or S
EPISILYLIGKTPKIKFKYEMIVKSXKX

SEQ ID NO: 63405 - protein, 32 aa, Artificial Sequence
  Cyclic GFR-binding peptide
  MOD_RES (2), (3): Xaa is C or S
PXXVPQALSPISILYIVGRKPKVYKQYEMIVR

SEQ ID NO: 63406 - protein, 24 aa, Artificial Sequence
  Cyclic GFR-binding peptide
KLSPISVLYIDDSSNVIYKQYENM

SEQ ID NO: 63407 - protein, 21 aa, Artificial Sequence
  Cyclic GFR-binding peptide
SPISILYIVGRTPKVYKQYEM

SEQ ID NO: 63408 - protein, 39 aa, Artificial Sequence; identical to SEQ ID NO: 19320
  Cyclic GFR-binding peptide
  MOD_RES (5), (6), (38): Xaa is C or S

SEQ ID NO: 63409 - protein, 27 aa, Artificial Sequence
  Cyclic GFR-binding peptide
  MOD_RES (1), (1): Xaa is C or S
XVPTELEPISMLYLDENEKVVKFKYED

SEQ ID NO: 63410 - protein, 31 aa, Artificial Sequence
  Cyclic GFR-binding peptide
  MOD_RES (31), (31): Xaa is C or S
PTQLEPISVLYLDDSSNVIKFKYENMVVRAX

SEQ ID NO: 63411 - protein, 39 aa, Artificial Sequence; identical to SEQ ID NO: 19324
  Cyclic GFR-binding peptide
  MOD_RES (4), (5), (36), (38): Xaa is C or S

SEQ ID NO: 63412 - protein, 34 aa, Artificial Sequence
  Cyclic GFR-binding peptide
  MOD_RES (4), (5): Xaa is C or S
PKAXXAPTKLEPISVLYLDSSNNVIKFKYENMVV

SEQ ID NO: 63413 - protein, 27 aa, Artificial Sequence
  Cyclic GFR-binding peptide
TKLSPISVLYIDSSNNVIYKQYENMVV

SEQ ID NO: 63414 - protein, 40 aa, Artificial Sequence; identical to SEQ ID NO: 19326
  Cyclic GFR-binding peptide
  MOD_RES (6), (7), (40): Xaa is C or S

SEQ ID NO: 63415 - protein, 34 aa, Artificial Sequence
  Cyclic GFR-binding peptide
  MOD_RES (5), (5): Xaa is C or S
TKPTXAPTKLSPISVLYIDDSSNVIYKQYENMVV

SEQ ID NO: 63416 - protein, 24 aa, Artificial Sequence
  Cyclic GFR-binding peptide
PQALEPISILYLVGRKPKVKFKYE

SEQ ID NO: 63417 - protein, 32 aa, Artificial Sequence
  Cyclic GFR-binding peptide
  MOD_RES (5), (6): Xaa is C or S
VPKPXXAPTKLSPISVLYIDDSSNVIYKQYEN

SEQ ID NO: 63418 - protein, 38 aa, Artificial Sequence; identical to SEQ ID NO: 19329
  Cyclic GFR-binding peptide
  MOD_RES (5), (6), (37): Xaa is C or S

SEQ ID NO: 63419 - protein, 37 aa, Artificial Sequence; identical to SEQ ID NO: 19330
  Cyclic GFR-binding peptide
  MOD_RES (6), (7): Xaa is C or S

SEQ ID NO: 63420 - protein, 28 aa, Artificial Sequence
  Cyclic GFR-binding peptide
  MOD_RES (28), (28): Xaa is C or S
LNAISILYFDKGVVTYLKKYRGMAVSEX

SEQ ID NO: 63421 - protein, 31 aa, Artificial Sequence; identical to SEQ ID NO: 19337
  Cyclic GFR-binding peptide

SEQ ID NO: 63422 - protein, 38 aa, Artificial Sequence; identical to SEQ ID NO: 19336
  Cyclic GFR-binding peptide
  MOD_RES (4), (5), (37): Xaa is C or S

SEQ ID NO: 63423 - protein, 25 aa, Artificial Sequence
  Cyclic GFR-binding peptide
PTELEPISMLYLDEYDKVVKFKYEE

SEQ ID NO: 63424 - protein, 40 aa, Artificial Sequence; identical to SEQ ID NO: 19339
  Cyclic GFR-binding peptide
  MOD_RES (5), (6), (37), (39): Xaa is C or S

SEQ ID NO: 63425 - protein, 27 aa, Artificial Sequence
  Cyclic GFR-binding peptide
  MOD_RES (1), (1): Xaa is C or S
XAPTQLSPISVLYIDDSSNVIYKQYEN

SEQ ID NO: 63426 - protein, 37 aa, Artificial Sequence; identical to SEQ ID NO: 19340
  Cyclic GFR-binding peptide
  MOD_RES (5), (6): Xaa is C or S

SEQ ID NO: 63427 - protein, 30 aa, Artificial Sequence
  Cyclic GFR-binding peptide
  MOD_RES (1), (1): Xaa is C or S
XVPTELSPISMLYIDEYDKVVYKQYEEMVV

SEQ ID NO: 63428 - protein, 31 aa, Artificial Sequence; identical to SEQ ID NO: 19342
  Cyclic GFR-binding peptide

SEQ ID NO: 63429 - protein, 38 aa, Artificial Sequence; identical to SEQ ID NO: 19344
  Cyclic GFR-binding peptide
  MOD_RES (6), (7): Xaa is C or S

SEQ ID NO: 63430 - protein, 24 aa, Artificial Sequence
  Cyclic GFR-binding peptide
PTKLNAISILYFDKGVVTYLKKYR

SEQ ID NO: 63431 - protein, 38 aa, Artificial Sequence; identical to SEQ ID NO: 19347
  Cyclic GFR-binding peptide
  MOD_RES (3), (4), (36), (38): Xaa is C or S

SEQ ID NO: 63432 - protein, 33 aa, Artificial Sequence
  Cyclic GFR-binding peptide
  MOD_RES (6), (7): Xaa is C or S
KASKAXXVPTKLSPISILYIDKGVVTYYKQYEG

SEQ ID NO: 63433 - protein, 37 aa, Artificial Sequence; identical to SEQ ID NO: 19348
  Cyclic GFR-binding peptide
  MOD_RES (2), (3), (35), (37): Xaa is C or S

SEQ ID NO: 63434 - protein, 40 aa, Artificial Sequence; identical to SEQ ID NO: 19350
  Cyclic GFR-binding peptide
  MOD_RES (5), (6), (38), (40): Xaa is C or S

SEQ ID NO: 63435 - protein, 34 aa, Artificial Sequence
  Cyclic GFR-binding peptide
  MOD_RES (31), (33): Xaa is C or S
PARLSPISILYKDAANNVVLKYHYDMVVEAXGXR

SEQ ID NO: 63436 - protein, 27 aa, Artificial Sequence
  Cyclic GFR-binding peptide
  MOD_RES (1), (2): Xaa is C or S
XXVPARLNAISILYFDAANNVVLKKYR

SEQ ID NO: 63437 - protein, 42 aa, Artificial Sequence; identical to SEQ ID NO: 19351
  Cyclic GFR-binding peptide
  MOD_RES (6), (7), (39), (41): Xaa is C or S

SEQ ID NO: 63438 - protein, 31 aa, Artificial Sequence; identical to SEQ ID NO: 19352
  Cyclic GFR-binding peptide
  MOD_RES (1), (1): Xaa is C or S

SEQ ID NO: 63439 - protein, 27 aa, Artificial Sequence
  Cyclic GFR-binding peptide
  MOD_RES (1), (2): Xaa is C or S
XXVPARLSPISILYKDAANNVVLKYHY

SEQ ID NO: 63440 - protein, 28 aa, Artificial Sequence
  Cyclic GFR-binding peptide
PTQLEPISVLYLDDSSNVIKFKYENMVV

SEQ ID NO: 63441 - protein, 22 aa, Artificial Sequence
  Cyclic GFR-binding peptide
SPISILYIDKGVVTYYKQYEGM

SEQ ID NO: 63442 - protein, 30 aa, Artificial Sequence
  Cyclic GFR-binding peptide
  MOD_RES (30), (30): Xaa is C or S
TKLSPISILYKDKGVVTYLKYHYGMAVSEX

SEQ ID NO: 63443 - protein, 36 aa, Artificial Sequence; identical to SEQ ID NO: 19358
  Cyclic GFR-binding peptide
  MOD_RES (2), (3), (34), (36): Xaa is C or S

SEQ ID NO: 63444 - protein, 30 aa, Artificial Sequence
  Cyclic GFR-binding peptide
PARLSPISILYKDAANNVVLKYHYDMVVEA

SEQ ID NO: 63445 - protein, 29 aa, Artificial Sequence
  Cyclic GFR-binding peptide
  MOD_RES (27), (29): Xaa is C or S
NAISILYFDKGVVTYLKKYRGMAVSEXGX

SEQ ID NO: 63446 - protein, 28 aa, Artificial Sequence
  Cyclic GFR-binding peptide
TKLSPISILYKDKGVVTYLKYHYGMAVS

SEQ ID NO: 63447 - protein, 40 aa, Artificial Sequence; identical to SEQ ID NO: 19365
  Cyclic GFR-binding peptide
  MOD_RES (4), (5), (38), (40): Xaa is C or S

SEQ ID NO: 63448 - protein, 33 aa, Artificial Sequence; identical to SEQ ID NO: 19370
  Cyclic GFR-binding peptide
  MOD_RES (1), (33): Xaa is C or S

SEQ ID NO: 63449 - protein, 34 aa, Artificial Sequence; identical to SEQ ID NO: 19371
  Cyclic GFR-binding peptide
  MOD_RES (31), (33): Xaa is C or S

SEQ ID NO: 63450 - protein, 21 aa, Artificial Sequence
  Cyclic GFR-binding peptide
EPISILYLDAANNVVKFKYED

SEQ ID NO: 63451 - protein, 33 aa, Artificial Sequence
  Cyclic GFR-binding peptide
  MOD_RES (5), (6): Xaa is C or S
VGKAXXVPTKLSPISVLYIDDMGVPTYKQYEEG

SEQ ID NO: 63452 - protein, 29 aa, Artificial Sequence
  Cyclic GFR-binding peptide
VPTKLSPISILYKDKGVVTYLKYHYGMAV

SEQ ID NO: 63453 - protein, 38 aa, Artificial Sequence; identical to SEQ ID NO: 19378
  Cyclic GFR-binding peptide
  MOD_RES (5), (37): Xaa is C or S

SEQ ID NO: 63454 - protein, 35 aa, Artificial Sequence; identical to SEQ ID NO: 21686
  Cyclic GFR-binding peptide
  MOD_RES (32), (34): Xaa is C or S

SEQ ID NO: 63455 - protein, 32 aa, Artificial Sequence
  Cyclic GFR-binding peptide
  MOD_RES (4), (5): Xaa is C or S
GKAXXVPTKLSPISVLYIDDMGVPTYKQYEEG

SEQ ID NO: 63456 - protein, 34 aa, Artificial Sequence; identical to SEQ ID NO: 19383
  Cyclic GFR-binding peptide
  MOD_RES (1), (2), (34): Xaa is C or S

SEQ ID NO: 63457 - protein, 34 aa, Artificial Sequence; identical to SEQ ID NO: 19386
  Cyclic GFR-binding peptide
  MOD_RES (2), (3): Xaa is C or S

SEQ ID NO: 63458 - protein, 37 aa, Artificial Sequence; identical to SEQ ID NO: 19388
  Cyclic GFR-binding peptide
  MOD_RES (6), (7): Xaa is C or S

SEQ ID NO: 63459 - protein, 25 aa, Artificial Sequence
  Cyclic GFR-binding peptide
KLEPISVLYLDDMGVPTKFKYEEGM

SEQ ID NO: 63460 - protein, 30 aa, Artificial Sequence
  Cyclic GFR-binding peptide
  MOD_RES (1), (2): Xaa is C or S
XXVPTELSPISMLYIDENEKVVYKQYEDMV

SEQ ID NO: 63461 - protein, 24 aa, Artificial Sequence
  Cyclic GFR-binding peptide
TKLEPISVLYLDDMGVPTKFKYEE

SEQ ID NO: 63462 - protein, 28 aa, Artificial Sequence
  Cyclic GFR-binding peptide
  MOD_RES (1), (2): Xaa is C or S
XXVPQALSPISILYIVGRKPKVYKQYEM

SEQ ID NO: 63463 - protein, 40 aa, Artificial Sequence; identical to SEQ ID NO: 19395
  Cyclic GFR-binding peptide
  MOD_RES (6), (7), (39): Xaa is C or S

SEQ ID NO: 63464 - protein, 29 aa, Artificial Sequence
  Cyclic GFR-binding peptide
  MOD_RES (3), (3): Xaa is C or S
PTXAPTKLSPISVLYIDDSSNVIYKQYEN

SEQ ID NO: 63465 - protein, 24 aa, Artificial Sequence
  Cyclic GFR-binding peptide
TQLSPISVLYIDDSSNVIYKQYEN

SEQ ID NO: 63466 - protein, 34 aa, Artificial Sequence; identical to SEQ ID NO: 19398
  Cyclic GFR-binding peptide
  MOD_RES (1), (2), (34): Xaa is C or S

SEQ ID NO: 63467 - protein, 36 aa, Artificial Sequence
  Cyclic GFR-binding peptide
  MOD_RES (6), (7): Xaa is C or S
ASASPXXVSQDLEPISILYLIGKTPKIKFKYEMIVK

SEQ ID NO: 63468 - protein, 35 aa, Artificial Sequence; identical to SEQ ID NO: 19401
  Cyclic GFR-binding peptide
  MOD_RES (32), (34): Xaa is C or S

SEQ ID NO: 63469 - protein, 35 aa, Artificial Sequence
  Cyclic GFR-binding peptide
  MOD_RES (6), (7): Xaa is C or S
KVGKAXXVPTKLSPISVLYIDDMGVPTYKQYEEGM

SEQ ID NO: 63470 - protein, 24 aa, Artificial Sequence
  Cyclic GFR-binding peptide
LEPISILYLVGRKPKVKFKYEMIV

SEQ ID NO: 63471 - protein, 35 aa, Artificial Sequence; identical to SEQ ID NO: 19407
  Cyclic GFR-binding peptide
  MOD_RES (1), (33), (35): Xaa is C or S

SEQ ID NO: 63472 - protein, 28 aa, Artificial Sequence
  Cyclic GFR-binding peptide
  MOD_RES (27), (27): Xaa is C or S
NAISILYFDAANNVVLKKYRDMVVEAXG

SEQ ID NO: 63473 - protein, 26 aa, Artificial Sequence
  Cyclic GFR-binding peptide
LSPISVLYIDSSNNVIYKQYENMVVK

SEQ ID NO: 63474 - protein, 41 aa, Artificial Sequence; identical to SEQ ID NO: 19413
  Cyclic GFR-binding peptide
  MOD_RES (6), (7), (39), (41): Xaa is C or S

SEQ ID NO: 63475 - protein, 27 aa, Artificial Sequence
  Cyclic GFR-binding peptide
KLEPISVLYLDDSSNVIKFKYENMVVR

SEQ ID NO: 63476 - protein, 39 aa, Artificial Sequence; identical to SEQ ID NO: 19429
  Cyclic GFR-binding peptide
  MOD_RES (6), (7), (38): Xaa is C or S

SEQ ID NO: 63477 - protein, 32 aa, Artificial Sequence
  Cyclic GFR-binding peptide
  MOD_RES (3), (4): Xaa is C or S
SPXXVSQDLSPISILYIIGKTPKIYKQYEMIV

SEQ ID NO: 63478 - protein, 33 aa, Artificial Sequence
  Cyclic GFR-binding peptide
  MOD_RES (5), (6): Xaa is C or S
ASKAXXVPTKLSPISILYIDKGVVTYYKQYEGM

SEQ ID NO: 63479 - protein, 35 aa, Artificial Sequence
  Cyclic GFR-binding peptide
  MOD_RES (6), (7): Xaa is C or S
KIPKAXXVPTELSPISMLYIDENEKVVYKQYEDMV

SEQ ID NO: 63480 - protein, 30 aa, Artificial Sequence
  Cyclic GFR-binding peptide
  MOD_RES (1), (2): Xaa is C or S
XXAPTKLSPISVLYIDSSNNVIYKQYENMV

SEQ ID NO: 63481 - protein, 36 aa, Artificial Sequence
  Cyclic GFR-binding peptide
  MOD_RES (7), (7): Xaa is C or S
HVTKPTXAPTKLEPISVLYLDDSSNVIKFKYENMVV

SEQ ID NO: 63482 - protein, 39 aa, Artificial Sequence; identical to SEQ ID NO: 19433
  Cyclic GFR-binding peptide
  MOD_RES (6), (7), (39): Xaa is C or S

SEQ ID NO: 63483 - protein, 28 aa, Artificial Sequence
  Cyclic GFR-binding peptide
QDLSPISILYIIGKTPKIYKQYEMIVKS

SEQ ID NO: 63484 - protein, 33 aa, Artificial Sequence; identical to SEQ ID NO: 19438
  Cyclic GFR-binding peptide
  MOD_RES (31), (33): Xaa is C or S

SEQ ID NO: 63485 - protein, 29 aa, Artificial Sequence
  Cyclic GFR-binding peptide
PTELEPISMLYLDEYDKVVKFKYEEMVVE

SEQ ID NO: 63486 - protein, 28 aa, Artificial Sequence
  Cyclic GFR-binding peptide
  MOD_RES (27), (27): Xaa is C or S
SPISMLYIDEYDKVVYKQYEEMVVEGXG

SEQ ID NO: 63487 - protein, 32 aa, Artificial Sequence
  Cyclic GFR-binding peptide
  MOD_RES (30), (32): Xaa is C or S
ARLSPISILYKDAANNVVLKYHYDMVVEAXGX

SEQ ID NO: 63488 - protein, 35 aa, Artificial Sequence; identical to SEQ ID NO: 19447
  Cyclic GFR-binding peptide
  MOD_RES (3), (4): Xaa is C or S

SEQ ID NO: 63489 - protein, 28 aa, Artificial Sequence
  Cyclic GFR-binding peptide
  MOD_RES (1), (2): Xaa is C or S
XXAPTKLSPISVLYIDDSSNVIYKQYEN

SEQ ID NO: 63490 - protein, 24 aa, Artificial Sequence
  Cyclic GFR-binding peptide
PARLNAISILYFDAANNVVLKKYR

SEQ ID NO: 63491 - protein, 27 aa, Artificial Sequence
  Cyclic GFR-binding peptide
TELEPISMLYLDEYDKVVKFKYEEMVV

SEQ ID NO: 63492 - protein, 27 aa, Artificial Sequence
  Cyclic GFR-binding peptide
TKLSPISVLYIDDSSNVIYKQYENMVV

SEQ ID NO: 63493 - protein, 23 aa, Artificial Sequence
  Cyclic GFR-binding peptide
KLSPISVLYIDSSNNVIYKQYEN

SEQ ID NO: 63494 - protein, 28 aa, Artificial Sequence
  Cyclic GFR-binding peptide
  MOD_RES (28), (28): Xaa is C or S
LSPISVLYIDDSSNVIYKQYENMVVRAX

SEQ ID NO: 63495 - protein, 33 aa, Artificial Sequence
  Cyclic GFR-binding peptide
  MOD_RES (3), (4): Xaa is C or S
APXXVPQALEPISILYLVGRKPKVKFKYEMIVR

SEQ ID NO: 63496 - protein, 38 aa, Artificial Sequence; identical to SEQ ID NO: 19457
  Cyclic GFR-binding peptide
  MOD_RES (6), (7), (38): Xaa is C or S

SEQ ID NO: 63497 - protein, 32 aa, Artificial Sequence
  Cyclic GFR-binding peptide
  MOD_RES (29), (31): Xaa is C or S
QALEPISILYLVGRKPKVKFKYEMIVRSXKXS

SEQ ID NO: 63498 - protein, 32 aa, Artificial Sequence
  Cyclic GFR-binding peptide
  MOD_RES (2), (3): Xaa is C or S
PXXVSQDLEPISILYLIGKTPKIKFKYEMIVK

SEQ ID NO: 63499 - protein, 33 aa, Artificial Sequence
  Cyclic GFR-binding peptide
  MOD_RES (6), (7): Xaa is C or S
AVPKAXXAPTKLSPISVLYIDSSNNVIYKQYEN

SEQ ID NO: 63500 - protein, 35 aa, Artificial Sequence
  Cyclic GFR-binding peptide
  MOD_RES (5), (6): Xaa is C or S
VPKPXXAPTKLEPISVLYLDDSSNVIKFKYENMVV

SEQ ID NO: 63501 - protein, 27 aa, Artificial Sequence
  Cyclic GFR-binding peptide
APTKLSPISVLYIDDSSNVIYKQYENM

SEQ ID NO: 63502 - protein, 23 aa, Artificial Sequence
  Cyclic GFR-binding peptide
QDLSPISILYIIGKTPKIYKQYE

SEQ ID NO: 63503 - protein, 35 aa, Artificial Sequence; identical to SEQ ID NO: 19462
  Cyclic GFR-binding peptide
  MOD_RES (2), (3), (34): Xaa is C or S

SEQ ID NO: 63504 - protein, 29 aa, Artificial Sequence
  Cyclic GFR-binding peptide
APTQLSPISVLYIDDSSNVIYKQYENMVV

SEQ ID NO: 63505 - protein, 31 aa, Artificial Sequence
  Cyclic GFR-binding peptide
  MOD_RES (31), (31): Xaa is C or S
PTKLEPISVLYLDDSSNVIKFKYENMVVRSX

SEQ ID NO: 63506 - protein, 32 aa, Artificial Sequence
  Cyclic GFR-binding peptide
  MOD_RES (29), (31): Xaa is C or S
RLSPISILYKDAANNVVLKYHYDMVVEAXGXR

SEQ ID NO: 63507 - protein, 30 aa, Artificial Sequence
  Cyclic GFR-binding peptide
  MOD_RES (3), (4): Xaa is C or S
ASXXVPARLEPISILYLDAANNVVKFKYED

SEQ ID NO: 63508 - protein, 28 aa, Artificial Sequence
  Cyclic GFR-binding peptide
  MOD_RES (28), (28): Xaa is C or S
ALEPISILYLVGRKPKVKFKYEMIVRSX

SEQ ID NO: 63509 - protein, 31 aa, Artificial Sequence
  Cyclic GFR-binding peptide
  MOD_RES (2), (3): Xaa is C or S
PXXAPTKLEPISVLYLDDSSNVIKFKYENMV

SEQ ID NO: 63510 - protein, 24 aa, Artificial Sequence
  Cyclic GFR-binding peptide
KLSPISILYIDKGVVTYYKQYEGM

SEQ ID NO: 63511 - protein, 36 aa, Artificial Sequence; identical to SEQ ID NO: 19476
  Cyclic GFR-binding peptide
  MOD_RES (4), (36): Xaa is C or S

SEQ ID NO: 63512 - protein, 38 aa, Artificial Sequence; identical to SEQ ID NO: 19480
  Cyclic GFR-binding peptide
  MOD_RES (5), (6), (38): Xaa is C or S

SEQ ID NO: 63513 - protein, 26 aa, Artificial Sequence
  Cyclic GFR-binding peptide
PTKLEPISVLYLDSSNNVIKFKYENM

SEQ ID NO: 63514 - protein, 28 aa, Artificial Sequence
  Cyclic GFR-binding peptide
PARLSPISILYKDAANNVVLKYHYDMVV

SEQ ID NO: 63515 - protein, 30 aa, Artificial Sequence
  Cyclic GFR-binding peptide
  MOD_RES (28), (30): Xaa is C or S
LSPISVLYIDSSNNVIYKQYENMVVKAXGX

SEQ ID NO: 63516 - protein, 27 aa, Artificial Sequence
  Cyclic GFR-binding peptide
  MOD_RES (1), (2): Xaa is C or S
XXVPTKLNAISILYFDKGVVTYLKKYR

SEQ ID NO: 63517 - protein, 37 aa, Artificial Sequence; identical to SEQ ID NO: 19484
  Cyclic GFR-binding peptide
  MOD_RES (1), (2), (34), (36): Xaa is C or S

SEQ ID NO: 63518 - protein, 34 aa, Artificial Sequence; identical to SEQ ID NO: 19486
  Cyclic GFR-binding peptide
  MOD_RES (2), (3): Xaa is C or S

SEQ ID NO: 63519 - protein, 27 aa, Artificial Sequence
  Cyclic GFR-binding peptide
  MOD_RES (1), (1): Xaa is C or S
XVPARLSPISILYKDAANNVVLKYHYD

SEQ ID NO: 63520 - protein, 36 aa, Artificial Sequence; identical to SEQ ID NO: 19487
  Cyclic GFR-binding peptide
  MOD_RES (4), (5), (36): Xaa is C or S

SEQ ID NO: 63521 - protein, 37 aa, Artificial Sequence; identical to SEQ ID NO: 19489
  Cyclic GFR-binding peptide
  MOD_RES (1), (2), (34), (36): Xaa is C or S

SEQ ID NO: 63522 - protein, 25 aa, Artificial Sequence
  Cyclic GFR-binding peptide
TKLSPISILYKDKGVVTYLKYHYGM

SEQ ID NO: 63523 - protein, 33 aa, Artificial Sequence
  Cyclic GFR-binding peptide
  MOD_RES (30), (32): Xaa is C or S
KLEPISVLYLDDMGVPTKFKYEEGMSVAEXGXR

SEQ ID NO: 63524 - protein, 20 aa, Artificial Sequence
  Cyclic GFR-binding peptide
SPISMLYIDEYDKVVYKQYE

SEQ ID NO: 63525 - protein, 37 aa, Artificial Sequence; identical to SEQ ID NO: 19492
  Cyclic GFR-binding peptide
  MOD_RES (4), (5): Xaa is C or S

SEQ ID NO: 63526 - protein, 33 aa, Artificial Sequence
  Cyclic GFR-binding peptide
  MOD_RES (5), (6): Xaa is C or S
VGKAXXVPTKLEPISVLYLDDMGVPTKFKYEEG

SEQ ID NO: 63527 - protein, 31 aa, Artificial Sequence
  Cyclic GFR-binding peptide
  MOD_RES (31), (31): Xaa is C or S
PARLEPISILYLDAANNVVKFKYEDMVVEAX

SEQ ID NO: 63528 - protein, 37 aa, Artificial Sequence; identical to SEQ ID NO: 19502
  Cyclic GFR-binding peptide
  MOD_RES (5), (6): Xaa is C or S

SEQ ID NO: 63529 - protein, 28 aa, Artificial Sequence
  Cyclic GFR-binding peptide
  MOD_RES (2), (3): Xaa is C or S
AXXAPTKLEPISVLYLDSSNNVIKFKYE

SEQ ID NO: 63530 - protein, 24 aa, Artificial Sequence
  Cyclic GFR-binding peptide
PTQLSPISVLYIDDSSNVIYKQYE

SEQ ID NO: 63531 - protein, 26 aa, Artificial Sequence
  Cyclic GFR-binding peptide
ARLEPISILYLDAANNVVKFKYEDMV

SEQ ID NO: 63532 - protein, 29 aa, Artificial Sequence
  Cyclic GFR-binding peptide
  MOD_RES (29), (29): Xaa is C or S
ELEPISMLYLDEYDKVVKFKYEEMVVEGX

SEQ ID NO: 63533 - protein, 43 aa, Artificial Sequence; identical to SEQ ID NO: 19507
  Cyclic GFR-binding peptide
  MOD_RES (6), (7), (40), (42): Xaa is C or S

SEQ ID NO: 63534 - protein, 34 aa, Artificial Sequence
  Cyclic GFR-binding peptide
  MOD_RES (5), (6): Xaa is C or S
ASKAXXVPTKLSPISILYIDKGVVTYYKQYEGMA

SEQ ID NO: 63535 - protein, 21 aa, Artificial Sequence
  Cyclic GFR-binding peptide
SPISILYKDKGVVTYLKYHYG

SEQ ID NO: 63536 - protein, 28 aa, Artificial Sequence
  Cyclic GFR-binding peptide
  MOD_RES (27), (27): Xaa is C or S
LSPISILYIVGRKPKVYKQYEMIVRSXK

SEQ ID NO: 63537 - protein, 32 aa, Artificial Sequence; identical to SEQ ID NO: 19512
  Cyclic GFR-binding peptide
  MOD_RES (32), (32): Xaa is C or S

SEQ ID NO: 63538 - protein, 40 aa, Artificial Sequence; identical to SEQ ID NO: 19519
  Cyclic GFR-binding peptide
  MOD_RES (6), (7), (39): Xaa is C or S

SEQ ID NO: 63539 - protein, 32 aa, Artificial Sequence
  Cyclic GFR-binding peptide
  MOD_RES (29), (31): Xaa is C or S
QALSPISILYIVGRKPKVYKQYEMIVRSXKXS

SEQ ID NO: 63540 - protein, 29 aa, Artificial Sequence
  Cyclic GFR-binding peptide
NAISILYFDKGVVTYLKKYRAAAAAAAAA

SEQ ID NO: 63541 - protein, 35 aa, Artificial Sequence
  Cyclic GFR-binding peptide
  MOD_RES (5), (6): Xaa is C or S
ASKAXXVPTKLSPISILYKDKGVVTYLKYHYGMAV

SEQ ID NO: 63542 - protein, 30 aa, Artificial Sequence
  Cyclic GFR-binding peptide
  MOD_RES (29), (29): Xaa is C or S
KLSPISILYIDKGVVTYYKQYEGMAVSEXG

SEQ ID NO: 63543 - protein, 33 aa, Artificial Sequence
  Cyclic GFR-binding peptide
  MOD_RES (30), (32): Xaa is C or S
PQDLSPISILYIVGRTPKVYKQYEMVVKSXKXS

SEQ ID NO: 63544 - protein, 26 aa, Artificial Sequence
  Cyclic GFR-binding peptide
KLSPISILYKDKGVVTYLKYHYGMAV

SEQ ID NO: 63545 - protein, 31 aa, Artificial Sequence
  Cyclic GFR-binding peptide
  MOD_RES (29), (31): Xaa is C or S
KLNAISILYFDKGVVTYLKKYRGMAVSEXGX

SEQ ID NO: 63546 - protein, 34 aa, Artificial Sequence; identical to SEQ ID NO: 19524
  Cyclic GFR-binding peptide
  MOD_RES (31), (33): Xaa is C or S

SEQ ID NO: 63547 - protein, 27 aa, Artificial Sequence
  Cyclic GFR-binding peptide
  MOD_RES (1), (2): Xaa is C or S
XXVPTELSPISMLYIDEYDKVVYKQYE

SEQ ID NO: 63548 - protein, 30 aa, Artificial Sequence
  Cyclic GFR-binding peptide
  MOD_RES (4), (5): Xaa is C or S
AAPXXVPQALSPISILYIVGRKPKVYKQYE

SEQ ID NO: 63549 - protein, 36 aa, Artificial Sequence; identical to SEQ ID NO: 19528
  Cyclic GFR-binding peptide
  MOD_RES (1), (33), (35): Xaa is C or S

SEQ ID NO: 63550 - protein, 20 aa, Artificial Sequence
  Cyclic GFR-binding peptide
NAISILYFDKGVVTYLKKYR

SEQ ID NO: 63551 - protein, 23 aa, Artificial Sequence
  Cyclic GFR-binding peptide
DLEPISILYLVGRTPKVKFKYEM

SEQ ID NO: 63552 - protein, 30 aa, Artificial Sequence
  Cyclic GFR-binding peptide
  MOD_RES (1), (1): Xaa is C or S
XAPTKLEPISVLYLDDSSNVIKFKYENMVV

SEQ ID NO: 63553 - protein, 26 aa, Artificial Sequence
  Cyclic GFR-binding peptide
ALEPISILYLVGRKPKVKFKYEMIVR

SEQ ID NO: 63554 - protein, 31 aa, Artificial Sequence; identical to SEQ ID NO: 19531
  Cyclic GFR-binding peptide
  MOD_RES (1), (1): Xaa is C or S

SEQ ID NO: 63555 - protein, 25 aa, Artificial Sequence
  Cyclic GFR-binding peptide
APTKLSPISVLYIDDSSNVIYKQYE

SEQ ID NO: 63556 - protein, 27 aa, Artificial Sequence
  Cyclic GFR-binding peptide
DLSPISILYIIGKTPKIYKQYEMIVKS

SEQ ID NO: 63557 - protein, 24 aa, Artificial Sequence
  Cyclic GFR-binding peptide
LSPISMLYIDENEKVVYKQYEDMV

SEQ ID NO: 63558 - protein, 37 aa, Artificial Sequence; identical to SEQ ID NO: 19536
  Cyclic GFR-binding peptide
  MOD_RES (5), (6), (37): Xaa is C or S

SEQ ID NO: 63559 - protein, 35 aa, Artificial Sequence
  Cyclic GFR-binding peptide
  MOD_RES (6), (6): Xaa is C or S
VTKPTXAPTKLSPISVLYIDDSSNVIYKQYENMVV

SEQ ID NO: 63560 - protein, 23 aa, Artificial Sequence
  Cyclic GFR-binding peptide
TKLSPISILYKDKGVVTYLKYHY

SEQ ID NO: 63561 - protein, 41 aa, Artificial Sequence; identical to SEQ ID NO: 19545
  Cyclic GFR-binding peptide
  MOD_RES (6), (7), (39), (41): Xaa is C or S

SEQ ID NO: 63562 - protein, 26 aa, Artificial Sequence
  Cyclic GFR-binding peptide
APTQLSPISVLYIDDSSNVIYKQYEN

SEQ ID NO: 63563 - protein, 31 aa, Artificial Sequence
  Cyclic GFR-binding peptide
  MOD_RES (4), (5): Xaa is C or S
PKAXXVPTELEPISMLYLDENEKVVKFKYED

SEQ ID NO: 63564 - protein, 22 aa, Artificial Sequence
  Cyclic GFR-binding peptide
NAISILYFDAANNVVLKKYRDM

SEQ ID NO: 63565 - protein, 30 aa, Artificial Sequence
  Cyclic GFR-binding peptide
  MOD_RES (28), (30): Xaa is C or S
LEPISVLYLDSSNNVIKFKYENMVVKAXGX

SEQ ID NO: 63566 - protein, 31 aa, Artificial Sequence
  Cyclic GFR-binding peptide
  MOD_RES (3), (3): Xaa is C or S
PTXAPTKLEPISVLYLDDSSNVIKFKYENMV

SEQ ID NO: 63567 - protein, 30 aa, Artificial Sequence
  Cyclic GFR-binding peptide
  MOD_RES (1), (1): Xaa is C or S
XVPTKLNAISILYFDKGVVTYLKKYRGMAV

SEQ ID NO: 63568 - protein, 30 aa, Artificial Sequence
  Cyclic GFR-binding peptide
  MOD_RES (29), (29): Xaa is C or S
RLSPISILYKDAANNVVLKYHYDMVVEAXG

SEQ ID NO: 63569 - protein, 27 aa, Artificial Sequence
  Cyclic GFR-binding peptide
  MOD_RES (1), (2): Xaa is C or S
XXVPTKLSPISILYKDKGVVTYLKYHY

SEQ ID NO: 63570 - protein, 31 aa, Artificial Sequence
  Cyclic GFR-binding peptide
  MOD_RES (4), (5): Xaa is C or S
PASXXVPARLNAISILYFDAANNVVLKKYRD

SEQ ID NO: 63571 - protein, 39 aa, Artificial Sequence; identical to SEQ ID NO: 19557
  Cyclic GFR-binding peptide
  MOD_RES (5), (6), (39): Xaa is C or S

SEQ ID NO: 63572 - protein, 30 aa, Artificial Sequence
  Cyclic GFR-binding peptide
  MOD_RES (1), (1): Xaa is C or S
XAPTQLSPISVLYIDDSSNVIYKQYENMVV

SEQ ID NO: 63573 - protein, 31 aa, Artificial Sequence
  Cyclic GFR-binding peptide
  MOD_RES (1), (2): Xaa is C or S
XXVPTKLSPISILYKDKGVVTYLKYHYGMAV

SEQ ID NO: 63574 - protein, 30 aa, Artificial Sequence; identical to SEQ ID NO: 956
  Cyclic GFR-binding peptide

SEQ ID NO: 63575 - protein, 36 aa, Artificial Sequence; identical to SEQ ID NO: 19559
  Cyclic GFR-binding peptide
  MOD_RES (3), (4), (36): Xaa is C or S

SEQ ID NO: 63576 - protein, 37 aa, Artificial Sequence; identical to SEQ ID NO: 19560
  Cyclic GFR-binding peptide
  MOD_RES (2), (3), (35), (37): Xaa is C or S

SEQ ID NO: 63577 - protein, 33 aa, Artificial Sequence
  Cyclic GFR-binding peptide
  MOD_RES (5), (6): Xaa is C or S
SASPXXVSQDLSPISILYIIGKTPKIYKQYEMI

SEQ ID NO: 63578 - protein, 26 aa, Artificial Sequence
  Cyclic GFR-binding peptide
PTKLSPISVLYIDSSNNVIYKQYENM

SEQ ID NO: 63579 - protein, 29 aa, Artificial Sequence
  Cyclic GFR-binding peptide
SPISILYIDAANNVVYKQYEAAAAAAAAA

SEQ ID NO: 63580 - protein, 36 aa, Artificial Sequence; identical to SEQ ID NO: 19563
  Cyclic GFR-binding peptide
  MOD_RES (1), (2), (35): Xaa is C or S

SEQ ID NO: 63581 - protein, 32 aa, Artificial Sequence
  Cyclic GFR-binding peptide
  MOD_RES (5), (5): Xaa is C or S
TKPTXAPTKLSPISVLYIDDSSNVIYKQYENM

SEQ ID NO: 63582 - protein, 33 aa, Artificial Sequence
  Cyclic GFR-binding peptide
  MOD_RES (30), (32): Xaa is C or S
TKLEPISVLYLDSSNNVIKFKYENMVVKAXGXH

SEQ ID NO: 63583 - protein, 31 aa, Artificial Sequence
  Cyclic GFR-binding peptide
  MOD_RES (30), (30): Xaa is C or S
TKLEPISVLYLDDSSNVIKFKYENMVVRSXG

SEQ ID NO: 63584 - protein, 32 aa, Artificial Sequence; identical to SEQ ID NO: 19567
  Cyclic GFR-binding peptide
  MOD_RES (32), (32): Xaa is C or S

SEQ ID NO: 63585 - protein, 27 aa, Artificial Sequence
  Cyclic GFR-binding peptide
  MOD_RES (1), (1): Xaa is C or S
XVSQDLEPISILYLIGKTPKIKFKYEM

SEQ ID NO: 63586 - protein, 26 aa, Artificial Sequence
  Cyclic GFR-binding peptide
SPISMLYIDEYDKVVYKQYEEMVVEG

SEQ ID NO: 63587 - protein, 31 aa, Artificial Sequence
  Cyclic GFR-binding peptide
  MOD_RES (3), (4): Xaa is C or S
KPXXAPTKLSPISVLYIDDSSNVIYKQYENM

SEQ ID NO: 63588 - protein, 21 aa, Artificial Sequence
  Cyclic GFR-binding peptide
LEPISVLYLDSSNNVIKFKYE

SEQ ID NO: 63589 - protein, 27 aa, Artificial Sequence
  Cyclic GFR-binding peptide
SQDLEPISILYLIGKTPKIKFKYEMIV

SEQ ID NO: 63590 - protein, 30 aa, Artificial Sequence
  Cyclic GFR-binding peptide
VPTKLEPISVLYLDDMGVPTKFKYEEGMSV

SEQ ID NO: 63591 - protein, 29 aa, Artificial Sequence
  Cyclic GFR-binding peptide
  MOD_RES (2), (3): Xaa is C or S
PXXAPTQLSPISVLYIDDSSNVIYKQYEN

SEQ ID NO: 63592 - protein, 25 aa, Artificial Sequence
  Cyclic GFR-binding peptide
SPISILYIVGRKPKVYKQYEMIVRS

SEQ ID NO: 63593 - protein, 36 aa, Artificial Sequence; identical to SEQ ID NO: 19573
  Cyclic GFR-binding peptide
  MOD_RES (1), (33), (35): Xaa is C or S

SEQ ID NO: 63594 - protein, 37 aa, Artificial Sequence; identical to SEQ ID NO: 19576
  Cyclic GFR-binding peptide
  MOD_RES (5), (6): Xaa is C or S

SEQ ID NO: 63595 - protein, 35 aa, Artificial Sequence; identical to SEQ ID NO: 19577
  Cyclic GFR-binding peptide
  MOD_RES (32), (34): Xaa is C or S

SEQ ID NO: 63596 - protein, 32 aa, Artificial Sequence; identical to SEQ ID NO: 19578
  Cyclic GFR-binding peptide
  MOD_RES (1), (2): Xaa is C or S

SEQ ID NO: 63597 - protein, 26 aa, Artificial Sequence
  Cyclic GFR-binding peptide
PTQLEPISVLYLDDSSNVIKFKYENM

SEQ ID NO: 63598 - protein, 39 aa, Artificial Sequence; identical to SEQ ID NO: 19579
  Cyclic GFR-binding peptide
  MOD_RES (4), (5), (37), (39): Xaa is C or S

SEQ ID NO: 63599 - protein, 37 aa, Artificial Sequence; identical to SEQ ID NO: 19582
  Cyclic GFR-binding peptide
  MOD_RES (2), (3), (35), (37): Xaa is C or S

SEQ ID NO: 63600 - protein, 33 aa, Artificial Sequence; identical to SEQ ID NO: 19583
  Cyclic GFR-binding peptide
  MOD_RES (3), (3): Xaa is C or S

SEQ ID NO: 63601 - protein, 26 aa, Artificial Sequence
  Cyclic GFR-binding peptide
EPISMLYLDEYDKVVKFKYEEMVVEG

SEQ ID NO: 63602 - protein, 34 aa, Artificial Sequence
  Cyclic GFR-binding peptide
  MOD_RES (31), (33): Xaa is C or S
PTELEPISMLYLDENEKVVKFKYEDMVVEGXGXR

SEQ ID NO: 63603 - protein, 24 aa, Artificial Sequence
  Cyclic GFR-binding peptide
PTELSPISMLYIDEYDKVVYKQYE

SEQ ID NO: 63604 - protein, 31 aa, Artificial Sequence
  Cyclic GFR-binding peptide
  MOD_RES (4), (5): Xaa is C or S
PKAXXAPTKLEPISVLYLDSSNNVIKFKYEN

SEQ ID NO: 63605 - protein, 26 aa, Artificial Sequence
  Cyclic GFR-binding peptide
VPTELSPISMLYIDEYDKVVYKQYEE

SEQ ID NO: 63606 - protein, 20 aa, Artificial Sequence
  Cyclic GFR-binding peptide
SPISILYKDKGVVTYLKYHY

SEQ ID NO: 63607 - protein, 31 aa, Artificial Sequence
  Cyclic GFR-binding peptide
  MOD_RES (31), (31): Xaa is C or S
PTELEPISMLYLDENEKVVKFKYEDMVVEGX

SEQ ID NO: 63608 - protein, 28 aa, Artificial Sequence
  Cyclic GFR-binding peptide
  MOD_RES (1), (1): Xaa is C or S
XVPTELSPISMLYIDENEKVVYKQYEDM

SEQ ID NO: 63609 - protein, 22 aa, Artificial Sequence
  Cyclic GFR-binding peptide
DLEPISILYLVGRTPKVKFKYE

SEQ ID NO: 63610 - protein, 35 aa, Artificial Sequence
  Cyclic GFR-binding peptide
  MOD_RES (5), (6): Xaa is C or S
VPKPXXAPTQLSPISVLYIDDSSNVIYKQYENMVV

SEQ ID NO: 63611 - protein, 24 aa, Artificial Sequence
  Cyclic GFR-binding peptide
LSPISILYIVGRTPKVYKQYEMVV

SEQ ID NO: 63612 - protein, 23 aa, Artificial Sequence
  Cyclic GFR-binding peptide
EPISMLYLDEYDKVVKFKYEEMV

SEQ ID NO: 63613 - protein, 38 aa, Artificial Sequence; identical to SEQ ID NO: 19595
  Cyclic GFR-binding peptide
  MOD_RES (2), (3), (35), (37): Xaa is C or S

SEQ ID NO: 63614 - protein, 38 aa, Artificial Sequence; identical to SEQ ID NO: 19597
  Cyclic GFR-binding peptide
  MOD_RES (3), (4), (36), (38): Xaa is C or S

SEQ ID NO: 63615 - protein, 33 aa, Artificial Sequence; identical to SEQ ID NO: 19599
  Cyclic GFR-binding peptide
  MOD_RES (2), (3): Xaa is C or S

SEQ ID NO: 63616 - protein, 29 aa, Artificial Sequence
  Cyclic GFR-binding peptide
  MOD_RES (28), (28): Xaa is C or S
LSPISMLYIDENEKVVYKQYEDMVVEGXG

SEQ ID NO: 63617 - protein, 34 aa, Artificial Sequence
  Cyclic GFR-binding peptide
  MOD_RES (6), (6): Xaa is C or S
VTKPTXAPTKLEPISVLYLDDSSNVIKFKYENMV

SEQ ID NO: 63618 - protein, 28 aa, Artificial Sequence
  Cyclic GFR-binding peptide
  MOD_RES (27), (27): Xaa is C or S
SPISVLYIDDSSNVIYKQYENMVVRAXG

SEQ ID NO: 63619 - protein, 36 aa, Artificial Sequence; identical to SEQ ID NO: 19602
  Cyclic GFR-binding peptide
  MOD_RES (1), (33), (35): Xaa is C or S

SEQ ID NO: 63620 - protein, 38 aa, Artificial Sequence; identical to SEQ ID NO: 19605
  Cyclic GFR-binding peptide
  MOD_RES (6), (7): Xaa is C or S

SEQ ID NO: 63621 - protein, 26 aa, Artificial Sequence
  Cyclic GFR-binding peptide
VSQDLSPISILYIIGKTPKIYKQYEM

SEQ ID NO: 63622 - protein, 38 aa, Artificial Sequence; identical to SEQ ID NO: 19608
  Cyclic GFR-binding peptide
  MOD_RES (4), (5), (37): Xaa is C or S

SEQ ID NO: 63623 - protein, 27 aa, Artificial Sequence
  Cyclic GFR-binding peptide
LSPISMLYIDENEKVVYKQYEDMVVEG

SEQ ID NO: 63624 - protein, 32 aa, Artificial Sequence
  Cyclic GFR-binding peptide
  MOD_RES (4), (5): Xaa is C or S
PKPXXAPTQLEPISVLYLDDSSNVIKFKYENM

SEQ ID NO: 63625 - protein, 31 aa, Artificial Sequence
  Cyclic GFR-binding peptide
  MOD_RES (3), (4): Xaa is C or S
KAXXVPTELSPISMLYIDENEKVVYKQYEDM

SEQ ID NO: 63626 - protein, 21 aa, Artificial Sequence
  Cyclic GFR-binding peptide
LSPISILYKDAANNVVLKYHY

SEQ ID NO: 63627 - protein, 35 aa, Artificial Sequence
  Cyclic GFR-binding peptide
  MOD_RES (6), (7): Xaa is C or S
ASASPXXVPQDLEPISILYLVGRTPKVKFKYEMVV

SEQ ID NO: 63628 - protein, 26 aa, Artificial Sequence
  Cyclic GFR-binding peptide
VPARLSPISILYKDAANNVVLKYHYD

SEQ ID NO: 63629 - protein, 28 aa, Artificial Sequence
  Cyclic GFR-binding peptide
KLSPISILYKDKGVVTYLKYHYGMAVSE

SEQ ID NO: 63630 - protein, 33 aa, Artificial Sequence; identical to SEQ ID NO: 19616
  Cyclic GFR-binding peptide
  MOD_RES (1), (2): Xaa is C or S

SEQ ID NO: 63631 - protein, 29 aa, Artificial Sequence
  Cyclic GFR-binding peptide
  MOD_RES (29), (29): Xaa is C or S
ELSPISMLYIDENEKVVYKQYEDMVVEGX

SEQ ID NO: 63632 - protein, 32 aa, Artificial Sequence; identical to SEQ ID NO: 19618
  Cyclic GFR-binding peptide
  MOD_RES (1), (1): Xaa is C or S

SEQ ID NO: 63633 - protein, 29 aa, Artificial Sequence
  Cyclic GFR-binding peptide
  MOD_RES (29), (29): Xaa is C or S
ELEPISMLYLDENEKVVKFKYEDMVVEGX

SEQ ID NO: 63634 - protein, 30 aa, Artificial Sequence; identical to SEQ ID NO: 962
  Cyclic GFR-binding peptide

SEQ ID NO: 63635 - protein, 34 aa, Artificial Sequence
  Cyclic GFR-binding peptide
  MOD_RES (31), (33): Xaa is C or S
PTKLSPISILYIDKGVVTYYKQYEGMAVSEXGXR

SEQ ID NO: 63636 - protein, 24 aa, Artificial Sequence
  Cyclic GFR-binding peptide
SPISILYKDAANNVVLKYHYDMVV

SEQ ID NO: 63637 - protein, 32 aa, Artificial Sequence
  Cyclic GFR-binding peptide
  MOD_RES (1), (2): Xaa is C or S
XXVPTKLSPISVLYIDDMGVPTYKQYEEGMSV

SEQ ID NO: 63638 - protein, 24 aa, Artificial Sequence
  Cyclic GFR-binding peptide
DLSPISILYIVGRTPKVYKQYEMV

SEQ ID NO: 63639 - protein, 33 aa, Artificial Sequence
  Cyclic GFR-binding peptide
  MOD_RES (6), (6): Xaa is C or S
VTKPTXAPTKLSPISVLYIDDSSNVIYKQYENM

SEQ ID NO: 63640 - protein, 29 aa, Artificial Sequence
  Cyclic GFR-binding peptide
VPTKLNAISILYFDKGVVTYLKKYRGMAV

SEQ ID NO: 63641 - protein, 30 aa, Artificial Sequence
  Cyclic GFR-binding peptide
  MOD_RES (2), (3): Xaa is C or S
PXXVPQDLEPISILYLVGRTPKVKFKYEMV

SEQ ID NO: 63642 - protein, 28 aa, Artificial Sequence
  Cyclic GFR-binding peptide
  MOD_RES (27), (27): Xaa is C or S
LEPISILYLVGRKPKVKFKYEMIVRSXK

SEQ ID NO: 63643 - protein, 34 aa, Artificial Sequence
  Cyclic GFR-binding peptide
  MOD_RES (4), (5): Xaa is C or S
PKAXXVPTELSPISMLYIDEYDKVVYKQYEEMVV

SEQ ID NO: 63644 - protein, 29 aa, Artificial Sequence
  Cyclic GFR-binding peptide
  MOD_RES (27), (29): Xaa is C or S
EPISMLYLDENEKVVKFKYEDMVVEGXGX

SEQ ID NO: 63645 - protein, 30 aa, Artificial Sequence
  Cyclic GFR-binding peptide
  MOD_RES (1), (1): Xaa is C or S
XVPTKLSPISILYIDKGVVTYYKQYEGMAV

SEQ ID NO: 63646 - protein, 38 aa, Artificial Sequence
  Cyclic GFR-binding peptide
  MOD_RES (6), (7): Xaa is C or S
KVGKAXXVPTKLEPISVLYLDDMGVPTKFKYEEGMSVA

SEQ ID NO: 63647 - protein, 34 aa, Artificial Sequence
  Cyclic GFR-binding peptide
  MOD_RES (31), (33): Xaa is C or S
PTQLEPISVLYLDDSSNVIKFKYENMVVRAXGXH

SEQ ID NO: 63648 - protein, 41 aa, Artificial Sequence; identical to SEQ ID NO: 19634
  Cyclic GFR-binding peptide
  MOD_RES (6), (7), (39), (41): Xaa is C or S

SEQ ID NO: 63649 - protein, 26 aa, Artificial Sequence
  Cyclic GFR-binding peptide
LSPISVLYIDDMGVPTYKQYEEGMSV

SEQ ID NO: 63650 - protein, 27 aa, Artificial Sequence
  Cyclic GFR-binding peptide
  MOD_RES (27), (27): Xaa is C or S
LEPISILYLVGRKPKVKFKYEMIVRSX

SEQ ID NO: 63651 - protein, 29 aa, Artificial Sequence
  Cyclic GFR-binding peptide
VPTKLSPISILYIDKGVVTYYKQYEGMAV

SEQ ID NO: 63652 - protein, 30 aa, Artificial Sequence
  Cyclic GFR-binding peptide
  MOD_RES (1), (1): Xaa is C or S
XVPTKLSPISILYKDKGVVTYLKYHYGMAV

SEQ ID NO: 63653 - protein, 34 aa, Artificial Sequence; identical to SEQ ID NO: 19637
  Cyclic GFR-binding peptide
  MOD_RES (32), (34): Xaa is C or S

SEQ ID NO: 63654 - protein, 31 aa, Artificial Sequence
  Cyclic GFR-binding peptide
  MOD_RES (1), (2): Xaa is C or S
XXAPTQLSPISVLYIDDSSNVIYKQYENMVV

SEQ ID NO: 63655 - protein, 32 aa, Artificial Sequence; identical to SEQ ID NO: 19638
  Cyclic GFR-binding peptide
  MOD_RES (1), (2): Xaa is C or S

SEQ ID NO: 63656 - protein, 32 aa, Artificial Sequence; identical to SEQ ID NO: 19639
  Cyclic GFR-binding peptide
  MOD_RES (1), (1): Xaa is C or S

SEQ ID NO: 63657 - protein, 31 aa, Artificial Sequence
  Cyclic GFR-binding peptide
  MOD_RES (29), (31): Xaa is C or S
RLSPISILYKDAANNVVLKYHYDMVVEAXGX

SEQ ID NO: 63658 - protein, 39 aa, Artificial Sequence; identical to SEQ ID NO: 19641
  Cyclic GFR-binding peptide
  MOD_RES (5), (6), (38): Xaa is C or S

SEQ ID NO: 63659 - protein, 31 aa, Artificial Sequence
  Cyclic GFR-binding peptide
  MOD_RES (30), (30): Xaa is C or S
TELEPISMLYLDEYDKVVKFKYEEMVVEGXG

SEQ ID NO: 63660 - protein, 30 aa, Artificial Sequence
  Cyclic GFR-binding peptide
PTKLSPISVLYIDSSNNVIYKQYENMVVKA

SEQ ID NO: 63661 - protein, 24 aa, Artificial Sequence
  Cyclic GFR-binding peptide
SPISMLYIDEYDKVVYKQYEEMVV

SEQ ID NO: 63662 - protein, 36 aa, Artificial Sequence
  Cyclic GFR-binding peptide
  MOD_RES (5), (6): Xaa is C or S
VGKAXXVPTKLSPISVLYIDDMGVPTYKQYEEGMSV

SEQ ID NO: 63663 - protein, 29 aa, Artificial Sequence
  Cyclic GFR-binding peptide
  MOD_RES (1), (2): Xaa is C or S
XXVPTELSPISMLYIDENEKVVYKQYEDM

SEQ ID NO: 63664 - protein, 27 aa, Artificial Sequence
  Cyclic GFR-binding peptide
  MOD_RES (27), (27): Xaa is C or S
EPISMLYLDEYDKVVKFKYEEMVVEGX

SEQ ID NO: 63665 - protein, 30 aa, Artificial Sequence; identical to SEQ ID NO: 19653
  Cyclic GFR-binding peptide

SEQ ID NO: 63666 - protein, 31 aa, Artificial Sequence; identical to SEQ ID NO: 19654
  Cyclic GFR-binding peptide

SEQ ID NO: 63667 - protein, 32 aa, Artificial Sequence
  Cyclic GFR-binding peptide
  MOD_RES (29), (31): Xaa is C or S
KLNAISILYFDKGVVTYLKKYRGMAVSEXGXR

SEQ ID NO: 63668 - protein, 30 aa, Artificial Sequence
  Cyclic GFR-binding peptide
  MOD_RES (28), (30): Xaa is C or S
LEPISMLYLDEYDKVVKFKYEEMVVEGXGX

SEQ ID NO: 63669 - protein, 30 aa, Artificial Sequence
  Cyclic GFR-binding peptide
  MOD_RES (30), (30): Xaa is C or S
TELEPISMLYLDENEKVVKFKYEDMVVEGX

SEQ ID NO: 63670 - protein, 35 aa, Artificial Sequence; identical to SEQ ID NO: 19656
  Cyclic GFR-binding peptide
  MOD_RES (32), (34): Xaa is C or S

SEQ ID NO: 63671 - protein, 29 aa, Artificial Sequence
  Cyclic GFR-binding peptide
  MOD_RES (28), (28): Xaa is C or S
SPISVLYIDDMGVPTYKQYEEGMSVAEXG

SEQ ID NO: 63672 - protein, 20 aa, Artificial Sequence
  Cyclic GFR-binding peptide
EPISVLYLDDSSNVIKFKYE

SEQ ID NO: 63673 - protein, 25 aa, Artificial Sequence
  Cyclic GFR-binding peptide
TKLEPISVLYLDDSSNVIKFKYENM

SEQ ID NO: 63674 - protein, 34 aa, Artificial Sequence
  Cyclic GFR-binding peptide
  MOD_RES (5), (6): Xaa is C or S
SASPXXVPQDLSPISILYIVGRTPKVYKQYEMVV

SEQ ID NO: 63675 - protein, 25 aa, Artificial Sequence
  Cyclic GFR-binding peptide
LEPISILYLVGRTPKVKFKYEMVVK

SEQ ID NO: 63676 - protein, 35 aa, Artificial Sequence; identical to SEQ ID NO: 19669
  Cyclic GFR-binding peptide
  MOD_RES (32), (34): Xaa is C or S

SEQ ID NO: 63677 - protein, 33 aa, Artificial Sequence; identical to SEQ ID NO: 19673
  Cyclic GFR-binding peptide
  MOD_RES (1), (2): Xaa is C or S

SEQ ID NO: 63678 - protein, 33 aa, Artificial Sequence; identical to SEQ ID NO: 19674
  Cyclic GFR-binding peptide
  MOD_RES (2), (3): Xaa is C or S

SEQ ID NO: 63679 - protein, 36 aa, Artificial Sequence; identical to SEQ ID NO: 19678
  Cyclic GFR-binding peptide
  MOD_RES (5), (6): Xaa is C or S

SEQ ID NO: 63680 - protein, 38 aa, Artificial Sequence
  Cyclic GFR-binding peptide
  MOD_RES (6), (7): Xaa is C or S
KVGKAXXVPTKLSPISVLYIDDMGVPTYKQYEEGMSVA

SEQ ID NO: 63681 - protein, 28 aa, Artificial Sequence
  Cyclic GFR-binding peptide
  MOD_RES (2), (3): Xaa is C or S
PXXAPTQLEPISVLYLDDSSNVIKFKYE

SEQ ID NO: 63682 - protein, 34 aa, Artificial Sequence
  Cyclic GFR-binding peptide
  MOD_RES (6), (7): Xaa is C or S
KIPKAXXVPTELEPISMLYLDENEKVVKFKYEDM

SEQ ID NO: 63683 - protein, 37 aa, Artificial Sequence; identical to SEQ ID NO: 19684
  Cyclic GFR-binding peptide
  MOD_RES (4), (5), (37): Xaa is C or S

SEQ ID NO: 63684 - protein, 32 aa, Artificial Sequence
  Cyclic GFR-binding peptide
  MOD_RES (29), (31): Xaa is C or S
ELSPISMLYIDEYDKVVYKQYEEMVVEGXGXR

SEQ ID NO: 63685 - protein, 29 aa, Artificial Sequence
  Cyclic GFR-binding peptide
  MOD_RES (1), (1): Xaa is C or S
XVPQDLEPISILYLVGRTPKVKFKYEMVV

SEQ ID NO: 63686 - protein, 35 aa, Artificial Sequence; identical to SEQ ID NO: 19686
  Cyclic GFR-binding peptide
  MOD_RES (5), (5): Xaa is C or S

SEQ ID NO: 63687 - protein, 37 aa, Artificial Sequence; identical to SEQ ID NO: 19687
  Cyclic GFR-binding peptide
  MOD_RES (3), (4), (36): Xaa is C or S

SEQ ID NO: 63688 - protein, 33 aa, Artificial Sequence; identical to SEQ ID NO: 19688
  Cyclic GFR-binding peptide
  MOD_RES (1), (2): Xaa is C or S

SEQ ID NO: 63689 - protein, 27 aa, Artificial Sequence
  Cyclic GFR-binding peptide
VPTELEPISMLYLDEYDKVVKFKYEEM

SEQ ID NO: 63690 - protein, 30 aa, Artificial Sequence
  Cyclic GFR-binding peptide
  MOD_RES (29), (29): Xaa is C or S
QALSPISILYIVGRKPKVYKQYEMIVRSXK

SEQ ID NO: 63691 - protein, 31 aa, Artificial Sequence
  Cyclic GFR-binding peptide
  MOD_RES (28), (30): Xaa is C or S
DLEPISILYLVGRTPKVKFKYEMVVKSXKXS

SEQ ID NO: 63692 - protein, 36 aa, Artificial Sequence
  Cyclic GFR-binding peptide
  MOD_RES (6), (7): Xaa is C or S
SIPKAXXVPTELEPISMLYLDEYDKVVKFKYEEMVV

SEQ ID NO: 63693 - protein, 32 aa, Artificial Sequence; identical to SEQ ID NO: 19692
  Cyclic GFR-binding peptide
  MOD_RES (32), (32): Xaa is C or S

SEQ ID NO: 63694 - protein, 27 aa, Artificial Sequence
  Cyclic GFR-binding peptide
  MOD_RES (1), (2): Xaa is C or S
XXVPQALEPISILYLVGRKPKVKFKYE

SEQ ID NO: 63695 - protein, 31 aa, Artificial Sequence
  Cyclic GFR-binding peptide
  MOD_RES (30), (30): Xaa is C or S
TKLSPISVLYIDDSSNVIYKQYENMVVRSXG

SEQ ID NO: 63696 - protein, 28 aa, Artificial Sequence
  Cyclic GFR-binding peptide
  MOD_RES (2), (3): Xaa is C or S
AXXVPTKLNAISILYFDKGVVTYLKKYR

SEQ ID NO: 63697 - protein, 23 aa, Artificial Sequence
  Cyclic GFR-binding peptide
LSPISMLYIDENEKVVYKQYEDM

SEQ ID NO: 63698 - protein, 26 aa, Artificial Sequence
  Cyclic GFR-binding peptide
KLNAISILYFDKGVVTYLKKYRGMAV

SEQ ID NO: 63699 - protein, 25 aa, Artificial Sequence
  Cyclic GFR-binding peptide
SPISVLYIDDSSNVIYKQYENMVVR

SEQ ID NO: 63700 - protein, 35 aa, Artificial Sequence; identical to SEQ ID NO: 19700
  Cyclic GFR-binding peptide
  MOD_RES (4), (5): Xaa is C or S

SEQ ID NO: 63701 - protein, 25 aa, Artificial Sequence
  Cyclic GFR-binding peptide
TELEPISMLYLDEYDKVVKFKYEEM

SEQ ID NO: 63702 - protein, 29 aa, Artificial Sequence
  Cyclic GFR-binding peptide
SPISILYIVGRTPKVYKQYEAAAAAAAAA

SEQ ID NO: 63703 - protein, 27 aa, Artificial Sequence
  Cyclic GFR-binding peptide
  MOD_RES (2), (2): Xaa is C or S
TXAPTKLEPISVLYLDDSSNVIKFKYE

SEQ ID NO: 63704 - protein, 36 aa, Artificial Sequence; identical to SEQ ID NO: 19706
  Cyclic GFR-binding peptide
  MOD_RES (3), (4), (36): Xaa is C or S

SEQ ID NO: 63705 - protein, 32 aa, Artificial Sequence; identical to SEQ ID NO: 19709
  Cyclic GFR-binding peptide
  MOD_RES (32), (32): Xaa is C or S

SEQ ID NO: 63706 - protein, 32 aa, Artificial Sequence
  Cyclic GFR-binding peptide
  MOD_RES (6), (7): Xaa is C or S
KVGKAXXVPTKLEPISVLYLDDMGVPTKFKYE

SEQ ID NO: 63707 - protein, 25 aa, Artificial Sequence
  Cyclic GFR-binding peptide
SPISMLYIDENEKVVYKQYEDMVVE

SEQ ID NO: 63708 - protein, 30 aa, Artificial Sequence
  Cyclic GFR-binding peptide
  MOD_RES (3), (4): Xaa is C or S
KAXXVPTKLEPISVLYLDDMGVPTKFKYEE

SEQ ID NO: 63709 - protein, 28 aa, Artificial Sequence
  Cyclic GFR-binding peptide
  MOD_RES (28), (28): Xaa is C or S
LSPISVLYIDDSSNVIYKQYENMVVRSX

SEQ ID NO: 63710 - protein, 31 aa, Artificial Sequence
  Cyclic GFR-binding peptide
  MOD_RES (3), (4): Xaa is C or S
KAXXVPTELEPISMLYLDEYDKVVKFKYEEM

SEQ ID NO: 63711 - protein, 34 aa, Artificial Sequence; identical to SEQ ID NO: 19714
  Cyclic GFR-binding peptide
  MOD_RES (32), (34): Xaa is C or S

SEQ ID NO: 63712 - protein, 36 aa, Artificial Sequence; identical to SEQ ID NO: 19713
  Cyclic GFR-binding peptide
  MOD_RES (3), (4), (36): Xaa is C or S

SEQ ID NO: 63713 - protein, 33 aa, Artificial Sequence; identical to SEQ ID NO: 19716
  Cyclic GFR-binding peptide
  MOD_RES (1), (32): Xaa is C or S

SEQ ID NO: 63714 - protein, 35 aa, Artificial Sequence; identical to SEQ ID NO: 19717
  Cyclic GFR-binding peptide
  MOD_RES (4), (5): Xaa is C or S

SEQ ID NO: 63715 - protein, 25 aa, Artificial Sequence
  Cyclic GFR-binding peptide
LSPISVLYIDDSSNVIYKQYENMVV

SEQ ID NO: 63716 - protein, 39 aa, Artificial Sequence; identical to SEQ ID NO: 19720
  Cyclic GFR-binding peptide
  MOD_RES (6), (7), (39): Xaa is C or S

SEQ ID NO: 63717 - protein, 39 aa, Artificial Sequence; identical to SEQ ID NO: 19722
  Cyclic GFR-binding peptide
  MOD_RES (2), (3), (36), (38): Xaa is C or S

SEQ ID NO: 63718 - protein, 34 aa, Artificial Sequence; identical to SEQ ID NO: 19725
  Cyclic GFR-binding peptide
  MOD_RES (1), (2), (34): Xaa is C or S

SEQ ID NO: 63719 - protein, 34 aa, Artificial Sequence; identical to SEQ ID NO: 19726
  Cyclic GFR-binding peptide
  MOD_RES (3), (4): Xaa is C or S

SEQ ID NO: 63720 - protein, 31 aa, Artificial Sequence
  Cyclic GFR-binding peptide
  MOD_RES (31), (31): Xaa is C or S
PTKLSPISVLYIDDSSNVIYKQYENMVVRSX

SEQ ID NO: 63721 - protein, 24 aa, Artificial Sequence
  Cyclic GFR-binding peptide
LEPISMLYLDEYDKVVKFKYEEMV

SEQ ID NO: 63722 - protein, 30 aa, Artificial Sequence
  Cyclic GFR-binding peptide
TKLEPISVLYLDDMGVPTKFKYEEGMSVAE

SEQ ID NO: 63723 - protein, 35 aa, Artificial Sequence
  Cyclic GFR-binding peptide
  MOD_RES (6), (7): Xaa is C or S
TVPKPXXAPTQLEPISVLYLDDSSNVIKFKYENMV

SEQ ID NO: 63724 - protein, 30 aa, Artificial Sequence
  Cyclic GFR-binding peptide
  MOD_RES (4), (5): Xaa is C or S
ASPXXVSQDLEPISILYLIGKTPKIKFKYE

SEQ ID NO: 63725 - protein, 30 aa, Artificial Sequence
  Cyclic GFR-binding peptide
  MOD_RES (2), (3): Xaa is C or S
PXXVPQALSPISILYIVGRKPKVYKQYEMI

SEQ ID NO: 63726 - protein, 23 aa, Artificial Sequence
  Cyclic GFR-binding peptide
SPISILYIVGRTPKVYKQYEMVV

SEQ ID NO: 63727 - protein, 32 aa, Artificial Sequence
  Cyclic GFR-binding peptide
  MOD_RES (6), (7): Xaa is C or S
AVPKAXXAPTKLSPISVLYIDSSNNVIYKQYE

SEQ ID NO: 63728 - protein, 31 aa, Artificial Sequence
  Cyclic GFR-binding peptide
  MOD_RES (5), (6): Xaa is C or S
IPKAXXVPTELEPISMLYLDENEKVVKFKYE

SEQ ID NO: 63729 - protein, 29 aa, Artificial Sequence
  Cyclic GFR-binding peptide
  MOD_RES (29), (29): Xaa is C or S
QDLSPISILYIIGKTPKIYKQYEMIVKSX

SEQ ID NO: 63730 - protein, 37 aa, Artificial Sequence; identical to SEQ ID NO: 19731
  Cyclic GFR-binding peptide
  MOD_RES (2), (3), (35), (37): Xaa is C or S

SEQ ID NO: 63731 - protein, 33 aa, Artificial Sequence
  Cyclic GFR-binding peptide
  MOD_RES (5), (6): Xaa is C or S
IPKAXXVPTELEPISMLYLDENEKVVKFKYEDM

SEQ ID NO: 63732 - protein, 37 aa, Artificial Sequence; identical to SEQ ID NO: 19734
  Cyclic GFR-binding peptide
  MOD_RES (2), (3), (34), (36): Xaa is C or S

SEQ ID NO: 63733 - protein, 24 aa, Artificial Sequence
  Cyclic GFR-binding peptide
QALSPISILYIVGRKPKVYKQYEM

SEQ ID NO: 63734 - protein, 27 aa, Artificial Sequence
  Cyclic GFR-binding peptide
VPTELSPISMLYIDENEKVVYKQYEDM

SEQ ID NO: 63735 - protein, 25 aa, Artificial Sequence
  Cyclic GFR-binding peptide
RLNAISILYFDAANNVVLKKYRDMV

SEQ ID NO: 63736 - protein, 32 aa, Artificial Sequence
  Cyclic GFR-binding peptide
  MOD_RES (3), (4): Xaa is C or S
KAXXVPTKLSPISVLYIDDMGVPTYKQYEEGM

SEQ ID NO: 63737 - protein, 29 aa, Artificial Sequence
  Cyclic GFR-binding peptide
VPTELSPISMLYIDEYDKVVYKQYEEMVV

SEQ ID NO: 63738 - protein, 36 aa, Artificial Sequence; identical to SEQ ID NO: 19740
  Cyclic GFR-binding peptide
  MOD_RES (4), (5): Xaa is C or S

SEQ ID NO: 63739 - protein, 28 aa, Artificial Sequence
  Cyclic GFR-binding peptide
  MOD_RES (3), (3): Xaa is C or S
PTXAPTKLSPISVLYIDDSSNVIYKQYE

SEQ ID NO: 63740 - protein, 31 aa, Artificial Sequence
  Cyclic GFR-binding peptide
  MOD_RES (5), (6): Xaa is C or S
APASXXVPARLSPISILYKDAANNVVLKYHY

SEQ ID NO: 63741 - protein, 23 aa, Artificial Sequence
  Cyclic GFR-binding peptide
TKLSPISILYIDKGVVTYYKQYE

SEQ ID NO: 63742 - protein, 25 aa, Artificial Sequence
  Cyclic GFR-binding peptide
LEPISILYLVGRKPKVKFKYEMIVR

SEQ ID NO: 63743 - protein, 22 aa, Artificial Sequence
  Cyclic GFR-binding peptide
LEPISILYLVGRKPKVKFKYEM

SEQ ID NO: 63744 - protein, 33 aa, Artificial Sequence; identical to SEQ ID NO: 19748
  Cyclic GFR-binding peptide
  MOD_RES (1), (33): Xaa is C or S

SEQ ID NO: 63745 - protein, 30 aa, Artificial Sequence
  Cyclic GFR-binding peptide
  MOD_RES (2), (3): Xaa is C or S
AXXVPTKLEPISVLYLDDMGVPTKFKYEEG

SEQ ID NO: 63746 - protein, 31 aa, Artificial Sequence
  Cyclic GFR-binding peptide
  MOD_RES (28), (30): Xaa is C or S
LSPISVLYIDDSSNVIYKQYENMVVRSXGXH

SEQ ID NO: 63747 - protein, 32 aa, Artificial Sequence; identical to SEQ ID NO: 19750
  Cyclic GFR-binding peptide
  MOD_RES (32), (32): Xaa is C or S

SEQ ID NO: 63748 - protein, 31 aa, Artificial Sequence
  Cyclic GFR-binding peptide
  MOD_RES (31), (31): Xaa is C or S
PTKLSPISILYKDKGVVTYLKYHYGMAVSEX

SEQ ID NO: 63749 - protein, 41 aa, Artificial Sequence; identical to SEQ ID NO: 19753
  Cyclic GFR-binding peptide
  MOD_RES (6), (7), (39), (41): Xaa is C or S

SEQ ID NO: 63750 - protein, 32 aa, Artificial Sequence
  Cyclic GFR-binding peptide
  MOD_RES (6), (7): Xaa is C or S
AAPASXXVPARLEPISILYLDAANNVVKFKYE

SEQ ID NO: 63751 - protein, 32 aa, Artificial Sequence
  Cyclic GFR-binding peptide
  MOD_RES (4), (5): Xaa is C or S
PASXXVPARLEPISILYLDAANNVVKFKYEDM

SEQ ID NO: 63752 - protein, 40 aa, Artificial Sequence; identical to SEQ ID NO: 19758
  Cyclic GFR-binding peptide
  MOD_RES (4), (5), (37), (39): Xaa is C or S

SEQ ID NO: 63753 - protein, 31 aa, Artificial Sequence
  Cyclic GFR-binding peptide
  MOD_RES (29), (31): Xaa is C or S
KLSPISVLYIDDSSNVIYKQYENMVVRSXGX

SEQ ID NO: 63754 - protein, 33 aa, Artificial Sequence
  Cyclic GFR-binding peptide
  MOD_RES (32), (32): Xaa is C or S
PTKLEPISVLYLDDMGVPTKFKYEEGMSVAEXG

SEQ ID NO: 63755 - protein, 33 aa, Artificial Sequence
  Cyclic GFR-binding peptide
  MOD_RES (6), (7): Xaa is C or S
KASKAXXVPTKLNAISILYFDKGVVTYLKKYRG

SEQ ID NO: 63756 - protein, 39 aa, Artificial Sequence; identical to SEQ ID NO: 19763
  Cyclic GFR-binding peptide
  MOD_RES (4), (5), (37), (39): Xaa is C or S

SEQ ID NO: 63757 - protein, 29 aa, Artificial Sequence
  Cyclic GFR-binding peptide
TELSPISMLYIDEYDKVVYKQYEEMVVEG

SEQ ID NO: 63758 - protein, 25 aa, Artificial Sequence
  Cyclic GFR-binding peptide
VPQALSPISILYIVGRKPKVYKQYE

SEQ ID NO: 63759 - protein, 27 aa, Artificial Sequence
  Cyclic GFR-binding peptide
  MOD_RES (1), (1): Xaa is C or S
XVPTELSPISMLYIDEYDKVVYKQYEE

SEQ ID NO: 63760 - protein, 36 aa, Artificial Sequence; identical to SEQ ID NO: 19765
  Cyclic GFR-binding peptide
  MOD_RES (1), (33), (35): Xaa is C or S

SEQ ID NO: 63761 - protein, 30 aa, Artificial Sequence
  Cyclic GFR-binding peptide
  MOD_RES (2), (3): Xaa is C or S
PXXVSQDLEPISILYLIGKTPKIKFKYEMI

SEQ ID NO: 63762 - protein, 34 aa, Artificial Sequence; identical to SEQ ID NO: 19767
  Cyclic GFR-binding peptide
  MOD_RES (1), (33): Xaa is C or S

SEQ ID NO: 63763 - protein, 31 aa, Artificial Sequence
  Cyclic GFR-binding peptide
  MOD_RES (28), (30): Xaa is C or S
LSPISMLYIDENEKVVYKQYEDMVVEGXGXR

SEQ ID NO: 63764 - protein, 27 aa, Artificial Sequence
  Cyclic GFR-binding peptide
LSPISMLYIDEYDKVVYKQYEEMVVEG

SEQ ID NO: 63765 - protein, 22 aa, Artificial Sequence
  Cyclic GFR-binding peptide
EPISMLYLDENEKVVKFKYEDM

SEQ ID NO: 63766 - protein, 32 aa, Artificial Sequence; identical to SEQ ID NO: 19770
  Cyclic GFR-binding peptide
  MOD_RES (2), (2): Xaa is C or S

SEQ ID NO: 63767 - protein, 23 aa, Artificial Sequence
  Cyclic GFR-binding peptide
LEPISVLYLDDMGVPTKFKYEEG

SEQ ID NO: 63768 - protein, 41 aa, Artificial Sequence; identical to SEQ ID NO: 19776
  Cyclic GFR-binding peptide
  MOD_RES (6), (7), (38), (40): Xaa is C or S

SEQ ID NO: 63769 - protein, 40 aa, Artificial Sequence; identical to SEQ ID NO: 19777
  Cyclic GFR-binding peptide
  MOD_RES (5), (6), (38), (40): Xaa is C or S

SEQ ID NO: 63770 - protein, 25 aa, Artificial Sequence
  Cyclic GFR-binding peptide
QDLSPISILYIIGKTPKIYKQYEMI

SEQ ID NO: 63771 - protein, 34 aa, Artificial Sequence
  Cyclic GFR-binding peptide
  MOD_RES (6), (7): Xaa is C or S
TVPKPXXAPTQLSPISVLYIDDSSNVIYKQYENM

SEQ ID NO: 63772 - protein, 32 aa, Artificial Sequence
  Cyclic GFR-binding peptide
  MOD_RES (3), (3): Xaa is C or S
PTXAPTKLSPISVLYIDDSSNVIYKQYENMVV

SEQ ID NO: 63773 - protein, 26 aa, Artificial Sequence
  Cyclic GFR-binding peptide
KLSPISILYIDKGVVTYYKQYEGMAV

SEQ ID NO: 63774 - protein, 36 aa, Artificial Sequence; identical to SEQ ID NO: 19781
  Cyclic GFR-binding peptide
  MOD_RES (4), (5): Xaa is C or S

SEQ ID NO: 63775 - protein, 32 aa, Artificial Sequence; identical to SEQ ID NO: 19782
  Cyclic GFR-binding peptide

SEQ ID NO: 63776 - protein, 31 aa, Artificial Sequence
  Cyclic GFR-binding peptide
  MOD_RES (1), (2): Xaa is C or S
XXAPTKLEPISVLYLDDSSNVIKFKYENMVV

SEQ ID NO: 63777 - protein, 32 aa, Artificial Sequence
  Cyclic GFR-binding peptide
  MOD_RES (5), (6): Xaa is C or S
IPKAXXVPTELSPISMLYIDEYDKVVYKQYEE

SEQ ID NO: 63778 - protein, 33 aa, Artificial Sequence; identical to SEQ ID NO: 19789
  Cyclic GFR-binding peptide
  MOD_RES (32), (32): Xaa is C or S

SEQ ID NO: 63779 - protein, 27 aa, Artificial Sequence
  Cyclic GFR-binding peptide
PTKLNAISILYFDKGVVTYLKKYRGMA

SEQ ID NO: 63780 - protein, 31 aa, Artificial Sequence
  Cyclic GFR-binding peptide
  MOD_RES (28), (30): Xaa is C or S
LEPISILYLDAANNVVKFKYEDMVVEAXGXR

SEQ ID NO: 63781 - protein, 27 aa, Artificial Sequence
  Cyclic GFR-binding peptide
VPTKLNAISILYFDKGVVTYLKKYRGM

SEQ ID NO: 63782 - protein, 28 aa, Artificial Sequence
  Cyclic GFR-binding peptide
PTKLEPISVLYLDDSSNVIKFKYENMVV

SEQ ID NO: 63783 - protein, 34 aa, Artificial Sequence; identical to SEQ ID NO: 19796
  Cyclic GFR-binding peptide
  MOD_RES (1), (33): Xaa is C or S

SEQ ID NO: 63784 - protein, 23 aa, Artificial Sequence
  Cyclic GFR-binding peptide
LEPISMLYLDEYDKVVKFKYEEM

SEQ ID NO: 63785 - protein, 37 aa, Artificial Sequence; identical to SEQ ID NO: 19800
  Cyclic GFR-binding peptide
  MOD_RES (2), (3), (36): Xaa is C or S

SEQ ID NO: 63786 - protein, 35 aa, Artificial Sequence; identical to SEQ ID NO: 19802
  Cyclic GFR-binding peptide
  MOD_RES (3), (4): Xaa is C or S

SEQ ID NO: 63787 - protein, 28 aa, Artificial Sequence
  Cyclic GFR-binding peptide
  MOD_RES (2), (3): Xaa is C or S
AXXVPTELEPISMLYLDENEKVVKFKYE

SEQ ID NO: 63788 - protein, 27 aa, Artificial Sequence
  Cyclic GFR-binding peptide
PTKLSPISILYKDKGVVTYLKYHYGMA

SEQ ID NO: 63789 - protein, 35 aa, Artificial Sequence; identical to SEQ ID NO: 19807
  Cyclic GFR-binding peptide
  MOD_RES (32), (34): Xaa is C or S

SEQ ID NO: 63790 - protein, 26 aa, Artificial Sequence
  Cyclic GFR-binding peptide
LEPISVLYLDSSNNVIKFKYENMVVK

SEQ ID NO: 63791 - protein, 29 aa, Artificial Sequence
  Cyclic GFR-binding peptide
  MOD_RES (1), (2): Xaa is C or S
XXVPTKLNAISILYFDKGVVTYLKKYRGM

SEQ ID NO: 63792 - protein, 29 aa, Artificial Sequence
  Cyclic GFR-binding peptide
  MOD_RES (2), (3): Xaa is C or S
SXXVPARLSPISILYKDAANNVVLKYHYD

SEQ ID NO: 63793 - protein, 24 aa, Artificial Sequence
  Cyclic GFR-binding peptide
LSPISVLYIDSSNNVIYKQYENMV

SEQ ID NO: 63794 - protein, 34 aa, Artificial Sequence; identical to SEQ ID NO: 19810
  Cyclic GFR-binding peptide
  MOD_RES (1), (2), (34): Xaa is C or S

SEQ ID NO: 63795 - protein, 35 aa, Artificial Sequence; identical to SEQ ID NO: 19811
  Cyclic GFR-binding peptide
  MOD_RES (2), (3), (34): Xaa is C or S

SEQ ID NO: 63796 - protein, 32 aa, Artificial Sequence
  Cyclic GFR-binding peptide
  MOD_RES (6), (7): Xaa is C or S
ASASPXXVSQDLSPISILYIIGKTPKIYKQYE

SEQ ID NO: 63797 - protein, 29 aa, Artificial Sequence
  Cyclic GFR-binding peptide
  MOD_RES (1), (1): Xaa is C or S
XAPTKLEPISVLYLDSSNNVIKFKYENMV

SEQ ID NO: 63798 - protein, 38 aa, Artificial Sequence; identical to SEQ ID NO: 19814
  Cyclic GFR-binding peptide
  MOD_RES (5), (6), (37): Xaa is C or S

SEQ ID NO: 63799 - protein, 31 aa, Artificial Sequence; identical to SEQ ID NO: 19815
  Cyclic GFR-binding peptide
  MOD_RES (1), (1): Xaa is C or S

SEQ ID NO: 63800 - protein, 33 aa, Artificial Sequence; identical to SEQ ID NO: 19818
  Cyclic GFR-binding peptide
  MOD_RES (2), (3): Xaa is C or S

SEQ ID NO: 63801 - protein, 30 aa, Artificial Sequence
  Cyclic GFR-binding peptide
  MOD_RES (27), (29): Xaa is C or S
SPISVLYIDDSSNVIYKQYENMVVRAXGXH

SEQ ID NO: 63802 - protein, 26 aa, Artificial Sequence
  Cyclic GFR-binding peptide
TKLSPISVLYIDDSSNVIYKQYENMV

SEQ ID NO: 63803 - protein, 28 aa, Artificial Sequence
  Cyclic GFR-binding peptide
  MOD_RES (28), (28): Xaa is C or S
LSPISILYKDAANNVVLKYHYDMVVEAX

SEQ ID NO: 63804 - protein, 28 aa, Artificial Sequence
  Cyclic GFR-binding peptide
APTQLSPISVLYIDDSSNVIYKQYENMV

SEQ ID NO: 63805 - protein, 35 aa, Artificial Sequence; identical to SEQ ID NO: 19821
  Cyclic GFR-binding peptide
  MOD_RES (1), (2), (35): Xaa is C or S

SEQ ID NO: 63806 - protein, 34 aa, Artificial Sequence; identical to SEQ ID NO: 19822
  Cyclic GFR-binding peptide
  MOD_RES (3), (4): Xaa is C or S

SEQ ID NO: 63807 - protein, 26 aa, Artificial Sequence
  Cyclic GFR-binding peptide
PTKLSPISILYKDKGVVTYLKYHYGM

SEQ ID NO: 63808 - protein, 28 aa, Artificial Sequence
  Cyclic GFR-binding peptide
VSQDLSPISILYIIGKTPKIYKQYEMIV

SEQ ID NO: 63809 - protein, 30 aa, Artificial Sequence
  Cyclic GFR-binding peptide
  MOD_RES (4), (5): Xaa is C or S
SKAXXVPTKLSPISILYIDKGVVTYYKQYE

SEQ ID NO: 63810 - protein, 34 aa, Artificial Sequence; identical to SEQ ID NO: 19826
  Cyclic GFR-binding peptide
  MOD_RES (3), (4): Xaa is C or S

SEQ ID NO: 63811 - protein, 30 aa, Artificial Sequence
  Cyclic GFR-binding peptide
  MOD_RES (4), (5): Xaa is C or S
PASXXVPARLSPISILYKDAANNVVLKYHY

SEQ ID NO: 63812 - protein, 39 aa, Artificial Sequence; identical to SEQ ID NO: 19833
  Cyclic GFR-binding peptide
  MOD_RES (6), (7), (39): Xaa is C or S

SEQ ID NO: 63813 - protein, 37 aa, Artificial Sequence; identical to SEQ ID NO: 19834
  Cyclic GFR-binding peptide
  MOD_RES (6), (7): Xaa is C or S

SEQ ID NO: 63814 - protein, 26 aa, Artificial Sequence
  Cyclic GFR-binding peptide
  MOD_RES (26), (26): Xaa is C or S
EPISILYLIGKTPKIKFKYEMIVKSX

SEQ ID NO: 63815 - protein, 39 aa, Artificial Sequence; identical to SEQ ID NO: 19838
  Cyclic GFR-binding peptide
  MOD_RES (6), (7), (39): Xaa is C or S

SEQ ID NO: 63816 - protein, 30 aa, Artificial Sequence
  Cyclic GFR-binding peptide
  MOD_RES (4), (5): Xaa is C or S
PKAXXAPTKLSPISVLYIDSSNNVIYKQYE

SEQ ID NO: 63817 - protein, 33 aa, Artificial Sequence
  Cyclic GFR-binding peptide
  MOD_RES (3), (4): Xaa is C or S
KAXXVPTELSPISMLYIDEYDKVVYKQYEEMVV

SEQ ID NO: 63818 - protein, 41 aa, Artificial Sequence; identical to SEQ ID NO: 19839
  Cyclic GFR-binding peptide
  MOD_RES (7), (39), (41): Xaa is C or S

SEQ ID NO: 63819 - protein, 38 aa, Artificial Sequence; identical to SEQ ID NO: 19840
  Cyclic GFR-binding peptide
  MOD_RES (3), (4), (36), (38): Xaa is C or S

SEQ ID NO: 63820 - protein, 31 aa, Artificial Sequence
  Cyclic GFR-binding peptide
  MOD_RES (3), (4): Xaa is C or S
APXXVPQALSPISILYIVGRKPKVYKQYEMI

SEQ ID NO: 63821 - protein, 22 aa, Artificial Sequence
  Cyclic GFR-binding peptide
ELEPISMLYLDEYDKVVKFKYE

SEQ ID NO: 63822 - protein, 34 aa, Artificial Sequence; identical to SEQ ID NO: 19848
  Cyclic GFR-binding peptide
  MOD_RES (31), (33): Xaa is C or S

SEQ ID NO: 63823 - protein, 26 aa, Artificial Sequence
  Cyclic GFR-binding peptide
ELSPISMLYIDEYDKVVYKQYEEMVV

SEQ ID NO: 63824 - protein, 39 aa, Artificial Sequence; identical to SEQ ID NO: 19854
  Cyclic GFR-binding peptide
  MOD_RES (6), (7), (39): Xaa is C or S

SEQ ID NO: 63825 - protein, 27 aa, Artificial Sequence
  Cyclic GFR-binding peptide
QDLEPISILYLVGRTPKVKFKYEMVVK

SEQ ID NO: 63826 - protein, 42 aa, Artificial Sequence; identical to SEQ ID NO: 19859
  Cyclic GFR-binding peptide
  MOD_RES (6), (7), (39), (41): Xaa is C or S

SEQ ID NO: 63827 - protein, 23 aa, Artificial Sequence
  Cyclic GFR-binding peptide
KLSPISILYIDKGVVTYYKQYEG

SEQ ID NO: 63828 - protein, 23 aa, Artificial Sequence
  Cyclic GFR-binding peptide
TKLSPISVLYIDDSSNVIYKQYE

SEQ ID NO: 63829 - protein, 29 aa, Artificial Sequence
  Cyclic GFR-binding peptide
  MOD_RES (29), (29): Xaa is C or S
RLSPISILYKDAANNVVLKYHYDMVVEAX

SEQ ID NO: 63830 - protein, 29 aa, Artificial Sequence
  Cyclic GFR-binding peptide
  MOD_RES (1), (1): Xaa is C or S
XVPTKLNAISILYFDKGVVTYLKKYRGMA

SEQ ID NO: 63831 - protein, 35 aa, Artificial Sequence; identical to SEQ ID NO: 19867
  Cyclic GFR-binding peptide
  MOD_RES (4), (5): Xaa is C or S

SEQ ID NO: 63832 - protein, 33 aa, Artificial Sequence
  Cyclic GFR-binding peptide
  MOD_RES (31), (33): Xaa is C or S
PTQLEPISVLYLDDSSNVIKFKYENMVVRAXGX

SEQ ID NO: 63833 - protein, 38 aa, Artificial Sequence; identical to SEQ ID NO: 19871
  Cyclic GFR-binding peptide
  MOD_RES (6), (7): Xaa is C or S

SEQ ID NO: 63834 - protein, 36 aa, Artificial Sequence; identical to SEQ ID NO: 19874
  Cyclic GFR-binding peptide
  MOD_RES (2), (3), (34), (36): Xaa is C or S

SEQ ID NO: 63835 - protein, 40 aa, Artificial Sequence; identical to SEQ ID NO: 19875
  Cyclic GFR-binding peptide
  MOD_RES (4), (5), (37), (39): Xaa is C or S

SEQ ID NO: 63836 - protein, 34 aa, Artificial Sequence; identical to SEQ ID NO: 19876
  Cyclic GFR-binding peptide
  MOD_RES (1), (33): Xaa is C or S

SEQ ID NO: 63837 - protein, 26 aa, Artificial Sequence
  Cyclic GFR-binding peptide
VPTKLSPISILYIDKGVVTYYKQYEG

SEQ ID NO: 63838 - protein, 27 aa, Artificial Sequence
  Cyclic GFR-binding peptide
ALSPISILYIVGRKPKVYKQYEMIVRS

SEQ ID NO: 63839 - protein, 34 aa, Artificial Sequence
  Cyclic GFR-binding peptide
  MOD_RES (4), (5): Xaa is C or S
GKAXXVPTKLSPISVLYIDDMGVPTYKQYEEGMS

SEQ ID NO: 63840 - protein, 23 aa, Artificial Sequence
  Cyclic GFR-binding peptide
QDLEPISILYLVGRTPKVKFKYE

SEQ ID NO: 63841 - protein, 30 aa, Artificial Sequence
  Cyclic GFR-binding peptide
  MOD_RES (27), (29): Xaa is C or S
SPISILYKDKGVVTYLKYHYGMAVSEXGXR

SEQ ID NO: 63842 - protein, 37 aa, Artificial Sequence; identical to SEQ ID NO: 19878
  Cyclic GFR-binding peptide
  MOD_RES (3), (4), (37): Xaa is C or S

SEQ ID NO: 63843 - protein, 26 aa, Artificial Sequence
  Cyclic GFR-binding peptide
TKLEPISVLYLDSSNNVIKFKYENMV

SEQ ID NO: 63844 - protein, 28 aa, Artificial Sequence
  Cyclic GFR-binding peptide
  MOD_RES (1), (2): Xaa is C or S
XXVPTKLSPISILYKDKGVVTYLKYHYG

SEQ ID NO: 63845 - protein, 32 aa, Artificial Sequence
  Cyclic GFR-binding peptide
  MOD_RES (6), (7): Xaa is C or S
ASASPXXVPQDLSPISILYIVGRTPKVYKQYE

SEQ ID NO: 63846 - protein, 30 aa, Artificial Sequence
  Cyclic GFR-binding peptide
  MOD_RES (28), (30): Xaa is C or S
DLEPISILYLIGKTPKIKFKYEMIVKSXKX

SEQ ID NO: 63847 - protein, 31 aa, Artificial Sequence; identical to SEQ ID NO: 19884
  Cyclic GFR-binding peptide
  MOD_RES (1), (1): Xaa is C or S

SEQ ID NO: 63848 - protein, 36 aa, Artificial Sequence; identical to SEQ ID NO: 19887
  Cyclic GFR-binding peptide
  MOD_RES (3), (4), (36): Xaa is C or S

SEQ ID NO: 63849 - protein, 36 aa, Artificial Sequence; identical to SEQ ID NO: 19888
  Cyclic GFR-binding peptide
  MOD_RES (5), (6): Xaa is C or S

SEQ ID NO: 63850 - protein, 30 aa, Artificial Sequence
  Cyclic GFR-binding peptide
  MOD_RES (28), (30): Xaa is C or S
DLSPISILYIVGRTPKVYKQYEMVVKSXKX

SEQ ID NO: 63851 - protein, 36 aa, Artificial Sequence; identical to SEQ ID NO: 19890
  Cyclic GFR-binding peptide
  MOD_RES (5), (6): Xaa is C or S

SEQ ID NO: 63852 - protein, 27 aa, Artificial Sequence
  Cyclic GFR-binding peptide
ELEPISMLYLDEYDKVVKFKYEEMVVE

SEQ ID NO: 63853 - protein, 35 aa, Artificial Sequence; identical to SEQ ID NO: 19894
  Cyclic GFR-binding peptide
  MOD_RES (1), (2), (34): Xaa is C or S

SEQ ID NO: 63854 - protein, 28 aa, Artificial Sequence
  Cyclic GFR-binding peptide
TKLEPISVLYLDDSSNVIKFKYENMVVR

SEQ ID NO: 63855 - protein, 28 aa, Artificial Sequence
  Cyclic GFR-binding peptide
  MOD_RES (1), (1): Xaa is C or S
XVPTKLEPISVLYLDDMGVPTKFKYEEG

SEQ ID NO: 63856 - protein, 39 aa, Artificial Sequence; identical to SEQ ID NO: 19895
  Cyclic GFR-binding peptide
  MOD_RES (4), (5), (37), (39): Xaa is C or S

SEQ ID NO: 63857 - protein, 21 aa, Artificial Sequence
  Cyclic GFR-binding peptide
LEPISMLYLDEYDKVVKFKYE

SEQ ID NO: 63858 - protein, 35 aa, Artificial Sequence; identical to SEQ ID NO: 19898
  Cyclic GFR-binding peptide
  MOD_RES (1), (2), (34): Xaa is C or S

SEQ ID NO: 63859 - protein, 35 aa, Artificial Sequence; identical to SEQ ID NO: 19899
  Cyclic GFR-binding peptide
  MOD_RES (1), (2), (34): Xaa is C or S

SEQ ID NO: 63860 - protein, 33 aa, Artificial Sequence
  Cyclic GFR-binding peptide
  MOD_RES (5), (6): Xaa is C or S
ASKAXXVPTKLNAISILYFDKGVVTYLKKYRGM

SEQ ID NO: 63861 - protein, 39 aa, Artificial Sequence; identical to SEQ ID NO: 19902
  Cyclic GFR-binding peptide
  MOD_RES (5), (6), (38): Xaa is C or S

SEQ ID NO: 63862 - protein, 31 aa, Artificial Sequence; identical to SEQ ID NO: 19904
  Cyclic GFR-binding peptide
  MOD_RES (1), (1): Xaa is C or S

SEQ ID NO: 63863 - protein, 33 aa, Artificial Sequence
  Cyclic GFR-binding peptide
  MOD_RES (7), (7): Xaa is C or S
HVTKPTXAPTKLSPISVLYIDDSSNVIYKQYEN

SEQ ID NO: 63864 - protein, 30 aa, Artificial Sequence
  Cyclic GFR-binding peptide
TKLSPISVLYIDDMGVPTYKQYEEGMSVAE

SEQ ID NO: 63865 - protein, 34 aa, Artificial Sequence; identical to SEQ ID NO: 19914
  Cyclic GFR-binding peptide
  MOD_RES (2), (3): Xaa is C or S

SEQ ID NO: 63866 - protein, 36 aa, Artificial Sequence; identical to SEQ ID NO: 19916
  Cyclic GFR-binding peptide
  MOD_RES (2), (3), (35): Xaa is C or S

SEQ ID NO: 63867 - protein, 29 aa, Artificial Sequence
  Cyclic GFR-binding peptide
  MOD_RES (1), (2): Xaa is C or S
XXVPQALSPISILYIVGRKPKVYKQYEMI

SEQ ID NO: 63868 - protein, 20 aa, Artificial Sequence
  Cyclic GFR-binding peptide
EPISILYLVGRKPKVKFKYE

SEQ ID NO: 63869 - protein, 29 aa, Artificial Sequence
  Cyclic GFR-binding peptide
  MOD_RES (1), (1): Xaa is C or S
XVPTKLEPISVLYLDDMGVPTKFKYEEGM

SEQ ID NO: 63870 - protein, 25 aa, Artificial Sequence
  Cyclic GFR-binding peptide
ARLSPISILYKDAANNVVLKYHYDM

SEQ ID NO: 63871 - protein, 24 aa, Artificial Sequence
  Cyclic GFR-binding peptide
QALEPISILYLVGRKPKVKFKYEM

SEQ ID NO: 63872 - protein, 41 aa, Artificial Sequence; identical to SEQ ID NO: 19924
  Cyclic GFR-binding peptide
  MOD_RES (7), (39), (41): Xaa is C or S

SEQ ID NO: 63873 - protein, 34 aa, Artificial Sequence; identical to SEQ ID NO: 19930
  Cyclic GFR-binding peptide
  MOD_RES (2), (3): Xaa is C or S

SEQ ID NO: 63874 - protein, 33 aa, Artificial Sequence
  Cyclic GFR-binding peptide
  MOD_RES (3), (4): Xaa is C or S
ASXXVPARLNAISILYFDAANNVVLKKYRDMVV

SEQ ID NO: 63875 - protein, 37 aa, Artificial Sequence; identical to SEQ ID NO: 19932
  Cyclic GFR-binding peptide
  MOD_RES (2), (3), (35), (37): Xaa is C or S

SEQ ID NO: 63876 - protein, 31 aa, Artificial Sequence
  Cyclic GFR-binding peptide
  MOD_RES (2), (3): Xaa is C or S
AXXVPTKLEPISVLYLDDMGVPTKFKYEEGM

SEQ ID NO: 63877 - protein, 26 aa, Artificial Sequence
  Cyclic GFR-binding peptide
TELSPISMLYIDENEKVVYKQYEDMV

SEQ ID NO: 63878 - protein, 33 aa, Artificial Sequence; identical to SEQ ID NO: 19935
  Cyclic GFR-binding peptide
  MOD_RES (1), (33): Xaa is C or S

SEQ ID NO: 63879 - protein, 29 aa, Artificial Sequence
  Cyclic GFR-binding peptide
  MOD_RES (1), (1): Xaa is C or S
XVSQDLEPISILYLIGKTPKIKFKYEMIV

SEQ ID NO: 63880 - protein, 34 aa, Artificial Sequence
  Cyclic GFR-binding peptide
  MOD_RES (31), (33): Xaa is C or S
PTKLSPISVLYIDDSSNVIYKQYENMVVRSXGXH

SEQ ID NO: 63881 - protein, 34 aa, Artificial Sequence; identical to SEQ ID NO: 19936
  Cyclic GFR-binding peptide
  MOD_RES (3), (4): Xaa is C or S

SEQ ID NO: 63882 - protein, 39 aa, Artificial Sequence; identical to SEQ ID NO: 19940
  Cyclic GFR-binding peptide
  MOD_RES (5), (6), (37), (39): Xaa is C or S

SEQ ID NO: 63883 - protein, 32 aa, Artificial Sequence
  Cyclic GFR-binding peptide
  MOD_RES (5), (6): Xaa is C or S
SAAPXXVPQALEPISILYLVGRKPKVKFKYEM

SEQ ID NO: 63884 - protein, 36 aa, Artificial Sequence; identical to SEQ ID NO: 19943
  Cyclic GFR-binding peptide
  MOD_RES (3), (4), (36): Xaa is C or S

SEQ ID NO: 63885 - protein, 29 aa, Artificial Sequence
  Cyclic GFR-binding peptide
PTKLSPISVLYIDDMGVPTYKQYEEGMSV

SEQ ID NO: 63886 - protein, 27 aa, Artificial Sequence
  Cyclic GFR-binding peptide
VPTKLSPISILYIDKGVVTYYKQYEGM

SEQ ID NO: 63887 - protein, 25 aa, Artificial Sequence
  Cyclic GFR-binding peptide
DLSPISILYIIGKTPKIYKQYEMIV

SEQ ID NO: 63888 - protein, 32 aa, Artificial Sequence; identical to SEQ ID NO: 19946
  Cyclic GFR-binding peptide
  MOD_RES (32), (32): Xaa is C or S

SEQ ID NO: 63889 - protein, 25 aa, Artificial Sequence
  Cyclic GFR-binding peptide
VPTKLSPISILYKDKGVVTYLKYHY

SEQ ID NO: 63890 - protein, 34 aa, Artificial Sequence; identical to SEQ ID NO: 19951
  Cyclic GFR-binding peptide
  MOD_RES (1), (2): Xaa is C or S

SEQ ID NO: 63891 - protein, 29 aa, Artificial Sequence
  Cyclic GFR-binding peptide
  MOD_RES (26), (28): Xaa is C or S
EPISILYLVGRKPKVKFKYEMIVRSXKXS

SEQ ID NO: 63892 - protein, 25 aa, Artificial Sequence
  Cyclic GFR-binding peptide
PTKLNAISILYFDKGVVTYLKKYRG

SEQ ID NO: 63893 - protein, 38 aa, Artificial Sequence; identical to SEQ ID NO: 19954
  Cyclic GFR-binding peptide
  MOD_RES (4), (36), (38): Xaa is C or S

SEQ ID NO: 63894 - protein, 31 aa, Artificial Sequence; identical to SEQ ID NO: 19955
  Cyclic GFR-binding peptide

SEQ ID NO: 63895 - protein, 28 aa, Artificial Sequence
  Cyclic GFR-binding peptide
  MOD_RES (2), (3): Xaa is C or S
PXXVSQDLEPISILYLIGKTPKIKFKYE

SEQ ID NO: 63896 - protein, 30 aa, Artificial Sequence
  Cyclic GFR-binding peptide
  MOD_RES (30), (30): Xaa is C or S
TQLEPISVLYLDDSSNVIKFKYENMVVRAX

SEQ ID NO: 63897 - protein, 28 aa, Artificial Sequence
  Cyclic GFR-binding peptide
PTKLEPISVLYLDSSNNVIKFKYENMVV

SEQ ID NO: 63898 - protein, 38 aa, Artificial Sequence; identical to SEQ ID NO: 19959
  Cyclic GFR-binding peptide
  MOD_RES (6), (7): Xaa is C or S

SEQ ID NO: 63899 - protein, 32 aa, Artificial Sequence
  Cyclic GFR-binding peptide
  MOD_RES (29), (31): Xaa is C or S
KLSPISILYKDKGVVTYLKYHYGMAVSEXGXR

SEQ ID NO: 63900 - protein, 35 aa, Artificial Sequence; identical to SEQ ID NO: 19960
  Cyclic GFR-binding peptide
  MOD_RES (4), (5): Xaa is C or S

SEQ ID NO: 63901 - protein, 25 aa, Artificial Sequence
  Cyclic GFR-binding peptide
TKLSPISVLYIDDMGVPTYKQYEEG

SEQ ID NO: 63902 - protein, 31 aa, Artificial Sequence
  Cyclic GFR-binding peptide
  MOD_RES (30), (30): Xaa is C or S
ARLEPISILYLDAANNVVKFKYEDMVVEAXG

SEQ ID NO: 63903 - protein, 33 aa, Artificial Sequence
  Cyclic GFR-binding peptide
  MOD_RES (6), (7): Xaa is C or S
AAPASXXVPARLSPISILYKDAANNVVLKYHYD

SEQ ID NO: 63904 - protein, 31 aa, Artificial Sequence; identical to SEQ ID NO: 19964
  Cyclic GFR-binding peptide

SEQ ID NO: 63905 - protein, 38 aa, Artificial Sequence; identical to SEQ ID NO: 19969
  Cyclic GFR-binding peptide
  MOD_RES (4), (5), (37): Xaa is C or S

SEQ ID NO: 63906 - protein, 40 aa, Artificial Sequence; identical to SEQ ID NO: 19970
  Cyclic GFR-binding peptide
  MOD_RES (6), (7), (39): Xaa is C or S

SEQ ID NO: 63907 - protein, 29 aa, Artificial Sequence
  Cyclic GFR-binding peptide
  MOD_RES (3), (4): Xaa is C or S
ASXXVPARLSPISILYKDAANNVVLKYHY

SEQ ID NO: 63908 - protein, 24 aa, Artificial Sequence
  Cyclic GFR-binding peptide
RLNAISILYFDAANNVVLKKYRDM

SEQ ID NO: 63909 - protein, 37 aa, Artificial Sequence; identical to SEQ ID NO: 19973
  Cyclic GFR-binding peptide
  MOD_RES (3), (4), (36): Xaa is C or S

SEQ ID NO: 63910 - protein, 26 aa, Artificial Sequence
  Cyclic GFR-binding peptide
  MOD_RES (1), (1): Xaa is C or S
XVPARLSPISILYKDAANNVVLKYHY

SEQ ID NO: 63911 - protein, 29 aa, Artificial Sequence
  Cyclic GFR-binding peptide
  MOD_RES (27), (29): Xaa is C or S
SPISMLYIDENEKVVYKQYEDMVVEGXGX

SEQ ID NO: 63912 - protein, 28 aa, Artificial Sequence
  Cyclic GFR-binding peptide
  MOD_RES (1), (1): Xaa is C or S
XVPQALSPISILYIVGRKPKVYKQYEMI

SEQ ID NO: 63913 - protein, 37 aa, Artificial Sequence; identical to SEQ ID NO: 19982
  Cyclic GFR-binding peptide
  MOD_RES (6), (7): Xaa is C or S

SEQ ID NO: 63914 - protein, 32 aa, Artificial Sequence
  Cyclic GFR-binding peptide
  MOD_RES (2), (3): Xaa is C or S
AXXVPTKLSPISILYIDKGVVTYYKQYEGMAV

SEQ ID NO: 63915 - protein, 39 aa, Artificial Sequence; identical to SEQ ID NO: 19987
  Cyclic GFR-binding peptide
  MOD_RES (5), (6), (38): Xaa is C or S

SEQ ID NO: 63916 - protein, 31 aa, Artificial Sequence
  Cyclic GFR-binding peptide
  MOD_RES (5), (5): Xaa is C or S
TKPTXAPTKLEPISVLYLDDSSNVIKFKYEN

SEQ ID NO: 63917 - protein, 27 aa, Artificial Sequence
  Cyclic GFR-binding peptide
  MOD_RES (1), (2): Xaa is C or S
XXAPTKLEPISVLYLDSSNNVIKFKYE

SEQ ID NO: 63918 - protein, 35 aa, Artificial Sequence; identical to SEQ ID NO: 19992
  Cyclic GFR-binding peptide
  MOD_RES (4), (5): Xaa is C or S

SEQ ID NO: 63919 - protein, 35 aa, Artificial Sequence
  Cyclic GFR-binding peptide
  MOD_RES (5), (6): Xaa is C or S
ASKAXXVPTKLNAISILYFDKGVVTYLKKYRGMAV

SEQ ID NO: 63920 - protein, 28 aa, Artificial Sequence
  Cyclic GFR-binding peptide
  MOD_RES (1), (2): Xaa is C or S
XXVPTKLSPISVLYIDDMGVPTYKQYEE

SEQ ID NO: 63921 - protein, 30 aa, Artificial Sequence
  Cyclic GFR-binding peptide
PTELSPISMLYIDENEKVVYKQYEDMVVEG

SEQ ID NO: 63922 - protein, 29 aa, Artificial Sequence
  Cyclic GFR-binding peptide
  MOD_RES (29), (29): Xaa is C or S
ELSPISMLYIDEYDKVVYKQYEEMVVEGX

SEQ ID NO: 63923 - protein, 39 aa, Artificial Sequence; identical to SEQ ID NO: 19996
  Cyclic GFR-binding peptide
  MOD_RES (3), (4), (36), (38): Xaa is C or S

SEQ ID NO: 63924 - protein, 33 aa, Artificial Sequence; identical to SEQ ID NO: 19997
  Cyclic GFR-binding peptide
  MOD_RES (32), (32): Xaa is C or S

SEQ ID NO: 63925 - protein, 37 aa, Artificial Sequence; identical to SEQ ID NO: 20000
  Cyclic GFR-binding peptide
  MOD_RES (1), (2), (34), (36): Xaa is C or S

SEQ ID NO: 63926 - protein, 28 aa, Artificial Sequence
  Cyclic GFR-binding peptide
  MOD_RES (28), (28): Xaa is C or S
LSPISMLYIDENEKVVYKQYEDMVVEGX

SEQ ID NO: 63927 - protein, 32 aa, Artificial Sequence
  Cyclic GFR-binding peptide
  MOD_RES (30), (32): Xaa is C or S
TELEPISMLYLDEYDKVVKFKYEEMVVEGXGX

SEQ ID NO: 63928 - protein, 28 aa, Artificial Sequence
  Cyclic GFR-binding peptide
  MOD_RES (27), (27): Xaa is C or S
EPISVLYLDSSNNVIKFKYENMVVKAXG

SEQ ID NO: 63929 - protein, 34 aa, Artificial Sequence; identical to SEQ ID NO: 20005
  Cyclic GFR-binding peptide
  MOD_RES (1), (2), (33): Xaa is C or S

SEQ ID NO: 63930 - protein, 32 aa, Artificial Sequence
  Cyclic GFR-binding peptide
  MOD_RES (4), (5): Xaa is C or S
PASXXVPARLNAISILYFDAANNVVLKKYRDM

SEQ ID NO: 63931 - protein, 35 aa, Artificial Sequence; identical to SEQ ID NO: 20012
  Cyclic GFR-binding peptide
  MOD_RES (1), (32), (34): Xaa is C or S

SEQ ID NO: 63932 - protein, 30 aa, Artificial Sequence
  Cyclic GFR-binding peptide
  MOD_RES (1), (2): Xaa is C or S
XXAPTQLSPISVLYIDDSSNVIYKQYENMV

SEQ ID NO: 63933 - protein, 33 aa, Artificial Sequence
  Cyclic GFR-binding peptide
  MOD_RES (6), (7): Xaa is C or S
AVPKAXXAPTKLEPISVLYLDSSNNVIKFKYEN

SEQ ID NO: 63934 - protein, 26 aa, Artificial Sequence
  Cyclic GFR-binding peptide
TELEPISMLYLDEYDKVVKFKYEEMV

SEQ ID NO: 63935 - protein, 33 aa, Artificial Sequence
  Cyclic GFR-binding peptide
  MOD_RES (30), (32): Xaa is C or S
ARLEPISILYLDAANNVVKFKYEDMVVEAXGXR

SEQ ID NO: 63936 - protein, 28 aa, Artificial Sequence
  Cyclic GFR-binding peptide
KLSPISVLYIDDMGVPTYKQYEEGMSVA

SEQ ID NO: 63937 - protein, 40 aa, Artificial Sequence; identical to SEQ ID NO: 20014
  Cyclic GFR-binding peptide
  MOD_RES (5), (6), (39): Xaa is C or S

SEQ ID NO: 63938 - protein, 31 aa, Artificial Sequence
  Cyclic GFR-binding peptide
  MOD_RES (5), (6): Xaa is C or S
SAAPXXVPQALSPISILYIVGRKPKVYKQYE

SEQ ID NO: 63939 - protein, 34 aa, Artificial Sequence
  Cyclic GFR-binding peptide
  MOD_RES (5), (6): Xaa is C or S
ASKAXXVPTKLSPISILYKDKGVVTYLKYHYGMA

SEQ ID NO: 63940 - protein, 29 aa, Artificial Sequence
  Cyclic GFR-binding peptide
VPQDLSPISILYIVGRTPKVYKQYEMVVK

SEQ ID NO: 63941 - protein, 25 aa, Artificial Sequence
  Cyclic GFR-binding peptide
QDLEPISILYLIGKTPKIKFKYEMI

SEQ ID NO: 63942 - protein, 35 aa, Artificial Sequence
  Cyclic GFR-binding peptide
  MOD_RES (5), (6): Xaa is C or S
IPKAXXVPTELSPISMLYIDENEKVVYKQYEDMVV

SEQ ID NO: 63943 - protein, 30 aa, Artificial Sequence
  Cyclic GFR-binding peptide
  MOD_RES (28), (30): Xaa is C or S
LNAISILYFDAANNVVLKKYRDMVVEAXGX

SEQ ID NO: 63944 - protein, 27 aa, Artificial Sequence
  Cyclic GFR-binding peptide
LEPISVLYLDDSSNVIKFKYENMVVRA

SEQ ID NO: 63945 - protein, 39 aa, Artificial Sequence; identical to SEQ ID NO: 20023
  Cyclic GFR-binding peptide
  MOD_RES (5), (6), (38): Xaa is C or S

SEQ ID NO: 63946 - protein, 31 aa, Artificial Sequence
  Cyclic GFR-binding peptide
  MOD_RES (30), (30): Xaa is C or S
SQDLEPISILYLIGKTPKIKFKYEMIVKSXK

SEQ ID NO: 63947 - protein, 34 aa, Artificial Sequence
  Cyclic GFR-binding peptide
  MOD_RES (3), (4): Xaa is C or S
KAXXVPTKLEPISVLYLDDMGVPTKFKYEEGMSV

SEQ ID NO: 63948 - protein, 38 aa, Artificial Sequence; identical to SEQ ID NO: 20027
  Cyclic GFR-binding peptide
  MOD_RES (2), (3), (35), (37): Xaa is C or S

SEQ ID NO: 63949 - protein, 25 aa, Artificial Sequence
  Cyclic GFR-binding peptide
VPARLSPISILYKDAANNVVLKYHY

SEQ ID NO: 63950 - protein, 22 aa, Artificial Sequence
  Cyclic GFR-binding peptide
LEPISVLYLDDMGVPTKFKYEE

SEQ ID NO: 63951 - protein, 35 aa, Artificial Sequence
  Cyclic GFR-binding peptide
  MOD_RES (5), (6): Xaa is C or S
VPKPXXAPTQLEPISVLYLDDSSNVIKFKYENMVV

SEQ ID NO: 63952 - protein, 23 aa, Artificial Sequence
  Cyclic GFR-binding peptide
ALSPISILYIVGRKPKVYKQYEM

SEQ ID NO: 63953 - protein, 29 aa, Artificial Sequence
  Cyclic GFR-binding peptide
  MOD_RES (1), (2): Xaa is C or S
XXAPTKLSPISVLYIDSSNNVIYKQYENM

SEQ ID NO: 63954 - protein, 26 aa, Artificial Sequence
  Cyclic GFR-binding peptide
SPISMLYIDENEKVVYKQYEDMVVEG

SEQ ID NO: 63955 - protein, 31 aa, Artificial Sequence
  Cyclic GFR-binding peptide
  MOD_RES (28), (30): Xaa is C or S
LEPISVLYLDSSNNVIKFKYENMVVKAXGXH

SEQ ID NO: 63956 - protein, 25 aa, Artificial Sequence
  Cyclic GFR-binding peptide
TQLEPISVLYLDDSSNVIKFKYENM

SEQ ID NO: 63957 - protein, 27 aa, Artificial Sequence
  Cyclic GFR-binding peptide
TQLSPISVLYIDDSSNVIYKQYENMVV

SEQ ID NO: 63958 - protein, 36 aa, Artificial Sequence; identical to SEQ ID NO: 20039
  Cyclic GFR-binding peptide
  MOD_RES (5), (6): Xaa is C or S

SEQ ID NO: 63959 - protein, 38 aa, Artificial Sequence; identical to SEQ ID NO: 20041
  Cyclic GFR-binding peptide
  MOD_RES (5), (6), (38): Xaa is C or S

SEQ ID NO: 63960 - protein, 28 aa, Artificial Sequence
  Cyclic GFR-binding peptide
VPARLEPISILYLDAANNVVKFKYEDMV

SEQ ID NO: 63961 - protein, 30 aa, Artificial Sequence
  Cyclic GFR-binding peptide
  MOD_RES (27), (29): Xaa is C or S
EPISVLYLDDSSNVIKFKYENMVVRSXGXH

SEQ ID NO: 63962 - protein, 23 aa, Artificial Sequence
  Cyclic GFR-binding peptide
TKLEPISVLYLDDMGVPTKFKYE

SEQ ID NO: 63963 - protein, 34 aa, Artificial Sequence; identical to SEQ ID NO: 20043
  Cyclic GFR-binding peptide
  MOD_RES (32), (34): Xaa is C or S

SEQ ID NO: 63964 - protein, 29 aa, Artificial Sequence
  Cyclic GFR-binding peptide
  MOD_RES (3), (4): Xaa is C or S
KAXXVPTELEPISMLYLDENEKVVKFKYE

SEQ ID NO: 63965 - protein, 31 aa, Artificial Sequence
  Cyclic GFR-binding peptide
  MOD_RES (2), (3): Xaa is C or S
AXXVPTKLNAISILYFDKGVVTYLKKYRGMA

SEQ ID NO: 63966 - protein, 35 aa, Artificial Sequence
  Cyclic GFR-binding peptide
  MOD_RES (5), (6): Xaa is C or S
SASPXXVSQDLSPISILYIIGKTPKIYKQYEMIVK

SEQ ID NO: 63967 - protein, 36 aa, Artificial Sequence; identical to SEQ ID NO: 20052
  Cyclic GFR-binding peptide
  MOD_RES (3), (4), (36): Xaa is C or S

SEQ ID NO: 63968 - protein, 36 aa, Artificial Sequence; identical to SEQ ID NO: 20056
  Cyclic GFR-binding peptide
  MOD_RES (1), (2), (34), (36): Xaa is C or S

SEQ ID NO: 63969 - protein, 33 aa, Artificial Sequence; identical to SEQ ID NO: 20057
  Cyclic GFR-binding peptide
  MOD_RES (1), (33): Xaa is C or S

SEQ ID NO: 63970 - protein, 32 aa, Artificial Sequence
  Cyclic GFR-binding peptide
  MOD_RES (2), (3): Xaa is C or S
AXXVPTKLSPISILYKDKGVVTYLKYHYGMAV

SEQ ID NO: 63971 - protein, 38 aa, Artificial Sequence; identical to SEQ ID NO: 20062
  Cyclic GFR-binding peptide
  MOD_RES (3), (4), (37): Xaa is C or S

SEQ ID NO: 63972 - protein, 26 aa, Artificial Sequence
  Cyclic GFR-binding peptide
TKLSPISVLYIDDMGVPTYKQYEEGM

SEQ ID NO: 63973 - protein, 31 aa, Artificial Sequence; identical to SEQ ID NO: 20065
  Cyclic GFR-binding peptide
  MOD_RES (1), (1): Xaa is C or S

SEQ ID NO: 63974 - protein, 22 aa, Artificial Sequence
  Cyclic GFR-binding peptide
LEPISVLYLDDSSNVIKFKYEN

SEQ ID NO: 63975 - protein, 29 aa, Artificial Sequence
  Cyclic GFR-binding peptide
  MOD_RES (27), (29): Xaa is C or S
LEPISILYLVGRTPKVKFKYEMVVKSXKX

SEQ ID NO: 63976 - protein, 33 aa, Artificial Sequence
  Cyclic GFR-binding peptide
  MOD_RES (31), (33): Xaa is C or S
TKLEPISVLYLDDMGVPTKFKYEEGMSVAEXGX

SEQ ID NO: 63977 - protein, 21 aa, Artificial Sequence
  Cyclic GFR-binding peptide
EPISILYLVGRTPKVKFKYEM

SEQ ID NO: 63978 - protein, 24 aa, Artificial Sequence
  Cyclic GFR-binding peptide
EPISILYLDAANNVVKFKYEDMVV

SEQ ID NO: 63979 - protein, 27 aa, Artificial Sequence
  Cyclic GFR-binding peptide
PTELSPISMLYIDEYDKVVYKQYEEMV

SEQ ID NO: 63980 - protein, 41 aa, Artificial Sequence; identical to SEQ ID NO: 20079
  Cyclic GFR-binding peptide
  MOD_RES (6), (7), (38), (40): Xaa is C or S

SEQ ID NO: 63981 - protein, 39 aa, Artificial Sequence; identical to SEQ ID NO: 20080
  Cyclic GFR-binding peptide
  MOD_RES (3), (4), (36), (38): Xaa is C or S

SEQ ID NO: 63982 - protein, 34 aa, Artificial Sequence; identical to SEQ ID NO: 20082
  Cyclic GFR-binding peptide
  MOD_RES (1), (32), (34): Xaa is C or S

SEQ ID NO: 63983 - protein, 34 aa, Artificial Sequence; identical to SEQ ID NO: 20083
  Cyclic GFR-binding peptide
  MOD_RES (32), (34): Xaa is C or S

SEQ ID NO: 63984 - protein, 41 aa, Artificial Sequence; identical to SEQ ID NO: 20085
  Cyclic GFR-binding peptide
  MOD_RES (5), (6), (38), (40): Xaa is C or S

SEQ ID NO: 63985 - protein, 33 aa, Artificial Sequence
  Cyclic GFR-binding peptide
  MOD_RES (31), (33): Xaa is C or S
PTKLSPISILYKDKGVVTYLKYHYGMAVSEXGX

SEQ ID NO: 63986 - protein, 29 aa, Artificial Sequence
  Cyclic GFR-binding peptide
SPISVLYIDDMGVPTYKQYEAAAAAAAAA

SEQ ID NO: 63987 - protein, 31 aa, Artificial Sequence
  Cyclic GFR-binding peptide
  MOD_RES (5), (6): Xaa is C or S
SASPXXVSQDLEPISILYLIGKTPKIKFKYE

SEQ ID NO: 63988 - protein, 33 aa, Artificial Sequence
  Cyclic GFR-binding peptide
  MOD_RES (30), (32): Xaa is C or S
PQDLEPISILYLVGRTPKVKFKYEMVVKSXKXS

SEQ ID NO: 63989 - protein, 34 aa, Artificial Sequence
  Cyclic GFR-binding peptide
  MOD_RES (5), (6): Xaa is C or S
VPKAXXAPTKLEPISVLYLDSSNNVIKFKYENMV

SEQ ID NO: 63990 - protein, 36 aa, Artificial Sequence; identical to SEQ ID NO: 20087
  Cyclic GFR-binding peptide
  MOD_RES (4), (5): Xaa is C or S

SEQ ID NO: 63991 - protein, 22 aa, Artificial Sequence
  Cyclic GFR-binding peptide
KLEPISVLYLDDSSNVIKFKYE

SEQ ID NO: 63992 - protein, 40 aa, Artificial Sequence; identical to SEQ ID NO: 20089
  Cyclic GFR-binding peptide
  MOD_RES (4), (5), (37), (39): Xaa is C or S

SEQ ID NO: 63993 - protein, 32 aa, Artificial Sequence; identical to SEQ ID NO: 20090
  Cyclic GFR-binding peptide
  MOD_RES (1), (1): Xaa is C or S

SEQ ID NO: 63994 - protein, 38 aa, Artificial Sequence; identical to SEQ ID NO: 20094
  Cyclic GFR-binding peptide
  MOD_RES (5), (6), (38): Xaa is C or S

SEQ ID NO: 63995 - protein, 25 aa, Artificial Sequence
  Cyclic GFR-binding peptide
NAISILYFDKGVVTYLKKYRGMAVS

SEQ ID NO: 63996 - protein, 30 aa, Artificial Sequence
  Cyclic GFR-binding peptide
  MOD_RES (28), (30): Xaa is C or S
LSPISVLYIDDSSNVIYKQYENMVVRAXGX

SEQ ID NO: 63997 - protein, 33 aa, Artificial Sequence
  Cyclic GFR-binding peptide
  MOD_RES (4), (5): Xaa is C or S
PKPXXAPTQLSPISVLYIDDSSNVIYKQYENMV

SEQ ID NO: 63998 - protein, 33 aa, Artificial Sequence; identical to SEQ ID NO: 20095
  Cyclic GFR-binding peptide
  MOD_RES (33), (33): Xaa is C or S

SEQ ID NO: 63999 - protein, 33 aa, Artificial Sequence
  Cyclic GFR-binding peptide
  MOD_RES (5), (6): Xaa is C or S
SASPXXVPQDLSPISILYIVGRTPKVYKQYEMV

SEQ ID NO: 64000 - protein, 28 aa, Artificial Sequence
  Cyclic GFR-binding peptide
  MOD_RES (27), (27): Xaa is C or S
LEPISILYLVGRTPKVKFKYEMVVKSXK

SEQ ID NO: 64001 - protein, 33 aa, Artificial Sequence
  Cyclic GFR-binding peptide
  MOD_RES (3), (4): Xaa is C or S
KAXXVPTELEPISMLYLDEYDKVVKFKYEEMVV

SEQ ID NO: 64002 - protein, 26 aa, Artificial Sequence
  Cyclic GFR-binding peptide
LNAISILYFDKGVVTYLKKYRGMAVS

SEQ ID NO: 64003 - protein, 33 aa, Artificial Sequence
  Cyclic GFR-binding peptide
  MOD_RES (30), (32): Xaa is C or S
ARLNAISILYFDAANNVVLKKYRDMVVEAXGXR

SEQ ID NO: 64004 - protein, 32 aa, Artificial Sequence
  Cyclic GFR-binding peptide
  MOD_RES (30), (32): Xaa is C or S
KLSPISVLYIDDMGVPTYKQYEEGMSVAEXGX

SEQ ID NO: 64005 - protein, 31 aa, Artificial Sequence
  Cyclic GFR-binding peptide
  MOD_RES (5), (6): Xaa is C or S
VGKAXXVPTKLSPISVLYIDDMGVPTYKQYE

SEQ ID NO: 64006 - protein, 37 aa, Artificial Sequence; identical to SEQ ID NO: 20100
  Cyclic GFR-binding peptide
  MOD_RES (2), (3), (35), (37): Xaa is C or S

SEQ ID NO: 64007 - protein, 35 aa, Artificial Sequence; identical to SEQ ID NO: 20099
  Cyclic GFR-binding peptide
  MOD_RES (2), (3): Xaa is C or S

SEQ ID NO: 64008 - protein, 28 aa, Artificial Sequence
  Cyclic GFR-binding peptide
QALSPISILYIVGRKPKVYKQYEMIVRS

SEQ ID NO: 64009 - protein, 41 aa, Artificial Sequence; identical to SEQ ID NO: 20101
  Cyclic GFR-binding peptide
  MOD_RES (5), (6), (39), (41): Xaa is C or S

SEQ ID NO: 64010 - protein, 42 aa, Artificial Sequence; identical to SEQ ID NO: 20104
  Cyclic GFR-binding peptide
  MOD_RES (7), (39), (41): Xaa is C or S

SEQ ID NO: 64011 - protein, 23 aa, Artificial Sequence
  Cyclic GFR-binding peptide
ELSPISMLYIDEYDKVVYKQYEE

SEQ ID NO: 64012 - protein, 26 aa, Artificial Sequence
  Cyclic GFR-binding peptide
  MOD_RES (1), (1): Xaa is C or S
XVPTELSPISMLYIDEYDKVVYKQYE

SEQ ID NO: 64013 - protein, 27 aa, Artificial Sequence
  Cyclic GFR-binding peptide
QALEPISILYLVGRKPKVKFKYEMIVR

SEQ ID NO: 64014 - protein, 26 aa, Artificial Sequence
  Cyclic GFR-binding peptide
  MOD_RES (1), (1): Xaa is C or S
XVPARLNAISILYFDAANNVVLKKYR

SEQ ID NO: 64015 - protein, 38 aa, Artificial Sequence; identical to SEQ ID NO: 20108
  Cyclic GFR-binding peptide
  MOD_RES (6), (38): Xaa is C or S

SEQ ID NO: 64016 - protein, 40 aa, Artificial Sequence; identical to SEQ ID NO: 20113
  Cyclic GFR-binding peptide
  MOD_RES (6), (7), (39): Xaa is C or S

SEQ ID NO: 64017 - protein, 32 aa, Artificial Sequence
  Cyclic GFR-binding peptide
  MOD_RES (29), (31): Xaa is C or S
KLEPISVLYLDDSSNVIKFKYENMVVRSXGXH

SEQ ID NO: 64018 - protein, 29 aa, Artificial Sequence
  Cyclic GFR-binding peptide
  MOD_RES (1), (2): Xaa is C or S
XXVPTKLEPISVLYLDDMGVPTKFKYEEG

SEQ ID NO: 64019 - protein, 31 aa, Artificial Sequence; identical to SEQ ID NO: 20114
  Cyclic GFR-binding peptide

SEQ ID NO: 64020 - protein, 34 aa, Artificial Sequence; identical to SEQ ID NO: 20115
  Cyclic GFR-binding peptide
  MOD_RES (32), (34): Xaa is C or S

SEQ ID NO: 64021 - protein, 29 aa, Artificial Sequence
  Cyclic GFR-binding peptide
  MOD_RES (1), (2): Xaa is C or S
XXVPTELEPISMLYLDEYDKVVKFKYEEM

SEQ ID NO: 64022 - protein, 26 aa, Artificial Sequence
  Cyclic GFR-binding peptide
VSQDLEPISILYLIGKTPKIKFKYEM

SEQ ID NO: 64023 - protein, 23 aa, Artificial Sequence
  Cyclic GFR-binding peptide
QLEPISVLYLDDSSNVIKFKYEN

SEQ ID NO: 64024 - protein, 33 aa, Artificial Sequence; identical to SEQ ID NO: 20120
  Cyclic GFR-binding peptide
  MOD_RES (32), (32): Xaa is C or S

SEQ ID NO: 64025 - protein, 28 aa, Artificial Sequence
  Cyclic GFR-binding peptide
  MOD_RES (1), (1): Xaa is C or S
XAPTKLSPISVLYIDSSNNVIYKQYENM

SEQ ID NO: 64026 - protein, 34 aa, Artificial Sequence; identical to SEQ ID NO: 20122
  Cyclic GFR-binding peptide
  MOD_RES (1), (2), (34): Xaa is C or S

SEQ ID NO: 64027 - protein, 27 aa, Artificial Sequence
  Cyclic GFR-binding peptide
PTKLSPISILYIDKGVVTYYKQYEGMA

SEQ ID NO: 64028 - protein, 23 aa, Artificial Sequence
  Cyclic GFR-binding peptide
LSPISILYIDKGVVTYYKQYEGM

SEQ ID NO: 64029 - protein, 30 aa, Artificial Sequence
  Cyclic GFR-binding peptide
  MOD_RES (29), (29): Xaa is C or S
QALEPISILYLVGRKPKVKFKYEMIVRSXK

SEQ ID NO: 64030 - protein, 31 aa, Artificial Sequence
  Cyclic GFR-binding peptide
  MOD_RES (28), (30): Xaa is C or S
SPISVLYIDDMGVPTYKQYEEGMSVAEXGXR

SEQ ID NO: 64031 - protein, 29 aa, Artificial Sequence
  Cyclic GFR-binding peptide
  MOD_RES (1), (1): Xaa is C or S
XVPTKLSPISILYIDKGVVTYYKQYEGMA

SEQ ID NO: 64032 - protein, 25 aa, Artificial Sequence
  Cyclic GFR-binding peptide
PTELEPISMLYLDENEKVVKFKYED

SEQ ID NO: 64033 - protein, 27 aa, Artificial Sequence
  Cyclic GFR-binding peptide
SPISVLYIDDMGVPTYKQYEEGMSVAE

SEQ ID NO: 64034 - protein, 31 aa, Artificial Sequence
  Cyclic GFR-binding peptide
  MOD_RES (29), (31): Xaa is C or S
KLSPISILYKDKGVVTYLKYHYGMAVSEXGX

SEQ ID NO: 64035 - protein, 25 aa, Artificial Sequence
  Cyclic GFR-binding peptide
ELSPISMLYIDEYDKVVYKQYEEMV

SEQ ID NO: 64036 - protein, 37 aa, Artificial Sequence
  Cyclic GFR-binding peptide
  MOD_RES (6), (7): Xaa is C or S
KVGKAXXVPTKLEPISVLYLDDMGVPTKFKYEEGMSV

SEQ ID NO: 64037 - protein, 40 aa, Artificial Sequence; identical to SEQ ID NO: 20135
  Cyclic GFR-binding peptide
  MOD_RES (6), (7), (38), (40): Xaa is C or S

SEQ ID NO: 64038 - protein, 25 aa, Artificial Sequence
  Cyclic GFR-binding peptide
LEPISVLYLDSSNNVIKFKYENMVV

SEQ ID NO: 64039 - protein, 41 aa, Artificial Sequence; identical to SEQ ID NO: 20139
  Cyclic GFR-binding peptide
  MOD_RES (6), (7), (39), (41): Xaa is C or S

SEQ ID NO: 64040 - protein, 30 aa, Artificial Sequence
  Cyclic GFR-binding peptide
  MOD_RES (1), (2): Xaa is C or S
XXVPARLEPISILYLDAANNVVKFKYEDMV

SEQ ID NO: 64041 - protein, 35 aa, Artificial Sequence; identical to SEQ ID NO: 20142
  Cyclic GFR-binding peptide
  MOD_RES (2), (34): Xaa is C or S

SEQ ID NO: 64042 - protein, 32 aa, Artificial Sequence
  Cyclic GFR-binding peptide
  MOD_RES (5), (6): Xaa is C or S
VGKAXXVPTKLEPISVLYLDDMGVPTKFKYEE

SEQ ID NO: 64043 - protein, 28 aa, Artificial Sequence
  Cyclic GFR-binding peptide
  MOD_RES (2), (3): Xaa is C or S
AXXVPTELSPISMLYIDEYDKVVYKQYE

SEQ ID NO: 64044 - protein, 30 aa, Artificial Sequence
  Cyclic GFR-binding peptide
  MOD_RES (29), (29): Xaa is C or S
QDLSPISILYIVGRTPKVYKQYEMVVKSXK

SEQ ID NO: 64045 - protein, 31 aa, Artificial Sequence
  Cyclic GFR-binding peptide
  MOD_RES (1), (2): Xaa is C or S
XXAPTKLSPISVLYIDDSSNVIYKQYENMVV

SEQ ID NO: 64046 - protein, 31 aa, Artificial Sequence; identical to SEQ ID NO: 20147
  Cyclic GFR-binding peptide
  MOD_RES (1), (1): Xaa is C or S

SEQ ID NO: 64047 - protein, 31 aa, Artificial Sequence
  Cyclic GFR-binding peptide
  MOD_RES (30), (30): Xaa is C or S
TQLEPISVLYLDDSSNVIKFKYENMVVRAXG

SEQ ID NO: 64048 - protein, 31 aa, Artificial Sequence
  Cyclic GFR-binding peptide
  MOD_RES (28), (30): Xaa is C or S
LEPISVLYLDDSSNVIKFKYENMVVRAXGXH

SEQ ID NO: 64049 - protein, 33 aa, Artificial Sequence; identical to SEQ ID NO: 20149
  Cyclic GFR-binding peptide
  MOD_RES (2), (3): Xaa is C or S

SEQ ID NO: 64050 - protein, 25 aa, Artificial Sequence
  Cyclic GFR-binding peptide
EPISVLYLDDMGVPTKFKYEEGMSV

SEQ ID NO: 64051 - protein, 30 aa, Artificial Sequence
  Cyclic GFR-binding peptide
  MOD_RES (27), (29): Xaa is C or S
NAISILYFDKGVVTYLKKYRGMAVSEXGXR

SEQ ID NO: 64052 - protein, 35 aa, Artificial Sequence; identical to SEQ ID NO: 20154
  Cyclic GFR-binding peptide
  MOD_RES (1), (33), (35): Xaa is C or S

SEQ ID NO: 64053 - protein, 30 aa, Artificial Sequence; identical to SEQ ID NO: 20155
  Cyclic GFR-binding peptide

SEQ ID NO: 64054 - protein, 33 aa, Artificial Sequence
  Cyclic GFR-binding peptide
  MOD_RES (3), (4): Xaa is C or S
SPXXVSQDLSPISILYIIGKTPKIYKQYEMIVK

SEQ ID NO: 64055 - protein, 26 aa, Artificial Sequence
  Cyclic GFR-binding peptide
LEPISMLYLDEYDKVVKFKYEEMVVE

SEQ ID NO: 64056 - protein, 33 aa, Artificial Sequence
  Cyclic GFR-binding peptide
  MOD_RES (6), (7): Xaa is C or S
TVPKPXXAPTQLSPISVLYIDDSSNVIYKQYEN

SEQ ID NO: 64057 - protein, 30 aa, Artificial Sequence
  Cyclic GFR-binding peptide
  MOD_RES (27), (29): Xaa is C or S
SPISMLYIDEYDKVVYKQYEEMVVEGXGXR

SEQ ID NO: 64058 - protein, 27 aa, Artificial Sequence
  Cyclic GFR-binding peptide
LEPISVLYLDDSSNVIKFKYENMVVRS

SEQ ID NO: 64059 - protein, 33 aa, Artificial Sequence
  Cyclic GFR-binding peptide
  MOD_RES (4), (5): Xaa is C or S
GKAXXVPTKLSPISVLYIDDMGVPTYKQYEEGM

SEQ ID NO: 64060 - protein, 23 aa, Artificial Sequence
  Cyclic GFR-binding peptide
SPISILYKDKGVVTYLKYHYGMA

SEQ ID NO: 64061 - protein, 29 aa, Artificial Sequence
  Cyclic GFR-binding peptide
EPISMLYLDEYDKVVKFKYEAAAAAAAAA

SEQ ID NO: 64062 - protein, 32 aa, Artificial Sequence
  Cyclic GFR-binding peptide
  MOD_RES (31), (31): Xaa is C or S
PTKLSPISILYIDKGVVTYYKQYEGMAVSEXG

SEQ ID NO: 64063 - protein, 31 aa, Artificial Sequence
  Cyclic GFR-binding peptide
  MOD_RES (4), (5): Xaa is C or S
PKAXXVPTELSPISMLYIDENEKVVYKQYED

SEQ ID NO: 64064 - protein, 34 aa, Artificial Sequence; identical to SEQ ID NO: 20166
  Cyclic GFR-binding peptide
  MOD_RES (1), (2), (34): Xaa is C or S

SEQ ID NO: 64065 - protein, 29 aa, Artificial Sequence
  Cyclic GFR-binding peptide
APTKLSPISVLYIDSSNNVIYKQYENMVV

SEQ ID NO: 64066 - protein, 38 aa, Artificial Sequence; identical to SEQ ID NO: 20170
  Cyclic GFR-binding peptide
  MOD_RES (4), (5), (37): Xaa is C or S

SEQ ID NO: 64067 - protein, 24 aa, Artificial Sequence
  Cyclic GFR-binding peptide
PARLSPISILYKDAANNVVLKYHY

SEQ ID NO: 64068 - protein, 37 aa, Artificial Sequence; identical to SEQ ID NO: 20179
  Cyclic GFR-binding peptide
  MOD_RES (6), (7): Xaa is C or S

SEQ ID NO: 64069 - protein, 37 aa, Artificial Sequence; identical to SEQ ID NO: 20180
  Cyclic GFR-binding peptide
  MOD_RES (1), (34), (36): Xaa is C or S

SEQ ID NO: 64070 - protein, 23 aa, Artificial Sequence
  Cyclic GFR-binding peptide
LNAISILYFDAANNVVLKKYRDM

SEQ ID NO: 64071 - protein, 30 aa, Artificial Sequence
  Cyclic GFR-binding peptide
  MOD_RES (3), (4): Xaa is C or S
KPXXAPTKLEPISVLYLDDSSNVIKFKYEN

SEQ ID NO: 64072 - protein, 34 aa, Artificial Sequence
  Cyclic GFR-binding peptide
  MOD_RES (6), (7): Xaa is C or S
KIPKAXXVPTELSPISMLYIDENEKVVYKQYEDM

SEQ ID NO: 64073 - protein, 36 aa, Artificial Sequence; identical to SEQ ID NO: 20185
  Cyclic GFR-binding peptide
  MOD_RES (4), (5): Xaa is C or S

SEQ ID NO: 64074 - protein, 30 aa, Artificial Sequence
  Cyclic GFR-binding peptide
PARLNAISILYFDAANNVVLKKYRDMVVEA

SEQ ID NO: 64075 - protein, 31 aa, Artificial Sequence
  Cyclic GFR-binding peptide
  MOD_RES (5), (6): Xaa is C or S
APASXXVPARLNAISILYFDAANNVVLKKYR

SEQ ID NO: 64076 - protein, 28 aa, Artificial Sequence
  Cyclic GFR-binding peptide
  MOD_RES (1), (2): Xaa is C or S
XXVPQALEPISILYLVGRKPKVKFKYEM

SEQ ID NO: 64077 - protein, 31 aa, Artificial Sequence
  Cyclic GFR-binding peptide
  MOD_RES (29), (31): Xaa is C or S
LEPISVLYLDDMGVPTKFKYEEGMSVAEXGX

SEQ ID NO: 64078 - protein, 22 aa, Artificial Sequence
  Cyclic GFR-binding peptide
LSPISVLYIDDMGVPTYKQYEE

SEQ ID NO: 64079 - protein, 39 aa, Artificial Sequence; identical to SEQ ID NO: 20195
  Cyclic GFR-binding peptide
  MOD_RES (3), (4), (36), (38): Xaa is C or S

SEQ ID NO: 64080 - protein, 30 aa, Artificial Sequence
  Cyclic GFR-binding peptide
  MOD_RES (1), (2): Xaa is C or S
XXVSQDLSPISILYIIGKTPKIYKQYEMIV

SEQ ID NO: 64081 - protein, 28 aa, Artificial Sequence
  Cyclic GFR-binding peptide
  MOD_RES (27), (27): Xaa is C or S
EPISVLYLDDSSNVIKFKYENMVVRAXG

SEQ ID NO: 64082 - protein, 37 aa, Artificial Sequence; identical to SEQ ID NO: 20203
  Cyclic GFR-binding peptide
  MOD_RES (5), (6): Xaa is C or S

SEQ ID NO: 64083 - protein, 34 aa, Artificial Sequence
  Cyclic GFR-binding peptide
  MOD_RES (6), (7): Xaa is C or S
AAPASXXVPARLSPISILYKDAANNVVLKYHYDM

SEQ ID NO: 64084 - protein, 27 aa, Artificial Sequence
  Cyclic GFR-binding peptide
PTKLEPISVLYLDDMGVPTKFKYEEGM

SEQ ID NO: 64085 - protein, 25 aa, Artificial Sequence
  Cyclic GFR-binding peptide
EPISVLYLDSSNNVIKFKYENMVVK

SEQ ID NO: 64086 - protein, 24 aa, Artificial Sequence
  Cyclic GFR-binding peptide
PTKLEPISVLYLDDSSNVIKFKYE

SEQ ID NO: 64087 - protein, 34 aa, Artificial Sequence; identical to SEQ ID NO: 20214
  Cyclic GFR-binding peptide
  MOD_RES (1), (2), (34): Xaa is C or S

SEQ ID NO: 64088 - protein, 23 aa, Artificial Sequence
  Cyclic GFR-binding peptide
SPISMLYIDENEKVVYKQYEDMV

SEQ ID NO: 64089 - protein, 30 aa, Artificial Sequence
  Cyclic GFR-binding peptide
  MOD_RES (4), (5): Xaa is C or S
PKPXXAPTKLEPISVLYLDDSSNVIKFKYE

SEQ ID NO: 64090 - protein, 42 aa, Artificial Sequence; identical to SEQ ID NO: 20218
  Cyclic GFR-binding peptide
  MOD_RES (6), (7), (39), (41): Xaa is C or S

SEQ ID NO: 64091 - protein, 31 aa, Artificial Sequence
  Cyclic GFR-binding peptide
  MOD_RES (1), (2): Xaa is C or S
XXVPARLEPISILYLDAANNVVKFKYEDMVV

SEQ ID NO: 64092 - protein, 22 aa, Artificial Sequence
  Cyclic GFR-binding peptide
LSPISILYIIGKTPKIYKQYEM

SEQ ID NO: 64093 - protein, 23 aa, Artificial Sequence
  Cyclic GFR-binding peptide
TELSPISMLYIDENEKVVYKQYE

SEQ ID NO: 64094 - protein, 25 aa, Artificial Sequence
  Cyclic GFR-binding peptide
PTELSPISMLYIDENEKVVYKQYED

SEQ ID NO: 64095 - protein, 36 aa, Artificial Sequence
  Cyclic GFR-binding peptide
  MOD_RES (6), (7): Xaa is C or S
ASASPXXVSQDLSPISILYIIGKTPKIYKQYEMIVK

SEQ ID NO: 64096 - protein, 38 aa, Artificial Sequence; identical to SEQ ID NO: 20228
  Cyclic GFR-binding peptide
  MOD_RES (3), (4), (36), (38): Xaa is C or S

SEQ ID NO: 64097 - protein, 22 aa, Artificial Sequence
  Cyclic GFR-binding peptide
LSPISVLYIDDSSNVIYKQYEN

SEQ ID NO: 64098 - protein, 34 aa, Artificial Sequence; identical to SEQ ID NO: 20230
  Cyclic GFR-binding peptide
  MOD_RES (33), (33): Xaa is C or S

SEQ ID NO: 64099 - protein, 23 aa, Artificial Sequence
  Cyclic GFR-binding peptide
SPISVLYIDSSNNVIYKQYENMV

SEQ ID NO: 64100 - protein, 35 aa, Artificial Sequence; identical to SEQ ID NO: 20235
  Cyclic GFR-binding peptide
  MOD_RES (4), (5): Xaa is C or S

SEQ ID NO: 64101 - protein, 27 aa, Artificial Sequence
  Cyclic GFR-binding peptide
KLSPISVLYIDSSNNVIYKQYENMVVK

SEQ ID NO: 64102 - protein, 22 aa, Artificial Sequence
  Cyclic GFR-binding peptide
NAISILYFDKGVVTYLKKYRGM

SEQ ID NO: 64103 - protein, 34 aa, Artificial Sequence; identical to SEQ ID NO: 20240
  Cyclic GFR-binding peptide
  MOD_RES (3), (4): Xaa is C or S

SEQ ID NO: 64104 - protein, 26 aa, Artificial Sequence
  Cyclic GFR-binding peptide
PTKLSPISVLYIDDSSNVIYKQYENM

SEQ ID NO: 64105 - protein, 29 aa, Artificial Sequence
  Cyclic GFR-binding peptide
PTKLSPISVLYIDSSNNVIYKQYENMVVK

SEQ ID NO: 64106 - protein, 31 aa, Artificial Sequence
  Cyclic GFR-binding peptide
  MOD_RES (1), (2): Xaa is C or S
XXVPTKLEPISVLYLDDMGVPTKFKYEEGMS

SEQ ID NO: 64107 - protein, 27 aa, Artificial Sequence
  Cyclic GFR-binding peptide
  MOD_RES (1), (1): Xaa is C or S
XAPTQLEPISVLYLDDSSNVIKFKYEN

SEQ ID NO: 64108 - protein, 30 aa, Artificial Sequence
  Cyclic GFR-binding peptide
PTELEPISMLYLDEYDKVVKFKYEEMVVEG

SEQ ID NO: 64109 - protein, 29 aa, Artificial Sequence
  Cyclic GFR-binding peptide
  MOD_RES (2), (3): Xaa is C or S
AXXVPTELEPISMLYLDEYDKVVKFKYEE

SEQ ID NO: 64110 - protein, 28 aa, Artificial Sequence
  Cyclic GFR-binding peptide
QDLEPISILYLVGRTPKVKFKYEMVVKS

SEQ ID NO: 64111 - protein, 28 aa, Artificial Sequence
  Cyclic GFR-binding peptide
APTKLEPISVLYLDDSSNVIKFKYENMV

SEQ ID NO: 64112 - protein, 31 aa, Artificial Sequence
  Cyclic GFR-binding peptide
  MOD_RES (29), (31): Xaa is C or S
RLNAISILYFDAANNVVLKKYRDMVVEAXGX

SEQ ID NO: 64113 - protein, 26 aa, Artificial Sequence
  Cyclic GFR-binding peptide
EPISVLYLDDSSNVIKFKYENMVVRA

SEQ ID NO: 64114 - protein, 30 aa, Artificial Sequence
  Cyclic GFR-binding peptide
  MOD_RES (3), (3): Xaa is C or S
PTXAPTKLEPISVLYLDDSSNVIKFKYENM

SEQ ID NO: 64115 - protein, 27 aa, Artificial Sequence
  Cyclic GFR-binding peptide
  MOD_RES (1), (1): Xaa is C or S
XVPTKLSPISILYIDKGVVTYYKQYEG

SEQ ID NO: 64116 - protein, 39 aa, Artificial Sequence; identical to SEQ ID NO: 20252
  Cyclic GFR-binding peptide
  MOD_RES (4), (5), (37), (39): Xaa is C or S

SEQ ID NO: 64117 - protein, 41 aa, Artificial Sequence; identical to SEQ ID NO: 20253
  Cyclic GFR-binding peptide
  MOD_RES (6), (7), (39), (41): Xaa is C or S

SEQ ID NO: 64118 - protein, 31 aa, Artificial Sequence
  Cyclic GFR-binding peptide
  MOD_RES (3), (4): Xaa is C or S
KAXXAPTKLSPISVLYIDSSNNVIYKQYENM

SEQ ID NO: 64119 - protein, 26 aa, Artificial Sequence
  Cyclic GFR-binding peptide
EPISVLYLDDSSNVIKFKYENMVVRS

SEQ ID NO: 64120 - protein, 29 aa, Artificial Sequence
  Cyclic GFR-binding peptide
TKLEPISVLYLDDMGVPTKFKYEEGMSVA

SEQ ID NO: 64121 - protein, 32 aa, Artificial Sequence
  Cyclic GFR-binding peptide
  MOD_RES (5), (6): Xaa is C or S
VPKPXXAPTKLEPISVLYLDDSSNVIKFKYEN

SEQ ID NO: 64122 - protein, 30 aa, Artificial Sequence
  Cyclic GFR-binding peptide
  MOD_RES (3), (4): Xaa is C or S
KAXXVPTKLSPISVLYIDDMGVPTYKQYEE

SEQ ID NO: 64123 - protein, 26 aa, Artificial Sequence
  Cyclic GFR-binding peptide
LEPISILYLIGKTPKIKFKYEMIVKS

SEQ ID NO: 64124 - protein, 32 aa, Artificial Sequence
  Cyclic GFR-binding peptide
  MOD_RES (2), (3): Xaa is C or S
AXXAPTKLEPISVLYLDSSNNVIKFKYENMVV

SEQ ID NO: 64125 - protein, 28 aa, Artificial Sequence
  Cyclic GFR-binding peptide
  MOD_RES (1), (2): Xaa is C or S
XXVPQDLEPISILYLVGRTPKVKFKYEM

SEQ ID NO: 64126 - protein, 35 aa, Artificial Sequence; identical to SEQ ID NO: 20264
  Cyclic GFR-binding peptide
  MOD_RES (1), (2), (33), (35): Xaa is C or S

SEQ ID NO: 64127 - protein, 25 aa, Artificial Sequence
  Cyclic GFR-binding peptide
PTKLSPISVLYIDSSNNVIYKQYEN

SEQ ID NO: 64128 - protein, 25 aa, Artificial Sequence
  Cyclic GFR-binding peptide
VPTELEPISMLYLDENEKVVKFKYE

SEQ ID NO: 64129 - protein, 31 aa, Artificial Sequence
  Cyclic GFR-binding peptide
  MOD_RES (29), (31): Xaa is C or S
KLEPISVLYLDDSSNVIKFKYENMVVRSXGX

SEQ ID NO: 64130 - protein, 30 aa, Artificial Sequence; identical to SEQ ID NO: 20269
  Cyclic GFR-binding peptide

SEQ ID NO: 64131 - protein, 24 aa, Artificial Sequence
  Cyclic GFR-binding peptide
KLSPISVLYIDSSNNVIYKQYENM

SEQ ID NO: 64132 - protein, 31 aa, Artificial Sequence
  Cyclic GFR-binding peptide
  MOD_RES (4), (5): Xaa is C or S
ASPXXVSQDLEPISILYLIGKTPKIKFKYEM

SEQ ID NO: 64133 - protein, 30 aa, Artificial Sequence
  Cyclic GFR-binding peptide
  MOD_RES (30), (30): Xaa is C or S
TKLSPISVLYIDDSSNVIYKQYENMVVRSX

SEQ ID NO: 64134 - protein, 28 aa, Artificial Sequence
  Cyclic GFR-binding peptide
  MOD_RES (27), (27): Xaa is C or S
LSPISILYIVGRTPKVYKQYEMVVKSXK

SEQ ID NO: 64135 - protein, 29 aa, Artificial Sequence
  Cyclic GFR-binding peptide
  MOD_RES (2), (3): Xaa is C or S
AXXVPTELSPISMLYIDEYDKVVYKQYEE

SEQ ID NO: 64136 - protein, 37 aa, Artificial Sequence; identical to SEQ ID NO: 20272
  Cyclic GFR-binding peptide
  MOD_RES (6), (7): Xaa is C or S

SEQ ID NO: 64137 - protein, 30 aa, Artificial Sequence
  Cyclic GFR-binding peptide
  MOD_RES (30), (30): Xaa is C or S
PQALSPISILYIVGRKPKVYKQYEMIVRSX

SEQ ID NO: 64138 - protein, 28 aa, Artificial Sequence
  Cyclic GFR-binding peptide
SQDLSPISILYIIGKTPKIYKQYEMIVK

SEQ ID NO: 64139 - protein, 24 aa, Artificial Sequence
  Cyclic GFR-binding peptide
PARLEPISILYLDAANNVVKFKYE

SEQ ID NO: 64140 - protein, 38 aa, Artificial Sequence; identical to SEQ ID NO: 20276
  Cyclic GFR-binding peptide
  MOD_RES (6), (38): Xaa is C or S

SEQ ID NO: 64141 - protein, 27 aa, Artificial Sequence
  Cyclic GFR-binding peptide
QALSPISILYIVGRKPKVYKQYEMIVR

SEQ ID NO: 64142 - protein, 31 aa, Artificial Sequence
  Cyclic GFR-binding peptide
  MOD_RES (3), (4): Xaa is C or S
ASXXVPARLSPISILYKDAANNVVLKYHYDM

SEQ ID NO: 64143 - protein, 22 aa, Artificial Sequence
  Cyclic GFR-binding peptide
QLEPISVLYLDDSSNVIKFKYE

SEQ ID NO: 64144 - protein, 41 aa, Artificial Sequence; identical to SEQ ID NO: 20278
  Cyclic GFR-binding peptide
  MOD_RES (6), (7), (38), (40): Xaa is C or S

SEQ ID NO: 64145 - protein, 34 aa, Artificial Sequence; identical to SEQ ID NO: 20279
  Cyclic GFR-binding peptide
  MOD_RES (1), (2), (34): Xaa is C or S

SEQ ID NO: 64146 - protein, 27 aa, Artificial Sequence
  Cyclic GFR-binding peptide
  MOD_RES (27), (27): Xaa is C or S
LSPISILYIVGRTPKVYKQYEMVVKSX

SEQ ID NO: 64147 - protein, 29 aa, Artificial Sequence
  Cyclic GFR-binding peptide
  MOD_RES (1), (1): Xaa is C or S
XVPTELSPISMLYIDEYDKVVYKQYEEMV

SEQ ID NO: 64148 - protein, 27 aa, Artificial Sequence
  Cyclic GFR-binding peptide
KLSPISVLYIDDMGVPTYKQYEEGMSV

SEQ ID NO: 64149 - protein, 33 aa, Artificial Sequence; identical to SEQ ID NO: 20282
  Cyclic GFR-binding peptide
  MOD_RES (1), (33): Xaa is C or S

SEQ ID NO: 64150 - protein, 25 aa, Artificial Sequence
  Cyclic GFR-binding peptide
PTKLEPISVLYLDSSNNVIKFKYEN

SEQ ID NO: 64151 - protein, 27 aa, Artificial Sequence
  Cyclic GFR-binding peptide
PARLNAISILYFDAANNVVLKKYRDMV

SEQ ID NO: 64152 - protein, 31 aa, Artificial Sequence
  Cyclic GFR-binding peptide
  MOD_RES (4), (5): Xaa is C or S
ASPXXVSQDLSPISILYIIGKTPKIYKQYEM

SEQ ID NO: 64153 - protein, 28 aa, Artificial Sequence
  Cyclic GFR-binding peptide
  MOD_RES (1), (2): Xaa is C or S
XXVPTKLEPISVLYLDDMGVPTKFKYEE

SEQ ID NO: 64154 - protein, 29 aa, Artificial Sequence
  Cyclic GFR-binding peptide
  MOD_RES (3), (4): Xaa is C or S
KPXXAPTKLEPISVLYLDDSSNVIKFKYE

SEQ ID NO: 64155 - protein, 41 aa, Artificial Sequence; identical to SEQ ID NO: 20288
  Cyclic GFR-binding peptide
  MOD_RES (6), (7), (39), (41): Xaa is C or S

SEQ ID NO: 64156 - protein, 29 aa, Artificial Sequence
  Cyclic GFR-binding peptide
  MOD_RES (28), (28): Xaa is C or S
DLSPISILYIVGRTPKVYKQYEMVVKSXK

SEQ ID NO: 64157 - protein, 35 aa, Artificial Sequence; identical to SEQ ID NO: 20289
  Cyclic GFR-binding peptide
  MOD_RES (1), (2), (34): Xaa is C or S

SEQ ID NO: 64158 - protein, 37 aa, Artificial Sequence; identical to SEQ ID NO: 20291
  Cyclic GFR-binding peptide
  MOD_RES (1), (2), (34), (36): Xaa is C or S

SEQ ID NO: 64159 - protein, 25 aa, Artificial Sequence
  Cyclic GFR-binding peptide
VPTELSPISMLYIDEYDKVVYKQYE

SEQ ID NO: 64160 - protein, 30 aa, Artificial Sequence
  Cyclic GFR-binding peptide
  MOD_RES (3), (4): Xaa is C or S
KPXXAPTKLSPISVLYIDDSSNVIYKQYEN

SEQ ID NO: 64161 - protein, 32 aa, Artificial Sequence
  Cyclic GFR-binding peptide
  MOD_RES (5), (6): Xaa is C or S
SAAPXXVPQALSPISILYIVGRKPKVYKQYEM

SEQ ID NO: 64162 - protein, 34 aa, Artificial Sequence; identical to SEQ ID NO: 20297
  Cyclic GFR-binding peptide
  MOD_RES (1), (33): Xaa is C or S

SEQ ID NO: 64163 - protein, 36 aa, Artificial Sequence; identical to SEQ ID NO: 20298
  Cyclic GFR-binding peptide
  MOD_RES (4), (5): Xaa is C or S

SEQ ID NO: 64164 - protein, 21 aa, Artificial Sequence
  Cyclic GFR-binding peptide
LNAISILYFDAANNVVLKKYR

SEQ ID NO: 64165 - protein, 29 aa, Artificial Sequence
  Cyclic GFR-binding peptide
EPISILYLDAANNVVKFKYEAAAAAAAAA

SEQ ID NO: 64166 - protein, 39 aa, Artificial Sequence; identical to SEQ ID NO: 20300
  Cyclic GFR-binding peptide
  MOD_RES (4), (5), (36), (38): Xaa is C or S

SEQ ID NO: 64167 - protein, 21 aa, Artificial Sequence
  Cyclic GFR-binding peptide
LSPISILYIDKGVVTYYKQYE

SEQ ID NO: 64168 - protein, 29 aa, Artificial Sequence
  Cyclic GFR-binding peptide
  MOD_RES (3), (4): Xaa is C or S
KAXXVPTKLSPISILYKDKGVVTYLKYHY

SEQ ID NO: 64169 - protein, 22 aa, Artificial Sequence
  Cyclic GFR-binding peptide
LSPISMLYIDENEKVVYKQYED

SEQ ID NO: 64170 - protein, 39 aa, Artificial Sequence; identical to SEQ ID NO: 20302
  Cyclic GFR-binding peptide
  MOD_RES (4), (5), (37), (39): Xaa is C or S

SEQ ID NO: 64171 - protein, 28 aa, Artificial Sequence
  Cyclic GFR-binding peptide
  MOD_RES (2), (3): Xaa is C or S
PXXVPQDLEPISILYLVGRTPKVKFKYE

SEQ ID NO: 64172 - protein, 34 aa, Artificial Sequence
  Cyclic GFR-binding peptide
  MOD_RES (4), (5): Xaa is C or S
PKAXXAPTKLSPISVLYIDSSNNVIYKQYENMVV

SEQ ID NO: 64173 - protein, 26 aa, Artificial Sequence
  Cyclic GFR-binding peptide
APTQLEPISVLYLDDSSNVIKFKYEN

SEQ ID NO: 64174 - protein, 35 aa, Artificial Sequence
  Cyclic GFR-binding peptide
  MOD_RES (6), (7): Xaa is C or S
SIPKAXXVPTELEPISMLYLDEYDKVVKFKYEEMV

SEQ ID NO: 64175 - protein, 34 aa, Artificial Sequence
  Cyclic GFR-binding peptide
  MOD_RES (31), (33): Xaa is C or S
PTELEPISMLYLDEYDKVVKFKYEEMVVEGXGXR

SEQ ID NO: 64176 - protein, 33 aa, Artificial Sequence
  Cyclic GFR-binding peptide
  MOD_RES (3), (4): Xaa is C or S
ASXXVPARLSPISILYKDAANNVVLKYHYDMVV

SEQ ID NO: 64177 - protein, 27 aa, Artificial Sequence
  Cyclic GFR-binding peptide
PTELEPISMLYLDENEKVVKFKYEDMV

SEQ ID NO: 64178 - protein, 39 aa, Artificial Sequence; identical to SEQ ID NO: 20310
  Cyclic GFR-binding peptide
  MOD_RES (4), (36), (38): Xaa is C or S

SEQ ID NO: 64179 - protein, 26 aa, Artificial Sequence
  Cyclic GFR-binding peptide
EPISVLYLDDMGVPTKFKYEEGMSVA

SEQ ID NO: 64180 - protein, 37 aa, Artificial Sequence; identical to SEQ ID NO: 20315
  Cyclic GFR-binding peptide
  MOD_RES (2), (3), (35), (37): Xaa is C or S

SEQ ID NO: 64181 - protein, 34 aa, Artificial Sequence; identical to SEQ ID NO: 20317
  Cyclic GFR-binding peptide
  MOD_RES (1), (34): Xaa is C or S

SEQ ID NO: 64182 - protein, 33 aa, Artificial Sequence; identical to SEQ ID NO: 20318
  Cyclic GFR-binding peptide
  MOD_RES (32), (32): Xaa is C or S

SEQ ID NO: 64183 - protein, 33 aa, Artificial Sequence; identical to SEQ ID NO: 20319
  Cyclic GFR-binding peptide
  MOD_RES (2), (3): Xaa is C or S

SEQ ID NO: 64184 - protein, 28 aa, Artificial Sequence
  Cyclic GFR-binding peptide
SQDLEPISILYLIGKTPKIKFKYEMIVK

SEQ ID NO: 64185 - protein, 29 aa, Artificial Sequence
  Cyclic GFR-binding peptide
  MOD_RES (1), (1): Xaa is C or S
XAPTKLSPISVLYIDDSSNVIYKQYENMV

SEQ ID NO: 64186 - protein, 31 aa, Artificial Sequence
  Cyclic GFR-binding peptide
  MOD_RES (5), (6): Xaa is C or S
SASPXXVPQDLEPISILYLVGRTPKVKFKYE

SEQ ID NO: 64187 - protein, 22 aa, Artificial Sequence
  Cyclic GFR-binding peptide
LEPISILYLIGKTPKIKFKYEM

SEQ ID NO: 64188 - protein, 31 aa, Artificial Sequence
  Cyclic GFR-binding peptide
  MOD_RES (3), (4): Xaa is C or S
APXXVPQALEPISILYLVGRKPKVKFKYEMI

SEQ ID NO: 64189 - protein, 31 aa, Artificial Sequence
  Cyclic GFR-binding peptide
  MOD_RES (30), (30): Xaa is C or S
TKLNAISILYFDKGVVTYLKKYRGMAVSEXG

SEQ ID NO: 64190 - protein, 29 aa, Artificial Sequence
  Cyclic GFR-binding peptide
  MOD_RES (27), (29): Xaa is C or S
LEPISILYLVGRKPKVKFKYEMIVRSXKX

SEQ ID NO: 64191 - protein, 35 aa, Artificial Sequence
  Cyclic GFR-binding peptide
  MOD_RES (6), (7): Xaa is C or S
KASKAXXVPTKLSPISILYKDKGVVTYLKYHYGMA

SEQ ID NO: 64192 - protein, 30 aa, Artificial Sequence
  Cyclic GFR-binding peptide
  MOD_RES (2), (3): Xaa is C or S
AXXVPTKLSPISVLYIDDMGVPTYKQYEEG

SEQ ID NO: 64193 - protein, 34 aa, Artificial Sequence
  Cyclic GFR-binding peptide
  MOD_RES (4), (5): Xaa is C or S
GKAXXVPTKLEPISVLYLDDMGVPTKFKYEEGMS

SEQ ID NO: 64194 - protein, 39 aa, Artificial Sequence; identical to SEQ ID NO: 20333
  Cyclic GFR-binding peptide
  MOD_RES (4), (5), (37), (39): Xaa is C or S

SEQ ID NO: 64195 - protein, 38 aa, Artificial Sequence; identical to SEQ ID NO: 20336
  Cyclic GFR-binding peptide
  MOD_RES (3), (4), (36), (38): Xaa is C or S

SEQ ID NO: 64196 - protein, 29 aa, Artificial Sequence
  Cyclic GFR-binding peptide
APTKLEPISVLYLDSSNNVIKFKYENMVV

SEQ ID NO: 64197 - protein, 40 aa, Artificial Sequence; identical to SEQ ID NO: 20337
  Cyclic GFR-binding peptide
  MOD_RES (6), (7), (39): Xaa is C or S

SEQ ID NO: 64198 - protein, 36 aa, Artificial Sequence; identical to SEQ ID NO: 20340
  Cyclic GFR-binding peptide
  MOD_RES (2), (3), (35): Xaa is C or S

SEQ ID NO: 64199 - protein, 29 aa, Artificial Sequence
  Cyclic GFR-binding peptide
  MOD_RES (1), (1): Xaa is C or S
XVPTELEPISMLYLDENEKVVKFKYEDMV

SEQ ID NO: 64200 - protein, 25 aa, Artificial Sequence
  Cyclic GFR-binding peptide
QDLEPISILYLVGRTPKVKFKYEMV

SEQ ID NO: 64201 - protein, 33 aa, Artificial Sequence
  Cyclic GFR-binding peptide
  MOD_RES (31), (33): Xaa is C or S
PTQLSPISVLYIDDSSNVIYKQYENMVVRAXGX

SEQ ID NO: 64202 - protein, 35 aa, Artificial Sequence; identical to SEQ ID NO: 20346
  Cyclic GFR-binding peptide
  MOD_RES (1), (34): Xaa is C or S

SEQ ID NO: 64203 - protein, 32 aa, Artificial Sequence; identical to SEQ ID NO: 20351
  Cyclic GFR-binding peptide
  MOD_RES (1), (2): Xaa is C or S

SEQ ID NO: 64204 - protein, 36 aa, Artificial Sequence; identical to SEQ ID NO: 20353
  Cyclic GFR-binding peptide
  MOD_RES (2), (3), (35): Xaa is C or S

SEQ ID NO: 64205 - protein, 36 aa, Artificial Sequence; identical to SEQ ID NO: 20354
  Cyclic GFR-binding peptide
  MOD_RES (2), (3), (35): Xaa is C or S

SEQ ID NO: 64206 - protein, 25 aa, Artificial Sequence
  Cyclic GFR-binding peptide
KLSPISVLYIDSSNNVIYKQYENMV

SEQ ID NO: 64207 - protein, 36 aa, Artificial Sequence; identical to SEQ ID NO: 20357
  Cyclic GFR-binding peptide
  MOD_RES (4), (36): Xaa is C or S

SEQ ID NO: 64208 - protein, 39 aa, Artificial Sequence; identical to SEQ ID NO: 20359
  Cyclic GFR-binding peptide
  MOD_RES (6), (7), (39): Xaa is C or S

SEQ ID NO: 64209 - protein, 33 aa, Artificial Sequence; identical to SEQ ID NO: 20360
  Cyclic GFR-binding peptide
  MOD_RES (1), (2): Xaa is C or S

SEQ ID NO: 64210 - protein, 25 aa, Artificial Sequence
  Cyclic GFR-binding peptide
TELSPISMLYIDEYDKVVYKQYEEM

SEQ ID NO: 64211 - protein, 30 aa, Artificial Sequence
  Cyclic GFR-binding peptide
  MOD_RES (1), (1): Xaa is C or S
XVPQDLSPISILYIVGRTPKVYKQYEMVVK

SEQ ID NO: 64212 - protein, 27 aa, Artificial Sequence
  Cyclic GFR-binding peptide
LEPISVLYLDDMGVPTKFKYEEGMSVA

SEQ ID NO: 64213 - protein, 31 aa, Artificial Sequence
  Cyclic GFR-binding peptide
  MOD_RES (30), (30): Xaa is C or S
PQDLSPISILYIVGRTPKVYKQYEMVVKSXK

SEQ ID NO: 64214 - protein, 26 aa, Artificial Sequence
  Cyclic GFR-binding peptide
  MOD_RES (26), (26): Xaa is C or S
EPISILYLVGRTPKVKFKYEMVVKSX

SEQ ID NO: 64215 - protein, 40 aa, Artificial Sequence; identical to SEQ ID NO: 20366
  Cyclic GFR-binding peptide
  MOD_RES (7), (39): Xaa is C or S

SEQ ID NO: 64216 - protein, 35 aa, Artificial Sequence; identical to SEQ ID NO: 20368
  Cyclic GFR-binding peptide
  MOD_RES (33), (35): Xaa is C or S

SEQ ID NO: 64217 - protein, 32 aa, Artificial Sequence
  Cyclic GFR-binding peptide
  MOD_RES (31), (31): Xaa is C or S
PTELSPISMLYIDEYDKVVYKQYEEMVVEGXG

SEQ ID NO: 64218 - protein, 36 aa, Artificial Sequence; identical to SEQ ID NO: 20371
  Cyclic GFR-binding peptide
  MOD_RES (2), (3), (35): Xaa is C or S

SEQ ID NO: 64219 - protein, 30 aa, Artificial Sequence
  Cyclic GFR-binding peptide
  MOD_RES (30), (30): Xaa is C or S
TKLEPISVLYLDDSSNVIKFKYENMVVRSX

SEQ ID NO: 64220 - protein, 21 aa, Artificial Sequence
  Cyclic GFR-binding peptide
LSPISILYIIGKTPKIYKQYE

SEQ ID NO: 64221 - protein, 25 aa, Artificial Sequence
  Cyclic GFR-binding peptide
KLSPISILYKDKGVVTYLKYHYGMA

SEQ ID NO: 64222 - protein, 31 aa, Artificial Sequence
  Cyclic GFR-binding peptide
  MOD_RES (28), (30): Xaa is C or S
LSPISILYIDKGVVTYYKQYEGMAVSEXGXR

SEQ ID NO: 64223 - protein, 23 aa, Artificial Sequence
  Cyclic GFR-binding peptide
DLSPISILYIVGRTPKVYKQYEM

SEQ ID NO: 64224 - protein, 30 aa, Artificial Sequence
  Cyclic GFR-binding peptide
  MOD_RES (1), (1): Xaa is C or S
XAPTKLEPISVLYLDSSNNVIKFKYENMVV

SEQ ID NO: 64225 - protein, 30 aa, Artificial Sequence
  Cyclic GFR-binding peptide
  MOD_RES (4), (5): Xaa is C or S
ASPXXVPQDLEPISILYLVGRTPKVKFKYE

SEQ ID NO: 64226 - protein, 31 aa, Artificial Sequence
  Cyclic GFR-binding peptide
  MOD_RES (30), (30): Xaa is C or S
PQDLEPISILYLVGRTPKVKFKYEMVVKSXK

SEQ ID NO: 64227 - protein, 33 aa, Artificial Sequence
  Cyclic GFR-binding peptide
  MOD_RES (4), (5): Xaa is C or S
ASPXXVPQDLSPISILYIVGRTPKVYKQYEMVV

SEQ ID NO: 64228 - protein, 26 aa, Artificial Sequence
  Cyclic GFR-binding peptide
QDLEPISILYLIGKTPKIKFKYEMIV

SEQ ID NO: 64229 - protein, 31 aa, Artificial Sequence
  Cyclic GFR-binding peptide
  MOD_RES (29), (31): Xaa is C or S
QLEPISVLYLDDSSNVIKFKYENMVVRAXGX

SEQ ID NO: 64230 - protein, 28 aa, Artificial Sequence
  Cyclic GFR-binding peptide
VPTKLSPISVLYIDDMGVPTYKQYEEGM

SEQ ID NO: 64231 - protein, 32 aa, Artificial Sequence
  Cyclic GFR-binding peptide
  MOD_RES (2), (3): Xaa is C or S
PXXVPQALEPISILYLVGRKPKVKFKYEMIVR

SEQ ID NO: 64232 - protein, 29 aa, Artificial Sequence
  Cyclic GFR-binding peptide
  MOD_RES (4), (4): Xaa is C or S
KPTXAPTKLSPISVLYIDDSSNVIYKQYE

SEQ ID NO: 64233 - protein, 38 aa, Artificial Sequence; identical to SEQ ID NO: 20388
  Cyclic GFR-binding peptide
  MOD_RES (2), (3), (35), (37): Xaa is C or S

SEQ ID NO: 64234 - protein, 37 aa, Artificial Sequence; identical to SEQ ID NO: 20389
  Cyclic GFR-binding peptide
  MOD_RES (2), (3), (34), (36): Xaa is C or S

SEQ ID NO: 64235 - protein, 27 aa, Artificial Sequence
  Cyclic GFR-binding peptide
  MOD_RES (1), (2): Xaa is C or S
XXVPARLEPISILYLDAANNVVKFKYE

SEQ ID NO: 64236 - protein, 33 aa, Artificial Sequence
  Cyclic GFR-binding peptide
  MOD_RES (6), (7): Xaa is C or S
TVPKPXXAPTQLEPISVLYLDDSSNVIKFKYEN

SEQ ID NO: 64237 - protein, 31 aa, Artificial Sequence; identical to SEQ ID NO: 20394
  Cyclic GFR-binding peptide
  MOD_RES (31), (31): Xaa is C or S

SEQ ID NO: 64238 - protein, 33 aa, Artificial Sequence; identical to SEQ ID NO: 20400
  Cyclic GFR-binding peptide
  MOD_RES (2), (3): Xaa is C or S

SEQ ID NO: 64239 - protein, 28 aa, Artificial Sequence
  Cyclic GFR-binding peptide
PTKLSPISVLYIDSSNNVIYKQYENMVV

SEQ ID NO: 64240 - protein, 24 aa, Artificial Sequence
  Cyclic GFR-binding peptide
TKLSPISILYKDKGVVTYLKYHYG

SEQ ID NO: 64241 - protein, 33 aa, Artificial Sequence
  Cyclic GFR-binding peptide
  MOD_RES (30), (32): Xaa is C or S
ARLSPISILYKDAANNVVLKYHYDMVVEAXGXR

SEQ ID NO: 64242 - protein, 25 aa, Artificial Sequence
  Cyclic GFR-binding peptide
VPTKLNAISILYFDKGVVTYLKKYR

SEQ ID NO: 64243 - protein, 41 aa, Artificial Sequence; identical to SEQ ID NO: 20407
  Cyclic GFR-binding peptide
  MOD_RES (6), (7), (40): Xaa is C or S

SEQ ID NO: 64244 - protein, 40 aa, Artificial Sequence; identical to SEQ ID NO: 20409
  Cyclic GFR-binding peptide
  MOD_RES (3), (4), (37), (39): Xaa is C or S

SEQ ID NO: 64245 - protein, 35 aa, Artificial Sequence
  Cyclic GFR-binding peptide
  MOD_RES (5), (6): Xaa is C or S
SASPXXVSQDLEPISILYLIGKTPKIKFKYEMIVK

SEQ ID NO: 64246 - protein, 28 aa, Artificial Sequence
  Cyclic GFR-binding peptide
TELSPISMLYIDEYDKVVYKQYEEMVVE

SEQ ID NO: 64247 - protein, 29 aa, Artificial Sequence
  Cyclic GFR-binding peptide
  MOD_RES (28), (28): Xaa is C or S
DLEPISILYLVGRTPKVKFKYEMVVKSXK

SEQ ID NO: 64248 - protein, 37 aa, Artificial Sequence; identical to SEQ ID NO: 20413
  Cyclic GFR-binding peptide
  MOD_RES (6), (7): Xaa is C or S

SEQ ID NO: 64249 - protein, 34 aa, Artificial Sequence
  Cyclic GFR-binding peptide
  MOD_RES (4), (5): Xaa is C or S
SKAXXVPTKLSPISILYIDKGVVTYYKQYEGMAV

SEQ ID NO: 64250 - protein, 41 aa, Artificial Sequence; identical to SEQ ID NO: 20415
  Cyclic GFR-binding peptide
  MOD_RES (6), (7), (39), (41): Xaa is C or S

SEQ ID NO: 64251 - protein, 31 aa, Artificial Sequence
  Cyclic GFR-binding peptide
  MOD_RES (30), (30): Xaa is C or S
ARLNAISILYFDAANNVVLKKYRDMVVEAXG

SEQ ID NO: 64252 - protein, 38 aa, Artificial Sequence; identical to SEQ ID NO: 20417
  Cyclic GFR-binding peptide
  MOD_RES (2), (3), (35), (37): Xaa is C or S

SEQ ID NO: 64253 - protein, 26 aa, Artificial Sequence
  Cyclic GFR-binding peptide
LSPISMLYIDENEKVVYKQYEDMVVE

SEQ ID NO: 64254 - protein, 40 aa, Artificial Sequence; identical to SEQ ID NO: 20423
  Cyclic GFR-binding peptide
  MOD_RES (4), (5), (37), (39): Xaa is C or S

SEQ ID NO: 64255 - protein, 34 aa, Artificial Sequence
  Cyclic GFR-binding peptide
  MOD_RES (5), (6): Xaa is C or S
VPKPXXAPTQLSPISVLYIDDSSNVIYKQYENMV

SEQ ID NO: 64256 - protein, 33 aa, Artificial Sequence
  Cyclic GFR-binding peptide
  MOD_RES (6), (6): Xaa is C or S
VTKPTXAPTKLEPISVLYLDDSSNVIKFKYENM

SEQ ID NO: 64257 - protein, 36 aa, Artificial Sequence; identical to SEQ ID NO: 20428
  Cyclic GFR-binding peptide
  MOD_RES (4), (5): Xaa is C or S

SEQ ID NO: 64258 - protein, 31 aa, Artificial Sequence
  Cyclic GFR-binding peptide
  MOD_RES (2), (3): Xaa is C or S
PXXVPQALSPISILYIVGRKPKVYKQYEMIV

SEQ ID NO: 64259 - protein, 26 aa, Artificial Sequence
  Cyclic GFR-binding peptide
PTQLSPISVLYIDDSSNVIYKQYENM

SEQ ID NO: 64260 - protein, 29 aa, Artificial Sequence
  Cyclic GFR-binding peptide
PARLNAISILYFDAANNVVLKKYRDMVVE

SEQ ID NO: 64261 - protein, 34 aa, Artificial Sequence
  Cyclic GFR-binding peptide
  MOD_RES (5), (6): Xaa is C or S
SASPXXVSQDLSPISILYIIGKTPKIYKQYEMIV

SEQ ID NO: 64262 - protein, 33 aa, Artificial Sequence
  Cyclic GFR-binding peptide
  MOD_RES (4), (5): Xaa is C or S
PKAXXAPTKLEPISVLYLDSSNNVIKFKYENMV

SEQ ID NO: 64263 - protein, 38 aa, Artificial Sequence; identical to SEQ ID NO: 20436
  Cyclic GFR-binding peptide
  MOD_RES (5), (37): Xaa is C or S

SEQ ID NO: 64264 - protein, 33 aa, Artificial Sequence
  Cyclic GFR-binding peptide
  MOD_RES (31), (33): Xaa is C or S
PTKLSPISVLYIDDSSNVIYKQYENMVVRSXGX

SEQ ID NO: 64265 - protein, 32 aa, Artificial Sequence
  Cyclic GFR-binding peptide
  MOD_RES (4), (5): Xaa is C or S
ASPXXVPQDLSPISILYIVGRTPKVYKQYEMV

SEQ ID NO: 64266 - protein, 40 aa, Artificial Sequence; identical to SEQ ID NO: 20439
  Cyclic GFR-binding peptide
  MOD_RES (5), (6), (37), (39): Xaa is C or S

SEQ ID NO: 64267 - protein, 29 aa, Artificial Sequence
  Cyclic GFR-binding peptide
  MOD_RES (28), (28): Xaa is C or S
LSPISILYIDKGVVTYYKQYEGMAVSEXG

SEQ ID NO: 64268 - protein, 22 aa, Artificial Sequence
  Cyclic GFR-binding peptide
SPISMLYIDENEKVVYKQYEDM

SEQ ID NO: 64269 - protein, 28 aa, Artificial Sequence
  Cyclic GFR-binding peptide
PARLNAISILYFDAANNVVLKKYRDMVV

SEQ ID NO: 64270 - protein, 27 aa, Artificial Sequence
  Cyclic GFR-binding peptide
PQDLEPISILYLVGRTPKVKFKYEMVV

SEQ ID NO: 64271 - protein, 35 aa, Artificial Sequence; identical to SEQ ID NO: 18133
  Cyclic GFR-binding peptide
  MOD_RES (2), (3), (35): Xaa is C or S

SEQ ID NO: 64272 - protein, 24 aa, Artificial Sequence
  Cyclic GFR-binding peptide
SPISILYIDKGVVTYYKQYEGMAV

SEQ ID NO: 64273 - protein, 28 aa, Artificial Sequence
  Cyclic GFR-binding peptide
  MOD_RES (2), (3): Xaa is C or S
AXXVPTKLEPISVLYLDDMGVPTKFKYE

SEQ ID NO: 64274 - protein, 32 aa, Artificial Sequence
  Cyclic GFR-binding peptide
  MOD_RES (31), (31): Xaa is C or S
PTELEPISMLYLDEYDKVVKFKYEEMVVEGXG

SEQ ID NO: 64275 - protein, 32 aa, Artificial Sequence
  Cyclic GFR-binding peptide
  MOD_RES (2), (3): Xaa is C or S
AXXVPTKLNAISILYFDKGVVTYLKKYRGMAV

SEQ ID NO: 64276 - protein, 25 aa, Artificial Sequence
  Cyclic GFR-binding peptide
PQDLSPISILYIVGRTPKVYKQYEM

SEQ ID NO: 64277 - protein, 28 aa, Artificial Sequence
  Cyclic GFR-binding peptide
PQDLEPISILYLVGRTPKVKFKYEMVVK

SEQ ID NO: 64278 - protein, 24 aa, Artificial Sequence
  Cyclic GFR-binding peptide
LEPISMLYLDENEKVVKFKYEDMV

SEQ ID NO: 64279 - protein, 33 aa, Artificial Sequence; identical to SEQ ID NO: 18138
  Cyclic GFR-binding peptide
  MOD_RES (2), (3): Xaa is C or S

SEQ ID NO: 64280 - protein, 32 aa, Artificial Sequence
  Cyclic GFR-binding peptide
  MOD_RES (31), (31): Xaa is C or S
PTKLEPISVLYLDDSSNVIKFKYENMVVRSXG

SEQ ID NO: 64281 - protein, 40 aa, Artificial Sequence; identical to SEQ ID NO: 18143
  Cyclic GFR-binding peptide
  MOD_RES (4), (5), (37), (39): Xaa is C or S

SEQ ID NO: 64282 - protein, 35 aa, Artificial Sequence
  Cyclic GFR-binding peptide
  MOD_RES (6), (7): Xaa is C or S
AAPASXXVPARLNAISILYFDAANNVVLKKYRDMV

SEQ ID NO: 64283 - protein, 31 aa, Artificial Sequence
  Cyclic GFR-binding peptide
  MOD_RES (29), (31): Xaa is C or S
ELSPISMLYIDENEKVVYKQYEDMVVEGXGX

SEQ ID NO: 64284 - protein, 36 aa, Artificial Sequence; identical to SEQ ID NO: 18145
  Cyclic GFR-binding peptide
  MOD_RES (5), (6): Xaa is C or S

SEQ ID NO: 64285 - protein, 29 aa, Artificial Sequence
  Cyclic GFR-binding peptide
SPISMLYIDENEKVVYKQYEAAAAAAAAA

SEQ ID NO: 64286 - protein, 34 aa, Artificial Sequence; identical to SEQ ID NO: 18155
  Cyclic GFR-binding peptide
  MOD_RES (1), (33): Xaa is C or S

SEQ ID NO: 64287 - protein, 30 aa, Artificial Sequence; identical to SEQ ID NO: 18156
  Cyclic GFR-binding peptide

SEQ ID NO: 64288 - protein, 38 aa, Artificial Sequence; identical to SEQ ID NO: 18162
  Cyclic GFR-binding peptide
  MOD_RES (3), (35), (37): Xaa is C or S

SEQ ID NO: 64289 - protein, 37 aa, Artificial Sequence; identical to SEQ ID NO: 18163
  Cyclic GFR-binding peptide
  MOD_RES (6), (7): Xaa is C or S

SEQ ID NO: 64290 - protein, 32 aa, Artificial Sequence; identical to SEQ ID NO: 18166
  Cyclic GFR-binding peptide
  MOD_RES (1), (32): Xaa is C or S

SEQ ID NO: 64291 - protein, 37 aa, Artificial Sequence; identical to SEQ ID NO: 18168
  Cyclic GFR-binding peptide
  MOD_RES (4), (5), (37): Xaa is C or S

SEQ ID NO: 64292 - protein, 20 aa, Artificial Sequence
  Cyclic GFR-binding peptide
EPISMLYLDENEKVVKFKYE

SEQ ID NO: 64293 - protein, 42 aa, Artificial Sequence; identical to SEQ ID NO: 18170
  Cyclic GFR-binding peptide
  MOD_RES (6), (7), (39), (41): Xaa is C or S

SEQ ID NO: 64294 - protein, 28 aa, Artificial Sequence
  Cyclic GFR-binding peptide
VPTKLEPISVLYLDDMGVPTKFKYEEGM

SEQ ID NO: 64295 - protein, 24 aa, Artificial Sequence
  Cyclic GFR-binding peptide
SQDLEPISILYLIGKTPKIKFKYE

SEQ ID NO: 64296 - protein, 41 aa, Artificial Sequence; identical to SEQ ID NO: 18172
  Cyclic GFR-binding peptide
  MOD_RES (6), (7), (39), (41): Xaa is C or S

SEQ ID NO: 64297 - protein, 36 aa, Artificial Sequence; identical to SEQ ID NO: 18176
  Cyclic GFR-binding peptide
  MOD_RES (6), (6): Xaa is C or S

SEQ ID NO: 64298 - protein, 37 aa, Artificial Sequence; identical to SEQ ID NO: 18177
  Cyclic GFR-binding peptide
  MOD_RES (4), (5), (37): Xaa is C or S

SEQ ID NO: 64299 - protein, 25 aa, Artificial Sequence
  Cyclic GFR-binding peptide
LSPISILYIVGRKPKVYKQYEMIVR

SEQ ID NO: 64300 - protein, 35 aa, Artificial Sequence; identical to SEQ ID NO: 18180
  Cyclic GFR-binding peptide
  MOD_RES (3), (4), (35): Xaa is C or S

SEQ ID NO: 64301 - protein, 27 aa, Artificial Sequence
  Cyclic GFR-binding peptide
  MOD_RES (27), (27): Xaa is C or S
LEPISILYLIGKTPKIKFKYEMIVKSX

SEQ ID NO: 64302 - protein, 41 aa, Artificial Sequence; identical to SEQ ID NO: 18182
  Cyclic GFR-binding peptide
  MOD_RES (5), (6), (38), (40): Xaa is C or S

SEQ ID NO: 64303 - protein, 31 aa, Artificial Sequence
  Cyclic GFR-binding peptide
  MOD_RES (4), (5): Xaa is C or S
GKAXXVPTKLSPISVLYIDDMGVPTYKQYEE

SEQ ID NO: 64304 - protein, 29 aa, Artificial Sequence
  Cyclic GFR-binding peptide
TKLSPISILYKDKGVVTYLKYHYGMAVSE

SEQ ID NO: 64305 - protein, 30 aa, Artificial Sequence
  Cyclic GFR-binding peptide
  MOD_RES (3), (4): Xaa is C or S
APXXVPQALSPISILYIVGRKPKVYKQYEM

SEQ ID NO: 64306 - protein, 33 aa, Artificial Sequence; identical to SEQ ID NO: 18186
  Cyclic GFR-binding peptide
  MOD_RES (32), (32): Xaa is C or S

SEQ ID NO: 64307 - protein, 38 aa, Artificial Sequence; identical to SEQ ID NO: 18187
  Cyclic GFR-binding peptide
  MOD_RES (6), (7): Xaa is C or S

SEQ ID NO: 64308 - protein, 36 aa, Artificial Sequence
  Cyclic GFR-binding peptide
  MOD_RES (6), (7): Xaa is C or S
AAPASXXVPARLSPISILYKDAANNVVLKYHYDMVV

SEQ ID NO: 64309 - protein, 32 aa, Artificial Sequence
  Cyclic GFR-binding peptide
  MOD_RES (6), (6): Xaa is C or S
VTKPTXAPTKLSPISVLYIDDSSNVIYKQYEN

SEQ ID NO: 64310 - protein, 38 aa, Artificial Sequence; identical to SEQ ID NO: 18189
  Cyclic GFR-binding peptide
  MOD_RES (3), (4), (36), (38): Xaa is C or S

SEQ ID NO: 64311 - protein, 39 aa, Artificial Sequence; identical to SEQ ID NO: 18190
  Cyclic GFR-binding peptide
  MOD_RES (3), (4), (36), (38): Xaa is C or S

SEQ ID NO: 64312 - protein, 29 aa, Artificial Sequence
  Cyclic GFR-binding peptide
  MOD_RES (1), (2): Xaa is C or S
XXVPTKLSPISILYIDKGVVTYYKQYEGM

SEQ ID NO: 64313 - protein, 35 aa, Artificial Sequence; identical to SEQ ID NO: 18193
  Cyclic GFR-binding peptide
  MOD_RES (1), (33), (35): Xaa is C or S

SEQ ID NO: 64314 - protein, 36 aa, Artificial Sequence; identical to SEQ ID NO: 18199
  Cyclic GFR-binding peptide
  MOD_RES (2), (3), (35): Xaa is C or S

SEQ ID NO: 64315 - protein, 32 aa, Artificial Sequence
  Cyclic GFR-binding peptide
  MOD_RES (6), (7): Xaa is C or S
ASAAPXXVPQALSPISILYIVGRKPKVYKQYE

SEQ ID NO: 64316 - protein, 35 aa, Artificial Sequence
  Cyclic GFR-binding peptide
  MOD_RES (6), (7): Xaa is C or S
TVPKPXXAPTQLSPISVLYIDDSSNVIYKQYENMV

SEQ ID NO: 64317 - protein, 35 aa, Artificial Sequence
  Cyclic GFR-binding peptide
  MOD_RES (6), (7): Xaa is C or S
KIPKAXXVPTELEPISMLYLDENEKVVKFKYEDMV

SEQ ID NO: 64318 - protein, 31 aa, Artificial Sequence; identical to SEQ ID NO: 18202
  Cyclic GFR-binding peptide

SEQ ID NO: 64319 - protein, 25 aa, Artificial Sequence
  Cyclic GFR-binding peptide
VPTELEPISMLYLDEYDKVVKFKYE

SEQ ID NO: 64320 - protein, 34 aa, Artificial Sequence; identical to SEQ ID NO: 18207
  Cyclic GFR-binding peptide
  MOD_RES (3), (4): Xaa is C or S

SEQ ID NO: 64321 - protein, 37 aa, Artificial Sequence; identical to SEQ ID NO: 18209
  Cyclic GFR-binding peptide
  MOD_RES (1), (2), (34), (36): Xaa is C or S

SEQ ID NO: 64322 - protein, 33 aa, Artificial Sequence
  Cyclic GFR-binding peptide
  MOD_RES (31), (33): Xaa is C or S
PTKLEPISVLYLDDSSNVIKFKYENMVVRSXGX

SEQ ID NO: 64323 - protein, 41 aa, Artificial Sequence; identical to SEQ ID NO: 18212
  Cyclic GFR-binding peptide
  MOD_RES (5), (6), (38), (40): Xaa is C or S

SEQ ID NO: 64324 - protein, 29 aa, Artificial Sequence
  Cyclic GFR-binding peptide
TKLSPISVLYIDSSNNVIYKQYENMVVKA

SEQ ID NO: 64325 - protein, 24 aa, Artificial Sequence
  Cyclic GFR-binding peptide
QDLSPISILYIVGRTPKVYKQYEM

SEQ ID NO: 64326 - protein, 33 aa, Artificial Sequence; identical to SEQ ID NO: 18220
  Cyclic GFR-binding peptide
  MOD_RES (2), (3): Xaa is C or S

SEQ ID NO: 64327 - protein, 30 aa, Artificial Sequence
  Cyclic GFR-binding peptide
  MOD_RES (27), (29): Xaa is C or S
EPISILYLDAANNVVKFKYEDMVVEAXGXR

SEQ ID NO: 64328 - protein, 32 aa, Artificial Sequence
  Cyclic GFR-binding peptide
  MOD_RES (5), (6): Xaa is C or S
ASKAXXVPTKLNAISILYFDKGVVTYLKKYRG

SEQ ID NO: 64329 - protein, 31 aa, Artificial Sequence
  Cyclic GFR-binding peptide
  MOD_RES (5), (6): Xaa is C or S
IPKAXXVPTELSPISMLYIDENEKVVYKQYE

SEQ ID NO: 64330 - protein, 29 aa, Artificial Sequence
  Cyclic GFR-binding peptide
  MOD_RES (3), (4): Xaa is C or S
KAXXVPTKLNAISILYFDKGVVTYLKKYR

SEQ ID NO: 64331 - protein, 27 aa, Artificial Sequence
  Cyclic GFR-binding peptide
APTKLSPISVLYIDSSNNVIYKQYENM

SEQ ID NO: 64332 - protein, 24 aa, Artificial Sequence
  Cyclic GFR-binding peptide
DLEPISILYLIGKTPKIKFKYEMI

SEQ ID NO: 64333 - protein, 26 aa, Artificial Sequence
  Cyclic GFR-binding peptide
ELSPISMLYIDENEKVVYKQYEDMVV

SEQ ID NO: 64334 - protein, 34 aa, Artificial Sequence
  Cyclic GFR-binding peptide
  MOD_RES (6), (7): Xaa is C or S
ASASPXXVSQDLEPISILYLIGKTPKIKFKYEMI

SEQ ID NO: 64335 - protein, 20 aa, Artificial Sequence
  Cyclic GFR-binding peptide
EPISILYLDAANNVVKFKYE

SEQ ID NO: 64336 - protein, 31 aa, Artificial Sequence
  Cyclic GFR-binding peptide
  MOD_RES (4), (5): Xaa is C or S
PASXXVPARLEPISILYLDAANNVVKFKYED

SEQ ID NO: 64337 - protein, 39 aa, Artificial Sequence; identical to SEQ ID NO: 18236
  Cyclic GFR-binding peptide
  MOD_RES (3), (4), (37), (39): Xaa is C or S

SEQ ID NO: 64338 - protein, 33 aa, Artificial Sequence
  Cyclic GFR-binding peptide
  MOD_RES (5), (6): Xaa is C or S
APASXXVPARLSPISILYKDAANNVVLKYHYDM

SEQ ID NO: 64339 - protein, 27 aa, Artificial Sequence
  Cyclic GFR-binding peptide
KLSPISILYIDKGVVTYYKQYEGMAVS

SEQ ID NO: 64340 - protein, 29 aa, Artificial Sequence
  Cyclic GFR-binding peptide
TELEPISMLYLDEYDKVVKFKYEEMVVEG

SEQ ID NO: 64341 - protein, 30 aa, Artificial Sequence
  Cyclic GFR-binding peptide
PTKLSPISVLYIDDMGVPTYKQYEEGMSVA

SEQ ID NO: 64342 - protein, 23 aa, Artificial Sequence
  Cyclic GFR-binding peptide
ALEPISILYLVGRKPKVKFKYEM

SEQ ID NO: 64343 - protein, 30 aa, Artificial Sequence
  Cyclic GFR-binding peptide
  MOD_RES (28), (30): Xaa is C or S
LSPISILYKDKGVVTYLKYHYGMAVSEXGX

SEQ ID NO: 64344 - protein, 33 aa, Artificial Sequence; identical to SEQ ID NO: 18249
  Cyclic GFR-binding peptide
  MOD_RES (32), (32): Xaa is C or S

SEQ ID NO: 64345 - protein, 30 aa, Artificial Sequence; identical to SEQ ID NO: 18254
  Cyclic GFR-binding peptide

SEQ ID NO: 64346 - protein, 23 aa, Artificial Sequence
  Cyclic GFR-binding peptide
EPISVLYLDDMGVPTKFKYEEGM

SEQ ID NO: 64347 - protein, 27 aa, Artificial Sequence
  Cyclic GFR-binding peptide
  MOD_RES (1), (1): Xaa is C or S
XAPTKLEPISVLYLDDSSNVIKFKYEN

SEQ ID NO: 64348 - protein, 35 aa, Artificial Sequence; identical to SEQ ID NO: 18261
  Cyclic GFR-binding peptide
  MOD_RES (1), (33), (35): Xaa is C or S

SEQ ID NO: 64349 - protein, 37 aa, Artificial Sequence
  Cyclic GFR-binding peptide
  MOD_RES (5), (6): Xaa is C or S
VGKAXXVPTKLEPISVLYLDDMGVPTKFKYEEGMSVA

SEQ ID NO: 64350 - protein, 33 aa, Artificial Sequence
  Cyclic GFR-binding peptide
  MOD_RES (31), (33): Xaa is C or S
TKLSPISVLYIDDMGVPTYKQYEEGMSVAEXGX

SEQ ID NO: 64351 - protein, 30 aa, Artificial Sequence
  Cyclic GFR-binding peptide
  MOD_RES (28), (30): Xaa is C or S
DLSPISILYIIGKTPKIYKQYEMIVKSXKX

SEQ ID NO: 64352 - protein, 29 aa, Artificial Sequence
  Cyclic GFR-binding peptide
PTKLEPISVLYLDDMGVPTKFKYEEGMSV

SEQ ID NO: 64353 - protein, 30 aa, Artificial Sequence
  Cyclic GFR-binding peptide
  MOD_RES (3), (4): Xaa is C or S
KAXXAPTKLEPISVLYLDSSNNVIKFKYEN

SEQ ID NO: 64354 - protein, 38 aa, Artificial Sequence; identical to SEQ ID NO: 18272
  Cyclic GFR-binding peptide
  MOD_RES (3), (4), (36), (38): Xaa is C or S

SEQ ID NO: 64355 - protein, 33 aa, Artificial Sequence
  Cyclic GFR-binding peptide
  MOD_RES (4), (5): Xaa is C or S
PASXXVPARLNAISILYFDAANNVVLKKYRDMV

SEQ ID NO: 64356 - protein, 21 aa, Artificial Sequence
  Cyclic GFR-binding peptide
EPISILYLIGKTPKIKFKYEM

SEQ ID NO: 64357 - protein, 38 aa, Artificial Sequence; identical to SEQ ID NO: 18277
  Cyclic GFR-binding peptide
  MOD_RES (3), (4), (36), (38): Xaa is C or S

SEQ ID NO: 64358 - protein, 30 aa, Artificial Sequence
  Cyclic GFR-binding peptide
  MOD_RES (30), (30): Xaa is C or S
PQDLSPISILYIVGRTPKVYKQYEMVVKSX

SEQ ID NO: 64359 - protein, 29 aa, Artificial Sequence
  Cyclic GFR-binding peptide
  MOD_RES (28), (28): Xaa is C or S
LSPISILYKDAANNVVLKYHYDMVVEAXG

SEQ ID NO: 64360 - protein, 36 aa, Artificial Sequence; identical to SEQ ID NO: 18283
  Cyclic GFR-binding peptide
  MOD_RES (4), (5), (36): Xaa is C or S

SEQ ID NO: 64361 - protein, 31 aa, Artificial Sequence
  Cyclic GFR-binding peptide
  MOD_RES (1), (2): Xaa is C or S
XXVPTELEPISMLYLDEYDKVVKFKYEEMVV

SEQ ID NO: 64362 - protein, 35 aa, Artificial Sequence
  Cyclic GFR-binding peptide
  MOD_RES (5), (6): Xaa is C or S
IPKAXXVPTELEPISMLYLDENEKVVKFKYEDMVV

SEQ ID NO: 64363 - protein, 35 aa, Artificial Sequence; identical to SEQ ID NO: 18284
  Cyclic GFR-binding peptide
  MOD_RES (4), (5): Xaa is C or S

SEQ ID NO: 64364 - protein, 31 aa, Artificial Sequence
  Cyclic GFR-binding peptide
  MOD_RES (1), (1): Xaa is C or S
XVPTKLSPISVLYIDDMGVPTYKQYEEGMSV

SEQ ID NO: 64365 - protein, 36 aa, Artificial Sequence; identical to SEQ ID NO: 18287
  Cyclic GFR-binding peptide
  MOD_RES (5), (6): Xaa is C or S

SEQ ID NO: 64366 - protein, 40 aa, Artificial Sequence; identical to SEQ ID NO: 18288
  Cyclic GFR-binding peptide
  MOD_RES (5), (6), (38), (40): Xaa is C or S

SEQ ID NO: 64367 - protein, 37 aa, Artificial Sequence; identical to SEQ ID NO: 18293
  Cyclic GFR-binding peptide
  MOD_RES (3), (35), (37): Xaa is C or S

SEQ ID NO: 64368 - protein, 27 aa, Artificial Sequence
  Cyclic GFR-binding peptide
VPTKLEPISVLYLDDMGVPTKFKYEEG

SEQ ID NO: 64369 - protein, 34 aa, Artificial Sequence
  Cyclic GFR-binding peptide
  MOD_RES (5), (6): Xaa is C or S
SASPXXVPQDLEPISILYLVGRTPKVKFKYEMVV

SEQ ID NO: 64370 - protein, 37 aa, Artificial Sequence; identical to SEQ ID NO: 18294
  Cyclic GFR-binding peptide
  MOD_RES (4), (36): Xaa is C or S

SEQ ID NO: 64371 - protein, 32 aa, Artificial Sequence
  Cyclic GFR-binding peptide
  MOD_RES (29), (31): Xaa is C or S
LSPISVLYIDDMGVPTYKQYEEGMSVAEXGXR

SEQ ID NO: 64372 - protein, 30 aa, Artificial Sequence
  Cyclic GFR-binding peptide
  MOD_RES (29), (29): Xaa is C or S
QDLEPISILYLVGRTPKVKFKYEMVVKSXK

SEQ ID NO: 64373 - protein, 30 aa, Artificial Sequence
  Cyclic GFR-binding peptide
  MOD_RES (3), (4): Xaa is C or S
KAXXVPTKLSPISILYKDKGVVTYLKYHYG

SEQ ID NO: 64374 - protein, 21 aa, Artificial Sequence
  Cyclic GFR-binding peptide
LEPISVLYLDDMGVPTKFKYE

SEQ ID NO: 64375 - protein, 31 aa, Artificial Sequence
  Cyclic GFR-binding peptide
VPTKLSPISVLYIDDMGVPTYKQYEEGMSVA

SEQ ID NO: 64376 - protein, 35 aa, Artificial Sequence; identical to SEQ ID NO: 18299
  Cyclic GFR-binding peptide
  MOD_RES (2), (3), (35): Xaa is C or S

SEQ ID NO: 64377 - protein, 27 aa, Artificial Sequence
  Cyclic GFR-binding peptide
QLEPISVLYLDDSSNVIKFKYENMVVR

SEQ ID NO: 64378 - protein, 39 aa, Artificial Sequence; identical to SEQ ID NO: 18302
  Cyclic GFR-binding peptide
  MOD_RES (3), (4), (36), (38): Xaa is C or S

SEQ ID NO: 64379 - protein, 29 aa, Artificial Sequence
  Cyclic GFR-binding peptide
  MOD_RES (3), (4): Xaa is C or S
APXXVPQALEPISILYLVGRKPKVKFKYE

SEQ ID NO: 64380 - protein, 38 aa, Artificial Sequence; identical to SEQ ID NO: 18319
  Cyclic GFR-binding peptide
  MOD_RES (4), (5), (37): Xaa is C or S

SEQ ID NO: 64381 - protein, 37 aa, Artificial Sequence; identical to SEQ ID NO: 18322
  Cyclic GFR-binding peptide
  MOD_RES (1), (2), (34), (36): Xaa is C or S

SEQ ID NO: 64382 - protein, 25 aa, Artificial Sequence
  Cyclic GFR-binding peptide
ARLEPISILYLDAANNVVKFKYEDM

SEQ ID NO: 64383 - protein, 28 aa, Artificial Sequence
  Cyclic GFR-binding peptide
KLEPISVLYLDDMGVPTKFKYEEGMSVA

SEQ ID NO: 64384 - protein, 37 aa, Artificial Sequence; identical to SEQ ID NO: 18323
  Cyclic GFR-binding peptide
  MOD_RES (2), (3), (34), (36): Xaa is C or S

SEQ ID NO: 64385 - protein, 33 aa, Artificial Sequence
  Cyclic GFR-binding peptide
  MOD_RES (7), (7): Xaa is C or S
HVTKPTXAPTKLEPISVLYLDDSSNVIKFKYEN

SEQ ID NO: 64386 - protein, 30 aa, Artificial Sequence
  Cyclic GFR-binding peptide
  MOD_RES (1), (2): Xaa is C or S
XXVPTELEPISMLYLDENEKVVKFKYEDMV

SEQ ID NO: 64387 - protein, 35 aa, Artificial Sequence; identical to SEQ ID NO: 18326
  Cyclic GFR-binding peptide
  MOD_RES (3), (4): Xaa is C or S

SEQ ID NO: 64388 - protein, 23 aa, Artificial Sequence
  Cyclic GFR-binding peptide
NAISILYFDAANNVVLKKYRDMV

SEQ ID NO: 64389 - protein, 29 aa, Artificial Sequence
  Cyclic GFR-binding peptide
  MOD_RES (3), (4): Xaa is C or S
KPXXAPTQLEPISVLYLDDSSNVIKFKYE

SEQ ID NO: 64390 - protein, 23 aa, Artificial Sequence
  Cyclic GFR-binding peptide
LNAISILYFDKGVVTYLKKYRGM

SEQ ID NO: 64391 - protein, 36 aa, Artificial Sequence; identical to SEQ ID NO: 18333
  Cyclic GFR-binding peptide
  MOD_RES (5), (5): Xaa is C or S

SEQ ID NO: 64392 - protein, 24 aa, Artificial Sequence
  Cyclic GFR-binding peptide
SPISILYKDKGVVTYLKYHYGMAV

SEQ ID NO: 64393 - protein, 29 aa, Artificial Sequence
  Cyclic GFR-binding peptide
  MOD_RES (2), (3): Xaa is C or S
PXXAPTQLEPISVLYLDDSSNVIKFKYEN

SEQ ID NO: 64394 - protein, 41 aa, Artificial Sequence; identical to SEQ ID NO: 18334
  Cyclic GFR-binding peptide
  MOD_RES (5), (6), (38), (40): Xaa is C or S

SEQ ID NO: 64395 - protein, 38 aa, Artificial Sequence; identical to SEQ ID NO: 18335
  Cyclic GFR-binding peptide
  MOD_RES (2), (3), (36), (38): Xaa is C or S

SEQ ID NO: 64396 - protein, 40 aa, Artificial Sequence; identical to SEQ ID NO: 18337
  Cyclic GFR-binding peptide
  MOD_RES (4), (5), (37), (39): Xaa is C or S

SEQ ID NO: 64397 - protein, 34 aa, Artificial Sequence; identical to SEQ ID NO: 18338
  Cyclic GFR-binding peptide
  MOD_RES (2), (3): Xaa is C or S

SEQ ID NO: 64398 - protein, 29 aa, Artificial Sequence
  Cyclic GFR-binding peptide
  MOD_RES (1), (2): Xaa is C or S
XXVPARLNAISILYFDAANNVVLKKYRDM

SEQ ID NO: 64399 - protein, 25 aa, Artificial Sequence
  Cyclic GFR-binding peptide
APTKLEPISVLYLDSSNNVIKFKYE

SEQ ID NO: 64400 - protein, 41 aa, Artificial Sequence; identical to SEQ ID NO: 18341
  Cyclic GFR-binding peptide
  MOD_RES (4), (5), (38), (40): Xaa is C or S

SEQ ID NO: 64401 - protein, 36 aa, Artificial Sequence; identical to SEQ ID NO: 18343
  Cyclic GFR-binding peptide
  MOD_RES (1), (33), (35): Xaa is C or S

SEQ ID NO: 64402 - protein, 27 aa, Artificial Sequence
  Cyclic GFR-binding peptide
LSPISVLYIDDSSNVIYKQYENMVVRS

SEQ ID NO: 64403 - protein, 26 aa, Artificial Sequence
  Cyclic GFR-binding peptide
PARLSPISILYKDAANNVVLKYHYDM

SEQ ID NO: 64404 - protein, 30 aa, Artificial Sequence; identical to SEQ ID NO: 18344
  Cyclic GFR-binding peptide

SEQ ID NO: 64405 - protein, 33 aa, Artificial Sequence
  Cyclic GFR-binding peptide
  MOD_RES (6), (7): Xaa is C or S
SIPKAXXVPTELSPISMLYIDEYDKVVYKQYEE

SEQ ID NO: 64406 - protein, 32 aa, Artificial Sequence
  Cyclic GFR-binding peptide
  MOD_RES (29), (31): Xaa is C or S
QDLEPISILYLVGRTPKVKFKYEMVVKSXKXS

SEQ ID NO: 64407 - protein, 32 aa, Artificial Sequence
  Cyclic GFR-binding peptide
  MOD_RES (30), (32): Xaa is C or S
TKLSPISILYKDKGVVTYLKYHYGMAVSEXGX

SEQ ID NO: 64408 - protein, 42 aa, Artificial Sequence; identical to SEQ ID NO: 18346
  Cyclic GFR-binding peptide
  MOD_RES (5), (6), (39), (41): Xaa is C or S

SEQ ID NO: 64409 - protein, 33 aa, Artificial Sequence; identical to SEQ ID NO: 18348
  Cyclic GFR-binding peptide
  MOD_RES (1), (2): Xaa is C or S

SEQ ID NO: 64410 - protein, 30 aa, Artificial Sequence
  Cyclic GFR-binding peptide
  MOD_RES (28), (30): Xaa is C or S
LSPISMLYIDENEKVVYKQYEDMVVEGXGX

SEQ ID NO: 64411 - protein, 28 aa, Artificial Sequence
  Cyclic GFR-binding peptide
  MOD_RES (2), (3): Xaa is C or S
SXXVPARLSPISILYKDAANNVVLKYHY

SEQ ID NO: 64412 - protein, 34 aa, Artificial Sequence
  Cyclic GFR-binding peptide
  MOD_RES (5), (6): Xaa is C or S
VPKPXXAPTQLEPISVLYLDDSSNVIKFKYENMV

SEQ ID NO: 64413 - protein, 30 aa, Artificial Sequence
  Cyclic GFR-binding peptide
  MOD_RES (1), (1): Xaa is C or S
XAPTKLSPISVLYIDSSNNVIYKQYENMVV

SEQ ID NO: 64414 - protein, 37 aa, Artificial Sequence; identical to SEQ ID NO: 18352
  Cyclic GFR-binding peptide
  MOD_RES (2), (34), (36): Xaa is C or S

SEQ ID NO: 64415 - protein, 34 aa, Artificial Sequence; identical to SEQ ID NO: 18354
  Cyclic GFR-binding peptide
  MOD_RES (3), (4): Xaa is C or S

SEQ ID NO: 64416 - protein, 27 aa, Artificial Sequence
  Cyclic GFR-binding peptide
LSPISVLYIDDSSNVIYKQYENMVVRA

SEQ ID NO: 64417 - protein, 37 aa, Artificial Sequence; identical to SEQ ID NO: 18359
  Cyclic GFR-binding peptide
  MOD_RES (4), (5), (37): Xaa is C or S

SEQ ID NO: 64418 - protein, 28 aa, Artificial Sequence
  Cyclic GFR-binding peptide
VPTELSPISMLYIDENEKVVYKQYEDMV

SEQ ID NO: 64419 - protein, 29 aa, Artificial Sequence
  Cyclic GFR-binding peptide
  MOD_RES (2), (3): Xaa is C or S
AXXVPTKLNAISILYFDKGVVTYLKKYRG

SEQ ID NO: 64420 - protein, 35 aa, Artificial Sequence; identical to SEQ ID NO: 18362
  Cyclic GFR-binding peptide
  MOD_RES (4), (5): Xaa is C or S

SEQ ID NO: 64421 - protein, 24 aa, Artificial Sequence
  Cyclic GFR-binding peptide
KLEPISVLYLDSSNNVIKFKYENM

SEQ ID NO: 64422 - protein, 26 aa, Artificial Sequence
  Cyclic GFR-binding peptide
TQLEPISVLYLDDSSNVIKFKYENMV

SEQ ID NO: 64423 - protein, 25 aa, Artificial Sequence
  Cyclic GFR-binding peptide
SPISILYIDKGVVTYYKQYEGMAVS

SEQ ID NO: 64424 - protein, 29 aa, Artificial Sequence
  Cyclic GFR-binding peptide
  MOD_RES (29), (29): Xaa is C or S
KLSPISVLYIDSSNNVIYKQYENMVVKAX

SEQ ID NO: 64425 - protein, 30 aa, Artificial Sequence
  Cyclic GFR-binding peptide
PTQLSPISVLYIDDSSNVIYKQYENMVVRA

SEQ ID NO: 64426 - protein, 28 aa, Artificial Sequence
  Cyclic GFR-binding peptide
  MOD_RES (28), (28): Xaa is C or S
LEPISMLYLDENEKVVKFKYEDMVVEGX

SEQ ID NO: 64427 - protein, 34 aa, Artificial Sequence
  Cyclic GFR-binding peptide
  MOD_RES (31), (33): Xaa is C or S
PARLNAISILYFDAANNVVLKKYRDMVVEAXGXR

SEQ ID NO: 64428 - protein, 28 aa, Artificial Sequence
  Cyclic GFR-binding peptide
QLEPISVLYLDDSSNVIKFKYENMVVRA

SEQ ID NO: 64429 - protein, 29 aa, Artificial Sequence
  Cyclic GFR-binding peptide
  MOD_RES (28), (28): Xaa is C or S
LEPISVLYLDDSSNVIKFKYENMVVRSXG

SEQ ID NO: 64430 - protein, 27 aa, Artificial Sequence
  Cyclic GFR-binding peptide
VPARLEPISILYLDAANNVVKFKYEDM

SEQ ID NO: 64431 - protein, 35 aa, Artificial Sequence; identical to SEQ ID NO: 18372
  Cyclic GFR-binding peptide
  MOD_RES (32), (34): Xaa is C or S

SEQ ID NO: 64432 - protein, 40 aa, Artificial Sequence; identical to SEQ ID NO: 18373
  Cyclic GFR-binding peptide
  MOD_RES (5), (6), (38), (40): Xaa is C or S

SEQ ID NO: 64433 - protein, 30 aa, Artificial Sequence
  Cyclic GFR-binding peptide
  MOD_RES (1), (1): Xaa is C or S
XVPTELSPISMLYIDENEKVVYKQYEDMVV

SEQ ID NO: 64434 - protein, 34 aa, Artificial Sequence
  Cyclic GFR-binding peptide
  MOD_RES (6), (7): Xaa is C or S
AVPKAXXAPTKLEPISVLYLDSSNNVIKFKYENM

SEQ ID NO: 64435 - protein, 28 aa, Artificial Sequence
  Cyclic GFR-binding peptide
  MOD_RES (1), (1): Xaa is C or S
XVPTKLSPISILYKDKGVVTYLKYHYGM

SEQ ID NO: 64436 - protein, 35 aa, Artificial Sequence; identical to SEQ ID NO: 18377
  Cyclic GFR-binding peptide
  MOD_RES (3), (4): Xaa is C or S

SEQ ID NO: 64437 - protein, 38 aa, Artificial Sequence; identical to SEQ ID NO: 18382
  Cyclic GFR-binding peptide
  MOD_RES (2), (3), (35), (37): Xaa is C or S

SEQ ID NO: 64438 - protein, 32 aa, Artificial Sequence
  Cyclic GFR-binding peptide
  MOD_RES (4), (5): Xaa is C or S
PKPXXAPTKLEPISVLYLDDSSNVIKFKYENM

SEQ ID NO: 64439 - protein, 27 aa, Artificial Sequence
  Cyclic GFR-binding peptide
APTKLEPISVLYLDSSNNVIKFKYENM

SEQ ID NO: 64440 - protein, 41 aa, Artificial Sequence; identical to SEQ ID NO: 18385
  Cyclic GFR-binding peptide
  MOD_RES (4), (5), (38), (40): Xaa is C or S

SEQ ID NO: 64441 - protein, 25 aa, Artificial Sequence
  Cyclic GFR-binding peptide
SQDLSPISILYIIGKTPKIYKQYEM

SEQ ID NO: 64442 - protein, 34 aa, Artificial Sequence; identical to SEQ ID NO: 18393
  Cyclic GFR-binding peptide
  MOD_RES (2), (3): Xaa is C or S

SEQ ID NO: 64443 - protein, 29 aa, Artificial Sequence
  Cyclic GFR-binding peptide
  MOD_RES (2), (3): Xaa is C or S
SXXVPARLNAISILYFDAANNVVLKKYRD

SEQ ID NO: 64444 - protein, 26 aa, Artificial Sequence
  Cyclic GFR-binding peptide
APTKLEPISVLYLDDSSNVIKFKYEN

SEQ ID NO: 64445 - protein, 30 aa, Artificial Sequence
  Cyclic GFR-binding peptide
  MOD_RES (30), (30): Xaa is C or S
TKLEPISVLYLDSSNNVIKFKYENMVVKAX

SEQ ID NO: 64446 - protein, 25 aa, Artificial Sequence
  Cyclic GFR-binding peptide
VPTKLSPISVLYIDDMGVPTYKQYE

SEQ ID NO: 64447 - protein, 40 aa, Artificial Sequence; identical to SEQ ID NO: 18399
  Cyclic GFR-binding peptide
  MOD_RES (6), (7), (38), (40): Xaa is C or S

SEQ ID NO: 64448 - protein, 32 aa, Artificial Sequence
  Cyclic GFR-binding peptide
  MOD_RES (30), (32): Xaa is C or S
TELSPISMLYIDEYDKVVYKQYEEMVVEGXGX

SEQ ID NO: 64449 - protein, 28 aa, Artificial Sequence
  Cyclic GFR-binding peptide
  MOD_RES (28), (28): Xaa is C or S
LEPISMLYLDEYDKVVKFKYEEMVVEGX

SEQ ID NO: 64450 - protein, 32 aa, Artificial Sequence
  Cyclic GFR-binding peptide
  MOD_RES (31), (31): Xaa is C or S
PARLSPISILYKDAANNVVLKYHYDMVVEAXG

SEQ ID NO: 64451 - protein, 35 aa, Artificial Sequence; identical to SEQ ID NO: 18401
  Cyclic GFR-binding peptide
  MOD_RES (1), (33), (35): Xaa is C or S

SEQ ID NO: 64452 - protein, 32 aa, Artificial Sequence
  Cyclic GFR-binding peptide
  MOD_RES (29), (31): Xaa is C or S
LEPISVLYLDDMGVPTKFKYEEGMSVAEXGXR

SEQ ID NO: 64453 - protein, 30 aa, Artificial Sequence
  Cyclic GFR-binding peptide
  MOD_RES (1), (1): Xaa is C or S
XVPQDLEPISILYLVGRTPKVKFKYEMVVK

SEQ ID NO: 64454 - protein, 29 aa, Artificial Sequence
  Cyclic GFR-binding peptide
  MOD_RES (3), (4): Xaa is C or S
ASXXVPARLEPISILYLDAANNVVKFKYE

SEQ ID NO: 64455 - protein, 32 aa, Artificial Sequence
  Cyclic GFR-binding peptide
  MOD_RES (30), (32): Xaa is C or S
PQALEPISILYLVGRKPKVKFKYEMIVRSXKX

SEQ ID NO: 64456 - protein, 32 aa, Artificial Sequence
  Cyclic GFR-binding peptide
  MOD_RES (6), (7): Xaa is C or S
TVPKPXXAPTQLSPISVLYIDDSSNVIYKQYE

SEQ ID NO: 64457 - protein, 36 aa, Artificial Sequence; identical to SEQ ID NO: 18404
  Cyclic GFR-binding peptide
  MOD_RES (5), (6): Xaa is C or S

SEQ ID NO: 64458 - protein, 28 aa, Artificial Sequence
  Cyclic GFR-binding peptide
VSQDLEPISILYLIGKTPKIKFKYEMIV

SEQ ID NO: 64459 - protein, 26 aa, Artificial Sequence
  Cyclic GFR-binding peptide
  MOD_RES (1), (1): Xaa is C or S
XVSQDLSPISILYIIGKTPKIYKQYE

SEQ ID NO: 64460 - protein, 32 aa, Artificial Sequence
  Cyclic GFR-binding peptide
  MOD_RES (29), (31): Xaa is C or S
QDLSPISILYIIGKTPKIYKQYEMIVKSXKXS

SEQ ID NO: 64461 - protein, 37 aa, Artificial Sequence; identical to SEQ ID NO: 18411
  Cyclic GFR-binding peptide
  MOD_RES (5), (6), (37): Xaa is C or S

SEQ ID NO: 64462 - protein, 33 aa, Artificial Sequence
  Cyclic GFR-binding peptide
  MOD_RES (31), (33): Xaa is C or S
PTKLSPISILYIDKGVVTYYKQYEGMAVSEXGX

SEQ ID NO: 64463 - protein, 35 aa, Artificial Sequence; identical to SEQ ID NO: 18413
  Cyclic GFR-binding peptide
  MOD_RES (4), (5): Xaa is C or S

SEQ ID NO: 64464 - protein, 29 aa, Artificial Sequence
  Cyclic GFR-binding peptide
  MOD_RES (26), (28): Xaa is C or S
EPISILYLVGRTPKVKFKYEMVVKSXKXS

SEQ ID NO: 64465 - protein, 31 aa, Artificial Sequence
  Cyclic GFR-binding peptide
  MOD_RES (1), (2): Xaa is C or S
XXVPTKLSPISVLYIDDMGVPTYKQYEEGMS

SEQ ID NO: 64466 - protein, 30 aa, Artificial Sequence
  Cyclic GFR-binding peptide
  MOD_RES (1), (2): Xaa is C or S
XXVPTELSPISMLYIDEYDKVVYKQYEEMV

SEQ ID NO: 64467 - protein, 29 aa, Artificial Sequence
  Cyclic GFR-binding peptide
  MOD_RES (28), (28): Xaa is C or S
DLEPISILYLIGKTPKIKFKYEMIVKSXK

SEQ ID NO: 64468 - protein, 38 aa, Artificial Sequence; identical to SEQ ID NO: 18421
  Cyclic GFR-binding peptide
  MOD_RES (6), (7), (38): Xaa is C or S

SEQ ID NO: 64469 - protein, 27 aa, Artificial Sequence
  Cyclic GFR-binding peptide
  MOD_RES (27), (27): Xaa is C or S
SPISMLYIDEYDKVVYKQYEEMVVEGX

SEQ ID NO: 64470 - protein, 35 aa, Artificial Sequence
  Cyclic GFR-binding peptide
  MOD_RES (5), (6): Xaa is C or S
VPKPXXAPTKLSPISVLYIDDSSNVIYKQYENMVV

SEQ ID NO: 64471 - protein, 39 aa, Artificial Sequence; identical to SEQ ID NO: 18427
  Cyclic GFR-binding peptide
  MOD_RES (3), (4), (36), (38): Xaa is C or S

SEQ ID NO: 64472 - protein, 34 aa, Artificial Sequence; identical to SEQ ID NO: 18431
  Cyclic GFR-binding peptide
  MOD_RES (3), (4): Xaa is C or S

SEQ ID NO: 64473 - protein, 29 aa, Artificial Sequence
  Cyclic GFR-binding peptide
PTELSPISMLYIDENEKVVYKQYEDMVVE

SEQ ID NO: 64474 - protein, 27 aa, Artificial Sequence
  Cyclic GFR-binding peptide
DLSPISILYIVGRTPKVYKQYEMVVKS

SEQ ID NO: 64475 - protein, 34 aa, Artificial Sequence; identical to SEQ ID NO: 18435
  Cyclic GFR-binding peptide
  MOD_RES (1), (33): Xaa is C or S

SEQ ID NO: 64476 - protein, 36 aa, Artificial Sequence; identical to SEQ ID NO: 18436
  Cyclic GFR-binding peptide
  MOD_RES (2), (3), (35): Xaa is C or S

SEQ ID NO: 64477 - protein, 24 aa, Artificial Sequence
  Cyclic GFR-binding peptide
PTQLEPISVLYLDDSSNVIKFKYE

SEQ ID NO: 64478 - protein, 32 aa, Artificial Sequence; identical to SEQ ID NO: 18440
  Cyclic GFR-binding peptide
  MOD_RES (1), (2): Xaa is C or S

SEQ ID NO: 64479 - protein, 25 aa, Artificial Sequence
  Cyclic GFR-binding peptide
KLSPISVLYIDDMGVPTYKQYEEGM

SEQ ID NO: 64480 - protein, 33 aa, Artificial Sequence; identical to SEQ ID NO: 18445
  Cyclic GFR-binding peptide
  MOD_RES (1), (2): Xaa is C or S

SEQ ID NO: 64481 - protein, 22 aa, Artificial Sequence
  Cyclic GFR-binding peptide
LNAISILYFDKGVVTYLKKYRG

SEQ ID NO: 64482 - protein, 23 aa, Artificial Sequence
  Cyclic GFR-binding peptide
LEPISVLYLDSSNNVIKFKYENM

SEQ ID NO: 64483 - protein, 42 aa, Artificial Sequence; identical to SEQ ID NO: 18448
  Cyclic GFR-binding peptide
  MOD_RES (6), (7), (40), (42): Xaa is C or S

SEQ ID NO: 64484 - protein, 34 aa, Artificial Sequence
  Cyclic GFR-binding peptide
  MOD_RES (6), (7): Xaa is C or S
ASAAPXXVPQALEPISILYLVGRKPKVKFKYEMI

SEQ ID NO: 64485 - protein, 35 aa, Artificial Sequence; identical to SEQ ID NO: 18452
  Cyclic GFR-binding peptide
  MOD_RES (2), (3), (35): Xaa is C or S

SEQ ID NO: 64486 - protein, 40 aa, Artificial Sequence; identical to SEQ ID NO: 18454
  Cyclic GFR-binding peptide
  MOD_RES (4), (5), (37), (39): Xaa is C or S

SEQ ID NO: 64487 - protein, 22 aa, Artificial Sequence
  Cyclic GFR-binding peptide
EPISVLYLDSSNNVIKFKYENM

SEQ ID NO: 64488 - protein, 34 aa, Artificial Sequence; identical to SEQ ID NO: 18457
  Cyclic GFR-binding peptide
  MOD_RES (1), (33): Xaa is C or S

SEQ ID NO: 64489 - protein, 33 aa, Artificial Sequence
  Cyclic GFR-binding peptide
  MOD_RES (4), (4): Xaa is C or S
KPTXAPTKLSPISVLYIDDSSNVIYKQYENMVV

SEQ ID NO: 64490 - protein, 31 aa, Artificial Sequence
  Cyclic GFR-binding peptide
  MOD_RES (5), (6): Xaa is C or S
VPKAXXAPTKLEPISVLYLDSSNNVIKFKYE

SEQ ID NO: 64491 - protein, 22 aa, Artificial Sequence
  Cyclic GFR-binding peptide
KLSPISILYKDKGVVTYLKYHY

SEQ ID NO: 64492 - protein, 31 aa, Artificial Sequence
  Cyclic GFR-binding peptide
  MOD_RES (4), (5): Xaa is C or S
PKPXXAPTQLEPISVLYLDDSSNVIKFKYEN

SEQ ID NO: 64493 - protein, 25 aa, Artificial Sequence
  Cyclic GFR-binding peptide
LEPISVLYLDDSSNVIKFKYENMVV

SEQ ID NO: 64494 - protein, 37 aa, Artificial Sequence; identical to SEQ ID NO: 18463
  Cyclic GFR-binding peptide
  MOD_RES (4), (5), (37): Xaa is C or S

SEQ ID NO: 64495 - protein, 26 aa, Artificial Sequence
  Cyclic GFR-binding peptide
PQDLSPISILYIVGRTPKVYKQYEMV

SEQ ID NO: 64496 - protein, 26 aa, Artificial Sequence
  Cyclic GFR-binding peptide
KLSPISVLYIDDMGVPTYKQYEEGMS

SEQ ID NO: 64497 - protein, 31 aa, Artificial Sequence
  Cyclic GFR-binding peptide
  MOD_RES (5), (6): Xaa is C or S
IPKAXXVPTELSPISMLYIDEYDKVVYKQYE

SEQ ID NO: 64498 - protein, 28 aa, Artificial Sequence
  Cyclic GFR-binding peptide
VPTKLSPISILYKDKGVVTYLKYHYGMA

SEQ ID NO: 64499 - protein, 22 aa, Artificial Sequence
  Cyclic GFR-binding peptide
LEPISMLYLDENEKVVKFKYED

SEQ ID NO: 64500 - protein, 23 aa, Artificial Sequence
  Cyclic GFR-binding peptide
LSPISILYIIGKTPKIYKQYEMI

SEQ ID NO: 64501 - protein, 40 aa, Artificial Sequence; identical to SEQ ID NO: 18468
  Cyclic GFR-binding peptide
  MOD_RES (5), (6), (38), (40): Xaa is C or S

SEQ ID NO: 64502 - protein, 37 aa, Artificial Sequence; identical to SEQ ID NO: 18470
  Cyclic GFR-binding peptide
  MOD_RES (5), (6): Xaa is C or S

SEQ ID NO: 64503 - protein, 28 aa, Artificial Sequence
  Cyclic GFR-binding peptide
  MOD_RES (26), (28): Xaa is C or S
EPISILYLVGRKPKVKFKYEMIVRSXKX

SEQ ID NO: 64504 - protein, 35 aa, Artificial Sequence
  Cyclic GFR-binding peptide
  MOD_RES (5), (6): Xaa is C or S
VPKAXXAPTKLEPISVLYLDSSNNVIKFKYENMVV

SEQ ID NO: 64505 - protein, 41 aa, Artificial Sequence; identical to SEQ ID NO: 18472
  Cyclic GFR-binding peptide
  MOD_RES (5), (6), (38), (40): Xaa is C or S

SEQ ID NO: 64506 - protein, 33 aa, Artificial Sequence
  Cyclic GFR-binding peptide
  MOD_RES (3), (4): Xaa is C or S
KAXXVPTELEPISMLYLDENEKVVKFKYEDMVV

SEQ ID NO: 64507 - protein, 31 aa, Artificial Sequence; identical to SEQ ID NO: 18474
  Cyclic GFR-binding peptide
  MOD_RES (1), (1): Xaa is C or S

SEQ ID NO: 64508 - protein, 24 aa, Artificial Sequence
  Cyclic GFR-binding peptide
SPISMLYIDENEKVVYKQYEDMVV

SEQ ID NO: 64509 - protein, 30 aa, Artificial Sequence
  Cyclic GFR-binding peptide
  MOD_RES (1), (2): Xaa is C or S
XXVPQALEPISILYLVGRKPKVKFKYEMIV

SEQ ID NO: 64510 - protein, 30 aa, Artificial Sequence
  Cyclic GFR-binding peptide
  MOD_RES (29), (29): Xaa is C or S
ELSPISMLYIDEYDKVVYKQYEEMVVEGXG

SEQ ID NO: 64511 - protein, 25 aa, Artificial Sequence
  Cyclic GFR-binding peptide
VPARLEPISILYLDAANNVVKFKYE

SEQ ID NO: 64512 - protein, 27 aa, Artificial Sequence
  Cyclic GFR-binding peptide
  MOD_RES (1), (2): Xaa is C or S
XXVPTELEPISMLYLDENEKVVKFKYE

SEQ ID NO: 64513 - protein, 33 aa, Artificial Sequence; identical to SEQ ID NO: 18482
  Cyclic GFR-binding peptide
  MOD_RES (1), (2): Xaa is C or S

SEQ ID NO: 64514 - protein, 39 aa, Artificial Sequence; identical to SEQ ID NO: 18483
  Cyclic GFR-binding peptide
  MOD_RES (5), (6), (37), (39): Xaa is C or S

SEQ ID NO: 64515 - protein, 37 aa, Artificial Sequence; identical to SEQ ID NO: 18485
  Cyclic GFR-binding peptide
  MOD_RES (5), (6): Xaa is C or S

SEQ ID NO: 64516 - protein, 37 aa, Artificial Sequence; identical to SEQ ID NO: 18486
  Cyclic GFR-binding peptide
  MOD_RES (6), (7): Xaa is C or S

SEQ ID NO: 64517 - protein, 38 aa, Artificial Sequence; identical to SEQ ID NO: 18490
  Cyclic GFR-binding peptide
  MOD_RES (3), (35), (37): Xaa is C or S

SEQ ID NO: 64518 - protein, 25 aa, Artificial Sequence
  Cyclic GFR-binding peptide
LEPISILYLIGKTPKIKFKYEMIVK

SEQ ID NO: 64519 - protein, 35 aa, Artificial Sequence; identical to SEQ ID NO: 18496
  Cyclic GFR-binding peptide
  MOD_RES (3), (4): Xaa is C or S

SEQ ID NO: 64520 - protein, 22 aa, Artificial Sequence
  Cyclic GFR-binding peptide
EPISILYLDAANNVVKFKYEDM

SEQ ID NO: 64521 - protein, 35 aa, Artificial Sequence; identical to SEQ ID NO: 18498
  Cyclic GFR-binding peptide
  MOD_RES (3), (4): Xaa is C or S

SEQ ID NO: 64522 - protein, 26 aa, Artificial Sequence
  Cyclic GFR-binding peptide
LEPISVLYLDDMGVPTKFKYEEGMSV

SEQ ID NO: 64523 - protein, 35 aa, Artificial Sequence
  Cyclic GFR-binding peptide
  MOD_RES (6), (6): Xaa is C or S
VTKPTXAPTKLEPISVLYLDDSSNVIKFKYENMVV

SEQ ID NO: 64524 - protein, 33 aa, Artificial Sequence
  Cyclic GFR-binding peptide
  MOD_RES (4), (5): Xaa is C or S
AAPXXVPQALEPISILYLVGRKPKVKFKYEMIV

SEQ ID NO: 64525 - protein, 33 aa, Artificial Sequence
  Cyclic GFR-binding peptide
  MOD_RES (31), (33): Xaa is C or S
PTKLNAISILYFDKGVVTYLKKYRGMAVSEXGX

SEQ ID NO: 64526 - protein, 34 aa, Artificial Sequence; identical to SEQ ID NO: 18507
  Cyclic GFR-binding peptide
  MOD_RES (2), (34): Xaa is C or S

SEQ ID NO: 64527 - protein, 20 aa, Artificial Sequence
  Cyclic GFR-binding peptide
EPISMLYLDEYDKVVKFKYE

SEQ ID NO: 64528 - protein, 30 aa, Artificial Sequence
  Cyclic GFR-binding peptide
  MOD_RES (29), (29): Xaa is C or S
KLSPISVLYIDDSSNVIYKQYENMVVRSXG

SEQ ID NO: 64529 - protein, 29 aa, Artificial Sequence
  Cyclic GFR-binding peptide
  MOD_RES (27), (29): Xaa is C or S
EPISMLYLDEYDKVVKFKYEEMVVEGXGX

SEQ ID NO: 64530 - protein, 39 aa, Artificial Sequence; identical to SEQ ID NO: 18513
  Cyclic GFR-binding peptide
  MOD_RES (5), (6), (38): Xaa is C or S

SEQ ID NO: 64531 - protein, 40 aa, Artificial Sequence; identical to SEQ ID NO: 18515
  Cyclic GFR-binding peptide
  MOD_RES (4), (5), (37), (39): Xaa is C or S

SEQ ID NO: 64532 - protein, 30 aa, Artificial Sequence
  Cyclic GFR-binding peptide
  MOD_RES (3), (4): Xaa is C or S
KAXXVPTELSPISMLYIDEYDKVVYKQYEE

SEQ ID NO: 64533 - protein, 29 aa, Artificial Sequence
  Cyclic GFR-binding peptide
  MOD_RES (2), (3): Xaa is C or S
AXXVPTKLEPISVLYLDDMGVPTKFKYEE

SEQ ID NO: 64534 - protein, 23 aa, Artificial Sequence
  Cyclic GFR-binding peptide
EPISILYLVGRTPKVKFKYEMVV

SEQ ID NO: 64535 - protein, 35 aa, Artificial Sequence; identical to SEQ ID NO: 18519
  Cyclic GFR-binding peptide
  MOD_RES (1), (33), (35): Xaa is C or S

SEQ ID NO: 64536 - protein, 25 aa, Artificial Sequence
  Cyclic GFR-binding peptide
KLSPISILYIDKGVVTYYKQYEGMA

SEQ ID NO: 64537 - protein, 36 aa, Artificial Sequence; identical to SEQ ID NO: 18521
  Cyclic GFR-binding peptide
  MOD_RES (1), (2), (34), (36): Xaa is C or S

SEQ ID NO: 64538 - protein, 36 aa, Artificial Sequence; identical to SEQ ID NO: 18522
  Cyclic GFR-binding peptide
  MOD_RES (1), (2), (33), (35): Xaa is C or S

SEQ ID NO: 64539 - protein, 24 aa, Artificial Sequence
  Cyclic GFR-binding peptide
LSPISMLYIDEYDKVVYKQYEEMV

SEQ ID NO: 64540 - protein, 32 aa, Artificial Sequence
  Cyclic GFR-binding peptide
  MOD_RES (3), (4): Xaa is C or S
KAXXVPTELEPISMLYLDEYDKVVKFKYEEMV

SEQ ID NO: 64541 - protein, 36 aa, Artificial Sequence; identical to SEQ ID NO: 18524
  Cyclic GFR-binding peptide
  MOD_RES (1), (2), (34), (36): Xaa is C or S

SEQ ID NO: 64542 - protein, 37 aa, Artificial Sequence; identical to SEQ ID NO: 18530
  Cyclic GFR-binding peptide
  MOD_RES (2), (3), (35), (37): Xaa is C or S

SEQ ID NO: 64543 - protein, 25 aa, Artificial Sequence
  Cyclic GFR-binding peptide
DLSPISILYIVGRTPKVYKQYEMVV

SEQ ID NO: 64544 - protein, 30 aa, Artificial Sequence
  Cyclic GFR-binding peptide
  MOD_RES (29), (29): Xaa is C or S
KLNAISILYFDKGVVTYLKKYRGMAVSEXG

SEQ ID NO: 64545 - protein, 29 aa, Artificial Sequence
  Cyclic GFR-binding peptide
SQDLSPISILYIIGKTPKIYKQYEMIVKS

SEQ ID NO: 64546 - protein, 26 aa, Artificial Sequence
  Cyclic GFR-binding peptide
ELEPISMLYLDEYDKVVKFKYEEMVV

SEQ ID NO: 64547 - protein, 28 aa, Artificial Sequence
  Cyclic GFR-binding peptide
TELSPISMLYIDENEKVVYKQYEDMVVE

SEQ ID NO: 64548 - protein, 27 aa, Artificial Sequence
  Cyclic GFR-binding peptide
  MOD_RES (26), (26): Xaa is C or S
EPISILYLIGKTPKIKFKYEMIVKSXK

SEQ ID NO: 64549 - protein, 38 aa, Artificial Sequence; identical to SEQ ID NO: 18538
  Cyclic GFR-binding peptide
  MOD_RES (4), (36), (38): Xaa is C or S

SEQ ID NO: 64550 - protein, 31 aa, Artificial Sequence
  Cyclic GFR-binding peptide
  MOD_RES (5), (6): Xaa is C or S
SASPXXVSQDLSPISILYIIGKTPKIYKQYE

SEQ ID NO: 64551 - protein, 27 aa, Artificial Sequence
  Cyclic GFR-binding peptide
TKLEPISVLYLDDSSNVIKFKYENMVV

SEQ ID NO: 64552 - protein, 24 aa, Artificial Sequence
  Cyclic GFR-binding peptide
LSPISILYKDAANNVVLKYHYDMV

SEQ ID NO: 64553 - protein, 27 aa, Artificial Sequence
  Cyclic GFR-binding peptide
TELSPISMLYIDEYDKVVYKQYEEMVV

SEQ ID NO: 64554 - protein, 28 aa, Artificial Sequence
  Cyclic GFR-binding peptide
PQALEPISILYLVGRKPKVKFKYEMIVR

SEQ ID NO: 64555 - protein, 31 aa, Artificial Sequence
  Cyclic GFR-binding peptide
  MOD_RES (2), (3): Xaa is C or S
AXXAPTKLSPISVLYIDSSNNVIYKQYENMV

SEQ ID NO: 64556 - protein, 37 aa, Artificial Sequence; identical to SEQ ID NO: 18547
  Cyclic GFR-binding peptide
  MOD_RES (5), (6): Xaa is C or S

SEQ ID NO: 64557 - protein, 33 aa, Artificial Sequence; identical to SEQ ID NO: 18549
  Cyclic GFR-binding peptide
  MOD_RES (1), (2), (33): Xaa is C or S

SEQ ID NO: 64558 - protein, 26 aa, Artificial Sequence
  Cyclic GFR-binding peptide
SPISVLYIDSSNNVIYKQYENMVVKA

SEQ ID NO: 64559 - protein, 29 aa, Artificial Sequence
  Cyclic GFR-binding peptide
  MOD_RES (3), (4): Xaa is C or S
ASXXVPARLNAISILYFDAANNVVLKKYR

SEQ ID NO: 64560 - protein, 30 aa, Artificial Sequence
  Cyclic GFR-binding peptide
  MOD_RES (4), (5): Xaa is C or S
GKAXXVPTKLEPISVLYLDDMGVPTKFKYE

SEQ ID NO: 64561 - protein, 32 aa, Artificial Sequence; identical to SEQ ID NO: 18550
  Cyclic GFR-binding peptide
  MOD_RES (31), (31): Xaa is C or S

SEQ ID NO: 64562 - protein, 32 aa, Artificial Sequence
  Cyclic GFR-binding peptide
  MOD_RES (4), (5): Xaa is C or S
PKPXXAPTKLSPISVLYIDDSSNVIYKQYENM

SEQ ID NO: 64563 - protein, 35 aa, Artificial Sequence
  Cyclic GFR-binding peptide
  MOD_RES (7), (7): Xaa is C or S
HVTKPTXAPTKLSPISVLYIDDSSNVIYKQYENMV

SEQ ID NO: 64564 - protein, 40 aa, Artificial Sequence; identical to SEQ ID NO: 18552
  Cyclic GFR-binding peptide
  MOD_RES (6), (7), (39): Xaa is C or S

SEQ ID NO: 64565 - protein, 36 aa, Artificial Sequence; identical to SEQ ID NO: 18553
  Cyclic GFR-binding peptide
  MOD_RES (3), (4): Xaa is C or S

SEQ ID NO: 64566 - protein, 31 aa, Artificial Sequence
  Cyclic GFR-binding peptide
  MOD_RES (31), (31): Xaa is C or S
TKLSPISVLYIDDMGVPTYKQYEEGMSVAEX

SEQ ID NO: 64567 - protein, 31 aa, Artificial Sequence
  Cyclic GFR-binding peptide
  MOD_RES (1), (2): Xaa is C or S
XXVPTELSPISMLYIDENEKVVYKQYEDMVV

SEQ ID NO: 64568 - protein, 21 aa, Artificial Sequence
  Cyclic GFR-binding peptide
SPISVLYIDDSSNVIYKQYEN

SEQ ID NO: 64569 - protein, 42 aa, Artificial Sequence; identical to SEQ ID NO: 18557
  Cyclic GFR-binding peptide
  MOD_RES (6), (7), (39), (41): Xaa is C or S

SEQ ID NO: 64570 - protein, 22 aa, Artificial Sequence
  Cyclic GFR-binding peptide
KLEPISVLYLDDMGVPTKFKYE

SEQ ID NO: 64571 - protein, 29 aa, Artificial Sequence
  Cyclic GFR-binding peptide
  MOD_RES (28), (28): Xaa is C or S
LSPISVLYIDDSSNVIYKQYENMVVRSXG

SEQ ID NO: 64572 - protein, 27 aa, Artificial Sequence
  Cyclic GFR-binding peptide
  MOD_RES (27), (27): Xaa is C or S
EPISVLYLDSSNNVIKFKYENMVVKAX

SEQ ID NO: 64573 - protein, 30 aa, Artificial Sequence
  Cyclic GFR-binding peptide
  MOD_RES (3), (4): Xaa is C or S
SPXXVPQDLEPISILYLVGRTPKVKFKYEM

SEQ ID NO: 64574 - protein, 36 aa, Artificial Sequence; identical to SEQ ID NO: 18566
  Cyclic GFR-binding peptide
  MOD_RES (4), (5): Xaa is C or S

SEQ ID NO: 64575 - protein, 32 aa, Artificial Sequence; identical to SEQ ID NO: 18568
  Cyclic GFR-binding peptide
  MOD_RES (1), (2): Xaa is C or S

SEQ ID NO: 64576 - protein, 39 aa, Artificial Sequence; identical to SEQ ID NO: 18569
  Cyclic GFR-binding peptide
  MOD_RES (7), (39): Xaa is C or S

SEQ ID NO: 64577 - protein, 36 aa, Artificial Sequence; identical to SEQ ID NO: 18571
  Cyclic GFR-binding peptide
  MOD_RES (5), (6): Xaa is C or S

SEQ ID NO: 64578 - protein, 27 aa, Artificial Sequence
  Cyclic GFR-binding peptide
QDLEPISILYLIGKTPKIKFKYEMIVK

SEQ ID NO: 64579 - protein, 28 aa, Artificial Sequence
  Cyclic GFR-binding peptide
PTQLSPISVLYIDDSSNVIYKQYENMVV

SEQ ID NO: 64580 - protein, 33 aa, Artificial Sequence; identical to SEQ ID NO: 18579
  Cyclic GFR-binding peptide
  MOD_RES (31), (33): Xaa is C or S

SEQ ID NO: 64581 - protein, 36 aa, Artificial Sequence; identical to SEQ ID NO: 18580
  Cyclic GFR-binding peptide
  MOD_RES (1), (33), (35): Xaa is C or S

SEQ ID NO: 64582 - protein, 32 aa, Artificial Sequence
  Cyclic GFR-binding peptide
  MOD_RES (5), (6): Xaa is C or S
APASXXVPARLSPISILYKDAANNVVLKYHYD

SEQ ID NO: 64583 - protein, 32 aa, Artificial Sequence; identical to SEQ ID NO: 18583
  Cyclic GFR-binding peptide
  MOD_RES (1), (1): Xaa is C or S

SEQ ID NO: 64584 - protein, 42 aa, Artificial Sequence; identical to SEQ ID NO: 18584
  Cyclic GFR-binding peptide
  MOD_RES (5), (6), (39), (41): Xaa is C or S

SEQ ID NO: 64585 - protein, 35 aa, Artificial Sequence; identical to SEQ ID NO: 18585
  Cyclic GFR-binding peptide
  MOD_RES (32), (34): Xaa is C or S

SEQ ID NO: 64586 - protein, 28 aa, Artificial Sequence
  Cyclic GFR-binding peptide
  MOD_RES (28), (28): Xaa is C or S
DLEPISILYLVGRTPKVKFKYEMVVKSX

SEQ ID NO: 64587 - protein, 27 aa, Artificial Sequence
  Cyclic GFR-binding peptide
  MOD_RES (1), (2): Xaa is C or S
XXAPTKLSPISVLYIDDSSNVIYKQYE

SEQ ID NO: 64588 - protein, 30 aa, Artificial Sequence
  Cyclic GFR-binding peptide
  MOD_RES (1), (1): Xaa is C or S
XVPTKLSPISVLYIDDMGVPTYKQYEEGMS

SEQ ID NO: 64589 - protein, 34 aa, Artificial Sequence; identical to SEQ ID NO: 18588
  Cyclic GFR-binding peptide
  MOD_RES (2), (3), (34): Xaa is C or S

SEQ ID NO: 64590 - protein, 32 aa, Artificial Sequence; identical to SEQ ID NO: 18590
  Cyclic GFR-binding peptide
  MOD_RES (1), (1): Xaa is C or S

SEQ ID NO: 64591 - protein, 33 aa, Artificial Sequence; identical to SEQ ID NO: 18596
  Cyclic GFR-binding peptide
  MOD_RES (1), (2): Xaa is C or S

SEQ ID NO: 64592 - protein, 28 aa, Artificial Sequence
  Cyclic GFR-binding peptide
  MOD_RES (27), (27): Xaa is C or S
SPISILYKDAANNVVLKYHYDMVVEAXG

SEQ ID NO: 64593 - protein, 35 aa, Artificial Sequence; identical to SEQ ID NO: 18600
  Cyclic GFR-binding peptide
  MOD_RES (3), (4): Xaa is C or S

SEQ ID NO: 64594 - protein, 37 aa, Artificial Sequence; identical to SEQ ID NO: 18601
  Cyclic GFR-binding peptide
  MOD_RES (1), (2), (34), (36): Xaa is C or S

SEQ ID NO: 64595 - protein, 25 aa, Artificial Sequence
  Cyclic GFR-binding peptide
VPQDLSPISILYIVGRTPKVYKQYE

SEQ ID NO: 64596 - protein, 36 aa, Artificial Sequence; identical to SEQ ID NO: 18603
  Cyclic GFR-binding peptide
  MOD_RES (2), (3), (35): Xaa is C or S

SEQ ID NO: 64597 - protein, 30 aa, Artificial Sequence
  Cyclic GFR-binding peptide
  MOD_RES (30), (30): Xaa is C or S
TELSPISMLYIDENEKVVYKQYEDMVVEGX

SEQ ID NO: 64598 - protein, 27 aa, Artificial Sequence
  Cyclic GFR-binding peptide
  MOD_RES (1), (1): Xaa is C or S
XVPTELSPISMLYIDENEKVVYKQYED

SEQ ID NO: 64599 - protein, 42 aa, Artificial Sequence; identical to SEQ ID NO: 18606
  Cyclic GFR-binding peptide
  MOD_RES (6), (7), (39), (41): Xaa is C or S

SEQ ID NO: 64600 - protein, 28 aa, Artificial Sequence
  Cyclic GFR-binding peptide
PTELSPISMLYIDENEKVVYKQYEDMVV

SEQ ID NO: 64601 - protein, 38 aa, Artificial Sequence; identical to SEQ ID NO: 18609
  Cyclic GFR-binding peptide
  MOD_RES (3), (4), (37): Xaa is C or S

SEQ ID NO: 64602 - protein, 31 aa, Artificial Sequence
  Cyclic GFR-binding peptide
  MOD_RES (3), (3): Xaa is C or S
PTXAPTKLSPISVLYIDDSSNVIYKQYENMV

SEQ ID NO: 64603 - protein, 31 aa, Artificial Sequence
  Cyclic GFR-binding peptide
  MOD_RES (4), (5): Xaa is C or S
SKAXXVPTKLNAISILYFDKGVVTYLKKYRG

SEQ ID NO: 64604 - protein, 27 aa, Artificial Sequence
  Cyclic GFR-binding peptide
VSQDLSPISILYIIGKTPKIYKQYEMI

SEQ ID NO: 64605 - protein, 35 aa, Artificial Sequence; identical to SEQ ID NO: 18612
  Cyclic GFR-binding peptide
  MOD_RES (32), (34): Xaa is C or S

SEQ ID NO: 64606 - protein, 29 aa, Artificial Sequence
  Cyclic GFR-binding peptide
  MOD_RES (3), (4): Xaa is C or S
SPXXVSQDLSPISILYIIGKTPKIYKQYE

SEQ ID NO: 64607 - protein, 40 aa, Artificial Sequence; identical to SEQ ID NO: 18616
  Cyclic GFR-binding peptide
  MOD_RES (6), (7), (39): Xaa is C or S

SEQ ID NO: 64608 - protein, 21 aa, Artificial Sequence
  Cyclic GFR-binding peptide
SPISMLYIDENEKVVYKQYED

SEQ ID NO: 64609 - protein, 31 aa, Artificial Sequence
  Cyclic GFR-binding peptide
  MOD_RES (31), (31): Xaa is C or S
PTKLNAISILYFDKGVVTYLKKYRGMAVSEX

SEQ ID NO: 64610 - protein, 40 aa, Artificial Sequence; identical to SEQ ID NO: 18619
  Cyclic GFR-binding peptide
  MOD_RES (6), (7), (40): Xaa is C or S

SEQ ID NO: 64611 - protein, 39 aa, Artificial Sequence; identical to SEQ ID NO: 18620
  Cyclic GFR-binding peptide
  MOD_RES (3), (4), (36), (38): Xaa is C or S

SEQ ID NO: 64612 - protein, 30 aa, Artificial Sequence
  Cyclic GFR-binding peptide
PTKLEPISVLYLDSSNNVIKFKYENMVVKA

SEQ ID NO: 64613 - protein, 31 aa, Artificial Sequence
  Cyclic GFR-binding peptide
  MOD_RES (30), (30): Xaa is C or S
PQALEPISILYLVGRKPKVKFKYEMIVRSXK

SEQ ID NO: 64614 - protein, 26 aa, Artificial Sequence
  Cyclic GFR-binding peptide
PQALEPISILYLVGRKPKVKFKYEMI

SEQ ID NO: 64615 - protein, 38 aa, Artificial Sequence; identical to SEQ ID NO: 18624
  Cyclic GFR-binding peptide
  MOD_RES (6), (7): Xaa is C or S

SEQ ID NO: 64616 - protein, 34 aa, Artificial Sequence
  Cyclic GFR-binding peptide
  MOD_RES (5), (6): Xaa is C or S
VGKAXXVPTKLSPISVLYIDDMGVPTYKQYEEGM

SEQ ID NO: 64617 - protein, 28 aa, Artificial Sequence
  Cyclic GFR-binding peptide
  MOD_RES (28), (28): Xaa is C or S
EPISVLYLDDMGVPTKFKYEEGMSVAEX

SEQ ID NO: 64618 - protein, 31 aa, Artificial Sequence
  Cyclic GFR-binding peptide
  MOD_RES (1), (2): Xaa is C or S
XXVPTKLNAISILYFDKGVVTYLKKYRGMAV

SEQ ID NO: 64619 - protein, 28 aa, Artificial Sequence
  Cyclic GFR-binding peptide
  MOD_RES (27), (27): Xaa is C or S
SPISILYKDKGVVTYLKYHYGMAVSEXG

SEQ ID NO: 64620 - protein, 37 aa, Artificial Sequence; identical to SEQ ID NO: 18632
  Cyclic GFR-binding peptide
  MOD_RES (4), (5), (37): Xaa is C or S

SEQ ID NO: 64621 - protein, 32 aa, Artificial Sequence
  Cyclic GFR-binding peptide
  MOD_RES (4), (5): Xaa is C or S
ASPXXVPQDLEPISILYLVGRTPKVKFKYEMV

SEQ ID NO: 64622 - protein, 28 aa, Artificial Sequence
  Cyclic GFR-binding peptide
  MOD_RES (28), (28): Xaa is C or S
LNAISILYFDAANNVVLKKYRDMVVEAX

SEQ ID NO: 64623 - protein, 25 aa, Artificial Sequence
  Cyclic GFR-binding peptide
NAISILYFDAANNVVLKKYRDMVVE

SEQ ID NO: 64624 - protein, 37 aa, Artificial Sequence
  Cyclic GFR-binding peptide
  MOD_RES (6), (7): Xaa is C or S
KVGKAXXVPTKLSPISVLYIDDMGVPTYKQYEEGMSV

SEQ ID NO: 64625 - protein, 25 aa, Artificial Sequence
  Cyclic GFR-binding peptide
PTKLSPISILYIDKGVVTYYKQYEG

SEQ ID NO: 64626 - protein, 35 aa, Artificial Sequence; identical to SEQ ID NO: 18638
  Cyclic GFR-binding peptide
  MOD_RES (1), (2), (33), (35): Xaa is C or S

SEQ ID NO: 64627 - protein, 34 aa, Artificial Sequence; identical to SEQ ID NO: 18639
  Cyclic GFR-binding peptide
  MOD_RES (1), (32), (34): Xaa is C or S

SEQ ID NO: 64628 - protein, 30 aa, Artificial Sequence
  Cyclic GFR-binding peptide
  MOD_RES (5), (5): Xaa is C or S
TKPTXAPTKLEPISVLYLDDSSNVIKFKYE

SEQ ID NO: 64629 - protein, 27 aa, Artificial Sequence
  Cyclic GFR-binding peptide
  MOD_RES (27), (27): Xaa is C or S
SPISILYIDKGVVTYYKQYEGMAVSEX

SEQ ID NO: 64630 - protein, 34 aa, Artificial Sequence; identical to SEQ ID NO: 18642
  Cyclic GFR-binding peptide
  MOD_RES (2), (3), (34): Xaa is C or S

SEQ ID NO: 64631 - protein, 33 aa, Artificial Sequence
  Cyclic GFR-binding peptide
  MOD_RES (4), (5): Xaa is C or S
SKAXXVPTKLSPISILYIDKGVVTYYKQYEGMA

SEQ ID NO: 64632 - protein, 23 aa, Artificial Sequence
  Cyclic GFR-binding peptide
QLSPISVLYIDDSSNVIYKQYEN

SEQ ID NO: 64633 - protein, 32 aa, Artificial Sequence
  Cyclic GFR-binding peptide
  MOD_RES (3), (4): Xaa is C or S
SPXXVSQDLEPISILYLIGKTPKIKFKYEMIV

SEQ ID NO: 64634 - protein, 27 aa, Artificial Sequence
  Cyclic GFR-binding peptide
LEPISMLYLDEYDKVVKFKYEEMVVEG

SEQ ID NO: 64635 - protein, 29 aa, Artificial Sequence
  Cyclic GFR-binding peptide
  MOD_RES (29), (29): Xaa is C or S
RLNAISILYFDAANNVVLKKYRDMVVEAX

SEQ ID NO: 64636 - protein, 33 aa, Artificial Sequence; identical to SEQ ID NO: 18648
  Cyclic GFR-binding peptide
  MOD_RES (32), (32): Xaa is C or S

SEQ ID NO: 64637 - protein, 22 aa, Artificial Sequence
  Cyclic GFR-binding peptide
SPISMLYIDEYDKVVYKQYEEM

SEQ ID NO: 64638 - protein, 30 aa, Artificial Sequence
  Cyclic GFR-binding peptide
  MOD_RES (2), (3): Xaa is C or S
AXXVPTKLSPISILYKDKGVVTYLKYHYGM

SEQ ID NO: 64639 - protein, 27 aa, Artificial Sequence
  Cyclic GFR-binding peptide
SQDLSPISILYIIGKTPKIYKQYEMIV

SEQ ID NO: 64640 - protein, 31 aa, Artificial Sequence
  Cyclic GFR-binding peptide
  MOD_RES (3), (4): Xaa is C or S
KPXXAPTQLSPISVLYIDDSSNVIYKQYENM

SEQ ID NO: 64641 - protein, 25 aa, Artificial Sequence
  Cyclic GFR-binding peptide
TELSPISMLYIDENEKVVYKQYEDM

SEQ ID NO: 64642 - protein, 35 aa, Artificial Sequence; identical to SEQ ID NO: 18653
  Cyclic GFR-binding peptide
  MOD_RES (1), (2), (34): Xaa is C or S

SEQ ID NO: 64643 - protein, 25 aa, Artificial Sequence
  Cyclic GFR-binding peptide
APTQLEPISVLYLDDSSNVIKFKYE

SEQ ID NO: 64644 - protein, 26 aa, Artificial Sequence
  Cyclic GFR-binding peptide
APTKLSPISVLYIDDSSNVIYKQYEN

SEQ ID NO: 64645 - protein, 34 aa, Artificial Sequence
  Cyclic GFR-binding peptide
  MOD_RES (4), (5): Xaa is C or S
PASXXVPARLNAISILYFDAANNVVLKKYRDMVV

SEQ ID NO: 64646 - protein, 24 aa, Artificial Sequence
  Cyclic GFR-binding peptide
DLSPISILYIIGKTPKIYKQYEMI

SEQ ID NO: 64647 - protein, 37 aa, Artificial Sequence; identical to SEQ ID NO: 18659
  Cyclic GFR-binding peptide
  MOD_RES (4), (5), (36): Xaa is C or S

SEQ ID NO: 64648 - protein, 28 aa, Artificial Sequence
  Cyclic GFR-binding peptide
TKLEPISVLYLDDMGVPTKFKYEEGMSV

SEQ ID NO: 64649 - protein, 34 aa, Artificial Sequence; identical to SEQ ID NO: 18660
  Cyclic GFR-binding peptide
  MOD_RES (1), (2), (34): Xaa is C or S

SEQ ID NO: 64650 - protein, 32 aa, Artificial Sequence
  Cyclic GFR-binding peptide
  MOD_RES (5), (6): Xaa is C or S
APASXXVPARLEPISILYLDAANNVVKFKYED

SEQ ID NO: 64651 - protein, 40 aa, Artificial Sequence; identical to SEQ ID NO: 18661
  Cyclic GFR-binding peptide
  MOD_RES (5), (6), (37), (39): Xaa is C or S

SEQ ID NO: 64652 - protein, 34 aa, Artificial Sequence; identical to SEQ ID NO: 18663
  Cyclic GFR-binding peptide
  MOD_RES (1), (33): Xaa is C or S

SEQ ID NO: 64653 - protein, 31 aa, Artificial Sequence
  Cyclic GFR-binding peptide
  MOD_RES (5), (6): Xaa is C or S
VPKPXXAPTQLEPISVLYLDDSSNVIKFKYE

SEQ ID NO: 64654 - protein, 38 aa, Artificial Sequence; identical to SEQ ID NO: 18664
  Cyclic GFR-binding peptide
  MOD_RES (5), (6), (38): Xaa is C or S

SEQ ID NO: 64655 - protein, 31 aa, Artificial Sequence
  Cyclic GFR-binding peptide
  MOD_RES (30), (30): Xaa is C or S
KLEPISVLYLDDMGVPTKFKYEEGMSVAEXG

SEQ ID NO: 64656 - protein, 33 aa, Artificial Sequence
  Cyclic GFR-binding peptide
  MOD_RES (3), (4): Xaa is C or S
KAXXVPTKLSPISILYIDKGVVTYYKQYEGMAV

SEQ ID NO: 64657 - protein, 25 aa, Artificial Sequence
  Cyclic GFR-binding peptide
PARLNAISILYFDAANNVVLKKYRD

SEQ ID NO: 64658 - protein, 23 aa, Artificial Sequence
  Cyclic GFR-binding peptide
LEPISILYLVGRKPKVKFKYEMI

SEQ ID NO: 64659 - protein, 32 aa, Artificial Sequence
  Cyclic GFR-binding peptide
  MOD_RES (6), (7): Xaa is C or S
AAPASXXVPARLSPISILYKDAANNVVLKYHY

SEQ ID NO: 64660 - protein, 31 aa, Artificial Sequence
  Cyclic GFR-binding peptide
  MOD_RES (5), (6): Xaa is C or S
ASKAXXVPTKLSPISILYIDKGVVTYYKQYE

SEQ ID NO: 64661 - protein, 30 aa, Artificial Sequence
  Cyclic GFR-binding peptide
  MOD_RES (1), (1): Xaa is C or S
XVPTELEPISMLYLDEYDKVVKFKYEEMVV

SEQ ID NO: 64662 - protein, 34 aa, Artificial Sequence; identical to SEQ ID NO: 18665
  Cyclic GFR-binding peptide
  MOD_RES (32), (34): Xaa is C or S

SEQ ID NO: 64663 - protein, 33 aa, Artificial Sequence; identical to SEQ ID NO: 18666
  Cyclic GFR-binding peptide
  MOD_RES (1), (33): Xaa is C or S

SEQ ID NO: 64664 - protein, 34 aa, Artificial Sequence; identical to SEQ ID NO: 18667
  Cyclic GFR-binding peptide
  MOD_RES (32), (34): Xaa is C or S

SEQ ID NO: 64665 - protein, 32 aa, Artificial Sequence; identical to SEQ ID NO: 18670
  Cyclic GFR-binding peptide
  MOD_RES (1), (2): Xaa is C or S

SEQ ID NO: 64666 - protein, 24 aa, Artificial Sequence
  Cyclic GFR-binding peptide
LEPISILYLDAANNVVKFKYEDMV

SEQ ID NO: 64667 - protein, 31 aa, Artificial Sequence
  Cyclic GFR-binding peptide
  MOD_RES (3), (4): Xaa is C or S
SPXXVPQDLEPISILYLVGRTPKVKFKYEMV

SEQ ID NO: 64668 - protein, 24 aa, Artificial Sequence
  Cyclic GFR-binding peptide
RLEPISILYLDAANNVVKFKYEDM

SEQ ID NO: 64669 - protein, 38 aa, Artificial Sequence; identical to SEQ ID NO: 18672
  Cyclic GFR-binding peptide
  MOD_RES (3), (4), (36), (38): Xaa is C or S

SEQ ID NO: 64670 - protein, 25 aa, Artificial Sequence
  Cyclic GFR-binding peptide
EPISILYLIGKTPKIKFKYEMIVKS

SEQ ID NO: 64671 - protein, 35 aa, Artificial Sequence
  Cyclic GFR-binding peptide
  MOD_RES (6), (7): Xaa is C or S
ASASPXXVPQDLSPISILYIVGRTPKVYKQYEMVV

SEQ ID NO: 64672 - protein, 30 aa, Artificial Sequence
  Cyclic GFR-binding peptide
  MOD_RES (30), (30): Xaa is C or S
TELSPISMLYIDEYDKVVYKQYEEMVVEGX

SEQ ID NO: 64673 - protein, 37 aa, Artificial Sequence; identical to SEQ ID NO: 18680
  Cyclic GFR-binding peptide
  MOD_RES (6), (7): Xaa is C or S

SEQ ID NO: 64674 - protein, 39 aa, Artificial Sequence; identical to SEQ ID NO: 18681
  Cyclic GFR-binding peptide
  MOD_RES (6), (7): Xaa is C or S

SEQ ID NO: 64675 - protein, 31 aa, Artificial Sequence
  Cyclic GFR-binding peptide
  MOD_RES (4), (5): Xaa is C or S
PASXXVPARLSPISILYKDAANNVVLKYHYD

SEQ ID NO: 64676 - protein, 24 aa, Artificial Sequence
  Cyclic GFR-binding peptide
PTELEPISMLYLDENEKVVKFKYE

SEQ ID NO: 64677 - protein, 34 aa, Artificial Sequence; identical to SEQ ID NO: 18684
  Cyclic GFR-binding peptide
  MOD_RES (1), (34): Xaa is C or S

SEQ ID NO: 64678 - protein, 34 aa, Artificial Sequence
  Cyclic GFR-binding peptide
  MOD_RES (6), (7): Xaa is C or S
ASASPXXVSQDLSPISILYIIGKTPKIYKQYEMI

SEQ ID NO: 64679 - protein, 32 aa, Artificial Sequence
  Cyclic GFR-binding peptide
  MOD_RES (30), (32): Xaa is C or S
SQDLEPISILYLIGKTPKIKFKYEMIVKSXKX

SEQ ID NO: 64680 - protein, 22 aa, Artificial Sequence
  Cyclic GFR-binding peptide
EPISILYLIGKTPKIKFKYEMI

SEQ ID NO: 64681 - protein, 35 aa, Artificial Sequence; identical to SEQ ID NO: 18686
  Cyclic GFR-binding peptide
  MOD_RES (2), (3), (35): Xaa is C or S

SEQ ID NO: 64682 - protein, 36 aa, Artificial Sequence; identical to SEQ ID NO: 18693
  Cyclic GFR-binding peptide
  MOD_RES (1), (33), (35): Xaa is C or S

SEQ ID NO: 64683 - protein, 42 aa, Artificial Sequence; identical to SEQ ID NO: 18697
  Cyclic GFR-binding peptide
  MOD_RES (6), (7), (40), (42): Xaa is C or S

SEQ ID NO: 64684 - protein, 38 aa, Artificial Sequence; identical to SEQ ID NO: 18698
  Cyclic GFR-binding peptide
  MOD_RES (5), (6), (38): Xaa is C or S

SEQ ID NO: 64685 - protein, 31 aa, Artificial Sequence
  Cyclic GFR-binding peptide
  MOD_RES (29), (31): Xaa is C or S
QDLSPISILYIVGRTPKVYKQYEMVVKSXKX

SEQ ID NO: 64686 - protein, 37 aa, Artificial Sequence; identical to SEQ ID NO: 18700
  Cyclic GFR-binding peptide
  MOD_RES (6), (7): Xaa is C or S

SEQ ID NO: 64687 - protein, 32 aa, Artificial Sequence
  Cyclic GFR-binding peptide
  MOD_RES (31), (31): Xaa is C or S
PTQLEPISVLYLDDSSNVIKFKYENMVVRAXG

SEQ ID NO: 64688 - protein, 26 aa, Artificial Sequence
  Cyclic GFR-binding peptide
QDLSPISILYIVGRTPKVYKQYEMVV

SEQ ID NO: 64689 - protein, 26 aa, Artificial Sequence
  Cyclic GFR-binding peptide
PTKLEPISVLYLDDSSNVIKFKYENM

SEQ ID NO: 64690 - protein, 29 aa, Artificial Sequence
  Cyclic GFR-binding peptide
  MOD_RES (3), (4): Xaa is C or S
KAXXAPTKLEPISVLYLDSSNNVIKFKYE

SEQ ID NO: 64691 - protein, 37 aa, Artificial Sequence; identical to SEQ ID NO: 18704
  Cyclic GFR-binding peptide
  MOD_RES (3), (4), (35), (37): Xaa is C or S

SEQ ID NO: 64692 - protein, 30 aa, Artificial Sequence
  Cyclic GFR-binding peptide
  MOD_RES (30), (30): Xaa is C or S
ARLEPISILYLDAANNVVKFKYEDMVVEAX

SEQ ID NO: 64693 - protein, 20 aa, Artificial Sequence
  Cyclic GFR-binding peptide
EPISVLYLDSSNNVIKFKYE

SEQ ID NO: 64694 - protein, 33 aa, Artificial Sequence; identical to SEQ ID NO: 18712
  Cyclic GFR-binding peptide
  MOD_RES (1), (33): Xaa is C or S

SEQ ID NO: 64695 - protein, 39 aa, Artificial Sequence; identical to SEQ ID NO: 18714
  Cyclic GFR-binding peptide
  MOD_RES (4), (5), (38): Xaa is C or S

SEQ ID NO: 64696 - protein, 31 aa, Artificial Sequence
  Cyclic GFR-binding peptide
  MOD_RES (2), (3): Xaa is C or S
AXXVPTELEPISMLYLDEYDKVVKFKYEEMV

SEQ ID NO: 64697 - protein, 35 aa, Artificial Sequence; identical to SEQ ID NO: 18717
  Cyclic GFR-binding peptide
  MOD_RES (4), (5): Xaa is C or S

SEQ ID NO: 64698 - protein, 30 aa, Artificial Sequence
  Cyclic GFR-binding peptide
  MOD_RES (30), (30): Xaa is C or S
KLEPISVLYLDDMGVPTKFKYEEGMSVAEX

SEQ ID NO: 64699 - protein, 31 aa, Artificial Sequence
  Cyclic GFR-binding peptide
  MOD_RES (1), (2): Xaa is C or S
XXVPQDLEPISILYLVGRTPKVKFKYEMVVK

SEQ ID NO: 64700 - protein, 38 aa, Artificial Sequence; identical to SEQ ID NO: 18719
  Cyclic GFR-binding peptide
  MOD_RES (7), (7): Xaa is C or S

SEQ ID NO: 64701 - protein, 20 aa, Artificial Sequence
  Cyclic GFR-binding peptide
SPISVLYIDDMGVPTYKQYE

SEQ ID NO: 64702 - protein, 31 aa, Artificial Sequence
  Cyclic GFR-binding peptide
  MOD_RES (31), (31): Xaa is C or S
PTQLSPISVLYIDDSSNVIYKQYENMVVRAX

SEQ ID NO: 64703 - protein, 20 aa, Artificial Sequence
  Cyclic GFR-binding peptide
SPISVLYIDDSSNVIYKQYE

SEQ ID NO: 64704 - protein, 26 aa, Artificial Sequence
  Cyclic GFR-binding peptide
ARLSPISILYKDAANNVVLKYHYDMV

SEQ ID NO: 64705 - protein, 21 aa, Artificial Sequence
  Cyclic GFR-binding peptide
LEPISILYLIGKTPKIKFKYE

SEQ ID NO: 64706 - protein, 22 aa, Artificial Sequence
  Cyclic GFR-binding peptide
LEPISILYLDAANNVVKFKYED

SEQ ID NO: 64707 - protein, 39 aa, Artificial Sequence; identical to SEQ ID NO: 18728
  Cyclic GFR-binding peptide
  MOD_RES (3), (4), (36), (38): Xaa is C or S

SEQ ID NO: 64708 - protein, 37 aa, Artificial Sequence; identical to SEQ ID NO: 18729
  Cyclic GFR-binding peptide
  MOD_RES (3), (4), (36): Xaa is C or S

SEQ ID NO: 64709 - protein, 28 aa, Artificial Sequence
  Cyclic GFR-binding peptide
QDLEPISILYLIGKTPKIKFKYEMIVKS

SEQ ID NO: 64710 - protein, 30 aa, Artificial Sequence; identical to SEQ ID NO: 960
  Cyclic GFR-binding peptide

SEQ ID NO: 64711 - protein, 37 aa, Artificial Sequence; identical to SEQ ID NO: 18736
  Cyclic GFR-binding peptide
  MOD_RES (3), (4), (35), (37): Xaa is C or S

SEQ ID NO: 64712 - protein, 23 aa, Artificial Sequence
  Cyclic GFR-binding peptide
EPISILYLVGRKPKVKFKYEMIV

SEQ ID NO: 64713 - protein, 36 aa, Artificial Sequence
  Cyclic GFR-binding peptide
  MOD_RES (7), (7): Xaa is C or S
HVTKPTXAPTKLSPISVLYIDDSSNVIYKQYENMVV

SEQ ID NO: 64714 - protein, 36 aa, Artificial Sequence; identical to SEQ ID NO: 18738
  Cyclic GFR-binding peptide
  MOD_RES (5), (6): Xaa is C or S

SEQ ID NO: 64715 - protein, 40 aa, Artificial Sequence; identical to SEQ ID NO: 18739
  Cyclic GFR-binding peptide
  MOD_RES (5), (37), (39): Xaa is C or S

SEQ ID NO: 64716 - protein, 29 aa, Artificial Sequence
  Cyclic GFR-binding peptide
APTQLEPISVLYLDDSSNVIKFKYENMVV

SEQ ID NO: 64717 - protein, 25 aa, Artificial Sequence
  Cyclic GFR-binding peptide
EPISILYLVGRTPKVKFKYEMVVKS

SEQ ID NO: 64718 - protein, 26 aa, Artificial Sequence
  Cyclic GFR-binding peptide
TKLEPISVLYLDDSSNVIKFKYENMV

SEQ ID NO: 64719 - protein, 27 aa, Artificial Sequence
  Cyclic GFR-binding peptide
  MOD_RES (1), (2): Xaa is C or S
XXVPQALSPISILYIVGRKPKVYKQYE

SEQ ID NO: 64720 - protein, 31 aa, Artificial Sequence
  Cyclic GFR-binding peptide
  MOD_RES (29), (31): Xaa is C or S
QALSPISILYIVGRKPKVYKQYEMIVRSXKX

SEQ ID NO: 64721 - protein, 24 aa, Artificial Sequence
  Cyclic GFR-binding peptide
LEPISVLYLDDSSNVIKFKYENMV

SEQ ID NO: 64722 - protein, 24 aa, Artificial Sequence
  Cyclic GFR-binding peptide
LEPISVLYLDSSNNVIKFKYENMV

SEQ ID NO: 64723 - protein, 30 aa, Artificial Sequence
  Cyclic GFR-binding peptide
  MOD_RES (27), (29): Xaa is C or S
LEPISILYLVGRTPKVKFKYEMVVKSXKXS

SEQ ID NO: 64724 - protein, 28 aa, Artificial Sequence
  Cyclic GFR-binding peptide
ELEPISMLYLDENEKVVKFKYEDMVVEG

SEQ ID NO: 64725 - protein, 34 aa, Artificial Sequence
  Cyclic GFR-binding peptide
  MOD_RES (5), (6): Xaa is C or S
IPKAXXVPTELSPISMLYIDEYDKVVYKQYEEMV

SEQ ID NO: 64726 - protein, 29 aa, Artificial Sequence
  Cyclic GFR-binding peptide
  MOD_RES (27), (29): Xaa is C or S
SPISILYKDKGVVTYLKYHYGMAVSEXGX

SEQ ID NO: 64727 - protein, 25 aa, Artificial Sequence
  Cyclic GFR-binding peptide
VPARLNAISILYFDAANNVVLKKYR

SEQ ID NO: 64728 - protein, 25 aa, Artificial Sequence
  Cyclic GFR-binding peptide
TKLEPISVLYLDDMGVPTKFKYEEG

SEQ ID NO: 64729 - protein, 26 aa, Artificial Sequence
  Cyclic GFR-binding peptide
VPTELSPISMLYIDENEKVVYKQYED

SEQ ID NO: 64730 - protein, 34 aa, Artificial Sequence; identical to SEQ ID NO: 18751
  Cyclic GFR-binding peptide
  MOD_RES (3), (4): Xaa is C or S

SEQ ID NO: 64731 - protein, 39 aa, Artificial Sequence; identical to SEQ ID NO: 18752
  Cyclic GFR-binding peptide
  MOD_RES (6), (7), (39): Xaa is C or S

SEQ ID NO: 64732 - protein, 36 aa, Artificial Sequence; identical to SEQ ID NO: 18753
  Cyclic GFR-binding peptide
  MOD_RES (33), (35): Xaa is C or S

SEQ ID NO: 64733 - protein, 29 aa, Artificial Sequence
  Cyclic GFR-binding peptide
  MOD_RES (27), (29): Xaa is C or S
EPISVLYLDSSNNVIKFKYENMVVKAXGX

SEQ ID NO: 64734 - protein, 25 aa, Artificial Sequence
  Cyclic GFR-binding peptide
LSPISILYIVGRTPKVYKQYEMVVK

SEQ ID NO: 64735 - protein, 28 aa, Artificial Sequence
  Cyclic GFR-binding peptide
KLNAISILYFDKGVVTYLKKYRGMAVSE

SEQ ID NO: 64736 - protein, 24 aa, Artificial Sequence
  Cyclic GFR-binding peptide
PQDLSPISILYIVGRTPKVYKQYE

SEQ ID NO: 64737 - protein, 32 aa, Artificial Sequence
  Cyclic GFR-binding peptide
  MOD_RES (2), (3): Xaa is C or S
PXXVPQDLEPISILYLVGRTPKVKFKYEMVVK

SEQ ID NO: 64738 - protein, 39 aa, Artificial Sequence; identical to SEQ ID NO: 18760
  Cyclic GFR-binding peptide
  MOD_RES (5), (6), (38): Xaa is C or S

SEQ ID NO: 64739 - protein, 28 aa, Artificial Sequence
  Cyclic GFR-binding peptide
  MOD_RES (2), (3): Xaa is C or S
AXXVPTKLSPISILYKDKGVVTYLKYHY

SEQ ID NO: 64740 - protein, 27 aa, Artificial Sequence
  Cyclic GFR-binding peptide
RLEPISILYLDAANNVVKFKYEDMVVE

SEQ ID NO: 64741 - protein, 25 aa, Artificial Sequence
  Cyclic GFR-binding peptide
PTKLSPISVLYIDDMGVPTYKQYEE

SEQ ID NO: 64742 - protein, 32 aa, Artificial Sequence
  Cyclic GFR-binding peptide
  MOD_RES (2), (3): Xaa is C or S
AXXVPTKLSPISVLYIDDMGVPTYKQYEEGMS

SEQ ID NO: 64743 - protein, 33 aa, Artificial Sequence; identical to SEQ ID NO: 18765
  Cyclic GFR-binding peptide
  MOD_RES (1), (1): Xaa is C or S

SEQ ID NO: 64744 - protein, 23 aa, Artificial Sequence
  Cyclic GFR-binding peptide
SPISILYIIGKTPKIYKQYEMIV

SEQ ID NO: 64745 - protein, 31 aa, Artificial Sequence
  Cyclic GFR-binding peptide
  MOD_RES (28), (30): Xaa is C or S
DLSPISILYIIGKTPKIYKQYEMIVKSXKXS

SEQ ID NO: 64746 - protein, 30 aa, Artificial Sequence
  Cyclic GFR-binding peptide
PTKLSPISILYIDKGVVTYYKQYEGMAVSE

SEQ ID NO: 64747 - protein, 42 aa, Artificial Sequence; identical to SEQ ID NO: 18770
  Cyclic GFR-binding peptide
  MOD_RES (6), (7), (39), (41): Xaa is C or S

SEQ ID NO: 64748 - protein, 40 aa, Artificial Sequence; identical to SEQ ID NO: 18775
  Cyclic GFR-binding peptide
  MOD_RES (6), (7), (38), (40): Xaa is C or S

SEQ ID NO: 64749 - protein, 30 aa, Artificial Sequence
  Cyclic GFR-binding peptide
  MOD_RES (29), (29): Xaa is C or S
KLSPISILYKDKGVVTYLKYHYGMAVSEXG

SEQ ID NO: 64750 - protein, 33 aa, Artificial Sequence
  Cyclic GFR-binding peptide
  MOD_RES (6), (7): Xaa is C or S
KIPKAXXVPTELEPISMLYLDENEKVVKFKYED

SEQ ID NO: 64751 - protein, 27 aa, Artificial Sequence
  Cyclic GFR-binding peptide
  MOD_RES (27), (27): Xaa is C or S
EPISVLYLDDSSNVIKFKYENMVVRAX

SEQ ID NO: 64752 - protein, 34 aa, Artificial Sequence; identical to SEQ ID NO: 18784
  Cyclic GFR-binding peptide
  MOD_RES (1), (33): Xaa is C or S

SEQ ID NO: 64753 - protein, 38 aa, Artificial Sequence; identical to SEQ ID NO: 18786
  Cyclic GFR-binding peptide
  MOD_RES (2), (3), (36), (38): Xaa is C or S

SEQ ID NO: 64754 - protein, 32 aa, Artificial Sequence
  Cyclic GFR-binding peptide
  MOD_RES (2), (3): Xaa is C or S
AXXVPTELEPISMLYLDEYDKVVKFKYEEMVV

SEQ ID NO: 64755 - protein, 31 aa, Artificial Sequence; identical to SEQ ID NO: 18788
  Cyclic GFR-binding peptide

SEQ ID NO: 64756 - protein, 32 aa, Artificial Sequence
  Cyclic GFR-binding peptide
  MOD_RES (31), (31): Xaa is C or S
TKLSPISVLYIDDMGVPTYKQYEEGMSVAEXG

SEQ ID NO: 64757 - protein, 35 aa, Artificial Sequence
  Cyclic GFR-binding peptide
  MOD_RES (4), (5): Xaa is C or S
GKAXXVPTKLSPISVLYIDDMGVPTYKQYEEGMSV

SEQ ID NO: 64758 - protein, 29 aa, Artificial Sequence
  Cyclic GFR-binding peptide
SPISILYIIGKTPKIYKQYEAAAAAAAAA

SEQ ID NO: 64759 - protein, 32 aa, Artificial Sequence; identical to SEQ ID NO: 18800
  Cyclic GFR-binding peptide
  MOD_RES (1), (2): Xaa is C or S

SEQ ID NO: 64760 - protein, 41 aa, Artificial Sequence; identical to SEQ ID NO: 18801
  Cyclic GFR-binding peptide
  MOD_RES (5), (6), (38), (40): Xaa is C or S

SEQ ID NO: 64761 - protein, 35 aa, Artificial Sequence; identical to SEQ ID NO: 18802
  Cyclic GFR-binding peptide
  MOD_RES (2), (3), (35): Xaa is C or S

SEQ ID NO: 64762 - protein, 24 aa, Artificial Sequence
  Cyclic GFR-binding peptide
QDLEPISILYLVGRTPKVKFKYEM

SEQ ID NO: 64763 - protein, 22 aa, Artificial Sequence
  Cyclic GFR-binding peptide
LSPISILYKDAANNVVLKYHYD

SEQ ID NO: 64764 - protein, 32 aa, Artificial Sequence
  Cyclic GFR-binding peptide
  MOD_RES (5), (6): Xaa is C or S
IPKAXXVPTELEPISMLYLDEYDKVVKFKYEE

SEQ ID NO: 64765 - protein, 33 aa, Artificial Sequence
  Cyclic GFR-binding peptide
  MOD_RES (3), (4): Xaa is C or S
KAXXAPTKLEPISVLYLDSSNNVIKFKYENMVV

SEQ ID NO: 64766 - protein, 29 aa, Artificial Sequence
  Cyclic GFR-binding peptide
  MOD_RES (2), (3): Xaa is C or S
PXXVSQDLEPISILYLIGKTPKIKFKYEM

SEQ ID NO: 64767 - protein, 27 aa, Artificial Sequence
  Cyclic GFR-binding peptide
LSPISILYKDKGVVTYLKYHYGMAVSE

SEQ ID NO: 64768 - protein, 38 aa, Artificial Sequence; identical to SEQ ID NO: 18806
  Cyclic GFR-binding peptide
  MOD_RES (4), (5), (37): Xaa is C or S

SEQ ID NO: 64769 - protein, 28 aa, Artificial Sequence
  Cyclic GFR-binding peptide
ARLSPISILYKDAANNVVLKYHYDMVVE

SEQ ID NO: 64770 - protein, 31 aa, Artificial Sequence
  Cyclic GFR-binding peptide
  MOD_RES (2), (3): Xaa is C or S
PXXAPTQLEPISVLYLDDSSNVIKFKYENMV

SEQ ID NO: 64771 - protein, 24 aa, Artificial Sequence
  Cyclic GFR-binding peptide
NAISILYFDKGVVTYLKKYRGMAV

SEQ ID NO: 64772 - protein, 33 aa, Artificial Sequence
  Cyclic GFR-binding peptide
  MOD_RES (3), (4): Xaa is C or S
KPXXAPTKLSPISVLYIDDSSNVIYKQYENMVV

SEQ ID NO: 64773 - protein, 24 aa, Artificial Sequence
  Cyclic GFR-binding peptide
EPISVLYLDDMGVPTKFKYEEGMS

SEQ ID NO: 64774 - protein, 32 aa, Artificial Sequence
  Cyclic GFR-binding peptide
  MOD_RES (5), (6): Xaa is C or S
SASPXXVPQDLSPISILYIVGRTPKVYKQYEM

SEQ ID NO: 64775 - protein, 29 aa, Artificial Sequence
  Cyclic GFR-binding peptide
  MOD_RES (1), (2): Xaa is C or S
XXAPTKLEPISVLYLDSSNNVIKFKYENM

SEQ ID NO: 64776 - protein, 38 aa, Artificial Sequence; identical to SEQ ID NO: 18809
  Cyclic GFR-binding peptide
  MOD_RES (5), (6), (37): Xaa is C or S

SEQ ID NO: 64777 - protein, 28 aa, Artificial Sequence
  Cyclic GFR-binding peptide
PTKLSPISVLYIDDMGVPTYKQYEEGMS

SEQ ID NO: 64778 - protein, 33 aa, Artificial Sequence
  Cyclic GFR-binding peptide
  MOD_RES (30), (32): Xaa is C or S
PQALEPISILYLVGRKPKVKFKYEMIVRSXKXS

SEQ ID NO: 64779 - protein, 33 aa, Artificial Sequence
  Cyclic GFR-binding peptide
  MOD_RES (5), (6): Xaa is C or S
IPKAXXVPTELSPISMLYIDENEKVVYKQYEDM

SEQ ID NO: 64780 - protein, 34 aa, Artificial Sequence
  Cyclic GFR-binding peptide
  MOD_RES (2), (3): Xaa is C or S
AXXVPTKLSPISVLYIDDMGVPTYKQYEEGMSVA

SEQ ID NO: 64781 - protein, 31 aa, Artificial Sequence
  Cyclic GFR-binding peptide
  MOD_RES (28), (30): Xaa is C or S
ALEPISILYLVGRKPKVKFKYEMIVRSXKXS

SEQ ID NO: 64782 - protein, 35 aa, Artificial Sequence
  Cyclic GFR-binding peptide
  MOD_RES (5), (6): Xaa is C or S
APASXXVPARLNAISILYFDAANNVVLKKYRDMVV

SEQ ID NO: 64783 - protein, 29 aa, Artificial Sequence
  Cyclic GFR-binding peptide
  MOD_RES (29), (29): Xaa is C or S
QLSPISVLYIDDSSNVIYKQYENMVVRAX

SEQ ID NO: 64784 - protein, 30 aa, Artificial Sequence
  Cyclic GFR-binding peptide
  MOD_RES (2), (3): Xaa is C or S
AXXVPTELSPISMLYIDENEKVVYKQYEDM

SEQ ID NO: 64785 - protein, 28 aa, Artificial Sequence
  Cyclic GFR-binding peptide
  MOD_RES (1), (2): Xaa is C or S
XXVPARLEPISILYLDAANNVVKFKYED

SEQ ID NO: 64786 - protein, 34 aa, Artificial Sequence; identical to SEQ ID NO: 18819
  Cyclic GFR-binding peptide
  MOD_RES (2), (3): Xaa is C or S

SEQ ID NO: 64787 - protein, 39 aa, Artificial Sequence; identical to SEQ ID NO: 18821
  Cyclic GFR-binding peptide
  MOD_RES (4), (5), (37), (39): Xaa is C or S

SEQ ID NO: 64788 - protein, 22 aa, Artificial Sequence
  Cyclic GFR-binding peptide
DLSPISILYIIGKTPKIYKQYE

SEQ ID NO: 64789 - protein, 35 aa, Artificial Sequence
  Cyclic GFR-binding peptide
  MOD_RES (6), (7): Xaa is C or S
YVPKPXXAPTKLSPISVLYIDDSSNVIYKQYENMV

SEQ ID NO: 64790 - protein, 28 aa, Artificial Sequence
  Cyclic GFR-binding peptide
  MOD_RES (26), (28): Xaa is C or S
SPISILYIIGKTPKIYKQYEMIVKSXKX

SEQ ID NO: 64791 - protein, 36 aa, Artificial Sequence; identical to SEQ ID NO: 18824
  Cyclic GFR-binding peptide
  MOD_RES (3), (4), (36): Xaa is C or S

SEQ ID NO: 64792 - protein, 34 aa, Artificial Sequence
  Cyclic GFR-binding peptide
  MOD_RES (5), (6): Xaa is C or S
VPKPXXAPTKLEPISVLYLDDSSNVIKFKYENMV

SEQ ID NO: 64793 - protein, 22 aa, Artificial Sequence
  Cyclic GFR-binding peptide
LSPISILYIVGRTPKVYKQYEM

SEQ ID NO: 64794 - protein, 23 aa, Artificial Sequence
  Cyclic GFR-binding peptide
ELSPISMLYIDENEKVVYKQYED

SEQ ID NO: 64795 - protein, 25 aa, Artificial Sequence
  Cyclic GFR-binding peptide
PTELSPISMLYIDEYDKVVYKQYEE

SEQ ID NO: 64796 - protein, 40 aa, Artificial Sequence; identical to SEQ ID NO: 18833
  Cyclic GFR-binding peptide
  MOD_RES (6), (38), (40): Xaa is C or S

SEQ ID NO: 64797 - protein, 22 aa, Artificial Sequence
  Cyclic GFR-binding peptide
LSPISVLYIDSSNNVIYKQYEN

SEQ ID NO: 64798 - protein, 36 aa, Artificial Sequence; identical to SEQ ID NO: 18834
  Cyclic GFR-binding peptide
  MOD_RES (3), (4), (36): Xaa is C or S

SEQ ID NO: 64799 - protein, 32 aa, Artificial Sequence
  Cyclic GFR-binding peptide
  MOD_RES (4), (5): Xaa is C or S
SKAXXVPTKLSPISILYKDKGVVTYLKYHYGM

SEQ ID NO: 64800 - protein, 34 aa, Artificial Sequence; identical to SEQ ID NO: 18838
  Cyclic GFR-binding peptide
  MOD_RES (1), (2), (33): Xaa is C or S

SEQ ID NO: 64801 - protein, 24 aa, Artificial Sequence
  Cyclic GFR-binding peptide
PTKLSPISVLYIDDSSNVIYKQYE

SEQ ID NO: 64802 - protein, 28 aa, Artificial Sequence
  Cyclic GFR-binding peptide
  MOD_RES (27), (27): Xaa is C or S
EPISMLYLDEYDKVVKFKYEEMVVEGXG

SEQ ID NO: 64803 - protein, 32 aa, Artificial Sequence
  Cyclic GFR-binding peptide
  MOD_RES (6), (7): Xaa is C or S
SIPKAXXVPTELSPISMLYIDEYDKVVYKQYE

SEQ ID NO: 64804 - protein, 32 aa, Artificial Sequence
  Cyclic GFR-binding peptide
  MOD_RES (31), (31): Xaa is C or S
PTKLSPISVLYIDDSSNVIYKQYENMVVRSXG

SEQ ID NO: 64805 - protein, 35 aa, Artificial Sequence; identical to SEQ ID NO: 18841
  Cyclic GFR-binding peptide
  MOD_RES (1), (2), (34): Xaa is C or S

SEQ ID NO: 64806 - protein, 31 aa, Artificial Sequence
  Cyclic GFR-binding peptide
  MOD_RES (2), (2): Xaa is C or S
TXAPTKLSPISVLYIDDSSNVIYKQYENMVV

SEQ ID NO: 64807 - protein, 35 aa, Artificial Sequence; identical to SEQ ID NO: 18844
  Cyclic GFR-binding peptide
  MOD_RES (2), (3), (34): Xaa is C or S

SEQ ID NO: 64808 - protein, 29 aa, Artificial Sequence
  Cyclic GFR-binding peptide
  MOD_RES (26), (28): Xaa is C or S
SPISILYIVGRKPKVYKQYEMIVRSXKXS

SEQ ID NO: 64809 - protein, 31 aa, Artificial Sequence
  Cyclic GFR-binding peptide
  MOD_RES (2), (3): Xaa is C or S
AXXVPTELEPISMLYLDENEKVVKFKYEDMV

SEQ ID NO: 64810 - protein, 32 aa, Artificial Sequence; identical to SEQ ID NO: 18847
  Cyclic GFR-binding peptide
  MOD_RES (32), (32): Xaa is C or S

SEQ ID NO: 64811 - protein, 32 aa, Artificial Sequence
  Cyclic GFR-binding peptide
  MOD_RES (30), (32): Xaa is C or S
ARLNAISILYFDAANNVVLKKYRDMVVEAXGX

SEQ ID NO: 64812 - protein, 25 aa, Artificial Sequence
  Cyclic GFR-binding peptide
DLEPISILYLVGRTPKVKFKYEMVV

SEQ ID NO: 64813 - protein, 26 aa, Artificial Sequence
  Cyclic GFR-binding peptide
VPARLNAISILYFDAANNVVLKKYRD

SEQ ID NO: 64814 - protein, 21 aa, Artificial Sequence
  Cyclic GFR-binding peptide
EPISILYLVGRKPKVKFKYEM

SEQ ID NO: 64815 - protein, 30 aa, Artificial Sequence
  Cyclic GFR-binding peptide
  MOD_RES (4), (5): Xaa is C or S
ASPXXVPQDLSPISILYIVGRTPKVYKQYE

SEQ ID NO: 64816 - protein, 25 aa, Artificial Sequence
  Cyclic GFR-binding peptide
EPISMLYLDEYDKVVKFKYEEMVVE

SEQ ID NO: 64817 - protein, 29 aa, Artificial Sequence
  Cyclic GFR-binding peptide
TKLSPISVLYIDDSSNVIYKQYENMVVRS

SEQ ID NO: 64818 - protein, 34 aa, Artificial Sequence; identical to SEQ ID NO: 18851
  Cyclic GFR-binding peptide
  MOD_RES (3), (4): Xaa is C or S

SEQ ID NO: 64819 - protein, 38 aa, Artificial Sequence; identical to SEQ ID NO: 18852
  Cyclic GFR-binding peptide
  MOD_RES (4), (5), (37): Xaa is C or S

SEQ ID NO: 64820 - protein, 39 aa, Artificial Sequence; identical to SEQ ID NO: 18853
  Cyclic GFR-binding peptide
  MOD_RES (6), (7), (39): Xaa is C or S

SEQ ID NO: 64821 - protein, 39 aa, Artificial Sequence; identical to SEQ ID NO: 18854
  Cyclic GFR-binding peptide
  MOD_RES (5), (6), (37), (39): Xaa is C or S

SEQ ID NO: 64822 - protein, 26 aa, Artificial Sequence
  Cyclic GFR-binding peptide
QALEPISILYLVGRKPKVKFKYEMIV

SEQ ID NO: 64823 - protein, 37 aa, Artificial Sequence; identical to SEQ ID NO: 18859
  Cyclic GFR-binding peptide
  MOD_RES (6), (7): Xaa is C or S

SEQ ID NO: 64824 - protein, 24 aa, Artificial Sequence
  Cyclic GFR-binding peptide
TKLSPISVLYIDDMGVPTYKQYEE

SEQ ID NO: 64825 - protein, 36 aa, Artificial Sequence
  Cyclic GFR-binding peptide
  MOD_RES (4), (5): Xaa is C or S
GKAXXVPTKLEPISVLYLDDMGVPTKFKYEEGMSVA

SEQ ID NO: 64826 - protein, 37 aa, Artificial Sequence; identical to SEQ ID NO: 18865
  Cyclic GFR-binding peptide
  MOD_RES (1), (2), (34), (36): Xaa is C or S

SEQ ID NO: 64827 - protein, 36 aa, Artificial Sequence; identical to SEQ ID NO: 18870
  Cyclic GFR-binding peptide
  MOD_RES (2), (34), (36): Xaa is C or S

SEQ ID NO: 64828 - protein, 28 aa, Artificial Sequence
  Cyclic GFR-binding peptide
PTELEPISMLYLDEYDKVVKFKYEEMVV

SEQ ID NO: 64829 - protein, 35 aa, Artificial Sequence
  Cyclic GFR-binding peptide
  MOD_RES (6), (7): Xaa is C or S
KASKAXXVPTKLSPISILYIDKGVVTYYKQYEGMA

SEQ ID NO: 64830 - protein, 29 aa, Artificial Sequence
  Cyclic GFR-binding peptide
NAISILYFDAANNVVLKKYRAAAAAAAAA

SEQ ID NO: 64831 - protein, 34 aa, Artificial Sequence; identical to SEQ ID NO: 18875
  Cyclic GFR-binding peptide
  MOD_RES (2), (3): Xaa is C or S

SEQ ID NO: 64832 - protein, 40 aa, Artificial Sequence; identical to SEQ ID NO: 18880
  Cyclic GFR-binding peptide
  MOD_RES (6), (7), (39): Xaa is C or S

SEQ ID NO: 64833 - protein, 39 aa, Artificial Sequence; identical to SEQ ID NO: 18882
  Cyclic GFR-binding peptide
  MOD_RES (4), (5), (37), (39): Xaa is C or S

SEQ ID NO: 64834 - protein, 29 aa, Artificial Sequence
  Cyclic GFR-binding peptide
  MOD_RES (1), (1): Xaa is C or S
XAPTKLSPISVLYIDSSNNVIYKQYENMV

SEQ ID NO: 64835 - protein, 35 aa, Artificial Sequence; identical to SEQ ID NO: 18886
  Cyclic GFR-binding peptide
  MOD_RES (3), (4): Xaa is C or S

SEQ ID NO: 64836 - protein, 25 aa, Artificial Sequence
  Cyclic GFR-binding peptide
VPQALEPISILYLVGRKPKVKFKYE

SEQ ID NO: 64837 - protein, 30 aa, Artificial Sequence
  Cyclic GFR-binding peptide
  MOD_RES (29), (29): Xaa is C or S
QLSPISVLYIDDSSNVIYKQYENMVVRAXG

SEQ ID NO: 64838 - protein, 31 aa, Artificial Sequence
  Cyclic GFR-binding peptide
  MOD_RES (4), (5): Xaa is C or S
PKAXXVPTELEPISMLYLDEYDKVVKFKYEE

SEQ ID NO: 64839 - protein, 25 aa, Artificial Sequence
  Cyclic GFR-binding peptide
TQLSPISVLYIDDSSNVIYKQYENM

SEQ ID NO: 64840 - protein, 27 aa, Artificial Sequence
  Cyclic GFR-binding peptide
VPARLNAISILYFDAANNVVLKKYRDM

SEQ ID NO: 64841 - protein, 29 aa, Artificial Sequence
  Cyclic GFR-binding peptide
VPTKLEPISVLYLDDMGVPTKFKYEEGMS

SEQ ID NO: 64842 - protein, 26 aa, Artificial Sequence
  Cyclic GFR-binding peptide
LEPISILYLDAANNVVKFKYEDMVVE

SEQ ID NO: 64843 - protein, 25 aa, Artificial Sequence
  Cyclic GFR-binding peptide
PQDLEPISILYLVGRTPKVKFKYEM

SEQ ID NO: 64844 - protein, 32 aa, Artificial Sequence
  Cyclic GFR-binding peptide
  MOD_RES (30), (32): Xaa is C or S
TKLNAISILYFDKGVVTYLKKYRGMAVSEXGX

SEQ ID NO: 64845 - protein, 30 aa, Artificial Sequence
  Cyclic GFR-binding peptide
  MOD_RES (30), (30): Xaa is C or S
TKLSPISILYIDKGVVTYYKQYEGMAVSEX

SEQ ID NO: 64846 - protein, 34 aa, Artificial Sequence; identical to SEQ ID NO: 18892
  Cyclic GFR-binding peptide
  MOD_RES (3), (4): Xaa is C or S

SEQ ID NO: 64847 - protein, 34 aa, Artificial Sequence; identical to SEQ ID NO: 18896
  Cyclic GFR-binding peptide
  MOD_RES (32), (34): Xaa is C or S

SEQ ID NO: 64848 - protein, 40 aa, Artificial Sequence; identical to SEQ ID NO: 18897
  Cyclic GFR-binding peptide
  MOD_RES (7), (39): Xaa is C or S

SEQ ID NO: 64849 - protein, 38 aa, Artificial Sequence; identical to SEQ ID NO: 18899
  Cyclic GFR-binding peptide
  MOD_RES (6), (7): Xaa is C or S

SEQ ID NO: 64850 - protein, 35 aa, Artificial Sequence; identical to SEQ ID NO: 18904
  Cyclic GFR-binding peptide
  MOD_RES (1), (2), (34): Xaa is C or S

SEQ ID NO: 64851 - protein, 27 aa, Artificial Sequence
  Cyclic GFR-binding peptide
  MOD_RES (26), (26): Xaa is C or S
SPISILYIVGRKPKVYKQYEMIVRSXK

SEQ ID NO: 64852 - protein, 36 aa, Artificial Sequence; identical to SEQ ID NO: 18906
  Cyclic GFR-binding peptide
  MOD_RES (4), (5): Xaa is C or S

SEQ ID NO: 64853 - protein, 27 aa, Artificial Sequence
  Cyclic GFR-binding peptide
QDLSPISILYIVGRTPKVYKQYEMVVK

SEQ ID NO: 64854 - protein, 37 aa, Artificial Sequence; identical to SEQ ID NO: 18909
  Cyclic GFR-binding peptide
  MOD_RES (3), (4), (35), (37): Xaa is C or S

SEQ ID NO: 64855 - protein, 33 aa, Artificial Sequence
  Cyclic GFR-binding peptide
  MOD_RES (30), (32): Xaa is C or S
TKLSPISILYKDKGVVTYLKYHYGMAVSEXGXR

SEQ ID NO: 64856 - protein, 35 aa, Artificial Sequence; identical to SEQ ID NO: 18910
  Cyclic GFR-binding peptide
  MOD_RES (1), (33), (35): Xaa is C or S

SEQ ID NO: 64857 - protein, 27 aa, Artificial Sequence
  Cyclic GFR-binding peptide
  MOD_RES (1), (1): Xaa is C or S
XVSQDLSPISILYIIGKTPKIYKQYEM

SEQ ID NO: 64858 - protein, 32 aa, Artificial Sequence
  Cyclic GFR-binding peptide
  MOD_RES (5), (6): Xaa is C or S
VPKAXXAPTKLEPISVLYLDSSNNVIKFKYEN

SEQ ID NO: 64859 - protein, 32 aa, Artificial Sequence
  Cyclic GFR-binding peptide
  MOD_RES (6), (7): Xaa is C or S
KASKAXXVPTKLSPISILYIDKGVVTYYKQYE

SEQ ID NO: 64860 - protein, 38 aa, Artificial Sequence; identical to SEQ ID NO: 18914
  Cyclic GFR-binding peptide
  MOD_RES (2), (3), (35), (37): Xaa is C or S

SEQ ID NO: 64861 - protein, 27 aa, Artificial Sequence
  Cyclic GFR-binding peptide
  MOD_RES (2), (2): Xaa is C or S
TXAPTKLSPISVLYIDDSSNVIYKQYE

SEQ ID NO: 64862 - protein, 28 aa, Artificial Sequence
  Cyclic GFR-binding peptide
VPQALSPISILYIVGRKPKVYKQYEMIV

SEQ ID NO: 64863 - protein, 24 aa, Artificial Sequence
  Cyclic GFR-binding peptide
PTKLSPISVLYIDDMGVPTYKQYE

SEQ ID NO: 64864 - protein, 36 aa, Artificial Sequence; identical to SEQ ID NO: 18920
  Cyclic GFR-binding peptide
  MOD_RES (5), (6): Xaa is C or S

SEQ ID NO: 64865 - protein, 35 aa, Artificial Sequence; identical to SEQ ID NO: 18921
  Cyclic GFR-binding peptide
  MOD_RES (1), (2), (33), (35): Xaa is C or S

SEQ ID NO: 64866 - protein, 21 aa, Artificial Sequence
  Cyclic GFR-binding peptide
LSPISILYKDKGVVTYLKYHY

SEQ ID NO: 64867 - protein, 35 aa, Artificial Sequence
  Cyclic GFR-binding peptide
  MOD_RES (7), (7): Xaa is C or S
HVTKPTXAPTKLEPISVLYLDDSSNVIKFKYENMV

SEQ ID NO: 64868 - protein, 29 aa, Artificial Sequence
  Cyclic GFR-binding peptide
  MOD_RES (28), (28): Xaa is C or S
LEPISMLYLDEYDKVVKFKYEEMVVEGXG

SEQ ID NO: 64869 - protein, 32 aa, Artificial Sequence
  Cyclic GFR-binding peptide
  MOD_RES (4), (5): Xaa is C or S
PKAXXVPTELSPISMLYIDEYDKVVYKQYEEM

SEQ ID NO: 64870 - protein, 30 aa, Artificial Sequence
  Cyclic GFR-binding peptide
  MOD_RES (3), (4): Xaa is C or S
APXXVPQALEPISILYLVGRKPKVKFKYEM

SEQ ID NO: 64871 - protein, 32 aa, Artificial Sequence
  Cyclic GFR-binding peptide
  MOD_RES (3), (4): Xaa is C or S
KAXXAPTKLSPISVLYIDSSNNVIYKQYENMV

SEQ ID NO: 64872 - protein, 31 aa, Artificial Sequence
  Cyclic GFR-binding peptide
  MOD_RES (2), (3): Xaa is C or S
AXXVPTELSPISMLYIDEYDKVVYKQYEEMV

SEQ ID NO: 64873 - protein, 26 aa, Artificial Sequence
  Cyclic GFR-binding peptide
LSPISILYKDAANNVVLKYHYDMVVE

SEQ ID NO: 64874 - protein, 37 aa, Artificial Sequence; identical to SEQ ID NO: 18933
  Cyclic GFR-binding peptide
  MOD_RES (1), (34), (36): Xaa is C or S

SEQ ID NO: 64875 - protein, 26 aa, Artificial Sequence
  Cyclic GFR-binding peptide
QLSPISVLYIDDSSNVIYKQYENMVV

SEQ ID NO: 64876 - protein, 30 aa, Artificial Sequence
  Cyclic GFR-binding peptide
  MOD_RES (3), (4): Xaa is C or S
KAXXVPTELSPISMLYIDENEKVVYKQYED

SEQ ID NO: 64877 - protein, 26 aa, Artificial Sequence
  Cyclic GFR-binding peptide
TKLNAISILYFDKGVVTYLKKYRGMA

SEQ ID NO: 64878 - protein, 27 aa, Artificial Sequence
  Cyclic GFR-binding peptide
  MOD_RES (27), (27): Xaa is C or S
SPISMLYIDENEKVVYKQYEDMVVEGX

SEQ ID NO: 64879 - protein, 37 aa, Artificial Sequence; identical to SEQ ID NO: 18937
  Cyclic GFR-binding peptide
  MOD_RES (5), (6), (37): Xaa is C or S

SEQ ID NO: 64880 - protein, 32 aa, Artificial Sequence; identical to SEQ ID NO: 18938
  Cyclic GFR-binding peptide
  MOD_RES (32), (32): Xaa is C or S

SEQ ID NO: 64881 - protein, 36 aa, Artificial Sequence
  Cyclic GFR-binding peptide
  MOD_RES (6), (7): Xaa is C or S
KIPKAXXVPTELSPISMLYIDENEKVVYKQYEDMVV

SEQ ID NO: 64882 - protein, 32 aa, Artificial Sequence; identical to SEQ ID NO: 18945
  Cyclic GFR-binding peptide
  MOD_RES (1), (32): Xaa is C or S

SEQ ID NO: 64883 - protein, 33 aa, Artificial Sequence
  Cyclic GFR-binding peptide
  MOD_RES (31), (33): Xaa is C or S
PTELSPISMLYIDEYDKVVYKQYEEMVVEGXGX

SEQ ID NO: 64884 - protein, 30 aa, Artificial Sequence
  Cyclic GFR-binding peptide
  MOD_RES (1), (2): Xaa is C or S
XXVPQALSPISILYIVGRKPKVYKQYEMIV

SEQ ID NO: 64885 - protein, 41 aa, Artificial Sequence; identical to SEQ ID NO: 18946
  Cyclic GFR-binding peptide
  MOD_RES (5), (6), (38), (40): Xaa is C or S

SEQ ID NO: 64886 - protein, 27 aa, Artificial Sequence
  Cyclic GFR-binding peptide
EPISVLYLDDMGVPTKFKYEEGMSVAE

SEQ ID NO: 64887 - protein, 32 aa, Artificial Sequence; identical to SEQ ID NO: 18950
  Cyclic GFR-binding peptide
  MOD_RES (1), (2): Xaa is C or S

SEQ ID NO: 64888 - protein, 34 aa, Artificial Sequence; identical to SEQ ID NO: 18952
  Cyclic GFR-binding peptide
  MOD_RES (1), (2): Xaa is C or S

SEQ ID NO: 64889 - protein, 31 aa, Artificial Sequence
  Cyclic GFR-binding peptide
  MOD_RES (2), (3): Xaa is C or S
PXXVSQDLSPISILYIIGKTPKIYKQYEMIV

SEQ ID NO: 64890 - protein, 29 aa, Artificial Sequence
  Cyclic GFR-binding peptide
  MOD_RES (1), (2): Xaa is C or S
XXVPTKLSPISVLYIDDMGVPTYKQYEEG

SEQ ID NO: 64891 - protein, 28 aa, Artificial Sequence
  Cyclic GFR-binding peptide
PARLEPISILYLDAANNVVKFKYEDMVV

SEQ ID NO: 64892 - protein, 30 aa, Artificial Sequence
  Cyclic GFR-binding peptide
  MOD_RES (4), (5): Xaa is C or S
PKAXXVPTELSPISMLYIDENEKVVYKQYE

SEQ ID NO: 64893 - protein, 32 aa, Artificial Sequence
  Cyclic GFR-binding peptide
  MOD_RES (6), (7): Xaa is C or S
AVPKAXXAPTKLEPISVLYLDSSNNVIKFKYE

SEQ ID NO: 64894 - protein, 33 aa, Artificial Sequence
  Cyclic GFR-binding peptide
  MOD_RES (30), (32): Xaa is C or S
TQLEPISVLYLDDSSNVIKFKYENMVVRAXGXH

SEQ ID NO: 64895 - protein, 32 aa, Artificial Sequence
  Cyclic GFR-binding peptide
  MOD_RES (4), (5): Xaa is C or S
PKPXXAPTQLSPISVLYIDDSSNVIYKQYENM

SEQ ID NO: 64896 - protein, 28 aa, Artificial Sequence
  Cyclic GFR-binding peptide
  MOD_RES (1), (2): Xaa is C or S
XXVPARLSPISILYKDAANNVVLKYHYD

SEQ ID NO: 64897 - protein, 27 aa, Artificial Sequence
  Cyclic GFR-binding peptide
LSPISVLYIDSSNNVIYKQYENMVVKA

SEQ ID NO: 64898 - protein, 31 aa, Artificial Sequence
  Cyclic GFR-binding peptide
PTKLEPISVLYLDDMGVPTKFKYEEGMSVAE

SEQ ID NO: 64899 - protein, 30 aa, Artificial Sequence
  Cyclic GFR-binding peptide
  MOD_RES (28), (30): Xaa is C or S
LEPISVLYLDDSSNVIKFKYENMVVRSXGX

SEQ ID NO: 64900 - protein, 33 aa, Artificial Sequence
  Cyclic GFR-binding peptide
  MOD_RES (3), (4): Xaa is C or S
KAXXVPTKLSPISILYKDKGVVTYLKYHYGMAV

SEQ ID NO: 64901 - protein, 23 aa, Artificial Sequence
  Cyclic GFR-binding peptide
LEPISILYLDAANNVVKFKYEDM

SEQ ID NO: 64902 - protein, 28 aa, Artificial Sequence
  Cyclic GFR-binding peptide
  MOD_RES (1), (1): Xaa is C or S
XVPQALEPISILYLVGRKPKVKFKYEMI

SEQ ID NO: 64903 - protein, 30 aa, Artificial Sequence
  Cyclic GFR-binding peptide
  MOD_RES (3), (3): Xaa is C or S
PTXAPTKLSPISVLYIDDSSNVIYKQYENM

SEQ ID NO: 64904 - protein, 35 aa, Artificial Sequence; identical to SEQ ID NO: 18975
  Cyclic GFR-binding peptide
  MOD_RES (3), (4), (35): Xaa is C or S

SEQ ID NO: 64905 - protein, 32 aa, Artificial Sequence; identical to SEQ ID NO: 18978
  Cyclic GFR-binding peptide
  MOD_RES (31), (31): Xaa is C or S

SEQ ID NO: 64906 - protein, 38 aa, Artificial Sequence; identical to SEQ ID NO: 18982
  Cyclic GFR-binding peptide
  MOD_RES (2), (3), (35), (37): Xaa is C or S

SEQ ID NO: 64907 - protein, 30 aa, Artificial Sequence
  Cyclic GFR-binding peptide
  MOD_RES (4), (5): Xaa is C or S
PKAXXVPTELSPISMLYIDEYDKVVYKQYE

SEQ ID NO: 64908 - protein, 38 aa, Artificial Sequence; identical to SEQ ID NO: 18983
  Cyclic GFR-binding peptide
  MOD_RES (6), (7), (38): Xaa is C or S

SEQ ID NO: 64909 - protein, 26 aa, Artificial Sequence
  Cyclic GFR-binding peptide
  MOD_RES (1), (1): Xaa is C or S
XAPTQLSPISVLYIDDSSNVIYKQYE

SEQ ID NO: 64910 - protein, 36 aa, Artificial Sequence; identical to SEQ ID NO: 18984
  Cyclic GFR-binding peptide
  MOD_RES (5), (6): Xaa is C or S

SEQ ID NO: 64911 - protein, 32 aa, Artificial Sequence
  Cyclic GFR-binding peptide
  MOD_RES (30), (32): Xaa is C or S
TKLSPISILYIDKGVVTYYKQYEGMAVSEXGX

SEQ ID NO: 64912 - protein, 38 aa, Artificial Sequence; identical to SEQ ID NO: 18985
  Cyclic GFR-binding peptide
  MOD_RES (6), (7): Xaa is C or S

SEQ ID NO: 64913 - protein, 33 aa, Artificial Sequence
  Cyclic GFR-binding peptide
  MOD_RES (30), (32): Xaa is C or S
TQLSPISVLYIDDSSNVIYKQYENMVVRAXGXH

SEQ ID NO: 64914 - protein, 37 aa, Artificial Sequence; identical to SEQ ID NO: 18989
  Cyclic GFR-binding peptide
  MOD_RES (5), (6), (37): Xaa is C or S

SEQ ID NO: 64915 - protein, 27 aa, Artificial Sequence
  Cyclic GFR-binding peptide
ARLSPISILYKDAANNVVLKYHYDMVV

SEQ ID NO: 64916 - protein, 23 aa, Artificial Sequence
  Cyclic GFR-binding peptide
DLEPISILYLIGKTPKIKFKYEM

SEQ ID NO: 64917 - protein, 39 aa, Artificial Sequence; identical to SEQ ID NO: 18990
  Cyclic GFR-binding peptide
  MOD_RES (4), (5), (37), (39): Xaa is C or S

SEQ ID NO: 64918 - protein, 31 aa, Artificial Sequence
  Cyclic GFR-binding peptide
  MOD_RES (30), (30): Xaa is C or S
TELSPISMLYIDEYDKVVYKQYEEMVVEGXG

SEQ ID NO: 64919 - protein, 24 aa, Artificial Sequence
  Cyclic GFR-binding peptide
EPISMLYLDEYDKVVKFKYEEMVV

SEQ ID NO: 64920 - protein, 37 aa, Artificial Sequence; identical to SEQ ID NO: 18992
  Cyclic GFR-binding peptide
  MOD_RES (2), (3), (35), (37): Xaa is C or S

SEQ ID NO: 64921 - protein, 37 aa, Artificial Sequence; identical to SEQ ID NO: 18994
  Cyclic GFR-binding peptide
  MOD_RES (6), (7): Xaa is C or S

SEQ ID NO: 64922 - protein, 29 aa, Artificial Sequence
  Cyclic GFR-binding peptide
  MOD_RES (28), (28): Xaa is C or S
ALSPISILYIVGRKPKVYKQYEMIVRSXK

SEQ ID NO: 64923 - protein, 37 aa, Artificial Sequence; identical to SEQ ID NO: 18996
  Cyclic GFR-binding peptide
  MOD_RES (2), (3), (35), (37): Xaa is C or S

SEQ ID NO: 64924 - protein, 23 aa, Artificial Sequence
  Cyclic GFR-binding peptide
LEPISILYLIGKTPKIKFKYEMI

SEQ ID NO: 64925 - protein, 31 aa, Artificial Sequence; identical to SEQ ID NO: 18997
  Cyclic GFR-binding peptide

SEQ ID NO: 64926 - protein, 25 aa, Artificial Sequence
  Cyclic GFR-binding peptide
KLNAISILYFDKGVVTYLKKYRGMA

SEQ ID NO: 64927 - protein, 38 aa, Artificial Sequence; identical to SEQ ID NO: 18998
  Cyclic GFR-binding peptide
  MOD_RES (2), (3), (35), (37): Xaa is C or S

SEQ ID NO: 64928 - protein, 24 aa, Artificial Sequence
  Cyclic GFR-binding peptide
SPISVLYIDDSSNVIYKQYENMVV

SEQ ID NO: 64929 - protein, 22 aa, Artificial Sequence
  Cyclic GFR-binding peptide
SPISVLYIDSSNNVIYKQYENM

SEQ ID NO: 64930 - protein, 36 aa, Artificial Sequence
  Cyclic GFR-binding peptide
  MOD_RES (6), (7): Xaa is C or S
YVPKPXXAPTKLEPISVLYLDDSSNVIKFKYENMVV

SEQ ID NO: 64931 - protein, 28 aa, Artificial Sequence
  Cyclic GFR-binding peptide
  MOD_RES (1), (1): Xaa is C or S
XVPTELEPISMLYLDENEKVVKFKYEDM

SEQ ID NO: 64932 - protein, 37 aa, Artificial Sequence; identical to SEQ ID NO: 19004
  Cyclic GFR-binding peptide
  MOD_RES (5), (6): Xaa is C or S

SEQ ID NO: 64933 - protein, 23 aa, Artificial Sequence
  Cyclic GFR-binding peptide
KLEPISVLYLDSSNNVIKFKYEN

SEQ ID NO: 64934 - protein, 26 aa, Artificial Sequence
  Cyclic GFR-binding peptide
PQDLEPISILYLVGRTPKVKFKYEMV

SEQ ID NO: 64935 - protein, 31 aa, Artificial Sequence
  Cyclic GFR-binding peptide
  MOD_RES (4), (4): Xaa is C or S
KPTXAPTKLSPISVLYIDDSSNVIYKQYENM

SEQ ID NO: 64936 - protein, 36 aa, Artificial Sequence; identical to SEQ ID NO: 19014
  Cyclic GFR-binding peptide
  MOD_RES (1), (2), (33), (35): Xaa is C or S

SEQ ID NO: 64937 - protein, 33 aa, Artificial Sequence
  Cyclic GFR-binding peptide
  MOD_RES (6), (7): Xaa is C or S
SIPKAXXVPTELEPISMLYLDEYDKVVKFKYEE

SEQ ID NO: 64938 - protein, 29 aa, Artificial Sequence
  Cyclic GFR-binding peptide
  MOD_RES (1), (2): Xaa is C or S
XXVPTELSPISMLYIDEYDKVVYKQYEEM

SEQ ID NO: 64939 - protein, 35 aa, Artificial Sequence; identical to SEQ ID NO: 19018
  Cyclic GFR-binding peptide
  MOD_RES (1), (32), (34): Xaa is C or S

SEQ ID NO: 64940 - protein, 24 aa, Artificial Sequence
  Cyclic GFR-binding peptide
LEPISILYLIGKTPKIKFKYEMIV

SEQ ID NO: 64941 - protein, 31 aa, Artificial Sequence; identical to SEQ ID NO: 19020
  Cyclic GFR-binding peptide

SEQ ID NO: 64942 - protein, 29 aa, Artificial Sequence
  Cyclic GFR-binding peptide
PQDLEPISILYLVGRTPKVKFKYEMVVKS

SEQ ID NO: 64943 - protein, 21 aa, Artificial Sequence
  Cyclic GFR-binding peptide
NAISILYFDKGVVTYLKKYRG

SEQ ID NO: 64944 - protein, 41 aa, Artificial Sequence; identical to SEQ ID NO: 19023
  Cyclic GFR-binding peptide
  MOD_RES (6), (7), (38), (40): Xaa is C or S

SEQ ID NO: 64945 - protein, 31 aa, Artificial Sequence
  Cyclic GFR-binding peptide
  MOD_RES (1), (2): Xaa is C or S
XXAPTKLEPISVLYLDSSNNVIKFKYENMVV

SEQ ID NO: 64946 - protein, 39 aa, Artificial Sequence; identical to SEQ ID NO: 19030
  Cyclic GFR-binding peptide
  MOD_RES (3), (4), (36), (38): Xaa is C or S

SEQ ID NO: 64947 - protein, 30 aa, Artificial Sequence
  Cyclic GFR-binding peptide
  MOD_RES (27), (29): Xaa is C or S
LSPISILYIIGKTPKIYKQYEMIVKSXKXS

SEQ ID NO: 64948 - protein, 32 aa, Artificial Sequence
  Cyclic GFR-binding peptide
  MOD_RES (31), (31): Xaa is C or S
PARLNAISILYFDAANNVVLKKYRDMVVEAXG

SEQ ID NO: 64949 - protein, 24 aa, Artificial Sequence
  Cyclic GFR-binding peptide
KLNAISILYFDKGVVTYLKKYRGM

SEQ ID NO: 64950 - protein, 40 aa, Artificial Sequence; identical to SEQ ID NO: 19037
  Cyclic GFR-binding peptide
  MOD_RES (5), (6), (38), (40): Xaa is C or S

SEQ ID NO: 64951 - protein, 27 aa, Artificial Sequence
  Cyclic GFR-binding peptide
  MOD_RES (1), (1): Xaa is C or S
XAPTKLSPISVLYIDSSNNVIYKQYEN

SEQ ID NO: 64952 - protein, 40 aa, Artificial Sequence; identical to SEQ ID NO: 19039
  Cyclic GFR-binding peptide
  MOD_RES (4), (5), (37), (39): Xaa is C or S

SEQ ID NO: 64953 - protein, 28 aa, Artificial Sequence
  Cyclic GFR-binding peptide
TKLSPISVLYIDSSNNVIYKQYENMVVK

SEQ ID NO: 64954 - protein, 35 aa, Artificial Sequence; identical to SEQ ID NO: 19042
  Cyclic GFR-binding peptide
  MOD_RES (4), (5): Xaa is C or S

SEQ ID NO: 64955 - protein, 37 aa, Artificial Sequence; identical to SEQ ID NO: 19043
  Cyclic GFR-binding peptide
  MOD_RES (5), (37): Xaa is C or S

SEQ ID NO: 64956 - protein, 38 aa, Artificial Sequence; identical to SEQ ID NO: 19044
  Cyclic GFR-binding peptide
  MOD_RES (3), (4), (36), (38): Xaa is C or S

SEQ ID NO: 64957 - protein, 37 aa, Artificial Sequence; identical to SEQ ID NO: 19046
  Cyclic GFR-binding peptide
  MOD_RES (2), (3), (35), (37): Xaa is C or S

SEQ ID NO: 64958 - protein, 35 aa, Artificial Sequence; identical to SEQ ID NO: 19048
  Cyclic GFR-binding peptide
  MOD_RES (5), (5): Xaa is C or S

SEQ ID NO: 64959 - protein, 31 aa, Artificial Sequence
  Cyclic GFR-binding peptide
  MOD_RES (2), (2): Xaa is C or S
TXAPTKLEPISVLYLDDSSNVIKFKYENMVV

SEQ ID NO: 64960 - protein, 33 aa, Artificial Sequence
  Cyclic GFR-binding peptide
  MOD_RES (2), (3): Xaa is C or S
AXXVPTKLEPISVLYLDDMGVPTKFKYEEGMSV

SEQ ID NO: 64961 - protein, 23 aa, Artificial Sequence
  Cyclic GFR-binding peptide
SPISILYIDKGVVTYYKQYEGMA

SEQ ID NO: 64962 - protein, 30 aa, Artificial Sequence
  Cyclic GFR-binding peptide
  MOD_RES (27), (29): Xaa is C or S
SPISILYIDKGVVTYYKQYEGMAVSEXGXR

SEQ ID NO: 64963 - protein, 31 aa, Artificial Sequence
  Cyclic GFR-binding peptide
  MOD_RES (2), (3): Xaa is C or S
PXXVSQDLEPISILYLIGKTPKIKFKYEMIV

SEQ ID NO: 64964 - protein, 40 aa, Artificial Sequence; identical to SEQ ID NO: 19054
  Cyclic GFR-binding peptide
  MOD_RES (5), (6), (38), (40): Xaa is C or S

SEQ ID NO: 64965 - protein, 36 aa, Artificial Sequence; identical to SEQ ID NO: 19055
  Cyclic GFR-binding peptide
  MOD_RES (5), (6): Xaa is C or S

SEQ ID NO: 64966 - protein, 29 aa, Artificial Sequence
  Cyclic GFR-binding peptide
VPQALSPISILYIVGRKPKVYKQYEMIVR

SEQ ID NO: 64967 - protein, 26 aa, Artificial Sequence
  Cyclic GFR-binding peptide
SPISILYKDKGVVTYLKYHYGMAVSE

SEQ ID NO: 64968 - protein, 35 aa, Artificial Sequence
  Cyclic GFR-binding peptide
  MOD_RES (6), (7): Xaa is C or S
YVPKPXXAPTKLEPISVLYLDDSSNVIKFKYENMV

SEQ ID NO: 64969 - protein, 34 aa, Artificial Sequence
  Cyclic GFR-binding peptide
  MOD_RES (4), (5): Xaa is C or S
PASXXVPARLSPISILYKDAANNVVLKYHYDMVV

SEQ ID NO: 64970 - protein, 32 aa, Artificial Sequence
  Cyclic GFR-binding peptide
  MOD_RES (29), (31): Xaa is C or S
RLEPISILYLDAANNVVKFKYEDMVVEAXGXR

SEQ ID NO: 64971 - protein, 31 aa, Artificial Sequence
  Cyclic GFR-binding peptide
  MOD_RES (3), (4): Xaa is C or S
KPXXAPTQLEPISVLYLDDSSNVIKFKYENM

SEQ ID NO: 64972 - protein, 42 aa, Artificial Sequence; identical to SEQ ID NO: 19059
  Cyclic GFR-binding peptide
  MOD_RES (6), (7), (39), (41): Xaa is C or S

SEQ ID NO: 64973 - protein, 32 aa, Artificial Sequence; identical to SEQ ID NO: 19061
  Cyclic GFR-binding peptide
  MOD_RES (32), (32): Xaa is C or S

SEQ ID NO: 64974 - protein, 30 aa, Artificial Sequence
  Cyclic GFR-binding peptide
  MOD_RES (3), (4): Xaa is C or S
KPXXAPTQLSPISVLYIDDSSNVIYKQYEN

SEQ ID NO: 64975 - protein, 28 aa, Artificial Sequence
  Cyclic GFR-binding peptide
  MOD_RES (28), (28): Xaa is C or S
SPISVLYIDDMGVPTYKQYEEGMSVAEX

SEQ ID NO: 64976 - protein, 30 aa, Artificial Sequence
  Cyclic GFR-binding peptide
  MOD_RES (3), (4): Xaa is C or S
SPXXVPQDLSPISILYIVGRTPKVYKQYEM

SEQ ID NO: 64977 - protein, 29 aa, Artificial Sequence
  Cyclic GFR-binding peptide
  MOD_RES (1), (1): Xaa is C or S
XVPQALEPISILYLVGRKPKVKFKYEMIV

SEQ ID NO: 64978 - protein, 29 aa, Artificial Sequence
  Cyclic GFR-binding peptide
  MOD_RES (26), (28): Xaa is C or S
SPISILYIIGKTPKIYKQYEMIVKSXKXS

SEQ ID NO: 64979 - protein, 25 aa, Artificial Sequence
  Cyclic GFR-binding peptide
SPISVLYIDDMGVPTYKQYEEGMSV

SEQ ID NO: 64980 - protein, 39 aa, Artificial Sequence; identical to SEQ ID NO: 19064
  Cyclic GFR-binding peptide
  MOD_RES (6), (7), (38): Xaa is C or S

SEQ ID NO: 64981 - protein, 25 aa, Artificial Sequence
  Cyclic GFR-binding peptide
LEPISMLYLDENEKVVKFKYEDMVV

SEQ ID NO: 64982 - protein, 27 aa, Artificial Sequence
  Cyclic GFR-binding peptide
  MOD_RES (1), (1): Xaa is C or S
XVPARLNAISILYFDAANNVVLKKYRD

SEQ ID NO: 64983 - protein, 39 aa, Artificial Sequence; identical to SEQ ID NO: 19069
  Cyclic GFR-binding peptide
  MOD_RES (6), (7), (38): Xaa is C or S

SEQ ID NO: 64984 - protein, 34 aa, Artificial Sequence; identical to SEQ ID NO: 19073
  Cyclic GFR-binding peptide
  MOD_RES (3), (4): Xaa is C or S

SEQ ID NO: 64985 - protein, 40 aa, Artificial Sequence; identical to SEQ ID NO: 19074
  Cyclic GFR-binding peptide
  MOD_RES (5), (37), (39): Xaa is C or S

SEQ ID NO: 64986 - protein, 26 aa, Artificial Sequence
  Cyclic GFR-binding peptide
LSPISILYIVGRKPKVYKQYEMIVRS

SEQ ID NO: 64987 - protein, 34 aa, Artificial Sequence; identical to SEQ ID NO: 19078
  Cyclic GFR-binding peptide
  MOD_RES (31), (33): Xaa is C or S

SEQ ID NO: 64988 - protein, 33 aa, Artificial Sequence
  Cyclic GFR-binding peptide
  MOD_RES (6), (7): Xaa is C or S
KASKAXXVPTKLSPISILYKDKGVVTYLKYHYG

SEQ ID NO: 64989 - protein, 26 aa, Artificial Sequence
  Cyclic GFR-binding peptide
RLEPISILYLDAANNVVKFKYEDMVV

SEQ ID NO: 64990 - protein, 38 aa, Artificial Sequence; identical to SEQ ID NO: 19081
  Cyclic GFR-binding peptide
  MOD_RES (4), (5), (37): Xaa is C or S

SEQ ID NO: 64991 - protein, 36 aa, Artificial Sequence; identical to SEQ ID NO: 19082
  Cyclic GFR-binding peptide
  MOD_RES (1), (2), (34), (36): Xaa is C or S

SEQ ID NO: 64992 - protein, 27 aa, Artificial Sequence
  Cyclic GFR-binding peptide
ARLNAISILYFDAANNVVLKKYRDMVV

SEQ ID NO: 64993 - protein, 22 aa, Artificial Sequence
  Cyclic GFR-binding peptide
KLNAISILYFDKGVVTYLKKYR

SEQ ID NO: 64994 - protein, 27 aa, Artificial Sequence
  Cyclic GFR-binding peptide
  MOD_RES (27), (27): Xaa is C or S
LEPISILYLVGRTPKVKFKYEMVVKSX

SEQ ID NO: 64995 - protein, 32 aa, Artificial Sequence
  Cyclic GFR-binding peptide
  MOD_RES (3), (4): Xaa is C or S
APXXVPQALSPISILYIVGRKPKVYKQYEMIV

SEQ ID NO: 64996 - protein, 33 aa, Artificial Sequence
  Cyclic GFR-binding peptide
  MOD_RES (3), (4): Xaa is C or S
SPXXVPQDLEPISILYLVGRTPKVKFKYEMVVK

SEQ ID NO: 64997 - protein, 32 aa, Artificial Sequence
  Cyclic GFR-binding peptide
  MOD_RES (5), (6): Xaa is C or S
VPKPXXAPTQLSPISVLYIDDSSNVIYKQYEN

SEQ ID NO: 64998 - protein, 30 aa, Artificial Sequence
  Cyclic GFR-binding peptide
  MOD_RES (3), (4): Xaa is C or S
SPXXVSQDLEPISILYLIGKTPKIKFKYEM

SEQ ID NO: 64999 - protein, 36 aa, Artificial Sequence; identical to SEQ ID NO: 19095
  Cyclic GFR-binding peptide
  MOD_RES (4), (5): Xaa is C or S

SEQ ID NO: 65000 - protein, 36 aa, Artificial Sequence; identical to SEQ ID NO: 19096
  Cyclic GFR-binding peptide
  MOD_RES (5), (6): Xaa is C or S

SEQ ID NO: 65001 - protein, 33 aa, Artificial Sequence
  Cyclic GFR-binding peptide
  MOD_RES (5), (6): Xaa is C or S
SASPXXVSQDLEPISILYLIGKTPKIKFKYEMI

SEQ ID NO: 65002 - protein, 27 aa, Artificial Sequence
  Cyclic GFR-binding peptide
  MOD_RES (1), (2): Xaa is C or S
XXAPTQLSPISVLYIDDSSNVIYKQYE

SEQ ID NO: 65003 - protein, 31 aa, Artificial Sequence
  Cyclic GFR-binding peptide
  MOD_RES (5), (6): Xaa is C or S
SAAPXXVPQALEPISILYLVGRKPKVKFKYE

SEQ ID NO: 65004 - protein, 34 aa, Artificial Sequence; identical to SEQ ID NO: 19099
  Cyclic GFR-binding peptide
  MOD_RES (1), (33): Xaa is C or S

SEQ ID NO: 65005 - protein, 36 aa, Artificial Sequence; identical to SEQ ID NO: 19102
  Cyclic GFR-binding peptide
  MOD_RES (4), (5): Xaa is C or S

SEQ ID NO: 65006 - protein, 21 aa, Artificial Sequence
  Cyclic GFR-binding peptide
EPISMLYLDENEKVVKFKYED

SEQ ID NO: 65007 - protein, 28 aa, Artificial Sequence
  Cyclic GFR-binding peptide
  MOD_RES (2), (3): Xaa is C or S
PXXAPTKLEPISVLYLDDSSNVIKFKYE

SEQ ID NO: 65008 - protein, 28 aa, Artificial Sequence
  Cyclic GFR-binding peptide
  MOD_RES (27), (27): Xaa is C or S
EPISVLYLDDSSNVIKFKYENMVVRSXG

SEQ ID NO: 65009 - protein, 29 aa, Artificial Sequence
  Cyclic GFR-binding peptide
  MOD_RES (3), (4): Xaa is C or S
KAXXVPTKLEPISVLYLDDMGVPTKFKYE

SEQ ID NO: 65010 - protein, 27 aa, Artificial Sequence
  Cyclic GFR-binding peptide
  MOD_RES (1), (2): Xaa is C or S
XXVPQDLSPISILYIVGRTPKVYKQYE

SEQ ID NO: 65011 - protein, 25 aa, Artificial Sequence
  Cyclic GFR-binding peptide
PTQLEPISVLYLDDSSNVIKFKYEN

SEQ ID NO: 65012 - protein, 37 aa, Artificial Sequence; identical to SEQ ID NO: 19112
  Cyclic GFR-binding peptide
  MOD_RES (3), (4), (36): Xaa is C or S

SEQ ID NO: 65013 - protein, 27 aa, Artificial Sequence
  Cyclic GFR-binding peptide
RLSPISILYKDAANNVVLKYHYDMVVE

SEQ ID NO: 65014 - protein, 23 aa, Artificial Sequence
  Cyclic GFR-binding peptide
SPISILYIVGRKPKVYKQYEMIV

SEQ ID NO: 65015 - protein, 30 aa, Artificial Sequence
  Cyclic GFR-binding peptide
  MOD_RES (1), (1): Xaa is C or S
XAPTKLSPISVLYIDDSSNVIYKQYENMVV

SEQ ID NO: 65016 - protein, 30 aa, Artificial Sequence
  Cyclic GFR-binding peptide
  MOD_RES (3), (4): Xaa is C or S
KAXXAPTKLSPISVLYIDSSNNVIYKQYEN

SEQ ID NO: 65017 - protein, 36 aa, Artificial Sequence
  Cyclic GFR-binding peptide
  MOD_RES (6), (7): Xaa is C or S
KVGKAXXVPTKLEPISVLYLDDMGVPTKFKYEEGMS

SEQ ID NO: 65018 - protein, 38 aa, Artificial Sequence; identical to SEQ ID NO: 19119
  Cyclic GFR-binding peptide
  MOD_RES (1), (2), (35), (37): Xaa is C or S

SEQ ID NO: 65019 - protein, 32 aa, Artificial Sequence
  Cyclic GFR-binding peptide
  MOD_RES (6), (7): Xaa is C or S
ASASPXXVPQDLEPISILYLVGRTPKVKFKYE

SEQ ID NO: 65020 - protein, 30 aa, Artificial Sequence
  Cyclic GFR-binding peptide
  MOD_RES (1), (1): Xaa is C or S
XVPARLEPISILYLDAANNVVKFKYEDMVV

SEQ ID NO: 65021 - protein, 29 aa, Artificial Sequence
  Cyclic GFR-binding peptide
  MOD_RES (1), (2): Xaa is C or S
XXVSQDLEPISILYLIGKTPKIKFKYEMI

SEQ ID NO: 65022 - protein, 32 aa, Artificial Sequence; identical to SEQ ID NO: 19123
  Cyclic GFR-binding peptide
  MOD_RES (32), (32): Xaa is C or S

SEQ ID NO: 65023 - protein, 31 aa, Artificial Sequence
  Cyclic GFR-binding peptide
  MOD_RES (31), (31): Xaa is C or S
PTKLSPISVLYIDSSNNVIYKQYENMVVKAX

SEQ ID NO: 65024 - protein, 34 aa, Artificial Sequence
  Cyclic GFR-binding peptide
  MOD_RES (6), (7): Xaa is C or S
SIPKAXXVPTELSPISMLYIDEYDKVVYKQYEEM

SEQ ID NO: 65025 - protein, 37 aa, Artificial Sequence; identical to SEQ ID NO: 19125
  Cyclic GFR-binding peptide
  MOD_RES (5), (6): Xaa is C or S

SEQ ID NO: 65026 - protein, 30 aa, Artificial Sequence
  Cyclic GFR-binding peptide
PTKLEPISVLYLDDSSNVIKFKYENMVVRS

SEQ ID NO: 65027 - protein, 28 aa, Artificial Sequence
  Cyclic GFR-binding peptide
ELSPISMLYIDEYDKVVYKQYEEMVVEG

SEQ ID NO: 65028 - protein, 24 aa, Artificial Sequence
  Cyclic GFR-binding peptide
SPISILYIIGKTPKIYKQYEMIVK

SEQ ID NO: 65029 - protein, 23 aa, Artificial Sequence
  Cyclic GFR-binding peptide
SPISVLYIDDSSNVIYKQYENMV

SEQ ID NO: 65030 - protein, 23 aa, Artificial Sequence
  Cyclic GFR-binding peptide
LSPISVLYIDSSNNVIYKQYENM

SEQ ID NO: 65031 - protein, 34 aa, Artificial Sequence
  Cyclic GFR-binding peptide
  MOD_RES (5), (6): Xaa is C or S
IPKAXXVPTELEPISMLYLDENEKVVKFKYEDMV

SEQ ID NO: 65032 - protein, 27 aa, Artificial Sequence
  Cyclic GFR-binding peptide
  MOD_RES (1), (2): Xaa is C or S
XXVPTKLSPISVLYIDDMGVPTYKQYE

SEQ ID NO: 65033 - protein, 32 aa, Artificial Sequence
  Cyclic GFR-binding peptide
  MOD_RES (3), (4): Xaa is C or S
ASXXVPARLNAISILYFDAANNVVLKKYRDMV

SEQ ID NO: 65034 - protein, 31 aa, Artificial Sequence
  Cyclic GFR-binding peptide
  MOD_RES (29), (31): Xaa is C or S
KLEPISVLYLDSSNNVIKFKYENMVVKAXGX

SEQ ID NO: 65035 - protein, 27 aa, Artificial Sequence
  Cyclic GFR-binding peptide
TKLEPISVLYLDSSNNVIKFKYENMVV

SEQ ID NO: 65036 - protein, 36 aa, Artificial Sequence; identical to SEQ ID NO: 19133
  Cyclic GFR-binding peptide
  MOD_RES (1), (33), (35): Xaa is C or S

SEQ ID NO: 65037 - protein, 30 aa, Artificial Sequence
  Cyclic GFR-binding peptide
  MOD_RES (2), (3): Xaa is C or S
SXXVPARLSPISILYKDAANNVVLKYHYDM

SEQ ID NO: 65038 - protein, 23 aa, Artificial Sequence
  Cyclic GFR-binding peptide
LSPISMLYIDEYDKVVYKQYEEM

SEQ ID NO: 65039 - protein, 32 aa, Artificial Sequence
  Cyclic GFR-binding peptide
  MOD_RES (31), (31): Xaa is C or S
PTQLSPISVLYIDDSSNVIYKQYENMVVRAXG

SEQ ID NO: 65040 - protein, 34 aa, Artificial Sequence
  Cyclic GFR-binding peptide
  MOD_RES (7), (7): Xaa is C or S
HVTKPTXAPTKLSPISVLYIDDSSNVIYKQYENM

SEQ ID NO: 65041 - protein, 32 aa, Artificial Sequence
  Cyclic GFR-binding peptide
  MOD_RES (31), (31): Xaa is C or S
PARLEPISILYLDAANNVVKFKYEDMVVEAXG

SEQ ID NO: 65042 - protein, 39 aa, Artificial Sequence; identical to SEQ ID NO: 19142
  Cyclic GFR-binding peptide
  MOD_RES (5), (6), (38): Xaa is C or S

SEQ ID NO: 65043 - protein, 29 aa, Artificial Sequence
  Cyclic GFR-binding peptide
  MOD_RES (27), (29): Xaa is C or S
LSPISILYIIGKTPKIYKQYEMIVKSXKX

SEQ ID NO: 65044 - protein, 33 aa, Artificial Sequence
  Cyclic GFR-binding peptide
  MOD_RES (4), (5): Xaa is C or S
SKAXXVPTKLSPISILYKDKGVVTYLKYHYGMA

SEQ ID NO: 65045 - protein, 34 aa, Artificial Sequence
  Cyclic GFR-binding peptide
  MOD_RES (6), (7): Xaa is C or S
AVPKAXXAPTKLSPISVLYIDSSNNVIYKQYENM

SEQ ID NO: 65046 - protein, 32 aa, Artificial Sequence; identical to SEQ ID NO: 19148
  Cyclic GFR-binding peptide
  MOD_RES (1), (2): Xaa is C or S

SEQ ID NO: 65047 - protein, 23 aa, Artificial Sequence
  Cyclic GFR-binding peptide
LSPISVLYIDDMGVPTYKQYEEG

SEQ ID NO: 65048 - protein, 30 aa, Artificial Sequence
  Cyclic GFR-binding peptide
  MOD_RES (3), (4): Xaa is C or S
SPXXVSQDLSPISILYIIGKTPKIYKQYEM

SEQ ID NO: 65049 - protein, 28 aa, Artificial Sequence
  Cyclic GFR-binding peptide
KLEPISVLYLDDSSNVIKFKYENMVVRS

SEQ ID NO: 65050 - protein, 32 aa, Artificial Sequence; identical to SEQ ID NO: 19155
  Cyclic GFR-binding peptide
  MOD_RES (31), (31): Xaa is C or S

SEQ ID NO: 65051 - protein, 33 aa, Artificial Sequence
  Cyclic GFR-binding peptide
  MOD_RES (5), (5): Xaa is C or S
TKPTXAPTKLSPISVLYIDDSSNVIYKQYENMV

SEQ ID NO: 65052 - protein, 24 aa, Artificial Sequence
  Cyclic GFR-binding peptide
TQLEPISVLYLDDSSNVIKFKYEN

SEQ ID NO: 65053 - protein, 32 aa, Artificial Sequence
  Cyclic GFR-binding peptide
  MOD_RES (3), (4): Xaa is C or S
KAXXAPTKLEPISVLYLDSSNNVIKFKYENMV

SEQ ID NO: 65054 - protein, 29 aa, Artificial Sequence
  Cyclic GFR-binding peptide
  MOD_RES (29), (29): Xaa is C or S
KLEPISVLYLDDSSNVIKFKYENMVVRSX

SEQ ID NO: 65055 - protein, 21 aa, Artificial Sequence
  Cyclic GFR-binding peptide
EPISVLYLDDSSNVIKFKYEN

SEQ ID NO: 65056 - protein, 38 aa, Artificial Sequence; identical to SEQ ID NO: 19163
  Cyclic GFR-binding peptide
  MOD_RES (4), (5), (37): Xaa is C or S

SEQ ID NO: 65057 - protein, 27 aa, Artificial Sequence
  Cyclic GFR-binding peptide
ELSPISMLYIDEYDKVVYKQYEEMVVE

SEQ ID NO: 65058 - protein, 27 aa, Artificial Sequence
  Cyclic GFR-binding peptide
VSQDLEPISILYLIGKTPKIKFKYEMI

SEQ ID NO: 65059 - protein, 29 aa, Artificial Sequence
  Cyclic GFR-binding peptide
  MOD_RES (29), (29): Xaa is C or S
KLNAISILYFDKGVVTYLKKYRGMAVSEX

SEQ ID NO: 65060 - protein, 36 aa, Artificial Sequence; identical to SEQ ID NO: 19165
  Cyclic GFR-binding peptide
  MOD_RES (4), (5): Xaa is C or S

SEQ ID NO: 65061 - protein, 34 aa, Artificial Sequence
  Cyclic GFR-binding peptide
  MOD_RES (5), (6): Xaa is C or S
APASXXVPARLNAISILYFDAANNVVLKKYRDMV

SEQ ID NO: 65062 - protein, 29 aa, Artificial Sequence
  Cyclic GFR-binding peptide
  MOD_RES (29), (29): Xaa is C or S
KLSPISILYKDKGVVTYLKYHYGMAVSEX

SEQ ID NO: 65063 - protein, 33 aa, Artificial Sequence; identical to SEQ ID NO: 19168
  Cyclic GFR-binding peptide
  MOD_RES (1), (32): Xaa is C or S

SEQ ID NO: 65064 - protein, 32 aa, Artificial Sequence
  Cyclic GFR-binding peptide
  MOD_RES (6), (7): Xaa is C or S
KIPKAXXVPTELSPISMLYIDENEKVVYKQYE

SEQ ID NO: 65065 - protein, 41 aa, Artificial Sequence; identical to SEQ ID NO: 19172
  Cyclic GFR-binding peptide
  MOD_RES (6), (38), (40): Xaa is C or S

SEQ ID NO: 65066 - protein, 29 aa, Artificial Sequence
  Cyclic GFR-binding peptide
  MOD_RES (28), (28): Xaa is C or S
LNAISILYFDKGVVTYLKKYRGMAVSEXG

SEQ ID NO: 65067 - protein, 31 aa, Artificial Sequence
  Cyclic GFR-binding peptide
  MOD_RES (29), (31): Xaa is C or S
ELEPISMLYLDEYDKVVKFKYEEMVVEGXGX

SEQ ID NO: 65068 - protein, 23 aa, Artificial Sequence
  Cyclic GFR-binding peptide
TQLSPISVLYIDDSSNVIYKQYE

SEQ ID NO: 65069 - protein, 26 aa, Artificial Sequence
  Cyclic GFR-binding peptide
  MOD_RES (1), (1): Xaa is C or S
XVPQALSPISILYIVGRKPKVYKQYE

SEQ ID NO: 65070 - protein, 28 aa, Artificial Sequence
  Cyclic GFR-binding peptide
  MOD_RES (1), (1): Xaa is C or S
XAPTQLSPISVLYIDDSSNVIYKQYENM

SEQ ID NO: 65071 - protein, 39 aa, Artificial Sequence; identical to SEQ ID NO: 19178
  Cyclic GFR-binding peptide
  MOD_RES (3), (4), (37), (39): Xaa is C or S

SEQ ID NO: 65072 - protein, 31 aa, Artificial Sequence
  Cyclic GFR-binding peptide
  MOD_RES (5), (6): Xaa is C or S
VPKPXXAPTKLEPISVLYLDDSSNVIKFKYE

SEQ ID NO: 65073 - protein, 26 aa, Artificial Sequence
  Cyclic GFR-binding peptide
APTKLSPISVLYIDSSNNVIYKQYEN

SEQ ID NO: 65074 - protein, 28 aa, Artificial Sequence
  Cyclic GFR-binding peptide
  MOD_RES (1), (1): Xaa is C or S
XVPQDLEPISILYLVGRTPKVKFKYEMV

SEQ ID NO: 65075 - protein, 32 aa, Artificial Sequence
  Cyclic GFR-binding peptide
  MOD_RES (29), (31): Xaa is C or S
ELEPISMLYLDENEKVVKFKYEDMVVEGXGXR

SEQ ID NO: 65076 - protein, 30 aa, Artificial Sequence
  Cyclic GFR-binding peptide
  MOD_RES (2), (3): Xaa is C or S
PXXVPQALEPISILYLVGRKPKVKFKYEMI

SEQ ID NO: 65077 - protein, 30 aa, Artificial Sequence
  Cyclic GFR-binding peptide
  MOD_RES (29), (29): Xaa is C or S
ELEPISMLYLDEYDKVVKFKYEEMVVEGXG

SEQ ID NO: 65078 - protein, 27 aa, Artificial Sequence
  Cyclic GFR-binding peptide
  MOD_RES (1), (2): Xaa is C or S
XXVPTELEPISMLYLDEYDKVVKFKYE

SEQ ID NO: 65079 - protein, 27 aa, Artificial Sequence
  Cyclic GFR-binding peptide
VPTELEPISMLYLDENEKVVKFKYEDM

SEQ ID NO: 65080 - protein, 27 aa, Artificial Sequence
  Cyclic GFR-binding peptide
VPTKLSPISVLYIDDMGVPTYKQYEEG

SEQ ID NO: 65081 - protein, 34 aa, Artificial Sequence
  Cyclic GFR-binding peptide
  MOD_RES (5), (6): Xaa is C or S
IPKAXXVPTELEPISMLYLDEYDKVVKFKYEEMV

SEQ ID NO: 65082 - protein, 36 aa, Artificial Sequence; identical to SEQ ID NO: 19184
  Cyclic GFR-binding peptide
  MOD_RES (1), (34), (36): Xaa is C or S

SEQ ID NO: 65083 - protein, 29 aa, Artificial Sequence
  Cyclic GFR-binding peptide
  MOD_RES (1), (1): Xaa is C or S
XVPARLSPISILYKDAANNVVLKYHYDMV

SEQ ID NO: 65084 - protein, 33 aa, Artificial Sequence
  Cyclic GFR-binding peptide
  MOD_RES (30), (32): Xaa is C or S
KLSPISVLYIDDMGVPTYKQYEEGMSVAEXGXR

SEQ ID NO: 65085 - protein, 24 aa, Artificial Sequence
  Cyclic GFR-binding peptide
TELSPISMLYIDEYDKVVYKQYEE

SEQ ID NO: 65086 - protein, 34 aa, Artificial Sequence
  Cyclic GFR-binding peptide
  MOD_RES (6), (7): Xaa is C or S
KASKAXXVPTKLSPISILYKDKGVVTYLKYHYGM

SEQ ID NO: 65087 - protein, 36 aa, Artificial Sequence; identical to SEQ ID NO: 19187
  Cyclic GFR-binding peptide
  MOD_RES (5), (6): Xaa is C or S

SEQ ID NO: 65088 - protein, 29 aa, Artificial Sequence
  Cyclic GFR-binding peptide
  MOD_RES (2), (3): Xaa is C or S
AXXVPTKLSPISILYKDKGVVTYLKYHYG

SEQ ID NO: 65089 - protein, 32 aa, Artificial Sequence
  Cyclic GFR-binding peptide
  MOD_RES (29), (31): Xaa is C or S
ELSPISMLYIDENEKVVYKQYEDMVVEGXGXR

SEQ ID NO: 65090 - protein, 36 aa, Artificial Sequence
  Cyclic GFR-binding peptide
  MOD_RES (6), (7): Xaa is C or S
ASAAPXXVPQALSPISILYIVGRKPKVYKQYEMIVR

SEQ ID NO: 65091 - protein, 22 aa, Artificial Sequence
  Cyclic GFR-binding peptide
EPISMLYLDEYDKVVKFKYEEM

SEQ ID NO: 65092 - protein, 28 aa, Artificial Sequence
  Cyclic GFR-binding peptide
TQLSPISVLYIDDSSNVIYKQYENMVVR

SEQ ID NO: 65093 - protein, 36 aa, Artificial Sequence
  Cyclic GFR-binding peptide
  MOD_RES (6), (7): Xaa is C or S
KVGKAXXVPTKLSPISVLYIDDMGVPTYKQYEEGMS

SEQ ID NO: 65094 - protein, 23 aa, Artificial Sequence
  Cyclic GFR-binding peptide
LEPISMLYLDENEKVVKFKYEDM

SEQ ID NO: 65095 - protein, 33 aa, Artificial Sequence; identical to SEQ ID NO: 19196
  Cyclic GFR-binding peptide
  MOD_RES (2), (3): Xaa is C or S

SEQ ID NO: 65096 - protein, 32 aa, Artificial Sequence
  Cyclic GFR-binding peptide
  MOD_RES (30), (32): Xaa is C or S
TQLSPISVLYIDDSSNVIYKQYENMVVRAXGX

SEQ ID NO: 65097 - protein, 36 aa, Artificial Sequence; identical to SEQ ID NO: 19205
  Cyclic GFR-binding peptide
  MOD_RES (1), (34), (36): Xaa is C or S

SEQ ID NO: 65098 - protein, 22 aa, Artificial Sequence
  Cyclic GFR-binding peptide
LSPISMLYIDEYDKVVYKQYEE

SEQ ID NO: 65099 - protein, 31 aa, Artificial Sequence
  Cyclic GFR-binding peptide
  MOD_RES (4), (5): Xaa is C or S
GKAXXVPTKLEPISVLYLDDMGVPTKFKYEE

SEQ ID NO: 65100 - protein, 31 aa, Artificial Sequence
  Cyclic GFR-binding peptide
  MOD_RES (3), (4): Xaa is C or S
SPXXVPQDLSPISILYIVGRTPKVYKQYEMV

SEQ ID NO: 65101 - protein, 36 aa, Artificial Sequence; identical to SEQ ID NO: 19212
  Cyclic GFR-binding peptide
  MOD_RES (4), (5): Xaa is C or S

SEQ ID NO: 65102 - protein, 38 aa, Artificial Sequence; identical to SEQ ID NO: 19214
  Cyclic GFR-binding peptide
  MOD_RES (3), (4), (35), (37): Xaa is C or S

SEQ ID NO: 65103 - protein, 30 aa, Artificial Sequence
  Cyclic GFR-binding peptide
  MOD_RES (2), (2): Xaa is C or S
TXAPTKLEPISVLYLDDSSNVIKFKYENMV

SEQ ID NO: 65104 - protein, 29 aa, Artificial Sequence
  Cyclic GFR-binding peptide
PTKLNAISILYFDKGVVTYLKKYRGMAVS

SEQ ID NO: 65105 - protein, 39 aa, Artificial Sequence; identical to SEQ ID NO: 19216
  Cyclic GFR-binding peptide
  MOD_RES (5), (37), (39): Xaa is C or S

SEQ ID NO: 65106 - protein, 21 aa, Artificial Sequence
  Cyclic GFR-binding peptide
EPISVLYLDDMGVPTKFKYEE

SEQ ID NO: 65107 - protein, 35 aa, Artificial Sequence; identical to SEQ ID NO: 19220
  Cyclic GFR-binding peptide
  MOD_RES (4), (5): Xaa is C or S

SEQ ID NO: 65108 - protein, 26 aa, Artificial Sequence
  Cyclic GFR-binding peptide
SPISVLYIDDSSNVIYKQYENMVVRS

SEQ ID NO: 65109 - protein, 27 aa, Artificial Sequence
  Cyclic GFR-binding peptide
VPTELSPISMLYIDEYDKVVYKQYEEM

SEQ ID NO: 65110 - protein, 31 aa, Artificial Sequence
  Cyclic GFR-binding peptide
  MOD_RES (30), (30): Xaa is C or S
TELEPISMLYLDENEKVVKFKYEDMVVEGXG

SEQ ID NO: 65111 - protein, 26 aa, Artificial Sequence
  Cyclic GFR-binding peptide
SPISVLYIDDSSNVIYKQYENMVVRA

SEQ ID NO: 65112 - protein, 31 aa, Artificial Sequence
  Cyclic GFR-binding peptide
  MOD_RES (29), (31): Xaa is C or S
QDLEPISILYLIGKTPKIKFKYEMIVKSXKX

SEQ ID NO: 65113 - protein, 30 aa, Artificial Sequence
  Cyclic GFR-binding peptide
PARLEPISILYLDAANNVVKFKYEDMVVEA

SEQ ID NO: 65114 - protein, 29 aa, Artificial Sequence
  Cyclic GFR-binding peptide
  MOD_RES (29), (29): Xaa is C or S
QALEPISILYLVGRKPKVKFKYEMIVRSX

SEQ ID NO: 65115 - protein, 27 aa, Artificial Sequence
  Cyclic GFR-binding peptide
PARLSPISILYKDAANNVVLKYHYDMV

SEQ ID NO: 65116 - protein, 28 aa, Artificial Sequence
  Cyclic GFR-binding peptide
QALEPISILYLVGRKPKVKFKYEMIVRS

SEQ ID NO: 65117 - protein, 30 aa, Artificial Sequence
  Cyclic GFR-binding peptide
  MOD_RES (28), (30): Xaa is C or S
LEPISILYLDAANNVVKFKYEDMVVEAXGX

SEQ ID NO: 65118 - protein, 29 aa, Artificial Sequence
  Cyclic GFR-binding peptide
  MOD_RES (1), (2): Xaa is C or S
XXAPTKLSPISVLYIDDSSNVIYKQYENM

SEQ ID NO: 65119 - protein, 33 aa, Artificial Sequence
  Cyclic GFR-binding peptide
  MOD_RES (30), (32): Xaa is C or S
TKLSPISVLYIDDSSNVIYKQYENMVVRSXGXH

SEQ ID NO: 65120 - protein, 31 aa, Artificial Sequence; identical to SEQ ID NO: 19231
  Cyclic GFR-binding peptide
  MOD_RES (1), (1): Xaa is C or S

SEQ ID NO: 65121 - protein, 29 aa, Artificial Sequence
  Cyclic GFR-binding peptide
SPISILYKDAANNVVLKYHYAAAAAAAAA

SEQ ID NO: 65122 - protein, 30 aa, Artificial Sequence
  Cyclic GFR-binding peptide
  MOD_RES (1), (1): Xaa is C or S
XVPQALEPISILYLVGRKPKVKFKYEMIVR

SEQ ID NO: 65123 - protein, 33 aa, Artificial Sequence
  Cyclic GFR-binding peptide
  MOD_RES (1), (2): Xaa is C or S
XXVPTKLEPISVLYLDDMGVPTKFKYEEGMSVA

SEQ ID NO: 65124 - protein, 31 aa, Artificial Sequence
  Cyclic GFR-binding peptide
  MOD_RES (1), (2): Xaa is C or S
XXAPTKLSPISVLYIDSSNNVIYKQYENMVV

SEQ ID NO: 65125 - protein, 31 aa, Artificial Sequence
  Cyclic GFR-binding peptide
  MOD_RES (31), (31): Xaa is C or S
TKLEPISVLYLDDMGVPTKFKYEEGMSVAEX

SEQ ID NO: 65126 - protein, 24 aa, Artificial Sequence
  Cyclic GFR-binding peptide
PTKLSPISVLYIDSSNNVIYKQYE

SEQ ID NO: 65127 - protein, 32 aa, Artificial Sequence; identical to SEQ ID NO: 19241
  Cyclic GFR-binding peptide
  MOD_RES (1), (2): Xaa is C or S

SEQ ID NO: 65128 - protein, 37 aa, Artificial Sequence; identical to SEQ ID NO: 19242
  Cyclic GFR-binding peptide
  MOD_RES (4), (5), (37): Xaa is C or S

SEQ ID NO: 65129 - protein, 34 aa, Artificial Sequence; identical to SEQ ID NO: 19243
  Cyclic GFR-binding peptide
  MOD_RES (1), (33): Xaa is C or S

SEQ ID NO: 65130 - protein, 31 aa, Artificial Sequence
  Cyclic GFR-binding peptide
  MOD_RES (28), (30): Xaa is C or S
LSPISMLYIDEYDKVVYKQYEEMVVEGXGXR

SEQ ID NO: 65131 - protein, 36 aa, Artificial Sequence; identical to SEQ ID NO: 19245
  Cyclic GFR-binding peptide
  MOD_RES (1), (2), (34), (36): Xaa is C or S

SEQ ID NO: 65132 - protein, 32 aa, Artificial Sequence
  Cyclic GFR-binding peptide
  MOD_RES (5), (6): Xaa is C or S
VPKAXXAPTKLSPISVLYIDSSNNVIYKQYEN

SEQ ID NO: 65133 - protein, 28 aa, Artificial Sequence
  Cyclic GFR-binding peptide
  MOD_RES (27), (27): Xaa is C or S
EPISILYLDAANNVVKFKYEDMVVEAXG

SEQ ID NO: 65134 - protein, 36 aa, Artificial Sequence; identical to SEQ ID NO: 19246
  Cyclic GFR-binding peptide
  MOD_RES (3), (4), (36): Xaa is C or S

SEQ ID NO: 65135 - protein, 42 aa, Artificial Sequence; identical to SEQ ID NO: 19247
  Cyclic GFR-binding peptide
  MOD_RES (6), (7), (39), (41): Xaa is C or S

SEQ ID NO: 65136 - protein, 32 aa, Artificial Sequence
  Cyclic GFR-binding peptide
  MOD_RES (6), (7): Xaa is C or S
AAPASXXVPARLNAISILYFDAANNVVLKKYR

SEQ ID NO: 65137 - protein, 36 aa, Artificial Sequence; identical to SEQ ID NO: 19248
  Cyclic GFR-binding peptide
  MOD_RES (1), (2), (34), (36): Xaa is C or S

SEQ ID NO: 65138 - protein, 29 aa, Artificial Sequence
  Cyclic GFR-binding peptide
  MOD_RES (29), (29): Xaa is C or S
KLSPISVLYIDDSSNVIYKQYENMVVRSX

SEQ ID NO: 65139 - protein, 41 aa, Artificial Sequence; identical to SEQ ID NO: 19250
  Cyclic GFR-binding peptide
  MOD_RES (6), (7), (39), (41): Xaa is C or S

SEQ ID NO: 65140 - protein, 31 aa, Artificial Sequence
  Cyclic GFR-binding peptide
  MOD_RES (30), (30): Xaa is C or S
TKLSPISILYKDKGVVTYLKYHYGMAVSEXG

SEQ ID NO: 65141 - protein, 29 aa, Artificial Sequence
  Cyclic GFR-binding peptide
  MOD_RES (27), (29): Xaa is C or S
SPISVLYIDDSSNVIYKQYENMVVRSXGX

SEQ ID NO: 65142 - protein, 26 aa, Artificial Sequence
  Cyclic GFR-binding peptide
  MOD_RES (26), (26): Xaa is C or S
SPISILYIVGRTPKVYKQYEMVVKSX

SEQ ID NO: 65143 - protein, 36 aa, Artificial Sequence; identical to SEQ ID NO: 19252
  Cyclic GFR-binding peptide
  MOD_RES (3), (4), (36): Xaa is C or S

SEQ ID NO: 65144 - protein, 28 aa, Artificial Sequence
  Cyclic GFR-binding peptide
  MOD_RES (28), (28): Xaa is C or S
LEPISILYLDAANNVVKFKYEDMVVEAX

SEQ ID NO: 65145 - protein, 33 aa, Artificial Sequence; identical to SEQ ID NO: 19253
  Cyclic GFR-binding peptide
  MOD_RES (1), (2): Xaa is C or S

SEQ ID NO: 65146 - protein, 24 aa, Artificial Sequence
  Cyclic GFR-binding peptide
PQALSPISILYIVGRKPKVYKQYE

SEQ ID NO: 65147 - protein, 33 aa, Artificial Sequence
  Cyclic GFR-binding peptide
  MOD_RES (31), (33): Xaa is C or S
PTKLSPISVLYIDSSNNVIYKQYENMVVKAXGX

SEQ ID NO: 65148 - protein, 34 aa, Artificial Sequence
  Cyclic GFR-binding peptide
  MOD_RES (4), (5): Xaa is C or S
ASPXXVSQDLSPISILYIIGKTPKIYKQYEMIVK

SEQ ID NO: 65149 - protein, 24 aa, Artificial Sequence
  Cyclic GFR-binding peptide
NAISILYFDAANNVVLKKYRDMVV

SEQ ID NO: 65150 - protein, 31 aa, Artificial Sequence
  Cyclic GFR-binding peptide
  MOD_RES (30), (30): Xaa is C or S
TKLSPISILYIDKGVVTYYKQYEGMAVSEXG

SEQ ID NO: 65151 - protein, 34 aa, Artificial Sequence; identical to SEQ ID NO: 19261
  Cyclic GFR-binding peptide
  MOD_RES (32), (34): Xaa is C or S

SEQ ID NO: 65152 - protein, 24 aa, Artificial Sequence
  Cyclic GFR-binding peptide
PTELEPISMLYLDEYDKVVKFKYE

SEQ ID NO: 65153 - protein, 37 aa, Artificial Sequence; identical to SEQ ID NO: 19264
  Cyclic GFR-binding peptide
  MOD_RES (2), (3), (34), (36): Xaa is C or S

SEQ ID NO: 65154 - protein, 36 aa, Artificial Sequence; identical to SEQ ID NO: 19265
  Cyclic GFR-binding peptide
  MOD_RES (4), (5): Xaa is C or S

SEQ ID NO: 65155 - protein, 32 aa, Artificial Sequence; identical to SEQ ID NO: 19269
  Cyclic GFR-binding peptide
  MOD_RES (1), (32): Xaa is C or S

SEQ ID NO: 65156 - protein, 37 aa, Artificial Sequence; identical to SEQ ID NO: 19271
  Cyclic GFR-binding peptide
  MOD_RES (3), (4), (36): Xaa is C or S

SEQ ID NO: 65157 - protein, 33 aa, Artificial Sequence; identical to SEQ ID NO: 19272
  Cyclic GFR-binding peptide
  MOD_RES (1), (32): Xaa is C or S

SEQ ID NO: 65158 - protein, 31 aa, Artificial Sequence
  Cyclic GFR-binding peptide
  MOD_RES (28), (30): Xaa is C or S
LEPISMLYLDEYDKVVKFKYEEMVVEGXGXR

SEQ ID NO: 65159 - protein, 30 aa, Artificial Sequence
  Cyclic GFR-binding peptide
  MOD_RES (3), (4): Xaa is C or S
KAXXVPTELEPISMLYLDENEKVVKFKYED

SEQ ID NO: 65160 - protein, 22 aa, Artificial Sequence
  Cyclic GFR-binding peptide
ELEPISMLYLDENEKVVKFKYE

SEQ ID NO: 65161 - protein, 25 aa, Artificial Sequence
  Cyclic GFR-binding peptide
SQDLEPISILYLIGKTPKIKFKYEM

SEQ ID NO: 65162 - protein, 27 aa, Artificial Sequence
  Cyclic GFR-binding peptide
LSPISVLYIDDMGVPTYKQYEEGMSVA

SEQ ID NO: 65163 - protein, 28 aa, Artificial Sequence
  Cyclic GFR-binding peptide
  MOD_RES (1), (1): Xaa is C or S
XVPARLSPISILYKDAANNVVLKYHYDM

SEQ ID NO: 65164 - protein, 30 aa, Artificial Sequence; identical to SEQ ID NO: 899
  Cyclic GFR-binding peptide

SEQ ID NO: 65165 - protein, 32 aa, Artificial Sequence
  Cyclic GFR-binding peptide
  MOD_RES (2), (3): Xaa is C or S
PXXVPQDLSPISILYIVGRTPKVYKQYEMVVK

SEQ ID NO: 65166 - protein, 27 aa, Artificial Sequence
  Cyclic GFR-binding peptide
PTQLEPISVLYLDDSSNVIKFKYENMV

SEQ ID NO: 65167 - protein, 33 aa, Artificial Sequence
  Cyclic GFR-binding peptide
  MOD_RES (4), (5): Xaa is C or S
AAPXXVPQALSPISILYIVGRKPKVYKQYEMIV

SEQ ID NO: 65168 - protein, 31 aa, Artificial Sequence
  Cyclic GFR-binding peptide
  MOD_RES (29), (31): Xaa is C or S
QALEPISILYLVGRKPKVKFKYEMIVRSXKX

SEQ ID NO: 65169 - protein, 35 aa, Artificial Sequence; identical to SEQ ID NO: 19277
  Cyclic GFR-binding peptide
  MOD_RES (4), (5): Xaa is C or S

SEQ ID NO: 65170 - protein, 32 aa, Artificial Sequence
  Cyclic GFR-binding peptide
  MOD_RES (3), (4): Xaa is C or S
APXXVPQALEPISILYLVGRKPKVKFKYEMIV

SEQ ID NO: 65171 - protein, 24 aa, Artificial Sequence
  Cyclic GFR-binding peptide
TELEPISMLYLDEYDKVVKFKYEE

SEQ ID NO: 65172 - protein, 29 aa, Artificial Sequence
  Cyclic GFR-binding peptide
PTKLSPISILYKDKGVVTYLKYHYGMAVS

SEQ ID NO: 65173 - protein, 25 aa, Artificial Sequence
  Cyclic GFR-binding peptide
SPISMLYIDEYDKVVYKQYEEMVVE

SEQ ID NO: 65174 - protein, 28 aa, Artificial Sequence
  Cyclic GFR-binding peptide
  MOD_RES (28), (28): Xaa is C or S
ALSPISILYIVGRKPKVYKQYEMIVRSX

SEQ ID NO: 65175 - protein, 30 aa, Artificial Sequence
  Cyclic GFR-binding peptide
  MOD_RES (2), (3): Xaa is C or S
SXXVPARLNAISILYFDAANNVVLKKYRDM

SEQ ID NO: 65176 - protein, 29 aa, Artificial Sequence
  Cyclic GFR-binding peptide
  MOD_RES (2), (2): Xaa is C or S
TXAPTKLSPISVLYIDDSSNVIYKQYENM

SEQ ID NO: 65177 - protein, 30 aa, Artificial Sequence
  Cyclic GFR-binding peptide
  MOD_RES (1), (2): Xaa is C or S
XXVPTKLEPISVLYLDDMGVPTKFKYEEGM

SEQ ID NO: 65178 - protein, 35 aa, Artificial Sequence; identical to SEQ ID NO: 19282
  Cyclic GFR-binding peptide
  MOD_RES (1), (33), (35): Xaa is C or S

SEQ ID NO: 65179 - protein, 30 aa, Artificial Sequence
  Cyclic GFR-binding peptide
  MOD_RES (4), (5): Xaa is C or S
SKAXXVPTKLSPISILYKDKGVVTYLKYHY

SEQ ID NO: 65180 - protein, 34 aa, Artificial Sequence; identical to SEQ ID NO: 19283
  Cyclic GFR-binding peptide
  MOD_RES (1), (2), (34): Xaa is C or S

SEQ ID NO: 65181 - protein, 31 aa, Artificial Sequence
  Cyclic GFR-binding peptide
  MOD_RES (2), (3): Xaa is C or S
PXXVPQDLEPISILYLVGRTPKVKFKYEMVV

SEQ ID NO: 65182 - protein, 30 aa, Artificial Sequence
  Cyclic GFR-binding peptide
  MOD_RES (28), (30): Xaa is C or S
DLEPISILYLVGRTPKVKFKYEMVVKSXKX

SEQ ID NO: 65183 - protein, 34 aa, Artificial Sequence
  Cyclic GFR-binding peptide
  MOD_RES (4), (5): Xaa is C or S
AAPXXVPQALSPISILYIVGRKPKVYKQYEMIVR

SEQ ID NO: 65184 - protein, 34 aa, Artificial Sequence
  Cyclic GFR-binding peptide
  MOD_RES (31), (33): Xaa is C or S
PARLEPISILYLDAANNVVKFKYEDMVVEAXGXR

SEQ ID NO: 65185 - protein, 34 aa, Artificial Sequence
  Cyclic GFR-binding peptide
  MOD_RES (31), (33): Xaa is C or S
PTQLSPISVLYIDDSSNVIYKQYENMVVRAXGXH

SEQ ID NO: 65186 - protein, 29 aa, Artificial Sequence
  Cyclic GFR-binding peptide
  MOD_RES (2), (2): Xaa is C or S
TXAPTKLEPISVLYLDDSSNVIKFKYENM

SEQ ID NO: 65187 - protein, 38 aa, Artificial Sequence; identical to SEQ ID NO: 19298
  Cyclic GFR-binding peptide
  MOD_RES (6), (7): Xaa is C or S

SEQ ID NO: 65188 - protein, 26 aa, Artificial Sequence
  Cyclic GFR-binding peptide
SPISILYKDAANNVVLKYHYDMVVEA

SEQ ID NO: 65189 - protein, 27 aa, Artificial Sequence
  Cyclic GFR-binding peptide
  MOD_RES (1), (1): Xaa is C or S
XVPTKLSPISILYKDKGVVTYLKYHYG

SEQ ID NO: 65190 - protein, 41 aa, Artificial Sequence; identical to SEQ ID NO: 19300
  Cyclic GFR-binding peptide
  MOD_RES (6), (7), (39), (41): Xaa is C or S

SEQ ID NO: 65191 - protein, 31 aa, Artificial Sequence
  Cyclic GFR-binding peptide
  MOD_RES (31), (31): Xaa is C or S
PTELEPISMLYLDEYDKVVKFKYEEMVVEGX

SEQ ID NO: 65192 - protein, 34 aa, Artificial Sequence
  Cyclic GFR-binding peptide
  MOD_RES (2), (3): Xaa is C or S
AXXVPTKLEPISVLYLDDMGVPTKFKYEEGMSVA

SEQ ID NO: 65193 - protein, 39 aa, Artificial Sequence; identical to SEQ ID NO: 19302
  Cyclic GFR-binding peptide
  MOD_RES (6), (7), (39): Xaa is C or S

SEQ ID NO: 65194 - protein, 42 aa, Artificial Sequence; identical to SEQ ID NO: 19303
  Cyclic GFR-binding peptide
  MOD_RES (6), (7), (39), (41): Xaa is C or S

SEQ ID NO: 65195 - protein, 34 aa, Artificial Sequence
  Cyclic GFR-binding peptide
  MOD_RES (31), (33): Xaa is C or S
PTELSPISMLYIDENEKVVYKQYEDMVVEGXGXR

SEQ ID NO: 65196 - protein, 35 aa, Artificial Sequence; identical to SEQ ID NO: 19308
  Cyclic GFR-binding peptide
  MOD_RES (4), (5): Xaa is C or S

SEQ ID NO: 65197 - protein, 31 aa, Artificial Sequence
  Cyclic GFR-binding peptide
  MOD_RES (5), (6): Xaa is C or S
VPKAXXAPTKLSPISVLYIDSSNNVIYKQYE

SEQ ID NO: 65198 - protein, 30 aa, Artificial Sequence
  Cyclic GFR-binding peptide
PTELEPISMLYLDENEKVVKFKYEDMVVEG

SEQ ID NO: 65199 - protein, 33 aa, Artificial Sequence; identical to SEQ ID NO: 19312
  Cyclic GFR-binding peptide
  MOD_RES (32), (32): Xaa is C or S

SEQ ID NO: 65200 - protein, 33 aa, Artificial Sequence; identical to SEQ ID NO: 19313
  Cyclic GFR-binding peptide
  MOD_RES (2), (3): Xaa is C or S

SEQ ID NO: 65201 - protein, 34 aa, Artificial Sequence; identical to SEQ ID NO: 19314
  Cyclic GFR-binding peptide
  MOD_RES (3), (4): Xaa is C or S

SEQ ID NO: 65202 - protein, 28 aa, Artificial Sequence
  Cyclic GFR-binding peptide
PTELSPISMLYIDEYDKVVYKQYEEMVV

SEQ ID NO: 65203 - protein, 26 aa, Artificial Sequence
  Cyclic GFR-binding peptide
LSPISMLYIDEYDKVVYKQYEEMVVE

SEQ ID NO: 65204 - protein, 34 aa, Artificial Sequence
  Cyclic GFR-binding peptide
  MOD_RES (6), (7): Xaa is C or S
YVPKPXXAPTKLSPISVLYIDDSSNVIYKQYENM

SEQ ID NO: 65205 - protein, 33 aa, Artificial Sequence
  Cyclic GFR-binding peptide
  MOD_RES (4), (5): Xaa is C or S
PKAXXAPTKLSPISVLYIDSSNNVIYKQYENMV

SEQ ID NO: 65206 - protein, 25 aa, Artificial Sequence
  Cyclic GFR-binding peptide
LNAISILYFDAANNVVLKKYRDMVV

SEQ ID NO: 65207 - protein, 41 aa, Artificial Sequence; identical to SEQ ID NO: 19318
  Cyclic GFR-binding peptide
  MOD_RES (6), (7), (38), (40): Xaa is C or S

SEQ ID NO: 65208 - protein, 27 aa, Artificial Sequence
  Cyclic GFR-binding peptide
  MOD_RES (1), (2): Xaa is C or S
XXAPTKLEPISVLYLDDSSNVIKFKYE

SEQ ID NO: 65209 - protein, 33 aa, Artificial Sequence
  Cyclic GFR-binding peptide
  MOD_RES (5), (6): Xaa is C or S
VPKAXXAPTKLEPISVLYLDSSNNVIKFKYENM

SEQ ID NO: 65210 - protein, 29 aa, Artificial Sequence
  Cyclic GFR-binding peptide
  MOD_RES (28), (28): Xaa is C or S
LSPISVLYIDSSNNVIYKQYENMVVKAXG

SEQ ID NO: 65211 - protein, 31 aa, Artificial Sequence
  Cyclic GFR-binding peptide
  MOD_RES (29), (31): Xaa is C or S
ELSPISMLYIDEYDKVVYKQYEEMVVEGXGX

SEQ ID NO: 65212 - protein, 38 aa, Artificial Sequence; identical to SEQ ID NO: 19322
  Cyclic GFR-binding peptide
  MOD_RES (2), (3), (35), (37): Xaa is C or S

SEQ ID NO: 65213 - protein, 32 aa, Artificial Sequence; identical to SEQ ID NO: 19323
  Cyclic GFR-binding peptide
  MOD_RES (1), (2): Xaa is C or S

SEQ ID NO: 65214 - protein, 21 aa, Artificial Sequence
  Cyclic GFR-binding peptide
SPISVLYIDSSNNVIYKQYEN

SEQ ID NO: 65215 - protein, 30 aa, Artificial Sequence; identical to SEQ ID NO: 961
  Cyclic GFR-binding peptide

SEQ ID NO: 65216 - protein, 37 aa, Artificial Sequence; identical to SEQ ID NO: 19328
  Cyclic GFR-binding peptide
  MOD_RES (4), (5), (37): Xaa is C or S

SEQ ID NO: 65217 - protein, 26 aa, Artificial Sequence
  Cyclic GFR-binding peptide
APTKLEPISVLYLDSSNNVIKFKYEN

SEQ ID NO: 65218 - protein, 36 aa, Artificial Sequence
  Cyclic GFR-binding peptide
  MOD_RES (6), (7): Xaa is C or S
KASKAXXVPTKLSPISILYIDKGVVTYYKQYEGMAV

SEQ ID NO: 65219 - protein, 36 aa, Artificial Sequence; identical to SEQ ID NO: 19335
  Cyclic GFR-binding peptide
  MOD_RES (3), (4), (36): Xaa is C or S

SEQ ID NO: 65220 - protein, 26 aa, Artificial Sequence
  Cyclic GFR-binding peptide
DLSPISILYIIGKTPKIYKQYEMIVK

SEQ ID NO: 65221 - protein, 30 aa, Artificial Sequence
  Cyclic GFR-binding peptide
  MOD_RES (27), (29): Xaa is C or S
LEPISILYLVGRKPKVKFKYEMIVRSXKXS

SEQ ID NO: 65222 - protein, 30 aa, Artificial Sequence
  Cyclic GFR-binding peptide
  MOD_RES (2), (3): Xaa is C or S
PXXAPTQLSPISVLYIDDSSNVIYKQYENM

SEQ ID NO: 65223 - protein, 32 aa, Artificial Sequence
  Cyclic GFR-binding peptide
  MOD_RES (5), (5): Xaa is C or S
TKPTXAPTKLEPISVLYLDDSSNVIKFKYENM

SEQ ID NO: 65224 - protein, 32 aa, Artificial Sequence
  Cyclic GFR-binding peptide
  MOD_RES (30), (32): Xaa is C or S
TKLEPISVLYLDSSNNVIKFKYENMVVKAXGX

SEQ ID NO: 65225 - protein, 31 aa, Artificial Sequence; identical to SEQ ID NO: 19338
  Cyclic GFR-binding peptide
  MOD_RES (1), (1): Xaa is C or S

SEQ ID NO: 65226 - protein, 25 aa, Artificial Sequence
  Cyclic GFR-binding peptide
PTQLSPISVLYIDDSSNVIYKQYEN

SEQ ID NO: 65227 - protein, 22 aa, Artificial Sequence
  Cyclic GFR-binding peptide
LEPISILYLVGRTPKVKFKYEM

SEQ ID NO: 65228 - protein, 33 aa, Artificial Sequence
  Cyclic GFR-binding peptide
  MOD_RES (6), (7): Xaa is C or S
KIPKAXXVPTELSPISMLYIDENEKVVYKQYED

SEQ ID NO: 65229 - protein, 29 aa, Artificial Sequence
  Cyclic GFR-binding peptide
  MOD_RES (3), (4): Xaa is C or S
KPXXAPTKLSPISVLYIDDSSNVIYKQYE

SEQ ID NO: 65230 - protein, 36 aa, Artificial Sequence; identical to SEQ ID NO: 19343
  Cyclic GFR-binding peptide
  MOD_RES (2), (3), (35): Xaa is C or S

SEQ ID NO: 65231 - protein, 32 aa, Artificial Sequence
  Cyclic GFR-binding peptide
  MOD_RES (32), (32): Xaa is C or S
PTKLSPISVLYIDDMGVPTYKQYEEGMSVAEX

SEQ ID NO: 65232 - protein, 27 aa, Artificial Sequence
  Cyclic GFR-binding peptide
LEPISVLYLDSSNNVIKFKYENMVVKA

SEQ ID NO: 65233 - protein, 35 aa, Artificial Sequence
  Cyclic GFR-binding peptide
  MOD_RES (4), (5): Xaa is C or S
GKAXXVPTKLEPISVLYLDDMGVPTKFKYEEGMSV

SEQ ID NO: 65234 - protein, 24 aa, Artificial Sequence
  Cyclic GFR-binding peptide
ALSPISILYIVGRKPKVYKQYEMI

SEQ ID NO: 65235 - protein, 33 aa, Artificial Sequence
  Cyclic GFR-binding peptide
  MOD_RES (31), (33): Xaa is C or S
PTELEPISMLYLDENEKVVKFKYEDMVVEGXGX

SEQ ID NO: 65236 - protein, 29 aa, Artificial Sequence
  Cyclic GFR-binding peptide
  MOD_RES (2), (3): Xaa is C or S
AXXAPTKLEPISVLYLDSSNNVIKFKYEN

SEQ ID NO: 65237 - protein, 22 aa, Artificial Sequence
  Cyclic GFR-binding peptide
KLEPISVLYLDSSNNVIKFKYE

SEQ ID NO: 65238 - protein, 24 aa, Artificial Sequence
  Cyclic GFR-binding peptide
ALEPISILYLVGRKPKVKFKYEMI

SEQ ID NO: 65239 - protein, 40 aa, Artificial Sequence; identical to SEQ ID NO: 19359
  Cyclic GFR-binding peptide
  MOD_RES (6), (7), (38), (40): Xaa is C or S

SEQ ID NO: 65240 - protein, 31 aa, Artificial Sequence
  Cyclic GFR-binding peptide
  MOD_RES (4), (5): Xaa is C or S
PKPXXAPTQLSPISVLYIDDSSNVIYKQYEN

SEQ ID NO: 65241 - protein, 34 aa, Artificial Sequence
  Cyclic GFR-binding peptide
  MOD_RES (31), (33): Xaa is C or S
PTKLSPISILYKDKGVVTYLKYHYGMAVSEXGXR

SEQ ID NO: 65242 - protein, 30 aa, Artificial Sequence; identical to SEQ ID NO: 19362
  Cyclic GFR-binding peptide

SEQ ID NO: 65243 - protein, 30 aa, Artificial Sequence
  Cyclic GFR-binding peptide
  MOD_RES (1), (2): Xaa is C or S
XXVSQDLEPISILYLIGKTPKIKFKYEMIV

SEQ ID NO: 65244 - protein, 30 aa, Artificial Sequence
  Cyclic GFR-binding peptide
  MOD_RES (2), (3): Xaa is C or S
PXXAPTQLEPISVLYLDDSSNVIKFKYENM

SEQ ID NO: 65245 - protein, 27 aa, Artificial Sequence
  Cyclic GFR-binding peptide
ARLEPISILYLDAANNVVKFKYEDMVV

SEQ ID NO: 65246 - protein, 36 aa, Artificial Sequence; identical to SEQ ID NO: 19364
  Cyclic GFR-binding peptide
  MOD_RES (1), (2), (34), (36): Xaa is C or S

SEQ ID NO: 65247 - protein, 38 aa, Artificial Sequence; identical to SEQ ID NO: 19366
  Cyclic GFR-binding peptide
  MOD_RES (3), (4), (36), (38): Xaa is C or S

SEQ ID NO: 65248 - protein, 25 aa, Artificial Sequence
  Cyclic GFR-binding peptide
PTKLEPISVLYLDDMGVPTKFKYEE

SEQ ID NO: 65249 - protein, 29 aa, Artificial Sequence
  Cyclic GFR-binding peptide
  MOD_RES (1), (1): Xaa is C or S
XVPARLEPISILYLDAANNVVKFKYEDMV

SEQ ID NO: 65250 - protein, 25 aa, Artificial Sequence
  Cyclic GFR-binding peptide
PQALSPISILYIVGRKPKVYKQYEM

SEQ ID NO: 65251 - protein, 28 aa, Artificial Sequence
  Cyclic GFR-binding peptide
  MOD_RES (26), (28): Xaa is C or S
SPISILYIVGRTPKVYKQYEMVVKSXKX

SEQ ID NO: 65252 - protein, 23 aa, Artificial Sequence
  Cyclic GFR-binding peptide
LSPISILYKDAANNVVLKYHYDM

SEQ ID NO: 65253 - protein, 29 aa, Artificial Sequence
  Cyclic GFR-binding peptide
  MOD_RES (29), (29): Xaa is C or S
QDLEPISILYLIGKTPKIKFKYEMIVKSX

SEQ ID NO: 65254 - protein, 34 aa, Artificial Sequence; identical to SEQ ID NO: 19374
  Cyclic GFR-binding peptide
  MOD_RES (2), (3): Xaa is C or S

SEQ ID NO: 65255 - protein, 35 aa, Artificial Sequence; identical to SEQ ID NO: 19376
  Cyclic GFR-binding peptide
  MOD_RES (2), (3), (34): Xaa is C or S

SEQ ID NO: 65256 - protein, 25 aa, Artificial Sequence
  Cyclic GFR-binding peptide
RLEPISILYLDAANNVVKFKYEDMV

SEQ ID NO: 65257 - protein, 41 aa, Artificial Sequence; identical to SEQ ID NO: 19379
  Cyclic GFR-binding peptide
  MOD_RES (5), (6), (38), (40): Xaa is C or S

SEQ ID NO: 65258 - protein, 31 aa, Artificial Sequence; identical to SEQ ID NO: 19381
  Cyclic GFR-binding peptide
  MOD_RES (1), (1): Xaa is C or S

SEQ ID NO: 65259 - protein, 23 aa, Artificial Sequence
  Cyclic GFR-binding peptide
EPISVLYLDSSNNVIKFKYENMV

SEQ ID NO: 65260 - protein, 32 aa, Artificial Sequence
  Cyclic GFR-binding peptide
  MOD_RES (1), (2): Xaa is C or S
XXVPTKLEPISVLYLDDMGVPTKFKYEEGMSV

SEQ ID NO: 65261 - protein, 24 aa, Artificial Sequence
  Cyclic GFR-binding peptide
KLEPISVLYLDDSSNVIKFKYENM

SEQ ID NO: 65262 - protein, 33 aa, Artificial Sequence
  Cyclic GFR-binding peptide
  MOD_RES (5), (6): Xaa is C or S
SAAPXXVPQALEPISILYLVGRKPKVKFKYEMI

SEQ ID NO: 65263 - protein, 34 aa, Artificial Sequence; identical to SEQ ID NO: 19389
  Cyclic GFR-binding peptide
  MOD_RES (3), (4): Xaa is C or S

SEQ ID NO: 65264 - protein, 38 aa, Artificial Sequence; identical to SEQ ID NO: 19390
  Cyclic GFR-binding peptide
  MOD_RES (3), (4), (35), (37): Xaa is C or S

SEQ ID NO: 65265 - protein, 35 aa, Artificial Sequence; identical to SEQ ID NO: 19392
  Cyclic GFR-binding peptide
  MOD_RES (1), (34): Xaa is C or S

SEQ ID NO: 65266 - protein, 43 aa, Artificial Sequence; identical to SEQ ID NO: 19394
  Cyclic GFR-binding peptide
  MOD_RES (6), (7), (40), (42): Xaa is C or S

SEQ ID NO: 65267 - protein, 32 aa, Artificial Sequence
  Cyclic GFR-binding peptide
  MOD_RES (2), (3): Xaa is C or S
AXXVPTKLEPISVLYLDDMGVPTKFKYEEGMS

SEQ ID NO: 65268 - protein, 40 aa, Artificial Sequence; identical to SEQ ID NO: 19396
  Cyclic GFR-binding peptide
  MOD_RES (6), (7), (39): Xaa is C or S

SEQ ID NO: 65269 - protein, 26 aa, Artificial Sequence
  Cyclic GFR-binding peptide
  MOD_RES (1), (1): Xaa is C or S
XVPTKLEPISVLYLDDMGVPTKFKYE

SEQ ID NO: 65270 - protein, 26 aa, Artificial Sequence
  Cyclic GFR-binding peptide
  MOD_RES (1), (1): Xaa is C or S
XVPQDLEPISILYLVGRTPKVKFKYE

SEQ ID NO: 65271 - protein, 32 aa, Artificial Sequence
  Cyclic GFR-binding peptide
  MOD_RES (29), (31): Xaa is C or S
ELEPISMLYLDEYDKVVKFKYEEMVVEGXGXR

SEQ ID NO: 65272 - protein, 29 aa, Artificial Sequence
  Cyclic GFR-binding peptide
  MOD_RES (1), (1): Xaa is C or S
XVPQALSPISILYIVGRKPKVYKQYEMIV

SEQ ID NO: 65273 - protein, 34 aa, Artificial Sequence
  Cyclic GFR-binding peptide
  MOD_RES (6), (7): Xaa is C or S
YVPKPXXAPTKLEPISVLYLDDSSNVIKFKYENM

SEQ ID NO: 65274 - protein, 40 aa, Artificial Sequence; identical to SEQ ID NO: 19406
  Cyclic GFR-binding peptide
  MOD_RES (5), (6), (38), (40): Xaa is C or S

SEQ ID NO: 65275 - protein, 32 aa, Artificial Sequence
  Cyclic GFR-binding peptide
  MOD_RES (5), (6): Xaa is C or S
ASKAXXVPTKLSPISILYKDKGVVTYLKYHYG

SEQ ID NO: 65276 - protein, 30 aa, Artificial Sequence
  Cyclic GFR-binding peptide
  MOD_RES (2), (3): Xaa is C or S
PXXVSQDLSPISILYIIGKTPKIYKQYEMI

SEQ ID NO: 65277 - protein, 34 aa, Artificial Sequence
  Cyclic GFR-binding peptide
  MOD_RES (5), (6): Xaa is C or S
VGKAXXVPTKLEPISVLYLDDMGVPTKFKYEEGM

SEQ ID NO: 65278 - protein, 31 aa, Artificial Sequence
  Cyclic GFR-binding peptide
  MOD_RES (4), (5): Xaa is C or S
PKAXXVPTELSPISMLYIDEYDKVVYKQYEE

SEQ ID NO: 65279 - protein, 33 aa, Artificial Sequence
  Cyclic GFR-binding peptide
  MOD_RES (5), (6): Xaa is C or S
VPKAXXAPTKLSPISVLYIDSSNNVIYKQYENM

SEQ ID NO: 65280 - protein, 28 aa, Artificial Sequence
  Cyclic GFR-binding peptide
RLNAISILYFDAANNVVLKKYRDMVVEA

SEQ ID NO: 65281 - protein, 28 aa, Artificial Sequence
  Cyclic GFR-binding peptide
  MOD_RES (2), (3): Xaa is C or S
PXXVPQDLSPISILYIVGRTPKVYKQYE

SEQ ID NO: 65282 - protein, 29 aa, Artificial Sequence
  Cyclic GFR-binding peptide
  MOD_RES (3), (4): Xaa is C or S
SPXXVSQDLEPISILYLIGKTPKIKFKYE

SEQ ID NO: 65283 - protein, 35 aa, Artificial Sequence; identical to SEQ ID NO: 19417
  Cyclic GFR-binding peptide
  MOD_RES (4), (5): Xaa is C or S

SEQ ID NO: 65284 - protein, 26 aa, Artificial Sequence
  Cyclic GFR-binding peptide
EPISMLYLDENEKVVKFKYEDMVVEG

SEQ ID NO: 65285 - protein, 31 aa, Artificial Sequence; identical to SEQ ID NO: 19419
  Cyclic GFR-binding peptide
  MOD_RES (1), (1): Xaa is C or S

SEQ ID NO: 65286 - protein, 34 aa, Artificial Sequence; identical to SEQ ID NO: 19421
  Cyclic GFR-binding peptide
  MOD_RES (4), (4): Xaa is C or S

SEQ ID NO: 65287 - protein, 33 aa, Artificial Sequence; identical to SEQ ID NO: 19423
  Cyclic GFR-binding peptide
  MOD_RES (1), (2): Xaa is C or S

SEQ ID NO: 65288 - protein, 37 aa, Artificial Sequence; identical to SEQ ID NO: 19424
  Cyclic GFR-binding peptide
  MOD_RES (5), (6): Xaa is C or S

SEQ ID NO: 65289 - protein, 29 aa, Artificial Sequence
  Cyclic GFR-binding peptide
  MOD_RES (28), (28): Xaa is C or S
LSPISMLYIDEYDKVVYKQYEEMVVEGXG

SEQ ID NO: 65290 - protein, 30 aa, Artificial Sequence
  Cyclic GFR-binding peptide
  MOD_RES (27), (29): Xaa is C or S
NAISILYFDAANNVVLKKYRDMVVEAXGXR

SEQ ID NO: 65291 - protein, 37 aa, Artificial Sequence; identical to SEQ ID NO: 19425
  Cyclic GFR-binding peptide
  MOD_RES (1), (2), (34), (36): Xaa is C or S

SEQ ID NO: 65292 - protein, 38 aa, Artificial Sequence; identical to SEQ ID NO: 19427
  Cyclic GFR-binding peptide
  MOD_RES (6), (7): Xaa is C or S

SEQ ID NO: 65293 - protein, 41 aa, Artificial Sequence; identical to SEQ ID NO: 19430
  Cyclic GFR-binding peptide
  MOD_RES (6), (38), (40): Xaa is C or S

SEQ ID NO: 65294 - protein, 29 aa, Artificial Sequence
  Cyclic GFR-binding peptide
  MOD_RES (27), (29): Xaa is C or S
NAISILYFDAANNVVLKKYRDMVVEAXGX

SEQ ID NO: 65295 - protein, 31 aa, Artificial Sequence
  Cyclic GFR-binding peptide
  MOD_RES (5), (6): Xaa is C or S
VPKPXXAPTQLSPISVLYIDDSSNVIYKQYE

SEQ ID NO: 65296 - protein, 30 aa, Artificial Sequence
  Cyclic GFR-binding peptide
  MOD_RES (1), (2): Xaa is C or S
XXAPTKLSPISVLYIDDSSNVIYKQYENMV

SEQ ID NO: 65297 - protein, 20 aa, Artificial Sequence
  Cyclic GFR-binding peptide
SPISVLYIDSSNNVIYKQYE

SEQ ID NO: 65298 - protein, 34 aa, Artificial Sequence; identical to SEQ ID NO: 19434
  Cyclic GFR-binding peptide
  MOD_RES (32), (34): Xaa is C or S

SEQ ID NO: 65299 - protein, 31 aa, Artificial Sequence
  Cyclic GFR-binding peptide
  MOD_RES (28), (30): Xaa is C or S
EPISVLYLDDMGVPTKFKYEEGMSVAEXGXR

SEQ ID NO: 65300 - protein, 24 aa, Artificial Sequence
  Cyclic GFR-binding peptide
SPISVLYIDDMGVPTYKQYEEGMS

SEQ ID NO: 65301 - protein, 38 aa, Artificial Sequence; identical to SEQ ID NO: 19436
  Cyclic GFR-binding peptide
  MOD_RES (4), (5), (37): Xaa is C or S

SEQ ID NO: 65302 - protein, 32 aa, Artificial Sequence; identical to SEQ ID NO: 19437
  Cyclic GFR-binding peptide
  MOD_RES (1), (2): Xaa is C or S

SEQ ID NO: 65303 - protein, 23 aa, Artificial Sequence
  Cyclic GFR-binding peptide
LSPISILYIVGRTPKVYKQYEMV

SEQ ID NO: 65304 - protein, 24 aa, Artificial Sequence
  Cyclic GFR-binding peptide
SPISVLYIDSSNNVIYKQYENMVV

SEQ ID NO: 65305 - protein, 22 aa, Artificial Sequence
  Cyclic GFR-binding peptide
ALSPISILYIVGRKPKVYKQYE

SEQ ID NO: 65306 - protein, 34 aa, Artificial Sequence; identical to SEQ ID NO: 19441
  Cyclic GFR-binding peptide
  MOD_RES (1), (32), (34): Xaa is C or S

SEQ ID NO: 65307 - protein, 30 aa, Artificial Sequence
  Cyclic GFR-binding peptide
  MOD_RES (4), (5): Xaa is C or S
SKAXXVPTKLNAISILYFDKGVVTYLKKYR

SEQ ID NO: 65308 - protein, 40 aa, Artificial Sequence; identical to SEQ ID NO: 19442
  Cyclic GFR-binding peptide
  MOD_RES (5), (6), (37), (39): Xaa is C or S

SEQ ID NO: 65309 - protein, 21 aa, Artificial Sequence
  Cyclic GFR-binding peptide
LEPISVLYLDDSSNVIKFKYE

SEQ ID NO: 65310 - protein, 39 aa, Artificial Sequence; identical to SEQ ID NO: 19444
  Cyclic GFR-binding peptide
  MOD_RES (3), (4), (36), (38): Xaa is C or S

SEQ ID NO: 65311 - protein, 29 aa, Artificial Sequence
  Cyclic GFR-binding peptide
PARLEPISILYLDAANNVVKFKYEDMVVE

SEQ ID NO: 65312 - protein, 32 aa, Artificial Sequence
  Cyclic GFR-binding peptide
  MOD_RES (3), (4): Xaa is C or S
KAXXVPTKLSPISILYIDKGVVTYYKQYEGMA

SEQ ID NO: 65313 - protein, 28 aa, Artificial Sequence
  Cyclic GFR-binding peptide
ARLEPISILYLDAANNVVKFKYEDMVVE

SEQ ID NO: 65314 - protein, 27 aa, Artificial Sequence
  Cyclic GFR-binding peptide
  MOD_RES (1), (2): Xaa is C or S
XXVPTELSPISMLYIDENEKVVYKQYE

SEQ ID NO: 65315 - protein, 29 aa, Artificial Sequence
  Cyclic GFR-binding peptide
  MOD_RES (28), (28): Xaa is C or S
LNAISILYFDAANNVVLKKYRDMVVEAXG

SEQ ID NO: 65316 - protein, 36 aa, Artificial Sequence
  Cyclic GFR-binding peptide
  MOD_RES (6), (7): Xaa is C or S
ASASPXXVPQDLSPISILYIVGRTPKVYKQYEMVVK

SEQ ID NO: 65317 - protein, 36 aa, Artificial Sequence
  Cyclic GFR-binding peptide
  MOD_RES (6), (7): Xaa is C or S
KASKAXXVPTKLSPISILYKDKGVVTYLKYHYGMAV

SEQ ID NO: 65318 - protein, 27 aa, Artificial Sequence
  Cyclic GFR-binding peptide
  MOD_RES (27), (27): Xaa is C or S
EPISMLYLDENEKVVKFKYEDMVVEGX

SEQ ID NO: 65319 - protein, 41 aa, Artificial Sequence; identical to SEQ ID NO: 19453
  Cyclic GFR-binding peptide
  MOD_RES (6), (7), (38), (40): Xaa is C or S

SEQ ID NO: 65320 - protein, 34 aa, Artificial Sequence; identical to SEQ ID NO: 19454
  Cyclic GFR-binding peptide
  MOD_RES (2), (3): Xaa is C or S

SEQ ID NO: 65321 - protein, 35 aa, Artificial Sequence
  Cyclic GFR-binding peptide
  MOD_RES (5), (6): Xaa is C or S
APASXXVPARLSPISILYKDAANNVVLKYHYDMVV

SEQ ID NO: 65322 - protein, 37 aa, Artificial Sequence; identical to SEQ ID NO: 19458
  Cyclic GFR-binding peptide
  MOD_RES (5), (6): Xaa is C or S

SEQ ID NO: 65323 - protein, 40 aa, Artificial Sequence; identical to SEQ ID NO: 19459
  Cyclic GFR-binding peptide
  MOD_RES (4), (5), (37), (39): Xaa is C or S

SEQ ID NO: 65324 - protein, 28 aa, Artificial Sequence
  Cyclic GFR-binding peptide
TELEPISMLYLDEYDKVVKFKYEEMVVE

SEQ ID NO: 65325 - protein, 30 aa, Artificial Sequence
  Cyclic GFR-binding peptide
  MOD_RES (3), (4): Xaa is C or S
ASXXVPARLSPISILYKDAANNVVLKYHYD

SEQ ID NO: 65326 - protein, 26 aa, Artificial Sequence
  Cyclic GFR-binding peptide
RLSPISILYKDAANNVVLKYHYDMVV

SEQ ID NO: 65327 - protein, 35 aa, Artificial Sequence; identical to SEQ ID NO: 19467
  Cyclic GFR-binding peptide
  MOD_RES (1), (2), (34): Xaa is C or S

SEQ ID NO: 65328 - protein, 34 aa, Artificial Sequence; identical to SEQ ID NO: 19468
  Cyclic GFR-binding peptide
  MOD_RES (1), (2), (34): Xaa is C or S

SEQ ID NO: 65329 - protein, 33 aa, Artificial Sequence
  Cyclic GFR-binding peptide
  MOD_RES (31), (33): Xaa is C or S
PARLNAISILYFDAANNVVLKKYRDMVVEAXGX

SEQ ID NO: 65330 - protein, 29 aa, Artificial Sequence
  Cyclic GFR-binding peptide
  MOD_RES (29), (29): Xaa is C or S
QDLSPISILYIVGRTPKVYKQYEMVVKSX

SEQ ID NO: 65331 - protein, 27 aa, Artificial Sequence
  Cyclic GFR-binding peptide
  MOD_RES (27), (27): Xaa is C or S
SPISILYKDKGVVTYLKYHYGMAVSEX

SEQ ID NO: 65332 - protein, 31 aa, Artificial Sequence
  Cyclic GFR-binding peptide
  MOD_RES (2), (3): Xaa is C or S
SXXVPARLNAISILYFDAANNVVLKKYRDMV

SEQ ID NO: 65333 - protein, 36 aa, Artificial Sequence; identical to SEQ ID NO: 19474
  Cyclic GFR-binding peptide
  MOD_RES (5), (6): Xaa is C or S

SEQ ID NO: 65334 - protein, 25 aa, Artificial Sequence
  Cyclic GFR-binding peptide
VPTKLSPISILYIDKGVVTYYKQYE

SEQ ID NO: 65335 - protein, 27 aa, Artificial Sequence
  Cyclic GFR-binding peptide
  MOD_RES (1), (1): Xaa is C or S
XAPTKLEPISVLYLDSSNNVIKFKYEN

SEQ ID NO: 65336 - protein, 38 aa, Artificial Sequence; identical to SEQ ID NO: 19482
  Cyclic GFR-binding peptide
  MOD_RES (3), (4), (36), (38): Xaa is C or S

SEQ ID NO: 65337 - protein, 36 aa, Artificial Sequence; identical to SEQ ID NO: 19483
  Cyclic GFR-binding peptide
  MOD_RES (3), (4), (35): Xaa is C or S

SEQ ID NO: 65338 - protein, 32 aa, Artificial Sequence
  Cyclic GFR-binding peptide
  MOD_RES (31), (31): Xaa is C or S
PTKLSPISVLYIDSSNNVIYKQYENMVVKAXG

SEQ ID NO: 65339 - protein, 26 aa, Artificial Sequence
  Cyclic GFR-binding peptide
PTKLNAISILYFDKGVVTYLKKYRGM

SEQ ID NO: 65340 - protein, 38 aa, Artificial Sequence; identical to SEQ ID NO: 19485
  Cyclic GFR-binding peptide
  MOD_RES (2), (3), (35), (37): Xaa is C or S

SEQ ID NO: 65341 - protein, 39 aa, Artificial Sequence; identical to SEQ ID NO: 19490
  Cyclic GFR-binding peptide
  MOD_RES (4), (5), (37), (39): Xaa is C or S

SEQ ID NO: 65342 - protein, 23 aa, Artificial Sequence
  Cyclic GFR-binding peptide
RLNAISILYFDAANNVVLKKYRD

SEQ ID NO: 65343 - protein, 23 aa, Artificial Sequence
  Cyclic GFR-binding peptide
TELSPISMLYIDEYDKVVYKQYE

SEQ ID NO: 65344 - protein, 28 aa, Artificial Sequence
  Cyclic GFR-binding peptide
TKLSPISVLYIDDSSNVIYKQYENMVVR

SEQ ID NO: 65345 - protein, 24 aa, Artificial Sequence
  Cyclic GFR-binding peptide
PTELSPISMLYIDENEKVVYKQYE

SEQ ID NO: 65346 - protein, 24 aa, Artificial Sequence
  Cyclic GFR-binding peptide
QDLEPISILYLIGKTPKIKFKYEM

SEQ ID NO: 65347 - protein, 33 aa, Artificial Sequence; identical to SEQ ID NO: 19499
  Cyclic GFR-binding peptide
  MOD_RES (31), (33): Xaa is C or S

SEQ ID NO: 65348 - protein, 26 aa, Artificial Sequence
  Cyclic GFR-binding peptide
QDLEPISILYLVGRTPKVKFKYEMVV

SEQ ID NO: 65349 - protein, 36 aa, Artificial Sequence; identical to SEQ ID NO: 19500
  Cyclic GFR-binding peptide
  MOD_RES (5), (6): Xaa is C or S

SEQ ID NO: 65350 - protein, 38 aa, Artificial Sequence; identical to SEQ ID NO: 19501
  Cyclic GFR-binding peptide
  MOD_RES (5), (6), (38): Xaa is C or S

SEQ ID NO: 65351 - protein, 27 aa, Artificial Sequence
  Cyclic GFR-binding peptide
KLEPISVLYLDSSNNVIKFKYENMVVK

SEQ ID NO: 65352 - protein, 41 aa, Artificial Sequence; identical to SEQ ID NO: 19504
  Cyclic GFR-binding peptide
  MOD_RES (5), (6), (38), (40): Xaa is C or S

SEQ ID NO: 65353 - protein, 35 aa, Artificial Sequence; identical to SEQ ID NO: 19506
  Cyclic GFR-binding peptide
  MOD_RES (3), (4), (35): Xaa is C or S

SEQ ID NO: 65354 - protein, 33 aa, Artificial Sequence
  Cyclic GFR-binding peptide
  MOD_RES (5), (6): Xaa is C or S
VPKPXXAPTQLSPISVLYIDDSSNVIYKQYENM

SEQ ID NO: 65355 - protein, 32 aa, Artificial Sequence
  Cyclic GFR-binding peptide
  MOD_RES (4), (5): Xaa is C or S
GKAXXVPTKLEPISVLYLDDMGVPTKFKYEEG

SEQ ID NO: 65356 - protein, 32 aa, Artificial Sequence
  Cyclic GFR-binding peptide
  MOD_RES (31), (31): Xaa is C or S
PTKLNAISILYFDKGVVTYLKKYRGMAVSEXG

SEQ ID NO: 65357 - protein, 39 aa, Artificial Sequence; identical to SEQ ID NO: 19513
  Cyclic GFR-binding peptide
  MOD_RES (5), (6), (38): Xaa is C or S

SEQ ID NO: 65358 - protein, 28 aa, Artificial Sequence
  Cyclic GFR-binding peptide
VPTKLSPISILYIDKGVVTYYKQYEGMA

SEQ ID NO: 65359 - protein, 29 aa, Artificial Sequence
  Cyclic GFR-binding peptide
PTKLSPISVLYIDDSSNVIYKQYENMVVR

SEQ ID NO: 65360 - protein, 27 aa, Artificial Sequence
  Cyclic GFR-binding peptide
  MOD_RES (1), (1): Xaa is C or S
XVPARLEPISILYLDAANNVVKFKYED

SEQ ID NO: 65361 - protein, 21 aa, Artificial Sequence
  Cyclic GFR-binding peptide
LSPISMLYIDEYDKVVYKQYE

SEQ ID NO: 65362 - protein, 29 aa, Artificial Sequence
  Cyclic GFR-binding peptide
  MOD_RES (2), (3): Xaa is C or S
AXXVPTELEPISMLYLDENEKVVKFKYED

SEQ ID NO: 65363 - protein, 31 aa, Artificial Sequence
  Cyclic GFR-binding peptide
  MOD_RES (1), (2): Xaa is C or S
XXVSQDLSPISILYIIGKTPKIYKQYEMIVK

SEQ ID NO: 65364 - protein, 29 aa, Artificial Sequence
  Cyclic GFR-binding peptide
TQLSPISVLYIDDSSNVIYKQYENMVVRA

SEQ ID NO: 65365 - protein, 35 aa, Artificial Sequence; identical to SEQ ID NO: 19525
  Cyclic GFR-binding peptide
  MOD_RES (1), (2), (34): Xaa is C or S

SEQ ID NO: 65366 - protein, 25 aa, Artificial Sequence
  Cyclic GFR-binding peptide
VPQDLEPISILYLVGRTPKVKFKYE

SEQ ID NO: 65367 - protein, 26 aa, Artificial Sequence
  Cyclic GFR-binding peptide
ARLNAISILYFDAANNVVLKKYRDMV

SEQ ID NO: 65368 - protein, 29 aa, Artificial Sequence
  Cyclic GFR-binding peptide
  MOD_RES (1), (2): Xaa is C or S
XXVPTELEPISMLYLDENEKVVKFKYEDM

SEQ ID NO: 65369 - protein, 35 aa, Artificial Sequence
  Cyclic GFR-binding peptide
  MOD_RES (6), (7): Xaa is C or S
ASAAPXXVPQALEPISILYLVGRKPKVKFKYEMIV

SEQ ID NO: 65370 - protein, 33 aa, Artificial Sequence
  Cyclic GFR-binding peptide
  MOD_RES (30), (32): Xaa is C or S
TKLSPISVLYIDSSNNVIYKQYENMVVKAXGXH

SEQ ID NO: 65371 - protein, 31 aa, Artificial Sequence
  Cyclic GFR-binding peptide
PTKLSPISVLYIDDMGVPTYKQYEEGMSVAE

SEQ ID NO: 65372 - protein, 32 aa, Artificial Sequence
  Cyclic GFR-binding peptide
  MOD_RES (30), (32): Xaa is C or S
PQDLSPISILYIVGRTPKVYKQYEMVVKSXKX

SEQ ID NO: 65373 - protein, 23 aa, Artificial Sequence
  Cyclic GFR-binding peptide
LEPISILYLVGRTPKVKFKYEMV

SEQ ID NO: 65374 - protein, 33 aa, Artificial Sequence
  Cyclic GFR-binding peptide
  MOD_RES (5), (6): Xaa is C or S
VPKPXXAPTQLEPISVLYLDDSSNVIKFKYENM

SEQ ID NO: 65375 - protein, 33 aa, Artificial Sequence
  Cyclic GFR-binding peptide
  MOD_RES (4), (5): Xaa is C or S
PKAXXVPTELSPISMLYIDENEKVVYKQYEDMV

SEQ ID NO: 65376 - protein, 25 aa, Artificial Sequence
  Cyclic GFR-binding peptide
SPISVLYIDSSNNVIYKQYENMVVK

SEQ ID NO: 65377 - protein, 36 aa, Artificial Sequence; identical to SEQ ID NO: 19540
  Cyclic GFR-binding peptide
  MOD_RES (1), (33), (35): Xaa is C or S

SEQ ID NO: 65378 - protein, 26 aa, Artificial Sequence
  Cyclic GFR-binding peptide
VPQDLSPISILYIVGRTPKVYKQYEM

SEQ ID NO: 65379 - protein, 34 aa, Artificial Sequence; identical to SEQ ID NO: 19541
  Cyclic GFR-binding peptide
  MOD_RES (3), (4): Xaa is C or S

SEQ ID NO: 65380 - protein, 33 aa, Artificial Sequence; identical to SEQ ID NO: 19542
  Cyclic GFR-binding peptide
  MOD_RES (1), (32): Xaa is C or S

SEQ ID NO: 65381 - protein, 37 aa, Artificial Sequence; identical to SEQ ID NO: 19543
  Cyclic GFR-binding peptide
  MOD_RES (4), (5): Xaa is C or S

SEQ ID NO: 65382 - protein, 33 aa, Artificial Sequence; identical to SEQ ID NO: 19544
  Cyclic GFR-binding peptide
  MOD_RES (1), (33): Xaa is C or S

SEQ ID NO: 65383 - protein, 31 aa, Artificial Sequence; identical to SEQ ID NO: 19547
  Cyclic GFR-binding peptide
  MOD_RES (1), (1): Xaa is C or S

SEQ ID NO: 65384 - protein, 33 aa, Artificial Sequence
  Cyclic GFR-binding peptide
  MOD_RES (3), (4): Xaa is C or S
KPXXAPTKLEPISVLYLDDSSNVIKFKYENMVV

SEQ ID NO: 65385 - protein, 33 aa, Artificial Sequence; identical to SEQ ID NO: 19549
  Cyclic GFR-binding peptide
  MOD_RES (1), (33): Xaa is C or S

SEQ ID NO: 65386 - protein, 41 aa, Artificial Sequence; identical to SEQ ID NO: 19554
  Cyclic GFR-binding peptide
  MOD_RES (5), (6), (39), (41): Xaa is C or S

SEQ ID NO: 65387 - protein, 33 aa, Artificial Sequence
  Cyclic GFR-binding peptide
  MOD_RES (3), (4): Xaa is C or S
KPXXAPTQLSPISVLYIDDSSNVIYKQYENMVV

SEQ ID NO: 65388 - protein, 31 aa, Artificial Sequence
  Cyclic GFR-binding peptide
  MOD_RES (6), (6): Xaa is C or S
VTKPTXAPTKLEPISVLYLDDSSNVIKFKYE

SEQ ID NO: 65389 - protein, 33 aa, Artificial Sequence
  Cyclic GFR-binding peptide
  MOD_RES (3), (4): Xaa is C or S
KAXXVPTKLSPISVLYIDDMGVPTYKQYEEGMS

SEQ ID NO: 65390 - protein, 34 aa, Artificial Sequence; identical to SEQ ID NO: 19556
  Cyclic GFR-binding peptide
  MOD_RES (1), (2), (33): Xaa is C or S

SEQ ID NO: 65391 - protein, 36 aa, Artificial Sequence; identical to SEQ ID NO: 19558
  Cyclic GFR-binding peptide
  MOD_RES (3), (4), (36): Xaa is C or S

SEQ ID NO: 65392 - protein, 35 aa, Artificial Sequence
  Cyclic GFR-binding peptide
  MOD_RES (5), (6): Xaa is C or S
SAAPXXVPQALEPISILYLVGRKPKVKFKYEMIVR

SEQ ID NO: 65393 - protein, 37 aa, Artificial Sequence; identical to SEQ ID NO: 19562
  Cyclic GFR-binding peptide
  MOD_RES (6), (6): Xaa is C or S

SEQ ID NO: 65394 - protein, 38 aa, Artificial Sequence; identical to SEQ ID NO: 19561
  Cyclic GFR-binding peptide
  MOD_RES (4), (5), (37): Xaa is C or S

SEQ ID NO: 65395 - protein, 34 aa, Artificial Sequence
  Cyclic GFR-binding peptide
  MOD_RES (3), (4): Xaa is C or S
KAXXVPTKLSPISVLYIDDMGVPTYKQYEEGMSV

SEQ ID NO: 65396 - protein, 33 aa, Artificial Sequence
  Cyclic GFR-binding peptide
  MOD_RES (4), (5): Xaa is C or S
ASPXXVSQDLEPISILYLIGKTPKIKFKYEMIV

SEQ ID NO: 65397 - protein, 34 aa, Artificial Sequence
  Cyclic GFR-binding peptide
  MOD_RES (7), (7): Xaa is C or S
HVTKPTXAPTKLEPISVLYLDDSSNVIKFKYENM

SEQ ID NO: 65398 - protein, 28 aa, Artificial Sequence
  Cyclic GFR-binding peptide
  MOD_RES (2), (3): Xaa is C or S
PXXVSQDLSPISILYIIGKTPKIYKQYE

SEQ ID NO: 65399 - protein, 24 aa, Artificial Sequence
  Cyclic GFR-binding peptide
KLEPISVLYLDDMGVPTKFKYEEG

SEQ ID NO: 65400 - protein, 33 aa, Artificial Sequence
  Cyclic GFR-binding peptide
  MOD_RES (3), (4): Xaa is C or S
KAXXVPTKLNAISILYFDKGVVTYLKKYRGMAV

SEQ ID NO: 65401 - protein, 37 aa, Artificial Sequence; identical to SEQ ID NO: 19574
  Cyclic GFR-binding peptide
  MOD_RES (5), (37): Xaa is C or S

SEQ ID NO: 65402 - protein, 26 aa, Artificial Sequence
  Cyclic GFR-binding peptide
KLEPISVLYLDDSSNVIKFKYENMVV

SEQ ID NO: 65403 - protein, 27 aa, Artificial Sequence
  Cyclic GFR-binding peptide
LNAISILYFDKGVVTYLKKYRGMAVSE

SEQ ID NO: 65404 - protein, 37 aa, Artificial Sequence; identical to SEQ ID NO: 19580
  Cyclic GFR-binding peptide
  MOD_RES (6), (7): Xaa is C or S

SEQ ID NO: 65405 - protein, 34 aa, Artificial Sequence; identical to SEQ ID NO: 19586
  Cyclic GFR-binding peptide
  MOD_RES (32), (34): Xaa is C or S

SEQ ID NO: 65406 - protein, 25 aa, Artificial Sequence
  Cyclic GFR-binding peptide
ARLNAISILYFDAANNVVLKKYRDM

SEQ ID NO: 65407 - protein, 33 aa, Artificial Sequence; identical to SEQ ID NO: 19587
  Cyclic GFR-binding peptide
  MOD_RES (1), (2): Xaa is C or S

SEQ ID NO: 65408 - protein, 21 aa, Artificial Sequence
  Cyclic GFR-binding peptide
SPISVLYIDDMGVPTYKQYEE

SEQ ID NO: 65409 - protein, 26 aa, Artificial Sequence
  Cyclic GFR-binding peptide
VPARLEPISILYLDAANNVVKFKYED

SEQ ID NO: 65410 - protein, 28 aa, Artificial Sequence
  Cyclic GFR-binding peptide
VPQDLEPISILYLVGRTPKVKFKYEMVV

SEQ ID NO: 65411 - protein, 28 aa, Artificial Sequence
  Cyclic GFR-binding peptide
  MOD_RES (1), (2): Xaa is C or S
XXVSQDLEPISILYLIGKTPKIKFKYEM

SEQ ID NO: 65412 - protein, 31 aa, Artificial Sequence
  Cyclic GFR-binding peptide
  MOD_RES (2), (3): Xaa is C or S
PXXAPTQLSPISVLYIDDSSNVIYKQYENMV

SEQ ID NO: 65413 - protein, 36 aa, Artificial Sequence; identical to SEQ ID NO: 19590
  Cyclic GFR-binding peptide
  MOD_RES (1), (2), (33), (35): Xaa is C or S

SEQ ID NO: 65414 - protein, 29 aa, Artificial Sequence
  Cyclic GFR-binding peptide
  MOD_RES (29), (29): Xaa is C or S
LSPISVLYIDDMGVPTYKQYEEGMSVAEX

SEQ ID NO: 65415 - protein, 28 aa, Artificial Sequence
  Cyclic GFR-binding peptide
  MOD_RES (26), (28): Xaa is C or S
SPISILYIVGRKPKVYKQYEMIVRSXKX

SEQ ID NO: 65416 - protein, 29 aa, Artificial Sequence
  Cyclic GFR-binding peptide
TELSPISMLYIDENEKVVYKQYEDMVVEG

SEQ ID NO: 65417 - protein, 35 aa, Artificial Sequence; identical to SEQ ID NO: 19591
  Cyclic GFR-binding peptide
  MOD_RES (1), (32), (34): Xaa is C or S

SEQ ID NO: 65418 - protein, 30 aa, Artificial Sequence
  Cyclic GFR-binding peptide
  MOD_RES (29), (29): Xaa is C or S
ELEPISMLYLDENEKVVKFKYEDMVVEGXG

SEQ ID NO: 65419 - protein, 29 aa, Artificial Sequence
  Cyclic GFR-binding peptide
  MOD_RES (1), (2): Xaa is C or S
XXVPARLEPISILYLDAANNVVKFKYEDM

SEQ ID NO: 65420 - protein, 39 aa, Artificial Sequence; identical to SEQ ID NO: 19598
  Cyclic GFR-binding peptide
  MOD_RES (6), (7), (38): Xaa is C or S

SEQ ID NO: 65421 - protein, 31 aa, Artificial Sequence
  Cyclic GFR-binding peptide
  MOD_RES (4), (5): Xaa is C or S
AAPXXVPQALEPISILYLVGRKPKVKFKYEM

SEQ ID NO: 65422 - protein, 30 aa, Artificial Sequence; identical to SEQ ID NO: 22038
  Cyclic GFR-binding peptide

SEQ ID NO: 65423 - protein, 28 aa, Artificial Sequence
  Cyclic GFR-binding peptide
  MOD_RES (1), (2): Xaa is C or S
XXVPTELEPISMLYLDEYDKVVKFKYEE

SEQ ID NO: 65424 - protein, 27 aa, Artificial Sequence
  Cyclic GFR-binding peptide
  MOD_RES (1), (2): Xaa is C or S
XXAPTKLSPISVLYIDSSNNVIYKQYE

SEQ ID NO: 65425 - protein, 33 aa, Artificial Sequence; identical to SEQ ID NO: 19610
  Cyclic GFR-binding peptide
  MOD_RES (32), (32): Xaa is C or S

SEQ ID NO: 65426 - protein, 36 aa, Artificial Sequence; identical to SEQ ID NO: 19611
  Cyclic GFR-binding peptide
  MOD_RES (2), (3), (36): Xaa is C or S

SEQ ID NO: 65427 - protein, 38 aa, Artificial Sequence; identical to SEQ ID NO: 19612
  Cyclic GFR-binding peptide
  MOD_RES (5), (6), (38): Xaa is C or S

SEQ ID NO: 65428 - protein, 26 aa, Artificial Sequence
  Cyclic GFR-binding peptide
LEPISVLYLDDSSNVIKFKYENMVVR

SEQ ID NO: 65429 - protein, 29 aa, Artificial Sequence
  Cyclic GFR-binding peptide
  MOD_RES (28), (28): Xaa is C or S
LSPISVLYIDDSSNVIYKQYENMVVRAXG

SEQ ID NO: 65430 - protein, 29 aa, Artificial Sequence
  Cyclic GFR-binding peptide
TKLNAISILYFDKGVVTYLKKYRGMAVSE

SEQ ID NO: 65431 - protein, 27 aa, Artificial Sequence
  Cyclic GFR-binding peptide
LSPISILYIDKGVVTYYKQYEGMAVSE

SEQ ID NO: 65432 - protein, 30 aa, Artificial Sequence
  Cyclic GFR-binding peptide
  MOD_RES (1), (1): Xaa is C or S
XVSQDLSPISILYIIGKTPKIYKQYEMIVK

SEQ ID NO: 65433 - protein, 31 aa, Artificial Sequence
  Cyclic GFR-binding peptide
  MOD_RES (28), (30): Xaa is C or S
LSPISILYKDKGVVTYLKYHYGMAVSEXGXR

SEQ ID NO: 65434 - protein, 34 aa, Artificial Sequence; identical to SEQ ID NO: 19617
  Cyclic GFR-binding peptide
  MOD_RES (32), (34): Xaa is C or S

SEQ ID NO: 65435 - protein, 30 aa, Artificial Sequence
  Cyclic GFR-binding peptide
  MOD_RES (30), (30): Xaa is C or S
SQDLSPISILYIIGKTPKIYKQYEMIVKSX

SEQ ID NO: 65436 - protein, 30 aa, Artificial Sequence
  Cyclic GFR-binding peptide
PTKLSPISILYKDKGVVTYLKYHYGMAVSE

SEQ ID NO: 65437 - protein, 40 aa, Artificial Sequence; identical to SEQ ID NO: 19623
  Cyclic GFR-binding peptide
  MOD_RES (4), (5), (38), (40): Xaa is C or S

SEQ ID NO: 65438 - protein, 38 aa, Artificial Sequence; identical to SEQ ID NO: 19624
  Cyclic GFR-binding peptide
  MOD_RES (4), (5), (36), (38): Xaa is C or S

SEQ ID NO: 65439 - protein, 32 aa, Artificial Sequence
  Cyclic GFR-binding peptide
  MOD_RES (2), (3): Xaa is C or S
AXXVPTELSPISMLYIDENEKVVYKQYEDMVV

SEQ ID NO: 65440 - protein, 27 aa, Artificial Sequence
  Cyclic GFR-binding peptide
PTELSPISMLYIDENEKVVYKQYEDMV

SEQ ID NO: 65441 - protein, 34 aa, Artificial Sequence; identical to SEQ ID NO: 19627
  Cyclic GFR-binding peptide
  MOD_RES (31), (33): Xaa is C or S

SEQ ID NO: 65442 - protein, 29 aa, Artificial Sequence
  Cyclic GFR-binding peptide
  MOD_RES (27), (29): Xaa is C or S
EPISVLYLDDSSNVIKFKYENMVVRSXGX

SEQ ID NO: 65443 - protein, 29 aa, Artificial Sequence
  Cyclic GFR-binding peptide
  MOD_RES (1), (2): Xaa is C or S
XXVPQDLSPISILYIVGRTPKVYKQYEMV

SEQ ID NO: 65444 - protein, 26 aa, Artificial Sequence
  Cyclic GFR-binding peptide
  MOD_RES (26), (26): Xaa is C or S
SPISILYIIGKTPKIYKQYEMIVKSX

SEQ ID NO: 65445 - protein, 29 aa, Artificial Sequence
  Cyclic GFR-binding peptide
  MOD_RES (28), (28): Xaa is C or S
LEPISVLYLDDSSNVIKFKYENMVVRAXG

SEQ ID NO: 65446 - protein, 38 aa, Artificial Sequence; identical to SEQ ID NO: 19636
  Cyclic GFR-binding peptide
  MOD_RES (5), (6), (38): Xaa is C or S

SEQ ID NO: 65447 - protein, 29 aa, Artificial Sequence
  Cyclic GFR-binding peptide
  MOD_RES (2), (3): Xaa is C or S
AXXVPTKLSPISVLYIDDMGVPTYKQYEE

SEQ ID NO: 65448 - protein, 28 aa, Artificial Sequence
  Cyclic GFR-binding peptide
KLSPISVLYIDSSNNVIYKQYENMVVKA

SEQ ID NO: 65449 - protein, 31 aa, Artificial Sequence; identical to SEQ ID NO: 19642
  Cyclic GFR-binding peptide

SEQ ID NO: 65450 - protein, 35 aa, Artificial Sequence; identical to SEQ ID NO: 19643
  Cyclic GFR-binding peptide
  MOD_RES (32), (34): Xaa is C or S

SEQ ID NO: 65451 - protein, 23 aa, Artificial Sequence
  Cyclic GFR-binding peptide
SPISVLYIDDMGVPTYKQYEEGM

SEQ ID NO: 65452 - protein, 38 aa, Artificial Sequence; identical to SEQ ID NO: 19646
  Cyclic GFR-binding peptide
  MOD_RES (5), (6), (38): Xaa is C or S

SEQ ID NO: 65453 - protein, 31 aa, Artificial Sequence
  Cyclic GFR-binding peptide
  MOD_RES (3), (4): Xaa is C or S
KAXXVPTKLSPISILYKDKGVVTYLKYHYGM

SEQ ID NO: 65454 - protein, 32 aa, Artificial Sequence
  Cyclic GFR-binding peptide
  MOD_RES (4), (5): Xaa is C or S
PKAXXAPTKLSPISVLYIDSSNNVIYKQYENM

SEQ ID NO: 65455 - protein, 26 aa, Artificial Sequence
  Cyclic GFR-binding peptide
LSPISILYIIGKTPKIYKQYEMIVKS

SEQ ID NO: 65456 - protein, 28 aa, Artificial Sequence
  Cyclic GFR-binding peptide
  MOD_RES (1), (1): Xaa is C or S
XVPARLEPISILYLDAANNVVKFKYEDM

SEQ ID NO: 65457 - protein, 28 aa, Artificial Sequence
  Cyclic GFR-binding peptide
APTKLEPISVLYLDSSNNVIKFKYENMV

SEQ ID NO: 65458 - protein, 34 aa, Artificial Sequence
  Cyclic GFR-binding peptide
  MOD_RES (6), (7): Xaa is C or S
SIPKAXXVPTELEPISMLYLDEYDKVVKFKYEEM

SEQ ID NO: 65459 - protein, 37 aa, Artificial Sequence; identical to SEQ ID NO: 19648
  Cyclic GFR-binding peptide
  MOD_RES (3), (4), (36): Xaa is C or S

SEQ ID NO: 65460 - protein, 36 aa, Artificial Sequence; identical to SEQ ID NO: 19649
  Cyclic GFR-binding peptide
  MOD_RES (2), (34), (36): Xaa is C or S

SEQ ID NO: 65461 - protein, 27 aa, Artificial Sequence
  Cyclic GFR-binding peptide
VPTKLSPISILYKDKGVVTYLKYHYGM

SEQ ID NO: 65462 - protein, 29 aa, Artificial Sequence
  Cyclic GFR-binding peptide
  MOD_RES (1), (2): Xaa is C or S
XXVSQDLSPISILYIIGKTPKIYKQYEMI

SEQ ID NO: 65463 - protein, 30 aa, Artificial Sequence
  Cyclic GFR-binding peptide
  MOD_RES (2), (3): Xaa is C or S
AXXAPTKLEPISVLYLDSSNNVIKFKYENM

SEQ ID NO: 65464 - protein, 41 aa, Artificial Sequence; identical to SEQ ID NO: 19657
  Cyclic GFR-binding peptide
  MOD_RES (5), (6), (38), (40): Xaa is C or S

SEQ ID NO: 65465 - protein, 26 aa, Artificial Sequence
  Cyclic GFR-binding peptide
LEPISMLYLDENEKVVKFKYEDMVVE

SEQ ID NO: 65466 - protein, 26 aa, Artificial Sequence
  Cyclic GFR-binding peptide
PTELSPISMLYIDENEKVVYKQYEDM

SEQ ID NO: 65467 - protein, 26 aa, Artificial Sequence
  Cyclic GFR-binding peptide
VPTKLSPISILYKDKGVVTYLKYHYG

SEQ ID NO: 65468 - protein, 31 aa, Artificial Sequence; identical to SEQ ID NO: 19658
  Cyclic GFR-binding peptide
  MOD_RES (1), (1): Xaa is C or S

SEQ ID NO: 65469 - protein, 35 aa, Artificial Sequence; identical to SEQ ID NO: 19660
  Cyclic GFR-binding peptide
  MOD_RES (1), (2), (33), (35): Xaa is C or S

SEQ ID NO: 65470 - protein, 36 aa, Artificial Sequence; identical to SEQ ID NO: 19661
  Cyclic GFR-binding peptide
  MOD_RES (3), (4), (35): Xaa is C or S

SEQ ID NO: 65471 - protein, 33 aa, Artificial Sequence
  Cyclic GFR-binding peptide
  MOD_RES (4), (5): Xaa is C or S
PKAXXVPTELEPISMLYLDEYDKVVKFKYEEMV

SEQ ID NO: 65472 - protein, 39 aa, Artificial Sequence; identical to SEQ ID NO: 19663
  Cyclic GFR-binding peptide
  MOD_RES (6), (7), (39): Xaa is C or S

SEQ ID NO: 65473 - protein, 29 aa, Artificial Sequence
  Cyclic GFR-binding peptide
  MOD_RES (27), (29): Xaa is C or S
SPISVLYIDDSSNVIYKQYENMVVRAXGX

SEQ ID NO: 65474 - protein, 32 aa, Artificial Sequence
  Cyclic GFR-binding peptide
  MOD_RES (2), (3): Xaa is C or S
PXXAPTQLEPISVLYLDDSSNVIKFKYENMVV

SEQ ID NO: 65475 - protein, 33 aa, Artificial Sequence; identical to SEQ ID NO: 19670
  Cyclic GFR-binding peptide
  MOD_RES (1), (1): Xaa is C or S

SEQ ID NO: 65476 - protein, 28 aa, Artificial Sequence
  Cyclic GFR-binding peptide
PTKLSPISILYIDKGVVTYYKQYEGMAV

SEQ ID NO: 65477 - protein, 25 aa, Artificial Sequence
  Cyclic GFR-binding peptide
SPISILYKDKGVVTYLKYHYGMAVS

SEQ ID NO: 65478 - protein, 38 aa, Artificial Sequence; identical to SEQ ID NO: 19675
  Cyclic GFR-binding peptide
  MOD_RES (6), (7): Xaa is C or S

SEQ ID NO: 65479 - protein, 29 aa, Artificial Sequence
  Cyclic GFR-binding peptide
  MOD_RES (29), (29): Xaa is C or S
KLEPISVLYLDSSNNVIKFKYENMVVKAX

SEQ ID NO: 65480 - protein, 26 aa, Artificial Sequence
  Cyclic GFR-binding peptide
QLEPISVLYLDDSSNVIKFKYENMVV

SEQ ID NO: 65481 - protein, 29 aa, Artificial Sequence
  Cyclic GFR-binding peptide
EPISVLYLDSSNNVIKFKYEAAAAAAAAA

SEQ ID NO: 65482 - protein, 27 aa, Artificial Sequence
  Cyclic GFR-binding peptide
  MOD_RES (27), (27): Xaa is C or S
EPISVLYLDDSSNVIKFKYENMVVRSX

SEQ ID NO: 65483 - protein, 23 aa, Artificial Sequence
  Cyclic GFR-binding peptide
TKLSPISVLYIDSSNNVIYKQYE

SEQ ID NO: 65484 - protein, 29 aa, Artificial Sequence
  Cyclic GFR-binding peptide
  MOD_RES (27), (29): Xaa is C or S
LSPISILYIVGRTPKVYKQYEMVVKSXKX

SEQ ID NO: 65485 - protein, 32 aa, Artificial Sequence
  Cyclic GFR-binding peptide
  MOD_RES (5), (6): Xaa is C or S
VPKPXXAPTQLEPISVLYLDDSSNVIKFKYEN

SEQ ID NO: 65486 - protein, 27 aa, Artificial Sequence
  Cyclic GFR-binding peptide
  MOD_RES (1), (1): Xaa is C or S
XVPQDLSPISILYIVGRTPKVYKQYEM

SEQ ID NO: 65487 - protein, 38 aa, Artificial Sequence; identical to SEQ ID NO: 19701
  Cyclic GFR-binding peptide
  MOD_RES (5), (6), (38): Xaa is C or S

SEQ ID NO: 65488 - protein, 32 aa, Artificial Sequence; identical to SEQ ID NO: 19703
  Cyclic GFR-binding peptide
  MOD_RES (1), (1): Xaa is C or S

SEQ ID NO: 65489 - protein, 29 aa, Artificial Sequence
  Cyclic GFR-binding peptide
PQALSPISILYIVGRKPKVYKQYEMIVRS

SEQ ID NO: 65490 - protein, 21 aa, Artificial Sequence
  Cyclic GFR-binding peptide
SPISILYIIGKTPKIYKQYEM

SEQ ID NO: 65491 - protein, 25 aa, Artificial Sequence
  Cyclic GFR-binding peptide
QLEPISVLYLDDSSNVIKFKYENMV

SEQ ID NO: 65492 - protein, 25 aa, Artificial Sequence
  Cyclic GFR-binding peptide
KLSPISVLYIDDSSNVIYKQYENMV

SEQ ID NO: 65493 - protein, 28 aa, Artificial Sequence
  Cyclic GFR-binding peptide
PQDLSPISILYIVGRTPKVYKQYEMVVK

SEQ ID NO: 65494 - protein, 36 aa, Artificial Sequence; identical to SEQ ID NO: 19711
  Cyclic GFR-binding peptide
  MOD_RES (3), (4), (36): Xaa is C or S

SEQ ID NO: 65495 - protein, 36 aa, Artificial Sequence
  Cyclic GFR-binding peptide
  MOD_RES (6), (7): Xaa is C or S
TVPKPXXAPTQLEPISVLYLDDSSNVIKFKYENMVV

SEQ ID NO: 65496 - protein, 32 aa, Artificial Sequence; identical to SEQ ID NO: 19712
  Cyclic GFR-binding peptide
  MOD_RES (31), (31): Xaa is C or S

SEQ ID NO: 65497 - protein, 31 aa, Artificial Sequence
  Cyclic GFR-binding peptide
  MOD_RES (4), (4): Xaa is C or S
KPTXAPTKLEPISVLYLDDSSNVIKFKYENM

SEQ ID NO: 65498 - protein, 33 aa, Artificial Sequence; identical to SEQ ID NO: 19715
  Cyclic GFR-binding peptide
  MOD_RES (1), (2), (33): Xaa is C or S

SEQ ID NO: 65499 - protein, 33 aa, Artificial Sequence
  Cyclic GFR-binding peptide
  MOD_RES (30), (32): Xaa is C or S
TELEPISMLYLDENEKVVKFKYEDMVVEGXGXR

SEQ ID NO: 65500 - protein, 29 aa, Artificial Sequence
  Cyclic GFR-binding peptide
VSQDLSPISILYIIGKTPKIYKQYEMIVK

SEQ ID NO: 65501 - protein, 27 aa, Artificial Sequence
  Cyclic GFR-binding peptide
APTKLEPISVLYLDDSSNVIKFKYENM

SEQ ID NO: 65502 - protein, 29 aa, Artificial Sequence
  Cyclic GFR-binding peptide
  MOD_RES (2), (3): Xaa is C or S
PXXVPQDLSPISILYIVGRTPKVYKQYEM

SEQ ID NO: 65503 - protein, 30 aa, Artificial Sequence
  Cyclic GFR-binding peptide
  MOD_RES (30), (30): Xaa is C or S
TELEPISMLYLDEYDKVVKFKYEEMVVEGX

SEQ ID NO: 65504 - protein, 33 aa, Artificial Sequence; identical to SEQ ID NO: 19727
  Cyclic GFR-binding peptide
  MOD_RES (2), (3): Xaa is C or S

SEQ ID NO: 65505 - protein, 32 aa, Artificial Sequence
  Cyclic GFR-binding peptide
  MOD_RES (5), (6): Xaa is C or S
SASPXXVSQDLEPISILYLIGKTPKIKFKYEM

SEQ ID NO: 65506 - protein, 28 aa, Artificial Sequence
  Cyclic GFR-binding peptide
  MOD_RES (27), (27): Xaa is C or S
NAISILYFDKGVVTYLKKYRGMAVSEXG

SEQ ID NO: 65507 - protein, 37 aa, Artificial Sequence; identical to SEQ ID NO: 19732
  Cyclic GFR-binding peptide
  MOD_RES (3), (4), (36): Xaa is C or S

SEQ ID NO: 65508 - protein, 30 aa, Artificial Sequence
  Cyclic GFR-binding peptide
  MOD_RES (1), (1): Xaa is C or S
XVPTELEPISMLYLDENEKVVKFKYEDMVV

SEQ ID NO: 65509 - protein, 30 aa, Artificial Sequence
  Cyclic GFR-binding peptide
  MOD_RES (1), (2): Xaa is C or S
XXVPARLSPISILYKDAANNVVLKYHYDMV

SEQ ID NO: 65510 - protein, 32 aa, Artificial Sequence
  Cyclic GFR-binding peptide
  MOD_RES (30), (32): Xaa is C or S
TKLEPISVLYLDDSSNVIKFKYENMVVRSXGX

SEQ ID NO: 65511 - protein, 32 aa, Artificial Sequence
  Cyclic GFR-binding peptide
  MOD_RES (3), (4): Xaa is C or S
KAXXVPTELSPISMLYIDEYDKVVYKQYEEMV

SEQ ID NO: 65512 - protein, 25 aa, Artificial Sequence
  Cyclic GFR-binding peptide
ELEPISMLYLDEYDKVVKFKYEEMV

SEQ ID NO: 65513 - protein, 32 aa, Artificial Sequence; identical to SEQ ID NO: 19746
  Cyclic GFR-binding peptide
  MOD_RES (1), (1): Xaa is C or S

SEQ ID NO: 65514 - protein, 27 aa, Artificial Sequence
  Cyclic GFR-binding peptide
TELSPISMLYIDENEKVVYKQYEDMVV

SEQ ID NO: 65515 - protein, 31 aa, Artificial Sequence
  Cyclic GFR-binding peptide
  MOD_RES (1), (2): Xaa is C or S
XXVPTKLSPISILYIDKGVVTYYKQYEGMAV

SEQ ID NO: 65516 - protein, 31 aa, Artificial Sequence
  Cyclic GFR-binding peptide
  MOD_RES (4), (5): Xaa is C or S
ASPXXVPQDLEPISILYLVGRTPKVKFKYEM

SEQ ID NO: 65517 - protein, 23 aa, Artificial Sequence
  Cyclic GFR-binding peptide
LEPISVLYLDDSSNVIKFKYENM

SEQ ID NO: 65518 - protein, 27 aa, Artificial Sequence
  Cyclic GFR-binding peptide
ALEPISILYLVGRKPKVKFKYEMIVRS

SEQ ID NO: 65519 - protein, 35 aa, Artificial Sequence
  Cyclic GFR-binding peptide
  MOD_RES (5), (6): Xaa is C or S
VGKAXXVPTKLEPISVLYLDDMGVPTKFKYEEGMS

SEQ ID NO: 65520 - protein, 33 aa, Artificial Sequence
  Cyclic GFR-binding peptide
  MOD_RES (4), (5): Xaa is C or S
GKAXXVPTKLEPISVLYLDDMGVPTKFKYEEGM

SEQ ID NO: 65521 - protein, 35 aa, Artificial Sequence
  Cyclic GFR-binding peptide
  MOD_RES (5), (6): Xaa is C or S
SASPXXVPQDLEPISILYLVGRTPKVKFKYEMVVK

SEQ ID NO: 65522 - protein, 36 aa, Artificial Sequence; identical to SEQ ID NO: 19752
  Cyclic GFR-binding peptide
  MOD_RES (3), (35): Xaa is C or S

SEQ ID NO: 65523 - protein, 39 aa, Artificial Sequence; identical to SEQ ID NO: 19754
  Cyclic GFR-binding peptide
  MOD_RES (7), (39): Xaa is C or S

SEQ ID NO: 65524 - protein, 34 aa, Artificial Sequence; identical to SEQ ID NO: 19759
  Cyclic GFR-binding peptide
  MOD_RES (1), (33): Xaa is C or S

SEQ ID NO: 65525 - protein, 28 aa, Artificial Sequence
  Cyclic GFR-binding peptide
PTKLNAISILYFDKGVVTYLKKYRGMAV

SEQ ID NO: 65526 - protein, 22 aa, Artificial Sequence
  Cyclic GFR-binding peptide
SPISVLYIDDSSNVIYKQYENM

SEQ ID NO: 65527 - protein, 32 aa, Artificial Sequence
  Cyclic GFR-binding peptide
  MOD_RES (6), (6): Xaa is C or S
VTKPTXAPTKLEPISVLYLDDSSNVIKFKYEN

SEQ ID NO: 65528 - protein, 32 aa, Artificial Sequence; identical to SEQ ID NO: 19762
  Cyclic GFR-binding peptide
  MOD_RES (1), (1): Xaa is C or S

SEQ ID NO: 65529 - protein, 34 aa, Artificial Sequence; identical to SEQ ID NO: 19766
  Cyclic GFR-binding peptide
  MOD_RES (1), (33): Xaa is C or S

SEQ ID NO: 65530 - protein, 30 aa, Artificial Sequence
  Cyclic GFR-binding peptide
  MOD_RES (3), (4): Xaa is C or S
KPXXAPTQLEPISVLYLDDSSNVIKFKYEN

SEQ ID NO: 65531 - protein, 30 aa, Artificial Sequence; identical to SEQ ID NO: 19768
  Cyclic GFR-binding peptide

SEQ ID NO: 65532 - protein, 29 aa, Artificial Sequence
  Cyclic GFR-binding peptide
  MOD_RES (28), (28): Xaa is C or S
LEPISILYLDAANNVVKFKYEDMVVEAXG

SEQ ID NO: 65533 - protein, 36 aa, Artificial Sequence; identical to SEQ ID NO: 19769
  Cyclic GFR-binding peptide
  MOD_RES (1), (33), (35): Xaa is C or S

SEQ ID NO: 65534 - protein, 29 aa, Artificial Sequence
  Cyclic GFR-binding peptide
  MOD_RES (3), (4): Xaa is C or S
KAXXVPTKLSPISVLYIDDMGVPTYKQYE

SEQ ID NO: 65535 - protein, 29 aa, Artificial Sequence
  Cyclic GFR-binding peptide
  MOD_RES (2), (3): Xaa is C or S
SXXVPARLEPISILYLDAANNVVKFKYED

SEQ ID NO: 65536 - protein, 39 aa, Artificial Sequence; identical to SEQ ID NO: 19772
  Cyclic GFR-binding peptide
  MOD_RES (4), (5), (37), (39): Xaa is C or S

SEQ ID NO: 65537 - protein, 28 aa, Artificial Sequence
  Cyclic GFR-binding peptide
  MOD_RES (1), (1): Xaa is C or S
XAPTQLEPISVLYLDDSSNVIKFKYENM

SEQ ID NO: 65538 - protein, 34 aa, Artificial Sequence; identical to SEQ ID NO: 19779
  Cyclic GFR-binding peptide
  MOD_RES (3), (4): Xaa is C or S

SEQ ID NO: 65539 - protein, 23 aa, Artificial Sequence
  Cyclic GFR-binding peptide
ARLSPISILYKDAANNVVLKYHY

SEQ ID NO: 65540 - protein, 25 aa, Artificial Sequence
  Cyclic GFR-binding peptide
VSQDLEPISILYLIGKTPKIKFKYE

SEQ ID NO: 65541 - protein, 28 aa, Artificial Sequence
  Cyclic GFR-binding peptide
RLEPISILYLDAANNVVKFKYEDMVVEA

SEQ ID NO: 65542 - protein, 34 aa, Artificial Sequence
  Cyclic GFR-binding peptide
  MOD_RES (5), (6): Xaa is C or S
VPKPXXAPTKLSPISVLYIDDSSNVIYKQYENMV

SEQ ID NO: 65543 - protein, 34 aa, Artificial Sequence; identical to SEQ ID NO: 19791
  Cyclic GFR-binding peptide
  MOD_RES (1), (33): Xaa is C or S

SEQ ID NO: 65544 - protein, 31 aa, Artificial Sequence
  Cyclic GFR-binding peptide
  MOD_RES (4), (5): Xaa is C or S
AAPXXVPQALSPISILYIVGRKPKVYKQYEM

SEQ ID NO: 65545 - protein, 35 aa, Artificial Sequence; identical to SEQ ID NO: 19793
  Cyclic GFR-binding peptide
  MOD_RES (3), (35): Xaa is C or S

SEQ ID NO: 65546 - protein, 25 aa, Artificial Sequence
  Cyclic GFR-binding peptide
TKLNAISILYFDKGVVTYLKKYRGM

SEQ ID NO: 65547 - protein, 42 aa, Artificial Sequence; identical to SEQ ID NO: 19797
  Cyclic GFR-binding peptide
  MOD_RES (6), (7), (39), (41): Xaa is C or S

SEQ ID NO: 65548 - protein, 33 aa, Artificial Sequence; identical to SEQ ID NO: 19799
  Cyclic GFR-binding peptide
  MOD_RES (2), (3): Xaa is C or S

SEQ ID NO: 65549 - protein, 23 aa, Artificial Sequence
  Cyclic GFR-binding peptide
KLEPISVLYLDDSSNVIKFKYEN

SEQ ID NO: 65550 - protein, 29 aa, Artificial Sequence
  Cyclic GFR-binding peptide
VPTELEPISMLYLDENEKVVKFKYEDMVV

SEQ ID NO: 65551 - protein, 35 aa, Artificial Sequence; identical to SEQ ID NO: 19801
  Cyclic GFR-binding peptide
  MOD_RES (4), (5): Xaa is C or S

SEQ ID NO: 65552 - protein, 22 aa, Artificial Sequence
  Cyclic GFR-binding peptide
SPISVLYIDDMGVPTYKQYEEG

SEQ ID NO: 65553 - protein, 34 aa, Artificial Sequence
  Cyclic GFR-binding peptide
  MOD_RES (32), (34): Xaa is C or S
PTKLSPISVLYIDDMGVPTYKQYEEGMSVAEXGX

SEQ ID NO: 65554 - protein, 38 aa, Artificial Sequence; identical to SEQ ID NO: 19808
  Cyclic GFR-binding peptide
  MOD_RES (4), (5), (38): Xaa is C or S

SEQ ID NO: 65555 - protein, 29 aa, Artificial Sequence
  Cyclic GFR-binding peptide
SPISVLYIDDSSNVIYKQYEAAAAAAAAA

SEQ ID NO: 65556 - protein, 33 aa, Artificial Sequence; identical to SEQ ID NO: 19809
  Cyclic GFR-binding peptide
  MOD_RES (1), (2): Xaa is C or S

SEQ ID NO: 65557 - protein, 20 aa, Artificial Sequence
  Cyclic GFR-binding peptide
SPISILYIVGRKPKVYKQYE

SEQ ID NO: 65558 - protein, 33 aa, Artificial Sequence
  Cyclic GFR-binding peptide
  MOD_RES (30), (32): Xaa is C or S
SQDLSPISILYIIGKTPKIYKQYEMIVKSXKXS

SEQ ID NO: 65559 - protein, 26 aa, Artificial Sequence
  Cyclic GFR-binding peptide
PTELEPISMLYLDEYDKVVKFKYEEM

SEQ ID NO: 65560 - protein, 38 aa, Artificial Sequence; identical to SEQ ID NO: 19813
  Cyclic GFR-binding peptide
  MOD_RES (5), (6), (38): Xaa is C or S

SEQ ID NO: 65561 - protein, 30 aa, Artificial Sequence
  Cyclic GFR-binding peptide
  MOD_RES (28), (30): Xaa is C or S
LSPISILYIDKGVVTYYKQYEGMAVSEXGX

SEQ ID NO: 65562 - protein, 25 aa, Artificial Sequence
  Cyclic GFR-binding peptide
RLSPISILYKDAANNVVLKYHYDMV

SEQ ID NO: 65563 - protein, 25 aa, Artificial Sequence
  Cyclic GFR-binding peptide
TKLSPISILYIDKGVVTYYKQYEGM

SEQ ID NO: 65564 - protein, 34 aa, Artificial Sequence
  Cyclic GFR-binding peptide
  MOD_RES (4), (5): Xaa is C or S
PKAXXVPTELEPISMLYLDENEKVVKFKYEDMVV

SEQ ID NO: 65565 - protein, 25 aa, Artificial Sequence
  Cyclic GFR-binding peptide
LEPISILYLDAANNVVKFKYEDMVV

SEQ ID NO: 65566 - protein, 39 aa, Artificial Sequence; identical to SEQ ID NO: 19819
  Cyclic GFR-binding peptide
  MOD_RES (4), (5), (37), (39): Xaa is C or S

SEQ ID NO: 65567 - protein, 29 aa, Artificial Sequence
  Cyclic GFR-binding peptide
  MOD_RES (1), (1): Xaa is C or S
XAPTQLSPISVLYIDDSSNVIYKQYENMV

SEQ ID NO: 65568 - protein, 36 aa, Artificial Sequence; identical to SEQ ID NO: 19820
  Cyclic GFR-binding peptide
  MOD_RES (2), (3), (35): Xaa is C or S

SEQ ID NO: 65569 - protein, 32 aa, Artificial Sequence
  Cyclic GFR-binding peptide
  MOD_RES (30), (32): Xaa is C or S
PQDLEPISILYLVGRTPKVKFKYEMVVKSXKX

SEQ ID NO: 65570 - protein, 31 aa, Artificial Sequence; identical to SEQ ID NO: 19823
  Cyclic GFR-binding peptide
  MOD_RES (1), (1): Xaa is C or S

SEQ ID NO: 65571 - protein, 24 aa, Artificial Sequence
  Cyclic GFR-binding peptide
LNAISILYFDKGVVTYLKKYRGMA

SEQ ID NO: 65572 - protein, 28 aa, Artificial Sequence
  Cyclic GFR-binding peptide
KLEPISVLYLDSSNNVIKFKYENMVVKA

SEQ ID NO: 65573 - protein, 25 aa, Artificial Sequence
  Cyclic GFR-binding peptide
ALEPISILYLVGRKPKVKFKYEMIV

SEQ ID NO: 65574 - protein, 26 aa, Artificial Sequence
  Cyclic GFR-binding peptide
DLEPISILYLVGRTPKVKFKYEMVVK

SEQ ID NO: 65575 - protein, 30 aa, Artificial Sequence
  Cyclic GFR-binding peptide
  MOD_RES (3), (4): Xaa is C or S
KAXXVPTKLNAISILYFDKGVVTYLKKYRG

SEQ ID NO: 65576 - protein, 32 aa, Artificial Sequence
  Cyclic GFR-binding peptide
  MOD_RES (3), (4): Xaa is C or S
KAXXVPTELEPISMLYLDENEKVVKFKYEDMV

SEQ ID NO: 65577 - protein, 23 aa, Artificial Sequence
  Cyclic GFR-binding peptide
DLSPISILYIIGKTPKIYKQYEM

SEQ ID NO: 65578 - protein, 39 aa, Artificial Sequence; identical to SEQ ID NO: 19828
  Cyclic GFR-binding peptide
  MOD_RES (3), (4), (36), (38): Xaa is C or S

SEQ ID NO: 65579 - protein, 29 aa, Artificial Sequence
  Cyclic GFR-binding peptide
  MOD_RES (1), (2): Xaa is C or S
XXAPTKLEPISVLYLDDSSNVIKFKYENM

SEQ ID NO: 65580 - protein, 22 aa, Artificial Sequence
  Cyclic GFR-binding peptide
RLEPISILYLDAANNVVKFKYE

SEQ ID NO: 65581 - protein, 25 aa, Artificial Sequence
  Cyclic GFR-binding peptide
VPTKLEPISVLYLDDMGVPTKFKYE

SEQ ID NO: 65582 - protein, 26 aa, Artificial Sequence
  Cyclic GFR-binding peptide
ELEPISMLYLDENEKVVKFKYEDMVV

SEQ ID NO: 65583 - protein, 28 aa, Artificial Sequence
  Cyclic GFR-binding peptide
  MOD_RES (1), (1): Xaa is C or S
XVSQDLSPISILYIIGKTPKIYKQYEMI

SEQ ID NO: 65584 - protein, 36 aa, Artificial Sequence; identical to SEQ ID NO: 19836
  Cyclic GFR-binding peptide
  MOD_RES (3), (4), (36): Xaa is C or S

SEQ ID NO: 65585 - protein, 22 aa, Artificial Sequence
  Cyclic GFR-binding peptide
SPISILYIVGRKPKVYKQYEMI

SEQ ID NO: 65586 - protein, 34 aa, Artificial Sequence
  Cyclic GFR-binding peptide
  MOD_RES (6), (7): Xaa is C or S
AAPASXXVPARLEPISILYLDAANNVVKFKYEDM

SEQ ID NO: 65587 - protein, 31 aa, Artificial Sequence
  Cyclic GFR-binding peptide
  MOD_RES (1), (2): Xaa is C or S
XXVPTELSPISMLYIDEYDKVVYKQYEEMVV

SEQ ID NO: 65588 - protein, 26 aa, Artificial Sequence
  Cyclic GFR-binding peptide
  MOD_RES (1), (1): Xaa is C or S
XAPTKLSPISVLYIDSSNNVIYKQYE

SEQ ID NO: 65589 - protein, 36 aa, Artificial Sequence; identical to SEQ ID NO: 19846
  Cyclic GFR-binding peptide
  MOD_RES (1), (33), (35): Xaa is C or S

SEQ ID NO: 65590 - protein, 21 aa, Artificial Sequence
  Cyclic GFR-binding peptide
SPISILYKDAANNVVLKYHYD

SEQ ID NO: 65591 - protein, 38 aa, Artificial Sequence; identical to SEQ ID NO: 19852
  Cyclic GFR-binding peptide
  MOD_RES (3), (4), (35), (37): Xaa is C or S

SEQ ID NO: 65592 - protein, 36 aa, Artificial Sequence; identical to SEQ ID NO: 19855
  Cyclic GFR-binding peptide
  MOD_RES (1), (2), (34), (36): Xaa is C or S

SEQ ID NO: 65593 - protein, 39 aa, Artificial Sequence; identical to SEQ ID NO: 19856
  Cyclic GFR-binding peptide
  MOD_RES (5), (6), (38): Xaa is C or S

SEQ ID NO: 65594 - protein, 37 aa, Artificial Sequence; identical to SEQ ID NO: 19857
  Cyclic GFR-binding peptide
  MOD_RES (3), (4), (36): Xaa is C or S

SEQ ID NO: 65595 - protein, 33 aa, Artificial Sequence
  Cyclic GFR-binding peptide
  MOD_RES (31), (33): Xaa is C or S
PARLEPISILYLDAANNVVKFKYEDMVVEAXGX

SEQ ID NO: 65596 - protein, 28 aa, Artificial Sequence
  Cyclic GFR-binding peptide
  MOD_RES (1), (1): Xaa is C or S
XVPQDLSPISILYIVGRTPKVYKQYEMV

SEQ ID NO: 65597 - protein, 32 aa, Artificial Sequence
  Cyclic GFR-binding peptide
  MOD_RES (2), (3): Xaa is C or S
AXXVPTELEPISMLYLDENEKVVKFKYEDMVV

SEQ ID NO: 65598 - protein, 32 aa, Artificial Sequence
  Cyclic GFR-binding peptide
  MOD_RES (30), (32): Xaa is C or S
TQLEPISVLYLDDSSNVIKFKYENMVVRAXGX

SEQ ID NO: 65599 - protein, 24 aa, Artificial Sequence
  Cyclic GFR-binding peptide
ARLNAISILYFDAANNVVLKKYRD

SEQ ID NO: 65600 - protein, 23 aa, Artificial Sequence
  Cyclic GFR-binding peptide
ARLEPISILYLDAANNVVKFKYE

SEQ ID NO: 65601 - protein, 30 aa, Artificial Sequence
  Cyclic GFR-binding peptide
  MOD_RES (27), (29): Xaa is C or S
EPISVLYLDDSSNVIKFKYENMVVRAXGXH

SEQ ID NO: 65602 - protein, 34 aa, Artificial Sequence
  Cyclic GFR-binding peptide
  MOD_RES (4), (5): Xaa is C or S
ASPXXVPQDLSPISILYIVGRTPKVYKQYEMVVK

SEQ ID NO: 65603 - protein, 21 aa, Artificial Sequence
  Cyclic GFR-binding peptide
SPISMLYIDEYDKVVYKQYEE

SEQ ID NO: 65604 - protein, 33 aa, Artificial Sequence; identical to SEQ ID NO: 19877
  Cyclic GFR-binding peptide
  MOD_RES (2), (3): Xaa is C or S

SEQ ID NO: 65605 - protein, 32 aa, Artificial Sequence
  Cyclic GFR-binding peptide
  MOD_RES (2), (3): Xaa is C or S
SXXVPARLEPISILYLDAANNVVKFKYEDMVV

SEQ ID NO: 65606 - protein, 26 aa, Artificial Sequence
  Cyclic GFR-binding peptide
RLNAISILYFDAANNVVLKKYRDMVV

SEQ ID NO: 65607 - protein, 22 aa, Artificial Sequence
  Cyclic GFR-binding peptide
SPISILYKDAANNVVLKYHYDM

SEQ ID NO: 65608 - protein, 39 aa, Artificial Sequence; identical to SEQ ID NO: 19881
  Cyclic GFR-binding peptide
  MOD_RES (6), (7), (39): Xaa is C or S

SEQ ID NO: 65609 - protein, 27 aa, Artificial Sequence
  Cyclic GFR-binding peptide
QLSPISVLYIDDSSNVIYKQYENMVVR

SEQ ID NO: 65610 - protein, 32 aa, Artificial Sequence
  Cyclic GFR-binding peptide
  MOD_RES (5), (6): Xaa is C or S
SASPXXVSQDLSPISILYIIGKTPKIYKQYEM

SEQ ID NO: 65611 - protein, 29 aa, Artificial Sequence
  Cyclic GFR-binding peptide
  MOD_RES (3), (4): Xaa is C or S
KAXXVPTELEPISMLYLDEYDKVVKFKYE

SEQ ID NO: 65612 - protein, 36 aa, Artificial Sequence; identical to SEQ ID NO: 19892
  Cyclic GFR-binding peptide
  MOD_RES (1), (2), (34), (36): Xaa is C or S

SEQ ID NO: 65613 - protein, 27 aa, Artificial Sequence
  Cyclic GFR-binding peptide
PTKLSPISVLYIDDSSNVIYKQYENMV

SEQ ID NO: 65614 - protein, 34 aa, Artificial Sequence
  Cyclic GFR-binding peptide
  MOD_RES (31), (33): Xaa is C or S
TKLEPISVLYLDDMGVPTKFKYEEGMSVAEXGXR

SEQ ID NO: 65615 - protein, 36 aa, Artificial Sequence; identical to SEQ ID NO: 19893
  Cyclic GFR-binding peptide
  MOD_RES (2), (3), (35): Xaa is C or S

SEQ ID NO: 65616 - protein, 25 aa, Artificial Sequence
  Cyclic GFR-binding peptide
TKLSPISVLYIDSSNNVIYKQYENM

SEQ ID NO: 65617 - protein, 29 aa, Artificial Sequence
  Cyclic GFR-binding peptide
  MOD_RES (1), (2): Xaa is C or S
XXAPTQLEPISVLYLDDSSNVIKFKYENM

SEQ ID NO: 65618 - protein, 35 aa, Artificial Sequence; identical to SEQ ID NO: 19901
  Cyclic GFR-binding peptide
  MOD_RES (1), (2), (34): Xaa is C or S

SEQ ID NO: 65619 - protein, 36 aa, Artificial Sequence; identical to SEQ ID NO: 19903
  Cyclic GFR-binding peptide
  MOD_RES (5), (6): Xaa is C or S

SEQ ID NO: 65620 - protein, 33 aa, Artificial Sequence
  Cyclic GFR-binding peptide
  MOD_RES (6), (7): Xaa is C or S
AAPASXXVPARLEPISILYLDAANNVVKFKYED

SEQ ID NO: 65621 - protein, 35 aa, Artificial Sequence; identical to SEQ ID NO: 19905
  Cyclic GFR-binding peptide
  MOD_RES (1), (33), (35): Xaa is C or S

SEQ ID NO: 65622 - protein, 32 aa, Artificial Sequence; identical to SEQ ID NO: 19906
  Cyclic GFR-binding peptide

SEQ ID NO: 65623 - protein, 25 aa, Artificial Sequence
  Cyclic GFR-binding peptide
APTKLEPISVLYLDDSSNVIKFKYE

SEQ ID NO: 65624 - protein, 36 aa, Artificial Sequence
  Cyclic GFR-binding peptide
  MOD_RES (6), (7): Xaa is C or S
KASKAXXVPTKLNAISILYFDKGVVTYLKKYRGMAV

SEQ ID NO: 65625 - protein, 36 aa, Artificial Sequence; identical to SEQ ID NO: 19909
  Cyclic GFR-binding peptide
  MOD_RES (1), (33), (35): Xaa is C or S

SEQ ID NO: 65626 - protein, 29 aa, Artificial Sequence
  Cyclic GFR-binding peptide
  MOD_RES (2), (3): Xaa is C or S
PXXVPQDLEPISILYLVGRTPKVKFKYEM

SEQ ID NO: 65627 - protein, 32 aa, Artificial Sequence; identical to SEQ ID NO: 19913
  Cyclic GFR-binding peptide
  MOD_RES (1), (2): Xaa is C or S

SEQ ID NO: 65628 - protein, 35 aa, Artificial Sequence; identical to SEQ ID NO: 19919
  Cyclic GFR-binding peptide
  MOD_RES (4), (5): Xaa is C or S

SEQ ID NO: 65629 - protein, 29 aa, Artificial Sequence
  Cyclic GFR-binding peptide
  MOD_RES (2), (3): Xaa is C or S
PXXVPQALEPISILYLVGRKPKVKFKYEM

SEQ ID NO: 65630 - protein, 26 aa, Artificial Sequence
  Cyclic GFR-binding peptide
VPQDLEPISILYLVGRTPKVKFKYEM

SEQ ID NO: 65631 - protein, 35 aa, Artificial Sequence; identical to SEQ ID NO: 19922
  Cyclic GFR-binding peptide
  MOD_RES (3), (35): Xaa is C or S

SEQ ID NO: 65632 - protein, 28 aa, Artificial Sequence
  Cyclic GFR-binding peptide
  MOD_RES (1), (2): Xaa is C or S
XXAPTQLSPISVLYIDDSSNVIYKQYEN

SEQ ID NO: 65633 - protein, 39 aa, Artificial Sequence; identical to SEQ ID NO: 19923
  Cyclic GFR-binding peptide
  MOD_RES (6), (7), (39): Xaa is C or S

SEQ ID NO: 65634 - protein, 20 aa, Artificial Sequence
  Cyclic GFR-binding peptide
EPISILYLVGRTPKVKFKYE

SEQ ID NO: 65635 - protein, 31 aa, Artificial Sequence
  Cyclic GFR-binding peptide
  MOD_RES (5), (6): Xaa is C or S
IPKAXXVPTELEPISMLYLDEYDKVVKFKYE

SEQ ID NO: 65636 - protein, 29 aa, Artificial Sequence
  Cyclic GFR-binding peptide
  MOD_RES (1), (1): Xaa is C or S
XVPQDLSPISILYIVGRTPKVYKQYEMVV

SEQ ID NO: 65637 - protein, 37 aa, Artificial Sequence; identical to SEQ ID NO: 19928
  Cyclic GFR-binding peptide
  MOD_RES (5), (6), (37): Xaa is C or S

SEQ ID NO: 65638 - protein, 27 aa, Artificial Sequence
  Cyclic GFR-binding peptide
  MOD_RES (1), (2): Xaa is C or S
XXVPTKLEPISVLYLDDMGVPTKFKYE

SEQ ID NO: 65639 - protein, 23 aa, Artificial Sequence
  Cyclic GFR-binding peptide
SPISILYKDAANNVVLKYHYDMV

SEQ ID NO: 65640 - protein, 29 aa, Artificial Sequence
  Cyclic GFR-binding peptide
  MOD_RES (1), (1): Xaa is C or S
XVPTELEPISMLYLDEYDKVVKFKYEEMV

SEQ ID NO: 65641 - protein, 24 aa, Artificial Sequence
  Cyclic GFR-binding peptide
PTKLSPISILYIDKGVVTYYKQYE

SEQ ID NO: 65642 - protein, 34 aa, Artificial Sequence; identical to SEQ ID NO: 19939
  Cyclic GFR-binding peptide
  MOD_RES (2), (3): Xaa is C or S

SEQ ID NO: 65643 - protein, 27 aa, Artificial Sequence
  Cyclic GFR-binding peptide
  MOD_RES (27), (27): Xaa is C or S
LSPISILYIVGRKPKVYKQYEMIVRSX

SEQ ID NO: 65644 - protein, 35 aa, Artificial Sequence; identical to SEQ ID NO: 19945
  Cyclic GFR-binding peptide
  MOD_RES (1), (32), (34): Xaa is C or S

SEQ ID NO: 65645 - protein, 34 aa, Artificial Sequence
  Cyclic GFR-binding peptide
  MOD_RES (6), (7): Xaa is C or S
AAPASXXVPARLNAISILYFDAANNVVLKKYRDM

SEQ ID NO: 65646 - protein, 35 aa, Artificial Sequence; identical to SEQ ID NO: 19947
  Cyclic GFR-binding peptide
  MOD_RES (1), (33), (35): Xaa is C or S

SEQ ID NO: 65647 - protein, 29 aa, Artificial Sequence
  Cyclic GFR-binding peptide
  MOD_RES (27), (29): Xaa is C or S
SPISMLYIDEYDKVVYKQYEEMVVEGXGX

SEQ ID NO: 65648 - protein, 34 aa, Artificial Sequence; identical to SEQ ID NO: 19948
  Cyclic GFR-binding peptide
  MOD_RES (3), (4): Xaa is C or S

SEQ ID NO: 65649 - protein, 29 aa, Artificial Sequence
  Cyclic GFR-binding peptide
EPISVLYLDDSSNVIKFKYEAAAAAAAAA

SEQ ID NO: 65650 - protein, 36 aa, Artificial Sequence; identical to SEQ ID NO: 19949
  Cyclic GFR-binding peptide
  MOD_RES (1), (2), (33), (35): Xaa is C or S

SEQ ID NO: 65651 - protein, 26 aa, Artificial Sequence
  Cyclic GFR-binding peptide
PTKLSPISILYIDKGVVTYYKQYEGM

SEQ ID NO: 65652 - protein, 28 aa, Artificial Sequence
  Cyclic GFR-binding peptide
  MOD_RES (26), (28): Xaa is C or S
EPISILYLVGRTPKVKFKYEMVVKSXKX

SEQ ID NO: 65653 - protein, 39 aa, Artificial Sequence; identical to SEQ ID NO: 19953
  Cyclic GFR-binding peptide
  MOD_RES (3), (4), (36), (38): Xaa is C or S

SEQ ID NO: 65654 - protein, 30 aa, Artificial Sequence
  Cyclic GFR-binding peptide
  MOD_RES (1), (1): Xaa is C or S
XVPARLNAISILYFDAANNVVLKKYRDMVV

SEQ ID NO: 65655 - protein, 28 aa, Artificial Sequence
  Cyclic GFR-binding peptide
  MOD_RES (2), (3): Xaa is C or S
PXXVPQALEPISILYLVGRKPKVKFKYE

SEQ ID NO: 65656 - protein, 33 aa, Artificial Sequence
  Cyclic GFR-binding peptide
  MOD_RES (32), (32): Xaa is C or S
PTKLSPISVLYIDDMGVPTYKQYEEGMSVAEXG

SEQ ID NO: 65657 - protein, 22 aa, Artificial Sequence
  Cyclic GFR-binding peptide
EPISILYLVGRTPKVKFKYEMV

SEQ ID NO: 65658 - protein, 29 aa, Artificial Sequence
  Cyclic GFR-binding peptide
TKLEPISVLYLDSSNNVIKFKYENMVVKA

SEQ ID NO: 65659 - protein, 32 aa, Artificial Sequence; identical to SEQ ID NO: 19962
  Cyclic GFR-binding peptide
  MOD_RES (1), (32): Xaa is C or S

SEQ ID NO: 65660 - protein, 37 aa, Artificial Sequence; identical to SEQ ID NO: 19965
  Cyclic GFR-binding peptide
  MOD_RES (4), (5), (37): Xaa is C or S

SEQ ID NO: 65661 - protein, 29 aa, Artificial Sequence
  Cyclic GFR-binding peptide
  MOD_RES (29), (29): Xaa is C or S
QALSPISILYIVGRKPKVYKQYEMIVRSX

SEQ ID NO: 65662 - protein, 34 aa, Artificial Sequence
  Cyclic GFR-binding peptide
  MOD_RES (4), (5): Xaa is C or S
ASPXXVPQDLEPISILYLVGRTPKVKFKYEMVVK

SEQ ID NO: 65663 - protein, 32 aa, Artificial Sequence; identical to SEQ ID NO: 19974
  Cyclic GFR-binding peptide
  MOD_RES (1), (2): Xaa is C or S

SEQ ID NO: 65664 - protein, 20 aa, Artificial Sequence
  Cyclic GFR-binding peptide
SPISILYKDAANNVVLKYHY

SEQ ID NO: 65665 - protein, 33 aa, Artificial Sequence; identical to SEQ ID NO: 19975
  Cyclic GFR-binding peptide
  MOD_RES (1), (33): Xaa is C or S

SEQ ID NO: 65666 - protein, 32 aa, Artificial Sequence
  Cyclic GFR-binding peptide
  MOD_RES (29), (31): Xaa is C or S
KLEPISVLYLDSSNNVIKFKYENMVVKAXGXH

SEQ ID NO: 65667 - protein, 38 aa, Artificial Sequence; identical to SEQ ID NO: 19981
  Cyclic GFR-binding peptide
  MOD_RES (4), (5), (36), (38): Xaa is C or S

SEQ ID NO: 65668 - protein, 24 aa, Artificial Sequence
  Cyclic GFR-binding peptide
TKLSPISILYIDKGVVTYYKQYEG

SEQ ID NO: 65669 - protein, 32 aa, Artificial Sequence
  Cyclic GFR-binding peptide
  MOD_RES (30), (32): Xaa is C or S
TELEPISMLYLDENEKVVKFKYEDMVVEGXGX

SEQ ID NO: 65670 - protein, 29 aa, Artificial Sequence
  Cyclic GFR-binding peptide
  MOD_RES (3), (4): Xaa is C or S
SPXXVPQDLSPISILYIVGRTPKVYKQYE

SEQ ID NO: 65671 - protein, 33 aa, Artificial Sequence; identical to SEQ ID NO: 19988
  Cyclic GFR-binding peptide
  MOD_RES (1), (33): Xaa is C or S

SEQ ID NO: 65672 - protein, 20 aa, Artificial Sequence
  Cyclic GFR-binding peptide
SPISILYIDKGVVTYYKQYE

SEQ ID NO: 65673 - protein, 26 aa, Artificial Sequence
  Cyclic GFR-binding peptide
VPQALEPISILYLVGRKPKVKFKYEM

SEQ ID NO: 65674 - protein, 28 aa, Artificial Sequence
  Cyclic GFR-binding peptide
  MOD_RES (27), (27): Xaa is C or S
SPISILYIDKGVVTYYKQYEGMAVSEXG

SEQ ID NO: 65675 - protein, 28 aa, Artificial Sequence
  Cyclic GFR-binding peptide
VPARLNAISILYFDAANNVVLKKYRDMV

SEQ ID NO: 65676 - protein, 21 aa, Artificial Sequence
  Cyclic GFR-binding peptide
LSPISILYIVGRTPKVYKQYE

SEQ ID NO: 65677 - protein, 27 aa, Artificial Sequence
  Cyclic GFR-binding peptide
  MOD_RES (1), (1): Xaa is C or S
XAPTKLSPISVLYIDDSSNVIYKQYEN

SEQ ID NO: 65678 - protein, 39 aa, Artificial Sequence; identical to SEQ ID NO: 19998
  Cyclic GFR-binding peptide
  MOD_RES (5), (37), (39): Xaa is C or S

SEQ ID NO: 65679 - protein, 34 aa, Artificial Sequence
  Cyclic GFR-binding peptide
  MOD_RES (4), (5): Xaa is C or S
PKPXXAPTQLSPISVLYIDDSSNVIYKQYENMVV

SEQ ID NO: 65680 - protein, 36 aa, Artificial Sequence; identical to SEQ ID NO: 20003
  Cyclic GFR-binding peptide
  MOD_RES (1), (2), (34), (36): Xaa is C or S

SEQ ID NO: 65681 - protein, 31 aa, Artificial Sequence
  Cyclic GFR-binding peptide
  MOD_RES (3), (4): Xaa is C or S
ASXXVPARLNAISILYFDAANNVVLKKYRDM

SEQ ID NO: 65682 - protein, 25 aa, Artificial Sequence
  Cyclic GFR-binding peptide
PQALEPISILYLVGRKPKVKFKYEM

SEQ ID NO: 65683 - protein, 35 aa, Artificial Sequence; identical to SEQ ID NO: 20006
  Cyclic GFR-binding peptide
  MOD_RES (1), (33), (35): Xaa is C or S

SEQ ID NO: 65684 - protein, 24 aa, Artificial Sequence
  Cyclic GFR-binding peptide
ELEPISMLYLDEYDKVVKFKYEEM

SEQ ID NO: 65685 - protein, 30 aa, Artificial Sequence
  Cyclic GFR-binding peptide
  MOD_RES (28), (30): Xaa is C or S
LNAISILYFDKGVVTYLKKYRGMAVSEXGX

SEQ ID NO: 65686 - protein, 28 aa, Artificial Sequence
  Cyclic GFR-binding peptide
  MOD_RES (28), (28): Xaa is C or S
DLEPISILYLIGKTPKIKFKYEMIVKSX

SEQ ID NO: 65687 - protein, 27 aa, Artificial Sequence
  Cyclic GFR-binding peptide
  MOD_RES (26), (26): Xaa is C or S
EPISILYLVGRTPKVKFKYEMVVKSXK

SEQ ID NO: 65688 - protein, 37 aa, Artificial Sequence; identical to SEQ ID NO: 20016
  Cyclic GFR-binding peptide
  MOD_RES (4), (5), (36): Xaa is C or S

SEQ ID NO: 65689 - protein, 27 aa, Artificial Sequence
  Cyclic GFR-binding peptide
  MOD_RES (1), (2): Xaa is C or S
XXAPTQLEPISVLYLDDSSNVIKFKYE

SEQ ID NO: 65690 - protein, 29 aa, Artificial Sequence
  Cyclic GFR-binding peptide
EPISILYLVGRKPKVKFKYEAAAAAAAAA

SEQ ID NO: 65691 - protein, 39 aa, Artificial Sequence; identical to SEQ ID NO: 20018
  Cyclic GFR-binding peptide
  MOD_RES (6), (7), (39): Xaa is C or S

SEQ ID NO: 65692 - protein, 31 aa, Artificial Sequence
  Cyclic GFR-binding peptide
  MOD_RES (29), (31): Xaa is C or S
LSPISVLYIDDMGVPTYKQYEEGMSVAEXGX

SEQ ID NO: 65693 - protein, 30 aa, Artificial Sequence
  Cyclic GFR-binding peptide
  MOD_RES (30), (30): Xaa is C or S
SQDLEPISILYLIGKTPKIKFKYEMIVKSX

SEQ ID NO: 65694 - protein, 28 aa, Artificial Sequence
  Cyclic GFR-binding peptide
  MOD_RES (2), (3): Xaa is C or S
PXXAPTKLSPISVLYIDDSSNVIYKQYE

SEQ ID NO: 65695 - protein, 29 aa, Artificial Sequence
  Cyclic GFR-binding peptide
SPISILYIDKGVVTYYKQYEAAAAAAAAA

SEQ ID NO: 65696 - protein, 33 aa, Artificial Sequence; identical to SEQ ID NO: 20020
  Cyclic GFR-binding peptide
  MOD_RES (3), (3): Xaa is C or S

SEQ ID NO: 65697 - protein, 27 aa, Artificial Sequence
  Cyclic GFR-binding peptide
PARLEPISILYLDAANNVVKFKYEDMV

SEQ ID NO: 65698 - protein, 23 aa, Artificial Sequence
  Cyclic GFR-binding peptide
LSPISVLYIDDSSNVIYKQYENM

SEQ ID NO: 65699 - protein, 24 aa, Artificial Sequence
  Cyclic GFR-binding peptide
TKLNAISILYFDKGVVTYLKKYRG

SEQ ID NO: 65700 - protein, 37 aa, Artificial Sequence; identical to SEQ ID NO: 20024
  Cyclic GFR-binding peptide
  MOD_RES (2), (34), (36): Xaa is C or S

SEQ ID NO: 65701 - protein, 28 aa, Artificial Sequence
  Cyclic GFR-binding peptide
APTQLEPISVLYLDDSSNVIKFKYENMV

SEQ ID NO: 65702 - protein, 39 aa, Artificial Sequence; identical to SEQ ID NO: 20026
  Cyclic GFR-binding peptide
  MOD_RES (3), (4), (36), (38): Xaa is C or S

SEQ ID NO: 65703 - protein, 26 aa, Artificial Sequence
  Cyclic GFR-binding peptide
EPISVLYLDSSNNVIKFKYENMVVKA

SEQ ID NO: 65704 - protein, 35 aa, Artificial Sequence; identical to SEQ ID NO: 20028
  Cyclic GFR-binding peptide
  MOD_RES (3), (4): Xaa is C or S

SEQ ID NO: 65705 - protein, 34 aa, Artificial Sequence; identical to SEQ ID NO: 20031
  Cyclic GFR-binding peptide
  MOD_RES (1), (2), (34): Xaa is C or S

SEQ ID NO: 65706 - protein, 32 aa, Artificial Sequence
  Cyclic GFR-binding peptide
  MOD_RES (31), (31): Xaa is C or S
PTELEPISMLYLDENEKVVKFKYEDMVVEGXG

SEQ ID NO: 65707 - protein, 25 aa, Artificial Sequence
  Cyclic GFR-binding peptide
LSPISILYKDAANNVVLKYHYDMVV

SEQ ID NO: 65708 - protein, 37 aa, Artificial Sequence; identical to SEQ ID NO: 20033
  Cyclic GFR-binding peptide
  MOD_RES (6), (6): Xaa is C or S

SEQ ID NO: 65709 - protein, 23 aa, Artificial Sequence
  Cyclic GFR-binding peptide
TKLEPISVLYLDDSSNVIKFKYE

SEQ ID NO: 65710 - protein, 31 aa, Artificial Sequence
  Cyclic GFR-binding peptide
  MOD_RES (28), (30): Xaa is C or S
LSPISVLYIDSSNNVIYKQYENMVVKAXGXH

SEQ ID NO: 65711 - protein, 35 aa, Artificial Sequence; identical to SEQ ID NO: 20036
  Cyclic GFR-binding peptide
  MOD_RES (3), (4): Xaa is C or S

SEQ ID NO: 65712 - protein, 29 aa, Artificial Sequence
  Cyclic GFR-binding peptide
  MOD_RES (28), (28): Xaa is C or S
DLSPISILYIIGKTPKIYKQYEMIVKSXK

SEQ ID NO: 65713 - protein, 33 aa, Artificial Sequence
  Cyclic GFR-binding peptide
  MOD_RES (4), (5): Xaa is C or S
SKAXXVPTKLNAISILYFDKGVVTYLKKYRGMA

SEQ ID NO: 65714 - protein, 37 aa, Artificial Sequence; identical to SEQ ID NO: 20042
  Cyclic GFR-binding peptide
  MOD_RES (4), (5), (37): Xaa is C or S

SEQ ID NO: 65715 - protein, 32 aa, Artificial Sequence
  Cyclic GFR-binding peptide
  MOD_RES (32), (32): Xaa is C or S
PTKLEPISVLYLDDMGVPTKFKYEEGMSVAEX

SEQ ID NO: 65716 - protein, 25 aa, Artificial Sequence
  Cyclic GFR-binding peptide
EPISILYLDAANNVVKFKYEDMVVE

SEQ ID NO: 65717 - protein, 35 aa, Artificial Sequence; identical to SEQ ID NO: 20045
  Cyclic GFR-binding peptide
  MOD_RES (3), (4), (35): Xaa is C or S

SEQ ID NO: 65718 - protein, 33 aa, Artificial Sequence
  Cyclic GFR-binding peptide
  MOD_RES (31), (33): Xaa is C or S
PARLSPISILYKDAANNVVLKYHYDMVVEAXGX

SEQ ID NO: 65719 - protein, 29 aa, Artificial Sequence
  Cyclic GFR-binding peptide
EPISMLYLDENEKVVKFKYEAAAAAAAAA

SEQ ID NO: 65720 - protein, 34 aa, Artificial Sequence; identical to SEQ ID NO: 20047
  Cyclic GFR-binding peptide
  MOD_RES (1), (33): Xaa is C or S

SEQ ID NO: 65721 - protein, 23 aa, Artificial Sequence
  Cyclic GFR-binding peptide
EPISMLYLDENEKVVKFKYEDMV

SEQ ID NO: 65722 - protein, 28 aa, Artificial Sequence
  Cyclic GFR-binding peptide
  MOD_RES (27), (27): Xaa is C or S
SPISVLYIDDSSNVIYKQYENMVVRSXG

SEQ ID NO: 65723 - protein, 34 aa, Artificial Sequence; identical to SEQ ID NO: 20048
  Cyclic GFR-binding peptide
  MOD_RES (2), (3), (34): Xaa is C or S

SEQ ID NO: 65724 - protein, 28 aa, Artificial Sequence
  Cyclic GFR-binding peptide
  MOD_RES (2), (3): Xaa is C or S
AXXVPTELSPISMLYIDENEKVVYKQYE

SEQ ID NO: 65725 - protein, 33 aa, Artificial Sequence; identical to SEQ ID NO: 20055
  Cyclic GFR-binding peptide
  MOD_RES (2), (3): Xaa is C or S

SEQ ID NO: 65726 - protein, 29 aa, Artificial Sequence
  Cyclic GFR-binding peptide
PTELEPISMLYLDENEKVVKFKYEDMVVE

SEQ ID NO: 65727 - protein, 38 aa, Artificial Sequence; identical to SEQ ID NO: 20060
  Cyclic GFR-binding peptide
  MOD_RES (5), (6), (38): Xaa is C or S

SEQ ID NO: 65728 - protein, 34 aa, Artificial Sequence; identical to SEQ ID NO: 20064
  Cyclic GFR-binding peptide
  MOD_RES (1), (2), (34): Xaa is C or S

SEQ ID NO: 65729 - protein, 32 aa, Artificial Sequence
  Cyclic GFR-binding peptide
  MOD_RES (2), (3): Xaa is C or S
PXXAPTKLEPISVLYLDDSSNVIKFKYENMVV

SEQ ID NO: 65730 - protein, 36 aa, Artificial Sequence; identical to SEQ ID NO: 20066
  Cyclic GFR-binding peptide
  MOD_RES (2), (3), (34), (36): Xaa is C or S

SEQ ID NO: 65731 - protein, 30 aa, Artificial Sequence
  Cyclic GFR-binding peptide
  MOD_RES (3), (4): Xaa is C or S
KAXXVPTKLSPISILYIDKGVVTYYKQYEG

SEQ ID NO: 65732 - protein, 28 aa, Artificial Sequence
  Cyclic GFR-binding peptide
  MOD_RES (1), (2): Xaa is C or S
XXVPTKLNAISILYFDKGVVTYLKKYRG

SEQ ID NO: 65733 - protein, 26 aa, Artificial Sequence
  Cyclic GFR-binding peptide
NAISILYFDKGVVTYLKKYRGMAVSE

SEQ ID NO: 65734 - protein, 31 aa, Artificial Sequence; identical to SEQ ID NO: 20069
  Cyclic GFR-binding peptide
  MOD_RES (31), (31): Xaa is C or S

SEQ ID NO: 65735 - protein, 24 aa, Artificial Sequence
  Cyclic GFR-binding peptide
PTKLEPISVLYLDSSNNVIKFKYE

SEQ ID NO: 65736 - protein, 22 aa, Artificial Sequence
  Cyclic GFR-binding peptide
SPISILYIVGRTPKVYKQYEMV

SEQ ID NO: 65737 - protein, 33 aa, Artificial Sequence; identical to SEQ ID NO: 20070
  Cyclic GFR-binding peptide
  MOD_RES (1), (2), (33): Xaa is C or S

SEQ ID NO: 65738 - protein, 30 aa, Artificial Sequence
  Cyclic GFR-binding peptide
PTKLSPISVLYIDDSSNVIYKQYENMVVRS

SEQ ID NO: 65739 - protein, 31 aa, Artificial Sequence
  Cyclic GFR-binding peptide
  MOD_RES (5), (6): Xaa is C or S
VPKPXXAPTKLSPISVLYIDDSSNVIYKQYE

SEQ ID NO: 65740 - protein, 32 aa, Artificial Sequence
  Cyclic GFR-binding peptide
  MOD_RES (30), (32): Xaa is C or S
KLEPISVLYLDDMGVPTKFKYEEGMSVAEXGX

SEQ ID NO: 65741 - protein, 34 aa, Artificial Sequence
  Cyclic GFR-binding peptide
  MOD_RES (5), (6): Xaa is C or S
SASPXXVSQDLEPISILYLIGKTPKIKFKYEMIV

SEQ ID NO: 65742 - protein, 28 aa, Artificial Sequence
  Cyclic GFR-binding peptide
ELEPISMLYLDEYDKVVKFKYEEMVVEG

SEQ ID NO: 65743 - protein, 26 aa, Artificial Sequence
  Cyclic GFR-binding peptide
TELSPISMLYIDEYDKVVYKQYEEMV

SEQ ID NO: 65744 - protein, 29 aa, Artificial Sequence
  Cyclic GFR-binding peptide
PARLSPISILYKDAANNVVLKYHYDMVVE

SEQ ID NO: 65745 - protein, 31 aa, Artificial Sequence
  Cyclic GFR-binding peptide
  MOD_RES (2), (3): Xaa is C or S
PXXVPQALEPISILYLVGRKPKVKFKYEMIV

SEQ ID NO: 65746 - protein, 36 aa, Artificial Sequence; identical to SEQ ID NO: 20092
  Cyclic GFR-binding peptide
  MOD_RES (3), (4), (35): Xaa is C or S

SEQ ID NO: 65747 - protein, 37 aa, Artificial Sequence; identical to SEQ ID NO: 20093
  Cyclic GFR-binding peptide
  MOD_RES (4), (5), (37): Xaa is C or S

SEQ ID NO: 65748 - protein, 32 aa, Artificial Sequence
  Cyclic GFR-binding peptide
  MOD_RES (29), (31): Xaa is C or S
KLSPISILYIDKGVVTYYKQYEGMAVSEXGXR

SEQ ID NO: 65749 - protein, 31 aa, Artificial Sequence
  Cyclic GFR-binding peptide
  MOD_RES (31), (31): Xaa is C or S
PTELSPISMLYIDEYDKVVYKQYEEMVVEGX

SEQ ID NO: 65750 - protein, 29 aa, Artificial Sequence
  Cyclic GFR-binding peptide
  MOD_RES (28), (28): Xaa is C or S
EPISVLYLDDMGVPTKFKYEEGMSVAEXG

SEQ ID NO: 65751 - protein, 35 aa, Artificial Sequence
  Cyclic GFR-binding peptide
  MOD_RES (6), (7): Xaa is C or S
SIPKAXXVPTELSPISMLYIDEYDKVVYKQYEEMV

SEQ ID NO: 65752 - protein, 32 aa, Artificial Sequence
  Cyclic GFR-binding peptide
  MOD_RES (3), (4): Xaa is C or S
KAXXVPTKLEPISVLYLDDMGVPTKFKYEEGM

SEQ ID NO: 65753 - protein, 35 aa, Artificial Sequence; identical to SEQ ID NO: 20098
  Cyclic GFR-binding peptide
  MOD_RES (3), (4): Xaa is C or S

SEQ ID NO: 65754 - protein, 25 aa, Artificial Sequence
  Cyclic GFR-binding peptide
QALEPISILYLVGRKPKVKFKYEMI

SEQ ID NO: 65755 - protein, 28 aa, Artificial Sequence
  Cyclic GFR-binding peptide
  MOD_RES (3), (3): Xaa is C or S
PTXAPTKLEPISVLYLDDSSNVIKFKYE

SEQ ID NO: 65756 - protein, 22 aa, Artificial Sequence
  Cyclic GFR-binding peptide
ELSPISMLYIDENEKVVYKQYE

SEQ ID NO: 65757 - protein, 34 aa, Artificial Sequence
  Cyclic GFR-binding peptide
  MOD_RES (4), (5): Xaa is C or S
PASXXVPARLEPISILYLDAANNVVKFKYEDMVV

SEQ ID NO: 65758 - protein, 42 aa, Artificial Sequence; identical to SEQ ID NO: 20103
  Cyclic GFR-binding peptide
  MOD_RES (7), (39), (41): Xaa is C or S

SEQ ID NO: 65759 - protein, 31 aa, Artificial Sequence
  Cyclic GFR-binding peptide
  MOD_RES (31), (31): Xaa is C or S
PARLNAISILYFDAANNVVLKKYRDMVVEAX

SEQ ID NO: 65760 - protein, 31 aa, Artificial Sequence
  Cyclic GFR-binding peptide
  MOD_RES (31), (31): Xaa is C or S
PARLSPISILYKDAANNVVLKYHYDMVVEAX

SEQ ID NO: 65761 - protein, 24 aa, Artificial Sequence
  Cyclic GFR-binding peptide
ELSPISMLYIDEYDKVVYKQYEEM

SEQ ID NO: 65762 - protein, 40 aa, Artificial Sequence; identical to SEQ ID NO: 20106
  Cyclic GFR-binding peptide
  MOD_RES (5), (6), (37), (39): Xaa is C or S

SEQ ID NO: 65763 - protein, 30 aa, Artificial Sequence
  Cyclic GFR-binding peptide
PTQLEPISVLYLDDSSNVIKFKYENMVVRA

SEQ ID NO: 65764 - protein, 32 aa, Artificial Sequence
  Cyclic GFR-binding peptide
  MOD_RES (31), (31): Xaa is C or S
PTKLEPISVLYLDSSNNVIKFKYENMVVKAXG

SEQ ID NO: 65765 - protein, 35 aa, Artificial Sequence
  Cyclic GFR-binding peptide
  MOD_RES (5), (6): Xaa is C or S
IPKAXXVPTELSPISMLYIDEYDKVVYKQYEEMVV

SEQ ID NO: 65766 - protein, 30 aa, Artificial Sequence; identical to SEQ ID NO: 20109
  Cyclic GFR-binding peptide

SEQ ID NO: 65767 - protein, 30 aa, Artificial Sequence
  Cyclic GFR-binding peptide
  MOD_RES (1), (2): Xaa is C or S
XXVPARLNAISILYFDAANNVVLKKYRDMV

SEQ ID NO: 65768 - protein, 39 aa, Artificial Sequence; identical to SEQ ID NO: 20110
  Cyclic GFR-binding peptide
  MOD_RES (4), (5), (36), (38): Xaa is C or S

SEQ ID NO: 65769 - protein, 38 aa, Artificial Sequence; identical to SEQ ID NO: 20112
  Cyclic GFR-binding peptide
  MOD_RES (5), (6): Xaa is C or S

SEQ ID NO: 65770 - protein, 26 aa, Artificial Sequence
  Cyclic GFR-binding peptide
  MOD_RES (26), (26): Xaa is C or S
EPISILYLVGRKPKVKFKYEMIVRSX

SEQ ID NO: 65771 - protein, 32 aa, Artificial Sequence
  Cyclic GFR-binding peptide
  MOD_RES (31), (31): Xaa is C or S
PTKLSPISILYKDKGVVTYLKYHYGMAVSEXG

SEQ ID NO: 65772 - protein, 29 aa, Artificial Sequence
  Cyclic GFR-binding peptide
  MOD_RES (26), (28): Xaa is C or S
EPISILYLIGKTPKIKFKYEMIVKSXKXS

SEQ ID NO: 65773 - protein, 29 aa, Artificial Sequence
  Cyclic GFR-binding peptide
SPISVLYIDSSNNVIYKQYEAAAAAAAAA

SEQ ID NO: 65774 - protein, 21 aa, Artificial Sequence
  Cyclic GFR-binding peptide
EPISMLYLDEYDKVVKFKYEE

SEQ ID NO: 65775 - protein, 34 aa, Artificial Sequence; identical to SEQ ID NO: 20124
  Cyclic GFR-binding peptide
  MOD_RES (3), (4): Xaa is C or S

SEQ ID NO: 65776 - protein, 36 aa, Artificial Sequence; identical to SEQ ID NO: 20123
  Cyclic GFR-binding peptide
  MOD_RES (4), (5), (36): Xaa is C or S

SEQ ID NO: 65777 - protein, 36 aa, Artificial Sequence; identical to SEQ ID NO: 20126
  Cyclic GFR-binding peptide
  MOD_RES (3), (4), (36): Xaa is C or S

SEQ ID NO: 65778 - protein, 30 aa, Artificial Sequence
  Cyclic GFR-binding peptide
  MOD_RES (1), (1): Xaa is C or S
XVSQDLEPISILYLIGKTPKIKFKYEMIVK

SEQ ID NO: 65779 - protein, 23 aa, Artificial Sequence
  Cyclic GFR-binding peptide
KLSPISVLYIDDSSNVIYKQYEN

SEQ ID NO: 65780 - protein, 38 aa, Artificial Sequence; identical to SEQ ID NO: 20130
  Cyclic GFR-binding peptide
  MOD_RES (6), (7), (38): Xaa is C or S

SEQ ID NO: 65781 - protein, 36 aa, Artificial Sequence; identical to SEQ ID NO: 20132
  Cyclic GFR-binding peptide
  MOD_RES (1), (33), (35): Xaa is C or S

SEQ ID NO: 65782 - protein, 34 aa, Artificial Sequence; identical to SEQ ID NO: 20133
  Cyclic GFR-binding peptide
  MOD_RES (2), (3): Xaa is C or S

SEQ ID NO: 65783 - protein, 28 aa, Artificial Sequence
  Cyclic GFR-binding peptide
TKLEPISVLYLDSSNNVIKFKYENMVVK

SEQ ID NO: 65784 - protein, 29 aa, Artificial Sequence
  Cyclic GFR-binding peptide
VSQDLEPISILYLIGKTPKIKFKYEMIVK

SEQ ID NO: 65785 - protein, 21 aa, Artificial Sequence
  Cyclic GFR-binding peptide
LNAISILYFDKGVVTYLKKYR

SEQ ID NO: 65786 - protein, 36 aa, Artificial Sequence
  Cyclic GFR-binding peptide
  MOD_RES (6), (7): Xaa is C or S
AVPKAXXAPTKLSPISVLYIDSSNNVIYKQYENMVV

SEQ ID NO: 65787 - protein, 30 aa, Artificial Sequence
  Cyclic GFR-binding peptide
  MOD_RES (27), (29): Xaa is C or S
EPISMLYLDEYDKVVKFKYEEMVVEGXGXR

SEQ ID NO: 65788 - protein, 36 aa, Artificial Sequence; identical to SEQ ID NO: 20144
  Cyclic GFR-binding peptide
  MOD_RES (4), (5), (36): Xaa is C or S

SEQ ID NO: 65789 - protein, 35 aa, Artificial Sequence; identical to SEQ ID NO: 20146
  Cyclic GFR-binding peptide
  MOD_RES (3), (4), (35): Xaa is C or S

SEQ ID NO: 65790 - protein, 31 aa, Artificial Sequence
  Cyclic GFR-binding peptide
  MOD_RES (29), (31): Xaa is C or S
QDLSPISILYIIGKTPKIYKQYEMIVKSXKX

SEQ ID NO: 65791 - protein, 40 aa, Artificial Sequence; identical to SEQ ID NO: 20150
  Cyclic GFR-binding peptide
  MOD_RES (5), (6), (38), (40): Xaa is C or S

SEQ ID NO: 65792 - protein, 29 aa, Artificial Sequence
  Cyclic GFR-binding peptide
VPARLNAISILYFDAANNVVLKKYRDMVV

SEQ ID NO: 65793 - protein, 26 aa, Artificial Sequence
  Cyclic GFR-binding peptide
TELEPISMLYLDENEKVVKFKYEDMV

SEQ ID NO: 65794 - protein, 24 aa, Artificial Sequence
  Cyclic GFR-binding peptide
TELEPISMLYLDENEKVVKFKYED

SEQ ID NO: 65795 - protein, 39 aa, Artificial Sequence; identical to SEQ ID NO: 20153
  Cyclic GFR-binding peptide
  MOD_RES (3), (4), (36), (38): Xaa is C or S

SEQ ID NO: 65796 - protein, 33 aa, Artificial Sequence
  Cyclic GFR-binding peptide
  MOD_RES (6), (7): Xaa is C or S
ASASPXXVPQDLEPISILYLVGRTPKVKFKYEM

SEQ ID NO: 65797 - protein, 36 aa, Artificial Sequence; identical to SEQ ID NO: 20156
  Cyclic GFR-binding peptide
  MOD_RES (3), (4), (36): Xaa is C or S

SEQ ID NO: 65798 - protein, 38 aa, Artificial Sequence; identical to SEQ ID NO: 20157
  Cyclic GFR-binding peptide
  MOD_RES (6), (7): Xaa is C or S

SEQ ID NO: 65799 - protein, 33 aa, Artificial Sequence
  Cyclic GFR-binding peptide
  MOD_RES (4), (5): Xaa is C or S
PKPXXAPTKLSPISVLYIDDSSNVIYKQYENMV

SEQ ID NO: 65800 - protein, 37 aa, Artificial Sequence; identical to SEQ ID NO: 20159
  Cyclic GFR-binding peptide
  MOD_RES (2), (3), (35), (37): Xaa is C or S

SEQ ID NO: 65801 - protein, 38 aa, Artificial Sequence; identical to SEQ ID NO: 20158
  Cyclic GFR-binding peptide
  MOD_RES (3), (4), (36), (38): Xaa is C or S

SEQ ID NO: 65802 - protein, 28 aa, Artificial Sequence
  Cyclic GFR-binding peptide
  MOD_RES (2), (3): Xaa is C or S
SXXVPARLEPISILYLDAANNVVKFKYE

SEQ ID NO: 65803 - protein, 31 aa, Artificial Sequence; identical to SEQ ID NO: 20162
  Cyclic GFR-binding peptide

SEQ ID NO: 65804 - protein, 36 aa, Artificial Sequence
  Cyclic GFR-binding peptide
  MOD_RES (6), (7): Xaa is C or S
AAPASXXVPARLNAISILYFDAANNVVLKKYRDMVV

SEQ ID NO: 65805 - protein, 23 aa, Artificial Sequence
  Cyclic GFR-binding peptide
KLSPISVLYIDDMGVPTYKQYEE

SEQ ID NO: 65806 - protein, 33 aa, Artificial Sequence
  Cyclic GFR-binding peptide
  MOD_RES (4), (5): Xaa is C or S
ASPXXVPQDLEPISILYLVGRTPKVKFKYEMVV

SEQ ID NO: 65807 - protein, 37 aa, Artificial Sequence; identical to SEQ ID NO: 20164
  Cyclic GFR-binding peptide
  MOD_RES (5), (6): Xaa is C or S

SEQ ID NO: 65808 - protein, 29 aa, Artificial Sequence
  Cyclic GFR-binding peptide
  MOD_RES (1), (1): Xaa is C or S
XVPTELSPISMLYIDENEKVVYKQYEDMV

SEQ ID NO: 65809 - protein, 33 aa, Artificial Sequence
  Cyclic GFR-binding peptide
  MOD_RES (4), (5): Xaa is C or S
PKPXXAPTQLEPISVLYLDDSSNVIKFKYENMV

SEQ ID NO: 65810 - protein, 32 aa, Artificial Sequence
  Cyclic GFR-binding peptide
  MOD_RES (6), (7): Xaa is C or S
ASAAPXXVPQALEPISILYLVGRKPKVKFKYE

SEQ ID NO: 65811 - protein, 31 aa, Artificial Sequence; identical to SEQ ID NO: 20169
  Cyclic GFR-binding peptide

SEQ ID NO: 65812 - protein, 32 aa, Artificial Sequence
  Cyclic GFR-binding peptide
  MOD_RES (30), (32): Xaa is C or S
TKLSPISVLYIDSSNNVIYKQYENMVVKAXGX

SEQ ID NO: 65813 - protein, 28 aa, Artificial Sequence
  Cyclic GFR-binding peptide
  MOD_RES (2), (3): Xaa is C or S
SXXVPARLNAISILYFDAANNVVLKKYR

SEQ ID NO: 65814 - protein, 28 aa, Artificial Sequence
  Cyclic GFR-binding peptide
PTKLSPISILYKDKGVVTYLKYHYGMAV

SEQ ID NO: 65815 - protein, 35 aa, Artificial Sequence; identical to SEQ ID NO: 20174
  Cyclic GFR-binding peptide
  MOD_RES (32), (34): Xaa is C or S

SEQ ID NO: 65816 - protein, 34 aa, Artificial Sequence; identical to SEQ ID NO: 20176
  Cyclic GFR-binding peptide
  MOD_RES (1), (33): Xaa is C or S

SEQ ID NO: 65817 - protein, 35 aa, Artificial Sequence
  Cyclic GFR-binding peptide
  MOD_RES (3), (4): Xaa is C or S
KAXXVPTKLEPISVLYLDDMGVPTKFKYEEGMSVA

SEQ ID NO: 65818 - protein, 28 aa, Artificial Sequence
  Cyclic GFR-binding peptide
  MOD_RES (2), (3): Xaa is C or S
AXXVPTKLSPISILYIDKGVVTYYKQYE

SEQ ID NO: 65819 - protein, 30 aa, Artificial Sequence
  Cyclic GFR-binding peptide
  MOD_RES (30), (30): Xaa is C or S
ARLSPISILYKDAANNVVLKYHYDMVVEAX

SEQ ID NO: 65820 - protein, 30 aa, Artificial Sequence
  Cyclic GFR-binding peptide
  MOD_RES (1), (2): Xaa is C or S
XXVPTKLSPISILYKDKGVVTYLKYHYGMA

SEQ ID NO: 65821 - protein, 38 aa, Artificial Sequence; identical to SEQ ID NO: 20181
  Cyclic GFR-binding peptide
  MOD_RES (6), (7), (38): Xaa is C or S

SEQ ID NO: 65822 - protein, 31 aa, Artificial Sequence; identical to SEQ ID NO: 20182
  Cyclic GFR-binding peptide
  MOD_RES (1), (1): Xaa is C or S

SEQ ID NO: 65823 - protein, 25 aa, Artificial Sequence
  Cyclic GFR-binding peptide
DLEPISILYLIGKTPKIKFKYEMIV

SEQ ID NO: 65824 - protein, 36 aa, Artificial Sequence; identical to SEQ ID NO: 20183
  Cyclic GFR-binding peptide
  MOD_RES (33), (35): Xaa is C or S

SEQ ID NO: 65825 - protein, 26 aa, Artificial Sequence
  Cyclic GFR-binding peptide
  MOD_RES (1), (1): Xaa is C or S
XVPTELSPISMLYIDENEKVVYKQYE

SEQ ID NO: 65826 - protein, 32 aa, Artificial Sequence; identical to SEQ ID NO: 20187
  Cyclic GFR-binding peptide
  MOD_RES (2), (2): Xaa is C or S

SEQ ID NO: 65827 - protein, 22 aa, Artificial Sequence
  Cyclic GFR-binding peptide
SPISILYIIGKTPKIYKQYEMI

SEQ ID NO: 65828 - protein, 34 aa, Artificial Sequence
  Cyclic GFR-binding peptide
  MOD_RES (6), (7): Xaa is C or S
KVGKAXXVPTKLEPISVLYLDDMGVPTKFKYEEG

SEQ ID NO: 65829 - protein, 34 aa, Artificial Sequence; identical to SEQ ID NO: 20190
  Cyclic GFR-binding peptide
  MOD_RES (2), (34): Xaa is C or S

SEQ ID NO: 65830 - protein, 22 aa, Artificial Sequence
  Cyclic GFR-binding peptide
EPISILYLVGRKPKVKFKYEMI

SEQ ID NO: 65831 - protein, 27 aa, Artificial Sequence
  Cyclic GFR-binding peptide
  MOD_RES (1), (1): Xaa is C or S
XVPQALEPISILYLVGRKPKVKFKYEM

SEQ ID NO: 65832 - protein, 31 aa, Artificial Sequence; identical to SEQ ID NO: 20191
  Cyclic GFR-binding peptide
  MOD_RES (1), (1): Xaa is C or S

SEQ ID NO: 65833 - protein, 27 aa, Artificial Sequence
  Cyclic GFR-binding peptide
ELEPISMLYLDENEKVVKFKYEDMVVE

SEQ ID NO: 65834 - protein, 26 aa, Artificial Sequence
  Cyclic GFR-binding peptide
LSPISILYKDKGVVTYLKYHYGMAVS

SEQ ID NO: 65835 - protein, 27 aa, Artificial Sequence
  Cyclic GFR-binding peptide
PTELEPISMLYLDEYDKVVKFKYEEMV

SEQ ID NO: 65836 - protein, 35 aa, Artificial Sequence
  Cyclic GFR-binding peptide
  MOD_RES (32), (34): Xaa is C or S
PTKLEPISVLYLDDMGVPTKFKYEEGMSVAEXGXR

SEQ ID NO: 65837 - protein, 37 aa, Artificial Sequence; identical to SEQ ID NO: 20194
  Cyclic GFR-binding peptide
  MOD_RES (5), (6): Xaa is C or S

SEQ ID NO: 65838 - protein, 27 aa, Artificial Sequence
  Cyclic GFR-binding peptide
TKLSPISVLYIDDMGVPTYKQYEEGMS

SEQ ID NO: 65839 - protein, 29 aa, Artificial Sequence
  Cyclic GFR-binding peptide
EPISILYLDKGVVTYKFKYEAAAAAAAAA

SEQ ID NO: 65840 - protein, 36 aa, Artificial Sequence; identical to SEQ ID NO: 20201
  Cyclic GFR-binding peptide
  MOD_RES (2), (3), (36): Xaa is C or S

SEQ ID NO: 65841 - protein, 25 aa, Artificial Sequence
  Cyclic GFR-binding peptide
SPISILYIIGKTPKIYKQYEMIVKS

SEQ ID NO: 65842 - protein, 32 aa, Artificial Sequence
  Cyclic GFR-binding peptide
  MOD_RES (4), (5): Xaa is C or S
PASXXVPARLSPISILYKDAANNVVLKYHYDM

SEQ ID NO: 65843 - protein, 32 aa, Artificial Sequence
  Cyclic GFR-binding peptide
  MOD_RES (30), (32): Xaa is C or S
TELSPISMLYIDENEKVVYKQYEDMVVEGXGX

SEQ ID NO: 65844 - protein, 34 aa, Artificial Sequence
  Cyclic GFR-binding peptide
  MOD_RES (4), (5): Xaa is C or S
PKPXXAPTKLEPISVLYLDDSSNVIKFKYENMVV

SEQ ID NO: 65845 - protein, 30 aa, Artificial Sequence
  Cyclic GFR-binding peptide
  MOD_RES (29), (29): Xaa is C or S
QLEPISVLYLDDSSNVIKFKYENMVVRAXG

SEQ ID NO: 65846 - protein, 33 aa, Artificial Sequence; identical to SEQ ID NO: 20210
  Cyclic GFR-binding peptide
  MOD_RES (32), (32): Xaa is C or S

SEQ ID NO: 65847 - protein, 37 aa, Artificial Sequence; identical to SEQ ID NO: 20211
  Cyclic GFR-binding peptide
  MOD_RES (1), (2), (34), (36): Xaa is C or S

SEQ ID NO: 65848 - protein, 40 aa, Artificial Sequence; identical to SEQ ID NO: 20212
  Cyclic GFR-binding peptide
  MOD_RES (6), (7), (39): Xaa is C or S

SEQ ID NO: 65849 - protein, 39 aa, Artificial Sequence; identical to SEQ ID NO: 20215
  Cyclic GFR-binding peptide
  MOD_RES (5), (6), (38): Xaa is C or S

SEQ ID NO: 65850 - protein, 31 aa, Artificial Sequence
  Cyclic GFR-binding peptide
  MOD_RES (1), (2): Xaa is C or S
XXVPQALEPISILYLVGRKPKVKFKYEMIVR

SEQ ID NO: 65851 - protein, 29 aa, Artificial Sequence
  Cyclic GFR-binding peptide
  MOD_RES (29), (29): Xaa is C or S
QDLEPISILYLVGRTPKVKFKYEMVVKSX

SEQ ID NO: 65852 - protein, 35 aa, Artificial Sequence; identical to SEQ ID NO: 20216
  Cyclic GFR-binding peptide
  MOD_RES (2), (3), (35): Xaa is C or S

SEQ ID NO: 65853 - protein, 30 aa, Artificial Sequence; identical to SEQ ID NO: 20219
  Cyclic GFR-binding peptide

SEQ ID NO: 65854 - protein, 29 aa, Artificial Sequence
  Cyclic GFR-binding peptide
VPARLSPISILYKDAANNVVLKYHYDMVV

SEQ ID NO: 65855 - protein, 36 aa, Artificial Sequence; identical to SEQ ID NO: 20220
  Cyclic GFR-binding peptide
  MOD_RES (3), (4), (35): Xaa is C or S

SEQ ID NO: 65856 - protein, 26 aa, Artificial Sequence
  Cyclic GFR-binding peptide
  MOD_RES (1), (1): Xaa is C or S
XVSQDLEPISILYLIGKTPKIKFKYE

SEQ ID NO: 65857 - protein, 35 aa, Artificial Sequence
  Cyclic GFR-binding peptide
  MOD_RES (5), (6): Xaa is C or S
IPKAXXVPTELEPISMLYLDEYDKVVKFKYEEMVV

SEQ ID NO: 65858 - protein, 27 aa, Artificial Sequence
  Cyclic GFR-binding peptide
KLSPISVLYIDDSSNVIYKQYENMVVR

SEQ ID NO: 65859 - protein, 31 aa, Artificial Sequence
  Cyclic GFR-binding peptide
  MOD_RES (4), (5): Xaa is C or S
ASPXXVPQDLSPISILYIVGRTPKVYKQYEM

SEQ ID NO: 65860 - protein, 33 aa, Artificial Sequence
  Cyclic GFR-binding peptide
  MOD_RES (5), (6): Xaa is C or S
ASKAXXVPTKLSPISILYKDKGVVTYLKYHYGM

SEQ ID NO: 65861 - protein, 27 aa, Artificial Sequence
  Cyclic GFR-binding peptide
  MOD_RES (1), (1): Xaa is C or S
XVPTKLEPISVLYLDDMGVPTKFKYEE

SEQ ID NO: 65862 - protein, 36 aa, Artificial Sequence; identical to SEQ ID NO: 20227
  Cyclic GFR-binding peptide
  MOD_RES (1), (2), (34), (36): Xaa is C or S

SEQ ID NO: 65863 - protein, 28 aa, Artificial Sequence
  Cyclic GFR-binding peptide
  MOD_RES (28), (28): Xaa is C or S
LSPISILYIDKGVVTYYKQYEGMAVSEX

SEQ ID NO: 65864 - protein, 37 aa, Artificial Sequence; identical to SEQ ID NO: 20229
  Cyclic GFR-binding peptide
  MOD_RES (7), (7): Xaa is C or S

SEQ ID NO: 65865 - protein, 26 aa, Artificial Sequence
  Cyclic GFR-binding peptide
VPQALSPISILYIVGRKPKVYKQYEM

SEQ ID NO: 65866 - protein, 30 aa, Artificial Sequence
  Cyclic GFR-binding peptide
  MOD_RES (30), (30): Xaa is C or S
ARLNAISILYFDAANNVVLKKYRDMVVEAX

SEQ ID NO: 65867 - protein, 35 aa, Artificial Sequence; identical to SEQ ID NO: 20231
  Cyclic GFR-binding peptide
  MOD_RES (2), (3), (35): Xaa is C or S

SEQ ID NO: 65868 - protein, 38 aa, Artificial Sequence; identical to SEQ ID NO: 20233
  Cyclic GFR-binding peptide
  MOD_RES (3), (4), (35), (37): Xaa is C or S

SEQ ID NO: 65869 - protein, 35 aa, Artificial Sequence; identical to SEQ ID NO: 20234
  Cyclic GFR-binding peptide
  MOD_RES (2), (3), (35): Xaa is C or S

SEQ ID NO: 65870 - protein, 24 aa, Artificial Sequence
  Cyclic GFR-binding peptide
EPISVLYLDSSNNVIKFKYENMVV

SEQ ID NO: 65871 - protein, 28 aa, Artificial Sequence
  Cyclic GFR-binding peptide
LEPISVLYLDDMGVPTKFKYEEGMSVAE

SEQ ID NO: 65872 - protein, 32 aa, Artificial Sequence; identical to SEQ ID NO: 20239
  Cyclic GFR-binding peptide
  MOD_RES (32), (32): Xaa is C or S

SEQ ID NO: 65873 - protein, 32 aa, Artificial Sequence; identical to SEQ ID NO: 20241
  Cyclic GFR-binding peptide
  MOD_RES (1), (1): Xaa is C or S

SEQ ID NO: 65874 - protein, 28 aa, Artificial Sequence
  Cyclic GFR-binding peptide
VPTELSPISMLYIDEYDKVVYKQYEEMV

SEQ ID NO: 65875 - protein, 23 aa, Artificial Sequence
  Cyclic GFR-binding peptide
LSPISILYIVGRKPKVYKQYEMI

SEQ ID NO: 65876 - protein, 29 aa, Artificial Sequence
  Cyclic GFR-binding peptide
  MOD_RES (1), (1): Xaa is C or S
XAPTKLEPISVLYLDDSSNVIKFKYENMV

SEQ ID NO: 65877 - protein, 23 aa, Artificial Sequence
  Cyclic GFR-binding peptide
QALEPISILYLVGRKPKVKFKYE

SEQ ID NO: 65878 - protein, 32 aa, Artificial Sequence
  Cyclic GFR-binding peptide
  MOD_RES (5), (6): Xaa is C or S
IPKAXXVPTELEPISMLYLDENEKVVKFKYED

SEQ ID NO: 65879 - protein, 37 aa, Artificial Sequence; identical to SEQ ID NO: 20245
  Cyclic GFR-binding peptide
  MOD_RES (3), (4), (35), (37): Xaa is C or S

SEQ ID NO: 65880 - protein, 23 aa, Artificial Sequence
  Cyclic GFR-binding peptide
ARLNAISILYFDAANNVVLKKYR

SEQ ID NO: 65881 - protein, 28 aa, Artificial Sequence
  Cyclic GFR-binding peptide
  MOD_RES (1), (2): Xaa is C or S
XXVPTKLSPISILYIDKGVVTYYKQYEG

SEQ ID NO: 65882 - protein, 21 aa, Artificial Sequence
  Cyclic GFR-binding peptide
LEPISILYLVGRKPKVKFKYE

SEQ ID NO: 65883 - protein, 30 aa, Artificial Sequence
  Cyclic GFR-binding peptide
  MOD_RES (3), (4): Xaa is C or S
KAXXVPTELEPISMLYLDEYDKVVKFKYEE

SEQ ID NO: 65884 - protein, 27 aa, Artificial Sequence
  Cyclic GFR-binding peptide
PQDLSPISILYIVGRTPKVYKQYEMVV

SEQ ID NO: 65885 - protein, 28 aa, Artificial Sequence
  Cyclic GFR-binding peptide
  MOD_RES (1), (2): Xaa is C or S
XXAPTQLEPISVLYLDDSSNVIKFKYEN

SEQ ID NO: 65886 - protein, 34 aa, Artificial Sequence
  Cyclic GFR-binding peptide
  MOD_RES (6), (7): Xaa is C or S
ASAAPXXVPQALSPISILYIVGRKPKVYKQYEMI

SEQ ID NO: 65887 - protein, 36 aa, Artificial Sequence; identical to SEQ ID NO: 20248
  Cyclic GFR-binding peptide
  MOD_RES (4), (5): Xaa is C or S

SEQ ID NO: 65888 - protein, 35 aa, Artificial Sequence; identical to SEQ ID NO: 20251
  Cyclic GFR-binding peptide
  MOD_RES (3), (4): Xaa is C or S

SEQ ID NO: 65889 - protein, 26 aa, Artificial Sequence
  Cyclic GFR-binding peptide
TKLSPISVLYIDSSNNVIYKQYENMV

SEQ ID NO: 65890 - protein, 24 aa, Artificial Sequence
  Cyclic GFR-binding peptide
TKLEPISVLYLDSSNNVIKFKYEN

SEQ ID NO: 65891 - protein, 36 aa, Artificial Sequence; identical to SEQ ID NO: 20257
  Cyclic GFR-binding peptide
  MOD_RES (1), (2), (34), (36): Xaa is C or S

SEQ ID NO: 65892 - protein, 37 aa, Artificial Sequence; identical to SEQ ID NO: 20263
  Cyclic GFR-binding peptide
  MOD_RES (5), (6): Xaa is C or S

SEQ ID NO: 65893 - protein, 27 aa, Artificial Sequence
  Cyclic GFR-binding peptide
  MOD_RES (1), (1): Xaa is C or S
XVPQDLEPISILYLVGRTPKVKFKYEM

SEQ ID NO: 65894 - protein, 30 aa, Artificial Sequence
  Cyclic GFR-binding peptide
  MOD_RES (1), (2): Xaa is C or S
XXAPTKLEPISVLYLDSSNNVIKFKYENMV

SEQ ID NO: 65895 - protein, 24 aa, Artificial Sequence
  Cyclic GFR-binding peptide
KLSPISVLYIDDMGVPTYKQYEEG

SEQ ID NO: 65896 - protein, 24 aa, Artificial Sequence
  Cyclic GFR-binding peptide
RLSPISILYKDAANNVVLKYHYDM

SEQ ID NO: 65897 - protein, 33 aa, Artificial Sequence
  Cyclic GFR-binding peptide
  MOD_RES (1), (2): Xaa is C or S
XXVPTKLSPISVLYIDDMGVPTYKQYEEGMSVA

SEQ ID NO: 65898 - protein, 28 aa, Artificial Sequence
  Cyclic GFR-binding peptide
  MOD_RES (27), (27): Xaa is C or S
LSPISILYIIGKTPKIYKQYEMIVKSXK

SEQ ID NO: 65899 - protein, 30 aa, Artificial Sequence
  Cyclic GFR-binding peptide
  MOD_RES (29), (29): Xaa is C or S
KLSPISVLYIDSSNNVIYKQYENMVVKAXG

SEQ ID NO: 65900 - protein, 33 aa, Artificial Sequence; identical to SEQ ID NO: 20268
  Cyclic GFR-binding peptide
  MOD_RES (2), (3): Xaa is C or S

SEQ ID NO: 65901 - protein, 25 aa, Artificial Sequence
  Cyclic GFR-binding peptide
TELEPISMLYLDENEKVVKFKYEDM

SEQ ID NO: 65902 - protein, 32 aa, Artificial Sequence; identical to SEQ ID NO: 20271
  Cyclic GFR-binding peptide
  MOD_RES (1), (1): Xaa is C or S

SEQ ID NO: 65903 - protein, 32 aa, Artificial Sequence
  Cyclic GFR-binding peptide
  MOD_RES (4), (5): Xaa is C or S
PKAXXVPTELEPISMLYLDEYDKVVKFKYEEM

SEQ ID NO: 65904 - protein, 24 aa, Artificial Sequence
  Cyclic GFR-binding peptide
PTKLEPISVLYLDDMGVPTKFKYE

SEQ ID NO: 65905 - protein, 30 aa, Artificial Sequence
  Cyclic GFR-binding peptide
  MOD_RES (29), (29): Xaa is C or S
QDLEPISILYLIGKTPKIKFKYEMIVKSXK

SEQ ID NO: 65906 - protein, 25 aa, Artificial Sequence
  Cyclic GFR-binding peptide
ELSPISMLYIDENEKVVYKQYEDMV

SEQ ID NO: 65907 - protein, 22 aa, Artificial Sequence
  Cyclic GFR-binding peptide
RLNAISILYFDAANNVVLKKYR

SEQ ID NO: 65908 - protein, 32 aa, Artificial Sequence; identical to SEQ ID NO: 20277
  Cyclic GFR-binding peptide
  MOD_RES (1), (2): Xaa is C or S

SEQ ID NO: 65909 - protein, 27 aa, Artificial Sequence
  Cyclic GFR-binding peptide
  MOD_RES (1), (2): Xaa is C or S
XXVSQDLEPISILYLIGKTPKIKFKYE

SEQ ID NO: 65910 - protein, 25 aa, Artificial Sequence
  Cyclic GFR-binding peptide
KLEPISVLYLDSSNNVIKFKYENMV

SEQ ID NO: 65911 - protein, 24 aa, Artificial Sequence
  Cyclic GFR-binding peptide
TKLSPISVLYIDSSNNVIYKQYEN

SEQ ID NO: 65912 - protein, 37 aa, Artificial Sequence; identical to SEQ ID NO: 20280
  Cyclic GFR-binding peptide
  MOD_RES (1), (2), (34), (36): Xaa is C or S

SEQ ID NO: 65913 - protein, 36 aa, Artificial Sequence; identical to SEQ ID NO: 20281
  Cyclic GFR-binding peptide
  MOD_RES (6), (6): Xaa is C or S

SEQ ID NO: 65914 - protein, 30 aa, Artificial Sequence
  Cyclic GFR-binding peptide
  MOD_RES (28), (30): Xaa is C or S
ALSPISILYIVGRKPKVYKQYEMIVRSXKX

SEQ ID NO: 65915 - protein, 33 aa, Artificial Sequence; identical to SEQ ID NO: 20283
  Cyclic GFR-binding peptide
  MOD_RES (2), (3): Xaa is C or S

SEQ ID NO: 65916 - protein, 39 aa, Artificial Sequence; identical to SEQ ID NO: 20284
  Cyclic GFR-binding peptide
  MOD_RES (5), (6), (38): Xaa is C or S

SEQ ID NO: 65917 - protein, 38 aa, Artificial Sequence; identical to SEQ ID NO: 20285
  Cyclic GFR-binding peptide
  MOD_RES (4), (5), (38): Xaa is C or S

SEQ ID NO: 65918 - protein, 28 aa, Artificial Sequence
  Cyclic GFR-binding peptide
  MOD_RES (27), (27): Xaa is C or S
SPISMLYIDENEKVVYKQYEDMVVEGXG

SEQ ID NO: 65919 - protein, 29 aa, Artificial Sequence
  Cyclic GFR-binding peptide
ARLSPISILYKDAANNVVLKYHYDMVVEA

SEQ ID NO: 65920 - protein, 24 aa, Artificial Sequence
  Cyclic GFR-binding peptide
EPISILYLVGRKPKVKFKYEMIVR

SEQ ID NO: 65921 - protein, 33 aa, Artificial Sequence
  Cyclic GFR-binding peptide
  MOD_RES (6), (7): Xaa is C or S
AAPASXXVPARLNAISILYFDAANNVVLKKYRD

SEQ ID NO: 65922 - protein, 31 aa, Artificial Sequence
  Cyclic GFR-binding peptide
VPTKLEPISVLYLDDMGVPTKFKYEEGMSVA

SEQ ID NO: 65923 - protein, 33 aa, Artificial Sequence; identical to SEQ ID NO: 20293
  Cyclic GFR-binding peptide
  MOD_RES (32), (32): Xaa is C or S

SEQ ID NO: 65924 - protein, 32 aa, Artificial Sequence; identical to SEQ ID NO: 20294
  Cyclic GFR-binding peptide
  MOD_RES (1), (32): Xaa is C or S

SEQ ID NO: 65925 - protein, 20 aa, Artificial Sequence
  Cyclic GFR-binding peptide
SPISILYIIGKTPKIYKQYE

SEQ ID NO: 65926 - protein, 30 aa, Artificial Sequence
  Cyclic GFR-binding peptide
  MOD_RES (2), (3): Xaa is C or S
AXXVPTELEPISMLYLDENEKVVKFKYEDM

SEQ ID NO: 65927 - protein, 36 aa, Artificial Sequence
  Cyclic GFR-binding peptide
  MOD_RES (6), (7): Xaa is C or S
AVPKAXXAPTKLEPISVLYLDSSNNVIKFKYENMVV

SEQ ID NO: 65928 - protein, 26 aa, Artificial Sequence
  Cyclic GFR-binding peptide
KLEPISVLYLDSSNNVIKFKYENMVV

SEQ ID NO: 65929 - protein, 26 aa, Artificial Sequence
  Cyclic GFR-binding peptide
TKLSPISILYKDKGVVTYLKYHYGMA

SEQ ID NO: 65930 - protein, 32 aa, Artificial Sequence
  Cyclic GFR-binding peptide
  MOD_RES (6), (7): Xaa is C or S
KVGKAXXVPTKLSPISVLYIDDMGVPTYKQYE

SEQ ID NO: 65931 - protein, 26 aa, Artificial Sequence
  Cyclic GFR-binding peptide
TQLSPISVLYIDDSSNVIYKQYENMV

SEQ ID NO: 65932 - protein, 28 aa, Artificial Sequence
  Cyclic GFR-binding peptide
VPTELEPISMLYLDENEKVVKFKYEDMV

SEQ ID NO: 65933 - protein, 25 aa, Artificial Sequence
  Cyclic GFR-binding peptide
EPISILYLVGRKPKVKFKYEMIVRS

SEQ ID NO: 65934 - protein, 38 aa, Artificial Sequence; identical to SEQ ID NO: 20303
  Cyclic GFR-binding peptide
  MOD_RES (5), (6), (38): Xaa is C or S

SEQ ID NO: 65935 - protein, 33 aa, Artificial Sequence
  Cyclic GFR-binding peptide
  MOD_RES (4), (4): Xaa is C or S
KPTXAPTKLEPISVLYLDDSSNVIKFKYENMVV

SEQ ID NO: 65936 - protein, 28 aa, Artificial Sequence
  Cyclic GFR-binding peptide
  MOD_RES (28), (28): Xaa is C or S
LSPISVLYIDSSNNVIYKQYENMVVKAX

SEQ ID NO: 65937 - protein, 25 aa, Artificial Sequence
  Cyclic GFR-binding peptide
PTKLSPISILYKDKGVVTYLKYHYG

SEQ ID NO: 65938 - protein, 24 aa, Artificial Sequence
  Cyclic GFR-binding peptide
TELSPISMLYIDENEKVVYKQYED

SEQ ID NO: 65939 - protein, 34 aa, Artificial Sequence
  Cyclic GFR-binding peptide
  MOD_RES (4), (5): Xaa is C or S
AAPXXVPQALEPISILYLVGRKPKVKFKYEMIVR

SEQ ID NO: 65940 - protein, 28 aa, Artificial Sequence
  Cyclic GFR-binding peptide
APTKLSPISVLYIDDSSNVIYKQYENMV

SEQ ID NO: 65941 - protein, 29 aa, Artificial Sequence
  Cyclic GFR-binding peptide
  MOD_RES (28), (28): Xaa is C or S
LSPISILYKDKGVVTYLKYHYGMAVSEXG

SEQ ID NO: 65942 - protein, 30 aa, Artificial Sequence
  Cyclic GFR-binding peptide
  MOD_RES (1), (2): Xaa is C or S
XXAPTQLEPISVLYLDDSSNVIKFKYENMV

SEQ ID NO: 65943 - protein, 29 aa, Artificial Sequence
  Cyclic GFR-binding peptide
  MOD_RES (2), (3): Xaa is C or S
PXXAPTKLSPISVLYIDDSSNVIYKQYEN

SEQ ID NO: 65944 - protein, 29 aa, Artificial Sequence
  Cyclic GFR-binding peptide
PTQLSPISVLYIDDSSNVIYKQYENMVVR

SEQ ID NO: 65945 - protein, 30 aa, Artificial Sequence
  Cyclic GFR-binding peptide
VPTKLSPISVLYIDDMGVPTYKQYEEGMSV

SEQ ID NO: 65946 - protein, 29 aa, Artificial Sequence
  Cyclic GFR-binding peptide
  MOD_RES (27), (29): Xaa is C or S
SPISVLYIDSSNNVIYKQYENMVVKAXGX

SEQ ID NO: 65947 - protein, 27 aa, Artificial Sequence
  Cyclic GFR-binding peptide
  MOD_RES (1), (1): Xaa is C or S
XVPTKLSPISVLYIDDMGVPTYKQYEE

SEQ ID NO: 65948 - protein, 27 aa, Artificial Sequence
  Cyclic GFR-binding peptide
PTKLSPISVLYIDDMGVPTYKQYEEGM

SEQ ID NO: 65949 - protein, 35 aa, Artificial Sequence; identical to SEQ ID NO: 20320
  Cyclic GFR-binding peptide
  MOD_RES (33), (35): Xaa is C or S

SEQ ID NO: 65950 - protein, 32 aa, Artificial Sequence; identical to SEQ ID NO: 20321
  Cyclic GFR-binding peptide
  MOD_RES (32), (32): Xaa is C or S

SEQ ID NO: 65951 - protein, 38 aa, Artificial Sequence; identical to SEQ ID NO: 20322
  Cyclic GFR-binding peptide
  MOD_RES (5), (6), (38): Xaa is C or S

SEQ ID NO: 65952 - protein, 26 aa, Artificial Sequence
  Cyclic GFR-binding peptide
LSPISILYIVGRTPKVYKQYEMVVKS

SEQ ID NO: 65953 - protein, 26 aa, Artificial Sequence
  Cyclic GFR-binding peptide
  MOD_RES (1), (1): Xaa is C or S
XVPTKLSPISILYIDKGVVTYYKQYE

SEQ ID NO: 65954 - protein, 39 aa, Artificial Sequence; identical to SEQ ID NO: 20328
  Cyclic GFR-binding peptide
  MOD_RES (5), (6), (37), (39): Xaa is C or S

SEQ ID NO: 65955 - protein, 33 aa, Artificial Sequence; identical to SEQ ID NO: 20329
  Cyclic GFR-binding peptide
  MOD_RES (2), (2): Xaa is C or S

SEQ ID NO: 65956 - protein, 32 aa, Artificial Sequence; identical to SEQ ID NO: 20331
  Cyclic GFR-binding peptide
  MOD_RES (32), (32): Xaa is C or S

SEQ ID NO: 65957 - protein, 23 aa, Artificial Sequence
  Cyclic GFR-binding peptide
SPISMLYIDEYDKVVYKQYEEMV

SEQ ID NO: 65958 - protein, 35 aa, Artificial Sequence; identical to SEQ ID NO: 20334
  Cyclic GFR-binding peptide
  MOD_RES (4), (5): Xaa is C or S

SEQ ID NO: 65959 - protein, 37 aa, Artificial Sequence; identical to SEQ ID NO: 20335
  Cyclic GFR-binding peptide
  MOD_RES (3), (4), (36): Xaa is C or S

SEQ ID NO: 65960 - protein, 22 aa, Artificial Sequence
  Cyclic GFR-binding peptide
SPISILYKDKGVVTYLKYHYGM

SEQ ID NO: 65961 - protein, 36 aa, Artificial Sequence; identical to SEQ ID NO: 20338
  Cyclic GFR-binding peptide
  MOD_RES (2), (3), (34), (36): Xaa is C or S

SEQ ID NO: 65962 - protein, 33 aa, Artificial Sequence; identical to SEQ ID NO: 20341
  Cyclic GFR-binding peptide
  MOD_RES (1), (2): Xaa is C or S

SEQ ID NO: 65963 - protein, 36 aa, Artificial Sequence; identical to SEQ ID NO: 20343
  Cyclic GFR-binding peptide
  MOD_RES (3), (4), (35): Xaa is C or S

SEQ ID NO: 65964 - protein, 24 aa, Artificial Sequence
  Cyclic GFR-binding peptide
SPISILYIVGRKPKVYKQYEMIVR

SEQ ID NO: 65965 - protein, 29 aa, Artificial Sequence
  Cyclic GFR-binding peptide
  MOD_RES (28), (28): Xaa is C or S
LEPISVLYLDSSNNVIKFKYENMVVKAXG

SEQ ID NO: 65966 - protein, 29 aa, Artificial Sequence
  Cyclic GFR-binding peptide
  MOD_RES (27), (29): Xaa is C or S
LEPISILYLIGKTPKIKFKYEMIVKSXKX

SEQ ID NO: 65967 - protein, 35 aa, Artificial Sequence; identical to SEQ ID NO: 20347
  Cyclic GFR-binding peptide
  MOD_RES (1), (32), (34): Xaa is C or S

SEQ ID NO: 65968 - protein, 24 aa, Artificial Sequence
  Cyclic GFR-binding peptide
LEPISILYLVGRTPKVKFKYEMVV

SEQ ID NO: 65969 - protein, 30 aa, Artificial Sequence
  Cyclic GFR-binding peptide
  MOD_RES (29), (29): Xaa is C or S
ELSPISMLYIDENEKVVYKQYEDMVVEGXG

SEQ ID NO: 65970 - protein, 36 aa, Artificial Sequence; identical to SEQ ID NO: 20349
  Cyclic GFR-binding peptide
  MOD_RES (4), (5): Xaa is C or S

SEQ ID NO: 65971 - protein, 37 aa, Artificial Sequence; identical to SEQ ID NO: 20350
  Cyclic GFR-binding peptide
  MOD_RES (4), (36): Xaa is C or S

SEQ ID NO: 65972 - protein, 21 aa, Artificial Sequence
  Cyclic GFR-binding peptide
LEPISMLYLDENEKVVKFKYE

SEQ ID NO: 65973 - protein, 33 aa, Artificial Sequence
  Cyclic GFR-binding peptide
  MOD_RES (3), (4): Xaa is C or S
KAXXVPTKLEPISVLYLDDMGVPTKFKYEEGMS

SEQ ID NO: 65974 - protein, 32 aa, Artificial Sequence
  Cyclic GFR-binding peptide
  MOD_RES (7), (7): Xaa is C or S
HVTKPTXAPTKLEPISVLYLDDSSNVIKFKYE

SEQ ID NO: 65975 - protein, 32 aa, Artificial Sequence
  Cyclic GFR-binding peptide
  MOD_RES (6), (7): Xaa is C or S
TVPKPXXAPTQLEPISVLYLDDSSNVIKFKYE

SEQ ID NO: 65976 - protein, 39 aa, Artificial Sequence; identical to SEQ ID NO: 20358
  Cyclic GFR-binding peptide
  MOD_RES (4), (5), (37), (39): Xaa is C or S

SEQ ID NO: 65977 - protein, 31 aa, Artificial Sequence
  Cyclic GFR-binding peptide
  MOD_RES (28), (30): Xaa is C or S
ALSPISILYIVGRKPKVYKQYEMIVRSXKXS

SEQ ID NO: 65978 - protein, 27 aa, Artificial Sequence
  Cyclic GFR-binding peptide
  MOD_RES (1), (1): Xaa is C or S
XVPQALSPISILYIVGRKPKVYKQYEM

SEQ ID NO: 65979 - protein, 39 aa, Artificial Sequence; identical to SEQ ID NO: 20362
  Cyclic GFR-binding peptide
  MOD_RES (5), (6), (38): Xaa is C or S

SEQ ID NO: 65980 - protein, 30 aa, Artificial Sequence
  Cyclic GFR-binding peptide
  MOD_RES (29), (29): Xaa is C or S
KLEPISVLYLDDSSNVIKFKYENMVVRSXG

SEQ ID NO: 65981 - protein, 37 aa, Artificial Sequence; identical to SEQ ID NO: 20365
  Cyclic GFR-binding peptide
  MOD_RES (1), (2), (34), (36): Xaa is C or S

SEQ ID NO: 65982 - protein, 25 aa, Artificial Sequence
  Cyclic GFR-binding peptide
EPISVLYLDDSSNVIKFKYENMVVR

SEQ ID NO: 65983 - protein, 26 aa, Artificial Sequence
  Cyclic GFR-binding peptide
  MOD_RES (1), (1): Xaa is C or S
XAPTQLEPISVLYLDDSSNVIKFKYE

SEQ ID NO: 65984 - protein, 30 aa, Artificial Sequence
  Cyclic GFR-binding peptide
  MOD_RES (29), (29): Xaa is C or S
LSPISVLYIDDMGVPTYKQYEEGMSVAEXG

SEQ ID NO: 65985 - protein, 29 aa, Artificial Sequence
  Cyclic GFR-binding peptide
  MOD_RES (29), (29): Xaa is C or S
RLEPISILYLDAANNVVKFKYEDMVVEAX

SEQ ID NO: 65986 - protein, 32 aa, Artificial Sequence
  Cyclic GFR-binding peptide
  MOD_RES (6), (7): Xaa is C or S
YVPKPXXAPTKLEPISVLYLDDSSNVIKFKYE

SEQ ID NO: 65987 - protein, 22 aa, Artificial Sequence
  Cyclic GFR-binding peptide
EPISVLYLDDSSNVIKFKYENM

SEQ ID NO: 65988 - protein, 39 aa, Artificial Sequence; identical to SEQ ID NO: 20370
  Cyclic GFR-binding peptide
  MOD_RES (6), (7), (39): Xaa is C or S

SEQ ID NO: 65989 - protein, 29 aa, Artificial Sequence
  Cyclic GFR-binding peptide
  MOD_RES (1), (1): Xaa is C or S
XVPTKLSPISVLYIDDMGVPTYKQYEEGM

SEQ ID NO: 65990 - protein, 31 aa, Artificial Sequence; identical to SEQ ID NO: 20372
  Cyclic GFR-binding peptide
  MOD_RES (1), (1): Xaa is C or S

SEQ ID NO: 65991 - protein, 28 aa, Artificial Sequence
  Cyclic GFR-binding peptide
  MOD_RES (27), (27): Xaa is C or S
LEPISILYLIGKTPKIKFKYEMIVKSXK

SEQ ID NO: 65992 - protein, 32 aa, Artificial Sequence
  Cyclic GFR-binding peptide
  MOD_RES (2), (3): Xaa is C or S
PXXAPTKLSPISVLYIDDSSNVIYKQYENMVV

SEQ ID NO: 65993 - protein, 34 aa, Artificial Sequence
  Cyclic GFR-binding peptide
  MOD_RES (5), (6): Xaa is C or S
APASXXVPARLSPISILYKDAANNVVLKYHYDMV

SEQ ID NO: 65994 - protein, 34 aa, Artificial Sequence
  Cyclic GFR-binding peptide
  MOD_RES (4), (5): Xaa is C or S
PKPXXAPTKLSPISVLYIDDSSNVIYKQYENMVV

SEQ ID NO: 65995 - protein, 30 aa, Artificial Sequence
  Cyclic GFR-binding peptide
  MOD_RES (30), (30): Xaa is C or S
KLSPISVLYIDDMGVPTYKQYEEGMSVAEX

SEQ ID NO: 65996 - protein, 34 aa, Artificial Sequence
  Cyclic GFR-binding peptide
  MOD_RES (31), (33): Xaa is C or S
PTKLEPISVLYLDDSSNVIKFKYENMVVRSXGXH

SEQ ID NO: 65997 - protein, 32 aa, Artificial Sequence
  Cyclic GFR-binding peptide
  MOD_RES (1), (1): Xaa is C or S
XVPTKLSPISVLYIDDMGVPTYKQYEEGMSVA

SEQ ID NO: 65998 - protein, 40 aa, Artificial Sequence; identical to SEQ ID NO: 20377
  Cyclic GFR-binding peptide
  MOD_RES (5), (6), (38), (40): Xaa is C or S

SEQ ID NO: 65999 - protein, 35 aa, Artificial Sequence; identical to SEQ ID NO: 20379
  Cyclic GFR-binding peptide
  MOD_RES (1), (33), (35): Xaa is C or S

SEQ ID NO: 66000 - protein, 30 aa, Artificial Sequence
  Cyclic GFR-binding peptide
  MOD_RES (4), (5): Xaa is C or S
PKAXXVPTELEPISMLYLDEYDKVVKFKYE

SEQ ID NO: 66001 - protein, 33 aa, Artificial Sequence
  Cyclic GFR-binding peptide
  MOD_RES (5), (6): Xaa is C or S
IPKAXXVPTELEPISMLYLDEYDKVVKFKYEEM

SEQ ID NO: 66002 - protein, 29 aa, Artificial Sequence
  Cyclic GFR-binding peptide
  MOD_RES (29), (29): Xaa is C or S
LEPISVLYLDDMGVPTKFKYEEGMSVAEX

SEQ ID NO: 66003 - protein, 32 aa, Artificial Sequence; identical to SEQ ID NO: 20383
  Cyclic GFR-binding peptide
  MOD_RES (1), (2): Xaa is C or S

SEQ ID NO: 66004 - protein, 35 aa, Artificial Sequence; identical to SEQ ID NO: 20384
  Cyclic GFR-binding peptide
  MOD_RES (32), (34): Xaa is C or S

SEQ ID NO: 66005 - protein, 20 aa, Artificial Sequence
  Cyclic GFR-binding peptide
NAISILYFDAANNVVLKKYR

SEQ ID NO: 66006 - protein, 39 aa, Artificial Sequence; identical to SEQ ID NO: 20390
  Cyclic GFR-binding peptide
  MOD_RES (3), (4), (36), (38): Xaa is C or S

SEQ ID NO: 66007 - protein, 26 aa, Artificial Sequence
  Cyclic GFR-binding peptide
PQALSPISILYIVGRKPKVYKQYEMI

SEQ ID NO: 66008 - protein, 39 aa, Artificial Sequence; identical to SEQ ID NO: 20393
  Cyclic GFR-binding peptide
  MOD_RES (6), (7), (39): Xaa is C or S

SEQ ID NO: 66009 - protein, 26 aa, Artificial Sequence
  Cyclic GFR-binding peptide
VPTKLSPISVLYIDDMGVPTYKQYEE

SEQ ID NO: 66010 - protein, 31 aa, Artificial Sequence
  Cyclic GFR-binding peptide
  MOD_RES (1), (2): Xaa is C or S
XXVPQALSPISILYIVGRKPKVYKQYEMIVR

SEQ ID NO: 66011 - protein, 32 aa, Artificial Sequence; identical to SEQ ID NO: 20396
  Cyclic GFR-binding peptide
  MOD_RES (1), (2): Xaa is C or S

SEQ ID NO: 66012 - protein, 27 aa, Artificial Sequence
  Cyclic GFR-binding peptide
LSPISILYKDAANNVVLKYHYDMVVEA

SEQ ID NO: 66013 - protein, 39 aa, Artificial Sequence; identical to SEQ ID NO: 20399
  Cyclic GFR-binding peptide
  MOD_RES (4), (36), (38): Xaa is C or S

SEQ ID NO: 66014 - protein, 30 aa, Artificial Sequence
  Cyclic GFR-binding peptide
  MOD_RES (1), (1): Xaa is C or S
XVPARLSPISILYKDAANNVVLKYHYDMVV

SEQ ID NO: 66015 - protein, 28 aa, Artificial Sequence
  Cyclic GFR-binding peptide
TKLNAISILYFDKGVVTYLKKYRGMAVS

SEQ ID NO: 66016 - protein, 31 aa, Artificial Sequence; identical to SEQ ID NO: 20404
  Cyclic GFR-binding peptide
  MOD_RES (31), (31): Xaa is C or S

SEQ ID NO: 66017 - protein, 36 aa, Artificial Sequence; identical to SEQ ID NO: 20406
  Cyclic GFR-binding peptide
  MOD_RES (1), (2), (34), (36): Xaa is C or S

SEQ ID NO: 66018 - protein, 34 aa, Artificial Sequence
  Cyclic GFR-binding peptide
  MOD_RES (5), (6): Xaa is C or S
VPKAXXAPTKLSPISVLYIDSSNNVIYKQYENMV

SEQ ID NO: 66019 - protein, 39 aa, Artificial Sequence; identical to SEQ ID NO: 20410
  Cyclic GFR-binding peptide
  MOD_RES (4), (5), (38): Xaa is C or S

SEQ ID NO: 66020 - protein, 32 aa, Artificial Sequence
  Cyclic GFR-binding peptide
  MOD_RES (3), (4): Xaa is C or S
KAXXVPTKLNAISILYFDKGVVTYLKKYRGMA

SEQ ID NO: 66021 - protein, 27 aa, Artificial Sequence
  Cyclic GFR-binding peptide
TKLEPISVLYLDDMGVPTKFKYEEGMS

SEQ ID NO: 66022 - protein, 38 aa, Artificial Sequence; identical to SEQ ID NO: 20420
  Cyclic GFR-binding peptide
  MOD_RES (3), (4), (36), (38): Xaa is C or S

SEQ ID NO: 66023 - protein, 33 aa, Artificial Sequence; identical to SEQ ID NO: 20424
  Cyclic GFR-binding peptide
  MOD_RES (1), (2): Xaa is C or S

SEQ ID NO: 66024 - protein, 38 aa, Artificial Sequence; identical to SEQ ID NO: 20425
  Cyclic GFR-binding peptide
  MOD_RES (2), (3), (35), (37): Xaa is C or S

SEQ ID NO: 66025 - protein, 37 aa, Artificial Sequence; identical to SEQ ID NO: 20426
  Cyclic GFR-binding peptide
  MOD_RES (1), (2), (34), (36): Xaa is C or S

SEQ ID NO: 66026 - protein, 38 aa, Artificial Sequence; identical to SEQ ID NO: 20427
  Cyclic GFR-binding peptide
  MOD_RES (1), (2), (35), (37): Xaa is C or S

SEQ ID NO: 66027 - protein, 34 aa, Artificial Sequence; identical to SEQ ID NO: 20430
  Cyclic GFR-binding peptide
  MOD_RES (32), (34): Xaa is C or S

SEQ ID NO: 66028 - protein, 34 aa, Artificial Sequence; identical to SEQ ID NO: 20431
  Cyclic GFR-binding peptide
  MOD_RES (3), (4): Xaa is C or S

SEQ ID NO: 66029 - protein, 30 aa, Artificial Sequence; identical to SEQ ID NO: 20432
  Cyclic GFR-binding peptide

SEQ ID NO: 66030 - protein, 28 aa, Artificial Sequence
  Cyclic GFR-binding peptide
RLSPISILYKDAANNVVLKYHYDMVVEA

SEQ ID NO: 66031 - protein, 40 aa, Artificial Sequence; identical to SEQ ID NO: 20433
  Cyclic GFR-binding peptide
  MOD_RES (6), (7), (39): Xaa is C or S

SEQ ID NO: 66032 - protein, 34 aa, Artificial Sequence; identical to SEQ ID NO: 20435
  Cyclic GFR-binding peptide
  MOD_RES (3), (3): Xaa is C or S

SEQ ID NO: 66033 - protein, 25 aa, Artificial Sequence
  Cyclic GFR-binding peptide
LSPISILYKDKGVVTYLKYHYGMAV

SEQ ID NO: 66034 - protein, 30 aa, Artificial Sequence
  Cyclic GFR-binding peptide
  MOD_RES (29), (29): Xaa is C or S
QDLSPISILYIIGKTPKIYKQYEMIVKSXK

SEQ ID NO: 66035 - protein, 27 aa, Artificial Sequence
  Cyclic GFR-binding peptide
  MOD_RES (1), (2): Xaa is C or S
XXVPTKLSPISILYIDKGVVTYYKQYE

SEQ ID NO: 66036 - protein, 37 aa, Artificial Sequence; identical to SEQ ID NO: 20440
  Cyclic GFR-binding peptide
  MOD_RES (6), (7): Xaa is C or S

SEQ ID NO: 66037 - protein, 28 aa, Artificial Sequence
  Cyclic GFR-binding peptide
  MOD_RES (28), (28): Xaa is C or S
LEPISVLYLDSSNNVIKFKYENMVVKAX

SEQ ID NO: 66038 - protein, 37 aa, Artificial Sequence; identical to SEQ ID NO: 20441
  Cyclic GFR-binding peptide
  MOD_RES (3), (4), (36): Xaa is C or S

SEQ ID NO: 66039 - protein, 39 aa, Artificial Sequence; identical to SEQ ID NO: 20443
  Cyclic GFR-binding peptide
  MOD_RES (1), (33), (34): Xaa is C or S

SEQ ID NO: 66040 - protein, 30 aa, Artificial Sequence
  Cyclic GFR-binding peptide
  MOD_RES (26), (27): Xaa is C or S
PIKGYYTVVGKDFYLINIPSLKTPVXXAKS

SEQ ID NO: 66041 - protein, 27 aa, Artificial Sequence
  Cyclic GFR-binding peptide
  MOD_RES (26), (27): Xaa is C or S
PIKGYIVNNSSDFYLVNIPSLKTPAXX

SEQ ID NO: 66042 - protein, 34 aa, Artificial Sequence
  Cyclic GFR-binding peptide
  MOD_RES (30), (31): Xaa is C or S
VVMDPIKGYVVNNASDFYLINIPSLRTPVXXTPP

SEQ ID NO: 66043 - protein, 40 aa, Artificial Sequence; identical to SEQ ID NO: 20454
  Cyclic GFR-binding peptide
  MOD_RES (1), (3), (35), (36): Xaa is C or S

SEQ ID NO: 66044 - protein, 37 aa, Artificial Sequence; identical to SEQ ID NO: 20455
  Cyclic GFR-binding peptide
  MOD_RES (2), (34): Xaa is C or S

SEQ ID NO: 66045 - protein, 32 aa, Artificial Sequence
  Cyclic GFR-binding peptide
  MOD_RES (2), (4): Xaa is C or S
HXGXARVVMNPIKGYIVNSSDDFYLVNIPSLQ

SEQ ID NO: 66046 - protein, 35 aa, Artificial Sequence; identical to SEQ ID NO: 20460
  Cyclic GFR-binding peptide
  MOD_RES (32), (33): Xaa is C or S

SEQ ID NO: 66047 - protein, 23 aa, Artificial Sequence
  Cyclic GFR-binding peptide
MDPIKGYVVKENEDFYLMNIPSL

SEQ ID NO: 66048 - protein, 29 aa, Artificial Sequence
  Cyclic GFR-binding peptide
EVIMPIKGYLLVRGNDFYLMNIPSTKVPA

SEQ ID NO: 66049 - protein, 34 aa, Artificial Sequence
  Cyclic GFR-binding peptide
  MOD_RES (30), (31): Xaa is C or S
VAMGPIKGYYTVVGKDFYLINIPSLKTPVXXAKS

SEQ ID NO: 66050 - protein, 22 aa, Artificial Sequence
  Cyclic GFR-binding peptide
DPIKGYVVNNAADFYLINIPSL

SEQ ID NO: 66051 - protein, 39 aa, Artificial Sequence; identical to SEQ ID NO: 20464
  Cyclic GFR-binding peptide
  MOD_RES (2), (4), (37), (38): Xaa is C or S

SEQ ID NO: 66052 - protein, 36 aa, Artificial Sequence; identical to SEQ ID NO: 20466
  Cyclic GFR-binding peptide
  MOD_RES (32), (33): Xaa is C or S

SEQ ID NO: 66053 - protein, 30 aa, Artificial Sequence
  Cyclic GFR-binding peptide
GEVVMEPIKGYVVKDYEDFYLMNIPSLETP

SEQ ID NO: 66054 - protein, 33 aa, Artificial Sequence; identical to SEQ ID NO: 20470
  Cyclic GFR-binding peptide
  MOD_RES (32), (33): Xaa is C or S

SEQ ID NO: 66055 - protein, 27 aa, Artificial Sequence
  Cyclic GFR-binding peptide
MDPIKGYVVNNASDFYLINIPSLRTPV

SEQ ID NO: 66056 - protein, 31 aa, Artificial Sequence
  Cyclic GFR-binding peptide
  MOD_RES (30), (31): Xaa is C or S
VVMNPIKGYIVNSSDDFYLVNIPSLKTPAXX

SEQ ID NO: 66057 - protein, 35 aa, Artificial Sequence; identical to SEQ ID NO: 20471
  Cyclic GFR-binding peptide
  MOD_RES (1), (3), (35): Xaa is C or S

SEQ ID NO: 66058 - protein, 39 aa, Artificial Sequence; identical to SEQ ID NO: 20472
  Cyclic GFR-binding peptide
  MOD_RES (2), (4), (36), (37): Xaa is C or S

SEQ ID NO: 66059 - protein, 35 aa, Artificial Sequence; identical to SEQ ID NO: 20473
  Cyclic GFR-binding peptide
  MOD_RES (1), (34), (35): Xaa is C or S

SEQ ID NO: 66060 - protein, 30 aa, Artificial Sequence
  Cyclic GFR-binding peptide
  MOD_RES (1), (3): Xaa is C or S
XGXESVAMGPIKGYYTVVGKDFYLINIPSL

SEQ ID NO: 66061 - protein, 27 aa, Artificial Sequence
  Cyclic GFR-binding peptide
  MOD_RES (26), (27): Xaa is C or S
PIKGYYTVVGKDFYLINIPSLKTPVXX

SEQ ID NO: 66062 - protein, 38 aa, Artificial Sequence; identical to SEQ ID NO: 20474
  Cyclic GFR-binding peptide
  MOD_RES (2), (33), (34): Xaa is C or S

SEQ ID NO: 66063 - protein, 28 aa, Artificial Sequence
  Cyclic GFR-binding peptide
  MOD_RES (27), (28): Xaa is C or S
DPIKGYVVKENEDFYLMNIPSLETPVXX

SEQ ID NO: 66064 - protein, 31 aa, Artificial Sequence
  Cyclic GFR-binding peptide
  MOD_RES (2), (4): Xaa is C or S
RXGXEAVSMGEPIKGYTPVGMDDFYLVNIPS

SEQ ID NO: 66065 - protein, 29 aa, Artificial Sequence
  Cyclic GFR-binding peptide
  MOD_RES (1), (1): Xaa is C or S
XEEVIMPIKGYLLVRGNDFYLMNIPSTKV

SEQ ID NO: 66066 - protein, 22 aa, Artificial Sequence
  Cyclic GFR-binding peptide
MEPIKGYVVKDYEDFYLMNIPS

SEQ ID NO: 66067 - protein, 31 aa, Artificial Sequence
  Cyclic GFR-binding peptide
  MOD_RES (28), (29): Xaa is C or S
MGPIKGYYTVVGKDFYLINIPSLKTPVXXAK

SEQ ID NO: 66068 - protein, 25 aa, Artificial Sequence
  Cyclic GFR-binding peptide
EVVMDPIKGYVVNNAADFYLINIPS

SEQ ID NO: 66069 - protein, 39 aa, Artificial Sequence; identical to SEQ ID NO: 20480
  Cyclic GFR-binding peptide
  MOD_RES (1), (33), (34): Xaa is C or S

SEQ ID NO: 66070 - protein, 27 aa, Artificial Sequence
  Cyclic GFR-binding peptide
MDPIKGYVVKENEDFYLMNIPSLETPV

SEQ ID NO: 66071 - protein, 30 aa, Artificial Sequence
  Cyclic GFR-binding peptide
  MOD_RES (2), (2): Xaa is C or S
GXSRVVMNPIKGYIVNSSDDFYLVNIPSLK

SEQ ID NO: 66072 - protein, 32 aa, Artificial Sequence
  Cyclic GFR-binding peptide
  MOD_RES (2), (2): Xaa is C or S
GXESVAMGPIKGYYTVVGKDFYLINIPSLKTP

SEQ ID NO: 66073 - protein, 30 aa, Artificial Sequence
  Cyclic GFR-binding peptide
  MOD_RES (28), (29): Xaa is C or S
GEPIKGYTPVGMDDFYLVNIPSLKTPVXXA

SEQ ID NO: 66074 - protein, 29 aa, Artificial Sequence
  Cyclic GFR-binding peptide
  MOD_RES (1), (3): Xaa is C or S
XGXSEVVMDPIKGYVVNNASDFYLINIPS

SEQ ID NO: 66075 - protein, 37 aa, Artificial Sequence; identical to SEQ ID NO: 20491
  Cyclic GFR-binding peptide
  MOD_RES (31), (32): Xaa is C or S

SEQ ID NO: 66076 - protein, 31 aa, Artificial Sequence
  Cyclic GFR-binding peptide
  MOD_RES (27), (28): Xaa is C or S
GPIKGYYTVVGKDFYLINIPSLKTPVXXAKS

SEQ ID NO: 66077 - protein, 40 aa, Artificial Sequence; identical to SEQ ID NO: 20492
  Cyclic GFR-binding peptide
  MOD_RES (2), (34), (35): Xaa is C or S

SEQ ID NO: 66078 - protein, 26 aa, Artificial Sequence
  Cyclic GFR-binding peptide
MDPIKGYVVKENEDFYLMNIPSLETP

SEQ ID NO: 66079 - protein, 34 aa, Artificial Sequence
  Cyclic GFR-binding peptide
  MOD_RES (28), (29): Xaa is C or S
MNPIKGYIVNSSDDFYLVNIPSLKTPAXXPKPVH

SEQ ID NO: 66080 - protein, 24 aa, Artificial Sequence
  Cyclic GFR-binding peptide
VVMDPIKGYVVKENEDFYLMNIPS

SEQ ID NO: 66081 - protein, 36 aa, Artificial Sequence; identical to SEQ ID NO: 20498
  Cyclic GFR-binding peptide
  MOD_RES (31), (32): Xaa is C or S

SEQ ID NO: 66082 - protein, 28 aa, Artificial Sequence
  Cyclic GFR-binding peptide
  MOD_RES (26), (27): Xaa is C or S
PIKGYVVNNASDFYLINIPSLRTPVXXT

SEQ ID NO: 66083 - protein, 38 aa, Artificial Sequence; identical to SEQ ID NO: 20499
  Cyclic GFR-binding peptide
  MOD_RES (1), (3), (35), (36): Xaa is C or S

SEQ ID NO: 66084 - protein, 26 aa, Artificial Sequence
  Cyclic GFR-binding peptide
VMDPIKGYVVKENEDFYLMNIPSLET

SEQ ID NO: 66085 - protein, 27 aa, Artificial Sequence
  Cyclic GFR-binding peptide
SVAMGPIKGYYTVVGKDFYLINIPSLK

SEQ ID NO: 66086 - protein, 28 aa, Artificial Sequence
  Cyclic GFR-binding peptide
  MOD_RES (27), (28): Xaa is C or S
NPIKGYIVNSSDDFYLVNIPSLKTPAXX

SEQ ID NO: 66087 - protein, 30 aa, Artificial Sequence
  Cyclic GFR-binding peptide
  MOD_RES (30), (30): Xaa is C or S
VAMGPIKGYYTVVGKDFYLINIPSLKTPVX

SEQ ID NO: 66088 - protein, 40 aa, Artificial Sequence; identical to SEQ ID NO: 20505
  Cyclic GFR-binding peptide
  MOD_RES (2), (34), (35): Xaa is C or S

SEQ ID NO: 66089 - protein, 27 aa, Artificial Sequence
  Cyclic GFR-binding peptide
VMNPIKGYIVNSSDDFYLVNIPSLKTP

SEQ ID NO: 66090 - protein, 27 aa, Artificial Sequence
  Cyclic GFR-binding peptide
VMNPIKGYIVNNSSDFYLVNIPSLKTP

SEQ ID NO: 66091 - protein, 37 aa, Artificial Sequence; identical to SEQ ID NO: 20509
  Cyclic GFR-binding peptide
  MOD_RES (2), (34), (35): Xaa is C or S

SEQ ID NO: 66092 - protein, 25 aa, Artificial Sequence
  Cyclic GFR-binding peptide
VVMEPIKGYVVKDYEDFYLMNIPSL

SEQ ID NO: 66093 - protein, 24 aa, Artificial Sequence
  Cyclic GFR-binding peptide
VVMDPIKGYVVNNAADFYLINIPS

SEQ ID NO: 66094 - protein, 40 aa, Artificial Sequence; identical to SEQ ID NO: 20511
  Cyclic GFR-binding peptide
  MOD_RES (1), (3), (35), (36): Xaa is C or S

SEQ ID NO: 66095 - protein, 30 aa, Artificial Sequence
  Cyclic GFR-binding peptide
  MOD_RES (2), (2): Xaa is C or S
GXGEVVMEPIKGYVVKDYEDFYLMNIPSLE

SEQ ID NO: 66096 - protein, 32 aa, Artificial Sequence
  Cyclic GFR-binding peptide
  MOD_RES (32), (32): Xaa is C or S
AVSMGEPIKGYTPVGMDDFYLVNIPSLKTPVX

SEQ ID NO: 66097 - protein, 20 aa, Artificial Sequence
  Cyclic GFR-binding peptide
PIKGYVVNNASDFYLINIPS

SEQ ID NO: 66098 - protein, 29 aa, Artificial Sequence
  Cyclic GFR-binding peptide
  MOD_RES (29), (29): Xaa is C or S
VIMPIKGYLLVRGNDFYLMNIPSTKVPAX

SEQ ID NO: 66099 - protein, 28 aa, Artificial Sequence
  Cyclic GFR-binding peptide
  MOD_RES (28), (28): Xaa is C or S
MNPIKGYIVNNSSDFYLVNIPSLKTPAX

SEQ ID NO: 66100 - protein, 41 aa, Artificial Sequence; identical to SEQ ID NO: 20516
  Cyclic GFR-binding peptide
  MOD_RES (2), (4), (36), (37): Xaa is C or S

SEQ ID NO: 66101 - protein, 29 aa, Artificial Sequence
  Cyclic GFR-binding peptide
  MOD_RES (27), (27): Xaa is C or S
NPIKGYIVNSSDDFYLVNIPSLKTPAXTP

SEQ ID NO: 66102 - protein, 27 aa, Artificial Sequence
  Cyclic GFR-binding peptide
AMGPIKGYYTVVGKDFYLINIPSLKTP

SEQ ID NO: 66103 - protein, 34 aa, Artificial Sequence; identical to SEQ ID NO: 20517
  Cyclic GFR-binding peptide
  MOD_RES (31), (32): Xaa is C or S

SEQ ID NO: 66104 - protein, 35 aa, Artificial Sequence; identical to SEQ ID NO: 20519
  Cyclic GFR-binding peptide
  MOD_RES (31), (32): Xaa is C or S

SEQ ID NO: 66105 - protein, 25 aa, Artificial Sequence
  Cyclic GFR-binding peptide
EVVMEPIKGYVVKDYEDFYLMNIPS

SEQ ID NO: 66106 - protein, 21 aa, Artificial Sequence
  Cyclic GFR-binding peptide
EPIKGYVVKDYEDFYLMNIPS

SEQ ID NO: 66107 - protein, 38 aa, Artificial Sequence; identical to SEQ ID NO: 20533
  Cyclic GFR-binding peptide
  MOD_RES (1), (3), (35), (36): Xaa is C or S

SEQ ID NO: 66108 - protein, 34 aa, Artificial Sequence; identical to SEQ ID NO: 20535
  Cyclic GFR-binding peptide
  MOD_RES (2), (34): Xaa is C or S

SEQ ID NO: 66109 - protein, 25 aa, Artificial Sequence
  Cyclic GFR-binding peptide
SMGEPIKGYTPVGMDDFYLVNIPSL

SEQ ID NO: 66110 - protein, 31 aa, Artificial Sequence; identical to SEQ ID NO: 20537
  Cyclic GFR-binding peptide

SEQ ID NO: 66111 - protein, 40 aa, Artificial Sequence; identical to SEQ ID NO: 20538
  Cyclic GFR-binding peptide
  MOD_RES (2), (4), (36), (37): Xaa is C or S

SEQ ID NO: 66112 - protein, 38 aa, Artificial Sequence; identical to SEQ ID NO: 20539
  Cyclic GFR-binding peptide
  MOD_RES (2), (4), (36), (37): Xaa is C or S

SEQ ID NO: 66113 - protein, 28 aa, Artificial Sequence
  Cyclic GFR-binding peptide
  MOD_RES (27), (28): Xaa is C or S
DPIKGYVVNNAADFYLINIPSLRAPVXX

SEQ ID NO: 66114 - protein, 37 aa, Artificial Sequence; identical to SEQ ID NO: 20544
  Cyclic GFR-binding peptide
  MOD_RES (31), (32): Xaa is C or S

SEQ ID NO: 66115 - protein, 33 aa, Artificial Sequence
  Cyclic GFR-binding peptide
  MOD_RES (29), (30): Xaa is C or S
VMDPIKGYVVNNASDFYLINIPSLRTPVXXTPP

SEQ ID NO: 66116 - protein, 33 aa, Artificial Sequence
  Cyclic GFR-binding peptide
  MOD_RES (29), (30): Xaa is C or S
VMNPIKGYIVNSSDDFYLVNIPSLQTPAXXPKP

SEQ ID NO: 66117 - protein, 32 aa, Artificial Sequence; identical to SEQ ID NO: 20546
  Cyclic GFR-binding peptide
  MOD_RES (32), (32): Xaa is C or S

SEQ ID NO: 66118 - protein, 35 aa, Artificial Sequence; identical to SEQ ID NO: 20547
  Cyclic GFR-binding peptide
  MOD_RES (1), (3), (35): Xaa is C or S

SEQ ID NO: 66119 - protein, 24 aa, Artificial Sequence
  Cyclic GFR-binding peptide
PIKGYVVKDYEDFYLMNIPSLETP

SEQ ID NO: 66120 - protein, 36 aa, Artificial Sequence; identical to SEQ ID NO: 20551
  Cyclic GFR-binding peptide
  MOD_RES (31), (31): Xaa is C or S

SEQ ID NO: 66121 - protein, 35 aa, Artificial Sequence
  Cyclic GFR-binding peptide
  MOD_RES (30), (31): Xaa is C or S
VVMNPIKGYIVNSSDDFYLVNIPSLQTPAXXPKPV

SEQ ID NO: 66122 - protein, 39 aa, Artificial Sequence; identical to SEQ ID NO: 20552
  Cyclic GFR-binding peptide
  MOD_RES (1), (33), (34): Xaa is C or S

SEQ ID NO: 66123 - protein, 40 aa, Artificial Sequence; identical to SEQ ID NO: 20553
  Cyclic GFR-binding peptide
  MOD_RES (1), (3), (34), (35): Xaa is C or S

SEQ ID NO: 66124 - protein, 38 aa, Artificial Sequence; identical to SEQ ID NO: 20554
  Cyclic GFR-binding peptide
  MOD_RES (2), (34), (35): Xaa is C or S

SEQ ID NO: 66125 - protein, 26 aa, Artificial Sequence
  Cyclic GFR-binding peptide
  MOD_RES (26), (26): Xaa is C or S
PIKGYVVKENEDFYLMNIPSLETPVX

SEQ ID NO: 66126 - protein, 36 aa, Artificial Sequence; identical to SEQ ID NO: 20555
  Cyclic GFR-binding peptide
  MOD_RES (1), (33), (34): Xaa is C or S

SEQ ID NO: 66127 - protein, 36 aa, Artificial Sequence; identical to SEQ ID NO: 20557
  Cyclic GFR-binding peptide
  MOD_RES (2), (33), (34): Xaa is C or S

SEQ ID NO: 66128 - protein, 31 aa, Artificial Sequence
  Cyclic GFR-binding peptide
  MOD_RES (27), (27): Xaa is C or S
NPIKGYIVNSSDDFYLVNIPSLKTPAXTPKT

SEQ ID NO: 66129 - protein, 29 aa, Artificial Sequence
  Cyclic GFR-binding peptide
SMGEPIKGYTPVGMDDFYLVNIPSLKTPV

SEQ ID NO: 66130 - protein, 28 aa, Artificial Sequence
  Cyclic GFR-binding peptide
ARVVMNPIKGYIVNSSDDFYLVNIPSLQ

SEQ ID NO: 66131 - protein, 33 aa, Artificial Sequence
  Cyclic GFR-binding peptide
  MOD_RES (27), (28): Xaa is C or S
DPIKGYVVNNAADFYLINIPSLRAPVXXSAPAA

SEQ ID NO: 66132 - protein, 32 aa, Artificial Sequence
  Cyclic GFR-binding peptide
  MOD_RES (30), (31): Xaa is C or S
VVMNPIKGYIVNSSDDFYLVNIPSLKTPAXXP

SEQ ID NO: 66133 - protein, 29 aa, Artificial Sequence
  Cyclic GFR-binding peptide
  MOD_RES (2), (2): Xaa is C or S
GXEAVSMGEPIKGYTPVGMDDFYLVNIPS

SEQ ID NO: 66134 - protein, 32 aa, Artificial Sequence
  Cyclic GFR-binding peptide
  MOD_RES (2), (4): Xaa is C or S
RXGXGEVVMDPIKGYVVKENEDFYLMNIPSLE

SEQ ID NO: 66135 - protein, 36 aa, Artificial Sequence
  Cyclic GFR-binding peptide
  MOD_RES (30), (31): Xaa is C or S
EVIMPIKGYLLVRGNDFYLMNIPSTKVPAXXTSPVR

SEQ ID NO: 66136 - protein, 34 aa, Artificial Sequence
  Cyclic GFR-binding peptide
  MOD_RES (29), (30): Xaa is C or S
VMDPIKGYVVKENEDFYLMNIPSLETPVXXAKPI

SEQ ID NO: 66137 - protein, 28 aa, Artificial Sequence
  Cyclic GFR-binding peptide
  MOD_RES (28), (28): Xaa is C or S
MNPIKGYIVNSSDDFYLVNIPSLQTPAX

SEQ ID NO: 66138 - protein, 39 aa, Artificial Sequence; identical to SEQ ID NO: 20571
  Cyclic GFR-binding peptide
  MOD_RES (1), (3), (34), (35): Xaa is C or S

SEQ ID NO: 66139 - protein, 42 aa, Artificial Sequence; identical to SEQ ID NO: 20574
  Cyclic GFR-binding peptide
  MOD_RES (2), (4), (36), (37): Xaa is C or S

SEQ ID NO: 66140 - protein, 36 aa, Artificial Sequence; identical to SEQ ID NO: 20576
  Cyclic GFR-binding peptide
  MOD_RES (2), (34), (35): Xaa is C or S

SEQ ID NO: 66141 - protein, 38 aa, Artificial Sequence; identical to SEQ ID NO: 20577
  Cyclic GFR-binding peptide
  MOD_RES (32), (33): Xaa is C or S

SEQ ID NO: 66142 - protein, 34 aa, Artificial Sequence
  Cyclic GFR-binding peptide
  MOD_RES (30), (31): Xaa is C or S
VVMDPIKGYVVNNAADFYLINIPSLRAPVXXSAP

SEQ ID NO: 66143 - protein, 27 aa, Artificial Sequence
  Cyclic GFR-binding peptide
VMEPIKGYVVKDYEDFYLMNIPSLETP

SEQ ID NO: 66144 - protein, 29 aa, Artificial Sequence
  Cyclic GFR-binding peptide
  MOD_RES (1), (3): Xaa is C or S
XGXARVVMNPIKGYIVNSSDDFYLVNIPS

SEQ ID NO: 66145 - protein, 35 aa, Artificial Sequence
  Cyclic GFR-binding peptide
  MOD_RES (30), (31): Xaa is C or S
SMGEPIKGYTPVGMDDFYLVNIPSLKTPVXXAKGV

SEQ ID NO: 66146 - protein, 31 aa, Artificial Sequence
  Cyclic GFR-binding peptide
EAVSMGEPIKGYTPVGMDDFYLVNIPSLKTP

SEQ ID NO: 66147 - protein, 31 aa, Artificial Sequence; identical to SEQ ID NO: 20584
  Cyclic GFR-binding peptide

SEQ ID NO: 66148 - protein, 37 aa, Artificial Sequence; identical to SEQ ID NO: 20587
  Cyclic GFR-binding peptide
  MOD_RES (1), (33), (34): Xaa is C or S

SEQ ID NO: 66149 - protein, 37 aa, Artificial Sequence; identical to SEQ ID NO: 20588
  Cyclic GFR-binding peptide
  MOD_RES (31), (32): Xaa is C or S

SEQ ID NO: 66150 - protein, 34 aa, Artificial Sequence; identical to SEQ ID NO: 20589
  Cyclic GFR-binding peptide
  MOD_RES (1), (32), (33): Xaa is C or S

SEQ ID NO: 66151 - protein, 31 aa, Artificial Sequence; identical to SEQ ID NO: 20591
  Cyclic GFR-binding peptide
  MOD_RES (31), (31): Xaa is C or S

SEQ ID NO: 66152 - protein, 28 aa, Artificial Sequence
  Cyclic GFR-binding peptide
  MOD_RES (1), (1): Xaa is C or S
XEAVSMGEPIKGYTPVGMDDFYLVNIPS

SEQ ID NO: 66153 - protein, 41 aa, Artificial Sequence; identical to SEQ ID NO: 20592
  Cyclic GFR-binding peptide
  MOD_RES (2), (35), (36): Xaa is C or S

SEQ ID NO: 66154 - protein, 33 aa, Artificial Sequence
  Cyclic GFR-binding peptide
  MOD_RES (27), (28): Xaa is C or S
DPIKGYVVKENEDFYLMNIPSLETPVXXAKPIK

SEQ ID NO: 66155 - protein, 38 aa, Artificial Sequence; identical to SEQ ID NO: 20597
  Cyclic GFR-binding peptide
  MOD_RES (1), (3), (36), (37): Xaa is C or S

SEQ ID NO: 66156 - protein, 34 aa, Artificial Sequence; identical to SEQ ID NO: 20599
  Cyclic GFR-binding peptide
  MOD_RES (31), (32): Xaa is C or S

SEQ ID NO: 66157 - protein, 26 aa, Artificial Sequence
  Cyclic GFR-binding peptide
EVVMDPIKGYVVNNAADFYLINIPSL

SEQ ID NO: 66158 - protein, 32 aa, Artificial Sequence; identical to SEQ ID NO: 20601
  Cyclic GFR-binding peptide
  MOD_RES (31), (32): Xaa is C or S

SEQ ID NO: 66159 - protein, 29 aa, Artificial Sequence
  Cyclic GFR-binding peptide
  MOD_RES (28), (29): Xaa is C or S
MEPIKGYVVKDYEDFYLMNIPSLETPVXX

SEQ ID NO: 66160 - protein, 32 aa, Artificial Sequence
  Cyclic GFR-binding peptide
  MOD_RES (1), (3): Xaa is C or S
XGXARVVMNPIKGYIVNSSDDFYLVNIPSLQT

SEQ ID NO: 66161 - protein, 28 aa, Artificial Sequence
  Cyclic GFR-binding peptide
  MOD_RES (27), (28): Xaa is C or S
GPIKGYYTVVGKDFYLINIPSLKTPVXX

SEQ ID NO: 66162 - protein, 25 aa, Artificial Sequence
  Cyclic GFR-binding peptide
PIKGYIVNSSDDFYLVNIPSLKTPA

SEQ ID NO: 66163 - protein, 37 aa, Artificial Sequence; identical to SEQ ID NO: 20606
  Cyclic GFR-binding peptide
  MOD_RES (1), (3), (35), (36): Xaa is C or S

SEQ ID NO: 66164 - protein, 34 aa, Artificial Sequence; identical to SEQ ID NO: 20610
  Cyclic GFR-binding peptide
  MOD_RES (31), (32): Xaa is C or S

SEQ ID NO: 66165 - protein, 38 aa, Artificial Sequence; identical to SEQ ID NO: 20619
  Cyclic GFR-binding peptide
  MOD_RES (2), (4), (36), (37): Xaa is C or S

SEQ ID NO: 66166 - protein, 30 aa, Artificial Sequence
  Cyclic GFR-binding peptide
  MOD_RES (1), (3): Xaa is C or S
XGXAEVVMDPIKGYVVNNAADFYLINIPSL

SEQ ID NO: 66167 - protein, 33 aa, Artificial Sequence; identical to SEQ ID NO: 20622
  Cyclic GFR-binding peptide
  MOD_RES (2), (2): Xaa is C or S

SEQ ID NO: 66168 - protein, 32 aa, Artificial Sequence
  Cyclic GFR-binding peptide
  MOD_RES (30), (31): Xaa is C or S
EVIMPIKGYLLVRGNDFYLMNIPSTKVPAXXT

SEQ ID NO: 66169 - protein, 33 aa, Artificial Sequence; identical to SEQ ID NO: 20628
  Cyclic GFR-binding peptide
  MOD_RES (2), (2): Xaa is C or S

SEQ ID NO: 66170 - protein, 35 aa, Artificial Sequence
  Cyclic GFR-binding peptide
  MOD_RES (29), (30): Xaa is C or S
VMNPIKGYIVNSSDDFYLVNIPSLKTPAXXPKPVY

SEQ ID NO: 66171 - protein, 33 aa, Artificial Sequence; identical to SEQ ID NO: 20633
  Cyclic GFR-binding peptide
  MOD_RES (1), (33): Xaa is C or S

SEQ ID NO: 66172 - protein, 29 aa, Artificial Sequence
  Cyclic GFR-binding peptide
  MOD_RES (1), (1): Xaa is C or S
XARVVMNPIKGYIVNSSDDFYLVNIPSLQ

SEQ ID NO: 66173 - protein, 39 aa, Artificial Sequence; identical to SEQ ID NO: 20637
  Cyclic GFR-binding peptide
  MOD_RES (1), (3), (35), (36): Xaa is C or S

SEQ ID NO: 66174 - protein, 32 aa, Artificial Sequence
  Cyclic GFR-binding peptide
  MOD_RES (2), (4): Xaa is C or S
RXGXGEVVMEPIKGYVVKDYEDFYLMNIPSLE

SEQ ID NO: 66175 - protein, 30 aa, Artificial Sequence
  Cyclic GFR-binding peptide
  MOD_RES (28), (29): Xaa is C or S
MDPIKGYVVNNAADFYLINIPSLRAPVXXS

SEQ ID NO: 66176 - protein, 30 aa, Artificial Sequence
  Cyclic GFR-binding peptide
  MOD_RES (1), (3): Xaa is C or S
XGXAKVVMNPIKGYIVNNSSDFYLVNIPSL

SEQ ID NO: 66177 - protein, 35 aa, Artificial Sequence; identical to SEQ ID NO: 20642
  Cyclic GFR-binding peptide
  MOD_RES (32), (33): Xaa is C or S

SEQ ID NO: 66178 - protein, 29 aa, Artificial Sequence
  Cyclic GFR-binding peptide
AAAAAAAAAPIKGYIIQQKDNFYLMNIPS

SEQ ID NO: 66179 - protein, 33 aa, Artificial Sequence; identical to SEQ ID NO: 20647
  Cyclic GFR-binding peptide
  MOD_RES (32), (33): Xaa is C or S

SEQ ID NO: 66180 - protein, 35 aa, Artificial Sequence; identical to SEQ ID NO: 20649
  Cyclic GFR-binding peptide
  MOD_RES (1), (3), (35): Xaa is C or S

SEQ ID NO: 66181 - protein, 29 aa, Artificial Sequence
  Cyclic GFR-binding peptide
  MOD_RES (26), (27): Xaa is C or S
PIKGYTPVGMDDFYLVNIPSLKTPVXXAK

SEQ ID NO: 66182 - protein, 29 aa, Artificial Sequence
  Cyclic GFR-binding peptide
SEVVMDPIKGYVVNNASDFYLINIPSLRT

SEQ ID NO: 66183 - protein, 40 aa, Artificial Sequence; identical to SEQ ID NO: 20650
  Cyclic GFR-binding peptide
  MOD_RES (2), (4), (36), (37): Xaa is C or S

SEQ ID NO: 66184 - protein, 21 aa, Artificial Sequence
  Cyclic GFR-binding peptide
DPIKGYVVNNASDFYLINIPS

SEQ ID NO: 66185 - protein, 41 aa, Artificial Sequence; identical to SEQ ID NO: 20651
  Cyclic GFR-binding peptide
  MOD_RES (1), (3), (35), (36): Xaa is C or S

SEQ ID NO: 66186 - protein, 32 aa, Artificial Sequence
  Cyclic GFR-binding peptide
  MOD_RES (2), (2): Xaa is C or S
GXSEVVMDPIKGYVVNNASDFYLINIPSLRTP

SEQ ID NO: 66187 - protein, 32 aa, Artificial Sequence; identical to SEQ ID NO: 20652
  Cyclic GFR-binding peptide
  MOD_RES (31), (32): Xaa is C or S

SEQ ID NO: 66188 - protein, 28 aa, Artificial Sequence
  Cyclic GFR-binding peptide
VAMGPIKGYYTVVGKDFYLINIPSLKTP

SEQ ID NO: 66189 - protein, 26 aa, Artificial Sequence
  Cyclic GFR-binding peptide
MNPIKGYIVNSSDDFYLVNIPSLKTP

SEQ ID NO: 66190 - protein, 38 aa, Artificial Sequence; identical to SEQ ID NO: 20655
  Cyclic GFR-binding peptide
  MOD_RES (32), (33): Xaa is C or S

SEQ ID NO: 66191 - protein, 26 aa, Artificial Sequence
  Cyclic GFR-binding peptide
KVVMNPIKGYIVNNSSDFYLVNIPSL

SEQ ID NO: 66192 - protein, 41 aa, Artificial Sequence; identical to SEQ ID NO: 20657
  Cyclic GFR-binding peptide
  MOD_RES (2), (4), (36), (37): Xaa is C or S

SEQ ID NO: 66193 - protein, 41 aa, Artificial Sequence; identical to SEQ ID NO: 20659
  Cyclic GFR-binding peptide
  MOD_RES (1), (3), (35), (36): Xaa is C or S

SEQ ID NO: 66194 - protein, 22 aa, Artificial Sequence
  Cyclic GFR-binding peptide
GPIKGYYTVVGKDFYLINIPSL

SEQ ID NO: 66195 - protein, 26 aa, Artificial Sequence
  Cyclic GFR-binding peptide
MDPIKGYVVNNASDFYLINIPSLRTP

SEQ ID NO: 66196 - protein, 35 aa, Artificial Sequence; identical to SEQ ID NO: 20661
  Cyclic GFR-binding peptide
  MOD_RES (2), (33), (34): Xaa is C or S

SEQ ID NO: 66197 - protein, 35 aa, Artificial Sequence
  Cyclic GFR-binding peptide
  MOD_RES (29), (30): Xaa is C or S
VIMPIKGYLLVRGNDFYLMNIPSTKVPAXXTSPVR

SEQ ID NO: 66198 - protein, 33 aa, Artificial Sequence
  Cyclic GFR-binding peptide
  MOD_RES (2), (4): Xaa is C or S
RXGXEAVSMGEPIKGYTPVGMDDFYLVNIPSLK

SEQ ID NO: 66199 - protein, 34 aa, Artificial Sequence; identical to SEQ ID NO: 20662
  Cyclic GFR-binding peptide
  MOD_RES (1), (33), (34): Xaa is C or S

SEQ ID NO: 66200 - protein, 24 aa, Artificial Sequence
  Cyclic GFR-binding peptide
VVMEPIKGYVVKDYEDFYLMNIPS

SEQ ID NO: 66201 - protein, 33 aa, Artificial Sequence
  Cyclic GFR-binding peptide
  MOD_RES (27), (28): Xaa is C or S
NPIKGYIVNNSSDFYLVNIPSLKTPAXXAKPVA

SEQ ID NO: 66202 - protein, 35 aa, Artificial Sequence; identical to SEQ ID NO: 20663
  Cyclic GFR-binding peptide
  MOD_RES (32), (33): Xaa is C or S

SEQ ID NO: 66203 - protein, 40 aa, Artificial Sequence; identical to SEQ ID NO: 20666
  Cyclic GFR-binding peptide
  MOD_RES (1), (3), (35), (36): Xaa is C or S

SEQ ID NO: 66204 - protein, 33 aa, Artificial Sequence; identical to SEQ ID NO: 20667
  Cyclic GFR-binding peptide
  MOD_RES (33), (33): Xaa is C or S

SEQ ID NO: 66205 - protein, 29 aa, Artificial Sequence
  Cyclic GFR-binding peptide
VAMGPIKGYYTVVGKDFYLINIPSLKTPV

SEQ ID NO: 66206 - protein, 33 aa, Artificial Sequence; identical to SEQ ID NO: 20674
  Cyclic GFR-binding peptide
  MOD_RES (1), (33): Xaa is C or S

SEQ ID NO: 66207 - protein, 32 aa, Artificial Sequence
  Cyclic GFR-binding peptide
  MOD_RES (30), (31): Xaa is C or S
VVMDPIKGYVVKENEDFYLMNIPSLETPVXXA

SEQ ID NO: 66208 - protein, 34 aa, Artificial Sequence
  Cyclic GFR-binding peptide
  MOD_RES (29), (30): Xaa is C or S
VMDPIKGYVVNNAADFYLINIPSLRAPVXXSAPA

SEQ ID NO: 66209 - protein, 33 aa, Artificial Sequence
  Cyclic GFR-binding peptide
  MOD_RES (28), (28): Xaa is C or S
MNPIKGYIVNSSDDFYLVNIPSLKTPAXTPKTV

SEQ ID NO: 66210 - protein, 27 aa, Artificial Sequence
  Cyclic GFR-binding peptide
VVMNPIKGYIVNSSDDFYLVNIPSLQT

SEQ ID NO: 66211 - protein, 34 aa, Artificial Sequence
  Cyclic GFR-binding peptide
  MOD_RES (2), (4): Xaa is C or S
HXGXAKVVMNPIKGYIVNNSSDFYLVNIPSLKTP

SEQ ID NO: 66212 - protein, 34 aa, Artificial Sequence
  Cyclic GFR-binding peptide
  MOD_RES (29), (29): Xaa is C or S
VMNPIKGYIVNSSDDFYLVNIPSLKTPAXTPKTV

SEQ ID NO: 66213 - protein, 38 aa, Artificial Sequence; identical to SEQ ID NO: 20688
  Cyclic GFR-binding peptide
  MOD_RES (2), (4), (36), (37): Xaa is C or S

SEQ ID NO: 66214 - protein, 32 aa, Artificial Sequence
  Cyclic GFR-binding peptide
  MOD_RES (2), (2): Xaa is C or S
GXGEVVMEPIKGYVVKDYEDFYLMNIPSLETP

SEQ ID NO: 66215 - protein, 31 aa, Artificial Sequence; identical to SEQ ID NO: 20691
  Cyclic GFR-binding peptide
  MOD_RES (1), (1): Xaa is C or S

SEQ ID NO: 66216 - protein, 29 aa, Artificial Sequence
  Cyclic GFR-binding peptide
AAAAAAAAAPIKGYVVKDYEDFYLMNIPS

SEQ ID NO: 66217 - protein, 30 aa, Artificial Sequence
  Cyclic GFR-binding peptide
  MOD_RES (29), (30): Xaa is C or S
VMNPIKGYIVNSSDDFYLVNIPSLQTPAXX

SEQ ID NO: 66218 - protein, 39 aa, Artificial Sequence; identical to SEQ ID NO: 20694
  Cyclic GFR-binding peptide
  MOD_RES (1), (33), (34): Xaa is C or S

SEQ ID NO: 66219 - protein, 32 aa, Artificial Sequence
  Cyclic GFR-binding peptide
  MOD_RES (27), (28): Xaa is C or S
EPIKGYVVKDYEDFYLMNIPSLETPVXXAKPI

SEQ ID NO: 66220 - protein, 32 aa, Artificial Sequence
  Cyclic GFR-binding peptide
  MOD_RES (1), (3): Xaa is C or S
XGXAEVVMDPIKGYVVNNAADFYLINIPSLRA

SEQ ID NO: 66221 - protein, 25 aa, Artificial Sequence
  Cyclic GFR-binding peptide
EEVIMPIKGYLLVRGNDFYLMNIPS

SEQ ID NO: 66222 - protein, 41 aa, Artificial Sequence; identical to SEQ ID NO: 20697
  Cyclic GFR-binding peptide
  MOD_RES (2), (4), (36), (37): Xaa is C or S

SEQ ID NO: 66223 - protein, 27 aa, Artificial Sequence
  Cyclic GFR-binding peptide
  MOD_RES (1), (1): Xaa is C or S
XESVAMGPIKGYYTVVGKDFYLINIPS

SEQ ID NO: 66224 - protein, 37 aa, Artificial Sequence; identical to SEQ ID NO: 20701
  Cyclic GFR-binding peptide
  MOD_RES (1), (33), (34): Xaa is C or S

SEQ ID NO: 66225 - protein, 41 aa, Artificial Sequence; identical to SEQ ID NO: 20702
  Cyclic GFR-binding peptide
  MOD_RES (2), (4), (36), (37): Xaa is C or S

SEQ ID NO: 66226 - protein, 35 aa, Artificial Sequence
  Cyclic GFR-binding peptide
  MOD_RES (29), (30): Xaa is C or S
VMNPIKGYIVNNSSDFYLVNIPSLKTPAXXAKPVA

SEQ ID NO: 66227 - protein, 27 aa, Artificial Sequence
  Cyclic GFR-binding peptide
EVVMDPIKGYVVNNASDFYLINIPSLR

SEQ ID NO: 66228 - protein, 33 aa, Artificial Sequence; identical to SEQ ID NO: 20706
  Cyclic GFR-binding peptide
  MOD_RES (2), (33): Xaa is C or S

SEQ ID NO: 66229 - protein, 32 aa, Artificial Sequence
  Cyclic GFR-binding peptide
  MOD_RES (26), (26): Xaa is C or S
PIKGYIVNSSDDFYLVNIPSLKTPAXTPKTVH

SEQ ID NO: 66230 - protein, 28 aa, Artificial Sequence
  Cyclic GFR-binding peptide
VMDPIKGYVVNNAADFYLINIPSLRAPV

SEQ ID NO: 66231 - protein, 27 aa, Artificial Sequence
  Cyclic GFR-binding peptide
SMGEPIKGYTPVGMDDFYLVNIPSLKT

SEQ ID NO: 66232 - protein, 31 aa, Artificial Sequence
  Cyclic GFR-binding peptide
  MOD_RES (29), (30): Xaa is C or S
VMNPIKGYIVNNSSDFYLVNIPSLKTPAXXA

SEQ ID NO: 66233 - protein, 36 aa, Artificial Sequence; identical to SEQ ID NO: 20712
  Cyclic GFR-binding peptide
  MOD_RES (1), (33): Xaa is C or S

SEQ ID NO: 66234 - protein, 27 aa, Artificial Sequence
  Cyclic GFR-binding peptide
VIMPIKGYLLVRGNDFYLMNIPSTKVP

SEQ ID NO: 66235 - protein, 30 aa, Artificial Sequence
  Cyclic GFR-binding peptide
  MOD_RES (30), (30): Xaa is C or S
SMGEPIKGYTPVGMDDFYLVNIPSLKTPVX

SEQ ID NO: 66236 - protein, 37 aa, Artificial Sequence
  Cyclic GFR-binding peptide
  MOD_RES (31), (32): Xaa is C or S
VSMGEPIKGYTPVGMDDFYLVNIPSLKTPVXXAKGVK

SEQ ID NO: 66237 - protein, 31 aa, Artificial Sequence
  Cyclic GFR-binding peptide
  MOD_RES (2), (2): Xaa is C or S
GXEAVSMGEPIKGYTPVGMDDFYLVNIPSLK

SEQ ID NO: 66238 - protein, 31 aa, Artificial Sequence
  Cyclic GFR-binding peptide
  MOD_RES (1), (3): Xaa is C or S
XGXGEVVMEPIKGYVVKDYEDFYLMNIPSLE

SEQ ID NO: 66239 - protein, 26 aa, Artificial Sequence
  Cyclic GFR-binding peptide
SVAMGPIKGYYTVVGKDFYLINIPSL

SEQ ID NO: 66240 - protein, 34 aa, Artificial Sequence
  Cyclic GFR-binding peptide
  MOD_RES (29), (30): Xaa is C or S
VIMPIKGYLLVRGNDFYLMNIPSTKVPAXXTSPV

SEQ ID NO: 66241 - protein, 26 aa, Artificial Sequence
  Cyclic GFR-binding peptide
VAMGPIKGYYTVVGKDFYLINIPSLK

SEQ ID NO: 66242 - protein, 31 aa, Artificial Sequence
  Cyclic GFR-binding peptide
  MOD_RES (30), (31): Xaa is C or S
VVMNPIKGYIVNNSSDFYLVNIPSLKTPAXX

SEQ ID NO: 66243 - protein, 30 aa, Artificial Sequence
  Cyclic GFR-binding peptide
  MOD_RES (2), (2): Xaa is C or S
GXESVAMGPIKGYYTVVGKDFYLINIPSLK

SEQ ID NO: 66244 - protein, 42 aa, Artificial Sequence; identical to SEQ ID NO: 20726
  Cyclic GFR-binding peptide
  MOD_RES (2), (4), (36), (37): Xaa is C or S

SEQ ID NO: 66245 - protein, 22 aa, Artificial Sequence
  Cyclic GFR-binding peptide
EPIKGYTPVGMDDFYLVNIPSL

SEQ ID NO: 66246 - protein, 37 aa, Artificial Sequence; identical to SEQ ID NO: 20730
  Cyclic GFR-binding peptide
  MOD_RES (31), (32): Xaa is C or S

SEQ ID NO: 66247 - protein, 31 aa, Artificial Sequence
  Cyclic GFR-binding peptide
  MOD_RES (28), (29): Xaa is C or S
MDPIKGYVVKENEDFYLMNIPSLETPVXXAK

SEQ ID NO: 66248 - protein, 30 aa, Artificial Sequence
  Cyclic GFR-binding peptide
  MOD_RES (27), (28): Xaa is C or S
MPIKGYLLVRGNDFYLMNIPSTKVPAXXTS

SEQ ID NO: 66249 - protein, 29 aa, Artificial Sequence
  Cyclic GFR-binding peptide
  MOD_RES (28), (29): Xaa is C or S
MNPIKGYIVNSSDDFYLVNIPSLQTPAXX

SEQ ID NO: 66250 - protein, 37 aa, Artificial Sequence; identical to SEQ ID NO: 20732
  Cyclic GFR-binding peptide
  MOD_RES (2), (4), (37): Xaa is C or S

SEQ ID NO: 66251 - protein, 33 aa, Artificial Sequence
  Cyclic GFR-binding peptide
  MOD_RES (29), (30): Xaa is C or S
VMEPIKGYVVKDYEDFYLMNIPSLETPVXXAKP

SEQ ID NO: 66252 - protein, 31 aa, Artificial Sequence
  Cyclic GFR-binding peptide
  MOD_RES (1), (1): Xaa is C or S
XSRVVMNPIKGYIVNSSDDFYLVNIPSLKTP

SEQ ID NO: 66253 - protein, 21 aa, Artificial Sequence
  Cyclic GFR-binding peptide
PIKGYVVKDYEDFYLMNIPSL

SEQ ID NO: 66254 - protein, 28 aa, Artificial Sequence
  Cyclic GFR-binding peptide
  MOD_RES (28), (28): Xaa is C or S
GEPIKGYTPVGMDDFYLVNIPSLKTPVX

SEQ ID NO: 66255 - protein, 24 aa, Artificial Sequence
  Cyclic GFR-binding peptide
MGEPIKGYTPVGMDDFYLVNIPSL

SEQ ID NO: 66256 - protein, 24 aa, Artificial Sequence
  Cyclic GFR-binding peptide
PIKGYIVNSSDDFYLVNIPSLKTP

SEQ ID NO: 66257 - protein, 30 aa, Artificial Sequence
  Cyclic GFR-binding peptide
  MOD_RES (29), (30): Xaa is C or S
VMDPIKGYVVNNAADFYLINIPSLRAPVXX

SEQ ID NO: 66258 - protein, 24 aa, Artificial Sequence
  Cyclic GFR-binding peptide
PIKGYTPVGMDDFYLVNIPSLKTP

SEQ ID NO: 66259 - protein, 24 aa, Artificial Sequence
  Cyclic GFR-binding peptide
NPIKGYIVNSSDDFYLVNIPSLQT

SEQ ID NO: 66260 - protein, 39 aa, Artificial Sequence; identical to SEQ ID NO: 20743
  Cyclic GFR-binding peptide
  MOD_RES (2), (4), (36), (37): Xaa is C or S

SEQ ID NO: 66261 - protein, 37 aa, Artificial Sequence; identical to SEQ ID NO: 20744
  Cyclic GFR-binding peptide
  MOD_RES (2), (4), (35), (36): Xaa is C or S

SEQ ID NO: 66262 - protein, 34 aa, Artificial Sequence
  Cyclic GFR-binding peptide
  MOD_RES (29), (30): Xaa is C or S
VMNPIKGYIVNSSDDFYLVNIPSLKTPAXXPKPV

SEQ ID NO: 66263 - protein, 34 aa, Artificial Sequence
  Cyclic GFR-binding peptide
  MOD_RES (2), (4): Xaa is C or S
RXGXAEVVMDPIKGYVVNNAADFYLINIPSLRAP

SEQ ID NO: 66264 - protein, 27 aa, Artificial Sequence
  Cyclic GFR-binding peptide
EVVMDPIKGYVVKENEDFYLMNIPSLE

SEQ ID NO: 66265 - protein, 26 aa, Artificial Sequence
  Cyclic GFR-binding peptide
EVVMDPIKGYVVNNASDFYLINIPSL

SEQ ID NO: 66266 - protein, 26 aa, Artificial Sequence
  Cyclic GFR-binding peptide
MNPIKGYIVNSSDDFYLVNIPSLQTP

SEQ ID NO: 66267 - protein, 38 aa, Artificial Sequence; identical to SEQ ID NO: 20758
  Cyclic GFR-binding peptide
  MOD_RES (1), (33), (34): Xaa is C or S

SEQ ID NO: 66268 - protein, 29 aa, Artificial Sequence
  Cyclic GFR-binding peptide
RVVMNPIKGYIVNSSDDFYLVNIPSLQTP

SEQ ID NO: 66269 - protein, 26 aa, Artificial Sequence
  Cyclic GFR-binding peptide
RVVMNPIKGYIVNSSDDFYLVNIPSL

SEQ ID NO: 66270 - protein, 25 aa, Artificial Sequence
  Cyclic GFR-binding peptide
VMNPIKGYIVNSSDDFYLVNIPSLK

SEQ ID NO: 66271 - protein, 25 aa, Artificial Sequence
  Cyclic GFR-binding peptide
VMNPIKGYIVNNSSDFYLVNIPSLK

SEQ ID NO: 66272 - protein, 32 aa, Artificial Sequence
  Cyclic GFR-binding peptide
  MOD_RES (1), (3): Xaa is C or S
XGXESVAMGPIKGYYTVVGKDFYLINIPSLKT

SEQ ID NO: 66273 - protein, 38 aa, Artificial Sequence; identical to SEQ ID NO: 20765
  Cyclic GFR-binding peptide
  MOD_RES (2), (4), (36), (37): Xaa is C or S

SEQ ID NO: 66274 - protein, 32 aa, Artificial Sequence
  Cyclic GFR-binding peptide
  MOD_RES (30), (31): Xaa is C or S
VVMDPIKGYVVNNAADFYLINIPSLRAPVXXS

SEQ ID NO: 66275 - protein, 25 aa, Artificial Sequence
  Cyclic GFR-binding peptide
EVVMDPIKGYVVNNASDFYLINIPS

SEQ ID NO: 66276 - protein, 37 aa, Artificial Sequence; identical to SEQ ID NO: 20771
  Cyclic GFR-binding peptide
  MOD_RES (32), (33): Xaa is C or S

SEQ ID NO: 66277 - protein, 35 aa, Artificial Sequence; identical to SEQ ID NO: 20773
  Cyclic GFR-binding peptide
  MOD_RES (2), (35): Xaa is C or S

SEQ ID NO: 66278 - protein, 43 aa, Artificial Sequence; identical to SEQ ID NO: 20775
  Cyclic GFR-binding peptide
  MOD_RES (2), (4), (37), (38): Xaa is C or S

SEQ ID NO: 66279 - protein, 23 aa, Artificial Sequence
  Cyclic GFR-binding peptide
MNPIKGYIVNNSSDFYLVNIPSL

SEQ ID NO: 66280 - protein, 36 aa, Artificial Sequence; identical to SEQ ID NO: 20776
  Cyclic GFR-binding peptide
  MOD_RES (1), (34), (35): Xaa is C or S

SEQ ID NO: 66281 - protein, 34 aa, Artificial Sequence
  Cyclic GFR-binding peptide
  MOD_RES (28), (28): Xaa is C or S
MNPIKGYIVNSSDDFYLVNIPSLKTPAXTPKTVH

SEQ ID NO: 66282 - protein, 33 aa, Artificial Sequence; identical to SEQ ID NO: 20779
  Cyclic GFR-binding peptide
  MOD_RES (31), (32): Xaa is C or S

SEQ ID NO: 66283 - protein, 29 aa, Artificial Sequence
  Cyclic GFR-binding peptide
AAAAAAAAAPIKGYIVNSSDDFYLVNIPS

SEQ ID NO: 66284 - protein, 26 aa, Artificial Sequence
  Cyclic GFR-binding peptide
AMGPIKGYYTVVGKDFYLINIPSLKT

SEQ ID NO: 66285 - protein, 34 aa, Artificial Sequence; identical to SEQ ID NO: 20780
  Cyclic GFR-binding peptide
  MOD_RES (2), (34): Xaa is C or S

SEQ ID NO: 66286 - protein, 26 aa, Artificial Sequence
  Cyclic GFR-binding peptide
VMNPIKGYIVNSSDDFYLVNIPSLQT

SEQ ID NO: 66287 - protein, 31 aa, Artificial Sequence
  Cyclic GFR-binding peptide
  MOD_RES (29), (30): Xaa is C or S
VMDPIKGYVVKENEDFYLMNIPSLETPVXXA

SEQ ID NO: 66288 - protein, 28 aa, Artificial Sequence
  Cyclic GFR-binding peptide
VMNPIKGYIVNSSDDFYLVNIPSLQTPA

SEQ ID NO: 66289 - protein, 36 aa, Artificial Sequence; identical to SEQ ID NO: 20781
  Cyclic GFR-binding peptide
  MOD_RES (1), (33), (34): Xaa is C or S

SEQ ID NO: 66290 - protein, 29 aa, Artificial Sequence
  Cyclic GFR-binding peptide
  MOD_RES (1), (1): Xaa is C or S
XGEVVMEPIKGYVVKDYEDFYLMNIPSLE

SEQ ID NO: 66291 - protein, 40 aa, Artificial Sequence; identical to SEQ ID NO: 20784
  Cyclic GFR-binding peptide
  MOD_RES (2), (4), (36), (37): Xaa is C or S

SEQ ID NO: 66292 - protein, 28 aa, Artificial Sequence
  Cyclic GFR-binding peptide
  MOD_RES (28), (28): Xaa is C or S
MEPIKGYVVKDYEDFYLMNIPSLETPVX

SEQ ID NO: 66293 - protein, 32 aa, Artificial Sequence
  Cyclic GFR-binding peptide
  MOD_RES (26), (27): Xaa is C or S
PIKGYIVNNSSDFYLVNIPSLKTPAXXAKPVA

SEQ ID NO: 66294 - protein, 38 aa, Artificial Sequence; identical to SEQ ID NO: 20787
  Cyclic GFR-binding peptide
  MOD_RES (1), (3), (35), (36): Xaa is C or S

SEQ ID NO: 66295 - protein, 34 aa, Artificial Sequence
  Cyclic GFR-binding peptide
  MOD_RES (28), (29): Xaa is C or S
MNPIKGYIVNNSSDFYLVNIPSLKTPAXXAKPVA

SEQ ID NO: 66296 - protein, 40 aa, Artificial Sequence; identical to SEQ ID NO: 20790
  Cyclic GFR-binding peptide
  MOD_RES (2), (35), (36): Xaa is C or S

SEQ ID NO: 66297 - protein, 33 aa, Artificial Sequence
  Cyclic GFR-binding peptide
  MOD_RES (30), (31): Xaa is C or S
VVMDPIKGYVVKENEDFYLMNIPSLETPVXXAK

SEQ ID NO: 66298 - protein, 30 aa, Artificial Sequence; identical to SEQ ID NO: 1953
  Cyclic GFR-binding peptide

SEQ ID NO: 66299 - protein, 28 aa, Artificial Sequence
  Cyclic GFR-binding peptide
  MOD_RES (1), (1): Xaa is C or S
XGEVVMDPIKGYVVKENEDFYLMNIPSL

SEQ ID NO: 66300 - protein, 26 aa, Artificial Sequence
  Cyclic GFR-binding peptide
  MOD_RES (26), (26): Xaa is C or S
PIKGYVVNNASDFYLINIPSLRTPVX

SEQ ID NO: 66301 - protein, 25 aa, Artificial Sequence
  Cyclic GFR-binding peptide
GEPIKGYTPVGMDDFYLVNIPSLKT

SEQ ID NO: 66302 - protein, 31 aa, Artificial Sequence
  Cyclic GFR-binding peptide
  MOD_RES (30), (31): Xaa is C or S
VVMDPIKGYVVNNAADFYLINIPSLRAPVXX

SEQ ID NO: 66303 - protein, 33 aa, Artificial Sequence; identical to SEQ ID NO: 20797
  Cyclic GFR-binding peptide
  MOD_RES (31), (32): Xaa is C or S

SEQ ID NO: 66304 - protein, 29 aa, Artificial Sequence
  Cyclic GFR-binding peptide
  MOD_RES (29), (29): Xaa is C or S
VMNPIKGYIVNSSDDFYLVNIPSLKTPAX

SEQ ID NO: 66305 - protein, 28 aa, Artificial Sequence
  Cyclic GFR-binding peptide
EEVIMPIKGYLLVRGNDFYLMNIPSTKV

SEQ ID NO: 66306 - protein, 38 aa, Artificial Sequence; identical to SEQ ID NO: 20806
  Cyclic GFR-binding peptide
  MOD_RES (32), (33): Xaa is C or S

SEQ ID NO: 66307 - protein, 29 aa, Artificial Sequence
  Cyclic GFR-binding peptide
  MOD_RES (26), (27): Xaa is C or S
PIKGYVVKDYEDFYLMNIPSLETPVXXAK

SEQ ID NO: 66308 - protein, 34 aa, Artificial Sequence
  Cyclic GFR-binding peptide
  MOD_RES (32), (33): Xaa is C or S
AVSMGEPIKGYTPVGMDDFYLVNIPSLKTPVXXA

SEQ ID NO: 66309 - protein, 30 aa, Artificial Sequence
  Cyclic GFR-binding peptide
  MOD_RES (26), (27): Xaa is C or S
PIKGYTPVGMDDFYLVNIPSLKTPVXXAKG

SEQ ID NO: 66310 - protein, 38 aa, Artificial Sequence; identical to SEQ ID NO: 20810
  Cyclic GFR-binding peptide
  MOD_RES (2), (34), (35): Xaa is C or S

SEQ ID NO: 66311 - protein, 27 aa, Artificial Sequence
  Cyclic GFR-binding peptide
  MOD_RES (26), (27): Xaa is C or S
PIKGYIVNSSDDFYLVNIPSLQTPAXX

SEQ ID NO: 66312 - protein, 27 aa, Artificial Sequence
  Cyclic GFR-binding peptide
  MOD_RES (26), (26): Xaa is C or S
PIKGYIVNSSDDFYLVNIPSLKTPAXT

SEQ ID NO: 66313 - protein, 30 aa, Artificial Sequence
  Cyclic GFR-binding peptide
GEVVMDPIKGYVVKENEDFYLMNIPSLETP

SEQ ID NO: 66314 - protein, 28 aa, Artificial Sequence
  Cyclic GFR-binding peptide
VVMDPIKGYVVKENEDFYLMNIPSLETP

SEQ ID NO: 66315 - protein, 28 aa, Artificial Sequence
  Cyclic GFR-binding peptide
  MOD_RES (1), (1): Xaa is C or S
XGEVVMEPIKGYVVKDYEDFYLMNIPSL

SEQ ID NO: 66316 - protein, 28 aa, Artificial Sequence
  Cyclic GFR-binding peptide
RVVMNPIKGYIVNSSDDFYLVNIPSLQT

SEQ ID NO: 66317 - protein, 38 aa, Artificial Sequence; identical to SEQ ID NO: 20818
  Cyclic GFR-binding peptide
  MOD_RES (2), (4), (35), (36): Xaa is C or S

SEQ ID NO: 66318 - protein, 27 aa, Artificial Sequence
  Cyclic GFR-binding peptide
KVVMNPIKGYIVNNSSDFYLVNIPSLK

SEQ ID NO: 66319 - protein, 32 aa, Artificial Sequence
  Cyclic GFR-binding peptide
  MOD_RES (30), (31): Xaa is C or S
VAMGPIKGYYTVVGKDFYLINIPSLKTPVXXA

SEQ ID NO: 66320 - protein, 27 aa, Artificial Sequence
  Cyclic GFR-binding peptide
VVMDPIKGYVVNNASDFYLINIPSLRT

SEQ ID NO: 66321 - protein, 40 aa, Artificial Sequence; identical to SEQ ID NO: 20822
  Cyclic GFR-binding peptide
  MOD_RES (1), (3), (35), (36): Xaa is C or S

SEQ ID NO: 66322 - protein, 25 aa, Artificial Sequence
  Cyclic GFR-binding peptide
VIMPIKGYLLVRGNDFYLMNIPSTK

SEQ ID NO: 66323 - protein, 28 aa, Artificial Sequence
  Cyclic GFR-binding peptide
AVSMGEPIKGYTPVGMDDFYLVNIPSLK

SEQ ID NO: 66324 - protein, 28 aa, Artificial Sequence
  Cyclic GFR-binding peptide
SMGEPIKGYTPVGMDDFYLVNIPSLKTP

SEQ ID NO: 66325 - protein, 28 aa, Artificial Sequence
  Cyclic GFR-binding peptide
  MOD_RES (1), (1): Xaa is C or S
XSRVVMNPIKGYIVNSSDDFYLVNIPSL

SEQ ID NO: 66326 - protein, 37 aa, Artificial Sequence; identical to SEQ ID NO: 20830
  Cyclic GFR-binding peptide
  MOD_RES (2), (4), (36), (37): Xaa is C or S

SEQ ID NO: 66327 - protein, 37 aa, Artificial Sequence; identical to SEQ ID NO: 20831
  Cyclic GFR-binding peptide
  MOD_RES (2), (34), (35): Xaa is C or S

SEQ ID NO: 66328 - protein, 35 aa, Artificial Sequence
  Cyclic GFR-binding peptide
  MOD_RES (2), (4): Xaa is C or S
RXGXEAVSMGEPIKGYTPVGMDDFYLVNIPSLKTP

SEQ ID NO: 66329 - protein, 38 aa, Artificial Sequence; identical to SEQ ID NO: 20833
  Cyclic GFR-binding peptide
  MOD_RES (1), (3), (35), (36): Xaa is C or S

SEQ ID NO: 66330 - protein, 36 aa, Artificial Sequence; identical to SEQ ID NO: 20834
  Cyclic GFR-binding peptide
  MOD_RES (32), (33): Xaa is C or S

SEQ ID NO: 66331 - protein, 28 aa, Artificial Sequence
  Cyclic GFR-binding peptide
  MOD_RES (26), (27): Xaa is C or S
PIKGYVVNNAADFYLINIPSLRAPVXXS

SEQ ID NO: 66332 - protein, 35 aa, Artificial Sequence
  Cyclic GFR-binding peptide
  MOD_RES (30), (31): Xaa is C or S
VVMNPIKGYIVNNSSDFYLVNIPSLKTPAXXAKPV

SEQ ID NO: 66333 - protein, 35 aa, Artificial Sequence; identical to SEQ ID NO: 20836
  Cyclic GFR-binding peptide
  MOD_RES (2), (34), (35): Xaa is C or S

SEQ ID NO: 66334 - protein, 25 aa, Artificial Sequence
  Cyclic GFR-binding peptide
MEPIKGYVVKDYEDFYLMNIPSLET

SEQ ID NO: 66335 - protein, 40 aa, Artificial Sequence; identical to SEQ ID NO: 20843
  Cyclic GFR-binding peptide
  MOD_RES (1), (3), (35), (36): Xaa is C or S

SEQ ID NO: 66336 - protein, 32 aa, Artificial Sequence
  Cyclic GFR-binding peptide
  MOD_RES (30), (31): Xaa is C or S
VVMEPIKGYVVKDYEDFYLMNIPSLETPVXXA

SEQ ID NO: 66337 - protein, 33 aa, Artificial Sequence
  Cyclic GFR-binding peptide
  MOD_RES (31), (32): Xaa is C or S
VSMGEPIKGYTPVGMDDFYLVNIPSLKTPVXXA

SEQ ID NO: 66338 - protein, 36 aa, Artificial Sequence
  Cyclic GFR-binding peptide
  MOD_RES (30), (31): Xaa is C or S
SMGEPIKGYTPVGMDDFYLVNIPSLKTPVXXAKGVK

SEQ ID NO: 66339 - protein, 24 aa, Artificial Sequence
  Cyclic GFR-binding peptide
PIKGYYTVVGKDFYLINIPSLKTP

SEQ ID NO: 66340 - protein, 27 aa, Artificial Sequence
  Cyclic GFR-binding peptide
  MOD_RES (27), (27): Xaa is C or S
NPIKGYIVNSSDDFYLVNIPSLQTPAX

SEQ ID NO: 66341 - protein, 37 aa, Artificial Sequence; identical to SEQ ID NO: 20848
  Cyclic GFR-binding peptide
  MOD_RES (31), (32): Xaa is C or S

SEQ ID NO: 66342 - protein, 33 aa, Artificial Sequence
  Cyclic GFR-binding peptide
  MOD_RES (30), (31): Xaa is C or S
VVMEPIKGYVVKDYEDFYLMNIPSLETPVXXAK

SEQ ID NO: 66343 - protein, 25 aa, Artificial Sequence
  Cyclic GFR-binding peptide
IMPIKGYLLVRGNDFYLMNIPSTKV

SEQ ID NO: 66344 - protein, 36 aa, Artificial Sequence; identical to SEQ ID NO: 20852
  Cyclic GFR-binding peptide
  MOD_RES (1), (3), (35), (36): Xaa is C or S

SEQ ID NO: 66345 - protein, 27 aa, Artificial Sequence
  Cyclic GFR-binding peptide
  MOD_RES (1), (1): Xaa is C or S
XGEVVMDPIKGYVVKENEDFYLMNIPS

SEQ ID NO: 66346 - protein, 26 aa, Artificial Sequence
  Cyclic GFR-binding peptide
AKVVMNPIKGYIVNNSSDFYLVNIPS

SEQ ID NO: 66347 - protein, 21 aa, Artificial Sequence
  Cyclic GFR-binding peptide
NPIKGYIVNNSSDFYLVNIPS

SEQ ID NO: 66348 - protein, 31 aa, Artificial Sequence
  Cyclic GFR-binding peptide
  MOD_RES (29), (29): Xaa is C or S
VMNPIKGYIVNSSDDFYLVNIPSLKTPAXTP

SEQ ID NO: 66349 - protein, 40 aa, Artificial Sequence; identical to SEQ ID NO: 20855
  Cyclic GFR-binding peptide
  MOD_RES (1), (3), (36), (37): Xaa is C or S

SEQ ID NO: 66350 - protein, 26 aa, Artificial Sequence
  Cyclic GFR-binding peptide
EVVMEPIKGYVVKDYEDFYLMNIPSL

SEQ ID NO: 66351 - protein, 30 aa, Artificial Sequence
  Cyclic GFR-binding peptide
  MOD_RES (26), (27): Xaa is C or S
PIKGYIVNSSDDFYLVNIPSLKTPAXXPKP

SEQ ID NO: 66352 - protein, 36 aa, Artificial Sequence; identical to SEQ ID NO: 20861
  Cyclic GFR-binding peptide
  MOD_RES (1), (3), (35): Xaa is C or S

SEQ ID NO: 66353 - protein, 27 aa, Artificial Sequence
  Cyclic GFR-binding peptide
MGEPIKGYTPVGMDDFYLVNIPSLKTP

SEQ ID NO: 66354 - protein, 36 aa, Artificial Sequence; identical to SEQ ID NO: 20863
  Cyclic GFR-binding peptide
  MOD_RES (2), (4), (36): Xaa is C or S

SEQ ID NO: 66355 - protein, 37 aa, Artificial Sequence; identical to SEQ ID NO: 20866
  Cyclic GFR-binding peptide
  MOD_RES (1), (3), (35): Xaa is C or S

SEQ ID NO: 66356 - protein, 39 aa, Artificial Sequence; identical to SEQ ID NO: 20870
  Cyclic GFR-binding peptide
  MOD_RES (1), (34), (35): Xaa is C or S

SEQ ID NO: 66357 - protein, 22 aa, Artificial Sequence
  Cyclic GFR-binding peptide
PIKGYYTVVGKDFYLINIPSLK

SEQ ID NO: 66358 - protein, 28 aa, Artificial Sequence
  Cyclic GFR-binding peptide
EVVMDPIKGYVVNNAADFYLINIPSLRA

SEQ ID NO: 66359 - protein, 33 aa, Artificial Sequence
  Cyclic GFR-binding peptide
  MOD_RES (1), (3): Xaa is C or S
XGXGEVVMDPIKGYVVKENEDFYLMNIPSLETP

SEQ ID NO: 66360 - protein, 22 aa, Artificial Sequence
  Cyclic GFR-binding peptide
MPIKGYLLVRGNDFYLMNIPST

SEQ ID NO: 66361 - protein, 34 aa, Artificial Sequence
  Cyclic GFR-binding peptide
  MOD_RES (28), (29): Xaa is C or S
MDPIKGYVVKENEDFYLMNIPSLETPVXXAKPIK

SEQ ID NO: 66362 - protein, 27 aa, Artificial Sequence
  Cyclic GFR-binding peptide
EAVSMGEPIKGYTPVGMDDFYLVNIPS

SEQ ID NO: 66363 - protein, 32 aa, Artificial Sequence
  Cyclic GFR-binding peptide
  MOD_RES (26), (27): Xaa is C or S
PIKGYLLVRGNDFYLMNIPSTKVPAXXTSPVR

SEQ ID NO: 66364 - protein, 30 aa, Artificial Sequence
  Cyclic GFR-binding peptide
  MOD_RES (28), (29): Xaa is C or S
MNPIKGYIVNNSSDFYLVNIPSLKTPAXXA

SEQ ID NO: 66365 - protein, 28 aa, Artificial Sequence
  Cyclic GFR-binding peptide
VVMNPIKGYIVNNSSDFYLVNIPSLKTP

SEQ ID NO: 66366 - protein, 38 aa, Artificial Sequence; identical to SEQ ID NO: 20881
  Cyclic GFR-binding peptide
  MOD_RES (33), (34): Xaa is C or S

SEQ ID NO: 66367 - protein, 34 aa, Artificial Sequence
  Cyclic GFR-binding peptide
  MOD_RES (29), (30): Xaa is C or S
VMNPIKGYIVNSSDDFYLVNIPSLQTPAXXPKPV

SEQ ID NO: 66368 - protein, 23 aa, Artificial Sequence
  Cyclic GFR-binding peptide
PIKGYTPVGMDDFYLVNIPSLKT

SEQ ID NO: 66369 - protein, 26 aa, Artificial Sequence
  Cyclic GFR-binding peptide
EVVMDPIKGYVVKENEDFYLMNIPSL

SEQ ID NO: 66370 - protein, 30 aa, Artificial Sequence
  Cyclic GFR-binding peptide
  MOD_RES (30), (30): Xaa is C or S
EVIMPIKGYLLVRGNDFYLMNIPSTKVPAX

SEQ ID NO: 66371 - protein, 30 aa, Artificial Sequence
  Cyclic GFR-binding peptide
  MOD_RES (2), (4): Xaa is C or S
RXGXAEVVMDPIKGYVVNNAADFYLINIPS

SEQ ID NO: 66372 - protein, 32 aa, Artificial Sequence
  Cyclic GFR-binding peptide
  MOD_RES (28), (29): Xaa is C or S
IMPIKGYLLVRGNDFYLMNIPSTKVPAXXTSP

SEQ ID NO: 66373 - protein, 37 aa, Artificial Sequence; identical to SEQ ID NO: 20887
  Cyclic GFR-binding peptide
  MOD_RES (1), (3), (35), (36): Xaa is C or S

SEQ ID NO: 66374 - protein, 41 aa, Artificial Sequence; identical to SEQ ID NO: 20888
  Cyclic GFR-binding peptide
  MOD_RES (2), (4), (36), (37): Xaa is C or S

SEQ ID NO: 66375 - protein, 27 aa, Artificial Sequence
  Cyclic GFR-binding peptide
  MOD_RES (26), (27): Xaa is C or S
PIKGYLLVRGNDFYLMNIPSTKVPAXX

SEQ ID NO: 66376 - protein, 33 aa, Artificial Sequence
  Cyclic GFR-binding peptide
  MOD_RES (2), (2): Xaa is C or S
GXEAVSMGEPIKGYTPVGMDDFYLVNIPSLKTP

SEQ ID NO: 66377 - protein, 34 aa, Artificial Sequence; identical to SEQ ID NO: 20891
  Cyclic GFR-binding peptide
  MOD_RES (2), (34): Xaa is C or S

SEQ ID NO: 66378 - protein, 35 aa, Artificial Sequence; identical to SEQ ID NO: 20892
  Cyclic GFR-binding peptide
  MOD_RES (31), (32): Xaa is C or S

SEQ ID NO: 66379 - protein, 32 aa, Artificial Sequence
  Cyclic GFR-binding peptide
  MOD_RES (26), (27): Xaa is C or S
PIKGYIVNSSDDFYLVNIPSLKTPAXXPKPVH

SEQ ID NO: 66380 - protein, 39 aa, Artificial Sequence; identical to SEQ ID NO: 20896
  Cyclic GFR-binding peptide
  MOD_RES (2), (34), (35): Xaa is C or S

SEQ ID NO: 66381 - protein, 24 aa, Artificial Sequence
  Cyclic GFR-binding peptide
VMNPIKGYIVNNSSDFYLVNIPSL

SEQ ID NO: 66382 - protein, 31 aa, Artificial Sequence
  Cyclic GFR-binding peptide
  MOD_RES (2), (2): Xaa is C or S
GXEEVIMPIKGYLLVRGNDFYLMNIPSTKVP

SEQ ID NO: 66383 - protein, 32 aa, Artificial Sequence; identical to SEQ ID NO: 20899
  Cyclic GFR-binding peptide
  MOD_RES (1), (1): Xaa is C or S

SEQ ID NO: 66384 - protein, 38 aa, Artificial Sequence; identical to SEQ ID NO: 20898
  Cyclic GFR-binding peptide
  MOD_RES (2), (34), (35): Xaa is C or S

SEQ ID NO: 66385 - protein, 35 aa, Artificial Sequence; identical to SEQ ID NO: 20901
  Cyclic GFR-binding peptide
  MOD_RES (31), (32): Xaa is C or S

SEQ ID NO: 66386 - protein, 34 aa, Artificial Sequence; identical to SEQ ID NO: 20903
  Cyclic GFR-binding peptide
  MOD_RES (31), (32): Xaa is C or S

SEQ ID NO: 66387 - protein, 28 aa, Artificial Sequence
  Cyclic GFR-binding peptide
  MOD_RES (26), (26): Xaa is C or S
PIKGYIVNSSDDFYLVNIPSLKTPAXTP

SEQ ID NO: 66388 - protein, 41 aa, Artificial Sequence; identical to SEQ ID NO: 20904
  Cyclic GFR-binding peptide
  MOD_RES (1), (3), (35), (36): Xaa is C or S

SEQ ID NO: 66389 - protein, 27 aa, Artificial Sequence
  Cyclic GFR-binding peptide
ESVAMGPIKGYYTVVGKDFYLINIPSL

SEQ ID NO: 66390 - protein, 29 aa, Artificial Sequence
  Cyclic GFR-binding peptide
AVSMGEPIKGYTPVGMDDFYLVNIPSLKT

SEQ ID NO: 66391 - protein, 38 aa, Artificial Sequence; identical to SEQ ID NO: 20909
  Cyclic GFR-binding peptide
  MOD_RES (2), (34), (35): Xaa is C or S

SEQ ID NO: 66392 - protein, 26 aa, Artificial Sequence
  Cyclic GFR-binding peptide
VMNPIKGYIVNSSDDFYLVNIPSLKT

SEQ ID NO: 66393 - protein, 34 aa, Artificial Sequence; identical to SEQ ID NO: 20918
  Cyclic GFR-binding peptide
  MOD_RES (2), (2): Xaa is C or S

SEQ ID NO: 66394 - protein, 28 aa, Artificial Sequence
  Cyclic GFR-binding peptide
  MOD_RES (26), (27): Xaa is C or S
PIKGYIVNSSDDFYLVNIPSLKTPAXXP

SEQ ID NO: 66395 - protein, 37 aa, Artificial Sequence; identical to SEQ ID NO: 20920
  Cyclic GFR-binding peptide
  MOD_RES (32), (33): Xaa is C or S

SEQ ID NO: 66396 - protein, 27 aa, Artificial Sequence
  Cyclic GFR-binding peptide
EVVMEPIKGYVVKDYEDFYLMNIPSLE

SEQ ID NO: 66397 - protein, 35 aa, Artificial Sequence; identical to SEQ ID NO: 20922
  Cyclic GFR-binding peptide
  MOD_RES (32), (33): Xaa is C or S

SEQ ID NO: 66398 - protein, 33 aa, Artificial Sequence
  Cyclic GFR-binding peptide
  MOD_RES (28), (29): Xaa is C or S
IMPIKGYLLVRGNDFYLMNIPSTKVPAXXTSPV

SEQ ID NO: 66399 - protein, 31 aa, Artificial Sequence
  Cyclic GFR-binding peptide
  MOD_RES (28), (28): Xaa is C or S
MNPIKGYIVNSSDDFYLVNIPSLKTPAXTPK

SEQ ID NO: 66400 - protein, 23 aa, Artificial Sequence
  Cyclic GFR-binding peptide
DPIKGYVVNNAADFYLINIPSLR

SEQ ID NO: 66401 - protein, 33 aa, Artificial Sequence
  Cyclic GFR-binding peptide
  MOD_RES (30), (31): Xaa is C or S
VVMNPIKGYIVNNSSDFYLVNIPSLKTPAXXAK

SEQ ID NO: 66402 - protein, 33 aa, Artificial Sequence
  Cyclic GFR-binding peptide
  MOD_RES (1), (3): Xaa is C or S
XGXGEVVMEPIKGYVVKDYEDFYLMNIPSLETP

SEQ ID NO: 66403 - protein, 32 aa, Artificial Sequence
  Cyclic GFR-binding peptide
  MOD_RES (27), (28): Xaa is C or S
DPIKGYVVNNAADFYLINIPSLRAPVXXSAPA

SEQ ID NO: 66404 - protein, 30 aa, Artificial Sequence
  Cyclic GFR-binding peptide
  MOD_RES (1), (1): Xaa is C or S
XSEVVMDPIKGYVVNNASDFYLINIPSLRT

SEQ ID NO: 66405 - protein, 41 aa, Artificial Sequence; identical to SEQ ID NO: 20937
  Cyclic GFR-binding peptide
  MOD_RES (2), (4), (37), (38): Xaa is C or S

SEQ ID NO: 66406 - protein, 25 aa, Artificial Sequence
  Cyclic GFR-binding peptide
EVIMPIKGYLLVRGNDFYLMNIPST

SEQ ID NO: 66407 - protein, 41 aa, Artificial Sequence; identical to SEQ ID NO: 20939
  Cyclic GFR-binding peptide
  MOD_RES (2), (4), (36), (37): Xaa is C or S

SEQ ID NO: 66408 - protein, 30 aa, Artificial Sequence
  Cyclic GFR-binding peptide
  MOD_RES (1), (3): Xaa is C or S
XGXGEVVMEPIKGYVVKDYEDFYLMNIPSL

SEQ ID NO: 66409 - protein, 30 aa, Artificial Sequence
  Cyclic GFR-binding peptide
  MOD_RES (2), (4): Xaa is C or S
LXGXEEVIMPIKGYLLVRGNDFYLMNIPST

SEQ ID NO: 66410 - protein, 31 aa, Artificial Sequence
  Cyclic GFR-binding peptide
  MOD_RES (1), (1): Xaa is C or S
XARVVMNPIKGYIVNSSDDFYLVNIPSLQTP

SEQ ID NO: 66411 - protein, 38 aa, Artificial Sequence; identical to SEQ ID NO: 20942
  Cyclic GFR-binding peptide
  MOD_RES (1), (33), (34): Xaa is C or S

SEQ ID NO: 66412 - protein, 35 aa, Artificial Sequence; identical to SEQ ID NO: 20944
  Cyclic GFR-binding peptide
  MOD_RES (31), (32): Xaa is C or S

SEQ ID NO: 66413 - protein, 30 aa, Artificial Sequence
  Cyclic GFR-binding peptide
  MOD_RES (1), (1): Xaa is C or S
XESVAMGPIKGYYTVVGKDFYLINIPSLKT

SEQ ID NO: 66414 - protein, 35 aa, Artificial Sequence; identical to SEQ ID NO: 20947
  Cyclic GFR-binding peptide
  MOD_RES (1), (33), (34): Xaa is C or S

SEQ ID NO: 66415 - protein, 29 aa, Artificial Sequence
  Cyclic GFR-binding peptide
EEVIMPIKGYLLVRGNDFYLMNIPSTKVP

SEQ ID NO: 66416 - protein, 29 aa, Artificial Sequence
  Cyclic GFR-binding peptide
  MOD_RES (29), (29): Xaa is C or S
MGEPIKGYTPVGMDDFYLVNIPSLKTPVX

SEQ ID NO: 66417 - protein, 27 aa, Artificial Sequence
  Cyclic GFR-binding peptide
  MOD_RES (26), (27): Xaa is C or S
PIKGYTPVGMDDFYLVNIPSLKTPVXX

SEQ ID NO: 66418 - protein, 31 aa, Artificial Sequence
  Cyclic GFR-binding peptide
  MOD_RES (1), (1): Xaa is C or S
XGEVVMEPIKGYVVKDYEDFYLMNIPSLETP

SEQ ID NO: 66419 - protein, 28 aa, Artificial Sequence
  Cyclic GFR-binding peptide
  MOD_RES (2), (2): Xaa is C or S
GXESVAMGPIKGYYTVVGKDFYLINIPS

SEQ ID NO: 66420 - protein, 37 aa, Artificial Sequence; identical to SEQ ID NO: 20954
  Cyclic GFR-binding peptide
  MOD_RES (1), (33), (34): Xaa is C or S

SEQ ID NO: 66421 - protein, 34 aa, Artificial Sequence; identical to SEQ ID NO: 20956
  Cyclic GFR-binding peptide
  MOD_RES (33), (34): Xaa is C or S

SEQ ID NO: 66422 - protein, 35 aa, Artificial Sequence; identical to SEQ ID NO: 20958
  Cyclic GFR-binding peptide
  MOD_RES (1), (33), (34): Xaa is C or S

SEQ ID NO: 66423 - protein, 29 aa, Artificial Sequence
  Cyclic GFR-binding peptide
AAAAAAAAAPIKGYVVNNAADFYLINIPS

SEQ ID NO: 66424 - protein, 40 aa, Artificial Sequence; identical to SEQ ID NO: 20960
  Cyclic GFR-binding peptide
  MOD_RES (2), (4), (36), (37): Xaa is C or S

SEQ ID NO: 66425 - protein, 36 aa, Artificial Sequence; identical to SEQ ID NO: 20961
  Cyclic GFR-binding peptide
  MOD_RES (1), (3), (35), (36): Xaa is C or S

SEQ ID NO: 66426 - protein, 29 aa, Artificial Sequence
  Cyclic GFR-binding peptide
  MOD_RES (27), (28): Xaa is C or S
NPIKGYIVNSSDDFYLVNIPSLKTPAXXP

SEQ ID NO: 66427 - protein, 32 aa, Artificial Sequence
  Cyclic GFR-binding peptide
  MOD_RES (29), (30): Xaa is C or S
VMDPIKGYVVNNAADFYLINIPSLRAPVXXSA

SEQ ID NO: 66428 - protein, 33 aa, Artificial Sequence
  Cyclic GFR-binding peptide
  MOD_RES (27), (28): Xaa is C or S
EPIKGYVVKDYEDFYLMNIPSLETPVXXAKPIS

SEQ ID NO: 66429 - protein, 24 aa, Artificial Sequence
  Cyclic GFR-binding peptide
PIKGYVVNNAADFYLINIPSLRAP

SEQ ID NO: 66430 - protein, 36 aa, Artificial Sequence
  Cyclic GFR-binding peptide
  MOD_RES (30), (31): Xaa is C or S
VVMNPIKGYIVNNSSDFYLVNIPSLKTPAXXAKPVA

SEQ ID NO: 66431 - protein, 32 aa, Artificial Sequence
  Cyclic GFR-binding peptide
  MOD_RES (31), (32): Xaa is C or S
VSMGEPIKGYTPVGMDDFYLVNIPSLKTPVXX

SEQ ID NO: 66432 - protein, 27 aa, Artificial Sequence
  Cyclic GFR-binding peptide
  MOD_RES (27), (27): Xaa is C or S
EPIKGYTPVGMDDFYLVNIPSLKTPVX

SEQ ID NO: 66433 - protein, 29 aa, Artificial Sequence
  Cyclic GFR-binding peptide
  MOD_RES (29), (29): Xaa is C or S
VMEPIKGYVVKDYEDFYLMNIPSLETPVX

SEQ ID NO: 66434 - protein, 26 aa, Artificial Sequence
  Cyclic GFR-binding peptide
VVMNPIKGYIVNNSSDFYLVNIPSLK

SEQ ID NO: 66435 - protein, 27 aa, Artificial Sequence
  Cyclic GFR-binding peptide
GEVVMEPIKGYVVKDYEDFYLMNIPSL

SEQ ID NO: 66436 - protein, 29 aa, Artificial Sequence
  Cyclic GFR-binding peptide
ARVVMNPIKGYIVNSSDDFYLVNIPSLQT

SEQ ID NO: 66437 - protein, 32 aa, Artificial Sequence; identical to SEQ ID NO: 20969
  Cyclic GFR-binding peptide

SEQ ID NO: 66438 - protein, 29 aa, Artificial Sequence
  Cyclic GFR-binding peptide
EVVMDPIKGYVVNNAADFYLINIPSLRAP

SEQ ID NO: 66439 - protein, 27 aa, Artificial Sequence
  Cyclic GFR-binding peptide
IMPIKGYLLVRGNDFYLMNIPSTKVPA

SEQ ID NO: 66440 - protein, 35 aa, Artificial Sequence; identical to SEQ ID NO: 20973
  Cyclic GFR-binding peptide
  MOD_RES (2), (34), (35): Xaa is C or S

SEQ ID NO: 66441 - protein, 36 aa, Artificial Sequence; identical to SEQ ID NO: 20974
  Cyclic GFR-binding peptide
  MOD_RES (31), (32): Xaa is C or S

SEQ ID NO: 66442 - protein, 40 aa, Artificial Sequence; identical to SEQ ID NO: 20975
  Cyclic GFR-binding peptide
  MOD_RES (2), (34): Xaa is C or S

SEQ ID NO: 66443 - protein, 39 aa, Artificial Sequence; identical to SEQ ID NO: 20976
  Cyclic GFR-binding peptide
  MOD_RES (2), (4), (36), (37): Xaa is C or S

SEQ ID NO: 66444 - protein, 36 aa, Artificial Sequence; identical to SEQ ID NO: 20978
  Cyclic GFR-binding peptide
  MOD_RES (31), (32): Xaa is C or S

SEQ ID NO: 66445 - protein, 37 aa, Artificial Sequence; identical to SEQ ID NO: 20979
  Cyclic GFR-binding peptide
  MOD_RES (1), (3), (34), (35): Xaa is C or S

SEQ ID NO: 66446 - protein, 30 aa, Artificial Sequence
  Cyclic GFR-binding peptide
  MOD_RES (29), (30): Xaa is C or S
AMGPIKGYYTVVGKDFYLINIPSLKTPVXX

SEQ ID NO: 66447 - protein, 23 aa, Artificial Sequence
  Cyclic GFR-binding peptide
NPIKGYIVNNSSDFYLVNIPSLK

SEQ ID NO: 66448 - protein, 39 aa, Artificial Sequence; identical to SEQ ID NO: 20986
  Cyclic GFR-binding peptide
  MOD_RES (2), (34), (35): Xaa is C or S

SEQ ID NO: 66449 - protein, 25 aa, Artificial Sequence
  Cyclic GFR-binding peptide
MNPIKGYIVNSSDDFYLVNIPSLQT

SEQ ID NO: 66450 - protein, 36 aa, Artificial Sequence; identical to SEQ ID NO: 20988
  Cyclic GFR-binding peptide
  MOD_RES (31), (32): Xaa is C or S

SEQ ID NO: 66451 - protein, 37 aa, Artificial Sequence; identical to SEQ ID NO: 20989
  Cyclic GFR-binding peptide
  MOD_RES (1), (3), (35), (36): Xaa is C or S

SEQ ID NO: 66452 - protein, 28 aa, Artificial Sequence
  Cyclic GFR-binding peptide
  MOD_RES (27), (28): Xaa is C or S
EPIKGYTPVGMDDFYLVNIPSLKTPVXX

SEQ ID NO: 66453 - protein, 26 aa, Artificial Sequence
  Cyclic GFR-binding peptide
VIMPIKGYLLVRGNDFYLMNIPSTKV

SEQ ID NO: 66454 - protein, 29 aa, Artificial Sequence
  Cyclic GFR-binding peptide
  MOD_RES (26), (27): Xaa is C or S
PIKGYVVNNASDFYLINIPSLRTPVXXTP

SEQ ID NO: 66455 - protein, 35 aa, Artificial Sequence
  Cyclic GFR-binding peptide
  MOD_RES (30), (31): Xaa is C or S
VVMDPIKGYVVKENEDFYLMNIPSLETPVXXAKPI

SEQ ID NO: 66456 - protein, 23 aa, Artificial Sequence
  Cyclic GFR-binding peptide
AMGPIKGYYTVVGKDFYLINIPS

SEQ ID NO: 66457 - protein, 27 aa, Artificial Sequence
  Cyclic GFR-binding peptide
  MOD_RES (26), (27): Xaa is C or S
PIKGYVVKDYEDFYLMNIPSLETPVXX

SEQ ID NO: 66458 - protein, 33 aa, Artificial Sequence
  Cyclic GFR-binding peptide
  MOD_RES (2), (4): Xaa is C or S
HXGXARVVMNPIKGYIVNSSDDFYLVNIPSLQT

SEQ ID NO: 66459 - protein, 23 aa, Artificial Sequence
  Cyclic GFR-binding peptide
MGEPIKGYTPVGMDDFYLVNIPS

SEQ ID NO: 66460 - protein, 30 aa, Artificial Sequence
  Cyclic GFR-binding peptide
  MOD_RES (28), (29): Xaa is C or S
MDPIKGYVVKENEDFYLMNIPSLETPVXXA

SEQ ID NO: 66461 - protein, 24 aa, Artificial Sequence
  Cyclic GFR-binding peptide
DPIKGYVVKENEDFYLMNIPSLET

SEQ ID NO: 66462 - protein, 36 aa, Artificial Sequence; identical to SEQ ID NO: 20996
  Cyclic GFR-binding peptide
  MOD_RES (2), (4), (36): Xaa is C or S

SEQ ID NO: 66463 - protein, 32 aa, Artificial Sequence
  Cyclic GFR-binding peptide
  MOD_RES (30), (31): Xaa is C or S
SMGEPIKGYTPVGMDDFYLVNIPSLKTPVXXA

SEQ ID NO: 66464 - protein, 36 aa, Artificial Sequence; identical to SEQ ID NO: 21003
  Cyclic GFR-binding peptide
  MOD_RES (2), (4), (36): Xaa is C or S

SEQ ID NO: 66465 - protein, 33 aa, Artificial Sequence
  Cyclic GFR-binding peptide
  MOD_RES (29), (30): Xaa is C or S
AMGPIKGYYTVVGKDFYLINIPSLKTPVXXAKS

SEQ ID NO: 66466 - protein, 34 aa, Artificial Sequence; identical to SEQ ID NO: 21006
  Cyclic GFR-binding peptide
  MOD_RES (32), (33): Xaa is C or S

SEQ ID NO: 66467 - protein, 33 aa, Artificial Sequence
  Cyclic GFR-binding peptide
  MOD_RES (2), (4): Xaa is C or S
RXGXGEVVMDPIKGYVVKENEDFYLMNIPSLET

SEQ ID NO: 66468 - protein, 40 aa, Artificial Sequence; identical to SEQ ID NO: 21010
  Cyclic GFR-binding peptide
  MOD_RES (2), (34), (35): Xaa is C or S

SEQ ID NO: 66469 - protein, 34 aa, Artificial Sequence; identical to SEQ ID NO: 21022
  Cyclic GFR-binding peptide
  MOD_RES (1), (33): Xaa is C or S

SEQ ID NO: 66470 - protein, 28 aa, Artificial Sequence
  Cyclic GFR-binding peptide
  MOD_RES (26), (27): Xaa is C or S
PIKGYVVKDYEDFYLMNIPSLETPVXXA

SEQ ID NO: 66471 - protein, 24 aa, Artificial Sequence
  Cyclic GFR-binding peptide
MGPIKGYYTVVGKDFYLINIPSLK

SEQ ID NO: 66472 - protein, 36 aa, Artificial Sequence; identical to SEQ ID NO: 21027
  Cyclic GFR-binding peptide
  MOD_RES (1), (3), (35), (36): Xaa is C or S

SEQ ID NO: 66473 - protein, 40 aa, Artificial Sequence; identical to SEQ ID NO: 21026
  Cyclic GFR-binding peptide
  MOD_RES (1), (3), (35), (36): Xaa is C or S

SEQ ID NO: 66474 - protein, 28 aa, Artificial Sequence
  Cyclic GFR-binding peptide
  MOD_RES (27), (28): Xaa is C or S
MPIKGYLLVRGNDFYLMNIPSTKVPAXX

SEQ ID NO: 66475 - protein, 35 aa, Artificial Sequence; identical to SEQ ID NO: 21030
  Cyclic GFR-binding peptide
  MOD_RES (2), (34), (35): Xaa is C or S

SEQ ID NO: 66476 - protein, 29 aa, Artificial Sequence
  Cyclic GFR-binding peptide
  MOD_RES (28), (29): Xaa is C or S
GEPIKGYTPVGMDDFYLVNIPSLKTPVXX

SEQ ID NO: 66477 - protein, 30 aa, Artificial Sequence
  Cyclic GFR-binding peptide
  MOD_RES (1), (3): Xaa is C or S
XGXSRVVMNPIKGYIVNSSDDFYLVNIPSL

SEQ ID NO: 66478 - protein, 27 aa, Artificial Sequence
  Cyclic GFR-binding peptide
VMNPIKGYIVNSSDDFYLVNIPSLQTP

SEQ ID NO: 66479 - protein, 32 aa, Artificial Sequence
  Cyclic GFR-binding peptide
  MOD_RES (26), (27): Xaa is C or S
PIKGYIVNSSDDFYLVNIPSLKTPAXXPKPVY

SEQ ID NO: 66480 - protein, 34 aa, Artificial Sequence
  Cyclic GFR-binding peptide
  MOD_RES (2), (4): Xaa is C or S
RXGXSEVVMDPIKGYVVNNASDFYLINIPSLRTP

SEQ ID NO: 66481 - protein, 27 aa, Artificial Sequence
  Cyclic GFR-binding peptide
  MOD_RES (1), (1): Xaa is C or S
XAKVVMNPIKGYIVNNSSDFYLVNIPS

SEQ ID NO: 66482 - protein, 23 aa, Artificial Sequence
  Cyclic GFR-binding peptide
DPIKGYVVKENEDFYLMNIPSLE

SEQ ID NO: 66483 - protein, 29 aa, Artificial Sequence
  Cyclic GFR-binding peptide
  MOD_RES (27), (28): Xaa is C or S
MPIKGYLLVRGNDFYLMNIPSTKVPAXXT

SEQ ID NO: 66484 - protein, 32 aa, Artificial Sequence
  Cyclic GFR-binding peptide
  MOD_RES (2), (4): Xaa is C or S
RXGXEAVSMGEPIKGYTPVGMDDFYLVNIPSL

SEQ ID NO: 66485 - protein, 30 aa, Artificial Sequence
  Cyclic GFR-binding peptide
  MOD_RES (28), (29): Xaa is C or S
MNPIKGYIVNSSDDFYLVNIPSLQTPAXXP

SEQ ID NO: 66486 - protein, 37 aa, Artificial Sequence; identical to SEQ ID NO: 21037
  Cyclic GFR-binding peptide
  MOD_RES (2), (4), (36), (37): Xaa is C or S

SEQ ID NO: 66487 - protein, 32 aa, Artificial Sequence
  Cyclic GFR-binding peptide
  MOD_RES (30), (30): Xaa is C or S
VVMNPIKGYIVNSSDDFYLVNIPSLKTPAXTP

SEQ ID NO: 66488 - protein, 38 aa, Artificial Sequence; identical to SEQ ID NO: 21041
  Cyclic GFR-binding peptide
  MOD_RES (2), (34), (35): Xaa is C or S

SEQ ID NO: 66489 - protein, 26 aa, Artificial Sequence
  Cyclic GFR-binding peptide
VMNPIKGYIVNNSSDFYLVNIPSLKT

SEQ ID NO: 66490 - protein, 40 aa, Artificial Sequence; identical to SEQ ID NO: 21043
  Cyclic GFR-binding peptide
  MOD_RES (2), (4), (35), (36): Xaa is C or S

SEQ ID NO: 66491 - protein, 28 aa, Artificial Sequence
  Cyclic GFR-binding peptide
VVMEPIKGYVVKDYEDFYLMNIPSLETP

SEQ ID NO: 66492 - protein, 31 aa, Artificial Sequence
  Cyclic GFR-binding peptide
  MOD_RES (2), (4): Xaa is C or S
RXGXGEVVMDPIKGYVVKENEDFYLMNIPSL

SEQ ID NO: 66493 - protein, 35 aa, Artificial Sequence; identical to SEQ ID NO: 21045
  Cyclic GFR-binding peptide
  MOD_RES (2), (34), (35): Xaa is C or S

SEQ ID NO: 66494 - protein, 31 aa, Artificial Sequence; identical to SEQ ID NO: 21046
  Cyclic GFR-binding peptide

SEQ ID NO: 66495 - protein, 35 aa, Artificial Sequence; identical to SEQ ID NO: 21047
  Cyclic GFR-binding peptide
  MOD_RES (31), (32): Xaa is C or S

SEQ ID NO: 66496 - protein, 36 aa, Artificial Sequence; identical to SEQ ID NO: 21050
  Cyclic GFR-binding peptide
  MOD_RES (1), (3), (35), (36): Xaa is C or S

SEQ ID NO: 66497 - protein, 33 aa, Artificial Sequence; identical to SEQ ID NO: 21051
  Cyclic GFR-binding peptide
  MOD_RES (31), (32): Xaa is C or S

SEQ ID NO: 66498 - protein, 33 aa, Artificial Sequence
  Cyclic GFR-binding peptide
  MOD_RES (2), (4): Xaa is C or S
HXGXAKVVMNPIKGYIVNNSSDFYLVNIPSLKT

SEQ ID NO: 66499 - protein, 34 aa, Artificial Sequence
  Cyclic GFR-binding peptide
  MOD_RES (30), (31): Xaa is C or S
SMGEPIKGYTPVGMDDFYLVNIPSLKTPVXXAKG

SEQ ID NO: 66500 - protein, 36 aa, Artificial Sequence
  Cyclic GFR-binding peptide
  MOD_RES (30), (31): Xaa is C or S
VVMDPIKGYVVNNAADFYLINIPSLRAPVXXSAPAA

SEQ ID NO: 66501 - protein, 32 aa, Artificial Sequence
  Cyclic GFR-binding peptide
  MOD_RES (30), (31): Xaa is C or S
VVMNPIKGYIVNNSSDFYLVNIPSLKTPAXXA

SEQ ID NO: 66502 - protein, 29 aa, Artificial Sequence
  Cyclic GFR-binding peptide
  MOD_RES (26), (27): Xaa is C or S
PIKGYIVNSSDDFYLVNIPSLKTPAXXPK

SEQ ID NO: 66503 - protein, 27 aa, Artificial Sequence
  Cyclic GFR-binding peptide
GEPIKGYTPVGMDDFYLVNIPSLKTPV

SEQ ID NO: 66504 - protein, 30 aa, Artificial Sequence
  Cyclic GFR-binding peptide
  MOD_RES (27), (28): Xaa is C or S
DPIKGYVVNNASDFYLINIPSLRTPVXXTP

SEQ ID NO: 66505 - protein, 28 aa, Artificial Sequence
  Cyclic GFR-binding peptide
AEVVMDPIKGYVVNNAADFYLINIPSLR

SEQ ID NO: 66506 - protein, 33 aa, Artificial Sequence
  Cyclic GFR-binding peptide
  MOD_RES (28), (29): Xaa is C or S
GEPIKGYTPVGMDDFYLVNIPSLKTPVXXAKGV

SEQ ID NO: 66507 - protein, 29 aa, Artificial Sequence
  Cyclic GFR-binding peptide
AEVVMDPIKGYVVNNAADFYLINIPSLRA

SEQ ID NO: 66508 - protein, 26 aa, Artificial Sequence
  Cyclic GFR-binding peptide
  MOD_RES (26), (26): Xaa is C or S
PIKGYTPVGMDDFYLVNIPSLKTPVX

SEQ ID NO: 66509 - protein, 36 aa, Artificial Sequence; identical to SEQ ID NO: 21063
  Cyclic GFR-binding peptide
  MOD_RES (1), (33), (34): Xaa is C or S

SEQ ID NO: 66510 - protein, 35 aa, Artificial Sequence; identical to SEQ ID NO: 21065
  Cyclic GFR-binding peptide
  MOD_RES (31), (31): Xaa is C or S

SEQ ID NO: 66511 - protein, 31 aa, Artificial Sequence
  Cyclic GFR-binding peptide
  MOD_RES (26), (26): Xaa is C or S
PIKGYIVNSSDDFYLVNIPSLKTPAXTPKTV

SEQ ID NO: 66512 - protein, 28 aa, Artificial Sequence
  Cyclic GFR-binding peptide
VMEPIKGYVVKDYEDFYLMNIPSLETPV

SEQ ID NO: 66513 - protein, 22 aa, Artificial Sequence
  Cyclic GFR-binding peptide
PIKGYIVNSSDDFYLVNIPSLQ

SEQ ID NO: 66514 - protein, 31 aa, Artificial Sequence
  Cyclic GFR-binding peptide
  MOD_RES (30), (31): Xaa is C or S
VVMEPIKGYVVKDYEDFYLMNIPSLETPVXX

SEQ ID NO: 66515 - protein, 35 aa, Artificial Sequence; identical to SEQ ID NO: 21070
  Cyclic GFR-binding peptide
  MOD_RES (1), (33), (34): Xaa is C or S

SEQ ID NO: 66516 - protein, 28 aa, Artificial Sequence
  Cyclic GFR-binding peptide
MGEPIKGYTPVGMDDFYLVNIPSLKTPV

SEQ ID NO: 66517 - protein, 27 aa, Artificial Sequence
  Cyclic GFR-binding peptide
  MOD_RES (1), (1): Xaa is C or S
XGEVVMEPIKGYVVKDYEDFYLMNIPS

SEQ ID NO: 66518 - protein, 25 aa, Artificial Sequence
  Cyclic GFR-binding peptide
MPIKGYLLVRGNDFYLMNIPSTKVP

SEQ ID NO: 66519 - protein, 31 aa, Artificial Sequence
  Cyclic GFR-binding peptide
  MOD_RES (1), (3): Xaa is C or S
XGXARVVMNPIKGYIVNSSDDFYLVNIPSLQ

SEQ ID NO: 66520 - protein, 40 aa, Artificial Sequence; identical to SEQ ID NO: 21074
  Cyclic GFR-binding peptide
  MOD_RES (1), (3), (35), (36): Xaa is C or S

SEQ ID NO: 66521 - protein, 37 aa, Artificial Sequence; identical to SEQ ID NO: 21077
  Cyclic GFR-binding peptide
  MOD_RES (1), (3), (35), (36): Xaa is C or S

SEQ ID NO: 66522 - protein, 38 aa, Artificial Sequence; identical to SEQ ID NO: 21078
  Cyclic GFR-binding peptide
  MOD_RES (32), (33): Xaa is C or S

SEQ ID NO: 66523 - protein, 22 aa, Artificial Sequence
  Cyclic GFR-binding peptide
DPIKGYVVKENEDFYLMNIPSL

SEQ ID NO: 66524 - protein, 36 aa, Artificial Sequence; identical to SEQ ID NO: 21079
  Cyclic GFR-binding peptide
  MOD_RES (2), (4), (36): Xaa is C or S

SEQ ID NO: 66525 - protein, 28 aa, Artificial Sequence
  Cyclic GFR-binding peptide
  MOD_RES (27), (27): Xaa is C or S
NPIKGYIVNSSDDFYLVNIPSLKTPAXT

SEQ ID NO: 66526 - protein, 38 aa, Artificial Sequence; identical to SEQ ID NO: 21081
  Cyclic GFR-binding peptide
  MOD_RES (2), (4), (36), (37): Xaa is C or S

SEQ ID NO: 66527 - protein, 29 aa, Artificial Sequence
  Cyclic GFR-binding peptide
  MOD_RES (1), (1): Xaa is C or S
XAKVVMNPIKGYIVNNSSDFYLVNIPSLK

SEQ ID NO: 66528 - protein, 30 aa, Artificial Sequence
  Cyclic GFR-binding peptide
  MOD_RES (27), (28): Xaa is C or S
NPIKGYIVNSSDDFYLVNIPSLKTPAXXPK

SEQ ID NO: 66529 - protein, 24 aa, Artificial Sequence
  Cyclic GFR-binding peptide
NPIKGYIVNNSSDFYLVNIPSLKT

SEQ ID NO: 66530 - protein, 33 aa, Artificial Sequence; identical to SEQ ID NO: 21085
  Cyclic GFR-binding peptide
  MOD_RES (32), (33): Xaa is C or S

SEQ ID NO: 66531 - protein, 28 aa, Artificial Sequence
  Cyclic GFR-binding peptide
  MOD_RES (2), (2): Xaa is C or S
GXAEVVMDPIKGYVVNNAADFYLINIPS

SEQ ID NO: 66532 - protein, 28 aa, Artificial Sequence
  Cyclic GFR-binding peptide
ESVAMGPIKGYYTVVGKDFYLINIPSLK

SEQ ID NO: 66533 - protein, 37 aa, Artificial Sequence; identical to SEQ ID NO: 21088
  Cyclic GFR-binding peptide
  MOD_RES (1), (3), (35), (36): Xaa is C or S

SEQ ID NO: 66534 - protein, 35 aa, Artificial Sequence; identical to SEQ ID NO: 21089
  Cyclic GFR-binding peptide
  MOD_RES (32), (33): Xaa is C or S

SEQ ID NO: 66535 - protein, 27 aa, Artificial Sequence
  Cyclic GFR-binding peptide
SRVVMNPIKGYIVNSSDDFYLVNIPSL

SEQ ID NO: 66536 - protein, 31 aa, Artificial Sequence
  Cyclic GFR-binding peptide
  MOD_RES (29), (30): Xaa is C or S
VMNPIKGYIVNSSDDFYLVNIPSLQTPAXXP

SEQ ID NO: 66537 - protein, 35 aa, Artificial Sequence; identical to SEQ ID NO: 21093
  Cyclic GFR-binding peptide
  MOD_RES (31), (32): Xaa is C or S

SEQ ID NO: 66538 - protein, 32 aa, Artificial Sequence; identical to SEQ ID NO: 21095
  Cyclic GFR-binding peptide
  MOD_RES (32), (32): Xaa is C or S

SEQ ID NO: 66539 - protein, 27 aa, Artificial Sequence
  Cyclic GFR-binding peptide
ARVVMNPIKGYIVNSSDDFYLVNIPSL

SEQ ID NO: 66540 - protein, 31 aa, Artificial Sequence
  Cyclic GFR-binding peptide
  MOD_RES (1), (3): Xaa is C or S
XGXGEVVMDPIKGYVVKENEDFYLMNIPSLE

SEQ ID NO: 66541 - protein, 36 aa, Artificial Sequence; identical to SEQ ID NO: 21101
  Cyclic GFR-binding peptide
  MOD_RES (32), (33): Xaa is C or S

SEQ ID NO: 66542 - protein, 29 aa, Artificial Sequence
  Cyclic GFR-binding peptide
  MOD_RES (28), (29): Xaa is C or S
IMPIKGYLLVRGNDFYLMNIPSTKVPAXX

SEQ ID NO: 66543 - protein, 37 aa, Artificial Sequence; identical to SEQ ID NO: 21102
  Cyclic GFR-binding peptide
  MOD_RES (32), (33): Xaa is C or S

SEQ ID NO: 66544 - protein, 23 aa, Artificial Sequence
  Cyclic GFR-binding peptide
MGPIKGYYTVVGKDFYLINIPSL

SEQ ID NO: 66545 - protein, 29 aa, Artificial Sequence
  Cyclic GFR-binding peptide
  MOD_RES (1), (1): Xaa is C or S
XGEVVMDPIKGYVVKENEDFYLMNIPSLE

SEQ ID NO: 66546 - protein, 32 aa, Artificial Sequence; identical to SEQ ID NO: 21105
  Cyclic GFR-binding peptide
  MOD_RES (1), (1): Xaa is C or S

SEQ ID NO: 66547 - protein, 31 aa, Artificial Sequence
  Cyclic GFR-binding peptide
  MOD_RES (28), (29): Xaa is C or S
MDPIKGYVVNNASDFYLINIPSLRTPVXXTP

SEQ ID NO: 66548 - protein, 34 aa, Artificial Sequence
  Cyclic GFR-binding peptide
  MOD_RES (28), (29): Xaa is C or S
MNPIKGYIVNSSDDFYLVNIPSLQTPAXXPKPVT

SEQ ID NO: 66549 - protein, 23 aa, Artificial Sequence
  Cyclic GFR-binding peptide
VMNPIKGYIVNSSDDFYLVNIPS

SEQ ID NO: 66550 - protein, 29 aa, Artificial Sequence
  Cyclic GFR-binding peptide
  MOD_RES (27), (28): Xaa is C or S
EPIKGYVVKDYEDFYLMNIPSLETPVXXA

SEQ ID NO: 66551 - protein, 33 aa, Artificial Sequence
  Cyclic GFR-binding peptide
  MOD_RES (2), (4): Xaa is C or S
LXGXEEVIMPIKGYLLVRGNDFYLMNIPSTKVP

SEQ ID NO: 66552 - protein, 27 aa, Artificial Sequence
  Cyclic GFR-binding peptide
AEVVMDPIKGYVVNNAADFYLINIPSL

SEQ ID NO: 66553 - protein, 38 aa, Artificial Sequence; identical to SEQ ID NO: 21110
  Cyclic GFR-binding peptide
  MOD_RES (1), (33), (34): Xaa is C or S

SEQ ID NO: 66554 - protein, 36 aa, Artificial Sequence; identical to SEQ ID NO: 21114
  Cyclic GFR-binding peptide
  MOD_RES (1), (3), (35), (36): Xaa is C or S

SEQ ID NO: 66555 - protein, 34 aa, Artificial Sequence; identical to SEQ ID NO: 21117
  Cyclic GFR-binding peptide
  MOD_RES (32), (33): Xaa is C or S

SEQ ID NO: 66556 - protein, 35 aa, Artificial Sequence
  Cyclic GFR-binding peptide
  MOD_RES (29), (30): Xaa is C or S
VMDPIKGYVVNNASDFYLINIPSLRTPVXXTPPTS

SEQ ID NO: 66557 - protein, 31 aa, Artificial Sequence
  Cyclic GFR-binding peptide
  MOD_RES (27), (28): Xaa is C or S
EPIKGYTPVGMDDFYLVNIPSLKTPVXXAKG

SEQ ID NO: 66558 - protein, 41 aa, Artificial Sequence; identical to SEQ ID NO: 21123
  Cyclic GFR-binding peptide
  MOD_RES (1), (3), (35), (36): Xaa is C or S

SEQ ID NO: 66559 - protein, 29 aa, Artificial Sequence
  Cyclic GFR-binding peptide
  MOD_RES (2), (2): Xaa is C or S
GXAKVVMNPIKGYIVNNSSDFYLVNIPSL

SEQ ID NO: 66560 - protein, 26 aa, Artificial Sequence
  Cyclic GFR-binding peptide
VSMGEPIKGYTPVGMDDFYLVNIPSL

SEQ ID NO: 66561 - protein, 36 aa, Artificial Sequence; identical to SEQ ID NO: 21125
  Cyclic GFR-binding peptide
  MOD_RES (32), (32): Xaa is C or S

SEQ ID NO: 66562 - protein, 29 aa, Artificial Sequence
  Cyclic GFR-binding peptide
  MOD_RES (1), (1): Xaa is C or S
XSEVVMDPIKGYVVNNASDFYLINIPSLR

SEQ ID NO: 66563 - protein, 23 aa, Artificial Sequence
  Cyclic GFR-binding peptide
PIKGYIVNSSDDFYLVNIPSLKT

SEQ ID NO: 66564 - protein, 33 aa, Artificial Sequence
  Cyclic GFR-binding peptide
  MOD_RES (30), (31): Xaa is C or S
VVMDPIKGYVVNNAADFYLINIPSLRAPVXXSA

SEQ ID NO: 66565 - protein, 39 aa, Artificial Sequence; identical to SEQ ID NO: 21133
  Cyclic GFR-binding peptide
  MOD_RES (2), (35), (36): Xaa is C or S

SEQ ID NO: 66566 - protein, 29 aa, Artificial Sequence
  Cyclic GFR-binding peptide
  MOD_RES (2), (2): Xaa is C or S
GXSEVVMDPIKGYVVNNASDFYLINIPSL

SEQ ID NO: 66567 - protein, 28 aa, Artificial Sequence
  Cyclic GFR-binding peptide
  MOD_RES (27), (28): Xaa is C or S
NPIKGYIVNNSSDFYLVNIPSLKTPAXX

SEQ ID NO: 66568 - protein, 24 aa, Artificial Sequence
  Cyclic GFR-binding peptide
MPIKGYLLVRGNDFYLMNIPSTKV

SEQ ID NO: 66569 - protein, 22 aa, Artificial Sequence
  Cyclic GFR-binding peptide
PIKGYVVNNASDFYLINIPSLR

SEQ ID NO: 66570 - protein, 39 aa, Artificial Sequence; identical to SEQ ID NO: 21139
  Cyclic GFR-binding peptide
  MOD_RES (1), (33), (34): Xaa is C or S

SEQ ID NO: 66571 - protein, 30 aa, Artificial Sequence
  Cyclic GFR-binding peptide
  MOD_RES (27), (28): Xaa is C or S
EPIKGYTPVGMDDFYLVNIPSLKTPVXXAK

SEQ ID NO: 66572 - protein, 30 aa, Artificial Sequence
  Cyclic GFR-binding peptide
  MOD_RES (26), (27): Xaa is C or S
PIKGYVVKDYEDFYLMNIPSLETPVXXAKP

SEQ ID NO: 66573 - protein, 32 aa, Artificial Sequence
  Cyclic GFR-binding peptide
  MOD_RES (27), (28): Xaa is C or S
NPIKGYIVNSSDDFYLVNIPSLQTPAXXPKPV

SEQ ID NO: 66574 - protein, 27 aa, Artificial Sequence
  Cyclic GFR-binding peptide
VAMGPIKGYYTVVGKDFYLINIPSLKT

SEQ ID NO: 66575 - protein, 25 aa, Artificial Sequence
  Cyclic GFR-binding peptide
MNPIKGYIVNNSSDFYLVNIPSLKT

SEQ ID NO: 66576 - protein, 33 aa, Artificial Sequence
  Cyclic GFR-binding peptide
  MOD_RES (29), (30): Xaa is C or S
VMDPIKGYVVNNAADFYLINIPSLRAPVXXSAP

SEQ ID NO: 66577 - protein, 31 aa, Artificial Sequence
  Cyclic GFR-binding peptide
  MOD_RES (26), (27): Xaa is C or S
PIKGYIVNSSDDFYLVNIPSLKTPAXXPKPV

SEQ ID NO: 66578 - protein, 33 aa, Artificial Sequence
  Cyclic GFR-binding peptide
  MOD_RES (28), (29): Xaa is C or S
MEPIKGYVVKDYEDFYLMNIPSLETPVXXAKPI

SEQ ID NO: 66579 - protein, 31 aa, Artificial Sequence; identical to SEQ ID NO: 21147
  Cyclic GFR-binding peptide

SEQ ID NO: 66580 - protein, 27 aa, Artificial Sequence
  Cyclic GFR-binding peptide
VMDPIKGYVVNNAADFYLINIPSLRAP

SEQ ID NO: 66581 - protein, 38 aa, Artificial Sequence; identical to SEQ ID NO: 21150
  Cyclic GFR-binding peptide
  MOD_RES (1), (33), (34): Xaa is C or S

SEQ ID NO: 66582 - protein, 34 aa, Artificial Sequence; identical to SEQ ID NO: 21149
  Cyclic GFR-binding peptide
  MOD_RES (1), (3): Xaa is C or S

SEQ ID NO: 66583 - protein, 37 aa, Artificial Sequence; identical to SEQ ID NO: 21151
  Cyclic GFR-binding peptide
  MOD_RES (2), (4), (36), (37): Xaa is C or S

SEQ ID NO: 66584 - protein, 41 aa, Artificial Sequence; identical to SEQ ID NO: 21156
  Cyclic GFR-binding peptide
  MOD_RES (1), (3), (35), (36): Xaa is C or S

SEQ ID NO: 66585 - protein, 27 aa, Artificial Sequence
  Cyclic GFR-binding peptide
MGPIKGYYTVVGKDFYLINIPSLKTPV

SEQ ID NO: 66586 - protein, 29 aa, Artificial Sequence
  Cyclic GFR-binding peptide
  MOD_RES (26), (27): Xaa is C or S
PIKGYLLVRGNDFYLMNIPSTKVPAXXTS

SEQ ID NO: 66587 - protein, 37 aa, Artificial Sequence; identical to SEQ ID NO: 21159
  Cyclic GFR-binding peptide
  MOD_RES (2), (33), (34): Xaa is C or S

SEQ ID NO: 66588 - protein, 36 aa, Artificial Sequence; identical to SEQ ID NO: 21160
  Cyclic GFR-binding peptide
  MOD_RES (1), (3), (35), (36): Xaa is C or S

SEQ ID NO: 66589 - protein, 31 aa, Artificial Sequence
  Cyclic GFR-binding peptide
  MOD_RES (2), (2): Xaa is C or S
GXAKVVMNPIKGYIVNNSSDFYLVNIPSLKT

SEQ ID NO: 66590 - protein, 23 aa, Artificial Sequence
  Cyclic GFR-binding peptide
MDPIKGYVVNNAADFYLINIPSL

SEQ ID NO: 66591 - protein, 37 aa, Artificial Sequence; identical to SEQ ID NO: 21161
  Cyclic GFR-binding peptide
  MOD_RES (1), (32), (33): Xaa is C or S

SEQ ID NO: 66592 - protein, 26 aa, Artificial Sequence
  Cyclic GFR-binding peptide
DPIKGYVVNNAADFYLINIPSLRAPV

SEQ ID NO: 66593 - protein, 32 aa, Artificial Sequence; identical to SEQ ID NO: 21165
  Cyclic GFR-binding peptide
  MOD_RES (1), (1): Xaa is C or S

SEQ ID NO: 66594 - protein, 22 aa, Artificial Sequence
  Cyclic GFR-binding peptide
NPIKGYIVNSSDDFYLVNIPSL

SEQ ID NO: 66595 - protein, 25 aa, Artificial Sequence
  Cyclic GFR-binding peptide
AMGPIKGYYTVVGKDFYLINIPSLK

SEQ ID NO: 66596 - protein, 31 aa, Artificial Sequence
  Cyclic GFR-binding peptide
  MOD_RES (29), (30): Xaa is C or S
AMGPIKGYYTVVGKDFYLINIPSLKTPVXXA

SEQ ID NO: 66597 - protein, 42 aa, Artificial Sequence; identical to SEQ ID NO: 21169
  Cyclic GFR-binding peptide
  MOD_RES (2), (4), (36), (37): Xaa is C or S

SEQ ID NO: 66598 - protein, 33 aa, Artificial Sequence
  Cyclic GFR-binding peptide
  MOD_RES (29), (29): Xaa is C or S
VMNPIKGYIVNSSDDFYLVNIPSLKTPAXTPKT

SEQ ID NO: 66599 - protein, 32 aa, Artificial Sequence; identical to SEQ ID NO: 21171
  Cyclic GFR-binding peptide
  MOD_RES (1), (32): Xaa is C or S

SEQ ID NO: 66600 - protein, 37 aa, Artificial Sequence; identical to SEQ ID NO: 21173
  Cyclic GFR-binding peptide
  MOD_RES (2), (34), (35): Xaa is C or S

SEQ ID NO: 66601 - protein, 37 aa, Artificial Sequence; identical to SEQ ID NO: 21174
  Cyclic GFR-binding peptide
  MOD_RES (31), (32): Xaa is C or S

SEQ ID NO: 66602 - protein, 21 aa, Artificial Sequence
  Cyclic GFR-binding peptide
PIKGYVVKENEDFYLMNIPSL

SEQ ID NO: 66603 - protein, 32 aa, Artificial Sequence; identical to SEQ ID NO: 21177
  Cyclic GFR-binding peptide
  MOD_RES (31), (32): Xaa is C or S

SEQ ID NO: 66604 - protein, 32 aa, Artificial Sequence
  Cyclic GFR-binding peptide
  MOD_RES (27), (28): Xaa is C or S
NPIKGYIVNSSDDFYLVNIPSLKTPAXXPKPV

SEQ ID NO: 66605 - protein, 22 aa, Artificial Sequence
  Cyclic GFR-binding peptide
MDPIKGYVVNNASDFYLINIPS

SEQ ID NO: 66606 - protein, 26 aa, Artificial Sequence
  Cyclic GFR-binding peptide
  MOD_RES (26), (26): Xaa is C or S
PIKGYIVNSSDDFYLVNIPSLQTPAX

SEQ ID NO: 66607 - protein, 38 aa, Artificial Sequence; identical to SEQ ID NO: 21184
  Cyclic GFR-binding peptide
  MOD_RES (32), (33): Xaa is C or S

SEQ ID NO: 66608 - protein, 36 aa, Artificial Sequence; identical to SEQ ID NO: 21185
  Cyclic GFR-binding peptide
  MOD_RES (2), (34), (35): Xaa is C or S

SEQ ID NO: 66609 - protein, 31 aa, Artificial Sequence; identical to SEQ ID NO: 21188
  Cyclic GFR-binding peptide
  MOD_RES (31), (31): Xaa is C or S

SEQ ID NO: 66610 - protein, 35 aa, Artificial Sequence; identical to SEQ ID NO: 21189
  Cyclic GFR-binding peptide
  MOD_RES (31), (32): Xaa is C or S

SEQ ID NO: 66611 - protein, 33 aa, Artificial Sequence; identical to SEQ ID NO: 21192
  Cyclic GFR-binding peptide
  MOD_RES (31), (32): Xaa is C or S

SEQ ID NO: 66612 - protein, 33 aa, Artificial Sequence; identical to SEQ ID NO: 21197
  Cyclic GFR-binding peptide
  MOD_RES (32), (33): Xaa is C or S

SEQ ID NO: 66613 - protein, 30 aa, Artificial Sequence
  Cyclic GFR-binding peptide
ESVAMGPIKGYYTVVGKDFYLINIPSLKTP

SEQ ID NO: 66614 - protein, 27 aa, Artificial Sequence
  Cyclic GFR-binding peptide
VSMGEPIKGYTPVGMDDFYLVNIPSLK

SEQ ID NO: 66615 - protein, 39 aa, Artificial Sequence; identical to SEQ ID NO: 21199
  Cyclic GFR-binding peptide
  MOD_RES (2), (4), (36), (37): Xaa is C or S

SEQ ID NO: 66616 - protein, 36 aa, Artificial Sequence; identical to SEQ ID NO: 21200
  Cyclic GFR-binding peptide
  MOD_RES (2), (34), (35): Xaa is C or S

SEQ ID NO: 66617 - protein, 24 aa, Artificial Sequence
  Cyclic GFR-binding peptide
IMPIKGYLLVRGNDFYLMNIPSTK

SEQ ID NO: 66618 - protein, 34 aa, Artificial Sequence
  Cyclic GFR-binding peptide
  MOD_RES (31), (32): Xaa is C or S
VSMGEPIKGYTPVGMDDFYLVNIPSLKTPVXXAK

SEQ ID NO: 66619 - protein, 30 aa, Artificial Sequence
  Cyclic GFR-binding peptide
  MOD_RES (27), (27): Xaa is C or S
NPIKGYIVNSSDDFYLVNIPSLKTPAXTPK

SEQ ID NO: 66620 - protein, 28 aa, Artificial Sequence
  Cyclic GFR-binding peptide
  MOD_RES (2), (2): Xaa is C or S
GXSRVVMNPIKGYIVNSSDDFYLVNIPS

SEQ ID NO: 66621 - protein, 27 aa, Artificial Sequence
  Cyclic GFR-binding peptide
  MOD_RES (27), (27): Xaa is C or S
MPIKGYLLVRGNDFYLMNIPSTKVPAX

SEQ ID NO: 66622 - protein, 36 aa, Artificial Sequence; identical to SEQ ID NO: 21207
  Cyclic GFR-binding peptide
  MOD_RES (1), (3), (35), (36): Xaa is C or S

SEQ ID NO: 66623 - protein, 36 aa, Artificial Sequence; identical to SEQ ID NO: 21209
  Cyclic GFR-binding peptide
  MOD_RES (2), (4), (36): Xaa is C or S

SEQ ID NO: 66624 - protein, 42 aa, Artificial Sequence; identical to SEQ ID NO: 21215
  Cyclic GFR-binding peptide
  MOD_RES (1), (3), (36), (37): Xaa is C or S

SEQ ID NO: 66625 - protein, 39 aa, Artificial Sequence; identical to SEQ ID NO: 21216
  Cyclic GFR-binding peptide
  MOD_RES (1), (3), (35), (36): Xaa is C or S

SEQ ID NO: 66626 - protein, 26 aa, Artificial Sequence
  Cyclic GFR-binding peptide
AEVVMDPIKGYVVNNAADFYLINIPS

SEQ ID NO: 66627 - protein, 40 aa, Artificial Sequence; identical to SEQ ID NO: 21218
  Cyclic GFR-binding peptide
  MOD_RES (2), (34), (35): Xaa is C or S

SEQ ID NO: 66628 - protein, 23 aa, Artificial Sequence
  Cyclic GFR-binding peptide
IMPIKGYLLVRGNDFYLMNIPST

SEQ ID NO: 66629 - protein, 35 aa, Artificial Sequence
  Cyclic GFR-binding peptide
  MOD_RES (30), (31): Xaa is C or S
VVMEPIKGYVVKDYEDFYLMNIPSLETPVXXAKPI

SEQ ID NO: 66630 - protein, 34 aa, Artificial Sequence; identical to SEQ ID NO: 21226
  Cyclic GFR-binding peptide
  MOD_RES (1), (33), (34): Xaa is C or S

SEQ ID NO: 66631 - protein, 29 aa, Artificial Sequence
  Cyclic GFR-binding peptide
EVVMDPIKGYVVNNASDFYLINIPSLRTP

SEQ ID NO: 66632 - protein, 38 aa, Artificial Sequence; identical to SEQ ID NO: 21232
  Cyclic GFR-binding peptide
  MOD_RES (1), (3), (35), (36): Xaa is C or S

SEQ ID NO: 66633 - protein, 31 aa, Artificial Sequence; identical to SEQ ID NO: 21235
  Cyclic GFR-binding peptide

SEQ ID NO: 66634 - protein, 33 aa, Artificial Sequence
  Cyclic GFR-binding peptide
  MOD_RES (30), (31): Xaa is C or S
VVMDPIKGYVVNNASDFYLINIPSLRTPVXXTP

SEQ ID NO: 66635 - protein, 32 aa, Artificial Sequence
  Cyclic GFR-binding peptide
  MOD_RES (2), (4): Xaa is C or S
LXGXEEVIMPIKGYLLVRGNDFYLMNIPSTKV

SEQ ID NO: 66636 - protein, 40 aa, Artificial Sequence; identical to SEQ ID NO: 21242
  Cyclic GFR-binding peptide
  MOD_RES (2), (4), (36), (37): Xaa is C or S

SEQ ID NO: 66637 - protein, 21 aa, Artificial Sequence
  Cyclic GFR-binding peptide
GPIKGYYTVVGKDFYLINIPS

SEQ ID NO: 66638 - protein, 28 aa, Artificial Sequence
  Cyclic GFR-binding peptide
VMDPIKGYVVNNASDFYLINIPSLRTPV

SEQ ID NO: 66639 - protein, 24 aa, Artificial Sequence
  Cyclic GFR-binding peptide
MDPIKGYVVKENEDFYLMNIPSLE

SEQ ID NO: 66640 - protein, 26 aa, Artificial Sequence
  Cyclic GFR-binding peptide
ESVAMGPIKGYYTVVGKDFYLINIPS

SEQ ID NO: 66641 - protein, 26 aa, Artificial Sequence
  Cyclic GFR-binding peptide
  MOD_RES (26), (26): Xaa is C or S
PIKGYVVKDYEDFYLMNIPSLETPVX

SEQ ID NO: 66642 - protein, 26 aa, Artificial Sequence
  Cyclic GFR-binding peptide
MGPIKGYYTVVGKDFYLINIPSLKTP

SEQ ID NO: 66643 - protein, 28 aa, Artificial Sequence
  Cyclic GFR-binding peptide
  MOD_RES (2), (2): Xaa is C or S
GXARVVMNPIKGYIVNSSDDFYLVNIPS

SEQ ID NO: 66644 - protein, 23 aa, Artificial Sequence
  Cyclic GFR-binding peptide
PIKGYYTVVGKDFYLINIPSLKT

SEQ ID NO: 66645 - protein, 29 aa, Artificial Sequence
  Cyclic GFR-binding peptide
  MOD_RES (29), (29): Xaa is C or S
VMDPIKGYVVKENEDFYLMNIPSLETPVX

SEQ ID NO: 66646 - protein, 30 aa, Artificial Sequence
  Cyclic GFR-binding peptide
  MOD_RES (1), (1): Xaa is C or S
XGEVVMDPIKGYVVKENEDFYLMNIPSLET

SEQ ID NO: 66647 - protein, 25 aa, Artificial Sequence
  Cyclic GFR-binding peptide
NPIKGYIVNNSSDFYLVNIPSLKTP

SEQ ID NO: 66648 - protein, 30 aa, Artificial Sequence
  Cyclic GFR-binding peptide
  MOD_RES (29), (29): Xaa is C or S
VMNPIKGYIVNSSDDFYLVNIPSLKTPAXT

SEQ ID NO: 66649 - protein, 36 aa, Artificial Sequence; identical to SEQ ID NO: 21248
  Cyclic GFR-binding peptide
  MOD_RES (32), (33): Xaa is C or S

SEQ ID NO: 66650 - protein, 28 aa, Artificial Sequence
  Cyclic GFR-binding peptide
VSMGEPIKGYTPVGMDDFYLVNIPSLKT

SEQ ID NO: 66651 - protein, 28 aa, Artificial Sequence
  Cyclic GFR-binding peptide
AKVVMNPIKGYIVNNSSDFYLVNIPSLK

SEQ ID NO: 66652 - protein, 27 aa, Artificial Sequence
  Cyclic GFR-binding peptide
  MOD_RES (27), (27): Xaa is C or S
NPIKGYIVNNSSDFYLVNIPSLKTPAX

SEQ ID NO: 66653 - protein, 30 aa, Artificial Sequence
  Cyclic GFR-binding peptide
  MOD_RES (2), (2): Xaa is C or S
GXEAVSMGEPIKGYTPVGMDDFYLVNIPSL

SEQ ID NO: 66654 - protein, 22 aa, Artificial Sequence
  Cyclic GFR-binding peptide
PIKGYIVNNSSDFYLVNIPSLK

SEQ ID NO: 66655 - protein, 37 aa, Artificial Sequence; identical to SEQ ID NO: 21262
  Cyclic GFR-binding peptide
  MOD_RES (1), (33), (34): Xaa is C or S

SEQ ID NO: 66656 - protein, 37 aa, Artificial Sequence; identical to SEQ ID NO: 21263
  Cyclic GFR-binding peptide
  MOD_RES (1), (33), (34): Xaa is C or S

SEQ ID NO: 66657 - protein, 33 aa, Artificial Sequence
  Cyclic GFR-binding peptide
  MOD_RES (27), (27): Xaa is C or S
NPIKGYIVNSSDDFYLVNIPSLKTPAXTPKTVH

SEQ ID NO: 66658 - protein, 31 aa, Artificial Sequence; identical to SEQ ID NO: 21270
  Cyclic GFR-binding peptide
  MOD_RES (31), (31): Xaa is C or S

SEQ ID NO: 66659 - protein, 30 aa, Artificial Sequence
  Cyclic GFR-binding peptide
  MOD_RES (28), (29): Xaa is C or S
MDPIKGYVVNNASDFYLINIPSLRTPVXXT

SEQ ID NO: 66660 - protein, 34 aa, Artificial Sequence
  Cyclic GFR-binding peptide
  MOD_RES (28), (29): Xaa is C or S
GEPIKGYTPVGMDDFYLVNIPSLKTPVXXAKGVK

SEQ ID NO: 66661 - protein, 39 aa, Artificial Sequence; identical to SEQ ID NO: 21275
  Cyclic GFR-binding peptide
  MOD_RES (2), (34), (35): Xaa is C or S

SEQ ID NO: 66662 - protein, 31 aa, Artificial Sequence
  Cyclic GFR-binding peptide
  MOD_RES (29), (30): Xaa is C or S
VIMPIKGYLLVRGNDFYLMNIPSTKVPAXXT

SEQ ID NO: 66663 - protein, 29 aa, Artificial Sequence
  Cyclic GFR-binding peptide
SVAMGPIKGYYTVVGKDFYLINIPSLKTP

SEQ ID NO: 66664 - protein, 33 aa, Artificial Sequence; identical to SEQ ID NO: 21284
  Cyclic GFR-binding peptide
  MOD_RES (32), (33): Xaa is C or S

SEQ ID NO: 66665 - protein, 31 aa, Artificial Sequence
  Cyclic GFR-binding peptide
  MOD_RES (2), (2): Xaa is C or S
GXSEVVMDPIKGYVVNNASDFYLINIPSLRT

SEQ ID NO: 66666 - protein, 39 aa, Artificial Sequence; identical to SEQ ID NO: 21287
  Cyclic GFR-binding peptide
  MOD_RES (1), (3), (35), (36): Xaa is C or S

SEQ ID NO: 66667 - protein, 38 aa, Artificial Sequence; identical to SEQ ID NO: 21294
  Cyclic GFR-binding peptide
  MOD_RES (2), (4), (37), (38): Xaa is C or S

SEQ ID NO: 66668 - protein, 32 aa, Artificial Sequence
  Cyclic GFR-binding peptide
  MOD_RES (29), (30): Xaa is C or S
VMNPIKGYIVNNSSDFYLVNIPSLKTPAXXAK

SEQ ID NO: 66669 - protein, 30 aa, Artificial Sequence
  Cyclic GFR-binding peptide
  MOD_RES (1), (1): Xaa is C or S
XGEVVMEPIKGYVVKDYEDFYLMNIPSLET

SEQ ID NO: 66670 - protein, 30 aa, Artificial Sequence; identical to SEQ ID NO: 21296
  Cyclic GFR-binding peptide

SEQ ID NO: 66671 - protein, 29 aa, Artificial Sequence
  Cyclic GFR-binding peptide
  MOD_RES (2), (2): Xaa is C or S
GXGEVVMDPIKGYVVKENEDFYLMNIPSL

SEQ ID NO: 66672 - protein, 39 aa, Artificial Sequence; identical to SEQ ID NO: 21301
  Cyclic GFR-binding peptide
  MOD_RES (2), (33), (34): Xaa is C or S

SEQ ID NO: 66673 - protein, 31 aa, Artificial Sequence
  Cyclic GFR-binding peptide
  MOD_RES (31), (31): Xaa is C or S
VSMGEPIKGYTPVGMDDFYLVNIPSLKTPVX

SEQ ID NO: 66674 - protein, 34 aa, Artificial Sequence
  Cyclic GFR-binding peptide
  MOD_RES (28), (29): Xaa is C or S
IMPIKGYLLVRGNDFYLMNIPSTKVPAXXTSPVR

SEQ ID NO: 66675 - protein, 33 aa, Artificial Sequence
  Cyclic GFR-binding peptide
  MOD_RES (2), (4): Xaa is C or S
RXGXSEVVMDPIKGYVVNNASDFYLINIPSLRT

SEQ ID NO: 66676 - protein, 30 aa, Artificial Sequence
  Cyclic GFR-binding peptide
  MOD_RES (27), (28): Xaa is C or S
DPIKGYVVNNAADFYLINIPSLRAPVXXSA

SEQ ID NO: 66677 - protein, 32 aa, Artificial Sequence
  Cyclic GFR-binding peptide
  MOD_RES (30), (31): Xaa is C or S
VVMDPIKGYVVNNASDFYLINIPSLRTPVXXT

SEQ ID NO: 66678 - protein, 32 aa, Artificial Sequence
  Cyclic GFR-binding peptide
  MOD_RES (2), (2): Xaa is C or S
GXAEVVMDPIKGYVVNNAADFYLINIPSLRAP

SEQ ID NO: 66679 - protein, 34 aa, Artificial Sequence; identical to SEQ ID NO: 21304
  Cyclic GFR-binding peptide
  MOD_RES (31), (32): Xaa is C or S

SEQ ID NO: 66680 - protein, 30 aa, Artificial Sequence
  Cyclic GFR-binding peptide
  MOD_RES (1), (1): Xaa is C or S
XARVVMNPIKGYIVNSSDDFYLVNIPSLQT

SEQ ID NO: 66681 - protein, 24 aa, Artificial Sequence
  Cyclic GFR-binding peptide
DPIKGYVVNNASDFYLINIPSLRT

SEQ ID NO: 66682 - protein, 32 aa, Artificial Sequence
  Cyclic GFR-binding peptide
  MOD_RES (27), (28): Xaa is C or S
NPIKGYIVNNSSDFYLVNIPSLKTPAXXAKPV

SEQ ID NO: 66683 - protein, 34 aa, Artificial Sequence; identical to SEQ ID NO: 21305
  Cyclic GFR-binding peptide
  MOD_RES (31), (31): Xaa is C or S

SEQ ID NO: 66684 - protein, 34 aa, Artificial Sequence
  Cyclic GFR-binding peptide
  MOD_RES (2), (4): Xaa is C or S
RXGXESVAMGPIKGYYTVVGKDFYLINIPSLKTP

SEQ ID NO: 66685 - protein, 24 aa, Artificial Sequence
  Cyclic GFR-binding peptide
VVMNPIKGYIVNNSSDFYLVNIPS

SEQ ID NO: 66686 - protein, 26 aa, Artificial Sequence
  Cyclic GFR-binding peptide
GEVVMEPIKGYVVKDYEDFYLMNIPS

SEQ ID NO: 66687 - protein, 36 aa, Artificial Sequence; identical to SEQ ID NO: 21312
  Cyclic GFR-binding peptide
  MOD_RES (1), (33), (34): Xaa is C or S

SEQ ID NO: 66688 - protein, 28 aa, Artificial Sequence
  Cyclic GFR-binding peptide
VMDPIKGYVVKENEDFYLMNIPSLETPV

SEQ ID NO: 66689 - protein, 30 aa, Artificial Sequence
  Cyclic GFR-binding peptide
AKVVMNPIKGYIVNNSSDFYLVNIPSLKTP

SEQ ID NO: 66690 - protein, 27 aa, Artificial Sequence
  Cyclic GFR-binding peptide
VMDPIKGYVVNNASDFYLINIPSLRTP

SEQ ID NO: 66691 - protein, 38 aa, Artificial Sequence; identical to SEQ ID NO: 21316
  Cyclic GFR-binding peptide
  MOD_RES (1), (33), (34): Xaa is C or S

SEQ ID NO: 66692 - protein, 38 aa, Artificial Sequence; identical to SEQ ID NO: 21321
  Cyclic GFR-binding peptide
  MOD_RES (2), (4), (36), (37): Xaa is C or S

SEQ ID NO: 66693 - protein, 41 aa, Artificial Sequence; identical to SEQ ID NO: 21323
  Cyclic GFR-binding peptide
  MOD_RES (2), (4), (36), (37): Xaa is C or S

SEQ ID NO: 66694 - protein, 25 aa, Artificial Sequence
  Cyclic GFR-binding peptide
PIKGYVVNNASDFYLINIPSLRTPV

SEQ ID NO: 66695 - protein, 35 aa, Artificial Sequence
  Cyclic GFR-binding peptide
  MOD_RES (29), (30): Xaa is C or S
VMEPIKGYVVKDYEDFYLMNIPSLETPVXXAKPIS

SEQ ID NO: 66696 - protein, 33 aa, Artificial Sequence; identical to SEQ ID NO: 21327
  Cyclic GFR-binding peptide
  MOD_RES (1), (1): Xaa is C or S

SEQ ID NO: 66697 - protein, 31 aa, Artificial Sequence
  Cyclic GFR-binding peptide
  MOD_RES (30), (30): Xaa is C or S
VVMNPIKGYIVNSSDDFYLVNIPSLKTPAXT

SEQ ID NO: 66698 - protein, 27 aa, Artificial Sequence
  Cyclic GFR-binding peptide
VMDPIKGYVVKENEDFYLMNIPSLETP

SEQ ID NO: 66699 - protein, 36 aa, Artificial Sequence
  Cyclic GFR-binding peptide
  MOD_RES (30), (31): Xaa is C or S
VVMNPIKGYIVNSSDDFYLVNIPSLKTPAXXPKPVH

SEQ ID NO: 66700 - protein, 31 aa, Artificial Sequence
  Cyclic GFR-binding peptide
  MOD_RES (27), (28): Xaa is C or S
EPIKGYVVKDYEDFYLMNIPSLETPVXXAKP

SEQ ID NO: 66701 - protein, 29 aa, Artificial Sequence
  Cyclic GFR-binding peptide
  MOD_RES (29), (29): Xaa is C or S
VMDPIKGYVVNNAADFYLINIPSLRAPVX

SEQ ID NO: 66702 - protein, 25 aa, Artificial Sequence
  Cyclic GFR-binding peptide
VVMDPIKGYVVKENEDFYLMNIPSL

SEQ ID NO: 66703 - protein, 34 aa, Artificial Sequence
  Cyclic GFR-binding peptide
  MOD_RES (29), (30): Xaa is C or S
VMEPIKGYVVKDYEDFYLMNIPSLETPVXXAKPI

SEQ ID NO: 66704 - protein, 22 aa, Artificial Sequence
  Cyclic GFR-binding peptide
PIKGYVVKENEDFYLMNIPSLE

SEQ ID NO: 66705 - protein, 38 aa, Artificial Sequence
  Cyclic GFR-binding peptide
  MOD_RES (32), (33): Xaa is C or S
AVSMGEPIKGYTPVGMDDFYLVNIPSLKTPVXXAKGVK

SEQ ID NO: 66706 - protein, 33 aa, Artificial Sequence; identical to SEQ ID NO: 21331
  Cyclic GFR-binding peptide
  MOD_RES (2), (2): Xaa is C or S

SEQ ID NO: 66707 - protein, 34 aa, Artificial Sequence; identical to SEQ ID NO: 21332
  Cyclic GFR-binding peptide
  MOD_RES (2), (34): Xaa is C or S

SEQ ID NO: 66708 - protein, 30 aa, Artificial Sequence
  Cyclic GFR-binding peptide
  MOD_RES (2), (2): Xaa is C or S
GXAEVVMDPIKGYVVNNAADFYLINIPSLR

SEQ ID NO: 66709 - protein, 29 aa, Artificial Sequence
  Cyclic GFR-binding peptide
AAAAAAAAAPIKGYYTVVGKDFYLINIPS

SEQ ID NO: 66710 - protein, 27 aa, Artificial Sequence
  Cyclic GFR-binding peptide
  MOD_RES (1), (1): Xaa is C or S
XAEVVMDPIKGYVVNNAADFYLINIPS

SEQ ID NO: 66711 - protein, 29 aa, Artificial Sequence
  Cyclic GFR-binding peptide
  MOD_RES (2), (4): Xaa is C or S
LXGXEEVIMPIKGYLLVRGNDFYLMNIPS

SEQ ID NO: 66712 - protein, 30 aa, Artificial Sequence
  Cyclic GFR-binding peptide
  MOD_RES (2), (4): Xaa is C or S
HXGXARVVMNPIKGYIVNSSDDFYLVNIPS

SEQ ID NO: 66713 - protein, 31 aa, Artificial Sequence
  Cyclic GFR-binding peptide
  MOD_RES (27), (28): Xaa is C or S
MPIKGYLLVRGNDFYLMNIPSTKVPAXXTSP

SEQ ID NO: 66714 - protein, 33 aa, Artificial Sequence
  Cyclic GFR-binding peptide
  MOD_RES (28), (29): Xaa is C or S
MDPIKGYVVNNASDFYLINIPSLRTPVXXTPPT

SEQ ID NO: 66715 - protein, 37 aa, Artificial Sequence; identical to SEQ ID NO: 21337
  Cyclic GFR-binding peptide
  MOD_RES (1), (33), (34): Xaa is C or S

SEQ ID NO: 66716 - protein, 26 aa, Artificial Sequence
  Cyclic GFR-binding peptide
  MOD_RES (26), (26): Xaa is C or S
PIKGYVVNNAADFYLINIPSLRAPVX

SEQ ID NO: 66717 - protein, 31 aa, Artificial Sequence
  Cyclic GFR-binding peptide
  MOD_RES (30), (31): Xaa is C or S
SMGEPIKGYTPVGMDDFYLVNIPSLKTPVXX

SEQ ID NO: 66718 - protein, 23 aa, Artificial Sequence
  Cyclic GFR-binding peptide
DPIKGYVVNNASDFYLINIPSLR

SEQ ID NO: 66719 - protein, 40 aa, Artificial Sequence; identical to SEQ ID NO: 21338
  Cyclic GFR-binding peptide
  MOD_RES (2), (34), (35): Xaa is C or S

SEQ ID NO: 66720 - protein, 33 aa, Artificial Sequence
  Cyclic GFR-binding peptide
  MOD_RES (1), (3): Xaa is C or S
XGXSEVVMDPIKGYVVNNASDFYLINIPSLRTP

SEQ ID NO: 66721 - protein, 34 aa, Artificial Sequence; identical to SEQ ID NO: 21339
  Cyclic GFR-binding peptide
  MOD_RES (32), (33): Xaa is C or S

SEQ ID NO: 66722 - protein, 37 aa, Artificial Sequence; identical to SEQ ID NO: 21341
  Cyclic GFR-binding peptide
  MOD_RES (32), (32): Xaa is C or S

SEQ ID NO: 66723 - protein, 34 aa, Artificial Sequence
  Cyclic GFR-binding peptide
  MOD_RES (1), (3): Xaa is C or S
XGXEAVSMGEPIKGYTPVGMDDFYLVNIPSLKTP

SEQ ID NO: 66724 - protein, 31 aa, Artificial Sequence
  Cyclic GFR-binding peptide
  MOD_RES (26), (27): Xaa is C or S
PIKGYVVKDYEDFYLMNIPSLETPVXXAKPI

SEQ ID NO: 66725 - protein, 26 aa, Artificial Sequence
  Cyclic GFR-binding peptide
MNPIKGYIVNNSSDFYLVNIPSLKTP

SEQ ID NO: 66726 - protein, 30 aa, Artificial Sequence
  Cyclic GFR-binding peptide
  MOD_RES (28), (28): Xaa is C or S
MNPIKGYIVNSSDDFYLVNIPSLKTPAXTP

SEQ ID NO: 66727 - protein, 35 aa, Artificial Sequence
  Cyclic GFR-binding peptide
  MOD_RES (29), (30): Xaa is C or S
AMGPIKGYYTVVGKDFYLINIPSLKTPVXXAKSAK

SEQ ID NO: 66728 - protein, 25 aa, Artificial Sequence
  Cyclic GFR-binding peptide
PIKGYVVKENEDFYLMNIPSLETPV

SEQ ID NO: 66729 - protein, 32 aa, Artificial Sequence
  Cyclic GFR-binding peptide
  MOD_RES (29), (30): Xaa is C or S
AMGPIKGYYTVVGKDFYLINIPSLKTPVXXAK

SEQ ID NO: 66730 - protein, 30 aa, Artificial Sequence
  Cyclic GFR-binding peptide
  MOD_RES (2), (2): Xaa is C or S
GXARVVMNPIKGYIVNSSDDFYLVNIPSLQ

SEQ ID NO: 66731 - protein, 30 aa, Artificial Sequence
  Cyclic GFR-binding peptide
  MOD_RES (1), (1): Xaa is C or S
XAEVVMDPIKGYVVNNAADFYLINIPSLRA

SEQ ID NO: 66732 - protein, 31 aa, Artificial Sequence; identical to SEQ ID NO: 21346
  Cyclic GFR-binding peptide

SEQ ID NO: 66733 - protein, 33 aa, Artificial Sequence
  Cyclic GFR-binding peptide
  MOD_RES (29), (30): Xaa is C or S
VMNPIKGYIVNNSSDFYLVNIPSLKTPAXXAKP

SEQ ID NO: 66734 - protein, 36 aa, Artificial Sequence
  Cyclic GFR-binding peptide
  MOD_RES (30), (31): Xaa is C or S
VVMDPIKGYVVNNASDFYLINIPSLRTPVXXTPPTS

SEQ ID NO: 66735 - protein, 39 aa, Artificial Sequence; identical to SEQ ID NO: 21349
  Cyclic GFR-binding peptide
  MOD_RES (2), (4), (36), (37): Xaa is C or S

SEQ ID NO: 66736 - protein, 27 aa, Artificial Sequence
  Cyclic GFR-binding peptide
  MOD_RES (27), (27): Xaa is C or S
DPIKGYVVNNAADFYLINIPSLRAPVX

SEQ ID NO: 66737 - protein, 25 aa, Artificial Sequence
  Cyclic GFR-binding peptide
DPIKGYVVNNASDFYLINIPSLRTP

SEQ ID NO: 66738 - protein, 26 aa, Artificial Sequence
  Cyclic GFR-binding peptide
GEVVMDPIKGYVVKENEDFYLMNIPS

SEQ ID NO: 66739 - protein, 31 aa, Artificial Sequence
  Cyclic GFR-binding peptide
  MOD_RES (1), (1): Xaa is C or S
XEAVSMGEPIKGYTPVGMDDFYLVNIPSLKT

SEQ ID NO: 66740 - protein, 31 aa, Artificial Sequence
  Cyclic GFR-binding peptide
  MOD_RES (2), (4): Xaa is C or S
RXGXAEVVMDPIKGYVVNNAADFYLINIPSL

SEQ ID NO: 66741 - protein, 32 aa, Artificial Sequence; identical to SEQ ID NO: 21361
  Cyclic GFR-binding peptide
  MOD_RES (31), (32): Xaa is C or S

SEQ ID NO: 66742 - protein, 36 aa, Artificial Sequence; identical to SEQ ID NO: 21362
  Cyclic GFR-binding peptide
  MOD_RES (1), (32), (33): Xaa is C or S

SEQ ID NO: 66743 - protein, 35 aa, Artificial Sequence; identical to SEQ ID NO: 21363
  Cyclic GFR-binding peptide
  MOD_RES (1), (33), (34): Xaa is C or S

SEQ ID NO: 66744 - protein, 29 aa, Artificial Sequence
  Cyclic GFR-binding peptide
  MOD_RES (28), (29): Xaa is C or S
MNPIKGYIVNNSSDFYLVNIPSLKTPAXX

SEQ ID NO: 66745 - protein, 31 aa, Artificial Sequence; identical to SEQ ID NO: 21365
  Cyclic GFR-binding peptide
  MOD_RES (31), (31): Xaa is C or S

SEQ ID NO: 66746 - protein, 30 aa, Artificial Sequence
  Cyclic GFR-binding peptide
  MOD_RES (28), (29): Xaa is C or S
MNPIKGYIVNSSDDFYLVNIPSLKTPAXXP

SEQ ID NO: 66747 - protein, 24 aa, Artificial Sequence
  Cyclic GFR-binding peptide
SMGEPIKGYTPVGMDDFYLVNIPS

SEQ ID NO: 66748 - protein, 33 aa, Artificial Sequence; identical to SEQ ID NO: 21367
  Cyclic GFR-binding peptide
  MOD_RES (1), (33): Xaa is C or S

SEQ ID NO: 66749 - protein, 34 aa, Artificial Sequence; identical to SEQ ID NO: 21371
  Cyclic GFR-binding peptide
  MOD_RES (31), (32): Xaa is C or S

SEQ ID NO: 66750 - protein, 24 aa, Artificial Sequence
  Cyclic GFR-binding peptide
EVIMPIKGYLLVRGNDFYLMNIPS

SEQ ID NO: 66751 - protein, 38 aa, Artificial Sequence; identical to SEQ ID NO: 21377
  Cyclic GFR-binding peptide
  MOD_RES (1), (3), (35), (36): Xaa is C or S

SEQ ID NO: 66752 - protein, 30 aa, Artificial Sequence
  Cyclic GFR-binding peptide
  MOD_RES (2), (2): Xaa is C or S
GXEEVIMPIKGYLLVRGNDFYLMNIPSTKV

SEQ ID NO: 66753 - protein, 37 aa, Artificial Sequence; identical to SEQ ID NO: 21378
  Cyclic GFR-binding peptide
  MOD_RES (31), (32): Xaa is C or S

SEQ ID NO: 66754 - protein, 35 aa, Artificial Sequence
  Cyclic GFR-binding peptide
  MOD_RES (30), (31): Xaa is C or S
EVIMPIKGYLLVRGNDFYLMNIPSTKVPAXXTSPV

SEQ ID NO: 66755 - protein, 27 aa, Artificial Sequence
  Cyclic GFR-binding peptide
  MOD_RES (1), (1): Xaa is C or S
XARVVMNPIKGYIVNSSDDFYLVNIPS

SEQ ID NO: 66756 - protein, 25 aa, Artificial Sequence
  Cyclic GFR-binding peptide
SVAMGPIKGYYTVVGKDFYLINIPS

SEQ ID NO: 66757 - protein, 29 aa, Artificial Sequence
  Cyclic GFR-binding peptide
SRVVMNPIKGYIVNSSDDFYLVNIPSLKT

SEQ ID NO: 66758 - protein, 27 aa, Artificial Sequence
  Cyclic GFR-binding peptide
  MOD_RES (26), (27): Xaa is C or S
PIKGYVVNNAADFYLINIPSLRAPVXX

SEQ ID NO: 66759 - protein, 39 aa, Artificial Sequence; identical to SEQ ID NO: 21389
  Cyclic GFR-binding peptide
  MOD_RES (2), (34), (35): Xaa is C or S

SEQ ID NO: 66760 - protein, 39 aa, Artificial Sequence; identical to SEQ ID NO: 21391
  Cyclic GFR-binding peptide
  MOD_RES (1), (33), (34): Xaa is C or S

SEQ ID NO: 66761 - protein, 40 aa, Artificial Sequence; identical to SEQ ID NO: 21394
  Cyclic GFR-binding peptide
  MOD_RES (2), (4), (37), (38): Xaa is C or S

SEQ ID NO: 66762 - protein, 30 aa, Artificial Sequence
  Cyclic GFR-binding peptide
  MOD_RES (1), (3): Xaa is C or S
XGXSEVVMDPIKGYVVNNASDFYLINIPSL

SEQ ID NO: 66763 - protein, 37 aa, Artificial Sequence; identical to SEQ ID NO: 21397
  Cyclic GFR-binding peptide
  MOD_RES (32), (33): Xaa is C or S

SEQ ID NO: 66764 - protein, 31 aa, Artificial Sequence
  Cyclic GFR-binding peptide
  MOD_RES (1), (3): Xaa is C or S
XGXSRVVMNPIKGYIVNSSDDFYLVNIPSLK

SEQ ID NO: 66765 - protein, 34 aa, Artificial Sequence; identical to SEQ ID NO: 21402
  Cyclic GFR-binding peptide
  MOD_RES (31), (32): Xaa is C or S

SEQ ID NO: 66766 - protein, 25 aa, Artificial Sequence
  Cyclic GFR-binding peptide
VVMDPIKGYVVNNASDFYLINIPSL

SEQ ID NO: 66767 - protein, 33 aa, Artificial Sequence; identical to SEQ ID NO: 21403
  Cyclic GFR-binding peptide
  MOD_RES (32), (33): Xaa is C or S

SEQ ID NO: 66768 - protein, 32 aa, Artificial Sequence
  Cyclic GFR-binding peptide
  MOD_RES (28), (29): Xaa is C or S
MEPIKGYVVKDYEDFYLMNIPSLETPVXXAKP

SEQ ID NO: 66769 - protein, 32 aa, Artificial Sequence; identical to SEQ ID NO: 21405
  Cyclic GFR-binding peptide
  MOD_RES (31), (32): Xaa is C or S

SEQ ID NO: 66770 - protein, 35 aa, Artificial Sequence; identical to SEQ ID NO: 21406
  Cyclic GFR-binding peptide
  MOD_RES (2), (4), (35): Xaa is C or S

SEQ ID NO: 66771 - protein, 31 aa, Artificial Sequence
  Cyclic GFR-binding peptide
  MOD_RES (2), (4): Xaa is C or S
HXGXSRVVMNPIKGYIVNSSDDFYLVNIPSL

SEQ ID NO: 66772 - protein, 33 aa, Artificial Sequence; identical to SEQ ID NO: 21409
  Cyclic GFR-binding peptide
  MOD_RES (31), (31): Xaa is C or S

SEQ ID NO: 66773 - protein, 29 aa, Artificial Sequence
  Cyclic GFR-binding peptide
  MOD_RES (26), (27): Xaa is C or S
PIKGYYTVVGKDFYLINIPSLKTPVXXAK

SEQ ID NO: 66774 - protein, 25 aa, Artificial Sequence
  Cyclic GFR-binding peptide
VAMGPIKGYYTVVGKDFYLINIPSL

SEQ ID NO: 66775 - protein, 39 aa, Artificial Sequence; identical to SEQ ID NO: 21413
  Cyclic GFR-binding peptide
  MOD_RES (2), (34), (35): Xaa is C or S

SEQ ID NO: 66776 - protein, 42 aa, Artificial Sequence; identical to SEQ ID NO: 21414
  Cyclic GFR-binding peptide
  MOD_RES (2), (4), (36), (37): Xaa is C or S

SEQ ID NO: 66777 - protein, 33 aa, Artificial Sequence
  Cyclic GFR-binding peptide
  MOD_RES (2), (4): Xaa is C or S
RXGXESVAMGPIKGYYTVVGKDFYLINIPSLKT

SEQ ID NO: 66778 - protein, 35 aa, Artificial Sequence; identical to SEQ ID NO: 21419
  Cyclic GFR-binding peptide
  MOD_RES (1), (33): Xaa is C or S

SEQ ID NO: 66779 - protein, 30 aa, Artificial Sequence
  Cyclic GFR-binding peptide
  MOD_RES (30), (30): Xaa is C or S
VVMDPIKGYVVNNAADFYLINIPSLRAPVX

SEQ ID NO: 66780 - protein, 31 aa, Artificial Sequence
  Cyclic GFR-binding peptide
  MOD_RES (27), (28): Xaa is C or S
DPIKGYVVKENEDFYLMNIPSLETPVXXAKP

SEQ ID NO: 66781 - protein, 30 aa, Artificial Sequence
  Cyclic GFR-binding peptide
EAVSMGEPIKGYTPVGMDDFYLVNIPSLKT

SEQ ID NO: 66782 - protein, 34 aa, Artificial Sequence
  Cyclic GFR-binding peptide
  MOD_RES (28), (29): Xaa is C or S
MNPIKGYIVNSSDDFYLVNIPSLKTPAXXPKPVY

SEQ ID NO: 66783 - protein, 31 aa, Artificial Sequence; identical to SEQ ID NO: 21426
  Cyclic GFR-binding peptide

SEQ ID NO: 66784 - protein, 31 aa, Artificial Sequence
  Cyclic GFR-binding peptide
  MOD_RES (2), (2): Xaa is C or S
GXGEVVMDPIKGYVVKENEDFYLMNIPSLET

SEQ ID NO: 66785 - protein, 38 aa, Artificial Sequence; identical to SEQ ID NO: 21436
  Cyclic GFR-binding peptide
  MOD_RES (1), (32), (33): Xaa is C or S

SEQ ID NO: 66786 - protein, 29 aa, Artificial Sequence
  Cyclic GFR-binding peptide
  MOD_RES (1), (1): Xaa is C or S
XEAVSMGEPIKGYTPVGMDDFYLVNIPSL

SEQ ID NO: 66787 - protein, 34 aa, Artificial Sequence; identical to SEQ ID NO: 21437
  Cyclic GFR-binding peptide
  MOD_RES (2), (34): Xaa is C or S

SEQ ID NO: 66788 - protein, 29 aa, Artificial Sequence
  Cyclic GFR-binding peptide
  MOD_RES (27), (28): Xaa is C or S
DPIKGYVVKENEDFYLMNIPSLETPVXXA

SEQ ID NO: 66789 - protein, 26 aa, Artificial Sequence
  Cyclic GFR-binding peptide
SMGEPIKGYTPVGMDDFYLVNIPSLK

SEQ ID NO: 66790 - protein, 23 aa, Artificial Sequence
  Cyclic GFR-binding peptide
PIKGYIVNNSSDFYLVNIPSLKT

SEQ ID NO: 66791 - protein, 25 aa, Artificial Sequence
  Cyclic GFR-binding peptide
DPIKGYVVKENEDFYLMNIPSLETP

SEQ ID NO: 66792 - protein, 30 aa, Artificial Sequence; identical to SEQ ID NO: 21440
  Cyclic GFR-binding peptide

SEQ ID NO: 66793 - protein, 31 aa, Artificial Sequence
  Cyclic GFR-binding peptide
  MOD_RES (1), (3): Xaa is C or S
XGXAKVVMNPIKGYIVNNSSDFYLVNIPSLK

SEQ ID NO: 66794 - protein, 30 aa, Artificial Sequence
  Cyclic GFR-binding peptide
  MOD_RES (28), (29): Xaa is C or S
MGPIKGYYTVVGKDFYLINIPSLKTPVXXA

SEQ ID NO: 66795 - protein, 39 aa, Artificial Sequence; identical to SEQ ID NO: 21442
  Cyclic GFR-binding peptide
  MOD_RES (1), (33): Xaa is C or S

SEQ ID NO: 66796 - protein, 32 aa, Artificial Sequence; identical to SEQ ID NO: 21443
  Cyclic GFR-binding peptide
  MOD_RES (32), (32): Xaa is C or S

SEQ ID NO: 66797 - protein, 26 aa, Artificial Sequence
  Cyclic GFR-binding peptide
MPIKGYLLVRGNDFYLMNIPSTKVPA

SEQ ID NO: 66798 - protein, 33 aa, Artificial Sequence
  Cyclic GFR-binding peptide
  MOD_RES (30), (30): Xaa is C or S
VVMNPIKGYIVNSSDDFYLVNIPSLKTPAXTPK

SEQ ID NO: 66799 - protein, 32 aa, Artificial Sequence
  Cyclic GFR-binding peptide
  MOD_RES (1), (3): Xaa is C or S
XGXSEVVMDPIKGYVVNNASDFYLINIPSLRT

SEQ ID NO: 66800 - protein, 33 aa, Artificial Sequence; identical to SEQ ID NO: 21446
  Cyclic GFR-binding peptide
  MOD_RES (31), (32): Xaa is C or S

SEQ ID NO: 66801 - protein, 37 aa, Artificial Sequence; identical to SEQ ID NO: 21447
  Cyclic GFR-binding peptide
  MOD_RES (1), (3), (36), (37): Xaa is C or S

SEQ ID NO: 66802 - protein, 37 aa, Artificial Sequence; identical to SEQ ID NO: 20445
  Cyclic GFR-binding peptide
  MOD_RES (32), (33): Xaa is C or S

SEQ ID NO: 66803 - protein, 27 aa, Artificial Sequence
  Cyclic GFR-binding peptide
VVMEPIKGYVVKDYEDFYLMNIPSLET

SEQ ID NO: 66804 - protein, 22 aa, Artificial Sequence
  Cyclic GFR-binding peptide
EPIKGYVVKDYEDFYLMNIPSL

SEQ ID NO: 66805 - protein, 32 aa, Artificial Sequence; identical to SEQ ID NO: 20447
  Cyclic GFR-binding peptide
  MOD_RES (2), (2): Xaa is C or S

SEQ ID NO: 66806 - protein, 35 aa, Artificial Sequence; identical to SEQ ID NO: 20448
  Cyclic GFR-binding peptide
  MOD_RES (32), (33): Xaa is C or S

SEQ ID NO: 66807 - protein, 25 aa, Artificial Sequence
  Cyclic GFR-binding peptide
PIKGYTPVGMDDFYLVNIPSLKTPV

SEQ ID NO: 66808 - protein, 27 aa, Artificial Sequence
  Cyclic GFR-binding peptide
  MOD_RES (27), (27): Xaa is C or S
DPIKGYVVKENEDFYLMNIPSLETPVX

SEQ ID NO: 66809 - protein, 29 aa, Artificial Sequence
  Cyclic GFR-binding peptide
VVMDPIKGYVVNNAADFYLINIPSLRAPV

SEQ ID NO: 66810 - protein, 39 aa, Artificial Sequence; identical to SEQ ID NO: 20450
  Cyclic GFR-binding peptide
  MOD_RES (2), (4), (36), (37): Xaa is C or S

SEQ ID NO: 66811 - protein, 35 aa, Artificial Sequence; identical to SEQ ID NO: 20452
  Cyclic GFR-binding peptide
  MOD_RES (1), (33), (34): Xaa is C or S

SEQ ID NO: 66812 - protein, 30 aa, Artificial Sequence
  Cyclic GFR-binding peptide
AEVVMDPIKGYVVNNAADFYLINIPSLRAP

SEQ ID NO: 66813 - protein, 31 aa, Artificial Sequence
  Cyclic GFR-binding peptide
  MOD_RES (26), (27): Xaa is C or S
PIKGYVVNNASDFYLINIPSLRTPVXXTPPT

SEQ ID NO: 66814 - protein, 34 aa, Artificial Sequence; identical to SEQ ID NO: 20457
  Cyclic GFR-binding peptide
  MOD_RES (2), (34): Xaa is C or S

SEQ ID NO: 66815 - protein, 27 aa, Artificial Sequence
  Cyclic GFR-binding peptide
  MOD_RES (2), (2): Xaa is C or S
GXEEVIMPIKGYLLVRGNDFYLMNIPS

SEQ ID NO: 66816 - protein, 36 aa, Artificial Sequence; identical to SEQ ID NO: 20461
  Cyclic GFR-binding peptide
  MOD_RES (31), (32): Xaa is C or S

SEQ ID NO: 66817 - protein, 32 aa, Artificial Sequence
  Cyclic GFR-binding peptide
  MOD_RES (29), (30): Xaa is C or S
VMNPIKGYIVNSSDDFYLVNIPSLQTPAXXPK

SEQ ID NO: 66818 - protein, 25 aa, Artificial Sequence
  Cyclic GFR-binding peptide
MGPIKGYYTVVGKDFYLINIPSLKT

SEQ ID NO: 66819 - protein, 36 aa, Artificial Sequence; identical to SEQ ID NO: 20468
  Cyclic GFR-binding peptide
  MOD_RES (2), (34), (35): Xaa is C or S

SEQ ID NO: 66820 - protein, 21 aa, Artificial Sequence
  Cyclic GFR-binding peptide
PIKGYTPVGMDDFYLVNIPSL

SEQ ID NO: 66821 - protein, 42 aa, Artificial Sequence; identical to SEQ ID NO: 20469
  Cyclic GFR-binding peptide
  MOD_RES (2), (4), (37), (38): Xaa is C or S

SEQ ID NO: 66822 - protein, 32 aa, Artificial Sequence
  Cyclic GFR-binding peptide
  MOD_RES (1), (3): Xaa is C or S
XGXEEVIMPIKGYLLVRGNDFYLMNIPSTKVP

SEQ ID NO: 66823 - protein, 21 aa, Artificial Sequence
  Cyclic GFR-binding peptide
PIKGYIVNSSDDFYLVNIPSL

SEQ ID NO: 66824 - protein, 29 aa, Artificial Sequence
  Cyclic GFR-binding peptide
  MOD_RES (1), (3): Xaa is C or S
XGXESVAMGPIKGYYTVVGKDFYLINIPS

SEQ ID NO: 66825 - protein, 29 aa, Artificial Sequence
  Cyclic GFR-binding peptide
EVVMEPIKGYVVKDYEDFYLMNIPSLETP

SEQ ID NO: 66826 - protein, 27 aa, Artificial Sequence
  Cyclic GFR-binding peptide
RVVMNPIKGYIVNSSDDFYLVNIPSLQ

SEQ ID NO: 66827 - protein, 23 aa, Artificial Sequence
  Cyclic GFR-binding peptide
VMDPIKGYVVNNAADFYLINIPS

SEQ ID NO: 66828 - protein, 31 aa, Artificial Sequence
  Cyclic GFR-binding peptide
  MOD_RES (1), (1): Xaa is C or S
XESVAMGPIKGYYTVVGKDFYLINIPSLKTP

SEQ ID NO: 66829 - protein, 26 aa, Artificial Sequence
  Cyclic GFR-binding peptide
SRVVMNPIKGYIVNSSDDFYLVNIPS

SEQ ID NO: 66830 - protein, 26 aa, Artificial Sequence
  Cyclic GFR-binding peptide
DPIKGYVVNNASDFYLINIPSLRTPV

SEQ ID NO: 66831 - protein, 34 aa, Artificial Sequence; identical to SEQ ID NO: 20482
  Cyclic GFR-binding peptide
  MOD_RES (32), (33): Xaa is C or S

SEQ ID NO: 66832 - protein, 24 aa, Artificial Sequence
  Cyclic GFR-binding peptide
EPIKGYTPVGMDDFYLVNIPSLKT

SEQ ID NO: 66833 - protein, 37 aa, Artificial Sequence; identical to SEQ ID NO: 20483
  Cyclic GFR-binding peptide
  MOD_RES (2), (4), (36): Xaa is C or S

SEQ ID NO: 66834 - protein, 24 aa, Artificial Sequence
  Cyclic GFR-binding peptide
EPIKGYVVKDYEDFYLMNIPSLET

SEQ ID NO: 66835 - protein, 31 aa, Artificial Sequence
  Cyclic GFR-binding peptide
  MOD_RES (1), (3): Xaa is C or S
XGXEEVIMPIKGYLLVRGNDFYLMNIPSTKV

SEQ ID NO: 66836 - protein, 39 aa, Artificial Sequence; identical to SEQ ID NO: 20485
  Cyclic GFR-binding peptide
  MOD_RES (2), (4), (36), (37): Xaa is C or S

SEQ ID NO: 66837 - protein, 37 aa, Artificial Sequence; identical to SEQ ID NO: 20486
  Cyclic GFR-binding peptide
  MOD_RES (2), (35), (36): Xaa is C or S

SEQ ID NO: 66838 - protein, 34 aa, Artificial Sequence; identical to SEQ ID NO: 20488
  Cyclic GFR-binding peptide
  MOD_RES (1), (3), (34): Xaa is C or S

SEQ ID NO: 66839 - protein, 33 aa, Artificial Sequence
  Cyclic GFR-binding peptide
  MOD_RES (30), (31): Xaa is C or S
SMGEPIKGYTPVGMDDFYLVNIPSLKTPVXXAK

SEQ ID NO: 66840 - protein, 36 aa, Artificial Sequence; identical to SEQ ID NO: 20490
  Cyclic GFR-binding peptide
  MOD_RES (2), (4), (36): Xaa is C or S

SEQ ID NO: 66841 - protein, 31 aa, Artificial Sequence
  Cyclic GFR-binding peptide
  MOD_RES (28), (29): Xaa is C or S
MDPIKGYVVNNAADFYLINIPSLRAPVXXSA

SEQ ID NO: 66842 - protein, 23 aa, Artificial Sequence
  Cyclic GFR-binding peptide
PIKGYVVKENEDFYLMNIPSLET

SEQ ID NO: 66843 - protein, 35 aa, Artificial Sequence; identical to SEQ ID NO: 20496
  Cyclic GFR-binding peptide
  MOD_RES (1), (3), (35): Xaa is C or S

SEQ ID NO: 66844 - protein, 29 aa, Artificial Sequence
  Cyclic GFR-binding peptide
  MOD_RES (28), (29): Xaa is C or S
MDPIKGYVVKENEDFYLMNIPSLETPVXX

SEQ ID NO: 66845 - protein, 26 aa, Artificial Sequence
  Cyclic GFR-binding peptide
NPIKGYIVNNSSDFYLVNIPSLKTPA

SEQ ID NO: 66846 - protein, 26 aa, Artificial Sequence
  Cyclic GFR-binding peptide
ARVVMNPIKGYIVNSSDDFYLVNIPS

SEQ ID NO: 66847 - protein, 39 aa, Artificial Sequence; identical to SEQ ID NO: 20503
  Cyclic GFR-binding peptide
  MOD_RES (2), (34): Xaa is C or S

SEQ ID NO: 66848 - protein, 30 aa, Artificial Sequence
  Cyclic GFR-binding peptide
  MOD_RES (1), (3): Xaa is C or S
XGXARVVMNPIKGYIVNSSDDFYLVNIPSL

SEQ ID NO: 66849 - protein, 32 aa, Artificial Sequence
  Cyclic GFR-binding peptide
  MOD_RES (28), (29): Xaa is C or S
MNPIKGYIVNNSSDFYLVNIPSLKTPAXXAKP

SEQ ID NO: 66850 - protein, 36 aa, Artificial Sequence
  Cyclic GFR-binding peptide
  MOD_RES (30), (31): Xaa is C or S
VVMEPIKGYVVKDYEDFYLMNIPSLETPVXXAKPIS

SEQ ID NO: 66851 - protein, 32 aa, Artificial Sequence; identical to SEQ ID NO: 20508
  Cyclic GFR-binding peptide
  MOD_RES (32), (32): Xaa is C or S

SEQ ID NO: 66852 - protein, 33 aa, Artificial Sequence
  Cyclic GFR-binding peptide
  MOD_RES (28), (29): Xaa is C or S
MGPIKGYYTVVGKDFYLINIPSLKTPVXXAKSA

SEQ ID NO: 66853 - protein, 28 aa, Artificial Sequence
  Cyclic GFR-binding peptide
  MOD_RES (26), (27): Xaa is C or S
PIKGYYTVVGKDFYLINIPSLKTPVXXA

SEQ ID NO: 66854 - protein, 27 aa, Artificial Sequence
  Cyclic GFR-binding peptide
  MOD_RES (27), (27): Xaa is C or S
GPIKGYYTVVGKDFYLINIPSLKTPVX

SEQ ID NO: 66855 - protein, 31 aa, Artificial Sequence
  Cyclic GFR-binding peptide
  MOD_RES (26), (27): Xaa is C or S
PIKGYYTVVGKDFYLINIPSLKTPVXXAKSA

SEQ ID NO: 66856 - protein, 23 aa, Artificial Sequence
  Cyclic GFR-binding peptide
EPIKGYTPVGMDDFYLVNIPSLK

SEQ ID NO: 66857 - protein, 37 aa, Artificial Sequence; identical to SEQ ID NO: 20514
  Cyclic GFR-binding peptide
  MOD_RES (32), (33): Xaa is C or S

SEQ ID NO: 66858 - protein, 29 aa, Artificial Sequence
  Cyclic GFR-binding peptide
  MOD_RES (1), (3): Xaa is C or S
XGXAKVVMNPIKGYIVNNSSDFYLVNIPS

SEQ ID NO: 66859 - protein, 34 aa, Artificial Sequence; identical to SEQ ID NO: 20513
  Cyclic GFR-binding peptide
  MOD_RES (2), (34): Xaa is C or S

SEQ ID NO: 66860 - protein, 41 aa, Artificial Sequence; identical to SEQ ID NO: 20518
  Cyclic GFR-binding peptide
  MOD_RES (1), (3), (35): Xaa is C or S

SEQ ID NO: 66861 - protein, 30 aa, Artificial Sequence
  Cyclic GFR-binding peptide
  MOD_RES (2), (4): Xaa is C or S
HXGXAKVVMNPIKGYIVNNSSDFYLVNIPS

SEQ ID NO: 66862 - protein, 31 aa, Artificial Sequence
  Cyclic GFR-binding peptide
  MOD_RES (2), (4): Xaa is C or S
LXGXEEVIMPIKGYLLVRGNDFYLMNIPSTK

SEQ ID NO: 66863 - protein, 20 aa, Artificial Sequence
  Cyclic GFR-binding peptide
PIKGYLLVRGNDFYLMNIPS

SEQ ID NO: 66864 - protein, 31 aa, Artificial Sequence
  Cyclic GFR-binding peptide
  MOD_RES (2), (4): Xaa is C or S
RXGXSEVVMDPIKGYVVNNASDFYLINIPSL

SEQ ID NO: 66865 - protein, 41 aa, Artificial Sequence; identical to SEQ ID NO: 20520
  Cyclic GFR-binding peptide
  MOD_RES (1), (3), (35), (36): Xaa is C or S

SEQ ID NO: 66866 - protein, 31 aa, Artificial Sequence
  Cyclic GFR-binding peptide
  MOD_RES (30), (31): Xaa is C or S
VVMNPIKGYIVNSSDDFYLVNIPSLQTPAXX

SEQ ID NO: 66867 - protein, 30 aa, Artificial Sequence
  Cyclic GFR-binding peptide
  MOD_RES (29), (30): Xaa is C or S
VIMPIKGYLLVRGNDFYLMNIPSTKVPAXX

SEQ ID NO: 66868 - protein, 32 aa, Artificial Sequence
  Cyclic GFR-binding peptide
  MOD_RES (2), (2): Xaa is C or S
GXAKVVMNPIKGYIVNNSSDFYLVNIPSLKTP

SEQ ID NO: 66869 - protein, 38 aa, Artificial Sequence; identical to SEQ ID NO: 20523
  Cyclic GFR-binding peptide
  MOD_RES (1), (33), (34): Xaa is C or S

SEQ ID NO: 66870 - protein, 35 aa, Artificial Sequence; identical to SEQ ID NO: 20525
  Cyclic GFR-binding peptide
  MOD_RES (31), (32): Xaa is C or S

SEQ ID NO: 66871 - protein, 31 aa, Artificial Sequence
  Cyclic GFR-binding peptide
  MOD_RES (2), (2): Xaa is C or S
GXAEVVMDPIKGYVVNNAADFYLINIPSLRA

SEQ ID NO: 66872 - protein, 39 aa, Artificial Sequence; identical to SEQ ID NO: 20527
  Cyclic GFR-binding peptide
  MOD_RES (33), (34): Xaa is C or S

SEQ ID NO: 66873 - protein, 31 aa, Artificial Sequence; identical to SEQ ID NO: 20528
  Cyclic GFR-binding peptide

SEQ ID NO: 66874 - protein, 32 aa, Artificial Sequence
  Cyclic GFR-binding peptide
  MOD_RES (28), (29): Xaa is C or S
MDPIKGYVVNNAADFYLINIPSLRAPVXXSAP

SEQ ID NO: 66875 - protein, 28 aa, Artificial Sequence
  Cyclic GFR-binding peptide
  MOD_RES (28), (28): Xaa is C or S
MGPIKGYYTVVGKDFYLINIPSLKTPVX

SEQ ID NO: 66876 - protein, 30 aa, Artificial Sequence
  Cyclic GFR-binding peptide
  MOD_RES (2), (4): Xaa is C or S
RXGXGEVVMDPIKGYVVKENEDFYLMNIPS

SEQ ID NO: 66877 - protein, 32 aa, Artificial Sequence
  Cyclic GFR-binding peptide
  MOD_RES (30), (31): Xaa is C or S
VVMNPIKGYIVNSSDDFYLVNIPSLQTPAXXP

SEQ ID NO: 66878 - protein, 32 aa, Artificial Sequence
  Cyclic GFR-binding peptide
  MOD_RES (2), (4): Xaa is C or S
HXGXSRVVMNPIKGYIVNSSDDFYLVNIPSLK

SEQ ID NO: 66879 - protein, 34 aa, Artificial Sequence
  Cyclic GFR-binding peptide
  MOD_RES (30), (31): Xaa is C or S
VVMDPIKGYVVKENEDFYLMNIPSLETPVXXAKP

SEQ ID NO: 66880 - protein, 33 aa, Artificial Sequence
  Cyclic GFR-binding peptide
  MOD_RES (27), (28): Xaa is C or S
DPIKGYVVNNASDFYLINIPSLRTPVXXTPPTS

SEQ ID NO: 66881 - protein, 35 aa, Artificial Sequence; identical to SEQ ID NO: 20536
  Cyclic GFR-binding peptide
  MOD_RES (2), (34), (35): Xaa is C or S

SEQ ID NO: 66882 - protein, 40 aa, Artificial Sequence; identical to SEQ ID NO: 20541
  Cyclic GFR-binding peptide
  MOD_RES (2), (34), (35): Xaa is C or S

SEQ ID NO: 66883 - protein, 36 aa, Artificial Sequence; identical to SEQ ID NO: 20542
  Cyclic GFR-binding peptide
  MOD_RES (2), (34), (35): Xaa is C or S

SEQ ID NO: 66884 - protein, 34 aa, Artificial Sequence; identical to SEQ ID NO: 20543
  Cyclic GFR-binding peptide
  MOD_RES (1), (3): Xaa is C or S

SEQ ID NO: 66885 - protein, 30 aa, Artificial Sequence
  Cyclic GFR-binding peptide
ARVVMNPIKGYIVNSSDDFYLVNIPSLQTP

SEQ ID NO: 66886 - protein, 39 aa, Artificial Sequence; identical to SEQ ID NO: 20545
  Cyclic GFR-binding peptide
  MOD_RES (2), (34), (35): Xaa is C or S

SEQ ID NO: 66887 - protein, 27 aa, Artificial Sequence
  Cyclic GFR-binding peptide
MDPIKGYVVNNAADFYLINIPSLRAPV

SEQ ID NO: 66888 - protein, 22 aa, Artificial Sequence
  Cyclic GFR-binding peptide
MDPIKGYVVKENEDFYLMNIPS

SEQ ID NO: 66889 - protein, 36 aa, Artificial Sequence; identical to SEQ ID NO: 20548
  Cyclic GFR-binding peptide
  MOD_RES (32), (33): Xaa is C or S

SEQ ID NO: 66890 - protein, 35 aa, Artificial Sequence; identical to SEQ ID NO: 20550
  Cyclic GFR-binding peptide
  MOD_RES (1), (32), (33): Xaa is C or S

SEQ ID NO: 66891 - protein, 28 aa, Artificial Sequence
  Cyclic GFR-binding peptide
GEVVMEPIKGYVVKDYEDFYLMNIPSLE

SEQ ID NO: 66892 - protein, 29 aa, Artificial Sequence
  Cyclic GFR-binding peptide
  MOD_RES (2), (2): Xaa is C or S
GXGEVVMEPIKGYVVKDYEDFYLMNIPSL

SEQ ID NO: 66893 - protein, 23 aa, Artificial Sequence
  Cyclic GFR-binding peptide
VMEPIKGYVVKDYEDFYLMNIPS

SEQ ID NO: 66894 - protein, 32 aa, Artificial Sequence; identical to SEQ ID NO: 20559
  Cyclic GFR-binding peptide
  MOD_RES (31), (32): Xaa is C or S

SEQ ID NO: 66895 - protein, 33 aa, Artificial Sequence
  Cyclic GFR-binding peptide
  MOD_RES (2), (4): Xaa is C or S
RXGXAEVVMDPIKGYVVNNAADFYLINIPSLRA

SEQ ID NO: 66896 - protein, 33 aa, Artificial Sequence; identical to SEQ ID NO: 20566
  Cyclic GFR-binding peptide
  MOD_RES (32), (33): Xaa is C or S

SEQ ID NO: 66897 - protein, 35 aa, Artificial Sequence
  Cyclic GFR-binding peptide
  MOD_RES (30), (31): Xaa is C or S
VVMNPIKGYIVNSSDDFYLVNIPSLKTPAXXPKPV

SEQ ID NO: 66898 - protein, 35 aa, Artificial Sequence; identical to SEQ ID NO: 20567
  Cyclic GFR-binding peptide
  MOD_RES (1), (3), (35): Xaa is C or S

SEQ ID NO: 66899 - protein, 37 aa, Artificial Sequence; identical to SEQ ID NO: 20568
  Cyclic GFR-binding peptide
  MOD_RES (2), (34), (35): Xaa is C or S

SEQ ID NO: 66900 - protein, 34 aa, Artificial Sequence; identical to SEQ ID NO: 20572
  Cyclic GFR-binding peptide
  MOD_RES (31), (32): Xaa is C or S

SEQ ID NO: 66901 - protein, 33 aa, Artificial Sequence
  Cyclic GFR-binding peptide
  MOD_RES (28), (29): Xaa is C or S
MNPIKGYIVNSSDDFYLVNIPSLKTPAXXPKPV

SEQ ID NO: 66902 - protein, 36 aa, Artificial Sequence; identical to SEQ ID NO: 20580
  Cyclic GFR-binding peptide
  MOD_RES (31), (32): Xaa is C or S

SEQ ID NO: 66903 - protein, 22 aa, Artificial Sequence
  Cyclic GFR-binding peptide
PIKGYVVKDYEDFYLMNIPSLE

SEQ ID NO: 66904 - protein, 40 aa, Artificial Sequence; identical to SEQ ID NO: 20586
  Cyclic GFR-binding peptide
  MOD_RES (1), (3), (35), (36): Xaa is C or S

SEQ ID NO: 66905 - protein, 32 aa, Artificial Sequence
  Cyclic GFR-binding peptide
  MOD_RES (29), (29): Xaa is C or S
VMNPIKGYIVNSSDDFYLVNIPSLKTPAXTPK

SEQ ID NO: 66906 - protein, 32 aa, Artificial Sequence; identical to SEQ ID NO: 20595
  Cyclic GFR-binding peptide
  MOD_RES (31), (32): Xaa is C or S

SEQ ID NO: 66907 - protein, 36 aa, Artificial Sequence; identical to SEQ ID NO: 20598
  Cyclic GFR-binding peptide
  MOD_RES (2), (34), (35): Xaa is C or S

SEQ ID NO: 66908 - protein, 22 aa, Artificial Sequence
  Cyclic GFR-binding peptide
PIKGYLLVRGNDFYLMNIPSTK

SEQ ID NO: 66909 - protein, 30 aa, Artificial Sequence
  Cyclic GFR-binding peptide
  MOD_RES (26), (27): Xaa is C or S
PIKGYIVNNSSDFYLVNIPSLKTPAXXAKP

SEQ ID NO: 66910 - protein, 33 aa, Artificial Sequence
  Cyclic GFR-binding peptide
  MOD_RES (1), (3): Xaa is C or S
XGXEAVSMGEPIKGYTPVGMDDFYLVNIPSLKT

SEQ ID NO: 66911 - protein, 28 aa, Artificial Sequence
  Cyclic GFR-binding peptide
  MOD_RES (1), (1): Xaa is C or S
XSEVVMDPIKGYVVNNASDFYLINIPSL

SEQ ID NO: 66912 - protein, 29 aa, Artificial Sequence
  Cyclic GFR-binding peptide
ESVAMGPIKGYYTVVGKDFYLINIPSLKT

SEQ ID NO: 66913 - protein, 36 aa, Artificial Sequence
  Cyclic GFR-binding peptide
  MOD_RES (32), (33): Xaa is C or S
AVSMGEPIKGYTPVGMDDFYLVNIPSLKTPVXXAKG

SEQ ID NO: 66914 - protein, 36 aa, Artificial Sequence; identical to SEQ ID NO: 20602
  Cyclic GFR-binding peptide
  MOD_RES (1), (3), (35), (36): Xaa is C or S

SEQ ID NO: 66915 - protein, 38 aa, Artificial Sequence; identical to SEQ ID NO: 20604
  Cyclic GFR-binding peptide
  MOD_RES (1), (33), (34): Xaa is C or S

SEQ ID NO: 66916 - protein, 31 aa, Artificial Sequence
  Cyclic GFR-binding peptide
  MOD_RES (27), (28): Xaa is C or S
NPIKGYIVNSSDDFYLVNIPSLKTPAXXPKP

SEQ ID NO: 66917 - protein, 40 aa, Artificial Sequence; identical to SEQ ID NO: 20612
  Cyclic GFR-binding peptide
  MOD_RES (2), (4), (36): Xaa is C or S

SEQ ID NO: 66918 - protein, 39 aa, Artificial Sequence; identical to SEQ ID NO: 20613
  Cyclic GFR-binding peptide
  MOD_RES (1), (3), (35), (36): Xaa is C or S

SEQ ID NO: 66919 - protein, 26 aa, Artificial Sequence
  Cyclic GFR-binding peptide
MEPIKGYVVKDYEDFYLMNIPSLETP

SEQ ID NO: 66920 - protein, 25 aa, Artificial Sequence
  Cyclic GFR-binding peptide
EPIKGYVVKDYEDFYLMNIPSLETP

SEQ ID NO: 66921 - protein, 34 aa, Artificial Sequence; identical to SEQ ID NO: 20618
  Cyclic GFR-binding peptide
  MOD_RES (32), (33): Xaa is C or S

SEQ ID NO: 66922 - protein, 35 aa, Artificial Sequence
  Cyclic GFR-binding peptide
  MOD_RES (29), (30): Xaa is C or S
MGEPIKGYTPVGMDDFYLVNIPSLKTPVXXAKGVK

SEQ ID NO: 66923 - protein, 33 aa, Artificial Sequence; identical to SEQ ID NO: 20620
  Cyclic GFR-binding peptide
  MOD_RES (31), (32): Xaa is C or S

SEQ ID NO: 66924 - protein, 30 aa, Artificial Sequence
  Cyclic GFR-binding peptide
  MOD_RES (27), (28): Xaa is C or S
GPIKGYYTVVGKDFYLINIPSLKTPVXXAK

SEQ ID NO: 66925 - protein, 32 aa, Artificial Sequence
  Cyclic GFR-binding peptide
  MOD_RES (27), (28): Xaa is C or S
MPIKGYLLVRGNDFYLMNIPSTKVPAXXTSPV

SEQ ID NO: 66926 - protein, 32 aa, Artificial Sequence
  Cyclic GFR-binding peptide
  MOD_RES (28), (29): Xaa is C or S
GEPIKGYTPVGMDDFYLVNIPSLKTPVXXAKG

SEQ ID NO: 66927 - protein, 39 aa, Artificial Sequence; identical to SEQ ID NO: 20627
  Cyclic GFR-binding peptide
  MOD_RES (1), (3), (35), (36): Xaa is C or S

SEQ ID NO: 66928 - protein, 33 aa, Artificial Sequence; identical to SEQ ID NO: 20630
  Cyclic GFR-binding peptide
  MOD_RES (2), (2): Xaa is C or S

SEQ ID NO: 66929 - protein, 30 aa, Artificial Sequence
  Cyclic GFR-binding peptide
  MOD_RES (30), (30): Xaa is C or S
VVMNPIKGYIVNNSSDFYLVNIPSLKTPAX

SEQ ID NO: 66930 - protein, 24 aa, Artificial Sequence
  Cyclic GFR-binding peptide
MNPIKGYIVNNSSDFYLVNIPSLK

SEQ ID NO: 66931 - protein, 23 aa, Artificial Sequence
  Cyclic GFR-binding peptide
EPIKGYVVKDYEDFYLMNIPSLE

SEQ ID NO: 66932 - protein, 20 aa, Artificial Sequence
  Cyclic GFR-binding peptide
PIKGYVVKDYEDFYLMNIPS

SEQ ID NO: 66933 - protein, 28 aa, Artificial Sequence
  Cyclic GFR-binding peptide
  MOD_RES (26), (27): Xaa is C or S
PIKGYLLVRGNDFYLMNIPSTKVPAXXT

SEQ ID NO: 66934 - protein, 35 aa, Artificial Sequence; identical to SEQ ID NO: 20635
  Cyclic GFR-binding peptide
  MOD_RES (33), (34): Xaa is C or S

SEQ ID NO: 66935 - protein, 20 aa, Artificial Sequence
  Cyclic GFR-binding peptide
PIKGYVVKENEDFYLMNIPS

SEQ ID NO: 66936 - protein, 24 aa, Artificial Sequence
  Cyclic GFR-binding peptide
VVMNPIKGYIVNSSDDFYLVNIPS

SEQ ID NO: 66937 - protein, 28 aa, Artificial Sequence
  Cyclic GFR-binding peptide
  MOD_RES (2), (2): Xaa is C or S
GXGEVVMEPIKGYVVKDYEDFYLMNIPS

SEQ ID NO: 66938 - protein, 25 aa, Artificial Sequence
  Cyclic GFR-binding peptide
VMNPIKGYIVNSSDDFYLVNIPSLQ

SEQ ID NO: 66939 - protein, 34 aa, Artificial Sequence
  Cyclic GFR-binding peptide
  MOD_RES (2), (4): Xaa is C or S
RXGXGEVVMEPIKGYVVKDYEDFYLMNIPSLETP

SEQ ID NO: 66940 - protein, 33 aa, Artificial Sequence; identical to SEQ ID NO: 20641
  Cyclic GFR-binding peptide
  MOD_RES (2), (2): Xaa is C or S

SEQ ID NO: 66941 - protein, 32 aa, Artificial Sequence
  Cyclic GFR-binding peptide
  MOD_RES (28), (29): Xaa is C or S
MNPIKGYIVNSSDDFYLVNIPSLKTPAXXPKP

SEQ ID NO: 66942 - protein, 23 aa, Artificial Sequence
  Cyclic GFR-binding peptide
MEPIKGYVVKDYEDFYLMNIPSL

SEQ ID NO: 66943 - protein, 29 aa, Artificial Sequence
  Cyclic GFR-binding peptide
VVMNPIKGYIVNNSSDFYLVNIPSLKTPA

SEQ ID NO: 66944 - protein, 35 aa, Artificial Sequence; identical to SEQ ID NO: 20643
  Cyclic GFR-binding peptide
  MOD_RES (1), (3), (34), (35): Xaa is C or S

SEQ ID NO: 66945 - protein, 42 aa, Artificial Sequence; identical to SEQ ID NO: 20644
  Cyclic GFR-binding peptide
  MOD_RES (2), (4), (36), (37): Xaa is C or S

SEQ ID NO: 66946 - protein, 26 aa, Artificial Sequence
  Cyclic GFR-binding peptide
EPIKGYTPVGMDDFYLVNIPSLKTPV

SEQ ID NO: 66947 - protein, 29 aa, Artificial Sequence
  Cyclic GFR-binding peptide
  MOD_RES (28), (29): Xaa is C or S
MDPIKGYVVNNASDFYLINIPSLRTPVXX

SEQ ID NO: 66948 - protein, 32 aa, Artificial Sequence
  Cyclic GFR-binding peptide
  MOD_RES (26), (27): Xaa is C or S
PIKGYVVKENEDFYLMNIPSLETPVXXAKPIK

SEQ ID NO: 66949 - protein, 25 aa, Artificial Sequence
  Cyclic GFR-binding peptide
NPIKGYIVNSSDDFYLVNIPSLKTP

SEQ ID NO: 66950 - protein, 22 aa, Artificial Sequence
  Cyclic GFR-binding peptide
MNPIKGYIVNSSDDFYLVNIPS

SEQ ID NO: 66951 - protein, 30 aa, Artificial Sequence
  Cyclic GFR-binding peptide
  MOD_RES (27), (28): Xaa is C or S
NPIKGYIVNNSSDFYLVNIPSLKTPAXXAK

SEQ ID NO: 66952 - protein, 27 aa, Artificial Sequence
  Cyclic GFR-binding peptide
  MOD_RES (27), (27): Xaa is C or S
NPIKGYIVNSSDDFYLVNIPSLKTPAX

SEQ ID NO: 66953 - protein, 38 aa, Artificial Sequence; identical to SEQ ID NO: 20654
  Cyclic GFR-binding peptide
  MOD_RES (1), (3), (35), (36): Xaa is C or S

SEQ ID NO: 66954 - protein, 23 aa, Artificial Sequence
  Cyclic GFR-binding peptide
VIMPIKGYLLVRGNDFYLMNIPS

SEQ ID NO: 66955 - protein, 25 aa, Artificial Sequence
  Cyclic GFR-binding peptide
PIKGYLLVRGNDFYLMNIPSTKVPA

SEQ ID NO: 66956 - protein, 26 aa, Artificial Sequence
  Cyclic GFR-binding peptide
EPIKGYVVKDYEDFYLMNIPSLETPV

SEQ ID NO: 66957 - protein, 27 aa, Artificial Sequence
  Cyclic GFR-binding peptide
MNPIKGYIVNNSSDFYLVNIPSLKTPA

SEQ ID NO: 66958 - protein, 28 aa, Artificial Sequence
  Cyclic GFR-binding peptide
  MOD_RES (26), (27): Xaa is C or S
PIKGYIVNNSSDFYLVNIPSLKTPAXXA

SEQ ID NO: 66959 - protein, 24 aa, Artificial Sequence
  Cyclic GFR-binding peptide
NPIKGYIVNSSDDFYLVNIPSLKT

SEQ ID NO: 66960 - protein, 24 aa, Artificial Sequence
  Cyclic GFR-binding peptide
MNPIKGYIVNSSDDFYLVNIPSLQ

SEQ ID NO: 66961 - protein, 32 aa, Artificial Sequence
  Cyclic GFR-binding peptide
  MOD_RES (2), (4): Xaa is C or S
HXGXAKVVMNPIKGYIVNNSSDFYLVNIPSLK

SEQ ID NO: 66962 - protein, 35 aa, Artificial Sequence
  Cyclic GFR-binding peptide
  MOD_RES (31), (32): Xaa is C or S
VSMGEPIKGYTPVGMDDFYLVNIPSLKTPVXXAKG

SEQ ID NO: 66963 - protein, 28 aa, Artificial Sequence
  Cyclic GFR-binding peptide
VMNPIKGYIVNSSDDFYLVNIPSLKTPA

SEQ ID NO: 66964 - protein, 31 aa, Artificial Sequence
  Cyclic GFR-binding peptide
  MOD_RES (28), (29): Xaa is C or S
MNPIKGYIVNSSDDFYLVNIPSLKTPAXXPK

SEQ ID NO: 66965 - protein, 38 aa, Artificial Sequence; identical to SEQ ID NO: 20670
  Cyclic GFR-binding peptide
  MOD_RES (2), (34), (35): Xaa is C or S

SEQ ID NO: 66966 - protein, 29 aa, Artificial Sequence
  Cyclic GFR-binding peptide
  MOD_RES (29), (29): Xaa is C or S
VMDPIKGYVVNNASDFYLINIPSLRTPVX

SEQ ID NO: 66967 - protein, 21 aa, Artificial Sequence
  Cyclic GFR-binding peptide
DPIKGYVVNNAADFYLINIPS

SEQ ID NO: 66968 - protein, 33 aa, Artificial Sequence
  Cyclic GFR-binding peptide
  MOD_RES (28), (29): Xaa is C or S
MNPIKGYIVNSSDDFYLVNIPSLQTPAXXPKPV

SEQ ID NO: 66969 - protein, 28 aa, Artificial Sequence
  Cyclic GFR-binding peptide
EVIMPIKGYLLVRGNDFYLMNIPSTKVP

SEQ ID NO: 66970 - protein, 39 aa, Artificial Sequence; identical to SEQ ID NO: 20678
  Cyclic GFR-binding peptide
  MOD_RES (1), (3), (36), (37): Xaa is C or S

SEQ ID NO: 66971 - protein, 35 aa, Artificial Sequence
  Cyclic GFR-binding peptide
  MOD_RES (29), (30): Xaa is C or S
VMNPIKGYIVNSSDDFYLVNIPSLQTPAXXPKPVT

SEQ ID NO: 66972 - protein, 34 aa, Artificial Sequence; identical to SEQ ID NO: 20679
  Cyclic GFR-binding peptide
  MOD_RES (32), (33): Xaa is C or S

SEQ ID NO: 66973 - protein, 29 aa, Artificial Sequence
  Cyclic GFR-binding peptide
  MOD_RES (27), (28): Xaa is C or S
GPIKGYYTVVGKDFYLINIPSLKTPVXXA

SEQ ID NO: 66974 - protein, 32 aa, Artificial Sequence; identical to SEQ ID NO: 20680
  Cyclic GFR-binding peptide
  MOD_RES (32), (32): Xaa is C or S

SEQ ID NO: 66975 - protein, 33 aa, Artificial Sequence
  Cyclic GFR-binding peptide
  MOD_RES (1), (3): Xaa is C or S
XGXARVVMNPIKGYIVNSSDDFYLVNIPSLQTP

SEQ ID NO: 66976 - protein, 39 aa, Artificial Sequence; identical to SEQ ID NO: 20681
  Cyclic GFR-binding peptide
  MOD_RES (1), (3), (35), (36): Xaa is C or S

SEQ ID NO: 66977 - protein, 36 aa, Artificial Sequence; identical to SEQ ID NO: 20684
  Cyclic GFR-binding peptide
  MOD_RES (1), (33), (34): Xaa is C or S

SEQ ID NO: 66978 - protein, 29 aa, Artificial Sequence
  Cyclic GFR-binding peptide
  MOD_RES (1), (1): Xaa is C or S
XESVAMGPIKGYYTVVGKDFYLINIPSLK

SEQ ID NO: 66979 - protein, 29 aa, Artificial Sequence
  Cyclic GFR-binding peptide
  MOD_RES (26), (26): Xaa is C or S
PIKGYIVNSSDDFYLVNIPSLKTPAXTPK

SEQ ID NO: 66980 - protein, 26 aa, Artificial Sequence
  Cyclic GFR-binding peptide
IMPIKGYLLVRGNDFYLMNIPSTKVP

SEQ ID NO: 66981 - protein, 32 aa, Artificial Sequence
  Cyclic GFR-binding peptide
  MOD_RES (29), (30): Xaa is C or S
VMEPIKGYVVKDYEDFYLMNIPSLETPVXXAK

SEQ ID NO: 66982 - protein, 28 aa, Artificial Sequence
  Cyclic GFR-binding peptide
EVVMDPIKGYVVNNASDFYLINIPSLRT

SEQ ID NO: 66983 - protein, 32 aa, Artificial Sequence; identical to SEQ ID NO: 20687
  Cyclic GFR-binding peptide
  MOD_RES (31), (32): Xaa is C or S

SEQ ID NO: 66984 - protein, 29 aa, Artificial Sequence
  Cyclic GFR-binding peptide
  MOD_RES (27), (28): Xaa is C or S
NPIKGYIVNNSSDFYLVNIPSLKTPAXXA

SEQ ID NO: 66985 - protein, 30 aa, Artificial Sequence
  Cyclic GFR-binding peptide
  MOD_RES (1), (3): Xaa is C or S
XGXEAVSMGEPIKGYTPVGMDDFYLVNIPS

SEQ ID NO: 66986 - protein, 28 aa, Artificial Sequence
  Cyclic GFR-binding peptide
VIMPIKGYLLVRGNDFYLMNIPSTKVPA

SEQ ID NO: 66987 - protein, 30 aa, Artificial Sequence
  Cyclic GFR-binding peptide
  MOD_RES (29), (30): Xaa is C or S
VMNPIKGYIVNNSSDFYLVNIPSLKTPAXX

SEQ ID NO: 66988 - protein, 36 aa, Artificial Sequence; identical to SEQ ID NO: 20690
  Cyclic GFR-binding peptide
  MOD_RES (32), (33): Xaa is C or S

SEQ ID NO: 66989 - protein, 27 aa, Artificial Sequence
  Cyclic GFR-binding peptide
  MOD_RES (26), (27): Xaa is C or S
PIKGYVVKENEDFYLMNIPSLETPVXX

SEQ ID NO: 66990 - protein, 28 aa, Artificial Sequence
  Cyclic GFR-binding peptide
  MOD_RES (28), (28): Xaa is C or S
IMPIKGYLLVRGNDFYLMNIPSTKVPAX

SEQ ID NO: 66991 - protein, 30 aa, Artificial Sequence
  Cyclic GFR-binding peptide
  MOD_RES (30), (30): Xaa is C or S
VVMNPIKGYIVNSSDDFYLVNIPSLKTPAX

SEQ ID NO: 66992 - protein, 31 aa, Artificial Sequence
  Cyclic GFR-binding peptide
  MOD_RES (28), (29): Xaa is C or S
MNPIKGYIVNNSSDFYLVNIPSLKTPAXXAK

SEQ ID NO: 66993 - protein, 23 aa, Artificial Sequence
  Cyclic GFR-binding peptide
PIKGYLLVRGNDFYLMNIPSTKV

SEQ ID NO: 66994 - protein, 42 aa, Artificial Sequence; identical to SEQ ID NO: 20696
  Cyclic GFR-binding peptide
  MOD_RES (2), (4), (36), (37): Xaa is C or S

SEQ ID NO: 66995 - protein, 27 aa, Artificial Sequence
  Cyclic GFR-binding peptide
GEVVMDPIKGYVVKENEDFYLMNIPSL

SEQ ID NO: 66996 - protein, 37 aa, Artificial Sequence; identical to SEQ ID NO: 20705
  Cyclic GFR-binding peptide
  MOD_RES (1), (3), (35), (36): Xaa is C or S

SEQ ID NO: 66997 - protein, 33 aa, Artificial Sequence
  Cyclic GFR-binding peptide
  MOD_RES (1), (3): Xaa is C or S
XGXAEVVMDPIKGYVVNNAADFYLINIPSLRAP

SEQ ID NO: 66998 - protein, 35 aa, Artificial Sequence; identical to SEQ ID NO: 20709
  Cyclic GFR-binding peptide
  MOD_RES (2), (34), (35): Xaa is C or S

SEQ ID NO: 66999 - protein, 32 aa, Artificial Sequence
  Cyclic GFR-binding peptide
  MOD_RES (26), (27): Xaa is C or S
PIKGYIVNSSDDFYLVNIPSLQTPAXXPKPVT

SEQ ID NO: 67000 - protein, 26 aa, Artificial Sequence
  Cyclic GFR-binding peptide
VVMNPIKGYIVNSSDDFYLVNIPSLK

SEQ ID NO: 67001 - protein, 41 aa, Artificial Sequence; identical to SEQ ID NO: 20714
  Cyclic GFR-binding peptide
  MOD_RES (2), (4), (35), (36): Xaa is C or S

SEQ ID NO: 67002 - protein, 25 aa, Artificial Sequence
  Cyclic GFR-binding peptide
EPIKGYTPVGMDDFYLVNIPSLKTP

SEQ ID NO: 67003 - protein, 32 aa, Artificial Sequence; identical to SEQ ID NO: 20718
  Cyclic GFR-binding peptide
  MOD_RES (31), (32): Xaa is C or S

SEQ ID NO: 67004 - protein, 30 aa, Artificial Sequence
  Cyclic GFR-binding peptide
  MOD_RES (29), (30): Xaa is C or S
VMDPIKGYVVKENEDFYLMNIPSLETPVXX

SEQ ID NO: 67005 - protein, 28 aa, Artificial Sequence
  Cyclic GFR-binding peptide
  MOD_RES (26), (27): Xaa is C or S
PIKGYIVNSSDDFYLVNIPSLQTPAXXP

SEQ ID NO: 67006 - protein, 36 aa, Artificial Sequence; identical to SEQ ID NO: 20721
  Cyclic GFR-binding peptide
  MOD_RES (2), (4), (36): Xaa is C or S

SEQ ID NO: 67007 - protein, 28 aa, Artificial Sequence
  Cyclic GFR-binding peptide
VVMDPIKGYVVNNASDFYLINIPSLRTP

SEQ ID NO: 67008 - protein, 23 aa, Artificial Sequence
  Cyclic GFR-binding peptide
PIKGYVVKDYEDFYLMNIPSLET

SEQ ID NO: 67009 - protein, 34 aa, Artificial Sequence
  Cyclic GFR-binding peptide
  MOD_RES (29), (30): Xaa is C or S
VMDPIKGYVVNNASDFYLINIPSLRTPVXXTPPT

SEQ ID NO: 67010 - protein, 22 aa, Artificial Sequence
  Cyclic GFR-binding peptide
DPIKGYVVNNASDFYLINIPSL

SEQ ID NO: 67011 - protein, 29 aa, Artificial Sequence
  Cyclic GFR-binding peptide
  MOD_RES (27), (28): Xaa is C or S
DPIKGYVVNNASDFYLINIPSLRTPVXXT

SEQ ID NO: 67012 - protein, 38 aa, Artificial Sequence; identical to SEQ ID NO: 20734
  Cyclic GFR-binding peptide
  MOD_RES (2), (34), (35): Xaa is C or S

SEQ ID NO: 67013 - protein, 27 aa, Artificial Sequence
  Cyclic GFR-binding peptide
EEVIMPIKGYLLVRGNDFYLMNIPSTK

SEQ ID NO: 67014 - protein, 33 aa, Artificial Sequence; identical to SEQ ID NO: 20735
  Cyclic GFR-binding peptide
  MOD_RES (31), (32): Xaa is C or S

SEQ ID NO: 67015 - protein, 29 aa, Artificial Sequence
  Cyclic GFR-binding peptide
  MOD_RES (2), (2): Xaa is C or S
GXARVVMNPIKGYIVNSSDDFYLVNIPSL

SEQ ID NO: 67016 - protein, 38 aa, Artificial Sequence; identical to SEQ ID NO: 20739
  Cyclic GFR-binding peptide
  MOD_RES (2), (4), (36): Xaa is C or S

SEQ ID NO: 67017 - protein, 25 aa, Artificial Sequence
  Cyclic GFR-binding peptide
PIKGYVVNNAADFYLINIPSLRAPV

SEQ ID NO: 67018 - protein, 26 aa, Artificial Sequence
  Cyclic GFR-binding peptide
NPIKGYIVNSSDDFYLVNIPSLQTPA

SEQ ID NO: 67019 - protein, 31 aa, Artificial Sequence
  Cyclic GFR-binding peptide
  MOD_RES (1), (3): Xaa is C or S
XGXESVAMGPIKGYYTVVGKDFYLINIPSLK

SEQ ID NO: 67020 - protein, 40 aa, Artificial Sequence; identical to SEQ ID NO: 20742
  Cyclic GFR-binding peptide
  MOD_RES (2), (34), (35): Xaa is C or S

SEQ ID NO: 67021 - protein, 29 aa, Artificial Sequence
  Cyclic GFR-binding peptide
  MOD_RES (27), (28): Xaa is C or S
DPIKGYVVNNAADFYLINIPSLRAPVXXS

SEQ ID NO: 67022 - protein, 34 aa, Artificial Sequence
  Cyclic GFR-binding peptide
  MOD_RES (2), (4): Xaa is C or S
HXGXARVVMNPIKGYIVNSSDDFYLVNIPSLQTP

SEQ ID NO: 67023 - protein, 26 aa, Artificial Sequence
  Cyclic GFR-binding peptide
  MOD_RES (26), (26): Xaa is C or S
PIKGYYTVVGKDFYLINIPSLKTPVX

SEQ ID NO: 67024 - protein, 33 aa, Artificial Sequence; identical to SEQ ID NO: 20747
  Cyclic GFR-binding peptide
  MOD_RES (1), (33): Xaa is C or S

SEQ ID NO: 67025 - protein, 28 aa, Artificial Sequence
  Cyclic GFR-binding peptide
  MOD_RES (28), (28): Xaa is C or S
MDPIKGYVVKENEDFYLMNIPSLETPVX

SEQ ID NO: 67026 - protein, 30 aa, Artificial Sequence
  Cyclic GFR-binding peptide
  MOD_RES (1), (1): Xaa is C or S
XEAVSMGEPIKGYTPVGMDDFYLVNIPSLK

SEQ ID NO: 67027 - protein, 36 aa, Artificial Sequence; identical to SEQ ID NO: 20749
  Cyclic GFR-binding peptide
  MOD_RES (2), (34), (35): Xaa is C or S

SEQ ID NO: 67028 - protein, 34 aa, Artificial Sequence
  Cyclic GFR-binding peptide
  MOD_RES (29), (30): Xaa is C or S
VMNPIKGYIVNNSSDFYLVNIPSLKTPAXXAKPV

SEQ ID NO: 67029 - protein, 37 aa, Artificial Sequence; identical to SEQ ID NO: 20751
  Cyclic GFR-binding peptide
  MOD_RES (33), (34): Xaa is C or S

SEQ ID NO: 67030 - protein, 35 aa, Artificial Sequence
  Cyclic GFR-binding peptide
  MOD_RES (30), (31): Xaa is C or S
VAMGPIKGYYTVVGKDFYLINIPSLKTPVXXAKSA

SEQ ID NO: 67031 - protein, 34 aa, Artificial Sequence
  Cyclic GFR-binding peptide
  MOD_RES (30), (31): Xaa is C or S
VVMNPIKGYIVNSSDDFYLVNIPSLKTPAXXPKP

SEQ ID NO: 67032 - protein, 30 aa, Artificial Sequence
  Cyclic GFR-binding peptide
  MOD_RES (2), (2): Xaa is C or S
GXAKVVMNPIKGYIVNNSSDFYLVNIPSLK

SEQ ID NO: 67033 - protein, 31 aa, Artificial Sequence
  Cyclic GFR-binding peptide
  MOD_RES (29), (30): Xaa is C or S
VMNPIKGYIVNSSDDFYLVNIPSLKTPAXXP

SEQ ID NO: 67034 - protein, 35 aa, Artificial Sequence
  Cyclic GFR-binding peptide
  MOD_RES (29), (29): Xaa is C or S
VMNPIKGYIVNSSDDFYLVNIPSLKTPAXTPKTVH

SEQ ID NO: 67035 - protein, 36 aa, Artificial Sequence
  Cyclic GFR-binding peptide
  MOD_RES (30), (31): Xaa is C or S
VAMGPIKGYYTVVGKDFYLINIPSLKTPVXXAKSAK

SEQ ID NO: 67036 - protein, 26 aa, Artificial Sequence
  Cyclic GFR-binding peptide
  MOD_RES (26), (26): Xaa is C or S
PIKGYIVNNSSDFYLVNIPSLKTPAX

SEQ ID NO: 67037 - protein, 36 aa, Artificial Sequence; identical to SEQ ID NO: 20762
  Cyclic GFR-binding peptide
  MOD_RES (2), (4), (35), (36): Xaa is C or S

SEQ ID NO: 67038 - protein, 30 aa, Artificial Sequence; identical to SEQ ID NO: 20763
  Cyclic GFR-binding peptide

SEQ ID NO: 67039 - protein, 30 aa, Artificial Sequence
  Cyclic GFR-binding peptide
  MOD_RES (2), (4): Xaa is C or S
RXGXGEVVMEPIKGYVVKDYEDFYLMNIPS

SEQ ID NO: 67040 - protein, 37 aa, Artificial Sequence; identical to SEQ ID NO: 20764
  Cyclic GFR-binding peptide
  MOD_RES (1), (34), (35): Xaa is C or S

SEQ ID NO: 67041 - protein, 33 aa, Artificial Sequence
  Cyclic GFR-binding peptide
  MOD_RES (1), (3): Xaa is C or S
XGXESVAMGPIKGYYTVVGKDFYLINIPSLKTP

SEQ ID NO: 67042 - protein, 33 aa, Artificial Sequence; identical to SEQ ID NO: 20766
  Cyclic GFR-binding peptide
  MOD_RES (1), (33): Xaa is C or S

SEQ ID NO: 67043 - protein, 35 aa, Artificial Sequence; identical to SEQ ID NO: 20768
  Cyclic GFR-binding peptide
  MOD_RES (1), (33), (34): Xaa is C or S

SEQ ID NO: 67044 - protein, 34 aa, Artificial Sequence
  Cyclic GFR-binding peptide
  MOD_RES (28), (29): Xaa is C or S
MDPIKGYVVNNAADFYLINIPSLRAPVXXSAPAA

SEQ ID NO: 67045 - protein, 21 aa, Artificial Sequence
  Cyclic GFR-binding peptide
MPIKGYLLVRGNDFYLMNIPS

SEQ ID NO: 67046 - protein, 29 aa, Artificial Sequence
  Cyclic GFR-binding peptide
  MOD_RES (28), (28): Xaa is C or S
MNPIKGYIVNSSDDFYLVNIPSLKTPAXT

SEQ ID NO: 67047 - protein, 21 aa, Artificial Sequence
  Cyclic GFR-binding peptide
EPIKGYTPVGMDDFYLVNIPS

SEQ ID NO: 67048 - protein, 41 aa, Artificial Sequence; identical to SEQ ID NO: 20783
  Cyclic GFR-binding peptide
  MOD_RES (1), (3), (36), (37): Xaa is C or S

SEQ ID NO: 67049 - protein, 35 aa, Artificial Sequence; identical to SEQ ID NO: 20785
  Cyclic GFR-binding peptide
  MOD_RES (2), (34), (35): Xaa is C or S

SEQ ID NO: 67050 - protein, 22 aa, Artificial Sequence
  Cyclic GFR-binding peptide
GEPIKGYTPVGMDDFYLVNIPS

SEQ ID NO: 67051 - protein, 30 aa, Artificial Sequence
  Cyclic GFR-binding peptide
  MOD_RES (1), (3): Xaa is C or S
XGXEEVIMPIKGYLLVRGNDFYLMNIPSTK

SEQ ID NO: 67052 - protein, 36 aa, Artificial Sequence; identical to SEQ ID NO: 20791
  Cyclic GFR-binding peptide
  MOD_RES (33), (34): Xaa is C or S

SEQ ID NO: 67053 - protein, 24 aa, Artificial Sequence
  Cyclic GFR-binding peptide
PIKGYIVNSSDDFYLVNIPSLQTP

SEQ ID NO: 67054 - protein, 31 aa, Artificial Sequence
  Cyclic GFR-binding peptide
  MOD_RES (30), (31): Xaa is C or S
VVMDPIKGYVVKENEDFYLMNIPSLETPVXX

SEQ ID NO: 67055 - protein, 39 aa, Artificial Sequence; identical to SEQ ID NO: 20793
  Cyclic GFR-binding peptide
  MOD_RES (1), (3), (35): Xaa is C or S

SEQ ID NO: 67056 - protein, 31 aa, Artificial Sequence
  Cyclic GFR-binding peptide
  MOD_RES (27), (28): Xaa is C or S
DPIKGYVVNNAADFYLINIPSLRAPVXXSAP

SEQ ID NO: 67057 - protein, 25 aa, Artificial Sequence
  Cyclic GFR-binding peptide
VVMNPIKGYIVNSSDDFYLVNIPSL

SEQ ID NO: 67058 - protein, 31 aa, Artificial Sequence
  Cyclic GFR-binding peptide
  MOD_RES (27), (28): Xaa is C or S
DPIKGYVVNNASDFYLINIPSLRTPVXXTPP

SEQ ID NO: 67059 - protein, 32 aa, Artificial Sequence
  Cyclic GFR-binding peptide
  MOD_RES (27), (28): Xaa is C or S
DPIKGYVVNNASDFYLINIPSLRTPVXXTPPT

SEQ ID NO: 67060 - protein, 28 aa, Artificial Sequence
  Cyclic GFR-binding peptide
  MOD_RES (26), (27): Xaa is C or S
PIKGYTPVGMDDFYLVNIPSLKTPVXXA

SEQ ID NO: 67061 - protein, 21 aa, Artificial Sequence
  Cyclic GFR-binding peptide
PIKGYVVNNASDFYLINIPSL

SEQ ID NO: 67062 - protein, 32 aa, Artificial Sequence; identical to SEQ ID NO: 20800
  Cyclic GFR-binding peptide
  MOD_RES (32), (32): Xaa is C or S

SEQ ID NO: 67063 - protein, 34 aa, Artificial Sequence; identical to SEQ ID NO: 20801
  Cyclic GFR-binding peptide
  MOD_RES (2), (34): Xaa is C or S

SEQ ID NO: 67064 - protein, 28 aa, Artificial Sequence
  Cyclic GFR-binding peptide
SVAMGPIKGYYTVVGKDFYLINIPSLKT

SEQ ID NO: 67065 - protein, 34 aa, Artificial Sequence; identical to SEQ ID NO: 20805
  Cyclic GFR-binding peptide
  MOD_RES (1), (33), (34): Xaa is C or S

SEQ ID NO: 67066 - protein, 34 aa, Artificial Sequence
  Cyclic GFR-binding peptide
  MOD_RES (30), (31): Xaa is C or S
VVMNPIKGYIVNNSSDFYLVNIPSLKTPAXXAKP

SEQ ID NO: 67067 - protein, 28 aa, Artificial Sequence
  Cyclic GFR-binding peptide
VVMDPIKGYVVNNAADFYLINIPSLRAP

SEQ ID NO: 67068 - protein, 30 aa, Artificial Sequence
  Cyclic GFR-binding peptide
AVSMGEPIKGYTPVGMDDFYLVNIPSLKTP

SEQ ID NO: 67069 - protein, 22 aa, Artificial Sequence
  Cyclic GFR-binding peptide
NPIKGYIVNNSSDFYLVNIPSL

SEQ ID NO: 67070 - protein, 31 aa, Artificial Sequence
  Cyclic GFR-binding peptide
  MOD_RES (2), (4): Xaa is C or S
HXGXARVVMNPIKGYIVNSSDDFYLVNIPSL

SEQ ID NO: 67071 - protein, 26 aa, Artificial Sequence
  Cyclic GFR-binding peptide
GPIKGYYTVVGKDFYLINIPSLKTPV

SEQ ID NO: 67072 - protein, 26 aa, Artificial Sequence
  Cyclic GFR-binding peptide
VVMDPIKGYVVNNAADFYLINIPSLR

SEQ ID NO: 67073 - protein, 28 aa, Artificial Sequence
  Cyclic GFR-binding peptide
VVMNPIKGYIVNSSDDFYLVNIPSLQTP

SEQ ID NO: 67074 - protein, 32 aa, Artificial Sequence; identical to SEQ ID NO: 20814
  Cyclic GFR-binding peptide
  MOD_RES (1), (1): Xaa is C or S

SEQ ID NO: 67075 - protein, 30 aa, Artificial Sequence
  Cyclic GFR-binding peptide
  MOD_RES (2), (2): Xaa is C or S
GXGEVVMDPIKGYVVKENEDFYLMNIPSLE

SEQ ID NO: 67076 - protein, 34 aa, Artificial Sequence; identical to SEQ ID NO: 20820
  Cyclic GFR-binding peptide
  MOD_RES (1), (3): Xaa is C or S

SEQ ID NO: 67077 - protein, 29 aa, Artificial Sequence
  Cyclic GFR-binding peptide
  MOD_RES (1), (3): Xaa is C or S
XGXAEVVMDPIKGYVVNNAADFYLINIPS

SEQ ID NO: 67078 - protein, 24 aa, Artificial Sequence
  Cyclic GFR-binding peptide
VVMDPIKGYVVNNASDFYLINIPS

SEQ ID NO: 67079 - protein, 34 aa, Artificial Sequence; identical to SEQ ID NO: 20823
  Cyclic GFR-binding peptide
  MOD_RES (1), (33), (34): Xaa is C or S

SEQ ID NO: 67080 - protein, 21 aa, Artificial Sequence
  Cyclic GFR-binding peptide
NPIKGYIVNSSDDFYLVNIPS

SEQ ID NO: 67081 - protein, 33 aa, Artificial Sequence
  Cyclic GFR-binding peptide
  MOD_RES (27), (28): Xaa is C or S
NPIKGYIVNSSDDFYLVNIPSLQTPAXXPKPVT

SEQ ID NO: 67082 - protein, 31 aa, Artificial Sequence
  Cyclic GFR-binding peptide
  MOD_RES (2), (2): Xaa is C or S
GXARVVMNPIKGYIVNSSDDFYLVNIPSLQT

SEQ ID NO: 67083 - protein, 29 aa, Artificial Sequence
  Cyclic GFR-binding peptide
VSMGEPIKGYTPVGMDDFYLVNIPSLKTP

SEQ ID NO: 67084 - protein, 31 aa, Artificial Sequence
  Cyclic GFR-binding peptide
  MOD_RES (28), (29): Xaa is C or S
MNPIKGYIVNSSDDFYLVNIPSLQTPAXXPK

SEQ ID NO: 67085 - protein, 35 aa, Artificial Sequence
  Cyclic GFR-binding peptide
  MOD_RES (29), (30): Xaa is C or S
VMDPIKGYVVNNAADFYLINIPSLRAPVXXSAPAA

SEQ ID NO: 67086 - protein, 23 aa, Artificial Sequence
  Cyclic GFR-binding peptide
VMDPIKGYVVKENEDFYLMNIPS

SEQ ID NO: 67087 - protein, 37 aa, Artificial Sequence; identical to SEQ ID NO: 20828
  Cyclic GFR-binding peptide
  MOD_RES (2), (4), (36), (37): Xaa is C or S

SEQ ID NO: 67088 - protein, 34 aa, Artificial Sequence
  Cyclic GFR-binding peptide
  MOD_RES (2), (4): Xaa is C or S
RXGXGEVVMDPIKGYVVKENEDFYLMNIPSLETP

SEQ ID NO: 67089 - protein, 31 aa, Artificial Sequence
  Cyclic GFR-binding peptide
  MOD_RES (28), (29): Xaa is C or S
GEPIKGYTPVGMDDFYLVNIPSLKTPVXXAK

SEQ ID NO: 67090 - protein, 27 aa, Artificial Sequence
  Cyclic GFR-binding peptide
AVSMGEPIKGYTPVGMDDFYLVNIPSL

SEQ ID NO: 67091 - protein, 25 aa, Artificial Sequence
  Cyclic GFR-binding peptide
PIKGYYTVVGKDFYLINIPSLKTPV

SEQ ID NO: 67092 - protein, 28 aa, Artificial Sequence
  Cyclic GFR-binding peptide
GEVVMDPIKGYVVKENEDFYLMNIPSLE

SEQ ID NO: 67093 - protein, 38 aa, Artificial Sequence; identical to SEQ ID NO: 20839
  Cyclic GFR-binding peptide
  MOD_RES (1), (3), (35), (36): Xaa is C or S

SEQ ID NO: 67094 - protein, 38 aa, Artificial Sequence; identical to SEQ ID NO: 20840
  Cyclic GFR-binding peptide
  MOD_RES (32), (32): Xaa is C or S

SEQ ID NO: 67095 - protein, 31 aa, Artificial Sequence
  Cyclic GFR-binding peptide
  MOD_RES (2), (2): Xaa is C or S
GXSRVVMNPIKGYIVNSSDDFYLVNIPSLKT

SEQ ID NO: 67096 - protein, 29 aa, Artificial Sequence
  Cyclic GFR-binding peptide
  MOD_RES (26), (27): Xaa is C or S
PIKGYVVNNAADFYLINIPSLRAPVXXSA

SEQ ID NO: 67097 - protein, 34 aa, Artificial Sequence; identical to SEQ ID NO: 20842
  Cyclic GFR-binding peptide
  MOD_RES (1), (3): Xaa is C or S

SEQ ID NO: 67098 - protein, 27 aa, Artificial Sequence
  Cyclic GFR-binding peptide
  MOD_RES (1), (1): Xaa is C or S
XSRVVMNPIKGYIVNSSDDFYLVNIPS

SEQ ID NO: 67099 - protein, 34 aa, Artificial Sequence
  Cyclic GFR-binding peptide
  MOD_RES (30), (31): Xaa is C or S
VVMEPIKGYVVKDYEDFYLMNIPSLETPVXXAKP

SEQ ID NO: 67100 - protein, 30 aa, Artificial Sequence
  Cyclic GFR-binding peptide
  MOD_RES (27), (28): Xaa is C or S
EPIKGYVVKDYEDFYLMNIPSLETPVXXAK

SEQ ID NO: 67101 - protein, 20 aa, Artificial Sequence
  Cyclic GFR-binding peptide
PIKGYVVNNAADFYLINIPS

SEQ ID NO: 67102 - protein, 31 aa, Artificial Sequence
  Cyclic GFR-binding peptide
  MOD_RES (30), (31): Xaa is C or S
VAMGPIKGYYTVVGKDFYLINIPSLKTPVXX

SEQ ID NO: 67103 - protein, 28 aa, Artificial Sequence
  Cyclic GFR-binding peptide
  MOD_RES (2), (2): Xaa is C or S
GXSEVVMDPIKGYVVNNASDFYLINIPS

SEQ ID NO: 67104 - protein, 33 aa, Artificial Sequence; identical to SEQ ID NO: 20846
  Cyclic GFR-binding peptide
  MOD_RES (1), (3): Xaa is C or S

SEQ ID NO: 67105 - protein, 37 aa, Artificial Sequence; identical to SEQ ID NO: 20849
  Cyclic GFR-binding peptide
  MOD_RES (32), (33): Xaa is C or S

SEQ ID NO: 67106 - protein, 25 aa, Artificial Sequence
  Cyclic GFR-binding peptide
PIKGYIVNNSSDFYLVNIPSLKTPA

SEQ ID NO: 67107 - protein, 27 aa, Artificial Sequence
  Cyclic GFR-binding peptide
  MOD_RES (1), (1): Xaa is C or S
XEEVIMPIKGYLLVRGNDFYLMNIPST

SEQ ID NO: 67108 - protein, 23 aa, Artificial Sequence
  Cyclic GFR-binding peptide
NPIKGYIVNSSDDFYLVNIPSLK

SEQ ID NO: 67109 - protein, 32 aa, Artificial Sequence
  Cyclic GFR-binding peptide
  MOD_RES (27), (28): Xaa is C or S
DPIKGYVVKENEDFYLMNIPSLETPVXXAKPI

SEQ ID NO: 67110 - protein, 29 aa, Artificial Sequence
  Cyclic GFR-binding peptide
VVMEPIKGYVVKDYEDFYLMNIPSLETPV

SEQ ID NO: 67111 - protein, 37 aa, Artificial Sequence; identical to SEQ ID NO: 20856
  Cyclic GFR-binding peptide
  MOD_RES (31), (32): Xaa is C or S

SEQ ID NO: 67112 - protein, 22 aa, Artificial Sequence
  Cyclic GFR-binding peptide
IMPIKGYLLVRGNDFYLMNIPS

SEQ ID NO: 67113 - protein, 29 aa, Artificial Sequence
  Cyclic GFR-binding peptide
AAAAAAAAAPIKGYLLVRGNDFYLMNIPS

SEQ ID NO: 67114 - protein, 35 aa, Artificial Sequence
  Cyclic GFR-binding peptide
  MOD_RES (32), (33): Xaa is C or S
AVSMGEPIKGYTPVGMDDFYLVNIPSLKTPVXXAK

SEQ ID NO: 67115 - protein, 36 aa, Artificial Sequence; identical to SEQ ID NO: 20857
  Cyclic GFR-binding peptide
  MOD_RES (1), (33), (34): Xaa is C or S

SEQ ID NO: 67116 - protein, 26 aa, Artificial Sequence
  Cyclic GFR-binding peptide
MDPIKGYVVNNAADFYLINIPSLRAP

SEQ ID NO: 67117 - protein, 37 aa, Artificial Sequence; identical to SEQ ID NO: 20868
  Cyclic GFR-binding peptide
  MOD_RES (1), (33), (34): Xaa is C or S

SEQ ID NO: 67118 - protein, 27 aa, Artificial Sequence
  Cyclic GFR-binding peptide
VVMDPIKGYVVNNAADFYLINIPSLRA

SEQ ID NO: 67119 - protein, 31 aa, Artificial Sequence
  Cyclic GFR-binding peptide
  MOD_RES (26), (27): Xaa is C or S
PIKGYIVNNSSDFYLVNIPSLKTPAXXAKPV

SEQ ID NO: 67120 - protein, 27 aa, Artificial Sequence
  Cyclic GFR-binding peptide
VVMNPIKGYIVNNSSDFYLVNIPSLKT

SEQ ID NO: 67121 - protein, 26 aa, Artificial Sequence
  Cyclic GFR-binding peptide
  MOD_RES (26), (26): Xaa is C or S
PIKGYLLVRGNDFYLMNIPSTKVPAX

SEQ ID NO: 67122 - protein, 29 aa, Artificial Sequence
  Cyclic GFR-binding peptide
  MOD_RES (2), (2): Xaa is C or S
GXSRVVMNPIKGYIVNSSDDFYLVNIPSL

SEQ ID NO: 67123 - protein, 32 aa, Artificial Sequence
  Cyclic GFR-binding peptide
  MOD_RES (1), (3): Xaa is C or S
XGXEAVSMGEPIKGYTPVGMDDFYLVNIPSLK

SEQ ID NO: 67124 - protein, 38 aa, Artificial Sequence; identical to SEQ ID NO: 20874
  Cyclic GFR-binding peptide
  MOD_RES (2), (4), (36), (37): Xaa is C or S

SEQ ID NO: 67125 - protein, 35 aa, Artificial Sequence
  Cyclic GFR-binding peptide
  MOD_RES (30), (31): Xaa is C or S
VVMDPIKGYVVNNAADFYLINIPSLRAPVXXSAPA

SEQ ID NO: 67126 - protein, 32 aa, Artificial Sequence; identical to SEQ ID NO: 20879
  Cyclic GFR-binding peptide
  MOD_RES (32), (32): Xaa is C or S

SEQ ID NO: 67127 - protein, 27 aa, Artificial Sequence
  Cyclic GFR-binding peptide
  MOD_RES (26), (27): Xaa is C or S
PIKGYVVNNASDFYLINIPSLRTPVXX

SEQ ID NO: 67128 - protein, 29 aa, Artificial Sequence
  Cyclic GFR-binding peptide
  MOD_RES (2), (2): Xaa is C or S
GXEEVIMPIKGYLLVRGNDFYLMNIPSTK

SEQ ID NO: 67129 - protein, 32 aa, Artificial Sequence
  Cyclic GFR-binding peptide
  MOD_RES (1), (3): Xaa is C or S
XGXGEVVMDPIKGYVVKENEDFYLMNIPSLET

SEQ ID NO: 67130 - protein, 28 aa, Artificial Sequence
  Cyclic GFR-binding peptide
EVVMEPIKGYVVKDYEDFYLMNIPSLET

SEQ ID NO: 67131 - protein, 32 aa, Artificial Sequence; identical to SEQ ID NO: 20883
  Cyclic GFR-binding peptide
  MOD_RES (31), (31): Xaa is C or S

SEQ ID NO: 67132 - protein, 31 aa, Artificial Sequence
  Cyclic GFR-binding peptide
  MOD_RES (29), (30): Xaa is C or S
VMDPIKGYVVNNASDFYLINIPSLRTPVXXT

SEQ ID NO: 67133 - protein, 37 aa, Artificial Sequence; identical to SEQ ID NO: 20885
  Cyclic GFR-binding peptide
  MOD_RES (2), (4), (36), (37): Xaa is C or S

SEQ ID NO: 67134 - protein, 30 aa, Artificial Sequence
  Cyclic GFR-binding peptide
  MOD_RES (2), (4): Xaa is C or S
HXGXSRVVMNPIKGYIVNSSDDFYLVNIPS

SEQ ID NO: 67135 - protein, 37 aa, Artificial Sequence; identical to SEQ ID NO: 20886
  Cyclic GFR-binding peptide
  MOD_RES (1), (3), (35), (36): Xaa is C or S

SEQ ID NO: 67136 - protein, 35 aa, Artificial Sequence; identical to SEQ ID NO: 20890
  Cyclic GFR-binding peptide
  MOD_RES (2), (34): Xaa is C or S

SEQ ID NO: 67137 - protein, 24 aa, Artificial Sequence
  Cyclic GFR-binding peptide
VIMPIKGYLLVRGNDFYLMNIPST

SEQ ID NO: 67138 - protein, 26 aa, Artificial Sequence
  Cyclic GFR-binding peptide
DPIKGYVVKENEDFYLMNIPSLETPV

SEQ ID NO: 67139 - protein, 23 aa, Artificial Sequence
  Cyclic GFR-binding peptide
PIKGYIVNSSDDFYLVNIPSLQT

SEQ ID NO: 67140 - protein, 30 aa, Artificial Sequence
  Cyclic GFR-binding peptide
  MOD_RES (27), (28): Xaa is C or S
DPIKGYVVKENEDFYLMNIPSLETPVXXAK

SEQ ID NO: 67141 - protein, 25 aa, Artificial Sequence
  Cyclic GFR-binding peptide
MNPIKGYIVNSSDDFYLVNIPSLKT

SEQ ID NO: 67142 - protein, 31 aa, Artificial Sequence
  Cyclic GFR-binding peptide
  MOD_RES (29), (30): Xaa is C or S
VMDPIKGYVVNNAADFYLINIPSLRAPVXXS

SEQ ID NO: 67143 - protein, 29 aa, Artificial Sequence
  Cyclic GFR-binding peptide
GEVVMDPIKGYVVKENEDFYLMNIPSLET

SEQ ID NO: 67144 - protein, 23 aa, Artificial Sequence
  Cyclic GFR-binding peptide
PIKGYVVNNASDFYLINIPSLRT

SEQ ID NO: 67145 - protein, 34 aa, Artificial Sequence; identical to SEQ ID NO: 20893
  Cyclic GFR-binding peptide
  MOD_RES (1), (33), (34): Xaa is C or S

SEQ ID NO: 67146 - protein, 30 aa, Artificial Sequence
  Cyclic GFR-binding peptide
  MOD_RES (2), (4): Xaa is C or S
RXGXESVAMGPIKGYYTVVGKDFYLINIPS

SEQ ID NO: 67147 - protein, 40 aa, Artificial Sequence; identical to SEQ ID NO: 20894
  Cyclic GFR-binding peptide
  MOD_RES (2), (34), (35): Xaa is C or S

SEQ ID NO: 67148 - protein, 24 aa, Artificial Sequence
  Cyclic GFR-binding peptide
PIKGYLLVRGNDFYLMNIPSTKVP

SEQ ID NO: 67149 - protein, 32 aa, Artificial Sequence
  Cyclic GFR-binding peptide
  MOD_RES (29), (30): Xaa is C or S
MGEPIKGYTPVGMDDFYLVNIPSLKTPVXXAK

SEQ ID NO: 67150 - protein, 30 aa, Artificial Sequence
  Cyclic GFR-binding peptide
  MOD_RES (27), (28): Xaa is C or S
NPIKGYIVNSSDDFYLVNIPSLQTPAXXPK

SEQ ID NO: 67151 - protein, 32 aa, Artificial Sequence
  Cyclic GFR-binding peptide
  MOD_RES (2), (2): Xaa is C or S
GXGEVVMDPIKGYVVKENEDFYLMNIPSLETP

SEQ ID NO: 67152 - protein, 35 aa, Artificial Sequence; identical to SEQ ID NO: 20906
  Cyclic GFR-binding peptide
  MOD_RES (31), (32): Xaa is C or S

SEQ ID NO: 67153 - protein, 39 aa, Artificial Sequence; identical to SEQ ID NO: 20910
  Cyclic GFR-binding peptide
  MOD_RES (1), (3), (35), (36): Xaa is C or S

SEQ ID NO: 67154 - protein, 30 aa, Artificial Sequence
  Cyclic GFR-binding peptide
VSMGEPIKGYTPVGMDDFYLVNIPSLKTPV

SEQ ID NO: 67155 - protein, 27 aa, Artificial Sequence
  Cyclic GFR-binding peptide
MEPIKGYVVKDYEDFYLMNIPSLETPV

SEQ ID NO: 67156 - protein, 32 aa, Artificial Sequence; identical to SEQ ID NO: 20916
  Cyclic GFR-binding peptide
  MOD_RES (32), (32): Xaa is C or S

SEQ ID NO: 67157 - protein, 38 aa, Artificial Sequence; identical to SEQ ID NO: 20917
  Cyclic GFR-binding peptide
  MOD_RES (32), (33): Xaa is C or S

SEQ ID NO: 67158 - protein, 36 aa, Artificial Sequence
  Cyclic GFR-binding peptide
  MOD_RES (30), (31): Xaa is C or S
VVMNPIKGYIVNSSDDFYLVNIPSLQTPAXXPKPVT

SEQ ID NO: 67159 - protein, 40 aa, Artificial Sequence; identical to SEQ ID NO: 20919
  Cyclic GFR-binding peptide
  MOD_RES (1), (3), (35): Xaa is C or S

SEQ ID NO: 67160 - protein, 30 aa, Artificial Sequence
  Cyclic GFR-binding peptide
  MOD_RES (2), (4): Xaa is C or S
RXGXSEVVMDPIKGYVVNNASDFYLINIPS

SEQ ID NO: 67161 - protein, 29 aa, Artificial Sequence
  Cyclic GFR-binding peptide
  MOD_RES (28), (29): Xaa is C or S
MGPIKGYYTVVGKDFYLINIPSLKTPVXX

SEQ ID NO: 67162 - protein, 37 aa, Artificial Sequence; identical to SEQ ID NO: 20921
  Cyclic GFR-binding peptide
  MOD_RES (31), (32): Xaa is C or S

SEQ ID NO: 67163 - protein, 26 aa, Artificial Sequence
  Cyclic GFR-binding peptide
VVMEPIKGYVVKDYEDFYLMNIPSLE

SEQ ID NO: 67164 - protein, 36 aa, Artificial Sequence; identical to SEQ ID NO: 20924
  Cyclic GFR-binding peptide
  MOD_RES (31), (32): Xaa is C or S

SEQ ID NO: 67165 - protein, 26 aa, Artificial Sequence
  Cyclic GFR-binding peptide
VMDPIKGYVVNNAADFYLINIPSLRA

SEQ ID NO: 67166 - protein, 31 aa, Artificial Sequence
  Cyclic GFR-binding peptide
  MOD_RES (1), (1): Xaa is C or S
XGEVVMDPIKGYVVKENEDFYLMNIPSLETP

SEQ ID NO: 67167 - protein, 42 aa, Artificial Sequence; identical to SEQ ID NO: 20930
  Cyclic GFR-binding peptide
  MOD_RES (2), (4), (36): Xaa is C or S

SEQ ID NO: 67168 - protein, 33 aa, Artificial Sequence; identical to SEQ ID NO: 20932
  Cyclic GFR-binding peptide
  MOD_RES (1), (32), (33): Xaa is C or S

SEQ ID NO: 67169 - protein, 36 aa, Artificial Sequence
  Cyclic GFR-binding peptide
  MOD_RES (30), (31): Xaa is C or S
VVMNPIKGYIVNSSDDFYLVNIPSLKTPAXXPKPVY

SEQ ID NO: 67170 - protein, 24 aa, Artificial Sequence
  Cyclic GFR-binding peptide
MDPIKGYVVNNASDFYLINIPSLR

SEQ ID NO: 67171 - protein, 32 aa, Artificial Sequence; identical to SEQ ID NO: 20938
  Cyclic GFR-binding peptide
  MOD_RES (1), (1): Xaa is C or S

SEQ ID NO: 67172 - protein, 33 aa, Artificial Sequence
  Cyclic GFR-binding peptide
  MOD_RES (30), (31): Xaa is C or S
VAMGPIKGYYTVVGKDFYLINIPSLKTPVXXAK

SEQ ID NO: 67173 - protein, 32 aa, Artificial Sequence
  Cyclic GFR-binding peptide
  MOD_RES (1), (3): Xaa is C or S
XGXGEVVMEPIKGYVVKDYEDFYLMNIPSLET

SEQ ID NO: 67174 - protein, 29 aa, Artificial Sequence
  Cyclic GFR-binding peptide
  MOD_RES (29), (29): Xaa is C or S
VMNPIKGYIVNSSDDFYLVNIPSLQTPAX

SEQ ID NO: 67175 - protein, 39 aa, Artificial Sequence; identical to SEQ ID NO: 20940
  Cyclic GFR-binding peptide
  MOD_RES (2), (4), (35), (36): Xaa is C or S

SEQ ID NO: 67176 - protein, 26 aa, Artificial Sequence
  Cyclic GFR-binding peptide
  MOD_RES (1), (1): Xaa is C or S
XEEVIMPIKGYLLVRGNDFYLMNIPS

SEQ ID NO: 67177 - protein, 31 aa, Artificial Sequence
  Cyclic GFR-binding peptide
  MOD_RES (28), (29): Xaa is C or S
MEPIKGYVVKDYEDFYLMNIPSLETPVXXAK

SEQ ID NO: 67178 - protein, 27 aa, Artificial Sequence
  Cyclic GFR-binding peptide
VVMDPIKGYVVKENEDFYLMNIPSLET

SEQ ID NO: 67179 - protein, 27 aa, Artificial Sequence
  Cyclic GFR-binding peptide
  MOD_RES (26), (27): Xaa is C or S
PIKGYIVNSSDDFYLVNIPSLKTPAXX

SEQ ID NO: 67180 - protein, 35 aa, Artificial Sequence; identical to SEQ ID NO: 20950
  Cyclic GFR-binding peptide
  MOD_RES (1), (33), (34): Xaa is C or S

SEQ ID NO: 67181 - protein, 25 aa, Artificial Sequence
  Cyclic GFR-binding peptide
MDPIKGYVVKENEDFYLMNIPSLET

SEQ ID NO: 67182 - protein, 32 aa, Artificial Sequence
  Cyclic GFR-binding peptide
  MOD_RES (1), (1): Xaa is C or S
XEAVSMGEPIKGYTPVGMDDFYLVNIPSLKTP

SEQ ID NO: 67183 - protein, 22 aa, Artificial Sequence
  Cyclic GFR-binding peptide
PIKGYIVNSSDDFYLVNIPSLK

SEQ ID NO: 67184 - protein, 30 aa, Artificial Sequence
  Cyclic GFR-binding peptide
  MOD_RES (29), (30): Xaa is C or S
VMEPIKGYVVKDYEDFYLMNIPSLETPVXX

SEQ ID NO: 67185 - protein, 40 aa, Artificial Sequence; identical to SEQ ID NO: 20962
  Cyclic GFR-binding peptide
  MOD_RES (2), (4), (36), (37): Xaa is C or S

SEQ ID NO: 67186 - protein, 37 aa, Artificial Sequence; identical to SEQ ID NO: 20963
  Cyclic GFR-binding peptide
  MOD_RES (1), (33): Xaa is C or S

SEQ ID NO: 67187 - protein, 41 aa, Artificial Sequence; identical to SEQ ID NO: 20964
  Cyclic GFR-binding peptide
  MOD_RES (2), (4), (36), (37): Xaa is C or S

SEQ ID NO: 67188 - protein, 30 aa, Artificial Sequence
  Cyclic GFR-binding peptide
  MOD_RES (1), (1): Xaa is C or S
XAKVVMNPIKGYIVNNSSDFYLVNIPSLKT

SEQ ID NO: 67189 - protein, 26 aa, Artificial Sequence
  Cyclic GFR-binding peptide
EEVIMPIKGYLLVRGNDFYLMNIPST

SEQ ID NO: 67190 - protein, 22 aa, Artificial Sequence
  Cyclic GFR-binding peptide
PIKGYVVNNAADFYLINIPSLR

SEQ ID NO: 67191 - protein, 36 aa, Artificial Sequence; identical to SEQ ID NO: 20967
  Cyclic GFR-binding peptide
  MOD_RES (2), (34), (35): Xaa is C or S

SEQ ID NO: 67192 - protein, 24 aa, Artificial Sequence
  Cyclic GFR-binding peptide
PIKGYIVNNSSDFYLVNIPSLKTP

SEQ ID NO: 67193 - protein, 28 aa, Artificial Sequence
  Cyclic GFR-binding peptide
KVVMNPIKGYIVNNSSDFYLVNIPSLKT

SEQ ID NO: 67194 - protein, 29 aa, Artificial Sequence
  Cyclic GFR-binding peptide
  MOD_RES (1), (3): Xaa is C or S
XGXGEVVMDPIKGYVVKENEDFYLMNIPS

SEQ ID NO: 67195 - protein, 31 aa, Artificial Sequence
  Cyclic GFR-binding peptide
  MOD_RES (27), (28): Xaa is C or S
NPIKGYIVNNSSDFYLVNIPSLKTPAXXAKP

SEQ ID NO: 67196 - protein, 35 aa, Artificial Sequence; identical to SEQ ID NO: 20977
  Cyclic GFR-binding peptide
  MOD_RES (1), (3): Xaa is C or S

SEQ ID NO: 67197 - protein, 33 aa, Artificial Sequence
  Cyclic GFR-binding peptide
  MOD_RES (28), (29): Xaa is C or S
MDPIKGYVVKENEDFYLMNIPSLETPVXXAKPI

SEQ ID NO: 67198 - protein, 41 aa, Artificial Sequence; identical to SEQ ID NO: 20980
  Cyclic GFR-binding peptide
  MOD_RES (1), (3), (35), (36): Xaa is C or S

SEQ ID NO: 67199 - protein, 27 aa, Artificial Sequence
  Cyclic GFR-binding peptide
MNPIKGYIVNSSDDFYLVNIPSLKTPA

SEQ ID NO: 67200 - protein, 26 aa, Artificial Sequence
  Cyclic GFR-binding peptide
GEPIKGYTPVGMDDFYLVNIPSLKTP

SEQ ID NO: 67201 - protein, 30 aa, Artificial Sequence
  Cyclic GFR-binding peptide
  MOD_RES (1), (3): Xaa is C or S
XGXGEVVMDPIKGYVVKENEDFYLMNIPSL

SEQ ID NO: 67202 - protein, 32 aa, Artificial Sequence
  Cyclic GFR-binding peptide
  MOD_RES (26), (27): Xaa is C or S
PIKGYVVKDYEDFYLMNIPSLETPVXXAKPIS

SEQ ID NO: 67203 - protein, 41 aa, Artificial Sequence; identical to SEQ ID NO: 20992
  Cyclic GFR-binding peptide
  MOD_RES (2), (4), (36): Xaa is C or S

SEQ ID NO: 67204 - protein, 24 aa, Artificial Sequence
  Cyclic GFR-binding peptide
PIKGYVVNNASDFYLINIPSLRTP

SEQ ID NO: 67205 - protein, 22 aa, Artificial Sequence
  Cyclic GFR-binding peptide
MGPIKGYYTVVGKDFYLINIPS

SEQ ID NO: 67206 - protein, 33 aa, Artificial Sequence; identical to SEQ ID NO: 20995
  Cyclic GFR-binding peptide
  MOD_RES (32), (33): Xaa is C or S

SEQ ID NO: 67207 - protein, 27 aa, Artificial Sequence
  Cyclic GFR-binding peptide
EVIMPIKGYLLVRGNDFYLMNIPSTKV

SEQ ID NO: 67208 - protein, 32 aa, Artificial Sequence; identical to SEQ ID NO: 20998
  Cyclic GFR-binding peptide
  MOD_RES (1), (1): Xaa is C or S

SEQ ID NO: 67209 - protein, 29 aa, Artificial Sequence
  Cyclic GFR-binding peptide
GEVVMEPIKGYVVKDYEDFYLMNIPSLET

SEQ ID NO: 67210 - protein, 31 aa, Artificial Sequence; identical to SEQ ID NO: 21004
  Cyclic GFR-binding peptide
  MOD_RES (31), (31): Xaa is C or S

SEQ ID NO: 67211 - protein, 24 aa, Artificial Sequence
  Cyclic GFR-binding peptide
GPIKGYYTVVGKDFYLINIPSLKT

SEQ ID NO: 67212 - protein, 34 aa, Artificial Sequence; identical to SEQ ID NO: 21007
  Cyclic GFR-binding peptide
  MOD_RES (1), (3): Xaa is C or S

SEQ ID NO: 67213 - protein, 34 aa, Artificial Sequence; identical to SEQ ID NO: 21008
  Cyclic GFR-binding peptide
  MOD_RES (32), (33): Xaa is C or S

SEQ ID NO: 67214 - protein, 40 aa, Artificial Sequence; identical to SEQ ID NO: 21013
  Cyclic GFR-binding peptide
  MOD_RES (2), (34), (35): Xaa is C or S

SEQ ID NO: 67215 - protein, 38 aa, Artificial Sequence; identical to SEQ ID NO: 21015
  Cyclic GFR-binding peptide
  MOD_RES (32), (33): Xaa is C or S

SEQ ID NO: 67216 - protein, 23 aa, Artificial Sequence
  Cyclic GFR-binding peptide
VMDPIKGYVVNNASDFYLINIPS

SEQ ID NO: 67217 - protein, 29 aa, Artificial Sequence
  Cyclic GFR-binding peptide
EVVMDPIKGYVVKENEDFYLMNIPSLETP

SEQ ID NO: 67218 - protein, 29 aa, Artificial Sequence
  Cyclic GFR-binding peptide
  MOD_RES (26), (27): Xaa is C or S
PIKGYVVKENEDFYLMNIPSLETPVXXAK

SEQ ID NO: 67219 - protein, 30 aa, Artificial Sequence
  Cyclic GFR-binding peptide
  MOD_RES (1), (1): Xaa is C or S
XSRVVMNPIKGYIVNSSDDFYLVNIPSLKT

SEQ ID NO: 67220 - protein, 26 aa, Artificial Sequence
  Cyclic GFR-binding peptide
NPIKGYIVNSSDDFYLVNIPSLKTPA

SEQ ID NO: 67221 - protein, 34 aa, Artificial Sequence; identical to SEQ ID NO: 21032
  Cyclic GFR-binding peptide
  MOD_RES (1), (3): Xaa is C or S

SEQ ID NO: 67222 - protein, 33 aa, Artificial Sequence; identical to SEQ ID NO: 21033
  Cyclic GFR-binding peptide
  MOD_RES (2), (2): Xaa is C or S

SEQ ID NO: 67223 - protein, 32 aa, Artificial Sequence
  Cyclic GFR-binding peptide
  MOD_RES (27), (28): Xaa is C or S
EPIKGYTPVGMDDFYLVNIPSLKTPVXXAKGV

SEQ ID NO: 67224 - protein, 34 aa, Artificial Sequence; identical to SEQ ID NO: 21034
  Cyclic GFR-binding peptide
  MOD_RES (31), (32): Xaa is C or S

SEQ ID NO: 67225 - protein, 30 aa, Artificial Sequence
  Cyclic GFR-binding peptide
  MOD_RES (26), (27): Xaa is C or S
PIKGYIVNSSDDFYLVNIPSLQTPAXXPKP

SEQ ID NO: 67226 - protein, 32 aa, Artificial Sequence
  Cyclic GFR-binding peptide
  MOD_RES (2), (4): Xaa is C or S
RXGXESVAMGPIKGYYTVVGKDFYLINIPSLK

SEQ ID NO: 67227 - protein, 41 aa, Artificial Sequence; identical to SEQ ID NO: 21038
  Cyclic GFR-binding peptide
  MOD_RES (1), (3), (35), (36): Xaa is C or S

SEQ ID NO: 67228 - protein, 41 aa, Artificial Sequence; identical to SEQ ID NO: 21039
  Cyclic GFR-binding peptide
  MOD_RES (1), (3), (35), (36): Xaa is C or S

SEQ ID NO: 67229 - protein, 32 aa, Artificial Sequence
  Cyclic GFR-binding peptide
  MOD_RES (2), (2): Xaa is C or S
GXEAVSMGEPIKGYTPVGMDDFYLVNIPSLKT

SEQ ID NO: 67230 - protein, 29 aa, Artificial Sequence
  Cyclic GFR-binding peptide
  MOD_RES (1), (3): Xaa is C or S
XGXSRVVMNPIKGYIVNSSDDFYLVNIPS

SEQ ID NO: 67231 - protein, 36 aa, Artificial Sequence
  Cyclic GFR-binding peptide
  MOD_RES (30), (31): Xaa is C or S
VVMDPIKGYVVKENEDFYLMNIPSLETPVXXAKPIK

SEQ ID NO: 67232 - protein, 28 aa, Artificial Sequence
  Cyclic GFR-binding peptide
  MOD_RES (27), (28): Xaa is C or S
EPIKGYVVKDYEDFYLMNIPSLETPVXX

SEQ ID NO: 67233 - protein, 29 aa, Artificial Sequence
  Cyclic GFR-binding peptide
AAAAAAAAAPIKGYVVKENEDFYLMNIPS

SEQ ID NO: 67234 - protein, 37 aa, Artificial Sequence; identical to SEQ ID NO: 21048
  Cyclic GFR-binding peptide
  MOD_RES (2), (4), (36), (37): Xaa is C or S

SEQ ID NO: 67235 - protein, 20 aa, Artificial Sequence
  Cyclic GFR-binding peptide
PIKGYYTVVGKDFYLINIPS

SEQ ID NO: 67236 - protein, 33 aa, Artificial Sequence
  Cyclic GFR-binding peptide
  MOD_RES (27), (28): Xaa is C or S
NPIKGYIVNSSDDFYLVNIPSLKTPAXXPKPVY

SEQ ID NO: 67237 - protein, 36 aa, Artificial Sequence; identical to SEQ ID NO: 21053
  Cyclic GFR-binding peptide
  MOD_RES (1), (3), (36): Xaa is C or S

SEQ ID NO: 67238 - protein, 31 aa, Artificial Sequence; identical to SEQ ID NO: 21054
  Cyclic GFR-binding peptide
  MOD_RES (31), (31): Xaa is C or S

SEQ ID NO: 67239 - protein, 30 aa, Artificial Sequence; identical to SEQ ID NO: 1963
  Cyclic GFR-binding peptide

SEQ ID NO: 67240 - protein, 32 aa, Artificial Sequence
  Cyclic GFR-binding peptide
  MOD_RES (26), (27): Xaa is C or S
PIKGYVVNNASDFYLINIPSLRTPVXXTPPTS

SEQ ID NO: 67241 - protein, 35 aa, Artificial Sequence
  Cyclic GFR-binding peptide
  MOD_RES (29), (30): Xaa is C or S
VMNPIKGYIVNSSDDFYLVNIPSLKTPAXXPKPVH

SEQ ID NO: 67242 - protein, 33 aa, Artificial Sequence; identical to SEQ ID NO: 21056
  Cyclic GFR-binding peptide
  MOD_RES (31), (32): Xaa is C or S

SEQ ID NO: 67243 - protein, 36 aa, Artificial Sequence; identical to SEQ ID NO: 21057
  Cyclic GFR-binding peptide
  MOD_RES (2), (4), (36): Xaa is C or S

SEQ ID NO: 67244 - protein, 28 aa, Artificial Sequence
  Cyclic GFR-binding peptide
  MOD_RES (2), (2): Xaa is C or S
GXEEVIMPIKGYLLVRGNDFYLMNIPST

SEQ ID NO: 67245 - protein, 36 aa, Artificial Sequence
  Cyclic GFR-binding peptide
  MOD_RES (30), (30): Xaa is C or S
VVMNPIKGYIVNSSDDFYLVNIPSLKTPAXTPKTVH

SEQ ID NO: 67246 - protein, 30 aa, Artificial Sequence
  Cyclic GFR-binding peptide
SEVVMDPIKGYVVNNASDFYLINIPSLRTP

SEQ ID NO: 67247 - protein, 28 aa, Artificial Sequence
  Cyclic GFR-binding peptide
EAVSMGEPIKGYTPVGMDDFYLVNIPSL

SEQ ID NO: 67248 - protein, 24 aa, Artificial Sequence
  Cyclic GFR-binding peptide
VAMGPIKGYYTVVGKDFYLINIPS

SEQ ID NO: 67249 - protein, 25 aa, Artificial Sequence
  Cyclic GFR-binding peptide
MDPIKGYVVNNAADFYLINIPSLRA

SEQ ID NO: 67250 - protein, 25 aa, Artificial Sequence
  Cyclic GFR-binding peptide
VSMGEPIKGYTPVGMDDFYLVNIPS

SEQ ID NO: 67251 - protein, 21 aa, Artificial Sequence
  Cyclic GFR-binding peptide
PIKGYVVNNAADFYLINIPSL

SEQ ID NO: 67252 - protein, 29 aa, Artificial Sequence
  Cyclic GFR-binding peptide
EAVSMGEPIKGYTPVGMDDFYLVNIPSLK

SEQ ID NO: 67253 - protein, 30 aa, Artificial Sequence
  Cyclic GFR-binding peptide
  MOD_RES (30), (30): Xaa is C or S
VVMDPIKGYVVNNASDFYLINIPSLRTPVX

SEQ ID NO: 67254 - protein, 33 aa, Artificial Sequence
  Cyclic GFR-binding peptide
  MOD_RES (27), (28): Xaa is C or S
NPIKGYIVNSSDDFYLVNIPSLKTPAXXPKPVH

SEQ ID NO: 67255 - protein, 26 aa, Artificial Sequence
  Cyclic GFR-binding peptide
  MOD_RES (26), (26): Xaa is C or S
PIKGYIVNSSDDFYLVNIPSLKTPAX

SEQ ID NO: 67256 - protein, 27 aa, Artificial Sequence
  Cyclic GFR-binding peptide
RVVMNPIKGYIVNSSDDFYLVNIPSLK

SEQ ID NO: 67257 - protein, 28 aa, Artificial Sequence
  Cyclic GFR-binding peptide
VVMNPIKGYIVNSSDDFYLVNIPSLKTP

SEQ ID NO: 67258 - protein, 28 aa, Artificial Sequence
  Cyclic GFR-binding peptide
  MOD_RES (2), (2): Xaa is C or S
GXAKVVMNPIKGYIVNNSSDFYLVNIPS

SEQ ID NO: 67259 - protein, 24 aa, Artificial Sequence
  Cyclic GFR-binding peptide
VMNPIKGYIVNSSDDFYLVNIPSL

SEQ ID NO: 67260 - protein, 33 aa, Artificial Sequence; identical to SEQ ID NO: 21075
  Cyclic GFR-binding peptide
  MOD_RES (1), (33): Xaa is C or S

SEQ ID NO: 67261 - protein, 28 aa, Artificial Sequence
  Cyclic GFR-binding peptide
AMGPIKGYYTVVGKDFYLINIPSLKTPV

SEQ ID NO: 67262 - protein, 31 aa, Artificial Sequence
  Cyclic GFR-binding peptide
  MOD_RES (2), (4): Xaa is C or S
HXGXAKVVMNPIKGYIVNNSSDFYLVNIPSL

SEQ ID NO: 67263 - protein, 28 aa, Artificial Sequence
  Cyclic GFR-binding peptide
SEVVMDPIKGYVVNNASDFYLINIPSLR

SEQ ID NO: 67264 - protein, 22 aa, Artificial Sequence
  Cyclic GFR-binding peptide
PIKGYTPVGMDDFYLVNIPSLK

SEQ ID NO: 67265 - protein, 28 aa, Artificial Sequence
  Cyclic GFR-binding peptide
  MOD_RES (1), (1): Xaa is C or S
XAEVVMDPIKGYVVNNAADFYLINIPSL

SEQ ID NO: 67266 - protein, 24 aa, Artificial Sequence
  Cyclic GFR-binding peptide
DPIKGYVVNNAADFYLINIPSLRA

SEQ ID NO: 67267 - protein, 23 aa, Artificial Sequence
  Cyclic GFR-binding peptide
GEPIKGYTPVGMDDFYLVNIPSL

SEQ ID NO: 67268 - protein, 34 aa, Artificial Sequence; identical to SEQ ID NO: 21090
  Cyclic GFR-binding peptide
  MOD_RES (1), (3): Xaa is C or S

SEQ ID NO: 67269 - protein, 30 aa, Artificial Sequence
  Cyclic GFR-binding peptide
  MOD_RES (26), (27): Xaa is C or S
PIKGYLLVRGNDFYLMNIPSTKVPAXXTSP

SEQ ID NO: 67270 - protein, 34 aa, Artificial Sequence; identical to SEQ ID NO: 21094
  Cyclic GFR-binding peptide
  MOD_RES (1), (3): Xaa is C or S

SEQ ID NO: 67271 - protein, 31 aa, Artificial Sequence; identical to SEQ ID NO: 21096
  Cyclic GFR-binding peptide
  MOD_RES (31), (31): Xaa is C or S

SEQ ID NO: 67272 - protein, 25 aa, Artificial Sequence
  Cyclic GFR-binding peptide
NPIKGYIVNSSDDFYLVNIPSLQTP

SEQ ID NO: 67273 - protein, 21 aa, Artificial Sequence
  Cyclic GFR-binding peptide
DPIKGYVVKENEDFYLMNIPS

SEQ ID NO: 67274 - protein, 32 aa, Artificial Sequence
  Cyclic GFR-binding peptide
  MOD_RES (26), (27): Xaa is C or S
PIKGYVVNNAADFYLINIPSLRAPVXXSAPAA

SEQ ID NO: 67275 - protein, 29 aa, Artificial Sequence
  Cyclic GFR-binding peptide
  MOD_RES (26), (27): Xaa is C or S
PIKGYIVNSSDDFYLVNIPSLQTPAXXPK

SEQ ID NO: 67276 - protein, 30 aa, Artificial Sequence
  Cyclic GFR-binding peptide
  MOD_RES (2), (2): Xaa is C or S
GXSEVVMDPIKGYVVNNASDFYLINIPSLR

SEQ ID NO: 67277 - protein, 36 aa, Artificial Sequence; identical to SEQ ID NO: 21103
  Cyclic GFR-binding peptide
  MOD_RES (31), (32): Xaa is C or S

SEQ ID NO: 67278 - protein, 25 aa, Artificial Sequence
  Cyclic GFR-binding peptide
MGEPIKGYTPVGMDDFYLVNIPSLK

SEQ ID NO: 67279 - protein, 28 aa, Artificial Sequence
  Cyclic GFR-binding peptide
EVVMDPIKGYVVKENEDFYLMNIPSLET

SEQ ID NO: 67280 - protein, 25 aa, Artificial Sequence
  Cyclic GFR-binding peptide
GPIKGYYTVVGKDFYLINIPSLKTP

SEQ ID NO: 67281 - protein, 25 aa, Artificial Sequence
  Cyclic GFR-binding peptide
VMDPIKGYVVNNAADFYLINIPSLR

SEQ ID NO: 67282 - protein, 34 aa, Artificial Sequence; identical to SEQ ID NO: 21104
  Cyclic GFR-binding peptide
  MOD_RES (32), (33): Xaa is C or S

SEQ ID NO: 67283 - protein, 23 aa, Artificial Sequence
  Cyclic GFR-binding peptide
VMNPIKGYIVNNSSDFYLVNIPS

SEQ ID NO: 67284 - protein, 40 aa, Artificial Sequence; identical to SEQ ID NO: 21108
  Cyclic GFR-binding peptide
  MOD_RES (2), (4), (36), (37): Xaa is C or S

SEQ ID NO: 67285 - protein, 32 aa, Artificial Sequence
  Cyclic GFR-binding peptide
  MOD_RES (26), (27): Xaa is C or S
PIKGYYTVVGKDFYLINIPSLKTPVXXAKSAK

SEQ ID NO: 67286 - protein, 36 aa, Artificial Sequence
  Cyclic GFR-binding peptide
  MOD_RES (31), (32): Xaa is C or S
VSMGEPIKGYTPVGMDDFYLVNIPSLKTPVXXAKGV

SEQ ID NO: 67287 - protein, 20 aa, Artificial Sequence
  Cyclic GFR-binding peptide
PIKGYIVNSSDDFYLVNIPS

SEQ ID NO: 67288 - protein, 30 aa, Artificial Sequence
  Cyclic GFR-binding peptide
  MOD_RES (26), (27): Xaa is C or S
PIKGYVVKENEDFYLMNIPSLETPVXXAKP

SEQ ID NO: 67289 - protein, 36 aa, Artificial Sequence; identical to SEQ ID NO: 21113
  Cyclic GFR-binding peptide
  MOD_RES (1), (3), (34), (35): Xaa is C or S

SEQ ID NO: 67290 - protein, 33 aa, Artificial Sequence; identical to SEQ ID NO: 21115
  Cyclic GFR-binding peptide
  MOD_RES (31), (32): Xaa is C or S

SEQ ID NO: 67291 - protein, 34 aa, Artificial Sequence
  Cyclic GFR-binding peptide
  MOD_RES (28), (29): Xaa is C or S
MGPIKGYYTVVGKDFYLINIPSLKTPVXXAKSAK

SEQ ID NO: 67292 - protein, 26 aa, Artificial Sequence
  Cyclic GFR-binding peptide
VMDPIKGYVVNNASDFYLINIPSLRT

SEQ ID NO: 67293 - protein, 38 aa, Artificial Sequence; identical to SEQ ID NO: 21118
  Cyclic GFR-binding peptide
  MOD_RES (2), (34): Xaa is C or S

SEQ ID NO: 67294 - protein, 31 aa, Artificial Sequence
  Cyclic GFR-binding peptide
  MOD_RES (26), (27): Xaa is C or S
PIKGYIVNSSDDFYLVNIPSLQTPAXXPKPV

SEQ ID NO: 67295 - protein, 28 aa, Artificial Sequence
  Cyclic GFR-binding peptide
  MOD_RES (1), (3): Xaa is C or S
XGXEEVIMPIKGYLLVRGNDFYLMNIPS

SEQ ID NO: 67296 - protein, 30 aa, Artificial Sequence; identical to SEQ ID NO: 21121
  Cyclic GFR-binding peptide

SEQ ID NO: 67297 - protein, 38 aa, Artificial Sequence; identical to SEQ ID NO: 21122
  Cyclic GFR-binding peptide
  MOD_RES (1), (33): Xaa is C or S

SEQ ID NO: 67298 - protein, 31 aa, Artificial Sequence
  Cyclic GFR-binding peptide
  MOD_RES (2), (2): Xaa is C or S
GXGEVVMEPIKGYVVKDYEDFYLMNIPSLET

SEQ ID NO: 67299 - protein, 31 aa, Artificial Sequence
  Cyclic GFR-binding peptide
  MOD_RES (2), (2): Xaa is C or S
GXESVAMGPIKGYYTVVGKDFYLINIPSLKT

SEQ ID NO: 67300 - protein, 29 aa, Artificial Sequence
  Cyclic GFR-binding peptide
AAAAAAAAAPIKGYVVNNASDFYLINIPS

SEQ ID NO: 67301 - protein, 34 aa, Artificial Sequence
  Cyclic GFR-binding peptide
  MOD_RES (29), (30): Xaa is C or S
MGEPIKGYTPVGMDDFYLVNIPSLKTPVXXAKGV

SEQ ID NO: 67302 - protein, 34 aa, Artificial Sequence; identical to SEQ ID NO: 21129
  Cyclic GFR-binding peptide
  MOD_RES (1), (33), (34): Xaa is C or S

SEQ ID NO: 67303 - protein, 29 aa, Artificial Sequence
  Cyclic GFR-binding peptide
  MOD_RES (2), (2): Xaa is C or S
GXESVAMGPIKGYYTVVGKDFYLINIPSL

SEQ ID NO: 67304 - protein, 40 aa, Artificial Sequence; identical to SEQ ID NO: 21130
  Cyclic GFR-binding peptide
  MOD_RES (1), (34), (35): Xaa is C or S

SEQ ID NO: 67305 - protein, 39 aa, Artificial Sequence; identical to SEQ ID NO: 21131
  Cyclic GFR-binding peptide
  MOD_RES (1), (3), (35), (36): Xaa is C or S

SEQ ID NO: 67306 - protein, 34 aa, Artificial Sequence; identical to SEQ ID NO: 21132
  Cyclic GFR-binding peptide
  MOD_RES (2), (33), (34): Xaa is C or S

SEQ ID NO: 67307 - protein, 31 aa, Artificial Sequence
  Cyclic GFR-binding peptide
  MOD_RES (1), (1): Xaa is C or S
XAKVVMNPIKGYIVNNSSDFYLVNIPSLKTP

SEQ ID NO: 67308 - protein, 35 aa, Artificial Sequence; identical to SEQ ID NO: 21135
  Cyclic GFR-binding peptide
  MOD_RES (32), (33): Xaa is C or S

SEQ ID NO: 67309 - protein, 32 aa, Artificial Sequence; identical to SEQ ID NO: 21138
  Cyclic GFR-binding peptide
  MOD_RES (1), (1): Xaa is C or S

SEQ ID NO: 67310 - protein, 29 aa, Artificial Sequence
  Cyclic GFR-binding peptide
  MOD_RES (28), (29): Xaa is C or S
MNPIKGYIVNSSDDFYLVNIPSLKTPAXX

SEQ ID NO: 67311 - protein, 20 aa, Artificial Sequence
  Cyclic GFR-binding peptide
PIKGYTPVGMDDFYLVNIPS

SEQ ID NO: 67312 - protein, 33 aa, Artificial Sequence; identical to SEQ ID NO: 21144
  Cyclic GFR-binding peptide
  MOD_RES (1), (33): Xaa is C or S

SEQ ID NO: 67313 - protein, 31 aa, Artificial Sequence
  Cyclic GFR-binding peptide
  MOD_RES (26), (27): Xaa is C or S
PIKGYLLVRGNDFYLMNIPSTKVPAXXTSPV

SEQ ID NO: 67314 - protein, 37 aa, Artificial Sequence; identical to SEQ ID NO: 21146
  Cyclic GFR-binding peptide
  MOD_RES (2), (34), (35): Xaa is C or S

SEQ ID NO: 67315 - protein, 32 aa, Artificial Sequence
  Cyclic GFR-binding peptide
  MOD_RES (28), (29): Xaa is C or S
MGPIKGYYTVVGKDFYLINIPSLKTPVXXAKS

SEQ ID NO: 67316 - protein, 35 aa, Artificial Sequence
  Cyclic GFR-binding peptide
  MOD_RES (29), (30): Xaa is C or S
VMDPIKGYVVKENEDFYLMNIPSLETPVXXAKPIK

SEQ ID NO: 67317 - protein, 34 aa, Artificial Sequence
  Cyclic GFR-binding peptide
  MOD_RES (30), (30): Xaa is C or S
VVMNPIKGYIVNSSDDFYLVNIPSLKTPAXTPKT

SEQ ID NO: 67318 - protein, 30 aa, Artificial Sequence
  Cyclic GFR-binding peptide
  MOD_RES (28), (29): Xaa is C or S
MEPIKGYVVKDYEDFYLMNIPSLETPVXXA

SEQ ID NO: 67319 - protein, 33 aa, Artificial Sequence
  Cyclic GFR-binding peptide
  MOD_RES (30), (31): Xaa is C or S
EVIMPIKGYLLVRGNDFYLMNIPSTKVPAXXTS

SEQ ID NO: 67320 - protein, 24 aa, Artificial Sequence
  Cyclic GFR-binding peptide
VMEPIKGYVVKDYEDFYLMNIPSL

SEQ ID NO: 67321 - protein, 31 aa, Artificial Sequence
  Cyclic GFR-binding peptide
  MOD_RES (26), (27): Xaa is C or S
PIKGYTPVGMDDFYLVNIPSLKTPVXXAKGV

SEQ ID NO: 67322 - protein, 27 aa, Artificial Sequence
  Cyclic GFR-binding peptide
  MOD_RES (27), (27): Xaa is C or S
DPIKGYVVNNASDFYLINIPSLRTPVX

SEQ ID NO: 67323 - protein, 25 aa, Artificial Sequence
  Cyclic GFR-binding peptide
VVMDPIKGYVVNNAADFYLINIPSL

SEQ ID NO: 67324 - protein, 24 aa, Artificial Sequence
  Cyclic GFR-binding peptide
VMDPIKGYVVNNASDFYLINIPSL

SEQ ID NO: 67325 - protein, 27 aa, Artificial Sequence
  Cyclic GFR-binding peptide
SEVVMDPIKGYVVNNASDFYLINIPSL

SEQ ID NO: 67326 - protein, 31 aa, Artificial Sequence
  Cyclic GFR-binding peptide
  MOD_RES (1), (1): Xaa is C or S
XAEVVMDPIKGYVVNNAADFYLINIPSLRAP

SEQ ID NO: 67327 - protein, 37 aa, Artificial Sequence; identical to SEQ ID NO: 21163
  Cyclic GFR-binding peptide
  MOD_RES (1), (3), (35), (36): Xaa is C or S

SEQ ID NO: 67328 - protein, 25 aa, Artificial Sequence
  Cyclic GFR-binding peptide
VVMNPIKGYIVNNSSDFYLVNIPSL

SEQ ID NO: 67329 - protein, 30 aa, Artificial Sequence
  Cyclic GFR-binding peptide
  MOD_RES (26), (27): Xaa is C or S
PIKGYVVNNASDFYLINIPSLRTPVXXTPP

SEQ ID NO: 67330 - protein, 30 aa, Artificial Sequence
  Cyclic GFR-binding peptide
  MOD_RES (30), (30): Xaa is C or S
VVMEPIKGYVVKDYEDFYLMNIPSLETPVX

SEQ ID NO: 67331 - protein, 25 aa, Artificial Sequence
  Cyclic GFR-binding peptide
EVVMDPIKGYVVKENEDFYLMNIPS

SEQ ID NO: 67332 - protein, 30 aa, Artificial Sequence; identical to SEQ ID NO: 1955
  Cyclic GFR-binding peptide

SEQ ID NO: 67333 - protein, 30 aa, Artificial Sequence
  Cyclic GFR-binding peptide
  MOD_RES (1), (1): Xaa is C or S
XEEVIMPIKGYLLVRGNDFYLMNIPSTKVP

SEQ ID NO: 67334 - protein, 38 aa, Artificial Sequence; identical to SEQ ID NO: 21167
  Cyclic GFR-binding peptide
  MOD_RES (32), (33): Xaa is C or S

SEQ ID NO: 67335 - protein, 34 aa, Artificial Sequence; identical to SEQ ID NO: 21168
  Cyclic GFR-binding peptide
  MOD_RES (1), (33), (34): Xaa is C or S

SEQ ID NO: 67336 - protein, 32 aa, Artificial Sequence
  Cyclic GFR-binding peptide
  MOD_RES (27), (27): Xaa is C or S
NPIKGYIVNSSDDFYLVNIPSLKTPAXTPKTV

SEQ ID NO: 67337 - protein, 33 aa, Artificial Sequence
  Cyclic GFR-binding peptide
  MOD_RES (28), (29): Xaa is C or S
MDPIKGYVVNNAADFYLINIPSLRAPVXXSAPA

SEQ ID NO: 67338 - protein, 34 aa, Artificial Sequence; identical to SEQ ID NO: 21172
  Cyclic GFR-binding peptide
  MOD_RES (32), (32): Xaa is C or S

SEQ ID NO: 67339 - protein, 33 aa, Artificial Sequence
  Cyclic GFR-binding peptide
  MOD_RES (30), (31): Xaa is C or S
VVMNPIKGYIVNSSDDFYLVNIPSLKTPAXXPK

SEQ ID NO: 67340 - protein, 29 aa, Artificial Sequence
  Cyclic GFR-binding peptide
KVVMNPIKGYIVNNSSDFYLVNIPSLKTP

SEQ ID NO: 67341 - protein, 30 aa, Artificial Sequence
  Cyclic GFR-binding peptide
  MOD_RES (29), (30): Xaa is C or S
MGEPIKGYTPVGMDDFYLVNIPSLKTPVXX

SEQ ID NO: 67342 - protein, 33 aa, Artificial Sequence
  Cyclic GFR-binding peptide
  MOD_RES (29), (30): Xaa is C or S
VIMPIKGYLLVRGNDFYLMNIPSTKVPAXXTSP

SEQ ID NO: 67343 - protein, 28 aa, Artificial Sequence
  Cyclic GFR-binding peptide
  MOD_RES (27), (28): Xaa is C or S
NPIKGYIVNSSDDFYLVNIPSLQTPAXX

SEQ ID NO: 67344 - protein, 31 aa, Artificial Sequence
  Cyclic GFR-binding peptide
  MOD_RES (29), (30): Xaa is C or S
MGEPIKGYTPVGMDDFYLVNIPSLKTPVXXA

SEQ ID NO: 67345 - protein, 36 aa, Artificial Sequence; identical to SEQ ID NO: 21178
  Cyclic GFR-binding peptide
  MOD_RES (32), (33): Xaa is C or S

SEQ ID NO: 67346 - protein, 32 aa, Artificial Sequence
  Cyclic GFR-binding peptide
  MOD_RES (28), (29): Xaa is C or S
MDPIKGYVVNNASDFYLINIPSLRTPVXXTPP

SEQ ID NO: 67347 - protein, 33 aa, Artificial Sequence; identical to SEQ ID NO: 21181
  Cyclic GFR-binding peptide
  MOD_RES (32), (32): Xaa is C or S

SEQ ID NO: 67348 - protein, 32 aa, Artificial Sequence
  Cyclic GFR-binding peptide
  MOD_RES (29), (30): Xaa is C or S
VIMPIKGYLLVRGNDFYLMNIPSTKVPAXXTS

SEQ ID NO: 67349 - protein, 32 aa, Artificial Sequence
  Cyclic GFR-binding peptide
  MOD_RES (2), (4): Xaa is C or S
RXGXAEVVMDPIKGYVVNNAADFYLINIPSLR

SEQ ID NO: 67350 - protein, 23 aa, Artificial Sequence
  Cyclic GFR-binding peptide
MPIKGYLLVRGNDFYLMNIPSTK

SEQ ID NO: 67351 - protein, 35 aa, Artificial Sequence; identical to SEQ ID NO: 21195
  Cyclic GFR-binding peptide
  MOD_RES (1), (33), (34): Xaa is C or S

SEQ ID NO: 67352 - protein, 34 aa, Artificial Sequence; identical to SEQ ID NO: 21198
  Cyclic GFR-binding peptide
  MOD_RES (1), (33), (34): Xaa is C or S

SEQ ID NO: 67353 - protein, 27 aa, Artificial Sequence
  Cyclic GFR-binding peptide
MNPIKGYIVNSSDDFYLVNIPSLQTPA

SEQ ID NO: 67354 - protein, 39 aa, Artificial Sequence; identical to SEQ ID NO: 21203
  Cyclic GFR-binding peptide
  MOD_RES (2), (34), (35): Xaa is C or S

SEQ ID NO: 67355 - protein, 25 aa, Artificial Sequence
  Cyclic GFR-binding peptide
RVVMNPIKGYIVNSSDDFYLVNIPS

SEQ ID NO: 67356 - protein, 37 aa, Artificial Sequence; identical to SEQ ID NO: 21205
  Cyclic GFR-binding peptide
  MOD_RES (2), (34), (35): Xaa is C or S

SEQ ID NO: 67357 - protein, 25 aa, Artificial Sequence
  Cyclic GFR-binding peptide
VMDPIKGYVVKENEDFYLMNIPSLE

SEQ ID NO: 67358 - protein, 37 aa, Artificial Sequence; identical to SEQ ID NO: 21210
  Cyclic GFR-binding peptide
  MOD_RES (32), (33): Xaa is C or S

SEQ ID NO: 67359 - protein, 29 aa, Artificial Sequence
  Cyclic GFR-binding peptide
  MOD_RES (27), (28): Xaa is C or S
EPIKGYTPVGMDDFYLVNIPSLKTPVXXA

SEQ ID NO: 67360 - protein, 31 aa, Artificial Sequence
  Cyclic GFR-binding peptide
  MOD_RES (30), (31): Xaa is C or S
EVIMPIKGYLLVRGNDFYLMNIPSTKVPAXX

SEQ ID NO: 67361 - protein, 35 aa, Artificial Sequence
  Cyclic GFR-binding peptide
  MOD_RES (30), (31): Xaa is C or S
VVMDPIKGYVVNNASDFYLINIPSLRTPVXXTPPT

SEQ ID NO: 67362 - protein, 26 aa, Artificial Sequence
  Cyclic GFR-binding peptide
VVMDPIKGYVVKENEDFYLMNIPSLE

SEQ ID NO: 67363 - protein, 37 aa, Artificial Sequence; identical to SEQ ID NO: 21211
  Cyclic GFR-binding peptide
  MOD_RES (2), (34), (35): Xaa is C or S

SEQ ID NO: 67364 - protein, 28 aa, Artificial Sequence
  Cyclic GFR-binding peptide
  MOD_RES (1), (1): Xaa is C or S
XARVVMNPIKGYIVNSSDDFYLVNIPSL

SEQ ID NO: 67365 - protein, 39 aa, Artificial Sequence; identical to SEQ ID NO: 21213
  Cyclic GFR-binding peptide
  MOD_RES (2), (4), (36), (37): Xaa is C or S

SEQ ID NO: 67366 - protein, 39 aa, Artificial Sequence; identical to SEQ ID NO: 21214
  Cyclic GFR-binding peptide
  MOD_RES (1), (33), (34): Xaa is C or S

SEQ ID NO: 67367 - protein, 28 aa, Artificial Sequence
  Cyclic GFR-binding peptide
  MOD_RES (28), (28): Xaa is C or S
MNPIKGYIVNSSDDFYLVNIPSLKTPAX

SEQ ID NO: 67368 - protein, 31 aa, Artificial Sequence
  Cyclic GFR-binding peptide
  MOD_RES (1), (3): Xaa is C or S
XGXEAVSMGEPIKGYTPVGMDDFYLVNIPSL

SEQ ID NO: 67369 - protein, 28 aa, Artificial Sequence
  Cyclic GFR-binding peptide
  MOD_RES (1), (1): Xaa is C or S
XAKVVMNPIKGYIVNNSSDFYLVNIPSL

SEQ ID NO: 67370 - protein, 26 aa, Artificial Sequence
  Cyclic GFR-binding peptide
MGEPIKGYTPVGMDDFYLVNIPSLKT

SEQ ID NO: 67371 - protein, 39 aa, Artificial Sequence; identical to SEQ ID NO: 21222
  Cyclic GFR-binding peptide
  MOD_RES (2), (34), (35): Xaa is C or S

SEQ ID NO: 67372 - protein, 24 aa, Artificial Sequence
  Cyclic GFR-binding peptide
VMDPIKGYVVNNAADFYLINIPSL

SEQ ID NO: 67373 - protein, 37 aa, Artificial Sequence; identical to SEQ ID NO: 21225
  Cyclic GFR-binding peptide
  MOD_RES (1), (33), (34): Xaa is C or S

SEQ ID NO: 67374 - protein, 38 aa, Artificial Sequence; identical to SEQ ID NO: 21227
  Cyclic GFR-binding peptide
  MOD_RES (2), (35), (36): Xaa is C or S

SEQ ID NO: 67375 - protein, 32 aa, Artificial Sequence
  Cyclic GFR-binding peptide
  MOD_RES (2), (2): Xaa is C or S
GXSRVVMNPIKGYIVNSSDDFYLVNIPSLKTP

SEQ ID NO: 67376 - protein, 28 aa, Artificial Sequence
  Cyclic GFR-binding peptide
  MOD_RES (28), (28): Xaa is C or S
MDPIKGYVVNNASDFYLINIPSLRTPVX

SEQ ID NO: 67377 - protein, 33 aa, Artificial Sequence; identical to SEQ ID NO: 21240
  Cyclic GFR-binding peptide
  MOD_RES (1), (33): Xaa is C or S

SEQ ID NO: 67378 - protein, 35 aa, Artificial Sequence; identical to SEQ ID NO: 21241
  Cyclic GFR-binding peptide
  MOD_RES (32), (32): Xaa is C or S

SEQ ID NO: 67379 - protein, 33 aa, Artificial Sequence
  Cyclic GFR-binding peptide
  MOD_RES (29), (30): Xaa is C or S
MGEPIKGYTPVGMDDFYLVNIPSLKTPVXXAKG

SEQ ID NO: 67380 - protein, 28 aa, Artificial Sequence
  Cyclic GFR-binding peptide
RVVMNPIKGYIVNSSDDFYLVNIPSLKT

SEQ ID NO: 67381 - protein, 26 aa, Artificial Sequence
  Cyclic GFR-binding peptide
SEVVMDPIKGYVVNNASDFYLINIPS

SEQ ID NO: 67382 - protein, 34 aa, Artificial Sequence
  Cyclic GFR-binding peptide
  MOD_RES (2), (4): Xaa is C or S
RXGXEAVSMGEPIKGYTPVGMDDFYLVNIPSLKT

SEQ ID NO: 67383 - protein, 30 aa, Artificial Sequence
  Cyclic GFR-binding peptide
  MOD_RES (28), (29): Xaa is C or S
IMPIKGYLLVRGNDFYLMNIPSTKVPAXXT

SEQ ID NO: 67384 - protein, 33 aa, Artificial Sequence
  Cyclic GFR-binding peptide
  MOD_RES (1), (3): Xaa is C or S
XGXAKVVMNPIKGYIVNNSSDFYLVNIPSLKTP

SEQ ID NO: 67385 - protein, 24 aa, Artificial Sequence
  Cyclic GFR-binding peptide
MNPIKGYIVNSSDDFYLVNIPSLK

SEQ ID NO: 67386 - protein, 33 aa, Artificial Sequence
  Cyclic GFR-binding peptide
  MOD_RES (32), (33): Xaa is C or S
AVSMGEPIKGYTPVGMDDFYLVNIPSLKTPVXX

SEQ ID NO: 67387 - protein, 25 aa, Artificial Sequence
  Cyclic GFR-binding peptide
DPIKGYVVNNAADFYLINIPSLRAP

SEQ ID NO: 67388 - protein, 42 aa, Artificial Sequence; identical to SEQ ID NO: 21253
  Cyclic GFR-binding peptide
  MOD_RES (2), (4), (36), (37): Xaa is C or S

SEQ ID NO: 67389 - protein, 35 aa, Artificial Sequence; identical to SEQ ID NO: 21255
  Cyclic GFR-binding peptide
  MOD_RES (1), (3), (35): Xaa is C or S

SEQ ID NO: 67390 - protein, 36 aa, Artificial Sequence; identical to SEQ ID NO: 21256
  Cyclic GFR-binding peptide
  MOD_RES (2), (35), (36): Xaa is C or S

SEQ ID NO: 67391 - protein, 26 aa, Artificial Sequence
  Cyclic GFR-binding peptide
VMEPIKGYVVKDYEDFYLMNIPSLET

SEQ ID NO: 67392 - protein, 29 aa, Artificial Sequence
  Cyclic GFR-binding peptide
  MOD_RES (1), (3): Xaa is C or S
XGXEEVIMPIKGYLLVRGNDFYLMNIPST

SEQ ID NO: 67393 - protein, 32 aa, Artificial Sequence; identical to SEQ ID NO: 21265
  Cyclic GFR-binding peptide
  MOD_RES (1), (1): Xaa is C or S

SEQ ID NO: 67394 - protein, 33 aa, Artificial Sequence; identical to SEQ ID NO: 21266
  Cyclic GFR-binding peptide
  MOD_RES (2), (2): Xaa is C or S

SEQ ID NO: 67395 - protein, 21 aa, Artificial Sequence
  Cyclic GFR-binding peptide
PIKGYIVNNSSDFYLVNIPSL

SEQ ID NO: 67396 - protein, 31 aa, Artificial Sequence
  Cyclic GFR-binding peptide
  MOD_RES (26), (27): Xaa is C or S
PIKGYVVNNAADFYLINIPSLRAPVXXSAPA

SEQ ID NO: 67397 - protein, 30 aa, Artificial Sequence
  Cyclic GFR-binding peptide
  MOD_RES (29), (30): Xaa is C or S
VMDPIKGYVVNNASDFYLINIPSLRTPVXX

SEQ ID NO: 67398 - protein, 24 aa, Artificial Sequence
  Cyclic GFR-binding peptide
MDPIKGYVVNNAADFYLINIPSLR

SEQ ID NO: 67399 - protein, 31 aa, Artificial Sequence
  Cyclic GFR-binding peptide
  MOD_RES (30), (31): Xaa is C or S
VVMDPIKGYVVNNASDFYLINIPSLRTPVXX

SEQ ID NO: 67400 - protein, 33 aa, Artificial Sequence; identical to SEQ ID NO: 21277
  Cyclic GFR-binding peptide
  MOD_RES (2), (2): Xaa is C or S

SEQ ID NO: 67401 - protein, 32 aa, Artificial Sequence
  Cyclic GFR-binding peptide
  MOD_RES (28), (29): Xaa is C or S
MDPIKGYVVKENEDFYLMNIPSLETPVXXAKP

SEQ ID NO: 67402 - protein, 27 aa, Artificial Sequence
  Cyclic GFR-binding peptide
AKVVMNPIKGYIVNNSSDFYLVNIPSL

SEQ ID NO: 67403 - protein, 42 aa, Artificial Sequence; identical to SEQ ID NO: 21279
  Cyclic GFR-binding peptide
  MOD_RES (2), (4), (36), (37): Xaa is C or S

SEQ ID NO: 67404 - protein, 35 aa, Artificial Sequence; identical to SEQ ID NO: 21282
  Cyclic GFR-binding peptide
  MOD_RES (32), (33): Xaa is C or S

SEQ ID NO: 67405 - protein, 38 aa, Artificial Sequence; identical to SEQ ID NO: 21283
  Cyclic GFR-binding peptide
  MOD_RES (1), (3), (35): Xaa is C or S

SEQ ID NO: 67406 - protein, 32 aa, Artificial Sequence
  Cyclic GFR-binding peptide
  MOD_RES (1), (3): Xaa is C or S
XGXSRVVMNPIKGYIVNSSDDFYLVNIPSLKT

SEQ ID NO: 67407 - protein, 38 aa, Artificial Sequence; identical to SEQ ID NO: 21285
  Cyclic GFR-binding peptide
  MOD_RES (32), (33): Xaa is C or S

SEQ ID NO: 67408 - protein, 33 aa, Artificial Sequence
  Cyclic GFR-binding peptide
  MOD_RES (28), (29): Xaa is C or S
MNPIKGYIVNNSSDFYLVNIPSLKTPAXXAKPV

SEQ ID NO: 67409 - protein, 20 aa, Artificial Sequence
  Cyclic GFR-binding peptide
PIKGYIVNNSSDFYLVNIPS

SEQ ID NO: 67410 - protein, 31 aa, Artificial Sequence; identical to SEQ ID NO: 21288
  Cyclic GFR-binding peptide
  MOD_RES (31), (31): Xaa is C or S

SEQ ID NO: 67411 - protein, 38 aa, Artificial Sequence; identical to SEQ ID NO: 21291
  Cyclic GFR-binding peptide
  MOD_RES (1), (33), (34): Xaa is C or S

SEQ ID NO: 67412 - protein, 37 aa, Artificial Sequence; identical to SEQ ID NO: 21295
  Cyclic GFR-binding peptide
  MOD_RES (2), (34), (35): Xaa is C or S

SEQ ID NO: 67413 - protein, 31 aa, Artificial Sequence
  Cyclic GFR-binding peptide
  MOD_RES (1), (3): Xaa is C or S
XGXAEVVMDPIKGYVVNNAADFYLINIPSLR

SEQ ID NO: 67414 - protein, 33 aa, Artificial Sequence
  Cyclic GFR-binding peptide
  MOD_RES (2), (4): Xaa is C or S
RXGXGEVVMEPIKGYVVKDYEDFYLMNIPSLET

SEQ ID NO: 67415 - protein, 34 aa, Artificial Sequence
  Cyclic GFR-binding peptide
  MOD_RES (2), (4): Xaa is C or S
HXGXSRVVMNPIKGYIVNSSDDFYLVNIPSLKTP

SEQ ID NO: 67416 - protein, 28 aa, Artificial Sequence
  Cyclic GFR-binding peptide
VMNPIKGYIVNNSSDFYLVNIPSLKTPA

SEQ ID NO: 67417 - protein, 31 aa, Artificial Sequence; identical to SEQ ID NO: 21298
  Cyclic GFR-binding peptide
  MOD_RES (31), (31): Xaa is C or S

SEQ ID NO: 67418 - protein, 35 aa, Artificial Sequence; identical to SEQ ID NO: 21302
  Cyclic GFR-binding peptide
  MOD_RES (1), (3), (35): Xaa is C or S

SEQ ID NO: 67419 - protein, 29 aa, Artificial Sequence
  Cyclic GFR-binding peptide
  MOD_RES (28), (29): Xaa is C or S
MDPIKGYVVNNAADFYLINIPSLRAPVXX

SEQ ID NO: 67420 - protein, 30 aa, Artificial Sequence
  Cyclic GFR-binding peptide
  MOD_RES (26), (27): Xaa is C or S
PIKGYVVNNAADFYLINIPSLRAPVXXSAP

SEQ ID NO: 67421 - protein, 36 aa, Artificial Sequence; identical to SEQ ID NO: 21309
  Cyclic GFR-binding peptide
  MOD_RES (1), (33), (34): Xaa is C or S

SEQ ID NO: 67422 - protein, 32 aa, Artificial Sequence
  Cyclic GFR-binding peptide
  MOD_RES (28), (29): Xaa is C or S
MNPIKGYIVNSSDDFYLVNIPSLQTPAXXPKP

SEQ ID NO: 67423 - protein, 32 aa, Artificial Sequence
  Cyclic GFR-binding peptide
  MOD_RES (2), (4): Xaa is C or S
RXGXSEVVMDPIKGYVVNNASDFYLINIPSLR

SEQ ID NO: 67424 - protein, 34 aa, Artificial Sequence
  Cyclic GFR-binding peptide
  MOD_RES (30), (31): Xaa is C or S
VVMNPIKGYIVNSSDDFYLVNIPSLQTPAXXPKP

SEQ ID NO: 67425 - protein, 29 aa, Artificial Sequence
  Cyclic GFR-binding peptide
  MOD_RES (1), (1): Xaa is C or S
XSRVVMNPIKGYIVNSSDDFYLVNIPSLK

SEQ ID NO: 67426 - protein, 31 aa, Artificial Sequence
  Cyclic GFR-binding peptide
  MOD_RES (2), (4): Xaa is C or S
RXGXGEVVMEPIKGYVVKDYEDFYLMNIPSL

SEQ ID NO: 67427 - protein, 28 aa, Artificial Sequence
  Cyclic GFR-binding peptide
  MOD_RES (26), (27): Xaa is C or S
PIKGYVVKENEDFYLMNIPSLETPVXXA

SEQ ID NO: 67428 - protein, 36 aa, Artificial Sequence; identical to SEQ ID NO: 21311
  Cyclic GFR-binding peptide
  MOD_RES (32), (33): Xaa is C or S

SEQ ID NO: 67429 - protein, 29 aa, Artificial Sequence
  Cyclic GFR-binding peptide
  MOD_RES (27), (28): Xaa is C or S
NPIKGYIVNSSDDFYLVNIPSLQTPAXXP

SEQ ID NO: 67430 - protein, 29 aa, Artificial Sequence
  Cyclic GFR-binding peptide
  MOD_RES (1), (1): Xaa is C or S
XAEVVMDPIKGYVVNNAADFYLINIPSLR

SEQ ID NO: 67431 - protein, 37 aa, Artificial Sequence; identical to SEQ ID NO: 21315
  Cyclic GFR-binding peptide
  MOD_RES (31), (31): Xaa is C or S

SEQ ID NO: 67432 - protein, 30 aa, Artificial Sequence
  Cyclic GFR-binding peptide
  MOD_RES (29), (30): Xaa is C or S
VMNPIKGYIVNSSDDFYLVNIPSLKTPAXX

SEQ ID NO: 67433 - protein, 23 aa, Artificial Sequence
  Cyclic GFR-binding peptide
NPIKGYIVNSSDDFYLVNIPSLQ

SEQ ID NO: 67434 - protein, 29 aa, Artificial Sequence
  Cyclic GFR-binding peptide
VVMNPIKGYIVNSSDDFYLVNIPSLQTPA

SEQ ID NO: 67435 - protein, 35 aa, Artificial Sequence; identical to SEQ ID NO: 21326
  Cyclic GFR-binding peptide
  MOD_RES (2), (34), (35): Xaa is C or S

SEQ ID NO: 67436 - protein, 31 aa, Artificial Sequence
  Cyclic GFR-binding peptide
  MOD_RES (1), (1): Xaa is C or S
XSEVVMDPIKGYVVNNASDFYLINIPSLRTP

SEQ ID NO: 67437 - protein, 21 aa, Artificial Sequence
  Cyclic GFR-binding peptide
PIKGYYTVVGKDFYLINIPSL

SEQ ID NO: 67438 - protein, 32 aa, Artificial Sequence
  Cyclic GFR-binding peptide
  MOD_RES (28), (28): Xaa is C or S
MNPIKGYIVNSSDDFYLVNIPSLKTPAXTPKT

SEQ ID NO: 67439 - protein, 29 aa, Artificial Sequence
  Cyclic GFR-binding peptide
  MOD_RES (26), (27): Xaa is C or S
PIKGYIVNNSSDFYLVNIPSLKTPAXXAK

SEQ ID NO: 67440 - protein, 29 aa, Artificial Sequence
  Cyclic GFR-binding peptide
VVMDPIKGYVVKENEDFYLMNIPSLETPV

SEQ ID NO: 67441 - protein, 29 aa, Artificial Sequence
  Cyclic GFR-binding peptide
AKVVMNPIKGYIVNNSSDFYLVNIPSLKT

SEQ ID NO: 67442 - protein, 31 aa, Artificial Sequence
  Cyclic GFR-binding peptide
  MOD_RES (28), (29): Xaa is C or S
IMPIKGYLLVRGNDFYLMNIPSTKVPAXXTS

SEQ ID NO: 67443 - protein, 34 aa, Artificial Sequence; identical to SEQ ID NO: 21329
  Cyclic GFR-binding peptide
  MOD_RES (1), (34): Xaa is C or S

SEQ ID NO: 67444 - protein, 24 aa, Artificial Sequence
  Cyclic GFR-binding peptide
GEPIKGYTPVGMDDFYLVNIPSLK

SEQ ID NO: 67445 - protein, 39 aa, Artificial Sequence; identical to SEQ ID NO: 21330
  Cyclic GFR-binding peptide
  MOD_RES (1), (33), (34): Xaa is C or S

SEQ ID NO: 67446 - protein, 32 aa, Artificial Sequence
  Cyclic GFR-binding peptide
  MOD_RES (26), (27): Xaa is C or S
PIKGYTPVGMDDFYLVNIPSLKTPVXXAKGVK

SEQ ID NO: 67447 - protein, 23 aa, Artificial Sequence
  Cyclic GFR-binding peptide
PIKGYVVNNAADFYLINIPSLRA

SEQ ID NO: 67448 - protein, 29 aa, Artificial Sequence
  Cyclic GFR-binding peptide
VVMNPIKGYIVNSSDDFYLVNIPSLKTPA

SEQ ID NO: 67449 - protein, 33 aa, Artificial Sequence
  Cyclic GFR-binding peptide
  MOD_RES (27), (28): Xaa is C or S
GPIKGYYTVVGKDFYLINIPSLKTPVXXAKSAK

SEQ ID NO: 67450 - protein, 32 aa, Artificial Sequence
  Cyclic GFR-binding peptide
  MOD_RES (29), (30): Xaa is C or S
VMNPIKGYIVNSSDDFYLVNIPSLKTPAXXPK

SEQ ID NO: 67451 - protein, 30 aa, Artificial Sequence
  Cyclic GFR-binding peptide
  MOD_RES (30), (30): Xaa is C or S
VVMNPIKGYIVNSSDDFYLVNIPSLQTPAX

SEQ ID NO: 67452 - protein, 38 aa, Artificial Sequence; identical to SEQ ID NO: 21345
  Cyclic GFR-binding peptide
  MOD_RES (2), (34), (35): Xaa is C or S

SEQ ID NO: 67453 - protein, 29 aa, Artificial Sequence
  Cyclic GFR-binding peptide
  MOD_RES (1), (3): Xaa is C or S
XGXGEVVMEPIKGYVVKDYEDFYLMNIPS

SEQ ID NO: 67454 - protein, 29 aa, Artificial Sequence
  Cyclic GFR-binding peptide
  MOD_RES (2), (2): Xaa is C or S
GXAEVVMDPIKGYVVNNAADFYLINIPSL

SEQ ID NO: 67455 - protein, 39 aa, Artificial Sequence; identical to SEQ ID NO: 21347
  Cyclic GFR-binding peptide
  MOD_RES (1), (33), (34): Xaa is C or S

SEQ ID NO: 67456 - protein, 31 aa, Artificial Sequence
  Cyclic GFR-binding peptide
AVSMGEPIKGYTPVGMDDFYLVNIPSLKTPV

SEQ ID NO: 67457 - protein, 26 aa, Artificial Sequence
  Cyclic GFR-binding peptide
VVMDPIKGYVVNNASDFYLINIPSLR

SEQ ID NO: 67458 - protein, 34 aa, Artificial Sequence
  Cyclic GFR-binding peptide
  MOD_RES (28), (29): Xaa is C or S
MEPIKGYVVKDYEDFYLMNIPSLETPVXXAKPIS

SEQ ID NO: 67459 - protein, 33 aa, Artificial Sequence
  Cyclic GFR-binding peptide
  MOD_RES (27), (28): Xaa is C or S
MPIKGYLLVRGNDFYLMNIPSTKVPAXXTSPVR

SEQ ID NO: 67460 - protein, 32 aa, Artificial Sequence
  Cyclic GFR-binding peptide
  MOD_RES (29), (30): Xaa is C or S
VMDPIKGYVVNNASDFYLINIPSLRTPVXXTP

SEQ ID NO: 67461 - protein, 24 aa, Artificial Sequence
  Cyclic GFR-binding peptide
PIKGYVVKENEDFYLMNIPSLETP

SEQ ID NO: 67462 - protein, 30 aa, Artificial Sequence; identical to SEQ ID NO: 21356
  Cyclic GFR-binding peptide

SEQ ID NO: 67463 - protein, 23 aa, Artificial Sequence
  Cyclic GFR-binding peptide
GPIKGYYTVVGKDFYLINIPSLK

SEQ ID NO: 67464 - protein, 36 aa, Artificial Sequence; identical to SEQ ID NO: 21360
  Cyclic GFR-binding peptide
  MOD_RES (31), (32): Xaa is C or S

SEQ ID NO: 67465 - protein, 35 aa, Artificial Sequence
  Cyclic GFR-binding peptide
  MOD_RES (30), (30): Xaa is C or S
VVMNPIKGYIVNSSDDFYLVNIPSLKTPAXTPKTV

SEQ ID NO: 67466 - protein, 29 aa, Artificial Sequence
  Cyclic GFR-binding peptide
  MOD_RES (29), (29): Xaa is C or S
VMNPIKGYIVNNSSDFYLVNIPSLKTPAX

SEQ ID NO: 67467 - protein, 31 aa, Artificial Sequence
  Cyclic GFR-binding peptide
  MOD_RES (1), (3): Xaa is C or S
XGXSEVVMDPIKGYVVNNASDFYLINIPSLR

SEQ ID NO: 67468 - protein, 40 aa, Artificial Sequence; identical to SEQ ID NO: 21370
  Cyclic GFR-binding peptide
  MOD_RES (2), (4), (36), (37): Xaa is C or S

SEQ ID NO: 67469 - protein, 32 aa, Artificial Sequence
  Cyclic GFR-binding peptide
  MOD_RES (2), (2): Xaa is C or S
GXARVVMNPIKGYIVNSSDDFYLVNIPSLQTP

SEQ ID NO: 67470 - protein, 34 aa, Artificial Sequence
  Cyclic GFR-binding peptide
  MOD_RES (28), (29): Xaa is C or S
MDPIKGYVVNNASDFYLINIPSLRTPVXXTPPTS

SEQ ID NO: 67471 - protein, 32 aa, Artificial Sequence
  Cyclic GFR-binding peptide
  MOD_RES (1), (3): Xaa is C or S
XGXAKVVMNPIKGYIVNNSSDFYLVNIPSLKT

SEQ ID NO: 67472 - protein, 26 aa, Artificial Sequence
  Cyclic GFR-binding peptide
EVIMPIKGYLLVRGNDFYLMNIPSTK

SEQ ID NO: 67473 - protein, 36 aa, Artificial Sequence; identical to SEQ ID NO: 21374
  Cyclic GFR-binding peptide
  MOD_RES (1), (33), (34): Xaa is C or S

SEQ ID NO: 67474 - protein, 22 aa, Artificial Sequence
  Cyclic GFR-binding peptide
MDPIKGYVVNNAADFYLINIPS

SEQ ID NO: 67475 - protein, 33 aa, Artificial Sequence
  Cyclic GFR-binding peptide
  MOD_RES (2), (4): Xaa is C or S
HXGXSRVVMNPIKGYIVNSSDDFYLVNIPSLKT

SEQ ID NO: 67476 - protein, 28 aa, Artificial Sequence
  Cyclic GFR-binding peptide
  MOD_RES (2), (2): Xaa is C or S
GXGEVVMDPIKGYVVKENEDFYLMNIPS

SEQ ID NO: 67477 - protein, 22 aa, Artificial Sequence
  Cyclic GFR-binding peptide
MNPIKGYIVNNSSDFYLVNIPS

SEQ ID NO: 67478 - protein, 25 aa, Artificial Sequence
  Cyclic GFR-binding peptide
PIKGYVVKDYEDFYLMNIPSLETPV

SEQ ID NO: 67479 - protein, 38 aa, Artificial Sequence; identical to SEQ ID NO: 21379
  Cyclic GFR-binding peptide
  MOD_RES (2), (4), (36), (37): Xaa is C or S

SEQ ID NO: 67480 - protein, 23 aa, Artificial Sequence
  Cyclic GFR-binding peptide
MNPIKGYIVNSSDDFYLVNIPSL

SEQ ID NO: 67481 - protein, 33 aa, Artificial Sequence
  Cyclic GFR-binding peptide
  MOD_RES (1), (3): Xaa is C or S
XGXSRVVMNPIKGYIVNSSDDFYLVNIPSLKTP

SEQ ID NO: 67482 - protein, 31 aa, Artificial Sequence
  Cyclic GFR-binding peptide
  MOD_RES (27), (28): Xaa is C or S
NPIKGYIVNSSDDFYLVNIPSLQTPAXXPKP

SEQ ID NO: 67483 - protein, 39 aa, Artificial Sequence; identical to SEQ ID NO: 21381
  Cyclic GFR-binding peptide
  MOD_RES (2), (4), (36): Xaa is C or S

SEQ ID NO: 67484 - protein, 28 aa, Artificial Sequence
  Cyclic GFR-binding peptide
  MOD_RES (27), (28): Xaa is C or S
DPIKGYVVNNASDFYLINIPSLRTPVXX

SEQ ID NO: 67485 - protein, 32 aa, Artificial Sequence
  Cyclic GFR-binding peptide
  MOD_RES (27), (28): Xaa is C or S
GPIKGYYTVVGKDFYLINIPSLKTPVXXAKSA

SEQ ID NO: 67486 - protein, 30 aa, Artificial Sequence
  Cyclic GFR-binding peptide
  MOD_RES (26), (26): Xaa is C or S
PIKGYIVNSSDDFYLVNIPSLKTPAXTPKT

SEQ ID NO: 67487 - protein, 24 aa, Artificial Sequence
  Cyclic GFR-binding peptide
AMGPIKGYYTVVGKDFYLINIPSL

SEQ ID NO: 67488 - protein, 29 aa, Artificial Sequence
  Cyclic GFR-binding peptide
VVMDPIKGYVVNNASDFYLINIPSLRTPV

SEQ ID NO: 67489 - protein, 29 aa, Artificial Sequence
  Cyclic GFR-binding peptide
AAAAAAAAAPIKGYTPVGMDDFYLVNIPS

SEQ ID NO: 67490 - protein, 29 aa, Artificial Sequence
  Cyclic GFR-binding peptide
AAAAAAAAAPIKGYIVNNSSDFYLVNIPS

SEQ ID NO: 67491 - protein, 37 aa, Artificial Sequence; identical to SEQ ID NO: 21399
  Cyclic GFR-binding peptide
  MOD_RES (31), (32): Xaa is C or S

SEQ ID NO: 67492 - protein, 31 aa, Artificial Sequence
  Cyclic GFR-binding peptide
  MOD_RES (26), (27): Xaa is C or S
PIKGYVVKENEDFYLMNIPSLETPVXXAKPI

SEQ ID NO: 67493 - protein, 26 aa, Artificial Sequence
  Cyclic GFR-binding peptide
AVSMGEPIKGYTPVGMDDFYLVNIPS

SEQ ID NO: 67494 - protein, 33 aa, Artificial Sequence
  Cyclic GFR-binding peptide
  MOD_RES (29), (30): Xaa is C or S
VMNPIKGYIVNSSDDFYLVNIPSLKTPAXXPKP

SEQ ID NO: 67495 - protein, 37 aa, Artificial Sequence
  Cyclic GFR-binding peptide
  MOD_RES (32), (33): Xaa is C or S
AVSMGEPIKGYTPVGMDDFYLVNIPSLKTPVXXAKGV

SEQ ID NO: 67496 - protein, 34 aa, Artificial Sequence
  Cyclic GFR-binding peptide
  MOD_RES (29), (30): Xaa is C or S
AMGPIKGYYTVVGKDFYLINIPSLKTPVXXAKSA

SEQ ID NO: 67497 - protein, 34 aa, Artificial Sequence
  Cyclic GFR-binding peptide
  MOD_RES (30), (31): Xaa is C or S
EVIMPIKGYLLVRGNDFYLMNIPSTKVPAXXTSP

SEQ ID NO: 67498 - protein, 31 aa, Artificial Sequence
  Cyclic GFR-binding peptide
  MOD_RES (29), (30): Xaa is C or S
VMEPIKGYVVKDYEDFYLMNIPSLETPVXXA

SEQ ID NO: 67499 - protein, 27 aa, Artificial Sequence
  Cyclic GFR-binding peptide
  MOD_RES (1), (1): Xaa is C or S
XSEVVMDPIKGYVVNNASDFYLINIPS

SEQ ID NO: 67500 - protein, 37 aa, Artificial Sequence; identical to SEQ ID NO: 21404
  Cyclic GFR-binding peptide
  MOD_RES (2), (4), (36), (37): Xaa is C or S

SEQ ID NO: 67501 - protein, 30 aa, Artificial Sequence
  Cyclic GFR-binding peptide
SRVVMNPIKGYIVNSSDDFYLVNIPSLKTP

SEQ ID NO: 67502 - protein, 28 aa, Artificial Sequence
  Cyclic GFR-binding peptide
  MOD_RES (1), (1): Xaa is C or S
XEEVIMPIKGYLLVRGNDFYLMNIPSTK

SEQ ID NO: 67503 - protein, 25 aa, Artificial Sequence
  Cyclic GFR-binding peptide
PIKGYIVNSSDDFYLVNIPSLQTPA

SEQ ID NO: 67504 - protein, 38 aa, Artificial Sequence; identical to SEQ ID NO: 21408
  Cyclic GFR-binding peptide
  MOD_RES (1), (34), (35): Xaa is C or S

SEQ ID NO: 67505 - protein, 35 aa, Artificial Sequence; identical to SEQ ID NO: 21412
  Cyclic GFR-binding peptide
  MOD_RES (1), (3), (35): Xaa is C or S

SEQ ID NO: 67506 - protein, 24 aa, Artificial Sequence
  Cyclic GFR-binding peptide
VMDPIKGYVVKENEDFYLMNIPSL

SEQ ID NO: 67507 - protein, 33 aa, Artificial Sequence
  Cyclic GFR-binding peptide
  MOD_RES (27), (28): Xaa is C or S
EPIKGYTPVGMDDFYLVNIPSLKTPVXXAKGVK

SEQ ID NO: 67508 - protein, 42 aa, Artificial Sequence; identical to SEQ ID NO: 21416
  Cyclic GFR-binding peptide
  MOD_RES (2), (4), (36), (37): Xaa is C or S

SEQ ID NO: 67509 - protein, 33 aa, Artificial Sequence
  Cyclic GFR-binding peptide
  MOD_RES (30), (31): Xaa is C or S
VVMNPIKGYIVNSSDDFYLVNIPSLQTPAXXPK

SEQ ID NO: 67510 - protein, 31 aa, Artificial Sequence
  Cyclic GFR-binding peptide
  MOD_RES (2), (4): Xaa is C or S
RXGXESVAMGPIKGYYTVVGKDFYLINIPSL

SEQ ID NO: 67511 - protein, 28 aa, Artificial Sequence
  Cyclic GFR-binding peptide
  MOD_RES (28), (28): Xaa is C or S
MDPIKGYVVNNAADFYLINIPSLRAPVX

SEQ ID NO: 67512 - protein, 27 aa, Artificial Sequence
  Cyclic GFR-binding peptide
EVVMDPIKGYVVNNAADFYLINIPSLR

SEQ ID NO: 67513 - protein, 32 aa, Artificial Sequence
  Cyclic GFR-binding peptide
  MOD_RES (29), (30): Xaa is C or S
VMDPIKGYVVKENEDFYLMNIPSLETPVXXAK

SEQ ID NO: 67514 - protein, 27 aa, Artificial Sequence
  Cyclic GFR-binding peptide
VVMNPIKGYIVNSSDDFYLVNIPSLKT

SEQ ID NO: 67515 - protein, 23 aa, Artificial Sequence
  Cyclic GFR-binding peptide
MDPIKGYVVNNASDFYLINIPSL

SEQ ID NO: 67516 - protein, 28 aa, Artificial Sequence
  Cyclic GFR-binding peptide
  MOD_RES (1), (1): Xaa is C or S
XESVAMGPIKGYYTVVGKDFYLINIPSL

SEQ ID NO: 67517 - protein, 27 aa, Artificial Sequence
  Cyclic GFR-binding peptide
  MOD_RES (27), (27): Xaa is C or S
EPIKGYVVKDYEDFYLMNIPSLETPVX

SEQ ID NO: 67518 - protein, 25 aa, Artificial Sequence
  Cyclic GFR-binding peptide
VMEPIKGYVVKDYEDFYLMNIPSLE

SEQ ID NO: 67519 - protein, 21 aa, Artificial Sequence
  Cyclic GFR-binding peptide
PIKGYLLVRGNDFYLMNIPST

SEQ ID NO: 67520 - protein, 26 aa, Artificial Sequence
  Cyclic GFR-binding peptide
VVMNPIKGYIVNSSDDFYLVNIPSLQ

SEQ ID NO: 67521 - protein, 38 aa, Artificial Sequence; identical to SEQ ID NO: 21432
  Cyclic GFR-binding peptide
  MOD_RES (1), (3), (34), (35): Xaa is C or S

SEQ ID NO: 67522 - protein, 37 aa, Artificial Sequence; identical to SEQ ID NO: 21435
  Cyclic GFR-binding peptide
  MOD_RES (2), (4), (36), (37): Xaa is C or S

SEQ ID NO: 67523 - protein, 29 aa, Artificial Sequence
  Cyclic GFR-binding peptide
  MOD_RES (29), (29): Xaa is C or S
AMGPIKGYYTVVGKDFYLINIPSLKTPVX

SEQ ID NO: 67524 - protein, 25 aa, Artificial Sequence
  Cyclic GFR-binding peptide
KVVMNPIKGYIVNNSSDFYLVNIPS

SEQ ID NO: 67525 - protein, 25 aa, Artificial Sequence
  Cyclic GFR-binding peptide
VMDPIKGYVVNNASDFYLINIPSLR

SEQ ID NO: 67526 - protein, 33 aa, Artificial Sequence
  Cyclic GFR-binding peptide
  MOD_RES (29), (30): Xaa is C or S
VMDPIKGYVVKENEDFYLMNIPSLETPVXXAKP

SEQ ID NO: 67527 - protein, 36 aa, Artificial Sequence; identical to SEQ ID NO: 21444
  Cyclic GFR-binding peptide
  MOD_RES (2), (34): Xaa is C or S

SEQ ID NO: 67528 - protein, 28 aa, Artificial Sequence
  Cyclic GFR-binding peptide
SRVVMNPIKGYIVNSSDDFYLVNIPSLK

SEQ ID NO: 67529 - protein, 25 aa, Artificial Sequence
  Cyclic GFR-binding peptide
MDPIKGYVVNNASDFYLINIPSLRT

SEQ ID NO: 67530 - protein, 30 aa, Artificial Sequence
  Cyclic GFR-binding peptide
  MOD_RES (30), (30): Xaa is C or S
VVMDPIKGYVVKENEDFYLMNIPSLETPVX

SEQ ID NO: 67531 - protein, 24 aa, Artificial Sequence
  Cyclic GFR-binding peptide
MEPIKGYVVKDYEDFYLMNIPSLE

SEQ ID NO: 67532 - protein, 29 aa, Artificial Sequence
  Cyclic GFR-binding peptide
RVVMNPIKGYIVNSSDDFYLVNIPSLKTP

SEQ ID NO: 67533 - protein, 39 aa, Artificial Sequence; identical to SEQ ID NO: 21452
  Cyclic GFR-binding peptide
  MOD_RES (6), (7), (39): Xaa is C or S

SEQ ID NO: 67534 - protein, 30 aa, Artificial Sequence
  Cyclic GFR-binding peptide
  MOD_RES (4), (5): Xaa is C or S
SKAXXVPTKLSPINILYFDKGVVTYYGKIP

SEQ ID NO: 67535 - protein, 27 aa, Artificial Sequence
  Cyclic GFR-binding peptide
  MOD_RES (1), (2): Xaa is C or S
XXAPTKLSPINVLYFDSSNNVIYGKIP

SEQ ID NO: 67536 - protein, 34 aa, Artificial Sequence
  Cyclic GFR-binding peptide
  MOD_RES (4), (5): Xaa is C or S
PPTXXVPTRLSPINILYFDSANNVVYGKIPDMVV

SEQ ID NO: 67537 - protein, 40 aa, Artificial Sequence; identical to SEQ ID NO: 21463
  Cyclic GFR-binding peptide
  MOD_RES (5), (6), (38), (40): Xaa is C or S

SEQ ID NO: 67538 - protein, 37 aa, Artificial Sequence; identical to SEQ ID NO: 21464
  Cyclic GFR-binding peptide
  MOD_RES (4), (36): Xaa is C or S

SEQ ID NO: 67539 - protein, 32 aa, Artificial Sequence
  Cyclic GFR-binding peptide
  MOD_RES (29), (31): Xaa is C or S
QLSPINVLYFDDSSNVIYGKIPNMVVRAXGXH

SEQ ID NO: 67540 - protein, 35 aa, Artificial Sequence; identical to SEQ ID NO: 21469
  Cyclic GFR-binding peptide
  MOD_RES (3), (4): Xaa is C or S

SEQ ID NO: 67541 - protein, 23 aa, Artificial Sequence
  Cyclic GFR-binding peptide
LSPINMLYFDENEKVVYGKIPDM

SEQ ID NO: 67542 - protein, 29 aa, Artificial Sequence
  Cyclic GFR-binding peptide
APVKTSPINMLYFDNGRVLLYGKIPMIVE

SEQ ID NO: 67543 - protein, 34 aa, Artificial Sequence
  Cyclic GFR-binding peptide
  MOD_RES (4), (5): Xaa is C or S
SKAXXVPTKLSPINILYFDKGVVTYYGKIPGMAV

SEQ ID NO: 67544 - protein, 22 aa, Artificial Sequence
  Cyclic GFR-binding peptide
LSPINILYFDAANNVVYGKIPD

SEQ ID NO: 67545 - protein, 39 aa, Artificial Sequence; identical to SEQ ID NO: 21473
  Cyclic GFR-binding peptide
  MOD_RES (2), (3), (36), (38): Xaa is C or S

SEQ ID NO: 67546 - protein, 36 aa, Artificial Sequence; identical to SEQ ID NO: 21475
  Cyclic GFR-binding peptide
  MOD_RES (4), (5): Xaa is C or S

SEQ ID NO: 67547 - protein, 30 aa, Artificial Sequence
  Cyclic GFR-binding peptide
PTELSPINMLYFDEYDKVVYGKIPEMVVEG

SEQ ID NO: 67548 - protein, 33 aa, Artificial Sequence; identical to SEQ ID NO: 21479
  Cyclic GFR-binding peptide
  MOD_RES (1), (2): Xaa is C or S

SEQ ID NO: 67549 - protein, 27 aa, Artificial Sequence
  Cyclic GFR-binding peptide
VPTRLSPINILYFDSANNVVYGKIPDM

SEQ ID NO: 67550 - protein, 31 aa, Artificial Sequence
  Cyclic GFR-binding peptide
  MOD_RES (1), (2): Xaa is C or S
XXAPTKLSPINVLYFDDSSNVIYGKIPNMVV

SEQ ID NO: 67551 - protein, 35 aa, Artificial Sequence; identical to SEQ ID NO: 21480
  Cyclic GFR-binding peptide
  MOD_RES (1), (33), (35): Xaa is C or S

SEQ ID NO: 67552 - protein, 39 aa, Artificial Sequence; identical to SEQ ID NO: 21481
  Cyclic GFR-binding peptide
  MOD_RES (3), (4), (36), (38): Xaa is C or S

SEQ ID NO: 67553 - protein, 35 aa, Artificial Sequence; identical to SEQ ID NO: 21482
  Cyclic GFR-binding peptide
  MOD_RES (1), (2), (35): Xaa is C or S

SEQ ID NO: 67554 - protein, 30 aa, Artificial Sequence
  Cyclic GFR-binding peptide
  MOD_RES (28), (30): Xaa is C or S
LSPINILYFDKGVVTYYGKIPGMAVSEXGX

SEQ ID NO: 67555 - protein, 27 aa, Artificial Sequence
  Cyclic GFR-binding peptide
  MOD_RES (1), (2): Xaa is C or S
XXVPTKLSPINILYFDKGVVTYYGKIP

SEQ ID NO: 67556 - protein, 38 aa, Artificial Sequence; identical to SEQ ID NO: 21483
  Cyclic GFR-binding peptide
  MOD_RES (5), (6), (37): Xaa is C or S

SEQ ID NO: 67557 - protein, 28 aa, Artificial Sequence
  Cyclic GFR-binding peptide
  MOD_RES (1), (2): Xaa is C or S
XXVPTELSPINMLYFDENEKVVYGKIPD

SEQ ID NO: 67558 - protein, 31 aa, Artificial Sequence
  Cyclic GFR-binding peptide
  MOD_RES (28), (30): Xaa is C or S
SPINVLYFDDMGVPTYGKIPEGMSVAEXGXR

SEQ ID NO: 67559 - protein, 29 aa, Artificial Sequence
  Cyclic GFR-binding peptide
  MOD_RES (29), (29): Xaa is C or S
VKTSPINMLYFDNGRVLLYGKIPMIVEEX

SEQ ID NO: 67560 - protein, 22 aa, Artificial Sequence
  Cyclic GFR-binding peptide
SPINMLYFDEYDKVVYGKIPEM

SEQ ID NO: 67561 - protein, 31 aa, Artificial Sequence
  Cyclic GFR-binding peptide
  MOD_RES (3), (4): Xaa is C or S
KAXXVPTKLSPINILYFDKGVVTYYGKIPGM

SEQ ID NO: 67562 - protein, 25 aa, Artificial Sequence
  Cyclic GFR-binding peptide
SPINILYFDAANNVVYGKIPDMVVE

SEQ ID NO: 67563 - protein, 39 aa, Artificial Sequence; identical to SEQ ID NO: 21489
  Cyclic GFR-binding peptide
  MOD_RES (6), (7), (39): Xaa is C or S

SEQ ID NO: 67564 - protein, 27 aa, Artificial Sequence
  Cyclic GFR-binding peptide
VPTELSPINMLYFDENEKVVYGKIPDM

SEQ ID NO: 67565 - protein, 30 aa, Artificial Sequence
  Cyclic GFR-binding peptide
  MOD_RES (29), (29): Xaa is C or S
KLSPINVLYFDDSSNVIYGKIPNMVVRSXG

SEQ ID NO: 67566 - protein, 32 aa, Artificial Sequence
  Cyclic GFR-binding peptide
  MOD_RES (31), (31): Xaa is C or S
PTKLSPINILYFDKGVVTYYGKIPGMAVSEXG

SEQ ID NO: 67567 - protein, 30 aa, Artificial Sequence
  Cyclic GFR-binding peptide
  MOD_RES (2), (3): Xaa is C or S
AXXVPTKLSPINVLYFDDMGVPTYGKIPEG

SEQ ID NO: 67568 - protein, 29 aa, Artificial Sequence
  Cyclic GFR-binding peptide
  MOD_RES (27), (29): Xaa is C or S
SPINILYFDSANNVVYGKIPDMVVESXGX

SEQ ID NO: 67569 - protein, 37 aa, Artificial Sequence; identical to SEQ ID NO: 21500
  Cyclic GFR-binding peptide
  MOD_RES (6), (7): Xaa is C or S

SEQ ID NO: 67570 - protein, 31 aa, Artificial Sequence
  Cyclic GFR-binding peptide
  MOD_RES (4), (5): Xaa is C or S
SKAXXVPTKLSPINILYFDKGVVTYYGKIPG

SEQ ID NO: 67571 - protein, 40 aa, Artificial Sequence; identical to SEQ ID NO: 21501
  Cyclic GFR-binding peptide
  MOD_RES (6), (7), (39): Xaa is C or S

SEQ ID NO: 67572 - protein, 26 aa, Artificial Sequence
  Cyclic GFR-binding peptide
PTELSPINMLYFDENEKVVYGKIPDM

SEQ ID NO: 67573 - protein, 34 aa, Artificial Sequence
  Cyclic GFR-binding peptide
  MOD_RES (6), (7): Xaa is C or S
HVPKPXXAPTKLSPINVLYFDDSSNVIYGKIPNM

SEQ ID NO: 67574 - protein, 24 aa, Artificial Sequence
  Cyclic GFR-binding peptide
SPINMLYFDENEKVVYGKIPDMVV

SEQ ID NO: 67575 - protein, 36 aa, Artificial Sequence; identical to SEQ ID NO: 21507
  Cyclic GFR-binding peptide
  MOD_RES (5), (6): Xaa is C or S

SEQ ID NO: 67576 - protein, 28 aa, Artificial Sequence
  Cyclic GFR-binding peptide
  MOD_RES (2), (3): Xaa is C or S
TXXVPTRLSPINILYFDSANNVVYGKIP

SEQ ID NO: 67577 - protein, 38 aa, Artificial Sequence; identical to SEQ ID NO: 21508
  Cyclic GFR-binding peptide
  MOD_RES (3), (4), (36), (38): Xaa is C or S

SEQ ID NO: 67578 - protein, 26 aa, Artificial Sequence
  Cyclic GFR-binding peptide
TELSPINMLYFDENEKVVYGKIPDMV

SEQ ID NO: 67579 - protein, 27 aa, Artificial Sequence
  Cyclic GFR-binding peptide
KLSPINILYFDKGVVTYYGKIPGMAVS

SEQ ID NO: 67580 - protein, 28 aa, Artificial Sequence
  Cyclic GFR-binding peptide
  MOD_RES (1), (2): Xaa is C or S
XXAPTKLSPINVLYFDDSSNVIYGKIPN

SEQ ID NO: 67581 - protein, 30 aa, Artificial Sequence
  Cyclic GFR-binding peptide
  MOD_RES (1), (1): Xaa is C or S
XVPTKLSPINILYFDKGVVTYYGKIPGMAV

SEQ ID NO: 67582 - protein, 40 aa, Artificial Sequence; identical to SEQ ID NO: 21514
  Cyclic GFR-binding peptide
  MOD_RES (6), (7), (39): Xaa is C or S

SEQ ID NO: 67583 - protein, 27 aa, Artificial Sequence
  Cyclic GFR-binding peptide
PTKLSPINVLYFDDSSNVIYGKIPNMV

SEQ ID NO: 67584 - protein, 27 aa, Artificial Sequence
  Cyclic GFR-binding peptide
PTKLSPINVLYFDSSNNVIYGKIPNMV

SEQ ID NO: 67585 - protein, 37 aa, Artificial Sequence; identical to SEQ ID NO: 21518
  Cyclic GFR-binding peptide
  MOD_RES (3), (4), (36): Xaa is C or S

SEQ ID NO: 67586 - protein, 25 aa, Artificial Sequence
  Cyclic GFR-binding peptide
LSPINMLYFDEYDKVVYGKIPEMVV

SEQ ID NO: 67587 - protein, 24 aa, Artificial Sequence
  Cyclic GFR-binding peptide
SPINILYFDAANNVVYGKIPDMVV

SEQ ID NO: 67588 - protein, 40 aa, Artificial Sequence; identical to SEQ ID NO: 21520
  Cyclic GFR-binding peptide
  MOD_RES (5), (6), (38), (40): Xaa is C or S

SEQ ID NO: 67589 - protein, 30 aa, Artificial Sequence
  Cyclic GFR-binding peptide
  MOD_RES (29), (29): Xaa is C or S
ELSPINMLYFDEYDKVVYGKIPEMVVEGXG

SEQ ID NO: 67590 - protein, 32 aa, Artificial Sequence
  Cyclic GFR-binding peptide
  MOD_RES (1), (1): Xaa is C or S
XVPTKLSPINVLYFDDMGVPTYGKIPEGMSVA

SEQ ID NO: 67591 - protein, 20 aa, Artificial Sequence
  Cyclic GFR-binding peptide
SPINILYFDSANNVVYGKIP

SEQ ID NO: 67592 - protein, 29 aa, Artificial Sequence
  Cyclic GFR-binding peptide
  MOD_RES (1), (1): Xaa is C or S
XAPVKTSPINMLYFDNGRVLLYGKIPMIV

SEQ ID NO: 67593 - protein, 28 aa, Artificial Sequence
  Cyclic GFR-binding peptide
  MOD_RES (1), (1): Xaa is C or S
XAPTKLSPINVLYFDSSNNVIYGKIPNM

SEQ ID NO: 67594 - protein, 41 aa, Artificial Sequence; identical to SEQ ID NO: 21525
  Cyclic GFR-binding peptide
  MOD_RES (5), (6), (38), (40): Xaa is C or S

SEQ ID NO: 67595 - protein, 29 aa, Artificial Sequence
  Cyclic GFR-binding peptide
  MOD_RES (3), (3): Xaa is C or S
PTXAPTKLSPINVLYFDDSSNVIYGKIPN

SEQ ID NO: 67596 - protein, 27 aa, Artificial Sequence
  Cyclic GFR-binding peptide
PTKLSPINILYFDKGVVTYYGKIPGMA

SEQ ID NO: 67597 - protein, 34 aa, Artificial Sequence; identical to SEQ ID NO: 21526
  Cyclic GFR-binding peptide
  MOD_RES (3), (4): Xaa is C or S

SEQ ID NO: 67598 - protein, 35 aa, Artificial Sequence; identical to SEQ ID NO: 21528
  Cyclic GFR-binding peptide
  MOD_RES (4), (5): Xaa is C or S

SEQ ID NO: 67599 - protein, 25 aa, Artificial Sequence
  Cyclic GFR-binding peptide
SPINMLYFDEYDKVVYGKIPEMVVE

SEQ ID NO: 67600 - protein, 21 aa, Artificial Sequence
  Cyclic GFR-binding peptide
SPINMLYFDEYDKVVYGKIPE

SEQ ID NO: 67601 - protein, 38 aa, Artificial Sequence; identical to SEQ ID NO: 21542
  Cyclic GFR-binding peptide
  MOD_RES (3), (4), (36), (38): Xaa is C or S

SEQ ID NO: 67602 - protein, 34 aa, Artificial Sequence; identical to SEQ ID NO: 21544
  Cyclic GFR-binding peptide
  MOD_RES (1), (33): Xaa is C or S

SEQ ID NO: 67603 - protein, 25 aa, Artificial Sequence
  Cyclic GFR-binding peptide
LSPINVLYFDDMGVPTYGKIPEGMS

SEQ ID NO: 67604 - protein, 31 aa, Artificial Sequence; identical to SEQ ID NO: 21546
  Cyclic GFR-binding peptide

SEQ ID NO: 67605 - protein, 40 aa, Artificial Sequence; identical to SEQ ID NO: 21547
  Cyclic GFR-binding peptide
  MOD_RES (4), (5), (37), (39): Xaa is C or S

SEQ ID NO: 67606 - protein, 38 aa, Artificial Sequence; identical to SEQ ID NO: 21548
  Cyclic GFR-binding peptide
  MOD_RES (2), (3), (35), (37): Xaa is C or S

SEQ ID NO: 67607 - protein, 28 aa, Artificial Sequence
  Cyclic GFR-binding peptide
  MOD_RES (1), (2): Xaa is C or S
XXVPARLSPINILYFDAANNVVYGKIPD

SEQ ID NO: 67608 - protein, 37 aa, Artificial Sequence; identical to SEQ ID NO: 21553
  Cyclic GFR-binding peptide
  MOD_RES (6), (7): Xaa is C or S

SEQ ID NO: 67609 - protein, 33 aa, Artificial Sequence
  Cyclic GFR-binding peptide
  MOD_RES (4), (5): Xaa is C or S
PPTXXVPTRLSPINILYFDSANNVVYGKIPDMV

SEQ ID NO: 67610 - protein, 33 aa, Artificial Sequence
  Cyclic GFR-binding peptide
  MOD_RES (4), (5): Xaa is C or S
PKPXXAPTQLSPINVLYFDDSSNVIYGKIPNMV

SEQ ID NO: 67611 - protein, 32 aa, Artificial Sequence; identical to SEQ ID NO: 21555
  Cyclic GFR-binding peptide
  MOD_RES (1), (1): Xaa is C or S

SEQ ID NO: 67612 - protein, 35 aa, Artificial Sequence; identical to SEQ ID NO: 21556
  Cyclic GFR-binding peptide
  MOD_RES (1), (33), (35): Xaa is C or S

SEQ ID NO: 67613 - protein, 24 aa, Artificial Sequence
  Cyclic GFR-binding peptide
PTELSPINMLYFDEYDKVVYGKIP

SEQ ID NO: 67614 - protein, 36 aa, Artificial Sequence; identical to SEQ ID NO: 21560
  Cyclic GFR-binding peptide
  MOD_RES (6), (6): Xaa is C or S

SEQ ID NO: 67615 - protein, 35 aa, Artificial Sequence
  Cyclic GFR-binding peptide
  MOD_RES (5), (6): Xaa is C or S
VPKPXXAPTQLSPINVLYFDDSSNVIYGKIPNMVV

SEQ ID NO: 67616 - protein, 39 aa, Artificial Sequence; identical to SEQ ID NO: 21561
  Cyclic GFR-binding peptide
  MOD_RES (6), (7), (39): Xaa is C or S

SEQ ID NO: 67617 - protein, 40 aa, Artificial Sequence; identical to SEQ ID NO: 21562
  Cyclic GFR-binding peptide
  MOD_RES (6), (7), (38), (40): Xaa is C or S

SEQ ID NO: 67618 - protein, 38 aa, Artificial Sequence; identical to SEQ ID NO: 21563
  Cyclic GFR-binding peptide
  MOD_RES (4), (5), (37): Xaa is C or S

SEQ ID NO: 67619 - protein, 26 aa, Artificial Sequence
  Cyclic GFR-binding peptide
  MOD_RES (1), (1): Xaa is C or S
XVPTELSPINMLYFDENEKVVYGKIP

SEQ ID NO: 67620 - protein, 36 aa, Artificial Sequence; identical to SEQ ID NO: 21564
  Cyclic GFR-binding peptide
  MOD_RES (3), (4), (36): Xaa is C or S

SEQ ID NO: 67621 - protein, 36 aa, Artificial Sequence; identical to SEQ ID NO: 21566
  Cyclic GFR-binding peptide
  MOD_RES (3), (4), (35): Xaa is C or S

SEQ ID NO: 67622 - protein, 31 aa, Artificial Sequence
  Cyclic GFR-binding peptide
  MOD_RES (5), (5): Xaa is C or S
TKPTXAPTKLSPINVLYFDDSSNVIYGKIPN

SEQ ID NO: 67623 - protein, 29 aa, Artificial Sequence
  Cyclic GFR-binding peptide
VPTKLSPINVLYFDDMGVPTYGKIPEGMS

SEQ ID NO: 67624 - protein, 28 aa, Artificial Sequence
  Cyclic GFR-binding peptide
QLSPINVLYFDDSSNVIYGKIPNMVVRA

SEQ ID NO: 67625 - protein, 33 aa, Artificial Sequence
  Cyclic GFR-binding peptide
  MOD_RES (6), (7): Xaa is C or S
AAPASXXVPARLSPINILYFDAANNVVYGKIPD

SEQ ID NO: 67626 - protein, 32 aa, Artificial Sequence
  Cyclic GFR-binding peptide
  MOD_RES (2), (3): Xaa is C or S
PXXAPTKLSPINVLYFDDSSNVIYGKIPNMVV

SEQ ID NO: 67627 - protein, 29 aa, Artificial Sequence
  Cyclic GFR-binding peptide
  MOD_RES (28), (28): Xaa is C or S
SPINVLYFDDMGVPTYGKIPEGMSVAEXG

SEQ ID NO: 67628 - protein, 32 aa, Artificial Sequence
  Cyclic GFR-binding peptide
  MOD_RES (29), (31): Xaa is C or S
ELSPINMLYFDENEKVVYGKIPDMVVEGXGXR

SEQ ID NO: 67629 - protein, 36 aa, Artificial Sequence
  Cyclic GFR-binding peptide
  MOD_RES (6), (7): Xaa is C or S
RVPSTXXAPVKTSPINMLYFDNGRVLLYGKIPMIVE

SEQ ID NO: 67630 - protein, 34 aa, Artificial Sequence
  Cyclic GFR-binding peptide
  MOD_RES (5), (6): Xaa is C or S
IPKAXXVPTELSPINMLYFDENEKVVYGKIPDMV

SEQ ID NO: 67631 - protein, 28 aa, Artificial Sequence
  Cyclic GFR-binding peptide
  MOD_RES (1), (1): Xaa is C or S
XAPTQLSPINVLYFDDSSNVIYGKIPNM

SEQ ID NO: 67632 - protein, 39 aa, Artificial Sequence; identical to SEQ ID NO: 21580
  Cyclic GFR-binding peptide
  MOD_RES (5), (6), (37), (39): Xaa is C or S

SEQ ID NO: 67633 - protein, 42 aa, Artificial Sequence; identical to SEQ ID NO: 21583
  Cyclic GFR-binding peptide
  MOD_RES (6), (7), (39), (41): Xaa is C or S

SEQ ID NO: 67634 - protein, 36 aa, Artificial Sequence; identical to SEQ ID NO: 21585
  Cyclic GFR-binding peptide
  MOD_RES (2), (3), (35): Xaa is C or S

SEQ ID NO: 67635 - protein, 38 aa, Artificial Sequence; identical to SEQ ID NO: 21586
  Cyclic GFR-binding peptide
  MOD_RES (6), (7): Xaa is C or S

SEQ ID NO: 67636 - protein, 34 aa, Artificial Sequence
  Cyclic GFR-binding peptide
  MOD_RES (4), (5): Xaa is C or S
PASXXVPARLSPINILYFDAANNVVYGKIPDMVV

SEQ ID NO: 67637 - protein, 27 aa, Artificial Sequence
  Cyclic GFR-binding peptide
PTELSPINMLYFDEYDKVVYGKIPEMV

SEQ ID NO: 67638 - protein, 29 aa, Artificial Sequence
  Cyclic GFR-binding peptide
  MOD_RES (27), (29): Xaa is C or S
SPINVLYFDDSSNVIYGKIPNMVVRAXGX

SEQ ID NO: 67639 - protein, 35 aa, Artificial Sequence
  Cyclic GFR-binding peptide
  MOD_RES (5), (6): Xaa is C or S
VGKAXXVPTKLSPINVLYFDDMGVPTYGKIPEGMS

SEQ ID NO: 67640 - protein, 31 aa, Artificial Sequence
  Cyclic GFR-binding peptide
PTKLSPINVLYFDDMGVPTYGKIPEGMSVAE

SEQ ID NO: 67641 - protein, 31 aa, Artificial Sequence; identical to SEQ ID NO: 21593
  Cyclic GFR-binding peptide

SEQ ID NO: 67642 - protein, 37 aa, Artificial Sequence; identical to SEQ ID NO: 21596
  Cyclic GFR-binding peptide
  MOD_RES (4), (5), (37): Xaa is C or S

SEQ ID NO: 67643 - protein, 37 aa, Artificial Sequence; identical to SEQ ID NO: 21597
  Cyclic GFR-binding peptide
  MOD_RES (6), (7): Xaa is C or S

SEQ ID NO: 67644 - protein, 34 aa, Artificial Sequence; identical to SEQ ID NO: 21598
  Cyclic GFR-binding peptide
  MOD_RES (2), (3), (34): Xaa is C or S

SEQ ID NO: 67645 - protein, 31 aa, Artificial Sequence; identical to SEQ ID NO: 21600
  Cyclic GFR-binding peptide
  MOD_RES (1), (1): Xaa is C or S

SEQ ID NO: 67646 - protein, 28 aa, Artificial Sequence
  Cyclic GFR-binding peptide
  MOD_RES (28), (28): Xaa is C or S
SPINVLYFDDMGVPTYGKIPEGMSVAEX

SEQ ID NO: 67647 - protein, 41 aa, Artificial Sequence; identical to SEQ ID NO: 21601
  Cyclic GFR-binding peptide
  MOD_RES (6), (7), (40): Xaa is C or S

SEQ ID NO: 67648 - protein, 33 aa, Artificial Sequence
  Cyclic GFR-binding peptide
  MOD_RES (6), (7): Xaa is C or S
KIPKAXXVPTELSPINMLYFDENEKVVYGKIPD

SEQ ID NO: 67649 - protein, 38 aa, Artificial Sequence; identical to SEQ ID NO: 21606
  Cyclic GFR-binding peptide
  MOD_RES (2), (3), (36), (38): Xaa is C or S

SEQ ID NO: 67650 - protein, 34 aa, Artificial Sequence; identical to SEQ ID NO: 21608
  Cyclic GFR-binding peptide
  MOD_RES (3), (4): Xaa is C or S

SEQ ID NO: 67651 - protein, 26 aa, Artificial Sequence
  Cyclic GFR-binding peptide
LSPINILYFDAANNVVYGKIPDMVVE

SEQ ID NO: 67652 - protein, 32 aa, Artificial Sequence; identical to SEQ ID NO: 21610
  Cyclic GFR-binding peptide
  MOD_RES (1), (2): Xaa is C or S

SEQ ID NO: 67653 - protein, 29 aa, Artificial Sequence
  Cyclic GFR-binding peptide
  MOD_RES (1), (2): Xaa is C or S
XXVPTELSPINMLYFDEYDKVVYGKIPEM

SEQ ID NO: 67654 - protein, 32 aa, Artificial Sequence
  Cyclic GFR-binding peptide
  MOD_RES (30), (32): Xaa is C or S
TQLSPINVLYFDDSSNVIYGKIPNMVVRAXGX

SEQ ID NO: 67655 - protein, 28 aa, Artificial Sequence
  Cyclic GFR-binding peptide
  MOD_RES (1), (2): Xaa is C or S
XXVPTKLSPINILYFDKGVVTYYGKIPG

SEQ ID NO: 67656 - protein, 25 aa, Artificial Sequence
  Cyclic GFR-binding peptide
APTKLSPINVLYFDDSSNVIYGKIP

SEQ ID NO: 67657 - protein, 37 aa, Artificial Sequence; identical to SEQ ID NO: 21615
  Cyclic GFR-binding peptide
  MOD_RES (2), (3), (35), (37): Xaa is C or S

SEQ ID NO: 67658 - protein, 34 aa, Artificial Sequence; identical to SEQ ID NO: 21619
  Cyclic GFR-binding peptide
  MOD_RES (3), (4): Xaa is C or S

SEQ ID NO: 67659 - protein, 38 aa, Artificial Sequence; identical to SEQ ID NO: 21628
  Cyclic GFR-binding peptide
  MOD_RES (2), (3), (35), (37): Xaa is C or S

SEQ ID NO: 67660 - protein, 30 aa, Artificial Sequence
  Cyclic GFR-binding peptide
  MOD_RES (28), (30): Xaa is C or S
LSPINILYFDAANNVVYGKIPDMVVEAXGX

SEQ ID NO: 67661 - protein, 33 aa, Artificial Sequence; identical to SEQ ID NO: 21631
  Cyclic GFR-binding peptide
  MOD_RES (32), (32): Xaa is C or S

SEQ ID NO: 67662 - protein, 32 aa, Artificial Sequence
  Cyclic GFR-binding peptide
  MOD_RES (2), (3): Xaa is C or S
TXXAPVKTSPINMLYFDNGRVLLYGKIPMIVE

SEQ ID NO: 67663 - protein, 33 aa, Artificial Sequence; identical to SEQ ID NO: 21637
  Cyclic GFR-binding peptide
  MOD_RES (32), (32): Xaa is C or S

SEQ ID NO: 67664 - protein, 35 aa, Artificial Sequence
  Cyclic GFR-binding peptide
  MOD_RES (6), (7): Xaa is C or S
YVPKPXXAPTKLSPINVLYFDDSSNVIYGKIPNMV

SEQ ID NO: 67665 - protein, 33 aa, Artificial Sequence; identical to SEQ ID NO: 21642
  Cyclic GFR-binding peptide
  MOD_RES (1), (33): Xaa is C or S

SEQ ID NO: 67666 - protein, 29 aa, Artificial Sequence
  Cyclic GFR-binding peptide
  MOD_RES (29), (29): Xaa is C or S
QLSPINVLYFDDSSNVIYGKIPNMVVRAX

SEQ ID NO: 67667 - protein, 39 aa, Artificial Sequence; identical to SEQ ID NO: 21646
  Cyclic GFR-binding peptide
  MOD_RES (4), (5), (37), (39): Xaa is C or S

SEQ ID NO: 67668 - protein, 32 aa, Artificial Sequence
  Cyclic GFR-binding peptide
  MOD_RES (29), (31): Xaa is C or S
ELSPINMLYFDEYDKVVYGKIPEMVVEGXGXR

SEQ ID NO: 67669 - protein, 30 aa, Artificial Sequence
  Cyclic GFR-binding peptide
  MOD_RES (2), (3): Xaa is C or S
SXXVPARLSPINILYFDAANNVVYGKIPDM

SEQ ID NO: 67670 - protein, 30 aa, Artificial Sequence
  Cyclic GFR-binding peptide
  MOD_RES (28), (30): Xaa is C or S
LSPINVLYFDSSNNVIYGKIPNMVVKAXGX

SEQ ID NO: 67671 - protein, 35 aa, Artificial Sequence; identical to SEQ ID NO: 21651
  Cyclic GFR-binding peptide
  MOD_RES (3), (4): Xaa is C or S

SEQ ID NO: 67672 - protein, 29 aa, Artificial Sequence
  Cyclic GFR-binding peptide
SPINMLYFNDKQQIIYGKIPAAAAAAAAA

SEQ ID NO: 67673 - protein, 33 aa, Artificial Sequence; identical to SEQ ID NO: 21656
  Cyclic GFR-binding peptide
  MOD_RES (1), (2): Xaa is C or S

SEQ ID NO: 67674 - protein, 35 aa, Artificial Sequence; identical to SEQ ID NO: 21658
  Cyclic GFR-binding peptide
  MOD_RES (1), (33), (35): Xaa is C or S

SEQ ID NO: 67675 - protein, 29 aa, Artificial Sequence
  Cyclic GFR-binding peptide
  MOD_RES (3), (4): Xaa is C or S
KAXXVPTKLSPINVLYFDDMGVPTYGKIP

SEQ ID NO: 67676 - protein, 29 aa, Artificial Sequence
  Cyclic GFR-binding peptide
TRLSPINILYFDSANNVVYGKIPDMVVES

SEQ ID NO: 67677 - protein, 40 aa, Artificial Sequence; identical to SEQ ID NO: 21659
  Cyclic GFR-binding peptide
  MOD_RES (4), (5), (37), (39): Xaa is C or S

SEQ ID NO: 67678 - protein, 21 aa, Artificial Sequence
  Cyclic GFR-binding peptide
SPINILYFDSANNVVYGKIPD

SEQ ID NO: 67679 - protein, 41 aa, Artificial Sequence; identical to SEQ ID NO: 21660
  Cyclic GFR-binding peptide
  MOD_RES (6), (7), (39), (41): Xaa is C or S

SEQ ID NO: 67680 - protein, 32 aa, Artificial Sequence
  Cyclic GFR-binding peptide
  MOD_RES (31), (31): Xaa is C or S
PTRLSPINILYFDSANNVVYGKIPDMVVESXG

SEQ ID NO: 67681 - protein, 32 aa, Artificial Sequence; identical to SEQ ID NO: 21661
  Cyclic GFR-binding peptide
  MOD_RES (1), (2): Xaa is C or S

SEQ ID NO: 67682 - protein, 28 aa, Artificial Sequence
  Cyclic GFR-binding peptide
PTKLSPINILYFDKGVVTYYGKIPGMAV

SEQ ID NO: 67683 - protein, 26 aa, Artificial Sequence
  Cyclic GFR-binding peptide
PTKLSPINVLYFDDSSNVIYGKIPNM

SEQ ID NO: 67684 - protein, 38 aa, Artificial Sequence; identical to SEQ ID NO: 21664
  Cyclic GFR-binding peptide
  MOD_RES (6), (7): Xaa is C or S

SEQ ID NO: 67685 - protein, 26 aa, Artificial Sequence
  Cyclic GFR-binding peptide
LSPINVLYFDSSNNVIYGKIPNMVVK

SEQ ID NO: 67686 - protein, 41 aa, Artificial Sequence; identical to SEQ ID NO: 21666
  Cyclic GFR-binding peptide
  MOD_RES (5), (6), (38), (40): Xaa is C or S

SEQ ID NO: 67687 - protein, 41 aa, Artificial Sequence; identical to SEQ ID NO: 21668
  Cyclic GFR-binding peptide
  MOD_RES (6), (7), (39), (41): Xaa is C or S

SEQ ID NO: 67688 - protein, 22 aa, Artificial Sequence
  Cyclic GFR-binding peptide
LSPINILYFDKGVVTYYGKIPG

SEQ ID NO: 67689 - protein, 26 aa, Artificial Sequence
  Cyclic GFR-binding peptide
PTRLSPINILYFDSANNVVYGKIPDM

SEQ ID NO: 67690 - protein, 35 aa, Artificial Sequence; identical to SEQ ID NO: 21670
  Cyclic GFR-binding peptide
  MOD_RES (2), (3), (34): Xaa is C or S

SEQ ID NO: 67691 - protein, 35 aa, Artificial Sequence
  Cyclic GFR-binding peptide
  MOD_RES (6), (7): Xaa is C or S
RVPSTXXAPVKTSPINMLYFDNGRVLLYGKIPMIV

SEQ ID NO: 67692 - protein, 33 aa, Artificial Sequence
  Cyclic GFR-binding peptide
  MOD_RES (30), (32): Xaa is C or S
KLSPINVLYFDDMGVPTYGKIPEGMSVAEXGXR

SEQ ID NO: 67693 - protein, 34 aa, Artificial Sequence; identical to SEQ ID NO: 21671
  Cyclic GFR-binding peptide
  MOD_RES (1), (2), (34): Xaa is C or S

SEQ ID NO: 67694 - protein, 24 aa, Artificial Sequence
  Cyclic GFR-binding peptide
SPINMLYFDEYDKVVYGKIPEMVV

SEQ ID NO: 67695 - protein, 33 aa, Artificial Sequence
  Cyclic GFR-binding peptide
  MOD_RES (6), (7): Xaa is C or S
AVPKAXXAPTKLSPINVLYFDSSNNVIYGKIPN

SEQ ID NO: 67696 - protein, 35 aa, Artificial Sequence; identical to SEQ ID NO: 21672
  Cyclic GFR-binding peptide
  MOD_RES (3), (4): Xaa is C or S

SEQ ID NO: 67697 - protein, 40 aa, Artificial Sequence; identical to SEQ ID NO: 21675
  Cyclic GFR-binding peptide
  MOD_RES (5), (6), (38), (40): Xaa is C or S

SEQ ID NO: 67698 - protein, 33 aa, Artificial Sequence; identical to SEQ ID NO: 21676
  Cyclic GFR-binding peptide
  MOD_RES (1), (1): Xaa is C or S

SEQ ID NO: 67699 - protein, 29 aa, Artificial Sequence
  Cyclic GFR-binding peptide
VPTKLSPINILYFDKGVVTYYGKIPGMAV

SEQ ID NO: 67700 - protein, 33 aa, Artificial Sequence; identical to SEQ ID NO: 21683
  Cyclic GFR-binding peptide
  MOD_RES (1), (33): Xaa is C or S

SEQ ID NO: 67701 - protein, 32 aa, Artificial Sequence
  Cyclic GFR-binding peptide
  MOD_RES (2), (3): Xaa is C or S
AXXVPTELSPINMLYFDENEKVVYGKIPDMVV

SEQ ID NO: 67702 - protein, 34 aa, Artificial Sequence
  Cyclic GFR-binding peptide
  MOD_RES (5), (6): Xaa is C or S
APASXXVPARLSPINILYFDAANNVVYGKIPDMV

SEQ ID NO: 67703 - protein, 33 aa, Artificial Sequence
  Cyclic GFR-binding peptide
  MOD_RES (6), (6): Xaa is C or S
VTKPTXAPTKLSPINVLYFDDSSNVIYGKIPNM

SEQ ID NO: 67704 - protein, 27 aa, Artificial Sequence
  Cyclic GFR-binding peptide
TQLSPINVLYFDDSSNVIYGKIPNMVV

SEQ ID NO: 67705 - protein, 34 aa, Artificial Sequence
  Cyclic GFR-binding peptide
  MOD_RES (31), (33): Xaa is C or S
PTKLSPINVLYFDSSNNVIYGKIPNMVVKAXGXH

SEQ ID NO: 67706 - protein, 34 aa, Artificial Sequence
  Cyclic GFR-binding peptide
  MOD_RES (6), (6): Xaa is C or S
VTKPTXAPTKLSPINVLYFDDSSNVIYGKIPNMV

SEQ ID NO: 67707 - protein, 38 aa, Artificial Sequence; identical to SEQ ID NO: 21697
  Cyclic GFR-binding peptide
  MOD_RES (2), (3), (35), (37): Xaa is C or S

SEQ ID NO: 67708 - protein, 32 aa, Artificial Sequence
  Cyclic GFR-binding peptide
  MOD_RES (31), (31): Xaa is C or S
PTELSPINMLYFDEYDKVVYGKIPEMVVEGXG

SEQ ID NO: 67709 - protein, 31 aa, Artificial Sequence; identical to SEQ ID NO: 21700
  Cyclic GFR-binding peptide
  MOD_RES (31), (31): Xaa is C or S

SEQ ID NO: 67710 - protein, 29 aa, Artificial Sequence
  Cyclic GFR-binding peptide
SPINMLYFDEYDKVVYGKIPAAAAAAAAA

SEQ ID NO: 67711 - protein, 30 aa, Artificial Sequence
  Cyclic GFR-binding peptide
  MOD_RES (1), (2): Xaa is C or S
XXAPTQLSPINVLYFDDSSNVIYGKIPNMV

SEQ ID NO: 67712 - protein, 39 aa, Artificial Sequence; identical to SEQ ID NO: 21703
  Cyclic GFR-binding peptide
  MOD_RES (6), (7), (39): Xaa is C or S

SEQ ID NO: 67713 - protein, 32 aa, Artificial Sequence
  Cyclic GFR-binding peptide
  MOD_RES (5), (6): Xaa is C or S
IPKAXXVPTELSPINMLYFDEYDKVVYGKIPE

SEQ ID NO: 67714 - protein, 32 aa, Artificial Sequence
  Cyclic GFR-binding peptide
  MOD_RES (30), (32): Xaa is C or S
ARLSPINILYFDAANNVVYGKIPDMVVEAXGX

SEQ ID NO: 67715 - protein, 25 aa, Artificial Sequence
  Cyclic GFR-binding peptide
SPINMLYFDNGRVLLYGKIPMIVEE

SEQ ID NO: 67716 - protein, 41 aa, Artificial Sequence; identical to SEQ ID NO: 21706
  Cyclic GFR-binding peptide
  MOD_RES (5), (6), (38), (40): Xaa is C or S

SEQ ID NO: 67717 - protein, 27 aa, Artificial Sequence
  Cyclic GFR-binding peptide
  MOD_RES (27), (27): Xaa is C or S
SPINILYFDKGVVTYYGKIPGMAVSEX

SEQ ID NO: 67718 - protein, 37 aa, Artificial Sequence; identical to SEQ ID NO: 21710
  Cyclic GFR-binding peptide
  MOD_RES (4), (5), (37): Xaa is C or S

SEQ ID NO: 67719 - protein, 41 aa, Artificial Sequence; identical to SEQ ID NO: 21711
  Cyclic GFR-binding peptide
  MOD_RES (5), (6), (38), (40): Xaa is C or S

SEQ ID NO: 67720 - protein, 35 aa, Artificial Sequence
  Cyclic GFR-binding peptide
  MOD_RES (6), (7): Xaa is C or S
AVPKAXXAPTKLSPINVLYFDSSNNVIYGKIPNMV

SEQ ID NO: 67721 - protein, 27 aa, Artificial Sequence
  Cyclic GFR-binding peptide
RLSPINILYFDSANNVVYGKIPDMVVE

SEQ ID NO: 67722 - protein, 33 aa, Artificial Sequence; identical to SEQ ID NO: 21715
  Cyclic GFR-binding peptide
  MOD_RES (1), (32): Xaa is C or S

SEQ ID NO: 67723 - protein, 32 aa, Artificial Sequence
  Cyclic GFR-binding peptide
  MOD_RES (7), (7): Xaa is C or S
HVTKPTXAPTKLSPINVLYFDDSSNVIYGKIP

SEQ ID NO: 67724 - protein, 28 aa, Artificial Sequence
  Cyclic GFR-binding peptide
VPARLSPINILYFDAANNVVYGKIPDMV

SEQ ID NO: 67725 - protein, 27 aa, Artificial Sequence
  Cyclic GFR-binding peptide
TKLSPINVLYFDDMGVPTYGKIPEGMS

SEQ ID NO: 67726 - protein, 31 aa, Artificial Sequence
  Cyclic GFR-binding peptide
  MOD_RES (2), (3): Xaa is C or S
AXXAPTKLSPINVLYFDSSNNVIYGKIPNMV

SEQ ID NO: 67727 - protein, 36 aa, Artificial Sequence; identical to SEQ ID NO: 21721
  Cyclic GFR-binding peptide
  MOD_RES (4), (36): Xaa is C or S

SEQ ID NO: 67728 - protein, 27 aa, Artificial Sequence
  Cyclic GFR-binding peptide
PVKTSPINMLYFDNGRVLLYGKIPMIV

SEQ ID NO: 67729 - protein, 30 aa, Artificial Sequence
  Cyclic GFR-binding peptide
  MOD_RES (1), (1): Xaa is C or S
XVPTKLSPINVLYFDDMGVPTYGKIPEGMS

SEQ ID NO: 67730 - protein, 37 aa, Artificial Sequence
  Cyclic GFR-binding peptide
  MOD_RES (6), (7): Xaa is C or S
KVGKAXXVPTKLSPINVLYFDDMGVPTYGKIPEGMSV

SEQ ID NO: 67731 - protein, 31 aa, Artificial Sequence
  Cyclic GFR-binding peptide
  MOD_RES (30), (30): Xaa is C or S
KLSPINVLYFDDMGVPTYGKIPEGMSVAEXG

SEQ ID NO: 67732 - protein, 31 aa, Artificial Sequence
  Cyclic GFR-binding peptide
  MOD_RES (29), (31): Xaa is C or S
ELSPINMLYFDEYDKVVYGKIPEMVVEGXGX

SEQ ID NO: 67733 - protein, 26 aa, Artificial Sequence
  Cyclic GFR-binding peptide
LSPINILYFDKGVVTYYGKIPGMAVS

SEQ ID NO: 67734 - protein, 34 aa, Artificial Sequence
  Cyclic GFR-binding peptide
  MOD_RES (5), (6): Xaa is C or S
VPSTXXAPVKTSPINMLYFDNGRVLLYGKIPMIV

SEQ ID NO: 67735 - protein, 26 aa, Artificial Sequence
  Cyclic GFR-binding peptide
KLSPINILYFDKGVVTYYGKIPGMAV

SEQ ID NO: 67736 - protein, 31 aa, Artificial Sequence
  Cyclic GFR-binding peptide
  MOD_RES (1), (2): Xaa is C or S
XXAPTKLSPINVLYFDSSNNVIYGKIPNMVV

SEQ ID NO: 67737 - protein, 30 aa, Artificial Sequence
  Cyclic GFR-binding peptide
  MOD_RES (29), (29): Xaa is C or S
KLSPINILYFDKGVVTYYGKIPGMAVSEXG

SEQ ID NO: 67738 - protein, 42 aa, Artificial Sequence; identical to SEQ ID NO: 21735
  Cyclic GFR-binding peptide
  MOD_RES (6), (7), (39), (41): Xaa is C or S

SEQ ID NO: 67739 - protein, 22 aa, Artificial Sequence
  Cyclic GFR-binding peptide
LSPINVLYFDDMGVPTYGKIPE

SEQ ID NO: 67740 - protein, 37 aa, Artificial Sequence; identical to SEQ ID NO: 21739
  Cyclic GFR-binding peptide
  MOD_RES (6), (7): Xaa is C or S

SEQ ID NO: 67741 - protein, 31 aa, Artificial Sequence
  Cyclic GFR-binding peptide
  MOD_RES (3), (4): Xaa is C or S
KAXXVPTELSPINMLYFDENEKVVYGKIPDM

SEQ ID NO: 67742 - protein, 30 aa, Artificial Sequence
  Cyclic GFR-binding peptide
  MOD_RES (3), (4): Xaa is C or S
STXXAPVKTSPINMLYFDNGRVLLYGKIPM

SEQ ID NO: 67743 - protein, 29 aa, Artificial Sequence
  Cyclic GFR-binding peptide
  MOD_RES (1), (2): Xaa is C or S
XXAPTQLSPINVLYFDDSSNVIYGKIPNM

SEQ ID NO: 67744 - protein, 37 aa, Artificial Sequence; identical to SEQ ID NO: 21741
  Cyclic GFR-binding peptide
  MOD_RES (1), (34), (36): Xaa is C or S

SEQ ID NO: 67745 - protein, 33 aa, Artificial Sequence
  Cyclic GFR-binding peptide
  MOD_RES (4), (5): Xaa is C or S
PKAXXVPTELSPINMLYFDEYDKVVYGKIPEMV

SEQ ID NO: 67746 - protein, 31 aa, Artificial Sequence
  Cyclic GFR-binding peptide
  MOD_RES (31), (31): Xaa is C or S
PTKLSPINVLYFDDSSNVIYGKIPNMVVRSX

SEQ ID NO: 67747 - protein, 21 aa, Artificial Sequence
  Cyclic GFR-binding peptide
LSPINMLYFDEYDKVVYGKIP

SEQ ID NO: 67748 - protein, 28 aa, Artificial Sequence
  Cyclic GFR-binding peptide
  MOD_RES (1), (1): Xaa is C or S
XVPTKLSPINVLYFDDMGVPTYGKIPEG

SEQ ID NO: 67749 - protein, 24 aa, Artificial Sequence
  Cyclic GFR-binding peptide
LSPINVLYFDDMGVPTYGKIPEGM

SEQ ID NO: 67750 - protein, 24 aa, Artificial Sequence
  Cyclic GFR-binding peptide
PTKLSPINVLYFDDSSNVIYGKIP

SEQ ID NO: 67751 - protein, 30 aa, Artificial Sequence
  Cyclic GFR-binding peptide
  MOD_RES (1), (2): Xaa is C or S
XXVPARLSPINILYFDAANNVVYGKIPDMV

SEQ ID NO: 67752 - protein, 24 aa, Artificial Sequence
  Cyclic GFR-binding peptide
PTKLSPINVLYFDDMGVPTYGKIP

SEQ ID NO: 67753 - protein, 24 aa, Artificial Sequence
  Cyclic GFR-binding peptide
TQLSPINVLYFDDSSNVIYGKIPN

SEQ ID NO: 67754 - protein, 39 aa, Artificial Sequence; identical to SEQ ID NO: 21752
  Cyclic GFR-binding peptide
  MOD_RES (3), (4), (36), (38): Xaa is C or S

SEQ ID NO: 67755 - protein, 37 aa, Artificial Sequence; identical to SEQ ID NO: 21753
  Cyclic GFR-binding peptide
  MOD_RES (2), (3), (34), (36): Xaa is C or S

SEQ ID NO: 67756 - protein, 34 aa, Artificial Sequence
  Cyclic GFR-binding peptide
  MOD_RES (5), (6): Xaa is C or S
VPKPXXAPTKLSPINVLYFDDSSNVIYGKIPNMV

SEQ ID NO: 67757 - protein, 34 aa, Artificial Sequence
  Cyclic GFR-binding peptide
  MOD_RES (31), (33): Xaa is C or S
PARLSPINILYFDAANNVVYGKIPDMVVEAXGXR

SEQ ID NO: 67758 - protein, 27 aa, Artificial Sequence
  Cyclic GFR-binding peptide
ELSPINMLYFDENEKVVYGKIPDMVVE

SEQ ID NO: 67759 - protein, 26 aa, Artificial Sequence
  Cyclic GFR-binding peptide
LSPINILYFDSANNVVYGKIPDMVVE

SEQ ID NO: 67760 - protein, 26 aa, Artificial Sequence
  Cyclic GFR-binding peptide
PTQLSPINVLYFDDSSNVIYGKIPNM

SEQ ID NO: 67761 - protein, 38 aa, Artificial Sequence; identical to SEQ ID NO: 21767
  Cyclic GFR-binding peptide
  MOD_RES (5), (6), (38): Xaa is C or S

SEQ ID NO: 67762 - protein, 29 aa, Artificial Sequence
  Cyclic GFR-binding peptide
PTQLSPINVLYFDDSSNVIYGKIPNMVVR

SEQ ID NO: 67763 - protein, 26 aa, Artificial Sequence
  Cyclic GFR-binding peptide
LSPINVLYFDDSSNVIYGKIPNMVVR

SEQ ID NO: 67764 - protein, 25 aa, Artificial Sequence
  Cyclic GFR-binding peptide
KLSPINVLYFDDSSNVIYGKIPNMV

SEQ ID NO: 67765 - protein, 25 aa, Artificial Sequence
  Cyclic GFR-binding peptide
KLSPINVLYFDSSNNVIYGKIPNMV

SEQ ID NO: 67766 - protein, 32 aa, Artificial Sequence
  Cyclic GFR-binding peptide
  MOD_RES (30), (32): Xaa is C or S
TKLSPINILYFDKGVVTYYGKIPGMAVSEXGX

SEQ ID NO: 67767 - protein, 38 aa, Artificial Sequence; identical to SEQ ID NO: 21774
  Cyclic GFR-binding peptide
  MOD_RES (2), (3), (35), (37): Xaa is C or S

SEQ ID NO: 67768 - protein, 32 aa, Artificial Sequence
  Cyclic GFR-binding peptide
  MOD_RES (2), (3): Xaa is C or S
SXXVPARLSPINILYFDAANNVVYGKIPDMVV

SEQ ID NO: 67769 - protein, 25 aa, Artificial Sequence
  Cyclic GFR-binding peptide
SPINILYFDSANNVVYGKIPDMVVE

SEQ ID NO: 67770 - protein, 37 aa, Artificial Sequence; identical to SEQ ID NO: 21780
  Cyclic GFR-binding peptide
  MOD_RES (5), (6): Xaa is C or S

SEQ ID NO: 67771 - protein, 35 aa, Artificial Sequence; identical to SEQ ID NO: 21782
  Cyclic GFR-binding peptide
  MOD_RES (1), (34): Xaa is C or S

SEQ ID NO: 67772 - protein, 43 aa, Artificial Sequence; identical to SEQ ID NO: 21784
  Cyclic GFR-binding peptide
  MOD_RES (6), (7), (40), (42): Xaa is C or S

SEQ ID NO: 67773 - protein, 23 aa, Artificial Sequence
  Cyclic GFR-binding peptide
LSPINVLYFDSSNNVIYGKIPNM

SEQ ID NO: 67774 - protein, 36 aa, Artificial Sequence; identical to SEQ ID NO: 21785
  Cyclic GFR-binding peptide
  MOD_RES (2), (3), (36): Xaa is C or S

SEQ ID NO: 67775 - protein, 34 aa, Artificial Sequence
  Cyclic GFR-binding peptide
  MOD_RES (7), (7): Xaa is C or S
HVTKPTXAPTKLSPINVLYFDDSSNVIYGKIPNM

SEQ ID NO: 67776 - protein, 33 aa, Artificial Sequence; identical to SEQ ID NO: 21788
  Cyclic GFR-binding peptide
  MOD_RES (2), (3): Xaa is C or S

SEQ ID NO: 67777 - protein, 29 aa, Artificial Sequence
  Cyclic GFR-binding peptide
SPINVLYFDDSSNVIYGKIPAAAAAAAAA

SEQ ID NO: 67778 - protein, 26 aa, Artificial Sequence
  Cyclic GFR-binding peptide
TKLSPINILYFDKGVVTYYGKIPGMA

SEQ ID NO: 67779 - protein, 34 aa, Artificial Sequence; identical to SEQ ID NO: 21789
  Cyclic GFR-binding peptide
  MOD_RES (1), (33): Xaa is C or S

SEQ ID NO: 67780 - protein, 26 aa, Artificial Sequence
  Cyclic GFR-binding peptide
TQLSPINVLYFDDSSNVIYGKIPNMV

SEQ ID NO: 67781 - protein, 31 aa, Artificial Sequence
  Cyclic GFR-binding peptide
  MOD_RES (2), (3): Xaa is C or S
AXXVPTELSPINMLYFDENEKVVYGKIPDMV

SEQ ID NO: 67782 - protein, 28 aa, Artificial Sequence
  Cyclic GFR-binding peptide
APTQLSPINVLYFDDSSNVIYGKIPNMV

SEQ ID NO: 67783 - protein, 36 aa, Artificial Sequence; identical to SEQ ID NO: 21790
  Cyclic GFR-binding peptide
  MOD_RES (3), (4), (36): Xaa is C or S

SEQ ID NO: 67784 - protein, 29 aa, Artificial Sequence
  Cyclic GFR-binding peptide
  MOD_RES (29), (29): Xaa is C or S
ELSPINMLYFDEYDKVVYGKIPEMVVEGX

SEQ ID NO: 67785 - protein, 40 aa, Artificial Sequence; identical to SEQ ID NO: 21793
  Cyclic GFR-binding peptide
  MOD_RES (4), (5), (37), (39): Xaa is C or S

SEQ ID NO: 67786 - protein, 28 aa, Artificial Sequence
  Cyclic GFR-binding peptide
  MOD_RES (1), (1): Xaa is C or S
XVPTELSPINMLYFDEYDKVVYGKIPEM

SEQ ID NO: 67787 - protein, 32 aa, Artificial Sequence
  Cyclic GFR-binding peptide
  MOD_RES (6), (7): Xaa is C or S
AVPKAXXAPTKLSPINVLYFDSSNNVIYGKIP

SEQ ID NO: 67788 - protein, 38 aa, Artificial Sequence; identical to SEQ ID NO: 21796
  Cyclic GFR-binding peptide
  MOD_RES (3), (4), (36), (38): Xaa is C or S

SEQ ID NO: 67789 - protein, 34 aa, Artificial Sequence
  Cyclic GFR-binding peptide
  MOD_RES (6), (7): Xaa is C or S
AVPKAXXAPTKLSPINVLYFDSSNNVIYGKIPNM

SEQ ID NO: 67790 - protein, 40 aa, Artificial Sequence; identical to SEQ ID NO: 21799
  Cyclic GFR-binding peptide
  MOD_RES (5), (6), (39): Xaa is C or S

SEQ ID NO: 67791 - protein, 33 aa, Artificial Sequence
  Cyclic GFR-binding peptide
  MOD_RES (3), (4): Xaa is C or S
KAXXVPTELSPINMLYFDENEKVVYGKIPDMVV

SEQ ID NO: 67792 - protein, 30 aa, Artificial Sequence; identical to SEQ ID NO: 918
  Cyclic GFR-binding peptide

SEQ ID NO: 67793 - protein, 28 aa, Artificial Sequence
  Cyclic GFR-binding peptide
  MOD_RES (28), (28): Xaa is C or S
LSPINMLYFDENEKVVYGKIPDMVVEGX

SEQ ID NO: 67794 - protein, 26 aa, Artificial Sequence
  Cyclic GFR-binding peptide
  MOD_RES (1), (1): Xaa is C or S
XVPTRLSPINILYFDSANNVVYGKIP

SEQ ID NO: 67795 - protein, 25 aa, Artificial Sequence
  Cyclic GFR-binding peptide
TKLSPINVLYFDDMGVPTYGKIPEG

SEQ ID NO: 67796 - protein, 31 aa, Artificial Sequence
  Cyclic GFR-binding peptide
  MOD_RES (1), (2): Xaa is C or S
XXVPARLSPINILYFDAANNVVYGKIPDMVV

SEQ ID NO: 67797 - protein, 33 aa, Artificial Sequence; identical to SEQ ID NO: 21806
  Cyclic GFR-binding peptide
  MOD_RES (2), (3): Xaa is C or S

SEQ ID NO: 67798 - protein, 29 aa, Artificial Sequence
  Cyclic GFR-binding peptide
  MOD_RES (1), (1): Xaa is C or S
XAPTKLSPINVLYFDDSSNVIYGKIPNMV

SEQ ID NO: 67799 - protein, 28 aa, Artificial Sequence
  Cyclic GFR-binding peptide
VKTSPINMLYFDNGRVLLYGKIPMIVEE

SEQ ID NO: 67800 - protein, 38 aa, Artificial Sequence; identical to SEQ ID NO: 21815
  Cyclic GFR-binding peptide
  MOD_RES (6), (7): Xaa is C or S

SEQ ID NO: 67801 - protein, 29 aa, Artificial Sequence
  Cyclic GFR-binding peptide
  MOD_RES (3), (4): Xaa is C or S
KAXXVPTELSPINMLYFDEYDKVVYGKIP

SEQ ID NO: 67802 - protein, 34 aa, Artificial Sequence
  Cyclic GFR-binding peptide
  MOD_RES (2), (3): Xaa is C or S
AXXVPTKLSPINVLYFDDMGVPTYGKIPEGMSVA

SEQ ID NO: 67803 - protein, 30 aa, Artificial Sequence
  Cyclic GFR-binding peptide
  MOD_RES (4), (5): Xaa is C or S
GKAXXVPTKLSPINVLYFDDMGVPTYGKIP

SEQ ID NO: 67804 - protein, 38 aa, Artificial Sequence; identical to SEQ ID NO: 21819
  Cyclic GFR-binding peptide
  MOD_RES (4), (5), (37): Xaa is C or S

SEQ ID NO: 67805 - protein, 27 aa, Artificial Sequence
  Cyclic GFR-binding peptide
  MOD_RES (1), (2): Xaa is C or S
XXAPTQLSPINVLYFDDSSNVIYGKIP

SEQ ID NO: 67806 - protein, 27 aa, Artificial Sequence
  Cyclic GFR-binding peptide
  MOD_RES (2), (2): Xaa is C or S
TXAPTKLSPINVLYFDDSSNVIYGKIP

SEQ ID NO: 67807 - protein, 30 aa, Artificial Sequence
  Cyclic GFR-binding peptide
PTELSPINMLYFDENEKVVYGKIPDMVVEG

SEQ ID NO: 67808 - protein, 28 aa, Artificial Sequence
  Cyclic GFR-binding peptide
PTELSPINMLYFDENEKVVYGKIPDMVV

SEQ ID NO: 67809 - protein, 28 aa, Artificial Sequence
  Cyclic GFR-binding peptide
  MOD_RES (28), (28): Xaa is C or S
LSPINMLYFDEYDKVVYGKIPEMVVEGX

SEQ ID NO: 67810 - protein, 28 aa, Artificial Sequence
  Cyclic GFR-binding peptide
TQLSPINVLYFDDSSNVIYGKIPNMVVR

SEQ ID NO: 67811 - protein, 38 aa, Artificial Sequence; identical to SEQ ID NO: 21827
  Cyclic GFR-binding peptide
  MOD_RES (3), (4), (35), (37): Xaa is C or S

SEQ ID NO: 67812 - protein, 27 aa, Artificial Sequence
  Cyclic GFR-binding peptide
KLSPINVLYFDSSNNVIYGKIPNMVVK

SEQ ID NO: 67813 - protein, 32 aa, Artificial Sequence
  Cyclic GFR-binding peptide
  MOD_RES (2), (3): Xaa is C or S
AXXVPTKLSPINILYFDKGVVTYYGKIPGMAV

SEQ ID NO: 67814 - protein, 27 aa, Artificial Sequence
  Cyclic GFR-binding peptide
TRLSPINILYFDSANNVVYGKIPDMVV

SEQ ID NO: 67815 - protein, 40 aa, Artificial Sequence; identical to SEQ ID NO: 21831
  Cyclic GFR-binding peptide
  MOD_RES (5), (6), (38), (40): Xaa is C or S

SEQ ID NO: 67816 - protein, 25 aa, Artificial Sequence
  Cyclic GFR-binding peptide
KTSPINMLYFDNGRVLLYGKIPMIV

SEQ ID NO: 67817 - protein, 28 aa, Artificial Sequence
  Cyclic GFR-binding peptide
KLSPINVLYFDDMGVPTYGKIPEGMSVA

SEQ ID NO: 67818 - protein, 28 aa, Artificial Sequence
  Cyclic GFR-binding peptide
PTKLSPINVLYFDDMGVPTYGKIPEGMS

SEQ ID NO: 67819 - protein, 28 aa, Artificial Sequence
  Cyclic GFR-binding peptide
  MOD_RES (28), (28): Xaa is C or S
LSPINVLYFDDSSNVIYGKIPNMVVRSX

SEQ ID NO: 67820 - protein, 37 aa, Artificial Sequence; identical to SEQ ID NO: 21839
  Cyclic GFR-binding peptide
  MOD_RES (1), (2), (34), (36): Xaa is C or S

SEQ ID NO: 67821 - protein, 37 aa, Artificial Sequence; identical to SEQ ID NO: 21840
  Cyclic GFR-binding peptide
  MOD_RES (3), (4), (36): Xaa is C or S

SEQ ID NO: 67822 - protein, 35 aa, Artificial Sequence
  Cyclic GFR-binding peptide
  MOD_RES (32), (34): Xaa is C or S
PTKLSPINVLYFDDMGVPTYGKIPEGMSVAEXGXR

SEQ ID NO: 67823 - protein, 38 aa, Artificial Sequence; identical to SEQ ID NO: 21842
  Cyclic GFR-binding peptide
  MOD_RES (3), (4), (36), (38): Xaa is C or S

SEQ ID NO: 67824 - protein, 36 aa, Artificial Sequence; identical to SEQ ID NO: 21843
  Cyclic GFR-binding peptide
  MOD_RES (4), (5): Xaa is C or S

SEQ ID NO: 67825 - protein, 28 aa, Artificial Sequence
  Cyclic GFR-binding peptide
  MOD_RES (2), (3): Xaa is C or S
SXXVPARLSPINILYFDAANNVVYGKIP

SEQ ID NO: 67826 - protein, 35 aa, Artificial Sequence
  Cyclic GFR-binding peptide
  MOD_RES (5), (6): Xaa is C or S
VPKAXXAPTKLSPINVLYFDSSNNVIYGKIPNMVV

SEQ ID NO: 67827 - protein, 35 aa, Artificial Sequence; identical to SEQ ID NO: 21845
  Cyclic GFR-binding peptide
  MOD_RES (1), (2), (34): Xaa is C or S

SEQ ID NO: 67828 - protein, 25 aa, Artificial Sequence
  Cyclic GFR-binding peptide
TELSPINMLYFDEYDKVVYGKIPEM

SEQ ID NO: 67829 - protein, 40 aa, Artificial Sequence; identical to SEQ ID NO: 21852
  Cyclic GFR-binding peptide
  MOD_RES (5), (6), (38), (40): Xaa is C or S

SEQ ID NO: 67830 - protein, 32 aa, Artificial Sequence
  Cyclic GFR-binding peptide
  MOD_RES (2), (3): Xaa is C or S
AXXVPTELSPINMLYFDEYDKVVYGKIPEMVV

SEQ ID NO: 67831 - protein, 33 aa, Artificial Sequence
  Cyclic GFR-binding peptide
  MOD_RES (2), (3): Xaa is C or S
AXXVPTKLSPINVLYFDDMGVPTYGKIPEGMSV

SEQ ID NO: 67832 - protein, 36 aa, Artificial Sequence
  Cyclic GFR-binding peptide
  MOD_RES (6), (7): Xaa is C or S
KVGKAXXVPTKLSPINVLYFDDMGVPTYGKIPEGMS

SEQ ID NO: 67833 - protein, 24 aa, Artificial Sequence
  Cyclic GFR-binding peptide
PTKLSPINILYFDKGVVTYYGKIP

SEQ ID NO: 67834 - protein, 27 aa, Artificial Sequence
  Cyclic GFR-binding peptide
  MOD_RES (1), (1): Xaa is C or S
XAPTQLSPINVLYFDDSSNVIYGKIPN

SEQ ID NO: 67835 - protein, 37 aa, Artificial Sequence; identical to SEQ ID NO: 21857
  Cyclic GFR-binding peptide
  MOD_RES (6), (7): Xaa is C or S

SEQ ID NO: 67836 - protein, 33 aa, Artificial Sequence
  Cyclic GFR-binding peptide
  MOD_RES (3), (4): Xaa is C or S
KAXXVPTELSPINMLYFDEYDKVVYGKIPEMVV

SEQ ID NO: 67837 - protein, 25 aa, Artificial Sequence
  Cyclic GFR-binding peptide
VKTSPINMLYFDNGRVLLYGKIPMI

SEQ ID NO: 67838 - protein, 36 aa, Artificial Sequence; identical to SEQ ID NO: 21861
  Cyclic GFR-binding peptide
  MOD_RES (1), (2), (34), (36): Xaa is C or S

SEQ ID NO: 67839 - protein, 27 aa, Artificial Sequence
  Cyclic GFR-binding peptide
  MOD_RES (27), (27): Xaa is C or S
SPINMLYFDENEKVVYGKIPDMVVEGX

SEQ ID NO: 67840 - protein, 26 aa, Artificial Sequence
  Cyclic GFR-binding peptide
SPINVLYFDSSNNVIYGKIPNMVVKA

SEQ ID NO: 67841 - protein, 21 aa, Artificial Sequence
  Cyclic GFR-binding peptide
SPINVLYFDSSNNVIYGKIPN

SEQ ID NO: 67842 - protein, 31 aa, Artificial Sequence
  Cyclic GFR-binding peptide
  MOD_RES (3), (3): Xaa is C or S
PTXAPTKLSPINVLYFDDSSNVIYGKIPNMV

SEQ ID NO: 67843 - protein, 40 aa, Artificial Sequence; identical to SEQ ID NO: 21864
  Cyclic GFR-binding peptide
  MOD_RES (4), (5), (38), (40): Xaa is C or S

SEQ ID NO: 67844 - protein, 26 aa, Artificial Sequence
  Cyclic GFR-binding peptide
LSPINMLYFDEYDKVVYGKIPEMVVE

SEQ ID NO: 67845 - protein, 30 aa, Artificial Sequence
  Cyclic GFR-binding peptide
  MOD_RES (4), (5): Xaa is C or S
PKPXXAPTKLSPINVLYFDDSSNVIYGKIP

SEQ ID NO: 67846 - protein, 36 aa, Artificial Sequence; identical to SEQ ID NO: 21870
  Cyclic GFR-binding peptide
  MOD_RES (2), (34), (36): Xaa is C or S

SEQ ID NO: 67847 - protein, 27 aa, Artificial Sequence
  Cyclic GFR-binding peptide
PTKLSPINVLYFDDMGVPTYGKIPEGM

SEQ ID NO: 67848 - protein, 36 aa, Artificial Sequence; identical to SEQ ID NO: 21872
  Cyclic GFR-binding peptide
  MOD_RES (1), (33), (35): Xaa is C or S

SEQ ID NO: 67849 - protein, 37 aa, Artificial Sequence; identical to SEQ ID NO: 21875
  Cyclic GFR-binding peptide
  MOD_RES (3), (35), (37): Xaa is C or S

SEQ ID NO: 67850 - protein, 39 aa, Artificial Sequence; identical to SEQ ID NO: 21879
  Cyclic GFR-binding peptide
  MOD_RES (5), (6), (39): Xaa is C or S

SEQ ID NO: 67851 - protein, 22 aa, Artificial Sequence
  Cyclic GFR-binding peptide
KLSPINILYFDKGVVTYYGKIP

SEQ ID NO: 67852 - protein, 28 aa, Artificial Sequence
  Cyclic GFR-binding peptide
ARLSPINILYFDAANNVVYGKIPDMVVE

SEQ ID NO: 67853 - protein, 33 aa, Artificial Sequence
  Cyclic GFR-binding peptide
  MOD_RES (31), (33): Xaa is C or S
PTELSPINMLYFDENEKVVYGKIPDMVVEGXGX

SEQ ID NO: 67854 - protein, 22 aa, Artificial Sequence
  Cyclic GFR-binding peptide
TSPINMLYFDNGRVLLYGKIPM

SEQ ID NO: 67855 - protein, 34 aa, Artificial Sequence
  Cyclic GFR-binding peptide
  MOD_RES (6), (7): Xaa is C or S
KIPKAXXVPTELSPINMLYFDENEKVVYGKIPDM

SEQ ID NO: 67856 - protein, 27 aa, Artificial Sequence
  Cyclic GFR-binding peptide
SPINVLYFDDMGVPTYGKIPEGMSVAE

SEQ ID NO: 67857 - protein, 32 aa, Artificial Sequence
  Cyclic GFR-binding peptide
  MOD_RES (6), (7): Xaa is C or S
RVPSTXXAPVKTSPINMLYFDNGRVLLYGKIP

SEQ ID NO: 67858 - protein, 30 aa, Artificial Sequence
  Cyclic GFR-binding peptide
  MOD_RES (2), (3): Xaa is C or S
AXXAPTKLSPINVLYFDSSNNVIYGKIPNM

SEQ ID NO: 67859 - protein, 28 aa, Artificial Sequence
  Cyclic GFR-binding peptide
PTKLSPINVLYFDSSNNVIYGKIPNMVV

SEQ ID NO: 67860 - protein, 38 aa, Artificial Sequence; identical to SEQ ID NO: 21890
  Cyclic GFR-binding peptide
  MOD_RES (5), (6): Xaa is C or S

SEQ ID NO: 67861 - protein, 34 aa, Artificial Sequence
  Cyclic GFR-binding peptide
  MOD_RES (5), (6): Xaa is C or S
VPKPXXAPTQLSPINVLYFDDSSNVIYGKIPNMV

SEQ ID NO: 67862 - protein, 23 aa, Artificial Sequence
  Cyclic GFR-binding peptide
TKLSPINVLYFDDMGVPTYGKIP

SEQ ID NO: 67863 - protein, 26 aa, Artificial Sequence
  Cyclic GFR-binding peptide
LSPINMLYFDENEKVVYGKIPDMVVE

SEQ ID NO: 67864 - protein, 30 aa, Artificial Sequence
  Cyclic GFR-binding peptide
  MOD_RES (1), (1): Xaa is C or S
XAPVKTSPINMLYFDNGRVLLYGKIPMIVE

SEQ ID NO: 67865 - protein, 30 aa, Artificial Sequence
  Cyclic GFR-binding peptide
  MOD_RES (27), (29): Xaa is C or S
SPINILYFDAANNVVYGKIPDMVVEAXGXR

SEQ ID NO: 67866 - protein, 32 aa, Artificial Sequence
  Cyclic GFR-binding peptide
  MOD_RES (4), (5): Xaa is C or S
PSTXXAPVKTSPINMLYFDNGRVLLYGKIPMI

SEQ ID NO: 67867 - protein, 37 aa, Artificial Sequence; identical to SEQ ID NO: 21896
  Cyclic GFR-binding peptide
  MOD_RES (2), (3), (35), (37): Xaa is C or S

SEQ ID NO: 67868 - protein, 41 aa, Artificial Sequence; identical to SEQ ID NO: 21897
  Cyclic GFR-binding peptide
  MOD_RES (5), (6), (38), (40): Xaa is C or S

SEQ ID NO: 67869 - protein, 27 aa, Artificial Sequence
  Cyclic GFR-binding peptide
  MOD_RES (1), (2): Xaa is C or S
XXAPVKTSPINMLYFDNGRVLLYGKIP

SEQ ID NO: 67870 - protein, 33 aa, Artificial Sequence
  Cyclic GFR-binding peptide
  MOD_RES (32), (32): Xaa is C or S
PTKLSPINVLYFDDMGVPTYGKIPEGMSVAEXG

SEQ ID NO: 67871 - protein, 34 aa, Artificial Sequence; identical to SEQ ID NO: 21900
  Cyclic GFR-binding peptide
  MOD_RES (1), (33): Xaa is C or S

SEQ ID NO: 67872 - protein, 35 aa, Artificial Sequence; identical to SEQ ID NO: 21901
  Cyclic GFR-binding peptide
  MOD_RES (4), (5): Xaa is C or S

SEQ ID NO: 67873 - protein, 32 aa, Artificial Sequence
  Cyclic GFR-binding peptide
  MOD_RES (6), (7): Xaa is C or S
HVPKPXXAPTKLSPINVLYFDDSSNVIYGKIP

SEQ ID NO: 67874 - protein, 39 aa, Artificial Sequence; identical to SEQ ID NO: 21905
  Cyclic GFR-binding peptide
  MOD_RES (5), (6), (38): Xaa is C or S

SEQ ID NO: 67875 - protein, 24 aa, Artificial Sequence
  Cyclic GFR-binding peptide
LSPINVLYFDSSNNVIYGKIPNMV

SEQ ID NO: 67876 - protein, 31 aa, Artificial Sequence
  Cyclic GFR-binding peptide
  MOD_RES (30), (30): Xaa is C or S
PVKTSPINMLYFDNGRVLLYGKIPMIVEEXG

SEQ ID NO: 67877 - protein, 32 aa, Artificial Sequence; identical to SEQ ID NO: 21908
  Cyclic GFR-binding peptide
  MOD_RES (32), (32): Xaa is C or S

SEQ ID NO: 67878 - protein, 38 aa, Artificial Sequence; identical to SEQ ID NO: 21907
  Cyclic GFR-binding peptide
  MOD_RES (4), (5), (37): Xaa is C or S

SEQ ID NO: 67879 - protein, 35 aa, Artificial Sequence; identical to SEQ ID NO: 21910
  Cyclic GFR-binding peptide
  MOD_RES (4), (5): Xaa is C or S

SEQ ID NO: 67880 - protein, 34 aa, Artificial Sequence; identical to SEQ ID NO: 21912
  Cyclic GFR-binding peptide
  MOD_RES (3), (4): Xaa is C or S

SEQ ID NO: 67881 - protein, 28 aa, Artificial Sequence
  Cyclic GFR-binding peptide
  MOD_RES (3), (3): Xaa is C or S
PTXAPTKLSPINVLYFDDSSNVIYGKIP

SEQ ID NO: 67882 - protein, 41 aa, Artificial Sequence; identical to SEQ ID NO: 21913
  Cyclic GFR-binding peptide
  MOD_RES (6), (7), (39), (41): Xaa is C or S

SEQ ID NO: 67883 - protein, 27 aa, Artificial Sequence
  Cyclic GFR-binding peptide
LSPINILYFDKGVVTYYGKIPGMAVSE

SEQ ID NO: 67884 - protein, 29 aa, Artificial Sequence
  Cyclic GFR-binding peptide
TKLSPINVLYFDDMGVPTYGKIPEGMSVA

SEQ ID NO: 67885 - protein, 38 aa, Artificial Sequence; identical to SEQ ID NO: 21918
  Cyclic GFR-binding peptide
  MOD_RES (4), (5), (37): Xaa is C or S

SEQ ID NO: 67886 - protein, 26 aa, Artificial Sequence
  Cyclic GFR-binding peptide
TKLSPINVLYFDDSSNVIYGKIPNMV

SEQ ID NO: 67887 - protein, 34 aa, Artificial Sequence; identical to SEQ ID NO: 21927
  Cyclic GFR-binding peptide
  MOD_RES (33), (33): Xaa is C or S

SEQ ID NO: 67888 - protein, 28 aa, Artificial Sequence
  Cyclic GFR-binding peptide
  MOD_RES (2), (3): Xaa is C or S
PXXAPTKLSPINVLYFDDSSNVIYGKIP

SEQ ID NO: 67889 - protein, 37 aa, Artificial Sequence; identical to SEQ ID NO: 21929
  Cyclic GFR-binding peptide
  MOD_RES (5), (6): Xaa is C or S

SEQ ID NO: 67890 - protein, 27 aa, Artificial Sequence
  Cyclic GFR-binding peptide
ELSPINMLYFDEYDKVVYGKIPEMVVE

SEQ ID NO: 67891 - protein, 35 aa, Artificial Sequence; identical to SEQ ID NO: 21931
  Cyclic GFR-binding peptide
  MOD_RES (3), (4): Xaa is C or S

SEQ ID NO: 67892 - protein, 33 aa, Artificial Sequence
  Cyclic GFR-binding peptide
  MOD_RES (5), (6): Xaa is C or S
VPSTXXAPVKTSPINMLYFDNGRVLLYGKIPMI

SEQ ID NO: 67893 - protein, 31 aa, Artificial Sequence
  Cyclic GFR-binding peptide
  MOD_RES (4), (4): Xaa is C or S
KPTXAPTKLSPINVLYFDDSSNVIYGKIPNM

SEQ ID NO: 67894 - protein, 23 aa, Artificial Sequence
  Cyclic GFR-binding peptide
RLSPINILYFDAANNVVYGKIPD

SEQ ID NO: 67895 - protein, 33 aa, Artificial Sequence
  Cyclic GFR-binding peptide
  MOD_RES (3), (4): Xaa is C or S
KAXXAPTKLSPINVLYFDSSNNVIYGKIPNMVV

SEQ ID NO: 67896 - protein, 33 aa, Artificial Sequence
  Cyclic GFR-binding peptide
  MOD_RES (31), (33): Xaa is C or S
PTELSPINMLYFDEYDKVVYGKIPEMVVEGXGX

SEQ ID NO: 67897 - protein, 32 aa, Artificial Sequence
  Cyclic GFR-binding peptide
  MOD_RES (5), (6): Xaa is C or S
APASXXVPARLSPINILYFDAANNVVYGKIPD

SEQ ID NO: 67898 - protein, 30 aa, Artificial Sequence
  Cyclic GFR-binding peptide
  MOD_RES (30), (30): Xaa is C or S
TRLSPINILYFDSANNVVYGKIPDMVVESX

SEQ ID NO: 67899 - protein, 41 aa, Artificial Sequence; identical to SEQ ID NO: 21946
  Cyclic GFR-binding peptide
  MOD_RES (4), (5), (38), (40): Xaa is C or S

SEQ ID NO: 67900 - protein, 25 aa, Artificial Sequence
  Cyclic GFR-binding peptide
TSPINMLYFDNGRVLLYGKIPMIVE

SEQ ID NO: 67901 - protein, 41 aa, Artificial Sequence; identical to SEQ ID NO: 21948
  Cyclic GFR-binding peptide
  MOD_RES (5), (6), (38), (40): Xaa is C or S

SEQ ID NO: 67902 - protein, 30 aa, Artificial Sequence
  Cyclic GFR-binding peptide
  MOD_RES (28), (30): Xaa is C or S
LSPINMLYFDEYDKVVYGKIPEMVVEGXGX

SEQ ID NO: 67903 - protein, 30 aa, Artificial Sequence
  Cyclic GFR-binding peptide
  MOD_RES (27), (29): Xaa is C or S
TSPINMLYFDNGRVLLYGKIPMIVEEXGXL

SEQ ID NO: 67904 - protein, 31 aa, Artificial Sequence
  Cyclic GFR-binding peptide
  MOD_RES (31), (31): Xaa is C or S
PTQLSPINVLYFDDSSNVIYGKIPNMVVRAX

SEQ ID NO: 67905 - protein, 38 aa, Artificial Sequence; identical to SEQ ID NO: 21951
  Cyclic GFR-binding peptide
  MOD_RES (5), (6), (38): Xaa is C or S

SEQ ID NO: 67906 - protein, 35 aa, Artificial Sequence; identical to SEQ ID NO: 21953
  Cyclic GFR-binding peptide
  MOD_RES (4), (5): Xaa is C or S

SEQ ID NO: 67907 - protein, 30 aa, Artificial Sequence
  Cyclic GFR-binding peptide
  MOD_RES (30), (30): Xaa is C or S
TKLSPINILYFDKGVVTYYGKIPGMAVSEX

SEQ ID NO: 67908 - protein, 35 aa, Artificial Sequence; identical to SEQ ID NO: 21956
  Cyclic GFR-binding peptide
  MOD_RES (2), (3), (35): Xaa is C or S

SEQ ID NO: 67909 - protein, 29 aa, Artificial Sequence
  Cyclic GFR-binding peptide
PVKTSPINMLYFDNGRVLLYGKIPMIVEE

SEQ ID NO: 67910 - protein, 29 aa, Artificial Sequence
  Cyclic GFR-binding peptide
  MOD_RES (1), (1): Xaa is C or S
XVPTKLSPINVLYFDDMGVPTYGKIPEGM

SEQ ID NO: 67911 - protein, 27 aa, Artificial Sequence
  Cyclic GFR-binding peptide
  MOD_RES (1), (2): Xaa is C or S
XXVPTKLSPINVLYFDDMGVPTYGKIP

SEQ ID NO: 67912 - protein, 31 aa, Artificial Sequence
  Cyclic GFR-binding peptide
  MOD_RES (31), (31): Xaa is C or S
PTELSPINMLYFDEYDKVVYGKIPEMVVEGX

SEQ ID NO: 67913 - protein, 28 aa, Artificial Sequence
  Cyclic GFR-binding peptide
  MOD_RES (27), (27): Xaa is C or S
SPINILYFDKGVVTYYGKIPGMAVSEXG

SEQ ID NO: 67914 - protein, 37 aa, Artificial Sequence; identical to SEQ ID NO: 21963
  Cyclic GFR-binding peptide
  MOD_RES (4), (5), (37): Xaa is C or S

SEQ ID NO: 67915 - protein, 34 aa, Artificial Sequence; identical to SEQ ID NO: 21965
  Cyclic GFR-binding peptide
  MOD_RES (1), (2): Xaa is C or S

SEQ ID NO: 67916 - protein, 35 aa, Artificial Sequence; identical to SEQ ID NO: 21967
  Cyclic GFR-binding peptide
  MOD_RES (2), (3), (35): Xaa is C or S

SEQ ID NO: 67917 - protein, 29 aa, Artificial Sequence
  Cyclic GFR-binding peptide
SPINILYFDAANNVVYGKIPAAAAAAAAA

SEQ ID NO: 67918 - protein, 40 aa, Artificial Sequence; identical to SEQ ID NO: 21969
  Cyclic GFR-binding peptide
  MOD_RES (4), (5), (37), (39): Xaa is C or S

SEQ ID NO: 67919 - protein, 36 aa, Artificial Sequence; identical to SEQ ID NO: 21970
  Cyclic GFR-binding peptide
  MOD_RES (1), (2), (34), (36): Xaa is C or S

SEQ ID NO: 67920 - protein, 29 aa, Artificial Sequence
  Cyclic GFR-binding peptide
  MOD_RES (2), (3): Xaa is C or S
PXXAPTKLSPINVLYFDDSSNVIYGKIPN

SEQ ID NO: 67921 - protein, 32 aa, Artificial Sequence
  Cyclic GFR-binding peptide
  MOD_RES (3), (4): Xaa is C or S
ASXXVPARLSPINILYFDAANNVVYGKIPDMV

SEQ ID NO: 67922 - protein, 33 aa, Artificial Sequence
  Cyclic GFR-binding peptide
  MOD_RES (6), (7): Xaa is C or S
SIPKAXXVPTELSPINMLYFDEYDKVVYGKIPE

SEQ ID NO: 67923 - protein, 24 aa, Artificial Sequence
  Cyclic GFR-binding peptide
PARLSPINILYFDAANNVVYGKIP

SEQ ID NO: 67924 - protein, 36 aa, Artificial Sequence
  Cyclic GFR-binding peptide
  MOD_RES (6), (7): Xaa is C or S
AVPKAXXAPTKLSPINVLYFDSSNNVIYGKIPNMVV

SEQ ID NO: 67925 - protein, 32 aa, Artificial Sequence
  Cyclic GFR-binding peptide
  MOD_RES (1), (2): Xaa is C or S
XXVPTKLSPINVLYFDDMGVPTYGKIPEGMSV

SEQ ID NO: 67926 - protein, 27 aa, Artificial Sequence
  Cyclic GFR-binding peptide
  MOD_RES (1), (1): Xaa is C or S
XVPTKLSPINVLYFDDMGVPTYGKIPE

SEQ ID NO: 67927 - protein, 29 aa, Artificial Sequence
  Cyclic GFR-binding peptide
  MOD_RES (1), (1): Xaa is C or S
XVPTELSPINMLYFDEYDKVVYGKIPEMV

SEQ ID NO: 67928 - protein, 26 aa, Artificial Sequence
  Cyclic GFR-binding peptide
KLSPINVLYFDSSNNVIYGKIPNMVV

SEQ ID NO: 67929 - protein, 27 aa, Artificial Sequence
  Cyclic GFR-binding peptide
LSPINMLYFDEYDKVVYGKIPEMVVEG

SEQ ID NO: 67930 - protein, 29 aa, Artificial Sequence
  Cyclic GFR-binding peptide
TQLSPINVLYFDDSSNVIYGKIPNMVVRA

SEQ ID NO: 67931 - protein, 32 aa, Artificial Sequence; identical to SEQ ID NO: 21978
  Cyclic GFR-binding peptide

SEQ ID NO: 67932 - protein, 29 aa, Artificial Sequence
  Cyclic GFR-binding peptide
PARLSPINILYFDAANNVVYGKIPDMVVE

SEQ ID NO: 67933 - protein, 27 aa, Artificial Sequence
  Cyclic GFR-binding peptide
APVKTSPINMLYFDNGRVLLYGKIPMI

SEQ ID NO: 67934 - protein, 35 aa, Artificial Sequence; identical to SEQ ID NO: 21982
  Cyclic GFR-binding peptide
  MOD_RES (1), (2), (34): Xaa is C or S

SEQ ID NO: 67935 - protein, 36 aa, Artificial Sequence; identical to SEQ ID NO: 21983
  Cyclic GFR-binding peptide
  MOD_RES (5), (6): Xaa is C or S

SEQ ID NO: 67936 - protein, 40 aa, Artificial Sequence; identical to SEQ ID NO: 21984
  Cyclic GFR-binding peptide
  MOD_RES (7), (39): Xaa is C or S

SEQ ID NO: 67937 - protein, 39 aa, Artificial Sequence; identical to SEQ ID NO: 21985
  Cyclic GFR-binding peptide
  MOD_RES (3), (4), (36), (38): Xaa is C or S

SEQ ID NO: 67938 - protein, 36 aa, Artificial Sequence; identical to SEQ ID NO: 21987
  Cyclic GFR-binding peptide
  MOD_RES (5), (6): Xaa is C or S

SEQ ID NO: 67939 - protein, 37 aa, Artificial Sequence; identical to SEQ ID NO: 21988
  Cyclic GFR-binding peptide
  MOD_RES (3), (4), (35), (37): Xaa is C or S

SEQ ID NO: 67940 - protein, 30 aa, Artificial Sequence
  Cyclic GFR-binding peptide
  MOD_RES (1), (2): Xaa is C or S
XXVPTKLSPINILYFDKGVVTYYGKIPGMA

SEQ ID NO: 67941 - protein, 23 aa, Artificial Sequence
  Cyclic GFR-binding peptide
KLSPINVLYFDSSNNVIYGKIPN

SEQ ID NO: 67942 - protein, 39 aa, Artificial Sequence; identical to SEQ ID NO: 21995
  Cyclic GFR-binding peptide
  MOD_RES (5), (6), (38): Xaa is C or S

SEQ ID NO: 67943 - protein, 25 aa, Artificial Sequence
  Cyclic GFR-binding peptide
TQLSPINVLYFDDSSNVIYGKIPNM

SEQ ID NO: 67944 - protein, 36 aa, Artificial Sequence; identical to SEQ ID NO: 21997
  Cyclic GFR-binding peptide
  MOD_RES (5), (6): Xaa is C or S

SEQ ID NO: 67945 - protein, 37 aa, Artificial Sequence; identical to SEQ ID NO: 21998
  Cyclic GFR-binding peptide
  MOD_RES (2), (3), (35), (37): Xaa is C or S

SEQ ID NO: 67946 - protein, 28 aa, Artificial Sequence
  Cyclic GFR-binding peptide
  MOD_RES (1), (2): Xaa is C or S
XXVPTKLSPINVLYFDDMGVPTYGKIPE

SEQ ID NO: 67947 - protein, 26 aa, Artificial Sequence
  Cyclic GFR-binding peptide
VKTSPINMLYFDNGRVLLYGKIPMIV

SEQ ID NO: 67948 - protein, 29 aa, Artificial Sequence
  Cyclic GFR-binding peptide
  MOD_RES (3), (4): Xaa is C or S
PTXXVPTRLSPINILYFDSANNVVYGKIP

SEQ ID NO: 67949 - protein, 35 aa, Artificial Sequence
  Cyclic GFR-binding peptide
  MOD_RES (5), (6): Xaa is C or S
IPKAXXVPTELSPINMLYFDENEKVVYGKIPDMVV

SEQ ID NO: 67950 - protein, 23 aa, Artificial Sequence
  Cyclic GFR-binding peptide
SPINILYFDKGVVTYYGKIPGMA

SEQ ID NO: 67951 - protein, 27 aa, Artificial Sequence
  Cyclic GFR-binding peptide
  MOD_RES (1), (2): Xaa is C or S
XXVPTELSPINMLYFDEYDKVVYGKIP

SEQ ID NO: 67952 - protein, 33 aa, Artificial Sequence
  Cyclic GFR-binding peptide
  MOD_RES (30), (32): Xaa is C or S
TQLSPINVLYFDDSSNVIYGKIPNMVVRAXGXH

SEQ ID NO: 67953 - protein, 23 aa, Artificial Sequence
  Cyclic GFR-binding peptide
SPINVLYFDDMGVPTYGKIPEGM

SEQ ID NO: 67954 - protein, 30 aa, Artificial Sequence
  Cyclic GFR-binding peptide
  MOD_RES (2), (3): Xaa is C or S
AXXVPTELSPINMLYFDENEKVVYGKIPDM

SEQ ID NO: 67955 - protein, 24 aa, Artificial Sequence
  Cyclic GFR-binding peptide
TELSPINMLYFDENEKVVYGKIPD

SEQ ID NO: 67956 - protein, 36 aa, Artificial Sequence; identical to SEQ ID NO: 22005
  Cyclic GFR-binding peptide
  MOD_RES (1), (33), (35): Xaa is C or S

SEQ ID NO: 67957 - protein, 32 aa, Artificial Sequence
  Cyclic GFR-binding peptide
  MOD_RES (2), (3): Xaa is C or S
AXXVPTKLSPINVLYFDDMGVPTYGKIPEGMS

SEQ ID NO: 67958 - protein, 36 aa, Artificial Sequence; identical to SEQ ID NO: 22012
  Cyclic GFR-binding peptide
  MOD_RES (1), (33), (35): Xaa is C or S

SEQ ID NO: 67959 - protein, 33 aa, Artificial Sequence
  Cyclic GFR-binding peptide
  MOD_RES (4), (5): Xaa is C or S
SKAXXVPTKLSPINILYFDKGVVTYYGKIPGMA

SEQ ID NO: 67960 - protein, 34 aa, Artificial Sequence; identical to SEQ ID NO: 22015
  Cyclic GFR-binding peptide
  MOD_RES (2), (3): Xaa is C or S

SEQ ID NO: 67961 - protein, 33 aa, Artificial Sequence
  Cyclic GFR-binding peptide
  MOD_RES (30), (32): Xaa is C or S
TELSPINMLYFDENEKVVYGKIPDMVVEGXGXR

SEQ ID NO: 67962 - protein, 40 aa, Artificial Sequence; identical to SEQ ID NO: 22019
  Cyclic GFR-binding peptide
  MOD_RES (6), (7), (39): Xaa is C or S

SEQ ID NO: 67963 - protein, 34 aa, Artificial Sequence; identical to SEQ ID NO: 22031
  Cyclic GFR-binding peptide
  MOD_RES (2), (34): Xaa is C or S

SEQ ID NO: 67964 - protein, 28 aa, Artificial Sequence
  Cyclic GFR-binding peptide
  MOD_RES (2), (3): Xaa is C or S
AXXVPTELSPINMLYFDEYDKVVYGKIP

SEQ ID NO: 67965 - protein, 24 aa, Artificial Sequence
  Cyclic GFR-binding peptide
KLSPINILYFDKGVVTYYGKIPGM

SEQ ID NO: 67966 - protein, 36 aa, Artificial Sequence; identical to SEQ ID NO: 22036
  Cyclic GFR-binding peptide
  MOD_RES (1), (2), (34), (36): Xaa is C or S

SEQ ID NO: 67967 - protein, 40 aa, Artificial Sequence; identical to SEQ ID NO: 22035
  Cyclic GFR-binding peptide
  MOD_RES (5), (6), (38), (40): Xaa is C or S

SEQ ID NO: 67968 - protein, 28 aa, Artificial Sequence
  Cyclic GFR-binding peptide
  MOD_RES (1), (2): Xaa is C or S
XXAPVKTSPINMLYFDNGRVLLYGKIPM

SEQ ID NO: 67969 - protein, 35 aa, Artificial Sequence; identical to SEQ ID NO: 22039
  Cyclic GFR-binding peptide
  MOD_RES (1), (2), (34): Xaa is C or S

SEQ ID NO: 67970 - protein, 29 aa, Artificial Sequence
  Cyclic GFR-binding peptide
  MOD_RES (1), (2): Xaa is C or S
XXVPTKLSPINVLYFDDMGVPTYGKIPEG

SEQ ID NO: 67971 - protein, 30 aa, Artificial Sequence
  Cyclic GFR-binding peptide
  MOD_RES (28), (30): Xaa is C or S
LSPINVLYFDDSSNVIYGKIPNMVVRSXGX

SEQ ID NO: 67972 - protein, 27 aa, Artificial Sequence
  Cyclic GFR-binding peptide
PTQLSPINVLYFDDSSNVIYGKIPNMV

SEQ ID NO: 67973 - protein, 32 aa, Artificial Sequence
  Cyclic GFR-binding peptide
  MOD_RES (6), (7): Xaa is C or S
YVPKPXXAPTKLSPINVLYFDDSSNVIYGKIP

SEQ ID NO: 67974 - protein, 34 aa, Artificial Sequence
  Cyclic GFR-binding peptide
  MOD_RES (31), (33): Xaa is C or S
PTRLSPINILYFDSANNVVYGKIPDMVVESXGXR

SEQ ID NO: 67975 - protein, 27 aa, Artificial Sequence
  Cyclic GFR-binding peptide
  MOD_RES (27), (27): Xaa is C or S
SPINVLYFDSSNNVIYGKIPNMVVKAX

SEQ ID NO: 67976 - protein, 23 aa, Artificial Sequence
  Cyclic GFR-binding peptide
ELSPINMLYFDENEKVVYGKIPD

SEQ ID NO: 67977 - protein, 29 aa, Artificial Sequence
  Cyclic GFR-binding peptide
  MOD_RES (2), (3): Xaa is C or S
TXXAPVKTSPINMLYFDNGRVLLYGKIPM

SEQ ID NO: 67978 - protein, 32 aa, Artificial Sequence
  Cyclic GFR-binding peptide
  MOD_RES (29), (31): Xaa is C or S
LSPINVLYFDDMGVPTYGKIPEGMSVAEXGXR

SEQ ID NO: 67979 - protein, 30 aa, Artificial Sequence
  Cyclic GFR-binding peptide
  MOD_RES (2), (3): Xaa is C or S
PXXAPTQLSPINVLYFDDSSNVIYGKIPNM

SEQ ID NO: 67980 - protein, 37 aa, Artificial Sequence; identical to SEQ ID NO: 22046
  Cyclic GFR-binding peptide
  MOD_RES (1), (2), (34), (36): Xaa is C or S

SEQ ID NO: 67981 - protein, 32 aa, Artificial Sequence
  Cyclic GFR-binding peptide
  MOD_RES (3), (3): Xaa is C or S
PTXAPTKLSPINVLYFDDSSNVIYGKIPNMVV

SEQ ID NO: 67982 - protein, 38 aa, Artificial Sequence; identical to SEQ ID NO: 22050
  Cyclic GFR-binding peptide
  MOD_RES (4), (5), (37): Xaa is C or S

SEQ ID NO: 67983 - protein, 26 aa, Artificial Sequence
  Cyclic GFR-binding peptide
TKLSPINVLYFDSSNNVIYGKIPNMV

SEQ ID NO: 67984 - protein, 40 aa, Artificial Sequence; identical to SEQ ID NO: 22052
  Cyclic GFR-binding peptide
  MOD_RES (5), (6), (37), (39): Xaa is C or S

SEQ ID NO: 67985 - protein, 28 aa, Artificial Sequence
  Cyclic GFR-binding peptide
PTELSPINMLYFDEYDKVVYGKIPEMVV

SEQ ID NO: 67986 - protein, 31 aa, Artificial Sequence
  Cyclic GFR-binding peptide
  MOD_RES (28), (30): Xaa is C or S
LSPINMLYFDENEKVVYGKIPDMVVEGXGXR

SEQ ID NO: 67987 - protein, 35 aa, Artificial Sequence; identical to SEQ ID NO: 22054
  Cyclic GFR-binding peptide
  MOD_RES (1), (2), (34): Xaa is C or S

SEQ ID NO: 67988 - protein, 31 aa, Artificial Sequence; identical to SEQ ID NO: 22055
  Cyclic GFR-binding peptide

SEQ ID NO: 67989 - protein, 35 aa, Artificial Sequence; identical to SEQ ID NO: 22056
  Cyclic GFR-binding peptide
  MOD_RES (4), (5): Xaa is C or S

SEQ ID NO: 67990 - protein, 36 aa, Artificial Sequence; identical to SEQ ID NO: 22059
  Cyclic GFR-binding peptide
  MOD_RES (1), (2), (34), (36): Xaa is C or S

SEQ ID NO: 67991 - protein, 33 aa, Artificial Sequence; identical to SEQ ID NO: 22060
  Cyclic GFR-binding peptide
  MOD_RES (2), (3): Xaa is C or S

SEQ ID NO: 67992 - protein, 33 aa, Artificial Sequence
  Cyclic GFR-binding peptide
  MOD_RES (30), (32): Xaa is C or S
TKLSPINVLYFDSSNNVIYGKIPNMVVKAXGXH

SEQ ID NO: 67993 - protein, 34 aa, Artificial Sequence
  Cyclic GFR-binding peptide
  MOD_RES (4), (5): Xaa is C or S
GKAXXVPTKLSPINVLYFDDMGVPTYGKIPEGMS

SEQ ID NO: 67994 - protein, 36 aa, Artificial Sequence
  Cyclic GFR-binding peptide
  MOD_RES (6), (7): Xaa is C or S
AAPASXXVPARLSPINILYFDAANNVVYGKIPDMVV

SEQ ID NO: 67995 - protein, 32 aa, Artificial Sequence
  Cyclic GFR-binding peptide
  MOD_RES (2), (3): Xaa is C or S
AXXAPTKLSPINVLYFDSSNNVIYGKIPNMVV

SEQ ID NO: 67996 - protein, 29 aa, Artificial Sequence
  Cyclic GFR-binding peptide
  MOD_RES (3), (4): Xaa is C or S
KPXXAPTKLSPINVLYFDDSSNVIYGKIP

SEQ ID NO: 67997 - protein, 27 aa, Artificial Sequence
  Cyclic GFR-binding peptide
VPTKLSPINVLYFDDMGVPTYGKIPEG

SEQ ID NO: 67998 - protein, 30 aa, Artificial Sequence
  Cyclic GFR-binding peptide
  MOD_RES (3), (4): Xaa is C or S
PTXXVPTRLSPINILYFDSANNVVYGKIPD

SEQ ID NO: 67999 - protein, 28 aa, Artificial Sequence
  Cyclic GFR-binding peptide
RLSPINILYFDAANNVVYGKIPDMVVEA

SEQ ID NO: 68000 - protein, 33 aa, Artificial Sequence
  Cyclic GFR-binding peptide
  MOD_RES (5), (6): Xaa is C or S
VGKAXXVPTKLSPINVLYFDDMGVPTYGKIPEG

SEQ ID NO: 68001 - protein, 29 aa, Artificial Sequence
  Cyclic GFR-binding peptide
ARLSPINILYFDAANNVVYGKIPDMVVEA

SEQ ID NO: 68002 - protein, 26 aa, Artificial Sequence
  Cyclic GFR-binding peptide
  MOD_RES (1), (1): Xaa is C or S
XVPTKLSPINVLYFDDMGVPTYGKIP

SEQ ID NO: 68003 - protein, 36 aa, Artificial Sequence; identical to SEQ ID NO: 22072
  Cyclic GFR-binding peptide
  MOD_RES (3), (4), (36): Xaa is C or S

SEQ ID NO: 68004 - protein, 35 aa, Artificial Sequence; identical to SEQ ID NO: 22074
  Cyclic GFR-binding peptide
  MOD_RES (5), (5): Xaa is C or S

SEQ ID NO: 68005 - protein, 31 aa, Artificial Sequence
  Cyclic GFR-binding peptide
  MOD_RES (6), (6): Xaa is C or S
VTKPTXAPTKLSPINVLYFDDSSNVIYGKIP

SEQ ID NO: 68006 - protein, 28 aa, Artificial Sequence
  Cyclic GFR-binding peptide
VPTELSPINMLYFDEYDKVVYGKIPEMV

SEQ ID NO: 68007 - protein, 22 aa, Artificial Sequence
  Cyclic GFR-binding peptide
QLSPINVLYFDDSSNVIYGKIP

SEQ ID NO: 68008 - protein, 31 aa, Artificial Sequence
  Cyclic GFR-binding peptide
  MOD_RES (1), (2): Xaa is C or S
XXVPTELSPINMLYFDEYDKVVYGKIPEMVV

SEQ ID NO: 68009 - protein, 35 aa, Artificial Sequence; identical to SEQ ID NO: 22079
  Cyclic GFR-binding peptide
  MOD_RES (2), (3), (35): Xaa is C or S

SEQ ID NO: 68010 - protein, 28 aa, Artificial Sequence
  Cyclic GFR-binding peptide
VPTKLSPINVLYFDDMGVPTYGKIPEGM

SEQ ID NO: 68011 - protein, 27 aa, Artificial Sequence
  Cyclic GFR-binding peptide
  MOD_RES (27), (27): Xaa is C or S
SPINMLYFDEYDKVVYGKIPEMVVEGX

SEQ ID NO: 68012 - protein, 25 aa, Artificial Sequence
  Cyclic GFR-binding peptide
PVKTSPINMLYFDNGRVLLYGKIPM

SEQ ID NO: 68013 - protein, 31 aa, Artificial Sequence
  Cyclic GFR-binding peptide
  MOD_RES (29), (31): Xaa is C or S
QLSPINVLYFDDSSNVIYGKIPNMVVRAXGX

SEQ ID NO: 68014 - protein, 40 aa, Artificial Sequence; identical to SEQ ID NO: 22083
  Cyclic GFR-binding peptide
  MOD_RES (5), (6), (38), (40): Xaa is C or S

SEQ ID NO: 68015 - protein, 37 aa, Artificial Sequence; identical to SEQ ID NO: 22086
  Cyclic GFR-binding peptide
  MOD_RES (2), (3), (35), (37): Xaa is C or S

SEQ ID NO: 68016 - protein, 38 aa, Artificial Sequence; identical to SEQ ID NO: 22087
  Cyclic GFR-binding peptide
  MOD_RES (6), (7): Xaa is C or S

SEQ ID NO: 68017 - protein, 22 aa, Artificial Sequence
  Cyclic GFR-binding peptide
LSPINMLYFDENEKVVYGKIPD

SEQ ID NO: 68018 - protein, 36 aa, Artificial Sequence; identical to SEQ ID NO: 22088
  Cyclic GFR-binding peptide
  MOD_RES (1), (33), (35): Xaa is C or S

SEQ ID NO: 68019 - protein, 28 aa, Artificial Sequence
  Cyclic GFR-binding peptide
  MOD_RES (2), (2): Xaa is C or S
TXAPTKLSPINVLYFDDSSNVIYGKIPN

SEQ ID NO: 68020 - protein, 38 aa, Artificial Sequence; identical to SEQ ID NO: 22090
  Cyclic GFR-binding peptide
  MOD_RES (2), (3), (35), (37): Xaa is C or S

SEQ ID NO: 68021 - protein, 29 aa, Artificial Sequence
  Cyclic GFR-binding peptide
  MOD_RES (29), (29): Xaa is C or S
KLSPINVLYFDSSNNVIYGKIPNMVVKAX

SEQ ID NO: 68022 - protein, 30 aa, Artificial Sequence
  Cyclic GFR-binding peptide
  MOD_RES (3), (4): Xaa is C or S
KPXXAPTKLSPINVLYFDDSSNVIYGKIPN

SEQ ID NO: 68023 - protein, 24 aa, Artificial Sequence
  Cyclic GFR-binding peptide
TKLSPINVLYFDSSNNVIYGKIPN

SEQ ID NO: 68024 - protein, 33 aa, Artificial Sequence; identical to SEQ ID NO: 22094
  Cyclic GFR-binding peptide
  MOD_RES (1), (2): Xaa is C or S

SEQ ID NO: 68025 - protein, 28 aa, Artificial Sequence
  Cyclic GFR-binding peptide
  MOD_RES (27), (27): Xaa is C or S
SPINILYFDAANNVVYGKIPDMVVEAXG

SEQ ID NO: 68026 - protein, 28 aa, Artificial Sequence
  Cyclic GFR-binding peptide
KLSPINILYFDKGVVTYYGKIPGMAVSE

SEQ ID NO: 68027 - protein, 37 aa, Artificial Sequence; identical to SEQ ID NO: 22097
  Cyclic GFR-binding peptide
  MOD_RES (2), (3), (35), (37): Xaa is C or S

SEQ ID NO: 68028 - protein, 35 aa, Artificial Sequence; identical to SEQ ID NO: 22098
  Cyclic GFR-binding peptide
  MOD_RES (3), (4): Xaa is C or S

SEQ ID NO: 68029 - protein, 27 aa, Artificial Sequence
  Cyclic GFR-binding peptide
LSPINVLYFDDSSNVIYGKIPNMVVRS

SEQ ID NO: 68030 - protein, 31 aa, Artificial Sequence
  Cyclic GFR-binding peptide
  MOD_RES (2), (3): Xaa is C or S
PXXAPTQLSPINVLYFDDSSNVIYGKIPNMV

SEQ ID NO: 68031 - protein, 35 aa, Artificial Sequence; identical to SEQ ID NO: 22102
  Cyclic GFR-binding peptide
  MOD_RES (4), (5): Xaa is C or S

SEQ ID NO: 68032 - protein, 32 aa, Artificial Sequence; identical to SEQ ID NO: 22104
  Cyclic GFR-binding peptide
  MOD_RES (1), (1): Xaa is C or S

SEQ ID NO: 68033 - protein, 27 aa, Artificial Sequence
  Cyclic GFR-binding peptide
LSPINVLYFDDSSNVIYGKIPNMVVRA

SEQ ID NO: 68034 - protein, 31 aa, Artificial Sequence
  Cyclic GFR-binding peptide
  MOD_RES (29), (31): Xaa is C or S
ELSPINMLYFDENEKVVYGKIPDMVVEGXGX

SEQ ID NO: 68035 - protein, 36 aa, Artificial Sequence; identical to SEQ ID NO: 22110
  Cyclic GFR-binding peptide
  MOD_RES (4), (5): Xaa is C or S

SEQ ID NO: 68036 - protein, 29 aa, Artificial Sequence
  Cyclic GFR-binding peptide
  MOD_RES (1), (2): Xaa is C or S
XXAPVKTSPINMLYFDNGRVLLYGKIPMI

SEQ ID NO: 68037 - protein, 37 aa, Artificial Sequence; identical to SEQ ID NO: 22111
  Cyclic GFR-binding peptide
  MOD_RES (5), (6): Xaa is C or S

SEQ ID NO: 68038 - protein, 23 aa, Artificial Sequence
  Cyclic GFR-binding peptide
LSPINILYFDKGVVTYYGKIPGM

SEQ ID NO: 68039 - protein, 29 aa, Artificial Sequence
  Cyclic GFR-binding peptide
  MOD_RES (29), (29): Xaa is C or S
ELSPINMLYFDENEKVVYGKIPDMVVEGX

SEQ ID NO: 68040 - protein, 32 aa, Artificial Sequence; identical to SEQ ID NO: 22114
  Cyclic GFR-binding peptide
  MOD_RES (32), (32): Xaa is C or S

SEQ ID NO: 68041 - protein, 31 aa, Artificial Sequence
  Cyclic GFR-binding peptide
  MOD_RES (3), (4): Xaa is C or S
PTXXVPTRLSPINILYFDSANNVVYGKIPDM

SEQ ID NO: 68042 - protein, 34 aa, Artificial Sequence
  Cyclic GFR-binding peptide
  MOD_RES (6), (7): Xaa is C or S
TVPKPXXAPTQLSPINVLYFDDSSNVIYGKIPNM

SEQ ID NO: 68043 - protein, 23 aa, Artificial Sequence
  Cyclic GFR-binding peptide
SPINVLYFDDSSNVIYGKIPNMV

SEQ ID NO: 68044 - protein, 29 aa, Artificial Sequence
  Cyclic GFR-binding peptide
  MOD_RES (2), (3): Xaa is C or S
AXXVPTELSPINMLYFDEYDKVVYGKIPE

SEQ ID NO: 68045 - protein, 33 aa, Artificial Sequence
  Cyclic GFR-binding peptide
  MOD_RES (30), (32): Xaa is C or S
PVKTSPINMLYFDNGRVLLYGKIPMIVEEXGXL

SEQ ID NO: 68046 - protein, 27 aa, Artificial Sequence
  Cyclic GFR-binding peptide
LSPINILYFDAANNVVYGKIPDMVVEA

SEQ ID NO: 68047 - protein, 38 aa, Artificial Sequence; identical to SEQ ID NO: 22119
  Cyclic GFR-binding peptide
  MOD_RES (5), (6), (38): Xaa is C or S

SEQ ID NO: 68048 - protein, 36 aa, Artificial Sequence; identical to SEQ ID NO: 22123
  Cyclic GFR-binding peptide
  MOD_RES (1), (2), (34), (36): Xaa is C or S

SEQ ID NO: 68049 - protein, 34 aa, Artificial Sequence; identical to SEQ ID NO: 22126
  Cyclic GFR-binding peptide
  MOD_RES (2), (3): Xaa is C or S

SEQ ID NO: 68050 - protein, 35 aa, Artificial Sequence
  Cyclic GFR-binding peptide
  MOD_RES (6), (7): Xaa is C or S
STPPTXXVPTRLSPINILYFDSANNVVYGKIPDMV

SEQ ID NO: 68051 - protein, 31 aa, Artificial Sequence
  Cyclic GFR-binding peptide
  MOD_RES (4), (5): Xaa is C or S
GKAXXVPTKLSPINVLYFDDMGVPTYGKIPE

SEQ ID NO: 68052 - protein, 41 aa, Artificial Sequence; identical to SEQ ID NO: 22132
  Cyclic GFR-binding peptide
  MOD_RES (6), (7), (39), (41): Xaa is C or S

SEQ ID NO: 68053 - protein, 29 aa, Artificial Sequence
  Cyclic GFR-binding peptide
  MOD_RES (28), (28): Xaa is C or S
LSPINVLYFDSSNNVIYGKIPNMVVKAXG

SEQ ID NO: 68054 - protein, 26 aa, Artificial Sequence
  Cyclic GFR-binding peptide
LSPINVLYFDDMGVPTYGKIPEGMSV

SEQ ID NO: 68055 - protein, 36 aa, Artificial Sequence; identical to SEQ ID NO: 22134
  Cyclic GFR-binding peptide
  MOD_RES (5), (5): Xaa is C or S

SEQ ID NO: 68056 - protein, 29 aa, Artificial Sequence
  Cyclic GFR-binding peptide
  MOD_RES (29), (29): Xaa is C or S
RLSPINILYFDSANNVVYGKIPDMVVESX

SEQ ID NO: 68057 - protein, 23 aa, Artificial Sequence
  Cyclic GFR-binding peptide
TKLSPINVLYFDDSSNVIYGKIP

SEQ ID NO: 68058 - protein, 33 aa, Artificial Sequence
  Cyclic GFR-binding peptide
  MOD_RES (3), (4): Xaa is C or S
ASXXVPARLSPINILYFDAANNVVYGKIPDMVV

SEQ ID NO: 68059 - protein, 39 aa, Artificial Sequence; identical to SEQ ID NO: 22142
  Cyclic GFR-binding peptide
  MOD_RES (4), (5), (38): Xaa is C or S

SEQ ID NO: 68060 - protein, 29 aa, Artificial Sequence
  Cyclic GFR-binding peptide
  MOD_RES (28), (28): Xaa is C or S
LSPINILYFDSANNVVYGKIPDMVVESXG

SEQ ID NO: 68061 - protein, 28 aa, Artificial Sequence
  Cyclic GFR-binding peptide
  MOD_RES (1), (2): Xaa is C or S
XXAPTKLSPINVLYFDSSNNVIYGKIPN

SEQ ID NO: 68062 - protein, 24 aa, Artificial Sequence
  Cyclic GFR-binding peptide
VKTSPINMLYFDNGRVLLYGKIPM

SEQ ID NO: 68063 - protein, 22 aa, Artificial Sequence
  Cyclic GFR-binding peptide
RLSPINILYFDSANNVVYGKIP

SEQ ID NO: 68064 - protein, 39 aa, Artificial Sequence; identical to SEQ ID NO: 22148
  Cyclic GFR-binding peptide
  MOD_RES (6), (7), (39): Xaa is C or S

SEQ ID NO: 68065 - protein, 30 aa, Artificial Sequence
  Cyclic GFR-binding peptide
  MOD_RES (3), (4): Xaa is C or S
KAXXVPTKLSPINVLYFDDMGVPTYGKIPE

SEQ ID NO: 68066 - protein, 30 aa, Artificial Sequence
  Cyclic GFR-binding peptide
  MOD_RES (4), (5): Xaa is C or S
PKAXXVPTELSPINMLYFDEYDKVVYGKIP

SEQ ID NO: 68067 - protein, 32 aa, Artificial Sequence
  Cyclic GFR-binding peptide
  MOD_RES (5), (6): Xaa is C or S
VPKPXXAPTQLSPINVLYFDDSSNVIYGKIPN

SEQ ID NO: 68068 - protein, 27 aa, Artificial Sequence
  Cyclic GFR-binding peptide
TKLSPINILYFDKGVVTYYGKIPGMAV

SEQ ID NO: 68069 - protein, 25 aa, Artificial Sequence
  Cyclic GFR-binding peptide
TKLSPINVLYFDSSNNVIYGKIPNM

SEQ ID NO: 68070 - protein, 33 aa, Artificial Sequence
  Cyclic GFR-binding peptide
  MOD_RES (4), (5): Xaa is C or S
PASXXVPARLSPINILYFDAANNVVYGKIPDMV

SEQ ID NO: 68071 - protein, 31 aa, Artificial Sequence
  Cyclic GFR-binding peptide
  MOD_RES (5), (6): Xaa is C or S
VPKPXXAPTKLSPINVLYFDDSSNVIYGKIP

SEQ ID NO: 68072 - protein, 33 aa, Artificial Sequence
  Cyclic GFR-binding peptide
  MOD_RES (5), (6): Xaa is C or S
IPKAXXVPTELSPINMLYFDEYDKVVYGKIPEM

SEQ ID NO: 68073 - protein, 31 aa, Artificial Sequence; identical to SEQ ID NO: 22156
  Cyclic GFR-binding peptide

SEQ ID NO: 68074 - protein, 27 aa, Artificial Sequence
  Cyclic GFR-binding peptide
PARLSPINILYFDAANNVVYGKIPDMV

SEQ ID NO: 68075 - protein, 38 aa, Artificial Sequence; identical to SEQ ID NO: 22159
  Cyclic GFR-binding peptide
  MOD_RES (5), (6), (38): Xaa is C or S

SEQ ID NO: 68076 - protein, 34 aa, Artificial Sequence; identical to SEQ ID NO: 22158
  Cyclic GFR-binding peptide
  MOD_RES (32), (34): Xaa is C or S

SEQ ID NO: 68077 - protein, 37 aa, Artificial Sequence; identical to SEQ ID NO: 22160
  Cyclic GFR-binding peptide
  MOD_RES (1), (2), (34), (36): Xaa is C or S

SEQ ID NO: 68078 - protein, 41 aa, Artificial Sequence; identical to SEQ ID NO: 22165
  Cyclic GFR-binding peptide
  MOD_RES (6), (7), (39), (41): Xaa is C or S

SEQ ID NO: 68079 - protein, 27 aa, Artificial Sequence
  Cyclic GFR-binding peptide
VPTKLSPINILYFDKGVVTYYGKIPGM

SEQ ID NO: 68080 - protein, 29 aa, Artificial Sequence
  Cyclic GFR-binding peptide
  MOD_RES (3), (4): Xaa is C or S
STXXAPVKTSPINMLYFDNGRVLLYGKIP

SEQ ID NO: 68081 - protein, 37 aa, Artificial Sequence; identical to SEQ ID NO: 22168
  Cyclic GFR-binding peptide
  MOD_RES (4), (5), (36): Xaa is C or S

SEQ ID NO: 68082 - protein, 36 aa, Artificial Sequence; identical to SEQ ID NO: 22169
  Cyclic GFR-binding peptide
  MOD_RES (1), (2), (34), (36): Xaa is C or S

SEQ ID NO: 68083 - protein, 31 aa, Artificial Sequence
  Cyclic GFR-binding peptide
  MOD_RES (30), (30): Xaa is C or S
TKLSPINVLYFDSSNNVIYGKIPNMVVKAXG

SEQ ID NO: 68084 - protein, 23 aa, Artificial Sequence
  Cyclic GFR-binding peptide
LSPINILYFDAANNVVYGKIPDM

SEQ ID NO: 68085 - protein, 37 aa, Artificial Sequence; identical to SEQ ID NO: 22170
  Cyclic GFR-binding peptide
  MOD_RES (5), (6), (37): Xaa is C or S

SEQ ID NO: 68086 - protein, 26 aa, Artificial Sequence
  Cyclic GFR-binding peptide
VPARLSPINILYFDAANNVVYGKIPD

SEQ ID NO: 68087 - protein, 32 aa, Artificial Sequence; identical to SEQ ID NO: 22174
  Cyclic GFR-binding peptide
  MOD_RES (32), (32): Xaa is C or S

SEQ ID NO: 68088 - protein, 22 aa, Artificial Sequence
  Cyclic GFR-binding peptide
LSPINVLYFDDSSNVIYGKIPN

SEQ ID NO: 68089 - protein, 25 aa, Artificial Sequence
  Cyclic GFR-binding peptide
KLSPINILYFDKGVVTYYGKIPGMA

SEQ ID NO: 68090 - protein, 31 aa, Artificial Sequence
  Cyclic GFR-binding peptide
  MOD_RES (2), (3): Xaa is C or S
AXXVPTKLSPINILYFDKGVVTYYGKIPGMA

SEQ ID NO: 68091 - protein, 42 aa, Artificial Sequence; identical to SEQ ID NO: 22178
  Cyclic GFR-binding peptide
  MOD_RES (6), (7), (39), (41): Xaa is C or S

SEQ ID NO: 68092 - protein, 33 aa, Artificial Sequence
  Cyclic GFR-binding peptide
  MOD_RES (5), (5): Xaa is C or S
TKPTXAPTKLSPINVLYFDDSSNVIYGKIPNMV

SEQ ID NO: 68093 - protein, 32 aa, Artificial Sequence; identical to SEQ ID NO: 22180
  Cyclic GFR-binding peptide
  MOD_RES (1), (32): Xaa is C or S

SEQ ID NO: 68094 - protein, 37 aa, Artificial Sequence; identical to SEQ ID NO: 22182
  Cyclic GFR-binding peptide
  MOD_RES (3), (4), (36): Xaa is C or S

SEQ ID NO: 68095 - protein, 37 aa, Artificial Sequence; identical to SEQ ID NO: 22183
  Cyclic GFR-binding peptide
  MOD_RES (6), (7): Xaa is C or S

SEQ ID NO: 68096 - protein, 21 aa, Artificial Sequence
  Cyclic GFR-binding peptide
LSPINMLYFDENEKVVYGKIP

SEQ ID NO: 68097 - protein, 32 aa, Artificial Sequence; identical to SEQ ID NO: 22186
  Cyclic GFR-binding peptide
  MOD_RES (1), (2): Xaa is C or S

SEQ ID NO: 68098 - protein, 32 aa, Artificial Sequence
  Cyclic GFR-binding peptide
  MOD_RES (5), (6): Xaa is C or S
VPKPXXAPTKLSPINVLYFDDSSNVIYGKIPN

SEQ ID NO: 68099 - protein, 22 aa, Artificial Sequence
  Cyclic GFR-binding peptide
SPINILYFDSANNVVYGKIPDM

SEQ ID NO: 68100 - protein, 26 aa, Artificial Sequence
  Cyclic GFR-binding peptide
  MOD_RES (1), (1): Xaa is C or S
XAPTQLSPINVLYFDDSSNVIYGKIP

SEQ ID NO: 68101 - protein, 38 aa, Artificial Sequence; identical to SEQ ID NO: 22193
  Cyclic GFR-binding peptide
  MOD_RES (6), (7): Xaa is C or S

SEQ ID NO: 68102 - protein, 36 aa, Artificial Sequence; identical to SEQ ID NO: 22194
  Cyclic GFR-binding peptide
  MOD_RES (2), (3), (35): Xaa is C or S

SEQ ID NO: 68103 - protein, 31 aa, Artificial Sequence; identical to SEQ ID NO: 22197
  Cyclic GFR-binding peptide
  MOD_RES (1), (1): Xaa is C or S

SEQ ID NO: 68104 - protein, 35 aa, Artificial Sequence; identical to SEQ ID NO: 22198
  Cyclic GFR-binding peptide
  MOD_RES (4), (5): Xaa is C or S

SEQ ID NO: 68105 - protein, 33 aa, Artificial Sequence; identical to SEQ ID NO: 22201
  Cyclic GFR-binding peptide
  MOD_RES (2), (3): Xaa is C or S

SEQ ID NO: 68106 - protein, 33 aa, Artificial Sequence; identical to SEQ ID NO: 22206
  Cyclic GFR-binding peptide
  MOD_RES (1), (2): Xaa is C or S

SEQ ID NO: 68107 - protein, 30 aa, Artificial Sequence
  Cyclic GFR-binding peptide
PTKLSPINILYFDKGVVTYYGKIPGMAVSE

SEQ ID NO: 68108 - protein, 27 aa, Artificial Sequence
  Cyclic GFR-binding peptide
KLSPINVLYFDDMGVPTYGKIPEGMSV

SEQ ID NO: 68109 - protein, 39 aa, Artificial Sequence; identical to SEQ ID NO: 22208
  Cyclic GFR-binding peptide
  MOD_RES (3), (4), (36), (38): Xaa is C or S

SEQ ID NO: 68110 - protein, 36 aa, Artificial Sequence; identical to SEQ ID NO: 22209
  Cyclic GFR-binding peptide
  MOD_RES (2), (3), (35): Xaa is C or S

SEQ ID NO: 68111 - protein, 24 aa, Artificial Sequence
  Cyclic GFR-binding peptide
KTSPINMLYFDNGRVLLYGKIPMI

SEQ ID NO: 68112 - protein, 34 aa, Artificial Sequence
  Cyclic GFR-binding peptide
  MOD_RES (3), (4): Xaa is C or S
KAXXVPTKLSPINVLYFDDMGVPTYGKIPEGMSV

SEQ ID NO: 68113 - protein, 30 aa, Artificial Sequence
  Cyclic GFR-binding peptide
  MOD_RES (4), (4): Xaa is C or S
KPTXAPTKLSPINVLYFDDSSNVIYGKIPN

SEQ ID NO: 68114 - protein, 28 aa, Artificial Sequence
  Cyclic GFR-binding peptide
  MOD_RES (27), (27): Xaa is C or S
SPINVLYFDDSSNVIYGKIPNMVVRSXG

SEQ ID NO: 68115 - protein, 27 aa, Artificial Sequence
  Cyclic GFR-binding peptide
  MOD_RES (1), (1): Xaa is C or S
XAPVKTSPINMLYFDNGRVLLYGKIPM

SEQ ID NO: 68116 - protein, 36 aa, Artificial Sequence; identical to SEQ ID NO: 22216
  Cyclic GFR-binding peptide
  MOD_RES (1), (2), (34), (36): Xaa is C or S

SEQ ID NO: 68117 - protein, 36 aa, Artificial Sequence; identical to SEQ ID NO: 22218
  Cyclic GFR-binding peptide
  MOD_RES (1), (33), (35): Xaa is C or S

SEQ ID NO: 68118 - protein, 42 aa, Artificial Sequence; identical to SEQ ID NO: 22224
  Cyclic GFR-binding peptide
  MOD_RES (6), (7), (40), (42): Xaa is C or S

SEQ ID NO: 68119 - protein, 39 aa, Artificial Sequence; identical to SEQ ID NO: 22225
  Cyclic GFR-binding peptide
  MOD_RES (4), (5), (37), (39): Xaa is C or S

SEQ ID NO: 68120 - protein, 26 aa, Artificial Sequence
  Cyclic GFR-binding peptide
SPINILYFDAANNVVYGKIPDMVVEA

SEQ ID NO: 68121 - protein, 40 aa, Artificial Sequence; identical to SEQ ID NO: 22227
  Cyclic GFR-binding peptide
  MOD_RES (6), (7), (39): Xaa is C or S

SEQ ID NO: 68122 - protein, 23 aa, Artificial Sequence
  Cyclic GFR-binding peptide
TSPINMLYFDNGRVLLYGKIPMI

SEQ ID NO: 68123 - protein, 35 aa, Artificial Sequence
  Cyclic GFR-binding peptide
  MOD_RES (5), (6): Xaa is C or S
IPKAXXVPTELSPINMLYFDEYDKVVYGKIPEMVV

SEQ ID NO: 68124 - protein, 34 aa, Artificial Sequence; identical to SEQ ID NO: 22235
  Cyclic GFR-binding peptide
  MOD_RES (1), (2), (34): Xaa is C or S

SEQ ID NO: 68125 - protein, 29 aa, Artificial Sequence
  Cyclic GFR-binding peptide
PTRLSPINILYFDSANNVVYGKIPDMVVE

SEQ ID NO: 68126 - protein, 38 aa, Artificial Sequence; identical to SEQ ID NO: 22241
  Cyclic GFR-binding peptide
  MOD_RES (3), (4), (36), (38): Xaa is C or S

SEQ ID NO: 68127 - protein, 31 aa, Artificial Sequence; identical to SEQ ID NO: 22244
  Cyclic GFR-binding peptide

SEQ ID NO: 68128 - protein, 33 aa, Artificial Sequence
  Cyclic GFR-binding peptide
  MOD_RES (3), (4): Xaa is C or S
PTXXVPTRLSPINILYFDSANNVVYGKIPDMVV

SEQ ID NO: 68129 - protein, 32 aa, Artificial Sequence
  Cyclic GFR-binding peptide
  MOD_RES (29), (31): Xaa is C or S
VKTSPINMLYFDNGRVLLYGKIPMIVEEXGXL

SEQ ID NO: 68130 - protein, 40 aa, Artificial Sequence; identical to SEQ ID NO: 22251
  Cyclic GFR-binding peptide
  MOD_RES (4), (5), (37), (39): Xaa is C or S

SEQ ID NO: 68131 - protein, 21 aa, Artificial Sequence
  Cyclic GFR-binding peptide
SPINILYFDKGVVTYYGKIPG

SEQ ID NO: 68132 - protein, 28 aa, Artificial Sequence
  Cyclic GFR-binding peptide
VPTRLSPINILYFDSANNVVYGKIPDMV

SEQ ID NO: 68133 - protein, 24 aa, Artificial Sequence
  Cyclic GFR-binding peptide
ELSPINMLYFDENEKVVYGKIPDM

SEQ ID NO: 68134 - protein, 26 aa, Artificial Sequence
  Cyclic GFR-binding peptide
SPINILYFDKGVVTYYGKIPGMAVSE

SEQ ID NO: 68135 - protein, 26 aa, Artificial Sequence
  Cyclic GFR-binding peptide
  MOD_RES (1), (1): Xaa is C or S
XVPTELSPINMLYFDEYDKVVYGKIP

SEQ ID NO: 68136 - protein, 26 aa, Artificial Sequence
  Cyclic GFR-binding peptide
PTKLSPINILYFDKGVVTYYGKIPGM

SEQ ID NO: 68137 - protein, 28 aa, Artificial Sequence
  Cyclic GFR-binding peptide
  MOD_RES (27), (27): Xaa is C or S
SPINVLYFDDSSNVIYGKIPNMVVRAXG

SEQ ID NO: 68138 - protein, 23 aa, Artificial Sequence
  Cyclic GFR-binding peptide
TKLSPINILYFDKGVVTYYGKIP

SEQ ID NO: 68139 - protein, 29 aa, Artificial Sequence
  Cyclic GFR-binding peptide
  MOD_RES (1), (1): Xaa is C or S
XVPTELSPINMLYFDENEKVVYGKIPDMV

SEQ ID NO: 68140 - protein, 30 aa, Artificial Sequence
  Cyclic GFR-binding peptide
  MOD_RES (30), (30): Xaa is C or S
TELSPINMLYFDENEKVVYGKIPDMVVEGX

SEQ ID NO: 68141 - protein, 25 aa, Artificial Sequence
  Cyclic GFR-binding peptide
PTKLSPINVLYFDSSNNVIYGKIPN

SEQ ID NO: 68142 - protein, 30 aa, Artificial Sequence
  Cyclic GFR-binding peptide
  MOD_RES (2), (2): Xaa is C or S
TXAPTKLSPINVLYFDDSSNVIYGKIPNMV

SEQ ID NO: 68143 - protein, 36 aa, Artificial Sequence; identical to SEQ ID NO: 22257
  Cyclic GFR-binding peptide
  MOD_RES (4), (5): Xaa is C or S

SEQ ID NO: 68144 - protein, 28 aa, Artificial Sequence
  Cyclic GFR-binding peptide
TKLSPINVLYFDDMGVPTYGKIPEGMSV

SEQ ID NO: 68145 - protein, 28 aa, Artificial Sequence
  Cyclic GFR-binding peptide
KLSPINVLYFDSSNNVIYGKIPNMVVKA

SEQ ID NO: 68146 - protein, 27 aa, Artificial Sequence
  Cyclic GFR-binding peptide
  MOD_RES (1), (1): Xaa is C or S
XAPTKLSPINVLYFDSSNNVIYGKIPN

SEQ ID NO: 68147 - protein, 30 aa, Artificial Sequence
  Cyclic GFR-binding peptide
  MOD_RES (29), (29): Xaa is C or S
LSPINVLYFDDMGVPTYGKIPEGMSVAEXG

SEQ ID NO: 68148 - protein, 22 aa, Artificial Sequence
  Cyclic GFR-binding peptide
KLSPINVLYFDSSNNVIYGKIP

SEQ ID NO: 68149 - protein, 37 aa, Artificial Sequence; identical to SEQ ID NO: 22271
  Cyclic GFR-binding peptide
  MOD_RES (4), (5), (37): Xaa is C or S

SEQ ID NO: 68150 - protein, 37 aa, Artificial Sequence; identical to SEQ ID NO: 22272
  Cyclic GFR-binding peptide
  MOD_RES (4), (5), (37): Xaa is C or S

SEQ ID NO: 68151 - protein, 33 aa, Artificial Sequence
  Cyclic GFR-binding peptide
  MOD_RES (7), (7): Xaa is C or S
HVTKPTXAPTKLSPINVLYFDDSSNVIYGKIPN

SEQ ID NO: 68152 - protein, 31 aa, Artificial Sequence; identical to SEQ ID NO: 22279
  Cyclic GFR-binding peptide
  MOD_RES (1), (1): Xaa is C or S

SEQ ID NO: 68153 - protein, 30 aa, Artificial Sequence
  Cyclic GFR-binding peptide
  MOD_RES (2), (3): Xaa is C or S
TXXVPTRLSPINILYFDSANNVVYGKIPDM

SEQ ID NO: 68154 - protein, 34 aa, Artificial Sequence
  Cyclic GFR-binding peptide
  MOD_RES (6), (7): Xaa is C or S
KVGKAXXVPTKLSPINVLYFDDMGVPTYGKIPEG

SEQ ID NO: 68155 - protein, 39 aa, Artificial Sequence; identical to SEQ ID NO: 22284
  Cyclic GFR-binding peptide
  MOD_RES (5), (6), (38): Xaa is C or S

SEQ ID NO: 68156 - protein, 31 aa, Artificial Sequence
  Cyclic GFR-binding peptide
  MOD_RES (2), (3): Xaa is C or S
TXXAPVKTSPINMLYFDNGRVLLYGKIPMIV

SEQ ID NO: 68157 - protein, 29 aa, Artificial Sequence
  Cyclic GFR-binding peptide
PTKLSPINILYFDKGVVTYYGKIPGMAVS

SEQ ID NO: 68158 - protein, 33 aa, Artificial Sequence; identical to SEQ ID NO: 22293
  Cyclic GFR-binding peptide
  MOD_RES (1), (2): Xaa is C or S

SEQ ID NO: 68159 - protein, 31 aa, Artificial Sequence
  Cyclic GFR-binding peptide
  MOD_RES (30), (30): Xaa is C or S
TRLSPINILYFDSANNVVYGKIPDMVVESXG

SEQ ID NO: 68160 - protein, 39 aa, Artificial Sequence; identical to SEQ ID NO: 22296
  Cyclic GFR-binding peptide
  MOD_RES (4), (5), (37), (39): Xaa is C or S

SEQ ID NO: 68161 - protein, 38 aa, Artificial Sequence; identical to SEQ ID NO: 22303
  Cyclic GFR-binding peptide
  MOD_RES (1), (2), (35), (37): Xaa is C or S

SEQ ID NO: 68162 - protein, 32 aa, Artificial Sequence
  Cyclic GFR-binding peptide
  MOD_RES (3), (4): Xaa is C or S
KAXXAPTKLSPINVLYFDSSNNVIYGKIPNMV

SEQ ID NO: 68163 - protein, 30 aa, Artificial Sequence
  Cyclic GFR-binding peptide
  MOD_RES (30), (30): Xaa is C or S
TELSPINMLYFDEYDKVVYGKIPEMVVEGX

SEQ ID NO: 68164 - protein, 30 aa, Artificial Sequence; identical to SEQ ID NO: 22305
  Cyclic GFR-binding peptide

SEQ ID NO: 68165 - protein, 29 aa, Artificial Sequence
  Cyclic GFR-binding peptide
  MOD_RES (28), (28): Xaa is C or S
LSPINMLYFDENEKVVYGKIPDMVVEGXG

SEQ ID NO: 68166 - protein, 39 aa, Artificial Sequence; identical to SEQ ID NO: 22310
  Cyclic GFR-binding peptide
  MOD_RES (6), (7), (38): Xaa is C or S

SEQ ID NO: 68167 - protein, 31 aa, Artificial Sequence
  Cyclic GFR-binding peptide
  MOD_RES (1), (1): Xaa is C or S
XVPTKLSPINVLYFDDMGVPTYGKIPEGMSV

SEQ ID NO: 68168 - protein, 34 aa, Artificial Sequence
  Cyclic GFR-binding peptide
  MOD_RES (6), (7): Xaa is C or S
RVPSTXXAPVKTSPINMLYFDNGRVLLYGKIPMI

SEQ ID NO: 68169 - protein, 33 aa, Artificial Sequence
  Cyclic GFR-binding peptide
  MOD_RES (30), (32): Xaa is C or S
TRLSPINILYFDSANNVVYGKIPDMVVESXGXR

SEQ ID NO: 68170 - protein, 30 aa, Artificial Sequence
  Cyclic GFR-binding peptide
  MOD_RES (3), (4): Xaa is C or S
ASXXVPARLSPINILYFDAANNVVYGKIPD

SEQ ID NO: 68171 - protein, 32 aa, Artificial Sequence
  Cyclic GFR-binding peptide
  MOD_RES (2), (3): Xaa is C or S
TXXVPTRLSPINILYFDSANNVVYGKIPDMVV

SEQ ID NO: 68172 - protein, 32 aa, Artificial Sequence
  Cyclic GFR-binding peptide
  MOD_RES (31), (31): Xaa is C or S
PARLSPINILYFDAANNVVYGKIPDMVVEAXG

SEQ ID NO: 68173 - protein, 34 aa, Artificial Sequence; identical to SEQ ID NO: 22313
  Cyclic GFR-binding peptide
  MOD_RES (3), (4): Xaa is C or S

SEQ ID NO: 68174 - protein, 30 aa, Artificial Sequence
  Cyclic GFR-binding peptide
  MOD_RES (30), (30): Xaa is C or S
TQLSPINVLYFDDSSNVIYGKIPNMVVRAX

SEQ ID NO: 68175 - protein, 24 aa, Artificial Sequence
  Cyclic GFR-binding peptide
TRLSPINILYFDSANNVVYGKIPD

SEQ ID NO: 68176 - protein, 32 aa, Artificial Sequence
  Cyclic GFR-binding peptide
  MOD_RES (5), (6): Xaa is C or S
VPKAXXAPTKLSPINVLYFDSSNNVIYGKIPN

SEQ ID NO: 68177 - protein, 34 aa, Artificial Sequence; identical to SEQ ID NO: 22314
  Cyclic GFR-binding peptide
  MOD_RES (4), (4): Xaa is C or S

SEQ ID NO: 68178 - protein, 34 aa, Artificial Sequence
  Cyclic GFR-binding peptide
  MOD_RES (31), (33): Xaa is C or S
PTKLSPINILYFDKGVVTYYGKIPGMAVSEXGXR

SEQ ID NO: 68179 - protein, 24 aa, Artificial Sequence
  Cyclic GFR-binding peptide
SPINVLYFDSSNNVIYGKIPNMVV

SEQ ID NO: 68180 - protein, 26 aa, Artificial Sequence
  Cyclic GFR-binding peptide
SPINMLYFDEYDKVVYGKIPEMVVEG

SEQ ID NO: 68181 - protein, 36 aa, Artificial Sequence; identical to SEQ ID NO: 22321
  Cyclic GFR-binding peptide
  MOD_RES (3), (4), (36): Xaa is C or S

SEQ ID NO: 68182 - protein, 28 aa, Artificial Sequence
  Cyclic GFR-binding peptide
VPTELSPINMLYFDENEKVVYGKIPDMV

SEQ ID NO: 68183 - protein, 30 aa, Artificial Sequence
  Cyclic GFR-binding peptide
PTKLSPINVLYFDSSNNVIYGKIPNMVVKA

SEQ ID NO: 68184 - protein, 27 aa, Artificial Sequence
  Cyclic GFR-binding peptide
PTRLSPINILYFDSANNVVYGKIPDMV

SEQ ID NO: 68185 - protein, 38 aa, Artificial Sequence; identical to SEQ ID NO: 22325
  Cyclic GFR-binding peptide
  MOD_RES (5), (6), (38): Xaa is C or S

SEQ ID NO: 68186 - protein, 38 aa, Artificial Sequence; identical to SEQ ID NO: 22330
  Cyclic GFR-binding peptide
  MOD_RES (2), (3), (35), (37): Xaa is C or S

SEQ ID NO: 68187 - protein, 41 aa, Artificial Sequence; identical to SEQ ID NO: 22332
  Cyclic GFR-binding peptide
  MOD_RES (5), (6), (38), (40): Xaa is C or S

SEQ ID NO: 68188 - protein, 25 aa, Artificial Sequence
  Cyclic GFR-binding peptide
VPTRLSPINILYFDSANNVVYGKIP

SEQ ID NO: 68189 - protein, 35 aa, Artificial Sequence
  Cyclic GFR-binding peptide
  MOD_RES (6), (7): Xaa is C or S
SIPKAXXVPTELSPINMLYFDEYDKVVYGKIPEMV

SEQ ID NO: 68190 - protein, 33 aa, Artificial Sequence; identical to SEQ ID NO: 22336
  Cyclic GFR-binding peptide
  MOD_RES (33), (33): Xaa is C or S

SEQ ID NO: 68191 - protein, 31 aa, Artificial Sequence
  Cyclic GFR-binding peptide
  MOD_RES (2), (2): Xaa is C or S
TXAPTKLSPINVLYFDDSSNVIYGKIPNMVV

SEQ ID NO: 68192 - protein, 27 aa, Artificial Sequence
  Cyclic GFR-binding peptide
PTELSPINMLYFDENEKVVYGKIPDMV

SEQ ID NO: 68193 - protein, 36 aa, Artificial Sequence
  Cyclic GFR-binding peptide
  MOD_RES (6), (7): Xaa is C or S
HVPKPXXAPTKLSPINVLYFDDSSNVIYGKIPNMVV

SEQ ID NO: 68194 - protein, 31 aa, Artificial Sequence
  Cyclic GFR-binding peptide
  MOD_RES (4), (5): Xaa is C or S
PKAXXVPTELSPINMLYFDEYDKVVYGKIPE

SEQ ID NO: 68195 - protein, 29 aa, Artificial Sequence
  Cyclic GFR-binding peptide
  MOD_RES (1), (1): Xaa is C or S
XVPARLSPINILYFDAANNVVYGKIPDMV

SEQ ID NO: 68196 - protein, 25 aa, Artificial Sequence
  Cyclic GFR-binding peptide
LSPINMLYFDENEKVVYGKIPDMVV

SEQ ID NO: 68197 - protein, 34 aa, Artificial Sequence
  Cyclic GFR-binding peptide
  MOD_RES (5), (6): Xaa is C or S
IPKAXXVPTELSPINMLYFDEYDKVVYGKIPEMV

SEQ ID NO: 68198 - protein, 22 aa, Artificial Sequence
  Cyclic GFR-binding peptide
ELSPINMLYFDENEKVVYGKIP

SEQ ID NO: 68199 - protein, 38 aa, Artificial Sequence
  Cyclic GFR-binding peptide
  MOD_RES (6), (7): Xaa is C or S
KVGKAXXVPTKLSPINVLYFDDMGVPTYGKIPEGMSVA

SEQ ID NO: 68200 - protein, 33 aa, Artificial Sequence; identical to SEQ ID NO: 22340
  Cyclic GFR-binding peptide
  MOD_RES (32), (32): Xaa is C or S

SEQ ID NO: 68201 - protein, 34 aa, Artificial Sequence; identical to SEQ ID NO: 22341
  Cyclic GFR-binding peptide
  MOD_RES (1), (33): Xaa is C or S

SEQ ID NO: 68202 - protein, 30 aa, Artificial Sequence
  Cyclic GFR-binding peptide
  MOD_RES (29), (29): Xaa is C or S
RLSPINILYFDAANNVVYGKIPDMVVEAXG

SEQ ID NO: 68203 - protein, 29 aa, Artificial Sequence
  Cyclic GFR-binding peptide
SPINILYFDKGVVTYYGKIPAAAAAAAAA

SEQ ID NO: 68204 - protein, 27 aa, Artificial Sequence
  Cyclic GFR-binding peptide
  MOD_RES (27), (27): Xaa is C or S
SPINILYFDAANNVVYGKIPDMVVEAX

SEQ ID NO: 68205 - protein, 29 aa, Artificial Sequence
  Cyclic GFR-binding peptide
  MOD_RES (26), (28): Xaa is C or S
SPINMLYFDNGRVLLYGKIPMIVEEXGXL

SEQ ID NO: 68206 - protein, 30 aa, Artificial Sequence
  Cyclic GFR-binding peptide
  MOD_RES (27), (29): Xaa is C or S
SPINVLYFDDSSNVIYGKIPNMVVRAXGXH

SEQ ID NO: 68207 - protein, 31 aa, Artificial Sequence
  Cyclic GFR-binding peptide
  MOD_RES (4), (5): Xaa is C or S
PSTXXAPVKTSPINMLYFDNGRVLLYGKIPM

SEQ ID NO: 68208 - protein, 33 aa, Artificial Sequence
  Cyclic GFR-binding peptide
  MOD_RES (5), (6): Xaa is C or S
TPPTXXVPTRLSPINILYFDSANNVVYGKIPDM

SEQ ID NO: 68209 - protein, 37 aa, Artificial Sequence; identical to SEQ ID NO: 22346
  Cyclic GFR-binding peptide
  MOD_RES (4), (5), (37): Xaa is C or S

SEQ ID NO: 68210 - protein, 26 aa, Artificial Sequence
  Cyclic GFR-binding peptide
  MOD_RES (1), (1): Xaa is C or S
XVPARLSPINILYFDAANNVVYGKIP

SEQ ID NO: 68211 - protein, 31 aa, Artificial Sequence
  Cyclic GFR-binding peptide
  MOD_RES (1), (2): Xaa is C or S
XXVPTKLSPINVLYFDDMGVPTYGKIPEGMS

SEQ ID NO: 68212 - protein, 23 aa, Artificial Sequence
  Cyclic GFR-binding peptide
RLSPINILYFDSANNVVYGKIPD

SEQ ID NO: 68213 - protein, 40 aa, Artificial Sequence; identical to SEQ ID NO: 22347
  Cyclic GFR-binding peptide
  MOD_RES (6), (7), (39): Xaa is C or S

SEQ ID NO: 68214 - protein, 33 aa, Artificial Sequence
  Cyclic GFR-binding peptide
  MOD_RES (31), (33): Xaa is C or S
PTRLSPINILYFDSANNVVYGKIPDMVVESXGX

SEQ ID NO: 68215 - protein, 34 aa, Artificial Sequence; identical to SEQ ID NO: 22348
  Cyclic GFR-binding peptide
  MOD_RES (2), (3): Xaa is C or S

SEQ ID NO: 68216 - protein, 37 aa, Artificial Sequence; identical to SEQ ID NO: 22350
  Cyclic GFR-binding peptide
  MOD_RES (6), (6): Xaa is C or S

SEQ ID NO: 68217 - protein, 34 aa, Artificial Sequence
  Cyclic GFR-binding peptide
  MOD_RES (32), (34): Xaa is C or S
PTKLSPINVLYFDDMGVPTYGKIPEGMSVAEXGX

SEQ ID NO: 68218 - protein, 31 aa, Artificial Sequence
  Cyclic GFR-binding peptide
  MOD_RES (5), (6): Xaa is C or S
IPKAXXVPTELSPINMLYFDEYDKVVYGKIP

SEQ ID NO: 68219 - protein, 26 aa, Artificial Sequence
  Cyclic GFR-binding peptide
PTKLSPINVLYFDSSNNVIYGKIPNM

SEQ ID NO: 68220 - protein, 30 aa, Artificial Sequence
  Cyclic GFR-binding peptide
  MOD_RES (3), (3): Xaa is C or S
PTXAPTKLSPINVLYFDDSSNVIYGKIPNM

SEQ ID NO: 68221 - protein, 35 aa, Artificial Sequence
  Cyclic GFR-binding peptide
  MOD_RES (6), (7): Xaa is C or S
KASKAXXVPTKLSPINILYFDKGVVTYYGKIPGMA

SEQ ID NO: 68222 - protein, 25 aa, Artificial Sequence
  Cyclic GFR-binding peptide
VPTELSPINMLYFDENEKVVYGKIP

SEQ ID NO: 68223 - protein, 32 aa, Artificial Sequence
  Cyclic GFR-binding peptide
  MOD_RES (3), (4): Xaa is C or S
KAXXVPTKLSPINILYFDKGVVTYYGKIPGMA

SEQ ID NO: 68224 - protein, 30 aa, Artificial Sequence
  Cyclic GFR-binding peptide
  MOD_RES (29), (29): Xaa is C or S
QLSPINVLYFDDSSNVIYGKIPNMVVRAXG

SEQ ID NO: 68225 - protein, 30 aa, Artificial Sequence
  Cyclic GFR-binding peptide
  MOD_RES (30), (30): Xaa is C or S
ARLSPINILYFDAANNVVYGKIPDMVVEAX

SEQ ID NO: 68226 - protein, 31 aa, Artificial Sequence; identical to SEQ ID NO: 22355
  Cyclic GFR-binding peptide

SEQ ID NO: 68227 - protein, 33 aa, Artificial Sequence
  Cyclic GFR-binding peptide
  MOD_RES (4), (5): Xaa is C or S
PKAXXAPTKLSPINVLYFDSSNNVIYGKIPNMV

SEQ ID NO: 68228 - protein, 36 aa, Artificial Sequence
  Cyclic GFR-binding peptide
  MOD_RES (6), (7): Xaa is C or S
STPPTXXVPTRLSPINILYFDSANNVVYGKIPDMVV

SEQ ID NO: 68229 - protein, 39 aa, Artificial Sequence; identical to SEQ ID NO: 22358
  Cyclic GFR-binding peptide
  MOD_RES (3), (4), (36), (38): Xaa is C or S

SEQ ID NO: 68230 - protein, 27 aa, Artificial Sequence
  Cyclic GFR-binding peptide
  MOD_RES (1), (1): Xaa is C or S
XVPARLSPINILYFDAANNVVYGKIPD

SEQ ID NO: 68231 - protein, 25 aa, Artificial Sequence
  Cyclic GFR-binding peptide
PTRLSPINILYFDSANNVVYGKIPD

SEQ ID NO: 68232 - protein, 26 aa, Artificial Sequence
  Cyclic GFR-binding peptide
SPINMLYFDENEKVVYGKIPDMVVEG

SEQ ID NO: 68233 - protein, 31 aa, Artificial Sequence
  Cyclic GFR-binding peptide
  MOD_RES (31), (31): Xaa is C or S
TKLSPINVLYFDDMGVPTYGKIPEGMSVAEX

SEQ ID NO: 68234 - protein, 31 aa, Artificial Sequence
  Cyclic GFR-binding peptide
  MOD_RES (28), (30): Xaa is C or S
LSPINILYFDAANNVVYGKIPDMVVEAXGXR

SEQ ID NO: 68235 - protein, 32 aa, Artificial Sequence; identical to SEQ ID NO: 22370
  Cyclic GFR-binding peptide
  MOD_RES (1), (2): Xaa is C or S

SEQ ID NO: 68236 - protein, 36 aa, Artificial Sequence; identical to SEQ ID NO: 22371
  Cyclic GFR-binding peptide
  MOD_RES (4), (5), (36): Xaa is C or S

SEQ ID NO: 68237 - protein, 35 aa, Artificial Sequence; identical to SEQ ID NO: 22372
  Cyclic GFR-binding peptide
  MOD_RES (2), (3), (35): Xaa is C or S

SEQ ID NO: 68238 - protein, 29 aa, Artificial Sequence
  Cyclic GFR-binding peptide
  MOD_RES (1), (2): Xaa is C or S
XXAPTKLSPINVLYFDSSNNVIYGKIPNM

SEQ ID NO: 68239 - protein, 31 aa, Artificial Sequence; identical to SEQ ID NO: 22374
  Cyclic GFR-binding peptide
  MOD_RES (1), (1): Xaa is C or S

SEQ ID NO: 68240 - protein, 30 aa, Artificial Sequence
  Cyclic GFR-binding peptide
  MOD_RES (2), (3): Xaa is C or S
PXXAPTKLSPINVLYFDDSSNVIYGKIPNM

SEQ ID NO: 68241 - protein, 24 aa, Artificial Sequence
  Cyclic GFR-binding peptide
SPINVLYFDDMGVPTYGKIPEGMS

SEQ ID NO: 68242 - protein, 33 aa, Artificial Sequence; identical to SEQ ID NO: 22376
  Cyclic GFR-binding peptide
  MOD_RES (1), (33): Xaa is C or S

SEQ ID NO: 68243 - protein, 34 aa, Artificial Sequence; identical to SEQ ID NO: 22380
  Cyclic GFR-binding peptide
  MOD_RES (3), (4): Xaa is C or S

SEQ ID NO: 68244 - protein, 24 aa, Artificial Sequence
  Cyclic GFR-binding peptide
SPINMLYFDNGRVLLYGKIPMIVE

SEQ ID NO: 68245 - protein, 38 aa, Artificial Sequence; identical to SEQ ID NO: 22386
  Cyclic GFR-binding peptide
  MOD_RES (3), (4), (36), (38): Xaa is C or S

SEQ ID NO: 68246 - protein, 30 aa, Artificial Sequence
  Cyclic GFR-binding peptide
  MOD_RES (29), (29): Xaa is C or S
VKTSPINMLYFDNGRVLLYGKIPMIVEEXG

SEQ ID NO: 68247 - protein, 37 aa, Artificial Sequence; identical to SEQ ID NO: 22387
  Cyclic GFR-binding peptide
  MOD_RES (6), (7): Xaa is C or S

SEQ ID NO: 68248 - protein, 35 aa, Artificial Sequence
  Cyclic GFR-binding peptide
  MOD_RES (5), (6): Xaa is C or S
VPSTXXAPVKTSPINMLYFDNGRVLLYGKIPMIVE

SEQ ID NO: 68249 - protein, 27 aa, Artificial Sequence
  Cyclic GFR-binding peptide
  MOD_RES (27), (27): Xaa is C or S
SPINVLYFDDSSNVIYGKIPNMVVRAX

SEQ ID NO: 68250 - protein, 25 aa, Artificial Sequence
  Cyclic GFR-binding peptide
SPINILYFDKGVVTYYGKIPGMAVS

SEQ ID NO: 68251 - protein, 29 aa, Artificial Sequence
  Cyclic GFR-binding peptide
TKLSPINVLYFDDSSNVIYGKIPNMVVRS

SEQ ID NO: 68252 - protein, 27 aa, Artificial Sequence
  Cyclic GFR-binding peptide
  MOD_RES (1), (2): Xaa is C or S
XXVPARLSPINILYFDAANNVVYGKIP

SEQ ID NO: 68253 - protein, 39 aa, Artificial Sequence; identical to SEQ ID NO: 22398
  Cyclic GFR-binding peptide
  MOD_RES (5), (6), (38): Xaa is C or S

SEQ ID NO: 68254 - protein, 39 aa, Artificial Sequence; identical to SEQ ID NO: 22400
  Cyclic GFR-binding peptide
  MOD_RES (6), (7), (39): Xaa is C or S

SEQ ID NO: 68255 - protein, 40 aa, Artificial Sequence; identical to SEQ ID NO: 22403
  Cyclic GFR-binding peptide
  MOD_RES (3), (4), (37), (39): Xaa is C or S

SEQ ID NO: 68256 - protein, 30 aa, Artificial Sequence
  Cyclic GFR-binding peptide
  MOD_RES (28), (30): Xaa is C or S
LSPINILYFDSANNVVYGKIPDMVVESXGX

SEQ ID NO: 68257 - protein, 37 aa, Artificial Sequence; identical to SEQ ID NO: 22406
  Cyclic GFR-binding peptide
  MOD_RES (5), (6): Xaa is C or S

SEQ ID NO: 68258 - protein, 31 aa, Artificial Sequence
  Cyclic GFR-binding peptide
  MOD_RES (29), (31): Xaa is C or S
KLSPINVLYFDDSSNVIYGKIPNMVVRSXGX

SEQ ID NO: 68259 - protein, 34 aa, Artificial Sequence; identical to SEQ ID NO: 22411
  Cyclic GFR-binding peptide
  MOD_RES (3), (4): Xaa is C or S

SEQ ID NO: 68260 - protein, 25 aa, Artificial Sequence
  Cyclic GFR-binding peptide
LSPINILYFDSANNVVYGKIPDMVV

SEQ ID NO: 68261 - protein, 33 aa, Artificial Sequence; identical to SEQ ID NO: 22412
  Cyclic GFR-binding peptide
  MOD_RES (1), (2): Xaa is C or S

SEQ ID NO: 68262 - protein, 32 aa, Artificial Sequence
  Cyclic GFR-binding peptide
  MOD_RES (4), (5): Xaa is C or S
PKAXXVPTELSPINMLYFDEYDKVVYGKIPEM

SEQ ID NO: 68263 - protein, 32 aa, Artificial Sequence; identical to SEQ ID NO: 22414
  Cyclic GFR-binding peptide
  MOD_RES (1), (2): Xaa is C or S

SEQ ID NO: 68264 - protein, 35 aa, Artificial Sequence; identical to SEQ ID NO: 22415
  Cyclic GFR-binding peptide
  MOD_RES (1), (32), (34): Xaa is C or S

SEQ ID NO: 68265 - protein, 31 aa, Artificial Sequence
  Cyclic GFR-binding peptide
  MOD_RES (28), (30): Xaa is C or S
LSPINVLYFDDSSNVIYGKIPNMVVRSXGXH

SEQ ID NO: 68266 - protein, 33 aa, Artificial Sequence; identical to SEQ ID NO: 22418
  Cyclic GFR-binding peptide
  MOD_RES (3), (3): Xaa is C or S

SEQ ID NO: 68267 - protein, 29 aa, Artificial Sequence
  Cyclic GFR-binding peptide
  MOD_RES (3), (4): Xaa is C or S
KAXXVPTKLSPINILYFDKGVVTYYGKIP

SEQ ID NO: 68268 - protein, 25 aa, Artificial Sequence
  Cyclic GFR-binding peptide
LSPINILYFDKGVVTYYGKIPGMAV

SEQ ID NO: 68269 - protein, 39 aa, Artificial Sequence; identical to SEQ ID NO: 22422
  Cyclic GFR-binding peptide
  MOD_RES (5), (6), (38): Xaa is C or S

SEQ ID NO: 68270 - protein, 42 aa, Artificial Sequence; identical to SEQ ID NO: 22423
  Cyclic GFR-binding peptide
  MOD_RES (6), (7), (39), (41): Xaa is C or S

SEQ ID NO: 68271 - protein, 33 aa, Artificial Sequence
  Cyclic GFR-binding peptide
  MOD_RES (30), (32): Xaa is C or S
TKLSPINILYFDKGVVTYYGKIPGMAVSEXGXR

SEQ ID NO: 68272 - protein, 35 aa, Artificial Sequence; identical to SEQ ID NO: 22428
  Cyclic GFR-binding peptide
  MOD_RES (3), (35): Xaa is C or S

SEQ ID NO: 68273 - protein, 30 aa, Artificial Sequence
  Cyclic GFR-binding peptide
  MOD_RES (1), (1): Xaa is C or S
XVPARLSPINILYFDAANNVVYGKIPDMVV

SEQ ID NO: 68274 - protein, 31 aa, Artificial Sequence
  Cyclic GFR-binding peptide
  MOD_RES (4), (5): Xaa is C or S
PKAXXVPTELSPINMLYFDENEKVVYGKIPD

SEQ ID NO: 68275 - protein, 30 aa, Artificial Sequence
  Cyclic GFR-binding peptide
TKLSPINVLYFDDMGVPTYGKIPEGMSVAE

SEQ ID NO: 68276 - protein, 34 aa, Artificial Sequence
  Cyclic GFR-binding peptide
  MOD_RES (6), (7): Xaa is C or S
YVPKPXXAPTKLSPINVLYFDDSSNVIYGKIPNM

SEQ ID NO: 68277 - protein, 31 aa, Artificial Sequence; identical to SEQ ID NO: 22435
  Cyclic GFR-binding peptide

SEQ ID NO: 68278 - protein, 31 aa, Artificial Sequence
  Cyclic GFR-binding peptide
  MOD_RES (30), (30): Xaa is C or S
TELSPINMLYFDENEKVVYGKIPDMVVEGXG

SEQ ID NO: 68279 - protein, 38 aa, Artificial Sequence; identical to SEQ ID NO: 22445
  Cyclic GFR-binding peptide
  MOD_RES (6), (7), (38): Xaa is C or S

SEQ ID NO: 68280 - protein, 29 aa, Artificial Sequence
  Cyclic GFR-binding peptide
  MOD_RES (29), (29): Xaa is C or S
LSPINVLYFDDMGVPTYGKIPEGMSVAEX

SEQ ID NO: 68281 - protein, 34 aa, Artificial Sequence; identical to SEQ ID NO: 22446
  Cyclic GFR-binding peptide
  MOD_RES (1), (33): Xaa is C or S

SEQ ID NO: 68282 - protein, 29 aa, Artificial Sequence
  Cyclic GFR-binding peptide
  MOD_RES (2), (3): Xaa is C or S
AXXVPTELSPINMLYFDENEKVVYGKIPD

SEQ ID NO: 68283 - protein, 26 aa, Artificial Sequence
  Cyclic GFR-binding peptide
KLSPINVLYFDDMGVPTYGKIPEGMS

SEQ ID NO: 68284 - protein, 23 aa, Artificial Sequence
  Cyclic GFR-binding peptide
TKLSPINVLYFDSSNNVIYGKIP

SEQ ID NO: 68285 - protein, 25 aa, Artificial Sequence
  Cyclic GFR-binding peptide
PTELSPINMLYFDENEKVVYGKIPD

SEQ ID NO: 68286 - protein, 30 aa, Artificial Sequence; identical to SEQ ID NO: 22449
  Cyclic GFR-binding peptide

SEQ ID NO: 68287 - protein, 31 aa, Artificial Sequence
  Cyclic GFR-binding peptide
  MOD_RES (29), (31): Xaa is C or S
KLSPINVLYFDSSNNVIYGKIPNMVVKAXGX

SEQ ID NO: 68288 - protein, 30 aa, Artificial Sequence
  Cyclic GFR-binding peptide
  MOD_RES (2), (3): Xaa is C or S
AXXVPTKLSPINILYFDKGVVTYYGKIPGM

SEQ ID NO: 68289 - protein, 39 aa, Artificial Sequence; identical to SEQ ID NO: 22451
  Cyclic GFR-binding peptide
  MOD_RES (7), (39): Xaa is C or S

SEQ ID NO: 68290 - protein, 32 aa, Artificial Sequence; identical to SEQ ID NO: 22452
  Cyclic GFR-binding peptide
  MOD_RES (1), (1): Xaa is C or S

SEQ ID NO: 68291 - protein, 26 aa, Artificial Sequence
  Cyclic GFR-binding peptide
APVKTSPINMLYFDNGRVLLYGKIPM

SEQ ID NO: 68292 - protein, 33 aa, Artificial Sequence
  Cyclic GFR-binding peptide
  MOD_RES (4), (4): Xaa is C or S
KPTXAPTKLSPINVLYFDDSSNVIYGKIPNMVV

SEQ ID NO: 68293 - protein, 32 aa, Artificial Sequence
  Cyclic GFR-binding peptide
  MOD_RES (30), (32): Xaa is C or S
TRLSPINILYFDSANNVVYGKIPDMVVESXGX

SEQ ID NO: 68294 - protein, 33 aa, Artificial Sequence; identical to SEQ ID NO: 22455
  Cyclic GFR-binding peptide
  MOD_RES (2), (3): Xaa is C or S

SEQ ID NO: 68295 - protein, 37 aa, Artificial Sequence; identical to SEQ ID NO: 22456
  Cyclic GFR-binding peptide
  MOD_RES (1), (2), (35), (37): Xaa is C or S

SEQ ID NO: 68296 - protein, 37 aa, Artificial Sequence; identical to SEQ ID NO: 21454
  Cyclic GFR-binding peptide
  MOD_RES (5), (6): Xaa is C or S

SEQ ID NO: 68297 - protein, 27 aa, Artificial Sequence
  Cyclic GFR-binding peptide
TELSPINMLYFDEYDKVVYGKIPEMVV

SEQ ID NO: 68298 - protein, 22 aa, Artificial Sequence
  Cyclic GFR-binding peptide
LSPINMLYFDEYDKVVYGKIPE

SEQ ID NO: 68299 - protein, 32 aa, Artificial Sequence; identical to SEQ ID NO: 21456
  Cyclic GFR-binding peptide
  MOD_RES (31), (31): Xaa is C or S

SEQ ID NO: 68300 - protein, 35 aa, Artificial Sequence; identical to SEQ ID NO: 21457
  Cyclic GFR-binding peptide
  MOD_RES (3), (4): Xaa is C or S

SEQ ID NO: 68301 - protein, 25 aa, Artificial Sequence
  Cyclic GFR-binding peptide
VPTKLSPINVLYFDDMGVPTYGKIP

SEQ ID NO: 68302 - protein, 27 aa, Artificial Sequence
  Cyclic GFR-binding peptide
  MOD_RES (1), (1): Xaa is C or S
XVPTELSPINMLYFDENEKVVYGKIPD

SEQ ID NO: 68303 - protein, 29 aa, Artificial Sequence
  Cyclic GFR-binding peptide
VPARLSPINILYFDAANNVVYGKIPDMVV

SEQ ID NO: 68304 - protein, 39 aa, Artificial Sequence; identical to SEQ ID NO: 21459
  Cyclic GFR-binding peptide
  MOD_RES (3), (4), (36), (38): Xaa is C or S

SEQ ID NO: 68305 - protein, 35 aa, Artificial Sequence; identical to SEQ ID NO: 21461
  Cyclic GFR-binding peptide
  MOD_RES (2), (3), (35): Xaa is C or S

SEQ ID NO: 68306 - protein, 30 aa, Artificial Sequence
  Cyclic GFR-binding peptide
PARLSPINILYFDAANNVVYGKIPDMVVEA

SEQ ID NO: 68307 - protein, 31 aa, Artificial Sequence
  Cyclic GFR-binding peptide
  MOD_RES (5), (6): Xaa is C or S
TPPTXXVPTRLSPINILYFDSANNVVYGKIP

SEQ ID NO: 68308 - protein, 34 aa, Artificial Sequence; identical to SEQ ID NO: 21466
  Cyclic GFR-binding peptide
  MOD_RES (1), (33): Xaa is C or S

SEQ ID NO: 68309 - protein, 27 aa, Artificial Sequence
  Cyclic GFR-binding peptide
  MOD_RES (26), (26): Xaa is C or S
SPINMLYFDNGRVLLYGKIPMIVEEXG

SEQ ID NO: 68310 - protein, 36 aa, Artificial Sequence; identical to SEQ ID NO: 21470
  Cyclic GFR-binding peptide
  MOD_RES (5), (6): Xaa is C or S

SEQ ID NO: 68311 - protein, 32 aa, Artificial Sequence
  Cyclic GFR-binding peptide
  MOD_RES (3), (4): Xaa is C or S
KPXXAPTQLSPINVLYFDDSSNVIYGKIPNMV

SEQ ID NO: 68312 - protein, 25 aa, Artificial Sequence
  Cyclic GFR-binding peptide
TKLSPINILYFDKGVVTYYGKIPGM

SEQ ID NO: 68313 - protein, 36 aa, Artificial Sequence; identical to SEQ ID NO: 21477
  Cyclic GFR-binding peptide
  MOD_RES (2), (3), (35): Xaa is C or S

SEQ ID NO: 68314 - protein, 21 aa, Artificial Sequence
  Cyclic GFR-binding peptide
LSPINVLYFDDMGVPTYGKIP

SEQ ID NO: 68315 - protein, 42 aa, Artificial Sequence; identical to SEQ ID NO: 21478
  Cyclic GFR-binding peptide
  MOD_RES (5), (6), (39), (41): Xaa is C or S

SEQ ID NO: 68316 - protein, 32 aa, Artificial Sequence
  Cyclic GFR-binding peptide
  MOD_RES (30), (32): Xaa is C or S
PVKTSPINMLYFDNGRVLLYGKIPMIVEEXGX

SEQ ID NO: 68317 - protein, 21 aa, Artificial Sequence
  Cyclic GFR-binding peptide
LSPINVLYFDDSSNVIYGKIP

SEQ ID NO: 68318 - protein, 29 aa, Artificial Sequence
  Cyclic GFR-binding peptide
  MOD_RES (27), (29): Xaa is C or S
SPINILYFDKGVVTYYGKIPGMAVSEXGX

SEQ ID NO: 68319 - protein, 29 aa, Artificial Sequence
  Cyclic GFR-binding peptide
PTELSPINMLYFDEYDKVVYGKIPEMVVE

SEQ ID NO: 68320 - protein, 27 aa, Artificial Sequence
  Cyclic GFR-binding peptide
QLSPINVLYFDDSSNVIYGKIPNMVVR

SEQ ID NO: 68321 - protein, 23 aa, Artificial Sequence
  Cyclic GFR-binding peptide
SPINILYFDAANNVVYGKIPDMV

SEQ ID NO: 68322 - protein, 31 aa, Artificial Sequence
  Cyclic GFR-binding peptide
  MOD_RES (31), (31): Xaa is C or S
PTKLSPINILYFDKGVVTYYGKIPGMAVSEX

SEQ ID NO: 68323 - protein, 26 aa, Artificial Sequence
  Cyclic GFR-binding peptide
SPINVLYFDDSSNVIYGKIPNMVVRS

SEQ ID NO: 68324 - protein, 26 aa, Artificial Sequence
  Cyclic GFR-binding peptide
VPTRLSPINILYFDSANNVVYGKIPD

SEQ ID NO: 68325 - protein, 34 aa, Artificial Sequence; identical to SEQ ID NO: 21491
  Cyclic GFR-binding peptide
  MOD_RES (2), (3): Xaa is C or S

SEQ ID NO: 68326 - protein, 24 aa, Artificial Sequence
  Cyclic GFR-binding peptide
TKLSPINVLYFDDMGVPTYGKIPE

SEQ ID NO: 68327 - protein, 37 aa, Artificial Sequence; identical to SEQ ID NO: 21492
  Cyclic GFR-binding peptide
  MOD_RES (2), (34), (36): Xaa is C or S

SEQ ID NO: 68328 - protein, 24 aa, Artificial Sequence
  Cyclic GFR-binding peptide
TELSPINMLYFDEYDKVVYGKIPE

SEQ ID NO: 68329 - protein, 31 aa, Artificial Sequence
  Cyclic GFR-binding peptide
  MOD_RES (29), (31): Xaa is C or S
VKTSPINMLYFDNGRVLLYGKIPMIVEEXGX

SEQ ID NO: 68330 - protein, 39 aa, Artificial Sequence; identical to SEQ ID NO: 21494
  Cyclic GFR-binding peptide
  MOD_RES (3), (4), (36), (38): Xaa is C or S

SEQ ID NO: 68331 - protein, 37 aa, Artificial Sequence; identical to SEQ ID NO: 21495
  Cyclic GFR-binding peptide
  MOD_RES (2), (3), (36): Xaa is C or S

SEQ ID NO: 68332 - protein, 34 aa, Artificial Sequence; identical to SEQ ID NO: 21497
  Cyclic GFR-binding peptide
  MOD_RES (1), (32), (34): Xaa is C or S

SEQ ID NO: 68333 - protein, 33 aa, Artificial Sequence
  Cyclic GFR-binding peptide
  MOD_RES (3), (4): Xaa is C or S
KAXXVPTKLSPINVLYFDDMGVPTYGKIPEGMS

SEQ ID NO: 68334 - protein, 36 aa, Artificial Sequence; identical to SEQ ID NO: 21499
  Cyclic GFR-binding peptide
  MOD_RES (1), (33), (35): Xaa is C or S

SEQ ID NO: 68335 - protein, 31 aa, Artificial Sequence
  Cyclic GFR-binding peptide
  MOD_RES (3), (4): Xaa is C or S
ASXXVPARLSPINILYFDAANNVVYGKIPDM

SEQ ID NO: 68336 - protein, 23 aa, Artificial Sequence
  Cyclic GFR-binding peptide
TELSPINMLYFDENEKVVYGKIP

SEQ ID NO: 68337 - protein, 35 aa, Artificial Sequence; identical to SEQ ID NO: 21505
  Cyclic GFR-binding peptide
  MOD_RES (1), (33), (35): Xaa is C or S

SEQ ID NO: 68338 - protein, 29 aa, Artificial Sequence
  Cyclic GFR-binding peptide
  MOD_RES (1), (2): Xaa is C or S
XXVPTELSPINMLYFDENEKVVYGKIPDM

SEQ ID NO: 68339 - protein, 26 aa, Artificial Sequence
  Cyclic GFR-binding peptide
APTKLSPINVLYFDSSNNVIYGKIPN

SEQ ID NO: 68340 - protein, 26 aa, Artificial Sequence
  Cyclic GFR-binding peptide
SPINVLYFDDSSNVIYGKIPNMVVRA

SEQ ID NO: 68341 - protein, 39 aa, Artificial Sequence; identical to SEQ ID NO: 21512
  Cyclic GFR-binding peptide
  MOD_RES (6), (38): Xaa is C or S

SEQ ID NO: 68342 - protein, 30 aa, Artificial Sequence
  Cyclic GFR-binding peptide
  MOD_RES (28), (30): Xaa is C or S
LSPINVLYFDDSSNVIYGKIPNMVVRAXGX

SEQ ID NO: 68343 - protein, 32 aa, Artificial Sequence
  Cyclic GFR-binding peptide
  MOD_RES (4), (5): Xaa is C or S
PKAXXAPTKLSPINVLYFDSSNNVIYGKIPNM

SEQ ID NO: 68344 - protein, 36 aa, Artificial Sequence
  Cyclic GFR-binding peptide
  MOD_RES (6), (7): Xaa is C or S
SIPKAXXVPTELSPINMLYFDEYDKVVYGKIPEMVV

SEQ ID NO: 68345 - protein, 32 aa, Artificial Sequence; identical to SEQ ID NO: 21517
  Cyclic GFR-binding peptide
  MOD_RES (1), (1): Xaa is C or S

SEQ ID NO: 68346 - protein, 33 aa, Artificial Sequence
  Cyclic GFR-binding peptide
  MOD_RES (5), (6): Xaa is C or S
ASKAXXVPTKLSPINILYFDKGVVTYYGKIPGM

SEQ ID NO: 68347 - protein, 28 aa, Artificial Sequence
  Cyclic GFR-binding peptide
  MOD_RES (2), (3): Xaa is C or S
AXXVPTKLSPINILYFDKGVVTYYGKIP

SEQ ID NO: 68348 - protein, 27 aa, Artificial Sequence
  Cyclic GFR-binding peptide
  MOD_RES (1), (1): Xaa is C or S
XVPTKLSPINILYFDKGVVTYYGKIPG

SEQ ID NO: 68349 - protein, 31 aa, Artificial Sequence
  Cyclic GFR-binding peptide
  MOD_RES (5), (6): Xaa is C or S
ASKAXXVPTKLSPINILYFDKGVVTYYGKIP

SEQ ID NO: 68350 - protein, 23 aa, Artificial Sequence
  Cyclic GFR-binding peptide
KLSPINVLYFDDMGVPTYGKIPE

SEQ ID NO: 68351 - protein, 37 aa, Artificial Sequence; identical to SEQ ID NO: 21523
  Cyclic GFR-binding peptide
  MOD_RES (5), (6): Xaa is C or S

SEQ ID NO: 68352 - protein, 29 aa, Artificial Sequence
  Cyclic GFR-binding peptide
  MOD_RES (27), (29): Xaa is C or S
SPINVLYFDSSNNVIYGKIPNMVVKAXGX

SEQ ID NO: 68353 - protein, 34 aa, Artificial Sequence; identical to SEQ ID NO: 21522
  Cyclic GFR-binding peptide
  MOD_RES (1), (33): Xaa is C or S

SEQ ID NO: 68354 - protein, 41 aa, Artificial Sequence; identical to SEQ ID NO: 21527
  Cyclic GFR-binding peptide
  MOD_RES (7), (39), (41): Xaa is C or S

SEQ ID NO: 68355 - protein, 30 aa, Artificial Sequence
  Cyclic GFR-binding peptide
  MOD_RES (27), (29): Xaa is C or S
SPINVLYFDSSNNVIYGKIPNMVVKAXGXH

SEQ ID NO: 68356 - protein, 31 aa, Artificial Sequence
  Cyclic GFR-binding peptide
  MOD_RES (28), (30): Xaa is C or S
KTSPINMLYFDNGRVLLYGKIPMIVEEXGXL

SEQ ID NO: 68357 - protein, 20 aa, Artificial Sequence
  Cyclic GFR-binding peptide
SPINMLYFDNGRVLLYGKIP

SEQ ID NO: 68358 - protein, 31 aa, Artificial Sequence
  Cyclic GFR-binding peptide
  MOD_RES (28), (30): Xaa is C or S
LSPINILYFDSANNVVYGKIPDMVVESXGXR

SEQ ID NO: 68359 - protein, 41 aa, Artificial Sequence; identical to SEQ ID NO: 21529
  Cyclic GFR-binding peptide
  MOD_RES (6), (7), (39), (41): Xaa is C or S

SEQ ID NO: 68360 - protein, 31 aa, Artificial Sequence
  Cyclic GFR-binding peptide
  MOD_RES (1), (2): Xaa is C or S
XXAPTQLSPINVLYFDDSSNVIYGKIPNMVV

SEQ ID NO: 68361 - protein, 30 aa, Artificial Sequence
  Cyclic GFR-binding peptide
  MOD_RES (1), (2): Xaa is C or S
XXAPVKTSPINMLYFDNGRVLLYGKIPMIV

SEQ ID NO: 68362 - protein, 32 aa, Artificial Sequence
  Cyclic GFR-binding peptide
  MOD_RES (31), (31): Xaa is C or S
PTKLSPINVLYFDSSNNVIYGKIPNMVVKAXG

SEQ ID NO: 68363 - protein, 38 aa, Artificial Sequence; identical to SEQ ID NO: 21532
  Cyclic GFR-binding peptide
  MOD_RES (5), (6), (38): Xaa is C or S

SEQ ID NO: 68364 - protein, 35 aa, Artificial Sequence; identical to SEQ ID NO: 21534
  Cyclic GFR-binding peptide
  MOD_RES (4), (5): Xaa is C or S

SEQ ID NO: 68365 - protein, 31 aa, Artificial Sequence
  Cyclic GFR-binding peptide
  MOD_RES (30), (30): Xaa is C or S
ARLSPINILYFDAANNVVYGKIPDMVVEAXG

SEQ ID NO: 68366 - protein, 39 aa, Artificial Sequence; identical to SEQ ID NO: 21536
  Cyclic GFR-binding peptide
  MOD_RES (6), (7): Xaa is C or S

SEQ ID NO: 68367 - protein, 31 aa, Artificial Sequence; identical to SEQ ID NO: 21537
  Cyclic GFR-binding peptide

SEQ ID NO: 68368 - protein, 32 aa, Artificial Sequence
  Cyclic GFR-binding peptide
  MOD_RES (4), (5): Xaa is C or S
PASXXVPARLSPINILYFDAANNVVYGKIPDM

SEQ ID NO: 68369 - protein, 28 aa, Artificial Sequence
  Cyclic GFR-binding peptide
  MOD_RES (1), (1): Xaa is C or S
XVPTKLSPINILYFDKGVVTYYGKIPGM

SEQ ID NO: 68370 - protein, 30 aa, Artificial Sequence
  Cyclic GFR-binding peptide
  MOD_RES (27), (29): Xaa is C or S
SPINMLYFDENEKVVYGKIPDMVVEGXGXR

SEQ ID NO: 68371 - protein, 32 aa, Artificial Sequence
  Cyclic GFR-binding peptide
  MOD_RES (2), (3): Xaa is C or S
PXXAPTQLSPINVLYFDDSSNVIYGKIPNMVV

SEQ ID NO: 68372 - protein, 32 aa, Artificial Sequence
  Cyclic GFR-binding peptide
  MOD_RES (29), (31): Xaa is C or S
KLSPINVLYFDDSSNVIYGKIPNMVVRSXGXH

SEQ ID NO: 68373 - protein, 34 aa, Artificial Sequence
  Cyclic GFR-binding peptide
  MOD_RES (4), (5): Xaa is C or S
PKAXXVPTELSPINMLYFDENEKVVYGKIPDMVV

SEQ ID NO: 68374 - protein, 33 aa, Artificial Sequence
  Cyclic GFR-binding peptide
  MOD_RES (6), (7): Xaa is C or S
STPPTXXVPTRLSPINILYFDSANNVVYGKIPD

SEQ ID NO: 68375 - protein, 35 aa, Artificial Sequence; identical to SEQ ID NO: 21545
  Cyclic GFR-binding peptide
  MOD_RES (1), (2), (34): Xaa is C or S

SEQ ID NO: 68376 - protein, 40 aa, Artificial Sequence; identical to SEQ ID NO: 21550
  Cyclic GFR-binding peptide
  MOD_RES (6), (7), (39): Xaa is C or S

SEQ ID NO: 68377 - protein, 36 aa, Artificial Sequence; identical to SEQ ID NO: 21551
  Cyclic GFR-binding peptide
  MOD_RES (2), (3), (35): Xaa is C or S

SEQ ID NO: 68378 - protein, 34 aa, Artificial Sequence; identical to SEQ ID NO: 21552
  Cyclic GFR-binding peptide
  MOD_RES (32), (34): Xaa is C or S

SEQ ID NO: 68379 - protein, 30 aa, Artificial Sequence
  Cyclic GFR-binding peptide
PTQLSPINVLYFDDSSNVIYGKIPNMVVRA

SEQ ID NO: 68380 - protein, 39 aa, Artificial Sequence; identical to SEQ ID NO: 21554
  Cyclic GFR-binding peptide
  MOD_RES (5), (6), (38): Xaa is C or S

SEQ ID NO: 68381 - protein, 27 aa, Artificial Sequence
  Cyclic GFR-binding peptide
VPARLSPINILYFDAANNVVYGKIPDM

SEQ ID NO: 68382 - protein, 22 aa, Artificial Sequence
  Cyclic GFR-binding peptide
SPINMLYFDENEKVVYGKIPDM

SEQ ID NO: 68383 - protein, 36 aa, Artificial Sequence; identical to SEQ ID NO: 21557
  Cyclic GFR-binding peptide
  MOD_RES (4), (5): Xaa is C or S

SEQ ID NO: 68384 - protein, 35 aa, Artificial Sequence; identical to SEQ ID NO: 21559
  Cyclic GFR-binding peptide
  MOD_RES (3), (4), (35): Xaa is C or S

SEQ ID NO: 68385 - protein, 28 aa, Artificial Sequence
  Cyclic GFR-binding peptide
ELSPINMLYFDEYDKVVYGKIPEMVVEG

SEQ ID NO: 68386 - protein, 29 aa, Artificial Sequence
  Cyclic GFR-binding peptide
  MOD_RES (28), (28): Xaa is C or S
LSPINMLYFDEYDKVVYGKIPEMVVEGXG

SEQ ID NO: 68387 - protein, 23 aa, Artificial Sequence
  Cyclic GFR-binding peptide
SPINMLYFDEYDKVVYGKIPEMV

SEQ ID NO: 68388 - protein, 32 aa, Artificial Sequence; identical to SEQ ID NO: 21568
  Cyclic GFR-binding peptide
  MOD_RES (1), (2): Xaa is C or S

SEQ ID NO: 68389 - protein, 33 aa, Artificial Sequence
  Cyclic GFR-binding peptide
  MOD_RES (30), (32): Xaa is C or S
ARLSPINILYFDAANNVVYGKIPDMVVEAXGXR

SEQ ID NO: 68390 - protein, 33 aa, Artificial Sequence; identical to SEQ ID NO: 21575
  Cyclic GFR-binding peptide
  MOD_RES (1), (2): Xaa is C or S

SEQ ID NO: 68391 - protein, 35 aa, Artificial Sequence
  Cyclic GFR-binding peptide
  MOD_RES (5), (6): Xaa is C or S
VPKPXXAPTKLSPINVLYFDDSSNVIYGKIPNMVV

SEQ ID NO: 68392 - protein, 35 aa, Artificial Sequence; identical to SEQ ID NO: 21576
  Cyclic GFR-binding peptide
  MOD_RES (1), (33), (35): Xaa is C or S

SEQ ID NO: 68393 - protein, 37 aa, Artificial Sequence; identical to SEQ ID NO: 21577
  Cyclic GFR-binding peptide
  MOD_RES (3), (4), (36): Xaa is C or S

SEQ ID NO: 68394 - protein, 34 aa, Artificial Sequence; identical to SEQ ID NO: 21581
  Cyclic GFR-binding peptide
  MOD_RES (3), (4): Xaa is C or S

SEQ ID NO: 68395 - protein, 33 aa, Artificial Sequence
  Cyclic GFR-binding peptide
  MOD_RES (5), (6): Xaa is C or S
VPKPXXAPTKLSPINVLYFDDSSNVIYGKIPNM

SEQ ID NO: 68396 - protein, 36 aa, Artificial Sequence; identical to SEQ ID NO: 21589
  Cyclic GFR-binding peptide
  MOD_RES (5), (6): Xaa is C or S

SEQ ID NO: 68397 - protein, 22 aa, Artificial Sequence
  Cyclic GFR-binding peptide
ELSPINMLYFDEYDKVVYGKIP

SEQ ID NO: 68398 - protein, 40 aa, Artificial Sequence; identical to SEQ ID NO: 21595
  Cyclic GFR-binding peptide
  MOD_RES (5), (6), (38), (40): Xaa is C or S

SEQ ID NO: 68399 - protein, 32 aa, Artificial Sequence
  Cyclic GFR-binding peptide
  MOD_RES (4), (4): Xaa is C or S
KPTXAPTKLSPINVLYFDDSSNVIYGKIPNMV

SEQ ID NO: 68400 - protein, 32 aa, Artificial Sequence; identical to SEQ ID NO: 21604
  Cyclic GFR-binding peptide
  MOD_RES (1), (2): Xaa is C or S

SEQ ID NO: 68401 - protein, 36 aa, Artificial Sequence; identical to SEQ ID NO: 21607
  Cyclic GFR-binding peptide
  MOD_RES (2), (3), (35): Xaa is C or S

SEQ ID NO: 68402 - protein, 22 aa, Artificial Sequence
  Cyclic GFR-binding peptide
KTSPINMLYFDNGRVLLYGKIP

SEQ ID NO: 68403 - protein, 30 aa, Artificial Sequence
  Cyclic GFR-binding peptide
  MOD_RES (4), (5): Xaa is C or S
PKAXXAPTKLSPINVLYFDSSNNVIYGKIP

SEQ ID NO: 68404 - protein, 33 aa, Artificial Sequence
  Cyclic GFR-binding peptide
  MOD_RES (31), (33): Xaa is C or S
TKLSPINVLYFDDMGVPTYGKIPEGMSVAEXGX

SEQ ID NO: 68405 - protein, 28 aa, Artificial Sequence
  Cyclic GFR-binding peptide
  MOD_RES (28), (28): Xaa is C or S
LSPINILYFDSANNVVYGKIPDMVVESX

SEQ ID NO: 68406 - protein, 29 aa, Artificial Sequence
  Cyclic GFR-binding peptide
TKLSPINILYFDKGVVTYYGKIPGMAVSE

SEQ ID NO: 68407 - protein, 36 aa, Artificial Sequence
  Cyclic GFR-binding peptide
  MOD_RES (4), (5): Xaa is C or S
GKAXXVPTKLSPINVLYFDDMGVPTYGKIPEGMSVA

SEQ ID NO: 68408 - protein, 36 aa, Artificial Sequence; identical to SEQ ID NO: 21611
  Cyclic GFR-binding peptide
  MOD_RES (1), (2), (34), (36): Xaa is C or S

SEQ ID NO: 68409 - protein, 38 aa, Artificial Sequence; identical to SEQ ID NO: 21613
  Cyclic GFR-binding peptide
  MOD_RES (5), (6), (38): Xaa is C or S

SEQ ID NO: 68410 - protein, 31 aa, Artificial Sequence
  Cyclic GFR-binding peptide
  MOD_RES (4), (5): Xaa is C or S
PKPXXAPTKLSPINVLYFDDSSNVIYGKIPN

SEQ ID NO: 68411 - protein, 40 aa, Artificial Sequence; identical to SEQ ID NO: 21621
  Cyclic GFR-binding peptide
  MOD_RES (5), (37), (39): Xaa is C or S

SEQ ID NO: 68412 - protein, 39 aa, Artificial Sequence; identical to SEQ ID NO: 21622
  Cyclic GFR-binding peptide
  MOD_RES (4), (5), (37), (39): Xaa is C or S

SEQ ID NO: 68413 - protein, 26 aa, Artificial Sequence
  Cyclic GFR-binding peptide
PTELSPINMLYFDEYDKVVYGKIPEM

SEQ ID NO: 68414 - protein, 25 aa, Artificial Sequence
  Cyclic GFR-binding peptide
PTELSPINMLYFDEYDKVVYGKIPE

SEQ ID NO: 68415 - protein, 34 aa, Artificial Sequence; identical to SEQ ID NO: 21627
  Cyclic GFR-binding peptide
  MOD_RES (2), (3): Xaa is C or S

SEQ ID NO: 68416 - protein, 35 aa, Artificial Sequence
  Cyclic GFR-binding peptide
  MOD_RES (6), (7): Xaa is C or S
KVGKAXXVPTKLSPINVLYFDDMGVPTYGKIPEGM

SEQ ID NO: 68417 - protein, 33 aa, Artificial Sequence; identical to SEQ ID NO: 21629
  Cyclic GFR-binding peptide
  MOD_RES (2), (3): Xaa is C or S

SEQ ID NO: 68418 - protein, 30 aa, Artificial Sequence
  Cyclic GFR-binding peptide
  MOD_RES (3), (4): Xaa is C or S
KAXXVPTKLSPINILYFDKGVVTYYGKIPG

SEQ ID NO: 68419 - protein, 32 aa, Artificial Sequence
  Cyclic GFR-binding peptide
  MOD_RES (5), (6): Xaa is C or S
VPSTXXAPVKTSPINMLYFDNGRVLLYGKIPM

SEQ ID NO: 68420 - protein, 32 aa, Artificial Sequence
  Cyclic GFR-binding peptide
  MOD_RES (4), (5): Xaa is C or S
GKAXXVPTKLSPINVLYFDDMGVPTYGKIPEG

SEQ ID NO: 68421 - protein, 39 aa, Artificial Sequence; identical to SEQ ID NO: 21636
  Cyclic GFR-binding peptide
  MOD_RES (4), (5), (37), (39): Xaa is C or S

SEQ ID NO: 68422 - protein, 33 aa, Artificial Sequence; identical to SEQ ID NO: 21639
  Cyclic GFR-binding peptide
  MOD_RES (32), (32): Xaa is C or S

SEQ ID NO: 68423 - protein, 30 aa, Artificial Sequence
  Cyclic GFR-binding peptide
  MOD_RES (1), (1): Xaa is C or S
XAPTKLSPINVLYFDSSNNVIYGKIPNMVV

SEQ ID NO: 68424 - protein, 24 aa, Artificial Sequence
  Cyclic GFR-binding peptide
KLSPINVLYFDSSNNVIYGKIPNM

SEQ ID NO: 68425 - protein, 23 aa, Artificial Sequence
  Cyclic GFR-binding peptide
ELSPINMLYFDEYDKVVYGKIPE

SEQ ID NO: 68426 - protein, 20 aa, Artificial Sequence
  Cyclic GFR-binding peptide
SPINMLYFDEYDKVVYGKIP

SEQ ID NO: 68427 - protein, 28 aa, Artificial Sequence
  Cyclic GFR-binding peptide
  MOD_RES (2), (3): Xaa is C or S
TXXAPVKTSPINMLYFDNGRVLLYGKIP

SEQ ID NO: 68428 - protein, 35 aa, Artificial Sequence; identical to SEQ ID NO: 21644
  Cyclic GFR-binding peptide
  MOD_RES (2), (3): Xaa is C or S

SEQ ID NO: 68429 - protein, 20 aa, Artificial Sequence
  Cyclic GFR-binding peptide
SPINMLYFDENEKVVYGKIP

SEQ ID NO: 68430 - protein, 24 aa, Artificial Sequence
  Cyclic GFR-binding peptide
SPINVLYFDDSSNVIYGKIPNMVV

SEQ ID NO: 68431 - protein, 28 aa, Artificial Sequence
  Cyclic GFR-binding peptide
  MOD_RES (27), (27): Xaa is C or S
SPINMLYFDEYDKVVYGKIPEMVVEGXG

SEQ ID NO: 68432 - protein, 25 aa, Artificial Sequence
  Cyclic GFR-binding peptide
QLSPINVLYFDDSSNVIYGKIPNMV

SEQ ID NO: 68433 - protein, 34 aa, Artificial Sequence
  Cyclic GFR-binding peptide
  MOD_RES (31), (33): Xaa is C or S
PTELSPINMLYFDEYDKVVYGKIPEMVVEGXGXR

SEQ ID NO: 68434 - protein, 33 aa, Artificial Sequence; identical to SEQ ID NO: 21650
  Cyclic GFR-binding peptide
  MOD_RES (32), (32): Xaa is C or S

SEQ ID NO: 68435 - protein, 32 aa, Artificial Sequence
  Cyclic GFR-binding peptide
  MOD_RES (4), (5): Xaa is C or S
PKPXXAPTKLSPINVLYFDDSSNVIYGKIPNM

SEQ ID NO: 68436 - protein, 23 aa, Artificial Sequence
  Cyclic GFR-binding peptide
LSPINMLYFDEYDKVVYGKIPEM

SEQ ID NO: 68437 - protein, 29 aa, Artificial Sequence
  Cyclic GFR-binding peptide
APTKLSPINVLYFDSSNNVIYGKIPNMVV

SEQ ID NO: 68438 - protein, 35 aa, Artificial Sequence; identical to SEQ ID NO: 21652
  Cyclic GFR-binding peptide
  MOD_RES (1), (2), (33), (35): Xaa is C or S

SEQ ID NO: 68439 - protein, 42 aa, Artificial Sequence; identical to SEQ ID NO: 21653
  Cyclic GFR-binding peptide
  MOD_RES (6), (7), (39), (41): Xaa is C or S

SEQ ID NO: 68440 - protein, 26 aa, Artificial Sequence
  Cyclic GFR-binding peptide
VPTKLSPINVLYFDDMGVPTYGKIPE

SEQ ID NO: 68441 - protein, 29 aa, Artificial Sequence
  Cyclic GFR-binding peptide
  MOD_RES (1), (2): Xaa is C or S
XXVPTRLSPINILYFDSANNVVYGKIPDM

SEQ ID NO: 68442 - protein, 32 aa, Artificial Sequence
  Cyclic GFR-binding peptide
  MOD_RES (6), (7): Xaa is C or S
KIPKAXXVPTELSPINMLYFDENEKVVYGKIP

SEQ ID NO: 68443 - protein, 25 aa, Artificial Sequence
  Cyclic GFR-binding peptide
PTKLSPINVLYFDDSSNVIYGKIPN

SEQ ID NO: 68444 - protein, 22 aa, Artificial Sequence
  Cyclic GFR-binding peptide
SPINVLYFDDSSNVIYGKIPNM

SEQ ID NO: 68445 - protein, 30 aa, Artificial Sequence
  Cyclic GFR-binding peptide
  MOD_RES (3), (4): Xaa is C or S
KAXXAPTKLSPINVLYFDSSNNVIYGKIPN

SEQ ID NO: 68446 - protein, 27 aa, Artificial Sequence
  Cyclic GFR-binding peptide
  MOD_RES (1), (1): Xaa is C or S
XAPTKLSPINVLYFDDSSNVIYGKIPN

SEQ ID NO: 68447 - protein, 38 aa, Artificial Sequence; identical to SEQ ID NO: 21663
  Cyclic GFR-binding peptide
  MOD_RES (3), (4), (36), (38): Xaa is C or S

SEQ ID NO: 68448 - protein, 23 aa, Artificial Sequence
  Cyclic GFR-binding peptide
SPINMLYFDNGRVLLYGKIPMIV

SEQ ID NO: 68449 - protein, 25 aa, Artificial Sequence
  Cyclic GFR-binding peptide
APVKTSPINMLYFDNGRVLLYGKIP

SEQ ID NO: 68450 - protein, 26 aa, Artificial Sequence
  Cyclic GFR-binding peptide
VPTELSPINMLYFDEYDKVVYGKIPE

SEQ ID NO: 68451 - protein, 27 aa, Artificial Sequence
  Cyclic GFR-binding peptide
APTKLSPINVLYFDSSNNVIYGKIPNM

SEQ ID NO: 68452 - protein, 28 aa, Artificial Sequence
  Cyclic GFR-binding peptide
  MOD_RES (2), (3): Xaa is C or S
AXXAPTKLSPINVLYFDSSNNVIYGKIP

SEQ ID NO: 68453 - protein, 24 aa, Artificial Sequence
  Cyclic GFR-binding peptide
TKLSPINVLYFDDSSNVIYGKIPN

SEQ ID NO: 68454 - protein, 24 aa, Artificial Sequence
  Cyclic GFR-binding peptide
QLSPINVLYFDDSSNVIYGKIPNM

SEQ ID NO: 68455 - protein, 32 aa, Artificial Sequence
  Cyclic GFR-binding peptide
  MOD_RES (29), (31): Xaa is C or S
KLSPINVLYFDSSNNVIYGKIPNMVVKAXGXH

SEQ ID NO: 68456 - protein, 35 aa, Artificial Sequence
  Cyclic GFR-binding peptide
  MOD_RES (4), (5): Xaa is C or S
GKAXXVPTKLSPINVLYFDDMGVPTYGKIPEGMSV

SEQ ID NO: 68457 - protein, 28 aa, Artificial Sequence
  Cyclic GFR-binding peptide
APTKLSPINVLYFDDSSNVIYGKIPNMV

SEQ ID NO: 68458 - protein, 31 aa, Artificial Sequence
  Cyclic GFR-binding peptide
  MOD_RES (3), (4): Xaa is C or S
KPXXAPTKLSPINVLYFDDSSNVIYGKIPNM

SEQ ID NO: 68459 - protein, 38 aa, Artificial Sequence; identical to SEQ ID NO: 21679
  Cyclic GFR-binding peptide
  MOD_RES (4), (5), (37): Xaa is C or S

SEQ ID NO: 68460 - protein, 29 aa, Artificial Sequence
  Cyclic GFR-binding peptide
  MOD_RES (1), (1): Xaa is C or S
XVPTRLSPINILYFDSANNVVYGKIPDMV

SEQ ID NO: 68461 - protein, 21 aa, Artificial Sequence
  Cyclic GFR-binding peptide
SPINILYFDAANNVVYGKIPD

SEQ ID NO: 68462 - protein, 33 aa, Artificial Sequence
  Cyclic GFR-binding peptide
  MOD_RES (5), (6): Xaa is C or S
VPKPXXAPTQLSPINVLYFDDSSNVIYGKIPNM

SEQ ID NO: 68463 - protein, 28 aa, Artificial Sequence
  Cyclic GFR-binding peptide
PVKTSPINMLYFDNGRVLLYGKIPMIVE

SEQ ID NO: 68464 - protein, 39 aa, Artificial Sequence; identical to SEQ ID NO: 21687
  Cyclic GFR-binding peptide
  MOD_RES (3), (4), (37), (39): Xaa is C or S

SEQ ID NO: 68465 - protein, 35 aa, Artificial Sequence
  Cyclic GFR-binding peptide
  MOD_RES (6), (7): Xaa is C or S
TVPKPXXAPTQLSPINVLYFDDSSNVIYGKIPNMV

SEQ ID NO: 68466 - protein, 34 aa, Artificial Sequence; identical to SEQ ID NO: 21688
  Cyclic GFR-binding peptide
  MOD_RES (2), (3): Xaa is C or S

SEQ ID NO: 68467 - protein, 29 aa, Artificial Sequence
  Cyclic GFR-binding peptide
  MOD_RES (2), (3): Xaa is C or S
AXXVPTKLSPINILYFDKGVVTYYGKIPG

SEQ ID NO: 68468 - protein, 32 aa, Artificial Sequence; identical to SEQ ID NO: 21689
  Cyclic GFR-binding peptide
  MOD_RES (1), (1): Xaa is C or S

SEQ ID NO: 68469 - protein, 33 aa, Artificial Sequence
  Cyclic GFR-binding peptide
  MOD_RES (31), (33): Xaa is C or S
PTQLSPINVLYFDDSSNVIYGKIPNMVVRAXGX

SEQ ID NO: 68470 - protein, 39 aa, Artificial Sequence; identical to SEQ ID NO: 21690
  Cyclic GFR-binding peptide
  MOD_RES (4), (5), (37), (39): Xaa is C or S

SEQ ID NO: 68471 - protein, 36 aa, Artificial Sequence; identical to SEQ ID NO: 21693
  Cyclic GFR-binding peptide
  MOD_RES (3), (4), (36): Xaa is C or S

SEQ ID NO: 68472 - protein, 29 aa, Artificial Sequence
  Cyclic GFR-binding peptide
  MOD_RES (29), (29): Xaa is C or S
KLSPINILYFDKGVVTYYGKIPGMAVSEX

SEQ ID NO: 68473 - protein, 29 aa, Artificial Sequence
  Cyclic GFR-binding peptide
  MOD_RES (4), (4): Xaa is C or S
KPTXAPTKLSPINVLYFDDSSNVIYGKIP

SEQ ID NO: 68474 - protein, 26 aa, Artificial Sequence
  Cyclic GFR-binding peptide
PVKTSPINMLYFDNGRVLLYGKIPMI

SEQ ID NO: 68475 - protein, 32 aa, Artificial Sequence
  Cyclic GFR-binding peptide
  MOD_RES (3), (4): Xaa is C or S
KAXXVPTELSPINMLYFDEYDKVVYGKIPEMV

SEQ ID NO: 68476 - protein, 28 aa, Artificial Sequence
  Cyclic GFR-binding peptide
TRLSPINILYFDSANNVVYGKIPDMVVE

SEQ ID NO: 68477 - protein, 32 aa, Artificial Sequence; identical to SEQ ID NO: 21696
  Cyclic GFR-binding peptide
  MOD_RES (1), (2): Xaa is C or S

SEQ ID NO: 68478 - protein, 29 aa, Artificial Sequence
  Cyclic GFR-binding peptide
  MOD_RES (2), (3): Xaa is C or S
AXXAPTKLSPINVLYFDSSNNVIYGKIPN

SEQ ID NO: 68479 - protein, 30 aa, Artificial Sequence
  Cyclic GFR-binding peptide
  MOD_RES (28), (30): Xaa is C or S
SPINVLYFDDMGVPTYGKIPEGMSVAEXGX

SEQ ID NO: 68480 - protein, 28 aa, Artificial Sequence
  Cyclic GFR-binding peptide
APVKTSPINMLYFDNGRVLLYGKIPMIV

SEQ ID NO: 68481 - protein, 30 aa, Artificial Sequence
  Cyclic GFR-binding peptide
  MOD_RES (1), (2): Xaa is C or S
XXAPTKLSPINVLYFDSSNNVIYGKIPNMV

SEQ ID NO: 68482 - protein, 36 aa, Artificial Sequence; identical to SEQ ID NO: 21699
  Cyclic GFR-binding peptide
  MOD_RES (4), (5): Xaa is C or S

SEQ ID NO: 68483 - protein, 27 aa, Artificial Sequence
  Cyclic GFR-binding peptide
  MOD_RES (1), (2): Xaa is C or S
XXVPTELSPINMLYFDENEKVVYGKIP

SEQ ID NO: 68484 - protein, 28 aa, Artificial Sequence
  Cyclic GFR-binding peptide
  MOD_RES (1), (1): Xaa is C or S
XAPVKTSPINMLYFDNGRVLLYGKIPMI

SEQ ID NO: 68485 - protein, 30 aa, Artificial Sequence
  Cyclic GFR-binding peptide
  MOD_RES (1), (1): Xaa is C or S
XAPTKLSPINVLYFDDSSNVIYGKIPNMVV

SEQ ID NO: 68486 - protein, 31 aa, Artificial Sequence
  Cyclic GFR-binding peptide
  MOD_RES (3), (4): Xaa is C or S
KAXXAPTKLSPINVLYFDSSNNVIYGKIPNM

SEQ ID NO: 68487 - protein, 23 aa, Artificial Sequence
  Cyclic GFR-binding peptide
VKTSPINMLYFDNGRVLLYGKIP

SEQ ID NO: 68488 - protein, 42 aa, Artificial Sequence; identical to SEQ ID NO: 21705
  Cyclic GFR-binding peptide
  MOD_RES (6), (7), (39), (41): Xaa is C or S

SEQ ID NO: 68489 - protein, 27 aa, Artificial Sequence
  Cyclic GFR-binding peptide
LSPINMLYFDENEKVVYGKIPDMVVEG

SEQ ID NO: 68490 - protein, 37 aa, Artificial Sequence; identical to SEQ ID NO: 21714
  Cyclic GFR-binding peptide
  MOD_RES (2), (3), (35), (37): Xaa is C or S

SEQ ID NO: 68491 - protein, 33 aa, Artificial Sequence
  Cyclic GFR-binding peptide
  MOD_RES (31), (33): Xaa is C or S
PARLSPINILYFDAANNVVYGKIPDMVVEAXGX

SEQ ID NO: 68492 - protein, 35 aa, Artificial Sequence; identical to SEQ ID NO: 21718
  Cyclic GFR-binding peptide
  MOD_RES (1), (2), (34): Xaa is C or S

SEQ ID NO: 68493 - protein, 32 aa, Artificial Sequence
  Cyclic GFR-binding peptide
  MOD_RES (6), (7): Xaa is C or S
TVPKPXXAPTQLSPINVLYFDDSSNVIYGKIP

SEQ ID NO: 68494 - protein, 26 aa, Artificial Sequence
  Cyclic GFR-binding peptide
KLSPINVLYFDDSSNVIYGKIPNMVV

SEQ ID NO: 68495 - protein, 41 aa, Artificial Sequence; identical to SEQ ID NO: 21723
  Cyclic GFR-binding peptide
  MOD_RES (6), (7), (38), (40): Xaa is C or S

SEQ ID NO: 68496 - protein, 25 aa, Artificial Sequence
  Cyclic GFR-binding peptide
PTKLSPINVLYFDDMGVPTYGKIPE

SEQ ID NO: 68497 - protein, 32 aa, Artificial Sequence; identical to SEQ ID NO: 21727
  Cyclic GFR-binding peptide
  MOD_RES (1), (2): Xaa is C or S

SEQ ID NO: 68498 - protein, 30 aa, Artificial Sequence
  Cyclic GFR-binding peptide
  MOD_RES (1), (2): Xaa is C or S
XXVPTELSPINMLYFDENEKVVYGKIPDMV

SEQ ID NO: 68499 - protein, 28 aa, Artificial Sequence
  Cyclic GFR-binding peptide
  MOD_RES (2), (3): Xaa is C or S
PXXAPTQLSPINVLYFDDSSNVIYGKIP

SEQ ID NO: 68500 - protein, 36 aa, Artificial Sequence; identical to SEQ ID NO: 21730
  Cyclic GFR-binding peptide
  MOD_RES (1), (33), (35): Xaa is C or S

SEQ ID NO: 68501 - protein, 28 aa, Artificial Sequence
  Cyclic GFR-binding peptide
PTRLSPINILYFDSANNVVYGKIPDMVV

SEQ ID NO: 68502 - protein, 23 aa, Artificial Sequence
  Cyclic GFR-binding peptide
TELSPINMLYFDEYDKVVYGKIP

SEQ ID NO: 68503 - protein, 34 aa, Artificial Sequence
  Cyclic GFR-binding peptide
  MOD_RES (5), (6): Xaa is C or S
TPPTXXVPTRLSPINILYFDSANNVVYGKIPDMV

SEQ ID NO: 68504 - protein, 22 aa, Artificial Sequence
  Cyclic GFR-binding peptide
LSPINILYFDSANNVVYGKIPD

SEQ ID NO: 68505 - protein, 29 aa, Artificial Sequence
  Cyclic GFR-binding peptide
  MOD_RES (2), (3): Xaa is C or S
TXXVPTRLSPINILYFDSANNVVYGKIPD

SEQ ID NO: 68506 - protein, 38 aa, Artificial Sequence; identical to SEQ ID NO: 21743
  Cyclic GFR-binding peptide
  MOD_RES (4), (5), (37): Xaa is C or S

SEQ ID NO: 68507 - protein, 27 aa, Artificial Sequence
  Cyclic GFR-binding peptide
KTSPINMLYFDNGRVLLYGKIPMIVEE

SEQ ID NO: 68508 - protein, 33 aa, Artificial Sequence; identical to SEQ ID NO: 21744
  Cyclic GFR-binding peptide
  MOD_RES (2), (3): Xaa is C or S

SEQ ID NO: 68509 - protein, 29 aa, Artificial Sequence
  Cyclic GFR-binding peptide
  MOD_RES (28), (28): Xaa is C or S
LSPINVLYFDDSSNVIYGKIPNMVVRAXG

SEQ ID NO: 68510 - protein, 38 aa, Artificial Sequence; identical to SEQ ID NO: 21748
  Cyclic GFR-binding peptide
  MOD_RES (3), (35), (37): Xaa is C or S

SEQ ID NO: 68511 - protein, 25 aa, Artificial Sequence
  Cyclic GFR-binding peptide
VPARLSPINILYFDAANNVVYGKIP

SEQ ID NO: 68512 - protein, 26 aa, Artificial Sequence
  Cyclic GFR-binding peptide
APTQLSPINVLYFDDSSNVIYGKIPN

SEQ ID NO: 68513 - protein, 31 aa, Artificial Sequence
  Cyclic GFR-binding peptide
  MOD_RES (29), (31): Xaa is C or S
KLSPINILYFDKGVVTYYGKIPGMAVSEXGX

SEQ ID NO: 68514 - protein, 40 aa, Artificial Sequence; identical to SEQ ID NO: 21751
  Cyclic GFR-binding peptide
  MOD_RES (6), (7), (39): Xaa is C or S

SEQ ID NO: 68515 - protein, 29 aa, Artificial Sequence
  Cyclic GFR-binding peptide
  MOD_RES (2), (3): Xaa is C or S
SXXVPARLSPINILYFDAANNVVYGKIPD

SEQ ID NO: 68516 - protein, 34 aa, Artificial Sequence
  Cyclic GFR-binding peptide
  MOD_RES (31), (33): Xaa is C or S
PTQLSPINVLYFDDSSNVIYGKIPNMVVRAXGXH

SEQ ID NO: 68517 - protein, 26 aa, Artificial Sequence
  Cyclic GFR-binding peptide
  MOD_RES (1), (1): Xaa is C or S
XVPTKLSPINILYFDKGVVTYYGKIP

SEQ ID NO: 68518 - protein, 33 aa, Artificial Sequence; identical to SEQ ID NO: 21756
  Cyclic GFR-binding peptide
  MOD_RES (1), (33): Xaa is C or S

SEQ ID NO: 68519 - protein, 28 aa, Artificial Sequence
  Cyclic GFR-binding peptide
  MOD_RES (1), (1): Xaa is C or S
XVPTELSPINMLYFDENEKVVYGKIPDM

SEQ ID NO: 68520 - protein, 30 aa, Artificial Sequence
  Cyclic GFR-binding peptide
  MOD_RES (30), (30): Xaa is C or S
KLSPINVLYFDDMGVPTYGKIPEGMSVAEX

SEQ ID NO: 68521 - protein, 36 aa, Artificial Sequence; identical to SEQ ID NO: 21758
  Cyclic GFR-binding peptide
  MOD_RES (2), (3), (35): Xaa is C or S

SEQ ID NO: 68522 - protein, 34 aa, Artificial Sequence
  Cyclic GFR-binding peptide
  MOD_RES (5), (6): Xaa is C or S
VPKAXXAPTKLSPINVLYFDSSNNVIYGKIPNMV

SEQ ID NO: 68523 - protein, 37 aa, Artificial Sequence; identical to SEQ ID NO: 21760
  Cyclic GFR-binding peptide
  MOD_RES (4), (5): Xaa is C or S

SEQ ID NO: 68524 - protein, 35 aa, Artificial Sequence
  Cyclic GFR-binding peptide
  MOD_RES (5), (6): Xaa is C or S
ASKAXXVPTKLSPINILYFDKGVVTYYGKIPGMAV

SEQ ID NO: 68525 - protein, 34 aa, Artificial Sequence
  Cyclic GFR-binding peptide
  MOD_RES (4), (5): Xaa is C or S
PKPXXAPTKLSPINVLYFDDSSNVIYGKIPNMVV

SEQ ID NO: 68526 - protein, 30 aa, Artificial Sequence
  Cyclic GFR-binding peptide
  MOD_RES (29), (29): Xaa is C or S
KLSPINVLYFDSSNNVIYGKIPNMVVKAXG

SEQ ID NO: 68527 - protein, 31 aa, Artificial Sequence
  Cyclic GFR-binding peptide
  MOD_RES (2), (3): Xaa is C or S
PXXAPTKLSPINVLYFDDSSNVIYGKIPNMV

SEQ ID NO: 68528 - protein, 35 aa, Artificial Sequence
  Cyclic GFR-binding peptide
  MOD_RES (7), (7): Xaa is C or S
HVTKPTXAPTKLSPINVLYFDDSSNVIYGKIPNMV

SEQ ID NO: 68529 - protein, 36 aa, Artificial Sequence
  Cyclic GFR-binding peptide
  MOD_RES (6), (7): Xaa is C or S
KASKAXXVPTKLSPINILYFDKGVVTYYGKIPGMAV

SEQ ID NO: 68530 - protein, 26 aa, Artificial Sequence
  Cyclic GFR-binding peptide
  MOD_RES (1), (1): Xaa is C or S
XAPTKLSPINVLYFDSSNNVIYGKIP

SEQ ID NO: 68531 - protein, 36 aa, Artificial Sequence; identical to SEQ ID NO: 21771
  Cyclic GFR-binding peptide
  MOD_RES (1), (2), (33), (35): Xaa is C or S

SEQ ID NO: 68532 - protein, 30 aa, Artificial Sequence; identical to SEQ ID NO: 21772
  Cyclic GFR-binding peptide

SEQ ID NO: 68533 - protein, 30 aa, Artificial Sequence
  Cyclic GFR-binding peptide
  MOD_RES (27), (29): Xaa is C or S
SPINMLYFDEYDKVVYGKIPEMVVEGXGXR

SEQ ID NO: 68534 - protein, 37 aa, Artificial Sequence; identical to SEQ ID NO: 21773
  Cyclic GFR-binding peptide
  MOD_RES (3), (4), (37): Xaa is C or S

SEQ ID NO: 68535 - protein, 33 aa, Artificial Sequence
  Cyclic GFR-binding peptide
  MOD_RES (31), (33): Xaa is C or S
PTKLSPINILYFDKGVVTYYGKIPGMAVSEXGX

SEQ ID NO: 68536 - protein, 33 aa, Artificial Sequence; identical to SEQ ID NO: 21775
  Cyclic GFR-binding peptide
  MOD_RES (1), (33): Xaa is C or S

SEQ ID NO: 68537 - protein, 35 aa, Artificial Sequence; identical to SEQ ID NO: 21777
  Cyclic GFR-binding peptide
  MOD_RES (2), (3), (35): Xaa is C or S

SEQ ID NO: 68538 - protein, 34 aa, Artificial Sequence
  Cyclic GFR-binding peptide
  MOD_RES (6), (7): Xaa is C or S
AAPASXXVPARLSPINILYFDAANNVVYGKIPDM

SEQ ID NO: 68539 - protein, 21 aa, Artificial Sequence
  Cyclic GFR-binding peptide
SPINMLYFDNGRVLLYGKIPM

SEQ ID NO: 68540 - protein, 29 aa, Artificial Sequence
  Cyclic GFR-binding peptide
  MOD_RES (2), (2): Xaa is C or S
TXAPTKLSPINVLYFDDSSNVIYGKIPNM

SEQ ID NO: 68541 - protein, 21 aa, Artificial Sequence
  Cyclic GFR-binding peptide
SPINVLYFDDMGVPTYGKIPE

SEQ ID NO: 68542 - protein, 41 aa, Artificial Sequence; identical to SEQ ID NO: 21792
  Cyclic GFR-binding peptide
  MOD_RES (5), (6), (39), (41): Xaa is C or S

SEQ ID NO: 68543 - protein, 35 aa, Artificial Sequence; identical to SEQ ID NO: 21794
  Cyclic GFR-binding peptide
  MOD_RES (1), (2), (34): Xaa is C or S

SEQ ID NO: 68544 - protein, 22 aa, Artificial Sequence
  Cyclic GFR-binding peptide
SPINVLYFDDMGVPTYGKIPEG

SEQ ID NO: 68545 - protein, 30 aa, Artificial Sequence
  Cyclic GFR-binding peptide
  MOD_RES (28), (30): Xaa is C or S
KTSPINMLYFDNGRVLLYGKIPMIVEEXGX

SEQ ID NO: 68546 - protein, 36 aa, Artificial Sequence; identical to SEQ ID NO: 21800
  Cyclic GFR-binding peptide
  MOD_RES (3), (4): Xaa is C or S

SEQ ID NO: 68547 - protein, 24 aa, Artificial Sequence
  Cyclic GFR-binding peptide
PTQLSPINVLYFDDSSNVIYGKIP

SEQ ID NO: 68548 - protein, 31 aa, Artificial Sequence
  Cyclic GFR-binding peptide
  MOD_RES (1), (2): Xaa is C or S
XXVPTELSPINMLYFDENEKVVYGKIPDMVV

SEQ ID NO: 68549 - protein, 39 aa, Artificial Sequence; identical to SEQ ID NO: 21802
  Cyclic GFR-binding peptide
  MOD_RES (5), (37), (39): Xaa is C or S

SEQ ID NO: 68550 - protein, 31 aa, Artificial Sequence
  Cyclic GFR-binding peptide
  MOD_RES (4), (5): Xaa is C or S
PASXXVPARLSPINILYFDAANNVVYGKIPD

SEQ ID NO: 68551 - protein, 25 aa, Artificial Sequence
  Cyclic GFR-binding peptide
LSPINVLYFDDSSNVIYGKIPNMVV

SEQ ID NO: 68552 - protein, 31 aa, Artificial Sequence
  Cyclic GFR-binding peptide
  MOD_RES (4), (5): Xaa is C or S
PPTXXVPTRLSPINILYFDSANNVVYGKIPD

SEQ ID NO: 68553 - protein, 32 aa, Artificial Sequence
  Cyclic GFR-binding peptide
  MOD_RES (5), (6): Xaa is C or S
TPPTXXVPTRLSPINILYFDSANNVVYGKIPD

SEQ ID NO: 68554 - protein, 28 aa, Artificial Sequence
  Cyclic GFR-binding peptide
  MOD_RES (2), (3): Xaa is C or S
AXXVPTKLSPINVLYFDDMGVPTYGKIP

SEQ ID NO: 68555 - protein, 21 aa, Artificial Sequence
  Cyclic GFR-binding peptide
LSPINILYFDSANNVVYGKIP

SEQ ID NO: 68556 - protein, 32 aa, Artificial Sequence; identical to SEQ ID NO: 21809
  Cyclic GFR-binding peptide
  MOD_RES (1), (1): Xaa is C or S

SEQ ID NO: 68557 - protein, 34 aa, Artificial Sequence; identical to SEQ ID NO: 21810
  Cyclic GFR-binding peptide
  MOD_RES (1), (33): Xaa is C or S

SEQ ID NO: 68558 - protein, 28 aa, Artificial Sequence
  Cyclic GFR-binding peptide
TKLSPINILYFDKGVVTYYGKIPGMAVS

SEQ ID NO: 68559 - protein, 34 aa, Artificial Sequence; identical to SEQ ID NO: 21814
  Cyclic GFR-binding peptide
  MOD_RES (1), (2), (34): Xaa is C or S

SEQ ID NO: 68560 - protein, 34 aa, Artificial Sequence
  Cyclic GFR-binding peptide
  MOD_RES (4), (5): Xaa is C or S
PKAXXAPTKLSPINVLYFDSSNNVIYGKIPNMVV

SEQ ID NO: 68561 - protein, 28 aa, Artificial Sequence
  Cyclic GFR-binding peptide
PARLSPINILYFDAANNVVYGKIPDMVV

SEQ ID NO: 68562 - protein, 30 aa, Artificial Sequence
  Cyclic GFR-binding peptide
PTKLSPINVLYFDDMGVPTYGKIPEGMSVA

SEQ ID NO: 68563 - protein, 22 aa, Artificial Sequence
  Cyclic GFR-binding peptide
LSPINVLYFDSSNNVIYGKIPN

SEQ ID NO: 68564 - protein, 31 aa, Artificial Sequence
  Cyclic GFR-binding peptide
  MOD_RES (28), (30): Xaa is C or S
LSPINVLYFDDSSNVIYGKIPNMVVRAXGXH

SEQ ID NO: 68565 - protein, 26 aa, Artificial Sequence
  Cyclic GFR-binding peptide
VPTKLSPINILYFDKGVVTYYGKIPG

SEQ ID NO: 68566 - protein, 26 aa, Artificial Sequence
  Cyclic GFR-binding peptide
RLSPINILYFDAANNVVYGKIPDMVV

SEQ ID NO: 68567 - protein, 28 aa, Artificial Sequence
  Cyclic GFR-binding peptide
PTQLSPINVLYFDDSSNVIYGKIPNMVV

SEQ ID NO: 68568 - protein, 32 aa, Artificial Sequence; identical to SEQ ID NO: 21823
  Cyclic GFR-binding peptide
  MOD_RES (32), (32): Xaa is C or S

SEQ ID NO: 68569 - protein, 30 aa, Artificial Sequence
  Cyclic GFR-binding peptide
  MOD_RES (29), (29): Xaa is C or S
ELSPINMLYFDENEKVVYGKIPDMVVEGXG

SEQ ID NO: 68570 - protein, 34 aa, Artificial Sequence; identical to SEQ ID NO: 21829
  Cyclic GFR-binding peptide
  MOD_RES (32), (34): Xaa is C or S

SEQ ID NO: 68571 - protein, 29 aa, Artificial Sequence
  Cyclic GFR-binding peptide
  MOD_RES (27), (29): Xaa is C or S
SPINILYFDAANNVVYGKIPDMVVEAXGX

SEQ ID NO: 68572 - protein, 24 aa, Artificial Sequence
  Cyclic GFR-binding peptide
SPINILYFDSANNVVYGKIPDMVV

SEQ ID NO: 68573 - protein, 34 aa, Artificial Sequence; identical to SEQ ID NO: 21832
  Cyclic GFR-binding peptide
  MOD_RES (1), (2), (34): Xaa is C or S

SEQ ID NO: 68574 - protein, 21 aa, Artificial Sequence
  Cyclic GFR-binding peptide
SPINVLYFDDSSNVIYGKIPN

SEQ ID NO: 68575 - protein, 33 aa, Artificial Sequence
  Cyclic GFR-binding peptide
  MOD_RES (6), (7): Xaa is C or S
TVPKPXXAPTQLSPINVLYFDDSSNVIYGKIPN

SEQ ID NO: 68576 - protein, 31 aa, Artificial Sequence
  Cyclic GFR-binding peptide
  MOD_RES (30), (30): Xaa is C or S
TQLSPINVLYFDDSSNVIYGKIPNMVVRAXG

SEQ ID NO: 68577 - protein, 29 aa, Artificial Sequence
  Cyclic GFR-binding peptide
PTKLSPINVLYFDDMGVPTYGKIPEGMSV

SEQ ID NO: 68578 - protein, 31 aa, Artificial Sequence
  Cyclic GFR-binding peptide
  MOD_RES (3), (4): Xaa is C or S
KPXXAPTQLSPINVLYFDDSSNVIYGKIPNM

SEQ ID NO: 68579 - protein, 35 aa, Artificial Sequence
  Cyclic GFR-binding peptide
  MOD_RES (6), (7): Xaa is C or S
AAPASXXVPARLSPINILYFDAANNVVYGKIPDMV

SEQ ID NO: 68580 - protein, 23 aa, Artificial Sequence
  Cyclic GFR-binding peptide
SPINMLYFDENEKVVYGKIPDMV

SEQ ID NO: 68581 - protein, 37 aa, Artificial Sequence; identical to SEQ ID NO: 21837
  Cyclic GFR-binding peptide
  MOD_RES (1), (2), (34), (36): Xaa is C or S

SEQ ID NO: 68582 - protein, 34 aa, Artificial Sequence
  Cyclic GFR-binding peptide
  MOD_RES (31), (33): Xaa is C or S
PTELSPINMLYFDENEKVVYGKIPDMVVEGXGXR

SEQ ID NO: 68583 - protein, 31 aa, Artificial Sequence
  Cyclic GFR-binding peptide
  MOD_RES (3), (4): Xaa is C or S
KAXXVPTKLSPINVLYFDDMGVPTYGKIPEG

SEQ ID NO: 68584 - protein, 27 aa, Artificial Sequence
  Cyclic GFR-binding peptide
LSPINVLYFDDMGVPTYGKIPEGMSVA

SEQ ID NO: 68585 - protein, 25 aa, Artificial Sequence
  Cyclic GFR-binding peptide
VPTKLSPINILYFDKGVVTYYGKIP

SEQ ID NO: 68586 - protein, 28 aa, Artificial Sequence
  Cyclic GFR-binding peptide
ELSPINMLYFDENEKVVYGKIPDMVVEG

SEQ ID NO: 68587 - protein, 38 aa, Artificial Sequence; identical to SEQ ID NO: 21848
  Cyclic GFR-binding peptide
  MOD_RES (3), (4), (36), (38): Xaa is C or S

SEQ ID NO: 68588 - protein, 38 aa, Artificial Sequence; identical to SEQ ID NO: 21849
  Cyclic GFR-binding peptide
  MOD_RES (7), (7): Xaa is C or S

SEQ ID NO: 68589 - protein, 31 aa, Artificial Sequence
  Cyclic GFR-binding peptide
  MOD_RES (30), (30): Xaa is C or S
TKLSPINVLYFDDSSNVIYGKIPNMVVRSXG

SEQ ID NO: 68590 - protein, 29 aa, Artificial Sequence
  Cyclic GFR-binding peptide
  MOD_RES (3), (4): Xaa is C or S
ASXXVPARLSPINILYFDAANNVVYGKIP

SEQ ID NO: 68591 - protein, 34 aa, Artificial Sequence; identical to SEQ ID NO: 21851
  Cyclic GFR-binding peptide
  MOD_RES (32), (34): Xaa is C or S

SEQ ID NO: 68592 - protein, 27 aa, Artificial Sequence
  Cyclic GFR-binding peptide
  MOD_RES (27), (27): Xaa is C or S
SPINVLYFDDSSNVIYGKIPNMVVRSX

SEQ ID NO: 68593 - protein, 34 aa, Artificial Sequence
  Cyclic GFR-binding peptide
  MOD_RES (4), (5): Xaa is C or S
PKAXXVPTELSPINMLYFDEYDKVVYGKIPEMVV

SEQ ID NO: 68594 - protein, 30 aa, Artificial Sequence
  Cyclic GFR-binding peptide
  MOD_RES (3), (4): Xaa is C or S
KAXXVPTELSPINMLYFDEYDKVVYGKIPE

SEQ ID NO: 68595 - protein, 20 aa, Artificial Sequence
  Cyclic GFR-binding peptide
SPINILYFDAANNVVYGKIP

SEQ ID NO: 68596 - protein, 31 aa, Artificial Sequence
  Cyclic GFR-binding peptide
  MOD_RES (1), (2): Xaa is C or S
XXVPTKLSPINILYFDKGVVTYYGKIPGMAV

SEQ ID NO: 68597 - protein, 28 aa, Artificial Sequence
  Cyclic GFR-binding peptide
  MOD_RES (27), (27): Xaa is C or S
SPINILYFDSANNVVYGKIPDMVVESXG

SEQ ID NO: 68598 - protein, 33 aa, Artificial Sequence; identical to SEQ ID NO: 21855
  Cyclic GFR-binding peptide
  MOD_RES (31), (33): Xaa is C or S

SEQ ID NO: 68599 - protein, 37 aa, Artificial Sequence; identical to SEQ ID NO: 21858
  Cyclic GFR-binding peptide
  MOD_RES (5), (6): Xaa is C or S

SEQ ID NO: 68600 - protein, 25 aa, Artificial Sequence
  Cyclic GFR-binding peptide
APTKLSPINVLYFDSSNNVIYGKIP

SEQ ID NO: 68601 - protein, 27 aa, Artificial Sequence
  Cyclic GFR-binding peptide
  MOD_RES (27), (27): Xaa is C or S
TSPINMLYFDNGRVLLYGKIPMIVEEX

SEQ ID NO: 68602 - protein, 23 aa, Artificial Sequence
  Cyclic GFR-binding peptide
KLSPINVLYFDDSSNVIYGKIPN

SEQ ID NO: 68603 - protein, 32 aa, Artificial Sequence
  Cyclic GFR-binding peptide
  MOD_RES (5), (6): Xaa is C or S
IPKAXXVPTELSPINMLYFDENEKVVYGKIPD

SEQ ID NO: 68604 - protein, 29 aa, Artificial Sequence
  Cyclic GFR-binding peptide
VPTELSPINMLYFDEYDKVVYGKIPEMVV

SEQ ID NO: 68605 - protein, 37 aa, Artificial Sequence; identical to SEQ ID NO: 21865
  Cyclic GFR-binding peptide
  MOD_RES (6), (7): Xaa is C or S

SEQ ID NO: 68606 - protein, 22 aa, Artificial Sequence
  Cyclic GFR-binding peptide
SPINMLYFDNGRVLLYGKIPMI

SEQ ID NO: 68607 - protein, 29 aa, Artificial Sequence
  Cyclic GFR-binding peptide
SPINMLYFDNGRVLLYGKIPAAAAAAAAA

SEQ ID NO: 68608 - protein, 35 aa, Artificial Sequence
  Cyclic GFR-binding peptide
  MOD_RES (3), (4): Xaa is C or S
KAXXVPTKLSPINVLYFDDMGVPTYGKIPEGMSVA

SEQ ID NO: 68609 - protein, 36 aa, Artificial Sequence; identical to SEQ ID NO: 21866
  Cyclic GFR-binding peptide
  MOD_RES (3), (4), (36): Xaa is C or S

SEQ ID NO: 68610 - protein, 26 aa, Artificial Sequence
  Cyclic GFR-binding peptide
PARLSPINILYFDAANNVVYGKIPDM

SEQ ID NO: 68611 - protein, 37 aa, Artificial Sequence; identical to SEQ ID NO: 21877
  Cyclic GFR-binding peptide
  MOD_RES (4), (5), (37): Xaa is C or S

SEQ ID NO: 68612 - protein, 27 aa, Artificial Sequence
  Cyclic GFR-binding peptide
ARLSPINILYFDAANNVVYGKIPDMVV

SEQ ID NO: 68613 - protein, 31 aa, Artificial Sequence
  Cyclic GFR-binding peptide
  MOD_RES (5), (6): Xaa is C or S
VPKAXXAPTKLSPINVLYFDSSNNVIYGKIP

SEQ ID NO: 68614 - protein, 27 aa, Artificial Sequence
  Cyclic GFR-binding peptide
TKLSPINVLYFDSSNNVIYGKIPNMVV

SEQ ID NO: 68615 - protein, 26 aa, Artificial Sequence
  Cyclic GFR-binding peptide
  MOD_RES (1), (1): Xaa is C or S
XAPVKTSPINMLYFDNGRVLLYGKIP

SEQ ID NO: 68616 - protein, 29 aa, Artificial Sequence
  Cyclic GFR-binding peptide
  MOD_RES (28), (28): Xaa is C or S
LSPINVLYFDDSSNVIYGKIPNMVVRSXG

SEQ ID NO: 68617 - protein, 32 aa, Artificial Sequence
  Cyclic GFR-binding peptide
  MOD_RES (30), (32): Xaa is C or S
KLSPINVLYFDDMGVPTYGKIPEGMSVAEXGX

SEQ ID NO: 68618 - protein, 38 aa, Artificial Sequence; identical to SEQ ID NO: 21883
  Cyclic GFR-binding peptide
  MOD_RES (2), (3), (35), (37): Xaa is C or S

SEQ ID NO: 68619 - protein, 35 aa, Artificial Sequence
  Cyclic GFR-binding peptide
  MOD_RES (5), (6): Xaa is C or S
APASXXVPARLSPINILYFDAANNVVYGKIPDMVV

SEQ ID NO: 68620 - protein, 32 aa, Artificial Sequence; identical to SEQ ID NO: 21888
  Cyclic GFR-binding peptide
  MOD_RES (1), (1): Xaa is C or S

SEQ ID NO: 68621 - protein, 27 aa, Artificial Sequence
  Cyclic GFR-binding peptide
  MOD_RES (1), (2): Xaa is C or S
XXVPTRLSPINILYFDSANNVVYGKIP

SEQ ID NO: 68622 - protein, 29 aa, Artificial Sequence
  Cyclic GFR-binding peptide
  MOD_RES (28), (28): Xaa is C or S
KTSPINMLYFDNGRVLLYGKIPMIVEEXG

SEQ ID NO: 68623 - protein, 32 aa, Artificial Sequence
  Cyclic GFR-binding peptide
  MOD_RES (30), (32): Xaa is C or S
TELSPINMLYFDENEKVVYGKIPDMVVEGXGX

SEQ ID NO: 68624 - protein, 28 aa, Artificial Sequence
  Cyclic GFR-binding peptide
TELSPINMLYFDEYDKVVYGKIPEMVVE

SEQ ID NO: 68625 - protein, 32 aa, Artificial Sequence; identical to SEQ ID NO: 21892
  Cyclic GFR-binding peptide
  MOD_RES (2), (2): Xaa is C or S

SEQ ID NO: 68626 - protein, 31 aa, Artificial Sequence
  Cyclic GFR-binding peptide
  MOD_RES (2), (3): Xaa is C or S
TXXVPTRLSPINILYFDSANNVVYGKIPDMV

SEQ ID NO: 68627 - protein, 37 aa, Artificial Sequence; identical to SEQ ID NO: 21894
  Cyclic GFR-binding peptide
  MOD_RES (1), (2), (34), (36): Xaa is C or S

SEQ ID NO: 68628 - protein, 30 aa, Artificial Sequence
  Cyclic GFR-binding peptide
  MOD_RES (27), (29): Xaa is C or S
SPINVLYFDDSSNVIYGKIPNMVVRSXGXH

SEQ ID NO: 68629 - protein, 37 aa, Artificial Sequence; identical to SEQ ID NO: 21895
  Cyclic GFR-binding peptide
  MOD_RES (2), (3), (35), (37): Xaa is C or S

SEQ ID NO: 68630 - protein, 35 aa, Artificial Sequence; identical to SEQ ID NO: 21899
  Cyclic GFR-binding peptide
  MOD_RES (2), (34): Xaa is C or S

SEQ ID NO: 68631 - protein, 24 aa, Artificial Sequence
  Cyclic GFR-binding peptide
TSPINMLYFDNGRVLLYGKIPMIV

SEQ ID NO: 68632 - protein, 26 aa, Artificial Sequence
  Cyclic GFR-binding peptide
VPTELSPINMLYFDENEKVVYGKIPD

SEQ ID NO: 68633 - protein, 23 aa, Artificial Sequence
  Cyclic GFR-binding peptide
TQLSPINVLYFDDSSNVIYGKIP

SEQ ID NO: 68634 - protein, 30 aa, Artificial Sequence
  Cyclic GFR-binding peptide
  MOD_RES (3), (4): Xaa is C or S
KAXXVPTELSPINMLYFDENEKVVYGKIPD

SEQ ID NO: 68635 - protein, 25 aa, Artificial Sequence
  Cyclic GFR-binding peptide
TKLSPINVLYFDDSSNVIYGKIPNM

SEQ ID NO: 68636 - protein, 31 aa, Artificial Sequence
  Cyclic GFR-binding peptide
  MOD_RES (2), (3): Xaa is C or S
SXXVPARLSPINILYFDAANNVVYGKIPDMV

SEQ ID NO: 68637 - protein, 29 aa, Artificial Sequence
  Cyclic GFR-binding peptide
TELSPINMLYFDENEKVVYGKIPDMVVEG

SEQ ID NO: 68638 - protein, 23 aa, Artificial Sequence
  Cyclic GFR-binding peptide
TRLSPINILYFDSANNVVYGKIP

SEQ ID NO: 68639 - protein, 34 aa, Artificial Sequence; identical to SEQ ID NO: 21902
  Cyclic GFR-binding peptide
  MOD_RES (1), (2), (34): Xaa is C or S

SEQ ID NO: 68640 - protein, 30 aa, Artificial Sequence
  Cyclic GFR-binding peptide
  MOD_RES (27), (29): Xaa is C or S
SPINILYFDKGVVTYYGKIPGMAVSEXGXR

SEQ ID NO: 68641 - protein, 40 aa, Artificial Sequence; identical to SEQ ID NO: 21903
  Cyclic GFR-binding peptide
  MOD_RES (6), (7), (39): Xaa is C or S

SEQ ID NO: 68642 - protein, 24 aa, Artificial Sequence
  Cyclic GFR-binding peptide
PVKTSPINMLYFDNGRVLLYGKIP

SEQ ID NO: 68643 - protein, 32 aa, Artificial Sequence
  Cyclic GFR-binding peptide
  MOD_RES (3), (4): Xaa is C or S
KAXXVPTKLSPINVLYFDDMGVPTYGKIPEGM

SEQ ID NO: 68644 - protein, 30 aa, Artificial Sequence
  Cyclic GFR-binding peptide
  MOD_RES (3), (4): Xaa is C or S
KPXXAPTQLSPINVLYFDDSSNVIYGKIPN

SEQ ID NO: 68645 - protein, 32 aa, Artificial Sequence
  Cyclic GFR-binding peptide
  MOD_RES (31), (31): Xaa is C or S
PTELSPINMLYFDENEKVVYGKIPDMVVEGXG

SEQ ID NO: 68646 - protein, 35 aa, Artificial Sequence; identical to SEQ ID NO: 21915
  Cyclic GFR-binding peptide
  MOD_RES (4), (5): Xaa is C or S

SEQ ID NO: 68647 - protein, 39 aa, Artificial Sequence; identical to SEQ ID NO: 21919
  Cyclic GFR-binding peptide
  MOD_RES (4), (5), (37), (39): Xaa is C or S

SEQ ID NO: 68648 - protein, 30 aa, Artificial Sequence
  Cyclic GFR-binding peptide
VPTKLSPINVLYFDDMGVPTYGKIPEGMSV

SEQ ID NO: 68649 - protein, 27 aa, Artificial Sequence
  Cyclic GFR-binding peptide
VPTELSPINMLYFDEYDKVVYGKIPEM

SEQ ID NO: 68650 - protein, 32 aa, Artificial Sequence; identical to SEQ ID NO: 21925
  Cyclic GFR-binding peptide
  MOD_RES (1), (1): Xaa is C or S

SEQ ID NO: 68651 - protein, 38 aa, Artificial Sequence; identical to SEQ ID NO: 21926
  Cyclic GFR-binding peptide
  MOD_RES (6), (7): Xaa is C or S

SEQ ID NO: 68652 - protein, 36 aa, Artificial Sequence
  Cyclic GFR-binding peptide
  MOD_RES (6), (7): Xaa is C or S
TVPKPXXAPTQLSPINVLYFDDSSNVIYGKIPNMVV

SEQ ID NO: 68653 - protein, 40 aa, Artificial Sequence; identical to SEQ ID NO: 21928
  Cyclic GFR-binding peptide
  MOD_RES (6), (38), (40): Xaa is C or S

SEQ ID NO: 68654 - protein, 30 aa, Artificial Sequence
  Cyclic GFR-binding peptide
  MOD_RES (27), (29): Xaa is C or S
SPINILYFDSANNVVYGKIPDMVVESXGXR

SEQ ID NO: 68655 - protein, 29 aa, Artificial Sequence
  Cyclic GFR-binding peptide
  MOD_RES (1), (2): Xaa is C or S
XXVPTKLSPINILYFDKGVVTYYGKIPGM

SEQ ID NO: 68656 - protein, 37 aa, Artificial Sequence; identical to SEQ ID NO: 21930
  Cyclic GFR-binding peptide
  MOD_RES (6), (7): Xaa is C or S

SEQ ID NO: 68657 - protein, 26 aa, Artificial Sequence
  Cyclic GFR-binding peptide
ELSPINMLYFDEYDKVVYGKIPEMVV

SEQ ID NO: 68658 - protein, 36 aa, Artificial Sequence; identical to SEQ ID NO: 21933
  Cyclic GFR-binding peptide
  MOD_RES (5), (6): Xaa is C or S

SEQ ID NO: 68659 - protein, 26 aa, Artificial Sequence
  Cyclic GFR-binding peptide
ARLSPINILYFDAANNVVYGKIPDMV

SEQ ID NO: 68660 - protein, 31 aa, Artificial Sequence
  Cyclic GFR-binding peptide
  MOD_RES (31), (31): Xaa is C or S
PTELSPINMLYFDENEKVVYGKIPDMVVEGX

SEQ ID NO: 68661 - protein, 42 aa, Artificial Sequence; identical to SEQ ID NO: 21939
  Cyclic GFR-binding peptide
  MOD_RES (7), (39), (41): Xaa is C or S

SEQ ID NO: 68662 - protein, 33 aa, Artificial Sequence; identical to SEQ ID NO: 21941
  Cyclic GFR-binding peptide
  MOD_RES (1), (2), (33): Xaa is C or S

SEQ ID NO: 68663 - protein, 36 aa, Artificial Sequence
  Cyclic GFR-binding peptide
  MOD_RES (6), (7): Xaa is C or S
YVPKPXXAPTKLSPINVLYFDDSSNVIYGKIPNMVV

SEQ ID NO: 68664 - protein, 24 aa, Artificial Sequence
  Cyclic GFR-binding peptide
RLSPINILYFDSANNVVYGKIPDM

SEQ ID NO: 68665 - protein, 32 aa, Artificial Sequence; identical to SEQ ID NO: 21947
  Cyclic GFR-binding peptide
  MOD_RES (32), (32): Xaa is C or S

SEQ ID NO: 68666 - protein, 33 aa, Artificial Sequence
  Cyclic GFR-binding peptide
  MOD_RES (3), (4): Xaa is C or S
KAXXVPTKLSPINILYFDKGVVTYYGKIPGMAV

SEQ ID NO: 68667 - protein, 32 aa, Artificial Sequence
  Cyclic GFR-binding peptide
  MOD_RES (30), (32): Xaa is C or S
TELSPINMLYFDEYDKVVYGKIPEMVVEGXGX

SEQ ID NO: 68668 - protein, 29 aa, Artificial Sequence
  Cyclic GFR-binding peptide
  MOD_RES (1), (1): Xaa is C or S
XAPTQLSPINVLYFDDSSNVIYGKIPNMV

SEQ ID NO: 68669 - protein, 39 aa, Artificial Sequence; identical to SEQ ID NO: 21949
  Cyclic GFR-binding peptide
  MOD_RES (4), (5), (36), (38): Xaa is C or S

SEQ ID NO: 68670 - protein, 26 aa, Artificial Sequence
  Cyclic GFR-binding peptide
  MOD_RES (26), (26): Xaa is C or S
SPINMLYFDNGRVLLYGKIPMIVEEX

SEQ ID NO: 68671 - protein, 31 aa, Artificial Sequence
  Cyclic GFR-binding peptide
  MOD_RES (3), (4): Xaa is C or S
KAXXVPTELSPINMLYFDEYDKVVYGKIPEM

SEQ ID NO: 68672 - protein, 27 aa, Artificial Sequence
  Cyclic GFR-binding peptide
TELSPINMLYFDENEKVVYGKIPDMVV

SEQ ID NO: 68673 - protein, 27 aa, Artificial Sequence
  Cyclic GFR-binding peptide
  MOD_RES (1), (2): Xaa is C or S
XXAPTKLSPINVLYFDDSSNVIYGKIP

SEQ ID NO: 68674 - protein, 35 aa, Artificial Sequence; identical to SEQ ID NO: 21959
  Cyclic GFR-binding peptide
  MOD_RES (2), (3), (35): Xaa is C or S

SEQ ID NO: 68675 - protein, 25 aa, Artificial Sequence
  Cyclic GFR-binding peptide
TELSPINMLYFDENEKVVYGKIPDM

SEQ ID NO: 68676 - protein, 32 aa, Artificial Sequence
  Cyclic GFR-binding peptide
  MOD_RES (32), (32): Xaa is C or S
PTKLSPINVLYFDDMGVPTYGKIPEGMSVAEX

SEQ ID NO: 68677 - protein, 22 aa, Artificial Sequence
  Cyclic GFR-binding peptide
KLSPINVLYFDDSSNVIYGKIP

SEQ ID NO: 68678 - protein, 30 aa, Artificial Sequence
  Cyclic GFR-binding peptide
  MOD_RES (1), (2): Xaa is C or S
XXVPTELSPINMLYFDEYDKVVYGKIPEMV

SEQ ID NO: 68679 - protein, 40 aa, Artificial Sequence; identical to SEQ ID NO: 21971
  Cyclic GFR-binding peptide
  MOD_RES (4), (5), (37), (39): Xaa is C or S

SEQ ID NO: 68680 - protein, 37 aa, Artificial Sequence; identical to SEQ ID NO: 21972
  Cyclic GFR-binding peptide
  MOD_RES (5), (37): Xaa is C or S

SEQ ID NO: 68681 - protein, 41 aa, Artificial Sequence; identical to SEQ ID NO: 21973
  Cyclic GFR-binding peptide
  MOD_RES (5), (6), (38), (40): Xaa is C or S

SEQ ID NO: 68682 - protein, 30 aa, Artificial Sequence
  Cyclic GFR-binding peptide
  MOD_RES (30), (30): Xaa is C or S
TKLSPINVLYFDSSNNVIYGKIPNMVVKAX

SEQ ID NO: 68683 - protein, 26 aa, Artificial Sequence
  Cyclic GFR-binding peptide
TSPINMLYFDNGRVLLYGKIPMIVEE

SEQ ID NO: 68684 - protein, 22 aa, Artificial Sequence
  Cyclic GFR-binding peptide
RLSPINILYFDAANNVVYGKIP

SEQ ID NO: 68685 - protein, 36 aa, Artificial Sequence; identical to SEQ ID NO: 21976
  Cyclic GFR-binding peptide
  MOD_RES (2), (3), (35): Xaa is C or S

SEQ ID NO: 68686 - protein, 24 aa, Artificial Sequence
  Cyclic GFR-binding peptide
PTKLSPINVLYFDSSNNVIYGKIP

SEQ ID NO: 68687 - protein, 28 aa, Artificial Sequence
  Cyclic GFR-binding peptide
TKLSPINVLYFDSSNNVIYGKIPNMVVK

SEQ ID NO: 68688 - protein, 29 aa, Artificial Sequence
  Cyclic GFR-binding peptide
  MOD_RES (27), (29): Xaa is C or S
SPINMLYFDENEKVVYGKIPDMVVEGXGX

SEQ ID NO: 68689 - protein, 31 aa, Artificial Sequence
  Cyclic GFR-binding peptide
  MOD_RES (4), (5): Xaa is C or S
PKAXXAPTKLSPINVLYFDSSNNVIYGKIPN

SEQ ID NO: 68690 - protein, 35 aa, Artificial Sequence; identical to SEQ ID NO: 21986
  Cyclic GFR-binding peptide
  MOD_RES (33), (35): Xaa is C or S

SEQ ID NO: 68691 - protein, 33 aa, Artificial Sequence
  Cyclic GFR-binding peptide
  MOD_RES (5), (6): Xaa is C or S
IPKAXXVPTELSPINMLYFDENEKVVYGKIPDM

SEQ ID NO: 68692 - protein, 41 aa, Artificial Sequence; identical to SEQ ID NO: 21989
  Cyclic GFR-binding peptide
  MOD_RES (6), (7), (39), (41): Xaa is C or S

SEQ ID NO: 68693 - protein, 27 aa, Artificial Sequence
  Cyclic GFR-binding peptide
APTKLSPINVLYFDDSSNVIYGKIPNM

SEQ ID NO: 68694 - protein, 26 aa, Artificial Sequence
  Cyclic GFR-binding peptide
PTKLSPINVLYFDDMGVPTYGKIPEG

SEQ ID NO: 68695 - protein, 30 aa, Artificial Sequence
  Cyclic GFR-binding peptide
  MOD_RES (28), (30): Xaa is C or S
LSPINMLYFDENEKVVYGKIPDMVVEGXGX

SEQ ID NO: 68696 - protein, 32 aa, Artificial Sequence
  Cyclic GFR-binding peptide
  MOD_RES (6), (7): Xaa is C or S
SIPKAXXVPTELSPINMLYFDEYDKVVYGKIP

SEQ ID NO: 68697 - protein, 41 aa, Artificial Sequence; identical to SEQ ID NO: 22001
  Cyclic GFR-binding peptide
  MOD_RES (6), (38), (40): Xaa is C or S

SEQ ID NO: 68698 - protein, 24 aa, Artificial Sequence
  Cyclic GFR-binding peptide
PTRLSPINILYFDSANNVVYGKIP

SEQ ID NO: 68699 - protein, 22 aa, Artificial Sequence
  Cyclic GFR-binding peptide
SPINILYFDKGVVTYYGKIPGM

SEQ ID NO: 68700 - protein, 33 aa, Artificial Sequence; identical to SEQ ID NO: 22004
  Cyclic GFR-binding peptide
  MOD_RES (1), (2): Xaa is C or S

SEQ ID NO: 68701 - protein, 27 aa, Artificial Sequence
  Cyclic GFR-binding peptide
VKTSPINMLYFDNGRVLLYGKIPMIVE

SEQ ID NO: 68702 - protein, 32 aa, Artificial Sequence; identical to SEQ ID NO: 22007
  Cyclic GFR-binding peptide
  MOD_RES (32), (32): Xaa is C or S

SEQ ID NO: 68703 - protein, 29 aa, Artificial Sequence
  Cyclic GFR-binding peptide
TELSPINMLYFDEYDKVVYGKIPEMVVEG

SEQ ID NO: 68704 - protein, 31 aa, Artificial Sequence; identical to SEQ ID NO: 22013
  Cyclic GFR-binding peptide
  MOD_RES (1), (1): Xaa is C or S

SEQ ID NO: 68705 - protein, 24 aa, Artificial Sequence
  Cyclic GFR-binding peptide
TKLSPINILYFDKGVVTYYGKIPG

SEQ ID NO: 68706 - protein, 34 aa, Artificial Sequence; identical to SEQ ID NO: 22016
  Cyclic GFR-binding peptide
  MOD_RES (32), (34): Xaa is C or S

SEQ ID NO: 68707 - protein, 34 aa, Artificial Sequence; identical to SEQ ID NO: 22017
  Cyclic GFR-binding peptide
  MOD_RES (2), (3): Xaa is C or S

SEQ ID NO: 68708 - protein, 40 aa, Artificial Sequence; identical to SEQ ID NO: 22022
  Cyclic GFR-binding peptide
  MOD_RES (6), (7), (39): Xaa is C or S

SEQ ID NO: 68709 - protein, 38 aa, Artificial Sequence; identical to SEQ ID NO: 22024
  Cyclic GFR-binding peptide
  MOD_RES (6), (7): Xaa is C or S

SEQ ID NO: 68710 - protein, 23 aa, Artificial Sequence
  Cyclic GFR-binding peptide
SPINILYFDSANNVVYGKIPDMV

SEQ ID NO: 68711 - protein, 29 aa, Artificial Sequence
  Cyclic GFR-binding peptide
PTELSPINMLYFDENEKVVYGKIPDMVVE

SEQ ID NO: 68712 - protein, 29 aa, Artificial Sequence
  Cyclic GFR-binding peptide
  MOD_RES (3), (4): Xaa is C or S
KAXXVPTELSPINMLYFDENEKVVYGKIP

SEQ ID NO: 68713 - protein, 30 aa, Artificial Sequence
  Cyclic GFR-binding peptide
  MOD_RES (30), (30): Xaa is C or S
TKLSPINVLYFDDSSNVIYGKIPNMVVRSX

SEQ ID NO: 68714 - protein, 26 aa, Artificial Sequence
  Cyclic GFR-binding peptide
APTKLSPINVLYFDDSSNVIYGKIPN

SEQ ID NO: 68715 - protein, 34 aa, Artificial Sequence; identical to SEQ ID NO: 22041
  Cyclic GFR-binding peptide
  MOD_RES (32), (34): Xaa is C or S

SEQ ID NO: 68716 - protein, 33 aa, Artificial Sequence; identical to SEQ ID NO: 22042
  Cyclic GFR-binding peptide
  MOD_RES (32), (32): Xaa is C or S

SEQ ID NO: 68717 - protein, 32 aa, Artificial Sequence
  Cyclic GFR-binding peptide
  MOD_RES (5), (6): Xaa is C or S
VGKAXXVPTKLSPINVLYFDDMGVPTYGKIPE

SEQ ID NO: 68718 - protein, 34 aa, Artificial Sequence; identical to SEQ ID NO: 22043
  Cyclic GFR-binding peptide
  MOD_RES (3), (4): Xaa is C or S

SEQ ID NO: 68719 - protein, 30 aa, Artificial Sequence
  Cyclic GFR-binding peptide
  MOD_RES (4), (5): Xaa is C or S
PKPXXAPTQLSPINVLYFDDSSNVIYGKIP

SEQ ID NO: 68720 - protein, 32 aa, Artificial Sequence
  Cyclic GFR-binding peptide
  MOD_RES (29), (31): Xaa is C or S
KLSPINILYFDKGVVTYYGKIPGMAVSEXGXR

SEQ ID NO: 68721 - protein, 41 aa, Artificial Sequence; identical to SEQ ID NO: 22047
  Cyclic GFR-binding peptide
  MOD_RES (6), (7), (39), (41): Xaa is C or S

SEQ ID NO: 68722 - protein, 41 aa, Artificial Sequence; identical to SEQ ID NO: 22048
  Cyclic GFR-binding peptide
  MOD_RES (6), (7), (39), (41): Xaa is C or S

SEQ ID NO: 68723 - protein, 32 aa, Artificial Sequence
  Cyclic GFR-binding peptide
  MOD_RES (31), (31): Xaa is C or S
TKLSPINVLYFDDMGVPTYGKIPEGMSVAEXG

SEQ ID NO: 68724 - protein, 29 aa, Artificial Sequence
  Cyclic GFR-binding peptide
  MOD_RES (27), (29): Xaa is C or S
SPINVLYFDDSSNVIYGKIPNMVVRSXGX

SEQ ID NO: 68725 - protein, 36 aa, Artificial Sequence
  Cyclic GFR-binding peptide
  MOD_RES (6), (7): Xaa is C or S
KIPKAXXVPTELSPINMLYFDENEKVVYGKIPDMVV

SEQ ID NO: 68726 - protein, 28 aa, Artificial Sequence
  Cyclic GFR-binding peptide
  MOD_RES (1), (2): Xaa is C or S
XXVPTELSPINMLYFDEYDKVVYGKIPE

SEQ ID NO: 68727 - protein, 29 aa, Artificial Sequence
  Cyclic GFR-binding peptide
SPINMLYFDENEKVVYGKIPAAAAAAAAA

SEQ ID NO: 68728 - protein, 37 aa, Artificial Sequence; identical to SEQ ID NO: 22057
  Cyclic GFR-binding peptide
  MOD_RES (1), (2), (34), (36): Xaa is C or S

SEQ ID NO: 68729 - protein, 20 aa, Artificial Sequence
  Cyclic GFR-binding peptide
SPINILYFDKGVVTYYGKIP

SEQ ID NO: 68730 - protein, 33 aa, Artificial Sequence
  Cyclic GFR-binding peptide
  MOD_RES (6), (7): Xaa is C or S
YVPKPXXAPTKLSPINVLYFDDSSNVIYGKIPN

SEQ ID NO: 68731 - protein, 36 aa, Artificial Sequence; identical to SEQ ID NO: 22062
  Cyclic GFR-binding peptide
  MOD_RES (1), (34), (36): Xaa is C or S

SEQ ID NO: 68732 - protein, 31 aa, Artificial Sequence; identical to SEQ ID NO: 22063
  Cyclic GFR-binding peptide
  MOD_RES (1), (1): Xaa is C or S

SEQ ID NO: 68733 - protein, 30 aa, Artificial Sequence; identical to SEQ ID NO: 928
  Cyclic GFR-binding peptide

SEQ ID NO: 68734 - protein, 32 aa, Artificial Sequence
  Cyclic GFR-binding peptide
  MOD_RES (6), (7): Xaa is C or S
STPPTXXVPTRLSPINILYFDSANNVVYGKIP

SEQ ID NO: 68735 - protein, 35 aa, Artificial Sequence
  Cyclic GFR-binding peptide
  MOD_RES (6), (7): Xaa is C or S
HVPKPXXAPTKLSPINVLYFDDSSNVIYGKIPNMV

SEQ ID NO: 68736 - protein, 33 aa, Artificial Sequence; identical to SEQ ID NO: 22065
  Cyclic GFR-binding peptide
  MOD_RES (2), (3): Xaa is C or S

SEQ ID NO: 68737 - protein, 36 aa, Artificial Sequence; identical to SEQ ID NO: 22066
  Cyclic GFR-binding peptide
  MOD_RES (1), (33), (35): Xaa is C or S

SEQ ID NO: 68738 - protein, 28 aa, Artificial Sequence
  Cyclic GFR-binding peptide
  MOD_RES (27), (27): Xaa is C or S
TSPINMLYFDNGRVLLYGKIPMIVEEXG

SEQ ID NO: 68739 - protein, 36 aa, Artificial Sequence
  Cyclic GFR-binding peptide
  MOD_RES (7), (7): Xaa is C or S
HVTKPTXAPTKLSPINVLYFDDSSNVIYGKIPNMVV

SEQ ID NO: 68740 - protein, 30 aa, Artificial Sequence
  Cyclic GFR-binding peptide
PTRLSPINILYFDSANNVVYGKIPDMVVES

SEQ ID NO: 68741 - protein, 28 aa, Artificial Sequence
  Cyclic GFR-binding peptide
LSPINVLYFDDMGVPTYGKIPEGMSVAE

SEQ ID NO: 68742 - protein, 24 aa, Artificial Sequence
  Cyclic GFR-binding peptide
SPINILYFDKGVVTYYGKIPGMAV

SEQ ID NO: 68743 - protein, 25 aa, Artificial Sequence
  Cyclic GFR-binding peptide
ARLSPINILYFDAANNVVYGKIPDM

SEQ ID NO: 68744 - protein, 25 aa, Artificial Sequence
  Cyclic GFR-binding peptide
SPINVLYFDDMGVPTYGKIPEGMSV

SEQ ID NO: 68745 - protein, 21 aa, Artificial Sequence
  Cyclic GFR-binding peptide
LSPINILYFDAANNVVYGKIP

SEQ ID NO: 68746 - protein, 29 aa, Artificial Sequence
  Cyclic GFR-binding peptide
KLSPINVLYFDDMGVPTYGKIPEGMSVAE

SEQ ID NO: 68747 - protein, 30 aa, Artificial Sequence
  Cyclic GFR-binding peptide
  MOD_RES (1), (1): Xaa is C or S
XVPTRLSPINILYFDSANNVVYGKIPDMVV

SEQ ID NO: 68748 - protein, 33 aa, Artificial Sequence
  Cyclic GFR-binding peptide
  MOD_RES (6), (7): Xaa is C or S
HVPKPXXAPTKLSPINVLYFDDSSNVIYGKIPN

SEQ ID NO: 68749 - protein, 26 aa, Artificial Sequence
  Cyclic GFR-binding peptide
  MOD_RES (1), (1): Xaa is C or S
XAPTKLSPINVLYFDDSSNVIYGKIP

SEQ ID NO: 68750 - protein, 27 aa, Artificial Sequence
  Cyclic GFR-binding peptide
KLSPINVLYFDDSSNVIYGKIPNMVVR

SEQ ID NO: 68751 - protein, 28 aa, Artificial Sequence
  Cyclic GFR-binding peptide
PTKLSPINVLYFDDSSNVIYGKIPNMVV

SEQ ID NO: 68752 - protein, 28 aa, Artificial Sequence
  Cyclic GFR-binding peptide
  MOD_RES (27), (27): Xaa is C or S
SPINVLYFDSSNNVIYGKIPNMVVKAXG

SEQ ID NO: 68753 - protein, 24 aa, Artificial Sequence
  Cyclic GFR-binding peptide
LSPINVLYFDDSSNVIYGKIPNMV

SEQ ID NO: 68754 - protein, 33 aa, Artificial Sequence; identical to SEQ ID NO: 22084
  Cyclic GFR-binding peptide
  MOD_RES (1), (33): Xaa is C or S

SEQ ID NO: 68755 - protein, 28 aa, Artificial Sequence
  Cyclic GFR-binding peptide
VPTKLSPINILYFDKGVVTYYGKIPGMA

SEQ ID NO: 68756 - protein, 31 aa, Artificial Sequence
  Cyclic GFR-binding peptide
  MOD_RES (28), (30): Xaa is C or S
LSPINVLYFDSSNNVIYGKIPNMVVKAXGXH

SEQ ID NO: 68757 - protein, 28 aa, Artificial Sequence
  Cyclic GFR-binding peptide
RLSPINILYFDSANNVVYGKIPDMVVES

SEQ ID NO: 68758 - protein, 22 aa, Artificial Sequence
  Cyclic GFR-binding peptide
KLSPINVLYFDDMGVPTYGKIP

SEQ ID NO: 68759 - protein, 28 aa, Artificial Sequence
  Cyclic GFR-binding peptide
  MOD_RES (28), (28): Xaa is C or S
LSPINILYFDAANNVVYGKIPDMVVEAX

SEQ ID NO: 68760 - protein, 24 aa, Artificial Sequence
  Cyclic GFR-binding peptide
ARLSPINILYFDAANNVVYGKIPD

SEQ ID NO: 68761 - protein, 23 aa, Artificial Sequence
  Cyclic GFR-binding peptide
LSPINVLYFDDMGVPTYGKIPEG

SEQ ID NO: 68762 - protein, 34 aa, Artificial Sequence; identical to SEQ ID NO: 22099
  Cyclic GFR-binding peptide
  MOD_RES (32), (34): Xaa is C or S

SEQ ID NO: 68763 - protein, 30 aa, Artificial Sequence
  Cyclic GFR-binding peptide
  MOD_RES (4), (5): Xaa is C or S
PSTXXAPVKTSPINMLYFDNGRVLLYGKIP

SEQ ID NO: 68764 - protein, 34 aa, Artificial Sequence; identical to SEQ ID NO: 22103
  Cyclic GFR-binding peptide
  MOD_RES (32), (34): Xaa is C or S

SEQ ID NO: 68765 - protein, 31 aa, Artificial Sequence; identical to SEQ ID NO: 22105
  Cyclic GFR-binding peptide
  MOD_RES (1), (1): Xaa is C or S

SEQ ID NO: 68766 - protein, 25 aa, Artificial Sequence
  Cyclic GFR-binding peptide
PTQLSPINVLYFDDSSNVIYGKIPN

SEQ ID NO: 68767 - protein, 21 aa, Artificial Sequence
  Cyclic GFR-binding peptide
SPINMLYFDENEKVVYGKIPD

SEQ ID NO: 68768 - protein, 32 aa, Artificial Sequence
  Cyclic GFR-binding peptide
  MOD_RES (6), (7): Xaa is C or S
AAPASXXVPARLSPINILYFDAANNVVYGKIP

SEQ ID NO: 68769 - protein, 29 aa, Artificial Sequence
  Cyclic GFR-binding peptide
  MOD_RES (3), (4): Xaa is C or S
KPXXAPTQLSPINVLYFDDSSNVIYGKIP

SEQ ID NO: 68770 - protein, 30 aa, Artificial Sequence
  Cyclic GFR-binding peptide
  MOD_RES (29), (29): Xaa is C or S
RLSPINILYFDSANNVVYGKIPDMVVESXG

SEQ ID NO: 68771 - protein, 36 aa, Artificial Sequence; identical to SEQ ID NO: 22112
  Cyclic GFR-binding peptide
  MOD_RES (5), (6): Xaa is C or S

SEQ ID NO: 68772 - protein, 25 aa, Artificial Sequence
  Cyclic GFR-binding peptide
KLSPINVLYFDDMGVPTYGKIPEGM

SEQ ID NO: 68773 - protein, 28 aa, Artificial Sequence
  Cyclic GFR-binding peptide
TELSPINMLYFDENEKVVYGKIPDMVVE

SEQ ID NO: 68774 - protein, 25 aa, Artificial Sequence
  Cyclic GFR-binding peptide
PTKLSPINILYFDKGVVTYYGKIPG

SEQ ID NO: 68775 - protein, 25 aa, Artificial Sequence
  Cyclic GFR-binding peptide
RLSPINILYFDAANNVVYGKIPDMV

SEQ ID NO: 68776 - protein, 34 aa, Artificial Sequence; identical to SEQ ID NO: 22113
  Cyclic GFR-binding peptide
  MOD_RES (2), (3): Xaa is C or S

SEQ ID NO: 68777 - protein, 23 aa, Artificial Sequence
  Cyclic GFR-binding peptide
SPINVLYFDSSNNVIYGKIPNMV

SEQ ID NO: 68778 - protein, 40 aa, Artificial Sequence; identical to SEQ ID NO: 22117
  Cyclic GFR-binding peptide
  MOD_RES (4), (5), (37), (39): Xaa is C or S

SEQ ID NO: 68779 - protein, 32 aa, Artificial Sequence
  Cyclic GFR-binding peptide
  MOD_RES (6), (7): Xaa is C or S
KASKAXXVPTKLSPINILYFDKGVVTYYGKIP

SEQ ID NO: 68780 - protein, 36 aa, Artificial Sequence
  Cyclic GFR-binding peptide
  MOD_RES (5), (6): Xaa is C or S
VGKAXXVPTKLSPINVLYFDDMGVPTYGKIPEGMSV

SEQ ID NO: 68781 - protein, 20 aa, Artificial Sequence
  Cyclic GFR-binding peptide
SPINVLYFDDSSNVIYGKIP

SEQ ID NO: 68782 - protein, 30 aa, Artificial Sequence
  Cyclic GFR-binding peptide
  MOD_RES (4), (5): Xaa is C or S
PKAXXVPTELSPINMLYFDENEKVVYGKIP

SEQ ID NO: 68783 - protein, 36 aa, Artificial Sequence; identical to SEQ ID NO: 22122
  Cyclic GFR-binding peptide
  MOD_RES (2), (3), (34), (36): Xaa is C or S

SEQ ID NO: 68784 - protein, 33 aa, Artificial Sequence; identical to SEQ ID NO: 22124
  Cyclic GFR-binding peptide
  MOD_RES (2), (3): Xaa is C or S

SEQ ID NO: 68785 - protein, 34 aa, Artificial Sequence
  Cyclic GFR-binding peptide
  MOD_RES (6), (7): Xaa is C or S
KASKAXXVPTKLSPINILYFDKGVVTYYGKIPGM

SEQ ID NO: 68786 - protein, 26 aa, Artificial Sequence
  Cyclic GFR-binding peptide
TRLSPINILYFDSANNVVYGKIPDMV

SEQ ID NO: 68787 - protein, 38 aa, Artificial Sequence; identical to SEQ ID NO: 22127
  Cyclic GFR-binding peptide
  MOD_RES (5), (37): Xaa is C or S

SEQ ID NO: 68788 - protein, 31 aa, Artificial Sequence
  Cyclic GFR-binding peptide
  MOD_RES (5), (6): Xaa is C or S
VPKPXXAPTQLSPINVLYFDDSSNVIYGKIP

SEQ ID NO: 68789 - protein, 28 aa, Artificial Sequence
  Cyclic GFR-binding peptide
  MOD_RES (26), (28): Xaa is C or S
SPINMLYFDNGRVLLYGKIPMIVEEXGX

SEQ ID NO: 68790 - protein, 30 aa, Artificial Sequence; identical to SEQ ID NO: 22130
  Cyclic GFR-binding peptide

SEQ ID NO: 68791 - protein, 38 aa, Artificial Sequence; identical to SEQ ID NO: 22131
  Cyclic GFR-binding peptide
  MOD_RES (6), (38): Xaa is C or S

SEQ ID NO: 68792 - protein, 31 aa, Artificial Sequence
  Cyclic GFR-binding peptide
  MOD_RES (30), (30): Xaa is C or S
TELSPINMLYFDEYDKVVYGKIPEMVVEGXG

SEQ ID NO: 68793 - protein, 31 aa, Artificial Sequence
  Cyclic GFR-binding peptide
  MOD_RES (30), (30): Xaa is C or S
TKLSPINILYFDKGVVTYYGKIPGMAVSEXG

SEQ ID NO: 68794 - protein, 29 aa, Artificial Sequence
  Cyclic GFR-binding peptide
SPINILYFDSANNVVYGKIPAAAAAAAAA

SEQ ID NO: 68795 - protein, 34 aa, Artificial Sequence
  Cyclic GFR-binding peptide
  MOD_RES (5), (6): Xaa is C or S
VGKAXXVPTKLSPINVLYFDDMGVPTYGKIPEGM

SEQ ID NO: 68796 - protein, 34 aa, Artificial Sequence; identical to SEQ ID NO: 22138
  Cyclic GFR-binding peptide
  MOD_RES (1), (2), (34): Xaa is C or S

SEQ ID NO: 68797 - protein, 29 aa, Artificial Sequence
  Cyclic GFR-binding peptide
  MOD_RES (28), (28): Xaa is C or S
LSPINILYFDKGVVTYYGKIPGMAVSEXG

SEQ ID NO: 68798 - protein, 40 aa, Artificial Sequence; identical to SEQ ID NO: 22139
  Cyclic GFR-binding peptide
  MOD_RES (6), (7), (40): Xaa is C or S

SEQ ID NO: 68799 - protein, 39 aa, Artificial Sequence; identical to SEQ ID NO: 22140
  Cyclic GFR-binding peptide
  MOD_RES (4), (5), (37), (39): Xaa is C or S

SEQ ID NO: 68800 - protein, 34 aa, Artificial Sequence; identical to SEQ ID NO: 22141
  Cyclic GFR-binding peptide
  MOD_RES (1), (2), (33): Xaa is C or S

SEQ ID NO: 68801 - protein, 31 aa, Artificial Sequence
  Cyclic GFR-binding peptide
  MOD_RES (31), (31): Xaa is C or S
PTKLSPINVLYFDSSNNVIYGKIPNMVVKAX

SEQ ID NO: 68802 - protein, 35 aa, Artificial Sequence; identical to SEQ ID NO: 22144
  Cyclic GFR-binding peptide
  MOD_RES (3), (4): Xaa is C or S

SEQ ID NO: 68803 - protein, 32 aa, Artificial Sequence; identical to SEQ ID NO: 22147
  Cyclic GFR-binding peptide
  MOD_RES (32), (32): Xaa is C or S

SEQ ID NO: 68804 - protein, 29 aa, Artificial Sequence
  Cyclic GFR-binding peptide
  MOD_RES (1), (2): Xaa is C or S
XXAPTKLSPINVLYFDDSSNVIYGKIPNM

SEQ ID NO: 68805 - protein, 20 aa, Artificial Sequence
  Cyclic GFR-binding peptide
SPINVLYFDDMGVPTYGKIP

SEQ ID NO: 68806 - protein, 33 aa, Artificial Sequence; identical to SEQ ID NO: 22153
  Cyclic GFR-binding peptide
  MOD_RES (1), (33): Xaa is C or S

SEQ ID NO: 68807 - protein, 31 aa, Artificial Sequence
  Cyclic GFR-binding peptide
  MOD_RES (5), (6): Xaa is C or S
VPSTXXAPVKTSPINMLYFDNGRVLLYGKIP

SEQ ID NO: 68808 - protein, 37 aa, Artificial Sequence; identical to SEQ ID NO: 22155
  Cyclic GFR-binding peptide
  MOD_RES (3), (4), (36): Xaa is C or S

SEQ ID NO: 68809 - protein, 32 aa, Artificial Sequence
  Cyclic GFR-binding peptide
  MOD_RES (4), (5): Xaa is C or S
SKAXXVPTKLSPINILYFDKGVVTYYGKIPGM

SEQ ID NO: 68810 - protein, 35 aa, Artificial Sequence
  Cyclic GFR-binding peptide
  MOD_RES (6), (7): Xaa is C or S
KIPKAXXVPTELSPINMLYFDENEKVVYGKIPDMV

SEQ ID NO: 68811 - protein, 34 aa, Artificial Sequence
  Cyclic GFR-binding peptide
  MOD_RES (5), (5): Xaa is C or S
TKPTXAPTKLSPINVLYFDDSSNVIYGKIPNMVV

SEQ ID NO: 68812 - protein, 30 aa, Artificial Sequence
  Cyclic GFR-binding peptide
  MOD_RES (2), (3): Xaa is C or S
AXXVPTELSPINMLYFDEYDKVVYGKIPEM

SEQ ID NO: 68813 - protein, 33 aa, Artificial Sequence
  Cyclic GFR-binding peptide
  MOD_RES (3), (4): Xaa is C or S
STXXAPVKTSPINMLYFDNGRVLLYGKIPMIVE

SEQ ID NO: 68814 - protein, 24 aa, Artificial Sequence
  Cyclic GFR-binding peptide
LSPINMLYFDEYDKVVYGKIPEMV

SEQ ID NO: 68815 - protein, 31 aa, Artificial Sequence
  Cyclic GFR-binding peptide
  MOD_RES (5), (6): Xaa is C or S
VGKAXXVPTKLSPINVLYFDDMGVPTYGKIP

SEQ ID NO: 68816 - protein, 27 aa, Artificial Sequence
  Cyclic GFR-binding peptide
  MOD_RES (1), (1): Xaa is C or S
XVPTRLSPINILYFDSANNVVYGKIPD

SEQ ID NO: 68817 - protein, 25 aa, Artificial Sequence
  Cyclic GFR-binding peptide
LSPINILYFDAANNVVYGKIPDMVV

SEQ ID NO: 68818 - protein, 24 aa, Artificial Sequence
  Cyclic GFR-binding peptide
LSPINILYFDSANNVVYGKIPDMV

SEQ ID NO: 68819 - protein, 27 aa, Artificial Sequence
  Cyclic GFR-binding peptide
LSPINILYFDSANNVVYGKIPDMVVES

SEQ ID NO: 68820 - protein, 31 aa, Artificial Sequence
  Cyclic GFR-binding peptide
  MOD_RES (31), (31): Xaa is C or S
PARLSPINILYFDAANNVVYGKIPDMVVEAX

SEQ ID NO: 68821 - protein, 37 aa, Artificial Sequence; identical to SEQ ID NO: 22172
  Cyclic GFR-binding peptide
  MOD_RES (2), (3), (35), (37): Xaa is C or S

SEQ ID NO: 68822 - protein, 25 aa, Artificial Sequence
  Cyclic GFR-binding peptide
LSPINVLYFDSSNNVIYGKIPNMVV

SEQ ID NO: 68823 - protein, 30 aa, Artificial Sequence
  Cyclic GFR-binding peptide
  MOD_RES (4), (5): Xaa is C or S
PPTXXVPTRLSPINILYFDSANNVVYGKIP

SEQ ID NO: 68824 - protein, 30 aa, Artificial Sequence
  Cyclic GFR-binding peptide
  MOD_RES (1), (1): Xaa is C or S
XVPTELSPINMLYFDEYDKVVYGKIPEMVV

SEQ ID NO: 68825 - protein, 25 aa, Artificial Sequence
  Cyclic GFR-binding peptide
SPINMLYFDENEKVVYGKIPDMVVE

SEQ ID NO: 68826 - protein, 30 aa, Artificial Sequence; identical to SEQ ID NO: 920
  Cyclic GFR-binding peptide

SEQ ID NO: 68827 - protein, 30 aa, Artificial Sequence
  Cyclic GFR-binding peptide
  MOD_RES (30), (30): Xaa is C or S
PVKTSPINMLYFDNGRVLLYGKIPMIVEEX

SEQ ID NO: 68828 - protein, 38 aa, Artificial Sequence; identical to SEQ ID NO: 22176
  Cyclic GFR-binding peptide
  MOD_RES (6), (7): Xaa is C or S

SEQ ID NO: 68829 - protein, 34 aa, Artificial Sequence; identical to SEQ ID NO: 22177
  Cyclic GFR-binding peptide
  MOD_RES (1), (2), (34): Xaa is C or S

SEQ ID NO: 68830 - protein, 32 aa, Artificial Sequence
  Cyclic GFR-binding peptide
  MOD_RES (6), (6): Xaa is C or S
VTKPTXAPTKLSPINVLYFDDSSNVIYGKIPN

SEQ ID NO: 68831 - protein, 33 aa, Artificial Sequence
  Cyclic GFR-binding peptide
  MOD_RES (5), (6): Xaa is C or S
APASXXVPARLSPINILYFDAANNVVYGKIPDM

SEQ ID NO: 68832 - protein, 34 aa, Artificial Sequence; identical to SEQ ID NO: 22181
  Cyclic GFR-binding peptide
  MOD_RES (3), (3): Xaa is C or S

SEQ ID NO: 68833 - protein, 33 aa, Artificial Sequence
  Cyclic GFR-binding peptide
  MOD_RES (3), (4): Xaa is C or S
KPXXAPTKLSPINVLYFDDSSNVIYGKIPNMVV

SEQ ID NO: 68834 - protein, 29 aa, Artificial Sequence
  Cyclic GFR-binding peptide
PTKLSPINVLYFDSSNNVIYGKIPNMVVK

SEQ ID NO: 68835 - protein, 30 aa, Artificial Sequence
  Cyclic GFR-binding peptide
  MOD_RES (1), (2): Xaa is C or S
XXVPTKLSPINVLYFDDMGVPTYGKIPEGM

SEQ ID NO: 68836 - protein, 33 aa, Artificial Sequence
  Cyclic GFR-binding peptide
  MOD_RES (4), (5): Xaa is C or S
PSTXXAPVKTSPINMLYFDNGRVLLYGKIPMIV

SEQ ID NO: 68837 - protein, 28 aa, Artificial Sequence
  Cyclic GFR-binding peptide
  MOD_RES (1), (2): Xaa is C or S
XXAPTQLSPINVLYFDDSSNVIYGKIPN

SEQ ID NO: 68838 - protein, 31 aa, Artificial Sequence
  Cyclic GFR-binding peptide
  MOD_RES (2), (3): Xaa is C or S
AXXVPTKLSPINVLYFDDMGVPTYGKIPEGM

SEQ ID NO: 68839 - protein, 36 aa, Artificial Sequence; identical to SEQ ID NO: 22187
  Cyclic GFR-binding peptide
  MOD_RES (4), (5): Xaa is C or S

SEQ ID NO: 68840 - protein, 32 aa, Artificial Sequence
  Cyclic GFR-binding peptide
  MOD_RES (4), (5): Xaa is C or S
PPTXXVPTRLSPINILYFDSANNVVYGKIPDM

SEQ ID NO: 68841 - protein, 33 aa, Artificial Sequence; identical to SEQ ID NO: 22190
  Cyclic GFR-binding peptide
  MOD_RES (2), (2): Xaa is C or S

SEQ ID NO: 68842 - protein, 32 aa, Artificial Sequence
  Cyclic GFR-binding peptide
  MOD_RES (3), (4): Xaa is C or S
STXXAPVKTSPINMLYFDNGRVLLYGKIPMIV

SEQ ID NO: 68843 - protein, 32 aa, Artificial Sequence
  Cyclic GFR-binding peptide
  MOD_RES (29), (31): Xaa is C or S
RLSPINILYFDAANNVVYGKIPDMVVEAXGXR

SEQ ID NO: 68844 - protein, 23 aa, Artificial Sequence
  Cyclic GFR-binding peptide
KTSPINMLYFDNGRVLLYGKIPM

SEQ ID NO: 68845 - protein, 35 aa, Artificial Sequence; identical to SEQ ID NO: 22204
  Cyclic GFR-binding peptide
  MOD_RES (2), (3), (35): Xaa is C or S

SEQ ID NO: 68846 - protein, 34 aa, Artificial Sequence; identical to SEQ ID NO: 22207
  Cyclic GFR-binding peptide
  MOD_RES (1), (2), (34): Xaa is C or S

SEQ ID NO: 68847 - protein, 27 aa, Artificial Sequence
  Cyclic GFR-binding peptide
APTQLSPINVLYFDDSSNVIYGKIPNM

SEQ ID NO: 68848 - protein, 39 aa, Artificial Sequence; identical to SEQ ID NO: 22212
  Cyclic GFR-binding peptide
  MOD_RES (5), (6), (38): Xaa is C or S

SEQ ID NO: 68849 - protein, 25 aa, Artificial Sequence
  Cyclic GFR-binding peptide
SPINVLYFDDSSNVIYGKIPNMVVR

SEQ ID NO: 68850 - protein, 37 aa, Artificial Sequence; identical to SEQ ID NO: 22214
  Cyclic GFR-binding peptide
  MOD_RES (3), (4), (36): Xaa is C or S

SEQ ID NO: 68851 - protein, 25 aa, Artificial Sequence
  Cyclic GFR-binding peptide
ELSPINMLYFDENEKVVYGKIPDMV

SEQ ID NO: 68852 - protein, 37 aa, Artificial Sequence; identical to SEQ ID NO: 22219
  Cyclic GFR-binding peptide
  MOD_RES (5), (6): Xaa is C or S

SEQ ID NO: 68853 - protein, 29 aa, Artificial Sequence
  Cyclic GFR-binding peptide
  MOD_RES (2), (3): Xaa is C or S
AXXVPTKLSPINVLYFDDMGVPTYGKIPE

SEQ ID NO: 68854 - protein, 31 aa, Artificial Sequence
  Cyclic GFR-binding peptide
  MOD_RES (1), (2): Xaa is C or S
XXAPVKTSPINMLYFDNGRVLLYGKIPMIVE

SEQ ID NO: 68855 - protein, 35 aa, Artificial Sequence
  Cyclic GFR-binding peptide
  MOD_RES (5), (6): Xaa is C or S
TPPTXXVPTRLSPINILYFDSANNVVYGKIPDMVV

SEQ ID NO: 68856 - protein, 26 aa, Artificial Sequence
  Cyclic GFR-binding peptide
ELSPINMLYFDENEKVVYGKIPDMVV

SEQ ID NO: 68857 - protein, 37 aa, Artificial Sequence; identical to SEQ ID NO: 22220
  Cyclic GFR-binding peptide
  MOD_RES (3), (4), (36): Xaa is C or S

SEQ ID NO: 68858 - protein, 28 aa, Artificial Sequence
  Cyclic GFR-binding peptide
  MOD_RES (28), (28): Xaa is C or S
LSPINVLYFDDSSNVIYGKIPNMVVRAX

SEQ ID NO: 68859 - protein, 39 aa, Artificial Sequence; identical to SEQ ID NO: 22222
  Cyclic GFR-binding peptide
  MOD_RES (3), (4), (36), (38): Xaa is C or S

SEQ ID NO: 68860 - protein, 39 aa, Artificial Sequence; identical to SEQ ID NO: 22223
  Cyclic GFR-binding peptide
  MOD_RES (6), (7), (39): Xaa is C or S

SEQ ID NO: 68861 - protein, 28 aa, Artificial Sequence
  Cyclic GFR-binding peptide
  MOD_RES (1), (1): Xaa is C or S
XAPTKLSPINVLYFDDSSNVIYGKIPNM

SEQ ID NO: 68862 - protein, 31 aa, Artificial Sequence
  Cyclic GFR-binding peptide
  MOD_RES (29), (31): Xaa is C or S
LSPINVLYFDDMGVPTYGKIPEGMSVAEXGX

SEQ ID NO: 68863 - protein, 28 aa, Artificial Sequence
  Cyclic GFR-binding peptide
  MOD_RES (28), (28): Xaa is C or S
LSPINVLYFDSSNNVIYGKIPNMVVKAX

SEQ ID NO: 68864 - protein, 26 aa, Artificial Sequence
  Cyclic GFR-binding peptide
TKLSPINVLYFDDMGVPTYGKIPEGM

SEQ ID NO: 68865 - protein, 39 aa, Artificial Sequence; identical to SEQ ID NO: 22231
  Cyclic GFR-binding peptide
  MOD_RES (5), (6), (38): Xaa is C or S

SEQ ID NO: 68866 - protein, 24 aa, Artificial Sequence
  Cyclic GFR-binding peptide
LSPINILYFDAANNVVYGKIPDMV

SEQ ID NO: 68867 - protein, 37 aa, Artificial Sequence; identical to SEQ ID NO: 22234
  Cyclic GFR-binding peptide
  MOD_RES (4), (5), (37): Xaa is C or S

SEQ ID NO: 68868 - protein, 38 aa, Artificial Sequence; identical to SEQ ID NO: 22236
  Cyclic GFR-binding peptide
  MOD_RES (3), (4), (37): Xaa is C or S

SEQ ID NO: 68869 - protein, 32 aa, Artificial Sequence
  Cyclic GFR-binding peptide
  MOD_RES (31), (31): Xaa is C or S
PTKLSPINVLYFDDSSNVIYGKIPNMVVRSXG

SEQ ID NO: 68870 - protein, 28 aa, Artificial Sequence
  Cyclic GFR-binding peptide
  MOD_RES (1), (1): Xaa is C or S
XVPTRLSPINILYFDSANNVVYGKIPDM

SEQ ID NO: 68871 - protein, 33 aa, Artificial Sequence; identical to SEQ ID NO: 22249
  Cyclic GFR-binding peptide
  MOD_RES (1), (33): Xaa is C or S

SEQ ID NO: 68872 - protein, 35 aa, Artificial Sequence; identical to SEQ ID NO: 22250
  Cyclic GFR-binding peptide
  MOD_RES (4), (4): Xaa is C or S

SEQ ID NO: 68873 - protein, 33 aa, Artificial Sequence
  Cyclic GFR-binding peptide
  MOD_RES (4), (5): Xaa is C or S
GKAXXVPTKLSPINVLYFDDMGVPTYGKIPEGM

SEQ ID NO: 68874 - protein, 28 aa, Artificial Sequence
  Cyclic GFR-binding peptide
TKLSPINVLYFDDSSNVIYGKIPNMVVR

SEQ ID NO: 68875 - protein, 26 aa, Artificial Sequence
  Cyclic GFR-binding peptide
SPINILYFDSANNVVYGKIPDMVVES

SEQ ID NO: 68876 - protein, 34 aa, Artificial Sequence
  Cyclic GFR-binding peptide
  MOD_RES (31), (33): Xaa is C or S
TKLSPINVLYFDDMGVPTYGKIPEGMSVAEXGXR

SEQ ID NO: 68877 - protein, 30 aa, Artificial Sequence
  Cyclic GFR-binding peptide
  MOD_RES (2), (3): Xaa is C or S
TXXAPVKTSPINMLYFDNGRVLLYGKIPMI

SEQ ID NO: 68878 - protein, 33 aa, Artificial Sequence
  Cyclic GFR-binding peptide
  MOD_RES (31), (33): Xaa is C or S
PTKLSPINVLYFDSSNNVIYGKIPNMVVKAXGX

SEQ ID NO: 68879 - protein, 24 aa, Artificial Sequence
  Cyclic GFR-binding peptide
KLSPINVLYFDDSSNVIYGKIPNM

SEQ ID NO: 68880 - protein, 33 aa, Artificial Sequence
  Cyclic GFR-binding peptide
  MOD_RES (1), (2): Xaa is C or S
XXVPTKLSPINVLYFDDMGVPTYGKIPEGMSVA

SEQ ID NO: 68881 - protein, 25 aa, Artificial Sequence
  Cyclic GFR-binding peptide
PARLSPINILYFDAANNVVYGKIPD

SEQ ID NO: 68882 - protein, 42 aa, Artificial Sequence; identical to SEQ ID NO: 22262
  Cyclic GFR-binding peptide
  MOD_RES (6), (7), (39), (41): Xaa is C or S

SEQ ID NO: 68883 - protein, 35 aa, Artificial Sequence; identical to SEQ ID NO: 22264
  Cyclic GFR-binding peptide
  MOD_RES (1), (33), (35): Xaa is C or S

SEQ ID NO: 68884 - protein, 36 aa, Artificial Sequence; identical to SEQ ID NO: 22265
  Cyclic GFR-binding peptide
  MOD_RES (1), (2), (35): Xaa is C or S

SEQ ID NO: 68885 - protein, 26 aa, Artificial Sequence
  Cyclic GFR-binding peptide
TELSPINMLYFDEYDKVVYGKIPEMV

SEQ ID NO: 68886 - protein, 29 aa, Artificial Sequence
  Cyclic GFR-binding peptide
  MOD_RES (27), (29): Xaa is C or S
TSPINMLYFDNGRVLLYGKIPMIVEEXGX

SEQ ID NO: 68887 - protein, 32 aa, Artificial Sequence; identical to SEQ ID NO: 22274
  Cyclic GFR-binding peptide
  MOD_RES (32), (32): Xaa is C or S

SEQ ID NO: 68888 - protein, 33 aa, Artificial Sequence; identical to SEQ ID NO: 22275
  Cyclic GFR-binding peptide
  MOD_RES (32), (32): Xaa is C or S

SEQ ID NO: 68889 - protein, 21 aa, Artificial Sequence
  Cyclic GFR-binding peptide
LSPINVLYFDSSNNVIYGKIP

SEQ ID NO: 68890 - protein, 31 aa, Artificial Sequence
  Cyclic GFR-binding peptide
  MOD_RES (5), (6): Xaa is C or S
APASXXVPARLSPINILYFDAANNVVYGKIP

SEQ ID NO: 68891 - protein, 30 aa, Artificial Sequence
  Cyclic GFR-binding peptide
  MOD_RES (1), (2): Xaa is C or S
XXVPTRLSPINILYFDSANNVVYGKIPDMV

SEQ ID NO: 68892 - protein, 24 aa, Artificial Sequence
  Cyclic GFR-binding peptide
RLSPINILYFDAANNVVYGKIPDM

SEQ ID NO: 68893 - protein, 31 aa, Artificial Sequence
  Cyclic GFR-binding peptide
  MOD_RES (1), (2): Xaa is C or S
XXVPTRLSPINILYFDSANNVVYGKIPDMVV

SEQ ID NO: 68894 - protein, 33 aa, Artificial Sequence; identical to SEQ ID NO: 22286
  Cyclic GFR-binding peptide
  MOD_RES (32), (32): Xaa is C or S

SEQ ID NO: 68895 - protein, 32 aa, Artificial Sequence
  Cyclic GFR-binding peptide
  MOD_RES (4), (5): Xaa is C or S
PKAXXVPTELSPINMLYFDENEKVVYGKIPDM

SEQ ID NO: 68896 - protein, 27 aa, Artificial Sequence
  Cyclic GFR-binding peptide
LSPINVLYFDSSNNVIYGKIPNMVVKA

SEQ ID NO: 68897 - protein, 42 aa, Artificial Sequence; identical to SEQ ID NO: 22288
  Cyclic GFR-binding peptide
  MOD_RES (6), (7), (39), (41): Xaa is C or S

SEQ ID NO: 68898 - protein, 35 aa, Artificial Sequence; identical to SEQ ID NO: 22291
  Cyclic GFR-binding peptide
  MOD_RES (3), (4): Xaa is C or S

SEQ ID NO: 68899 - protein, 38 aa, Artificial Sequence; identical to SEQ ID NO: 22292
  Cyclic GFR-binding peptide
  MOD_RES (4), (36), (38): Xaa is C or S

SEQ ID NO: 68900 - protein, 32 aa, Artificial Sequence
  Cyclic GFR-binding peptide
  MOD_RES (30), (32): Xaa is C or S
TKLSPINVLYFDDSSNVIYGKIPNMVVRSXGX

SEQ ID NO: 68901 - protein, 38 aa, Artificial Sequence; identical to SEQ ID NO: 22294
  Cyclic GFR-binding peptide
  MOD_RES (6), (7): Xaa is C or S

SEQ ID NO: 68902 - protein, 33 aa, Artificial Sequence
  Cyclic GFR-binding peptide
  MOD_RES (5), (6): Xaa is C or S
VPKAXXAPTKLSPINVLYFDSSNNVIYGKIPNM

SEQ ID NO: 68903 - protein, 20 aa, Artificial Sequence
  Cyclic GFR-binding peptide
SPINVLYFDSSNNVIYGKIP

SEQ ID NO: 68904 - protein, 31 aa, Artificial Sequence; identical to SEQ ID NO: 22297
  Cyclic GFR-binding peptide
  MOD_RES (1), (1): Xaa is C or S

SEQ ID NO: 68905 - protein, 38 aa, Artificial Sequence; identical to SEQ ID NO: 22300
  Cyclic GFR-binding peptide
  MOD_RES (5), (6), (38): Xaa is C or S

SEQ ID NO: 68906 - protein, 37 aa, Artificial Sequence; identical to SEQ ID NO: 22304
  Cyclic GFR-binding peptide
  MOD_RES (3), (4), (36): Xaa is C or S

SEQ ID NO: 68907 - protein, 31 aa, Artificial Sequence
  Cyclic GFR-binding peptide
  MOD_RES (29), (31): Xaa is C or S
RLSPINILYFDAANNVVYGKIPDMVVEAXGX

SEQ ID NO: 68908 - protein, 33 aa, Artificial Sequence
  Cyclic GFR-binding peptide
  MOD_RES (30), (32): Xaa is C or S
TELSPINMLYFDEYDKVVYGKIPEMVVEGXGXR

SEQ ID NO: 68909 - protein, 34 aa, Artificial Sequence
  Cyclic GFR-binding peptide
  MOD_RES (31), (33): Xaa is C or S
PTKLSPINVLYFDDSSNVIYGKIPNMVVRSXGXH

SEQ ID NO: 68910 - protein, 28 aa, Artificial Sequence
  Cyclic GFR-binding peptide
APTKLSPINVLYFDSSNNVIYGKIPNMV

SEQ ID NO: 68911 - protein, 31 aa, Artificial Sequence; identical to SEQ ID NO: 22307
  Cyclic GFR-binding peptide
  MOD_RES (1), (1): Xaa is C or S

SEQ ID NO: 68912 - protein, 35 aa, Artificial Sequence; identical to SEQ ID NO: 22311
  Cyclic GFR-binding peptide
  MOD_RES (1), (33), (35): Xaa is C or S

SEQ ID NO: 68913 - protein, 29 aa, Artificial Sequence
  Cyclic GFR-binding peptide
  MOD_RES (1), (2): Xaa is C or S
XXVPARLSPINILYFDAANNVVYGKIPDM

SEQ ID NO: 68914 - protein, 30 aa, Artificial Sequence
  Cyclic GFR-binding peptide
  MOD_RES (4), (5): Xaa is C or S
PASXXVPARLSPINILYFDAANNVVYGKIP

SEQ ID NO: 68915 - protein, 36 aa, Artificial Sequence; identical to SEQ ID NO: 22318
  Cyclic GFR-binding peptide
  MOD_RES (3), (4), (36): Xaa is C or S

SEQ ID NO: 68916 - protein, 32 aa, Artificial Sequence
  Cyclic GFR-binding peptide
  MOD_RES (4), (5): Xaa is C or S
PKPXXAPTQLSPINVLYFDDSSNVIYGKIPNM

SEQ ID NO: 68917 - protein, 32 aa, Artificial Sequence
  Cyclic GFR-binding peptide
  MOD_RES (29), (31): Xaa is C or S
RLSPINILYFDSANNVVYGKIPDMVVESXGXR

SEQ ID NO: 68918 - protein, 34 aa, Artificial Sequence
  Cyclic GFR-binding peptide
  MOD_RES (4), (5): Xaa is C or S
PKPXXAPTQLSPINVLYFDDSSNVIYGKIPNMVV

SEQ ID NO: 68919 - protein, 29 aa, Artificial Sequence
  Cyclic GFR-binding peptide
  MOD_RES (29), (29): Xaa is C or S
KLSPINVLYFDDSSNVIYGKIPNMVVRSX

SEQ ID NO: 68920 - protein, 31 aa, Artificial Sequence
  Cyclic GFR-binding peptide
  MOD_RES (28), (30): Xaa is C or S
LSPINMLYFDEYDKVVYGKIPEMVVEGXGXR

SEQ ID NO: 68921 - protein, 28 aa, Artificial Sequence
  Cyclic GFR-binding peptide
  MOD_RES (2), (3): Xaa is C or S
AXXVPTELSPINMLYFDENEKVVYGKIP

SEQ ID NO: 68922 - protein, 36 aa, Artificial Sequence; identical to SEQ ID NO: 22320
  Cyclic GFR-binding peptide
  MOD_RES (4), (5): Xaa is C or S

SEQ ID NO: 68923 - protein, 29 aa, Artificial Sequence
  Cyclic GFR-binding peptide
  MOD_RES (2), (3): Xaa is C or S
PXXAPTQLSPINVLYFDDSSNVIYGKIPN

SEQ ID NO: 68924 - protein, 29 aa, Artificial Sequence
  Cyclic GFR-binding peptide
  MOD_RES (29), (29): Xaa is C or S
RLSPINILYFDAANNVVYGKIPDMVVEAX

SEQ ID NO: 68925 - protein, 37 aa, Artificial Sequence; identical to SEQ ID NO: 22324
  Cyclic GFR-binding peptide
  MOD_RES (7), (7): Xaa is C or S

SEQ ID NO: 68926 - protein, 30 aa, Artificial Sequence
  Cyclic GFR-binding peptide
  MOD_RES (1), (2): Xaa is C or S
XXAPTKLSPINVLYFDDSSNVIYGKIPNMV

SEQ ID NO: 68927 - protein, 23 aa, Artificial Sequence
  Cyclic GFR-binding peptide
QLSPINVLYFDDSSNVIYGKIPN

SEQ ID NO: 68928 - protein, 29 aa, Artificial Sequence
  Cyclic GFR-binding peptide
APTQLSPINVLYFDDSSNVIYGKIPNMVV

SEQ ID NO: 68929 - protein, 35 aa, Artificial Sequence; identical to SEQ ID NO: 22335
  Cyclic GFR-binding peptide
  MOD_RES (1), (2), (34): Xaa is C or S

SEQ ID NO: 68930 - protein, 31 aa, Artificial Sequence
  Cyclic GFR-binding peptide
  MOD_RES (31), (31): Xaa is C or S
PTRLSPINILYFDSANNVVYGKIPDMVVESX

SEQ ID NO: 68931 - protein, 21 aa, Artificial Sequence
  Cyclic GFR-binding peptide
LSPINILYFDKGVVTYYGKIP

SEQ ID NO: 68932 - protein, 32 aa, Artificial Sequence
  Cyclic GFR-binding peptide
  MOD_RES (5), (5): Xaa is C or S
TKPTXAPTKLSPINVLYFDDSSNVIYGKIPNM

SEQ ID NO: 68933 - protein, 29 aa, Artificial Sequence
  Cyclic GFR-binding peptide
  MOD_RES (3), (4): Xaa is C or S
KAXXAPTKLSPINVLYFDSSNNVIYGKIP

SEQ ID NO: 68934 - protein, 29 aa, Artificial Sequence
  Cyclic GFR-binding peptide
VPTELSPINMLYFDENEKVVYGKIPDMVV

SEQ ID NO: 68935 - protein, 29 aa, Artificial Sequence
  Cyclic GFR-binding peptide
TKLSPINVLYFDSSNNVIYGKIPNMVVKA

SEQ ID NO: 68936 - protein, 31 aa, Artificial Sequence
  Cyclic GFR-binding peptide
  MOD_RES (3), (4): Xaa is C or S
STXXAPVKTSPINMLYFDNGRVLLYGKIPMI

SEQ ID NO: 68937 - protein, 34 aa, Artificial Sequence; identical to SEQ ID NO: 22338
  Cyclic GFR-binding peptide
  MOD_RES (1), (34): Xaa is C or S

SEQ ID NO: 68938 - protein, 24 aa, Artificial Sequence
  Cyclic GFR-binding peptide
KLSPINVLYFDDMGVPTYGKIPEG

SEQ ID NO: 68939 - protein, 39 aa, Artificial Sequence; identical to SEQ ID NO: 22339
  Cyclic GFR-binding peptide
  MOD_RES (6), (7), (39): Xaa is C or S

SEQ ID NO: 68940 - protein, 32 aa, Artificial Sequence
  Cyclic GFR-binding peptide
  MOD_RES (6), (7): Xaa is C or S
KVGKAXXVPTKLSPINVLYFDDMGVPTYGKIP

SEQ ID NO: 68941 - protein, 23 aa, Artificial Sequence
  Cyclic GFR-binding peptide
ARLSPINILYFDAANNVVYGKIP

SEQ ID NO: 68942 - protein, 29 aa, Artificial Sequence
  Cyclic GFR-binding peptide
APTKLSPINVLYFDDSSNVIYGKIPNMVV

SEQ ID NO: 68943 - protein, 33 aa, Artificial Sequence
  Cyclic GFR-binding peptide
  MOD_RES (6), (7): Xaa is C or S
KASKAXXVPTKLSPINILYFDKGVVTYYGKIPG

SEQ ID NO: 68944 - protein, 32 aa, Artificial Sequence
  Cyclic GFR-binding peptide
  MOD_RES (3), (4): Xaa is C or S
KPXXAPTKLSPINVLYFDDSSNVIYGKIPNMV

SEQ ID NO: 68945 - protein, 30 aa, Artificial Sequence
  Cyclic GFR-binding peptide
  MOD_RES (1), (1): Xaa is C or S
XAPTQLSPINVLYFDDSSNVIYGKIPNMVV

SEQ ID NO: 68946 - protein, 38 aa, Artificial Sequence; identical to SEQ ID NO: 22354
  Cyclic GFR-binding peptide
  MOD_RES (4), (5), (37): Xaa is C or S

SEQ ID NO: 68947 - protein, 29 aa, Artificial Sequence
  Cyclic GFR-binding peptide
  MOD_RES (27), (29): Xaa is C or S
SPINMLYFDEYDKVVYGKIPEMVVEGXGX

SEQ ID NO: 68948 - protein, 29 aa, Artificial Sequence
  Cyclic GFR-binding peptide
  MOD_RES (28), (28): Xaa is C or S
LSPINILYFDAANNVVYGKIPDMVVEAXG

SEQ ID NO: 68949 - protein, 39 aa, Artificial Sequence; identical to SEQ ID NO: 22356
  Cyclic GFR-binding peptide
  MOD_RES (6), (7), (39): Xaa is C or S

SEQ ID NO: 68950 - protein, 31 aa, Artificial Sequence
  Cyclic GFR-binding peptide
VPTKLSPINVLYFDDMGVPTYGKIPEGMSVA

SEQ ID NO: 68951 - protein, 26 aa, Artificial Sequence
  Cyclic GFR-binding peptide
RLSPINILYFDSANNVVYGKIPDMVV

SEQ ID NO: 68952 - protein, 34 aa, Artificial Sequence
  Cyclic GFR-binding peptide
  MOD_RES (6), (7): Xaa is C or S
SIPKAXXVPTELSPINMLYFDEYDKVVYGKIPEM

SEQ ID NO: 68953 - protein, 33 aa, Artificial Sequence
  Cyclic GFR-binding peptide
  MOD_RES (6), (7): Xaa is C or S
RVPSTXXAPVKTSPINMLYFDNGRVLLYGKIPM

SEQ ID NO: 68954 - protein, 32 aa, Artificial Sequence
  Cyclic GFR-binding peptide
  MOD_RES (3), (4): Xaa is C or S
PTXXVPTRLSPINILYFDSANNVVYGKIPDMV

SEQ ID NO: 68955 - protein, 24 aa, Artificial Sequence
  Cyclic GFR-binding peptide
PTELSPINMLYFDENEKVVYGKIP

SEQ ID NO: 68956 - protein, 30 aa, Artificial Sequence; identical to SEQ ID NO: 22365
  Cyclic GFR-binding peptide

SEQ ID NO: 68957 - protein, 23 aa, Artificial Sequence
  Cyclic GFR-binding peptide
KLSPINILYFDKGVVTYYGKIPG

SEQ ID NO: 68958 - protein, 36 aa, Artificial Sequence; identical to SEQ ID NO: 22369
  Cyclic GFR-binding peptide
  MOD_RES (5), (6): Xaa is C or S

SEQ ID NO: 68959 - protein, 35 aa, Artificial Sequence
  Cyclic GFR-binding peptide
  MOD_RES (6), (6): Xaa is C or S
VTKPTXAPTKLSPINVLYFDDSSNVIYGKIPNMVV

SEQ ID NO: 68960 - protein, 29 aa, Artificial Sequence
  Cyclic GFR-binding peptide
  MOD_RES (1), (1): Xaa is C or S
XAPTKLSPINVLYFDSSNNVIYGKIPNMV

SEQ ID NO: 68961 - protein, 31 aa, Artificial Sequence
  Cyclic GFR-binding peptide
  MOD_RES (29), (31): Xaa is C or S
RLSPINILYFDSANNVVYGKIPDMVVESXGX

SEQ ID NO: 68962 - protein, 40 aa, Artificial Sequence; identical to SEQ ID NO: 22379
  Cyclic GFR-binding peptide
  MOD_RES (4), (5), (37), (39): Xaa is C or S

SEQ ID NO: 68963 - protein, 32 aa, Artificial Sequence
  Cyclic GFR-binding peptide
  MOD_RES (31), (31): Xaa is C or S
PTQLSPINVLYFDDSSNVIYGKIPNMVVRAXG

SEQ ID NO: 68964 - protein, 34 aa, Artificial Sequence
  Cyclic GFR-binding peptide
  MOD_RES (6), (7): Xaa is C or S
STPPTXXVPTRLSPINILYFDSANNVVYGKIPDM

SEQ ID NO: 68965 - protein, 32 aa, Artificial Sequence
  Cyclic GFR-binding peptide
  MOD_RES (30), (32): Xaa is C or S
TKLSPINVLYFDSSNNVIYGKIPNMVVKAXGX

SEQ ID NO: 68966 - protein, 26 aa, Artificial Sequence
  Cyclic GFR-binding peptide
KTSPINMLYFDNGRVLLYGKIPMIVE

SEQ ID NO: 68967 - protein, 36 aa, Artificial Sequence; identical to SEQ ID NO: 22383
  Cyclic GFR-binding peptide
  MOD_RES (3), (4), (36): Xaa is C or S

SEQ ID NO: 68968 - protein, 22 aa, Artificial Sequence
  Cyclic GFR-binding peptide
SPINILYFDAANNVVYGKIPDM

SEQ ID NO: 68969 - protein, 33 aa, Artificial Sequence
  Cyclic GFR-binding peptide
  MOD_RES (30), (32): Xaa is C or S
TKLSPINVLYFDDSSNVIYGKIPNMVVRSXGXH

SEQ ID NO: 68970 - protein, 28 aa, Artificial Sequence
  Cyclic GFR-binding peptide
  MOD_RES (27), (27): Xaa is C or S
SPINMLYFDENEKVVYGKIPDMVVEGXG

SEQ ID NO: 68971 - protein, 22 aa, Artificial Sequence
  Cyclic GFR-binding peptide
SPINVLYFDSSNNVIYGKIPNM

SEQ ID NO: 68972 - protein, 25 aa, Artificial Sequence
  Cyclic GFR-binding peptide
VPTELSPINMLYFDEYDKVVYGKIP

SEQ ID NO: 68973 - protein, 38 aa, Artificial Sequence; identical to SEQ ID NO: 22388
  Cyclic GFR-binding peptide
  MOD_RES (2), (3), (35), (37): Xaa is C or S

SEQ ID NO: 68974 - protein, 23 aa, Artificial Sequence
  Cyclic GFR-binding peptide
LSPINVLYFDDSSNVIYGKIPNM

SEQ ID NO: 68975 - protein, 33 aa, Artificial Sequence
  Cyclic GFR-binding peptide
  MOD_RES (31), (33): Xaa is C or S
PTKLSPINVLYFDDSSNVIYGKIPNMVVRSXGX

SEQ ID NO: 68976 - protein, 31 aa, Artificial Sequence
  Cyclic GFR-binding peptide
  MOD_RES (4), (5): Xaa is C or S
PKPXXAPTQLSPINVLYFDDSSNVIYGKIPN

SEQ ID NO: 68977 - protein, 39 aa, Artificial Sequence; identical to SEQ ID NO: 22390
  Cyclic GFR-binding peptide
  MOD_RES (4), (36), (38): Xaa is C or S

SEQ ID NO: 68978 - protein, 28 aa, Artificial Sequence
  Cyclic GFR-binding peptide
  MOD_RES (1), (2): Xaa is C or S
XXVPTRLSPINILYFDSANNVVYGKIPD

SEQ ID NO: 68979 - protein, 32 aa, Artificial Sequence
  Cyclic GFR-binding peptide
  MOD_RES (5), (6): Xaa is C or S
ASKAXXVPTKLSPINILYFDKGVVTYYGKIPG

SEQ ID NO: 68980 - protein, 30 aa, Artificial Sequence
  Cyclic GFR-binding peptide
  MOD_RES (5), (5): Xaa is C or S
TKPTXAPTKLSPINVLYFDDSSNVIYGKIP

SEQ ID NO: 68981 - protein, 24 aa, Artificial Sequence
  Cyclic GFR-binding peptide
LSPINILYFDKGVVTYYGKIPGMA

SEQ ID NO: 68982 - protein, 29 aa, Artificial Sequence
  Cyclic GFR-binding peptide
VPTRLSPINILYFDSANNVVYGKIPDMVV

SEQ ID NO: 68983 - protein, 29 aa, Artificial Sequence
  Cyclic GFR-binding peptide
SPINVLYFDDMGVPTYGKIPAAAAAAAAA

SEQ ID NO: 68984 - protein, 29 aa, Artificial Sequence
  Cyclic GFR-binding peptide
SPINVLYFDSSNNVIYGKIPAAAAAAAAA

SEQ ID NO: 68985 - protein, 37 aa, Artificial Sequence; identical to SEQ ID NO: 22408
  Cyclic GFR-binding peptide
  MOD_RES (6), (7): Xaa is C or S

SEQ ID NO: 68986 - protein, 31 aa, Artificial Sequence
  Cyclic GFR-binding peptide
  MOD_RES (5), (6): Xaa is C or S
IPKAXXVPTELSPINMLYFDENEKVVYGKIP

SEQ ID NO: 68987 - protein, 26 aa, Artificial Sequence
  Cyclic GFR-binding peptide
SPINVLYFDDMGVPTYGKIPEGMSVA

SEQ ID NO: 68988 - protein, 33 aa, Artificial Sequence
  Cyclic GFR-binding peptide
  MOD_RES (4), (5): Xaa is C or S
PKPXXAPTKLSPINVLYFDDSSNVIYGKIPNMV

SEQ ID NO: 68989 - protein, 37 aa, Artificial Sequence
  Cyclic GFR-binding peptide
  MOD_RES (5), (6): Xaa is C or S
VGKAXXVPTKLSPINVLYFDDMGVPTYGKIPEGMSVA

SEQ ID NO: 68990 - protein, 34 aa, Artificial Sequence
  Cyclic GFR-binding peptide
  MOD_RES (5), (6): Xaa is C or S
ASKAXXVPTKLSPINILYFDKGVVTYYGKIPGMA

SEQ ID NO: 68991 - protein, 34 aa, Artificial Sequence
  Cyclic GFR-binding peptide
  MOD_RES (4), (5): Xaa is C or S
PSTXXAPVKTSPINMLYFDNGRVLLYGKIPMIVE

SEQ ID NO: 68992 - protein, 31 aa, Artificial Sequence
  Cyclic GFR-binding peptide
  MOD_RES (2), (3): Xaa is C or S
AXXVPTELSPINMLYFDEYDKVVYGKIPEMV

SEQ ID NO: 68993 - protein, 27 aa, Artificial Sequence
  Cyclic GFR-binding peptide
  MOD_RES (27), (27): Xaa is C or S
SPINILYFDSANNVVYGKIPDMVVESX

SEQ ID NO: 68994 - protein, 37 aa, Artificial Sequence; identical to SEQ ID NO: 22413
  Cyclic GFR-binding peptide
  MOD_RES (1), (2), (34), (36): Xaa is C or S

SEQ ID NO: 68995 - protein, 30 aa, Artificial Sequence
  Cyclic GFR-binding peptide
PTKLSPINVLYFDDSSNVIYGKIPNMVVRS

SEQ ID NO: 68996 - protein, 28 aa, Artificial Sequence
  Cyclic GFR-binding peptide
  MOD_RES (28), (28): Xaa is C or S
KTSPINMLYFDNGRVLLYGKIPMIVEEX

SEQ ID NO: 68997 - protein, 25 aa, Artificial Sequence
  Cyclic GFR-binding peptide
APTQLSPINVLYFDDSSNVIYGKIP

SEQ ID NO: 68998 - protein, 38 aa, Artificial Sequence; identical to SEQ ID NO: 22417
  Cyclic GFR-binding peptide
  MOD_RES (4), (5), (38): Xaa is C or S

SEQ ID NO: 68999 - protein, 35 aa, Artificial Sequence; identical to SEQ ID NO: 22421
  Cyclic GFR-binding peptide
  MOD_RES (1), (33), (35): Xaa is C or S

SEQ ID NO: 69000 - protein, 24 aa, Artificial Sequence
  Cyclic GFR-binding peptide
LSPINMLYFDENEKVVYGKIPDMV

SEQ ID NO: 69001 - protein, 33 aa, Artificial Sequence
  Cyclic GFR-binding peptide
  MOD_RES (6), (7): Xaa is C or S
KVGKAXXVPTKLSPINVLYFDDMGVPTYGKIPE

SEQ ID NO: 69002 - protein, 42 aa, Artificial Sequence; identical to SEQ ID NO: 22425
  Cyclic GFR-binding peptide
  MOD_RES (6), (7), (39), (41): Xaa is C or S

SEQ ID NO: 69003 - protein, 33 aa, Artificial Sequence
  Cyclic GFR-binding peptide
  MOD_RES (3), (4): Xaa is C or S
KPXXAPTQLSPINVLYFDDSSNVIYGKIPNMVV

SEQ ID NO: 69004 - protein, 31 aa, Artificial Sequence
  Cyclic GFR-binding peptide
  MOD_RES (28), (30): Xaa is C or S
LSPINILYFDKGVVTYYGKIPGMAVSEXGXR

SEQ ID NO: 69005 - protein, 28 aa, Artificial Sequence
  Cyclic GFR-binding peptide
  MOD_RES (1), (1): Xaa is C or S
XVPARLSPINILYFDAANNVVYGKIPDM

SEQ ID NO: 69006 - protein, 27 aa, Artificial Sequence
  Cyclic GFR-binding peptide
RLSPINILYFDAANNVVYGKIPDMVVE

SEQ ID NO: 69007 - protein, 32 aa, Artificial Sequence
  Cyclic GFR-binding peptide
  MOD_RES (3), (4): Xaa is C or S
KAXXVPTELSPINMLYFDENEKVVYGKIPDMV

SEQ ID NO: 69008 - protein, 27 aa, Artificial Sequence
  Cyclic GFR-binding peptide
TKLSPINVLYFDDSSNVIYGKIPNMVV

SEQ ID NO: 69009 - protein, 23 aa, Artificial Sequence
  Cyclic GFR-binding peptide
LSPINILYFDSANNVVYGKIPDM

SEQ ID NO: 69010 - protein, 28 aa, Artificial Sequence
  Cyclic GFR-binding peptide
  MOD_RES (28), (28): Xaa is C or S
LSPINILYFDKGVVTYYGKIPGMAVSEX

SEQ ID NO: 69011 - protein, 27 aa, Artificial Sequence
  Cyclic GFR-binding peptide
  MOD_RES (1), (1): Xaa is C or S
XVPTELSPINMLYFDEYDKVVYGKIPE

SEQ ID NO: 69012 - protein, 25 aa, Artificial Sequence
  Cyclic GFR-binding peptide
ELSPINMLYFDEYDKVVYGKIPEMV

SEQ ID NO: 69013 - protein, 21 aa, Artificial Sequence
  Cyclic GFR-binding peptide
TSPINMLYFDNGRVLLYGKIP

SEQ ID NO: 69014 - protein, 26 aa, Artificial Sequence
  Cyclic GFR-binding peptide
QLSPINVLYFDDSSNVIYGKIPNMVV

SEQ ID NO: 69015 - protein, 38 aa, Artificial Sequence; identical to SEQ ID NO: 22441
  Cyclic GFR-binding peptide
  MOD_RES (4), (5), (36), (38): Xaa is C or S

SEQ ID NO: 69016 - protein, 37 aa, Artificial Sequence; identical to SEQ ID NO: 22444
  Cyclic GFR-binding peptide
  MOD_RES (1), (2), (34), (36): Xaa is C or S

SEQ ID NO: 69017 - protein, 29 aa, Artificial Sequence
  Cyclic GFR-binding peptide
  MOD_RES (1), (1): Xaa is C or S
XVPTKLSPINILYFDKGVVTYYGKIPGMA

SEQ ID NO: 69018 - protein, 25 aa, Artificial Sequence
  Cyclic GFR-binding peptide
SPINVLYFDSSNNVIYGKIPNMVVK

SEQ ID NO: 69019 - protein, 25 aa, Artificial Sequence
  Cyclic GFR-binding peptide
RLSPINILYFDSANNVVYGKIPDMV

SEQ ID NO: 69020 - protein, 33 aa, Artificial Sequence
  Cyclic GFR-binding peptide
  MOD_RES (4), (5): Xaa is C or S
PKAXXVPTELSPINMLYFDENEKVVYGKIPDMV

SEQ ID NO: 69021 - protein, 36 aa, Artificial Sequence; identical to SEQ ID NO: 22453
  Cyclic GFR-binding peptide
  MOD_RES (3), (35): Xaa is C or S

SEQ ID NO: 69022 - protein, 28 aa, Artificial Sequence
  Cyclic GFR-binding peptide
KLSPINVLYFDDSSNVIYGKIPNMVVRS

SEQ ID NO: 69023 - protein, 25 aa, Artificial Sequence
  Cyclic GFR-binding peptide
TRLSPINILYFDSANNVVYGKIPDM

SEQ ID NO: 69024 - protein, 30 aa, Artificial Sequence
  Cyclic GFR-binding peptide
  MOD_RES (1), (1): Xaa is C or S
XVPTELSPINMLYFDENEKVVYGKIPDMVV

SEQ ID NO: 69025 - protein, 24 aa, Artificial Sequence
  Cyclic GFR-binding peptide
ELSPINMLYFDEYDKVVYGKIPEM

SEQ ID NO: 69026 - protein, 29 aa, Artificial Sequence
  Cyclic GFR-binding peptide
PTKLSPINVLYFDDSSNVIYGKIPNMVVR

SEQ ID NO: 69027 - protein, 24 aa, Artificial Sequence
  Cyclic GFR-binding peptide
EYQKYLLVRGNDIYLMSIPSTKVP

SEQ ID NO: 69028 - protein, 35 aa, Artificial Sequence; identical to SEQ ID NO: 22463
  Cyclic GFR-binding peptide
  MOD_RES (31), (32): Xaa is C or S

SEQ ID NO: 69029 - protein, 25 aa, Artificial Sequence
  Cyclic GFR-binding peptide
VVMDEYQKYVVNNASDIYLISIPSL

SEQ ID NO: 69030 - protein, 27 aa, Artificial Sequence
  Cyclic GFR-binding peptide
  MOD_RES (2), (2): Xaa is C or S
GXEEVIMEYQKYLLVRGNDIYLMSIPS

SEQ ID NO: 69031 - protein, 32 aa, Artificial Sequence; identical to SEQ ID NO: 22464
  Cyclic GFR-binding peptide
  MOD_RES (2), (2): Xaa is C or S

SEQ ID NO: 69032 - protein, 30 aa, Artificial Sequence
  Cyclic GFR-binding peptide
  MOD_RES (27), (28): Xaa is C or S
MEYQKYLLVRGNDIYLMSIPSTKVPAXXTS

SEQ ID NO: 69033 - protein, 21 aa, Artificial Sequence
  Cyclic GFR-binding peptide
EYQKYIIQQKDNIYLMSIPSM

SEQ ID NO: 69034 - protein, 32 aa, Artificial Sequence; identical to SEQ ID NO: 22467
  Cyclic GFR-binding peptide
  MOD_RES (1), (32): Xaa is C or S

SEQ ID NO: 69035 - protein, 28 aa, Artificial Sequence
  Cyclic GFR-binding peptide
  MOD_RES (2), (2): Xaa is C or S
GXSEVVMDEYQKYVVNNASDIYLISIPS

SEQ ID NO: 69036 - protein, 31 aa, Artificial Sequence
  Cyclic GFR-binding peptide
  MOD_RES (29), (30): Xaa is C or S
VMDEYQKYVVNNASDIYLISIPSLRTPVXXT

SEQ ID NO: 69037 - protein, 27 aa, Artificial Sequence
  Cyclic GFR-binding peptide
EVVMDEYQKYVVNNASDIYLISIPSLR

SEQ ID NO: 69038 - protein, 33 aa, Artificial Sequence; identical to SEQ ID NO: 22468
  Cyclic GFR-binding peptide
  MOD_RES (1), (33): Xaa is C or S

SEQ ID NO: 69039 - protein, 24 aa, Artificial Sequence
  Cyclic GFR-binding peptide
EYQKYVVNNASDIYLISIPSLRTP

SEQ ID NO: 69040 - protein, 29 aa, Artificial Sequence
  Cyclic GFR-binding peptide
  MOD_RES (2), (4): Xaa is C or S
LXGXEEVIMEYQKYLLVRGNDIYLMSIPS

SEQ ID NO: 69041 - protein, 33 aa, Artificial Sequence; identical to SEQ ID NO: 22474
  Cyclic GFR-binding peptide
  MOD_RES (32), (33): Xaa is C or S

SEQ ID NO: 69042 - protein, 29 aa, Artificial Sequence
  Cyclic GFR-binding peptide
  MOD_RES (28), (29): Xaa is C or S
IMEYQKYLLVRGNDIYLMSIPSTKVPAXX

SEQ ID NO: 69043 - protein, 22 aa, Artificial Sequence
  Cyclic GFR-binding peptide
IMEYQKYLLVRGNDIYLMSIPS

SEQ ID NO: 69044 - protein, 32 aa, Artificial Sequence
  Cyclic GFR-binding peptide
  MOD_RES (29), (30): Xaa is C or S
VMDEYQKYVVNNASDIYLISIPSLRTPVXXTP

SEQ ID NO: 69045 - protein, 22 aa, Artificial Sequence
  Cyclic GFR-binding peptide
MEYQKYLLVRGNDIYLMSIPST

SEQ ID NO: 69046 - protein, 33 aa, Artificial Sequence
  Cyclic GFR-binding peptide
  MOD_RES (30), (31): Xaa is C or S
VVMGEYQKYIIQQKDNIYLMSIPSMKTPTXXPG

SEQ ID NO: 69047 - protein, 24 aa, Artificial Sequence
  Cyclic GFR-binding peptide
MEYQKYLLVRGNDIYLMSIPSTKV

SEQ ID NO: 69048 - protein, 36 aa, Artificial Sequence
  Cyclic GFR-binding peptide
  MOD_RES (1), (33), (34): Xaa is C or S
XSEVVMDEYQKYVVNNASDIYLISIPSLRTPVXXTP

SEQ ID NO: 69049 - protein, 28 aa, Artificial Sequence
  Cyclic GFR-binding peptide
  MOD_RES (26), (27): Xaa is C or S
EYQKYIIQQKDNIYLMSIPSMKTPTXXP

SEQ ID NO: 69050 - protein, 33 aa, Artificial Sequence
  Cyclic GFR-binding peptide
  MOD_RES (30), (31): Xaa is C or S
EVIMEYQKYLLVRGNDIYLMSIPSTKVPAXXTS

SEQ ID NO: 69051 - protein, 36 aa, Artificial Sequence; identical to SEQ ID NO: 22480
  Cyclic GFR-binding peptide
  MOD_RES (1), (32), (33): Xaa is C or S

SEQ ID NO: 69052 - protein, 41 aa, Artificial Sequence; identical to SEQ ID NO: 22481
  Cyclic GFR-binding peptide
  MOD_RES (2), (4), (36), (37): Xaa is C or S

SEQ ID NO: 69053 - protein, 23 aa, Artificial Sequence
  Cyclic GFR-binding peptide
IMEYQKYLLVRGNDIYLMSIPST

SEQ ID NO: 69054 - protein, 35 aa, Artificial Sequence
  Cyclic GFR-binding peptide
  MOD_RES (30), (31): Xaa is C or S
VVMGEYQKYIIQQKDNIYLMSIPSMKTPTXXPGAS

SEQ ID NO: 69055 - protein, 33 aa, Artificial Sequence
  Cyclic GFR-binding peptide
  MOD_RES (27), (28): Xaa is C or S
MEYQKYLLVRGNDIYLMSIPSTKVPAXXTSPVR

SEQ ID NO: 69056 - protein, 28 aa, Artificial Sequence
  Cyclic GFR-binding peptide
  MOD_RES (1), (1): Xaa is C or S
XRDVVMGEYQKYIIQQKDNIYLMSIPSM

SEQ ID NO: 69057 - protein, 30 aa, Artificial Sequence
  Cyclic GFR-binding peptide
  MOD_RES (28), (29): Xaa is C or S
MGEYQKYIIQQKDNIYLMSIPSMKTPTXXP

SEQ ID NO: 69058 - protein, 30 aa, Artificial Sequence
  Cyclic GFR-binding peptide
  MOD_RES (30), (30): Xaa is C or S
VVMGEYQKYIIQQKDNIYLMSIPSMKTPTX

SEQ ID NO: 69059 - protein, 39 aa, Artificial Sequence
  Cyclic GFR-binding peptide
  MOD_RES (2), (34), (35): Xaa is C or S
GXSEVVMDEYQKYVVNNASDIYLISIPSLRTPVXXTPPT

SEQ ID NO: 69060 - protein, 28 aa, Artificial Sequence
  Cyclic GFR-binding peptide
  MOD_RES (28), (28): Xaa is C or S
IMEYQKYLLVRGNDIYLMSIPSTKVPAX

SEQ ID NO: 69061 - protein, 32 aa, Artificial Sequence
  Cyclic GFR-binding peptide
  MOD_RES (26), (27): Xaa is C or S
EYQKYIVNSSDDIYLVSIPSLKTPAXXPKPVH

SEQ ID NO: 69062 - protein, 23 aa, Artificial Sequence
  Cyclic GFR-binding peptide
VIMEYQKYLLVRGNDIYLMSIPS

SEQ ID NO: 69063 - protein, 35 aa, Artificial Sequence
  Cyclic GFR-binding peptide
  MOD_RES (30), (31): Xaa is C or S
VVMDEYQKYVVNNASDIYLISIPSLRTPVXXTPPT

SEQ ID NO: 69064 - protein, 31 aa, Artificial Sequence
  Cyclic GFR-binding peptide
  MOD_RES (30), (31): Xaa is C or S
EVIMEYQKYLLVRGNDIYLMSIPSTKVPAXX

SEQ ID NO: 69065 - protein, 30 aa, Artificial Sequence; identical to SEQ ID NO: 22492
  Cyclic GFR-binding peptide

SEQ ID NO: 69066 - protein, 32 aa, Artificial Sequence
  Cyclic GFR-binding peptide
  MOD_RES (2), (4): Xaa is C or S
RXGXSEVVMDEYQKYVVNNASDIYLISIPSLR

SEQ ID NO: 69067 - protein, 40 aa, Artificial Sequence
  Cyclic GFR-binding peptide
  MOD_RES (1), (3), (35), (36): Xaa is C or S
XGXSEVVMDEYQKYVVNNASDIYLISIPSLRTPVXXTPPT

SEQ ID NO: 69068 - protein, 25 aa, Artificial Sequence
  Cyclic GFR-binding peptide
DVVMGEYQKYIIQQKDNIYLMSIPS

SEQ ID NO: 69069 - protein, 40 aa, Artificial Sequence; identical to SEQ ID NO: 22497
  Cyclic GFR-binding peptide
  MOD_RES (2), (34), (35): Xaa is C or S

SEQ ID NO: 69070 - protein, 33 aa, Artificial Sequence; identical to SEQ ID NO: 22501
  Cyclic GFR-binding peptide
  MOD_RES (1), (3): Xaa is C or S

SEQ ID NO: 69071 - protein, 38 aa, Artificial Sequence
  Cyclic GFR-binding peptide
  MOD_RES (2), (34), (35): Xaa is C or S
GXSEVVMDEYQKYVVNNASDIYLISIPSLRTPVXXTPP

SEQ ID NO: 69072 - protein, 30 aa, Artificial Sequence
  Cyclic GFR-binding peptide
  MOD_RES (1), (1): Xaa is C or S
XEEVIMEYQKYLLVRGNDIYLMSIPSTKVP

SEQ ID NO: 69073 - protein, 27 aa, Artificial Sequence
  Cyclic GFR-binding peptide
  MOD_RES (1), (1): Xaa is C or S
XRDVVMGEYQKYIIQQKDNIYLMSIPS

SEQ ID NO: 69074 - protein, 25 aa, Artificial Sequence
  Cyclic GFR-binding peptide
EEVIMEYQKYLLVRGNDIYLMSIPS

SEQ ID NO: 69075 - protein, 28 aa, Artificial Sequence
  Cyclic GFR-binding peptide
VIMEYQKYLLVRGNDIYLMSIPSTKVPA

SEQ ID NO: 69076 - protein, 26 aa, Artificial Sequence
  Cyclic GFR-binding peptide
MGEYQKYIIQQKDNIYLMSIPSMKTP

SEQ ID NO: 69077 - protein, 37 aa, Artificial Sequence; identical to SEQ ID NO: 22502
  Cyclic GFR-binding peptide
  MOD_RES (2), (34), (35): Xaa is C or S

SEQ ID NO: 69078 - protein, 32 aa, Artificial Sequence
  Cyclic GFR-binding peptide
  MOD_RES (2), (2): Xaa is C or S
GXRDVVMGEYQKYIIQQKDNIYLMSIPSMKTP

SEQ ID NO: 69079 - protein, 28 aa, Artificial Sequence
  Cyclic GFR-binding peptide
VMGEYQKYIIQQKDNIYLMSIPSMKTPT

SEQ ID NO: 69080 - protein, 37 aa, Artificial Sequence
  Cyclic GFR-binding peptide
  MOD_RES (2), (34), (35): Xaa is C or S
GXSEVVMDEYQKYVVNNASDIYLISIPSLRTPVXXTP

SEQ ID NO: 69081 - protein, 34 aa, Artificial Sequence; identical to SEQ ID NO: 22507
  Cyclic GFR-binding peptide
  MOD_RES (1), (3): Xaa is C or S

SEQ ID NO: 69082 - protein, 38 aa, Artificial Sequence; identical to SEQ ID NO: 22508
  Cyclic GFR-binding peptide
  MOD_RES (1), (3), (34), (35): Xaa is C or S

SEQ ID NO: 69083 - protein, 22 aa, Artificial Sequence
  Cyclic GFR-binding peptide
GEYQKYIIQQKDNIYLMSIPSM

SEQ ID NO: 69084 - protein, 37 aa, Artificial Sequence; identical to SEQ ID NO: 22511
  Cyclic GFR-binding peptide
  MOD_RES (1), (33), (34): Xaa is C or S

SEQ ID NO: 69085 - protein, 37 aa, Artificial Sequence
  Cyclic GFR-binding peptide
  MOD_RES (32), (33): Xaa is C or S
SEVVMDEYQKYVVNNASDIYLISIPSLRTPVXXTPPT

SEQ ID NO: 69086 - protein, 36 aa, Artificial Sequence; identical to SEQ ID NO: 22513
  Cyclic GFR-binding peptide
  MOD_RES (32), (33): Xaa is C or S

SEQ ID NO: 69087 - protein, 30 aa, Artificial Sequence
  Cyclic GFR-binding peptide
  MOD_RES (29), (30): Xaa is C or S
VMGEYQKYIIQQKDNIYLMSIPSMKTPTXX

SEQ ID NO: 69088 - protein, 31 aa, Artificial Sequence
  Cyclic GFR-binding peptide
  MOD_RES (2), (4): Xaa is C or S
SXGXRDVVMGEYQKYIIQQKDNIYLMSIPSM

SEQ ID NO: 69089 - protein, 30 aa, Artificial Sequence
  Cyclic GFR-binding peptide
  MOD_RES (26), (27): Xaa is C or S
EYQKYIIQQKDNIYLMSIPSMKTPTXXPGA

SEQ ID NO: 69090 - protein, 36 aa, Artificial Sequence; identical to SEQ ID NO: 22516
  Cyclic GFR-binding peptide
  MOD_RES (1), (3), (34), (35): Xaa is C or S

SEQ ID NO: 69091 - protein, 29 aa, Artificial Sequence
  Cyclic GFR-binding peptide
  MOD_RES (1), (3): Xaa is C or S
XGXSEVVMDEYQKYVVNNASDIYLISIPS

SEQ ID NO: 69092 - protein, 27 aa, Artificial Sequence
  Cyclic GFR-binding peptide
  MOD_RES (27), (27): Xaa is C or S
MEYQKYLLVRGNDIYLMSIPSTKVPAX

SEQ ID NO: 69093 - protein, 36 aa, Artificial Sequence; identical to SEQ ID NO: 22519
  Cyclic GFR-binding peptide
  MOD_RES (31), (32): Xaa is C or S

SEQ ID NO: 69094 - protein, 24 aa, Artificial Sequence
  Cyclic GFR-binding peptide
VVMGEYQKYIIQQKDNIYLMSIPS

SEQ ID NO: 69095 - protein, 29 aa, Artificial Sequence
  Cyclic GFR-binding peptide
  MOD_RES (1), (1): Xaa is C or S
XSEVVMDEYQKYVVNNASDIYLISIPSLR

SEQ ID NO: 69096 - protein, 33 aa, Artificial Sequence
  Cyclic GFR-binding peptide
  MOD_RES (2), (2): Xaa is C or S
GXSEVVMDEYQKYVVNNASDIYLISIPSLRTPV

SEQ ID NO: 69097 - protein, 33 aa, Artificial Sequence
  Cyclic GFR-binding peptide
  MOD_RES (29), (30): Xaa is C or S
VMGEYQKYIIQQKDNIYLMSIPSMKTPTXXPGA

SEQ ID NO: 69098 - protein, 31 aa, Artificial Sequence; identical to SEQ ID NO: 22523
  Cyclic GFR-binding peptide

SEQ ID NO: 69099 - protein, 32 aa, Artificial Sequence
  Cyclic GFR-binding peptide
  MOD_RES (26), (27): Xaa is C or S
EYQKYVVNNASDIYLISIPSLRTPVXXTPPTS

SEQ ID NO: 69100 - protein, 27 aa, Artificial Sequence
  Cyclic GFR-binding peptide
  MOD_RES (1), (1): Xaa is C or S
XEEVIMEYQKYLLVRGNDIYLMSIPST

SEQ ID NO: 69101 - protein, 40 aa, Artificial Sequence; identical to SEQ ID NO: 22527
  Cyclic GFR-binding peptide
  MOD_RES (2), (4), (36), (37): Xaa is C or S

SEQ ID NO: 69102 - protein, 33 aa, Artificial Sequence
  Cyclic GFR-binding peptide
  MOD_RES (28), (29): Xaa is C or S
MDEYQKYVVNNASDIYLISIPSLRTPVXXTPPT

SEQ ID NO: 69103 - protein, 20 aa, Artificial Sequence
  Cyclic GFR-binding peptide
EYQKYIIQQKDNIYLMSIPS

SEQ ID NO: 69104 - protein, 34 aa, Artificial Sequence
  Cyclic GFR-binding peptide
  MOD_RES (31), (32): Xaa is C or S
EVVMDEYQKYVVNNASDIYLISIPSLRTPVXXTP

SEQ ID NO: 69105 - protein, 31 aa, Artificial Sequence
  Cyclic GFR-binding peptide
  MOD_RES (30), (31): Xaa is C or S
VVMDEYQKYVVNNASDIYLISIPSLRTPVXX

SEQ ID NO: 69106 - protein, 34 aa, Artificial Sequence
  Cyclic GFR-binding peptide
  MOD_RES (2), (34): Xaa is C or S
GXSEVVMDEYQKYVVNNASDIYLISIPSLRTPVX

SEQ ID NO: 69107 - protein, 37 aa, Artificial Sequence
  Cyclic GFR-binding peptide
  MOD_RES (1), (3), (35), (36): Xaa is C or S
XGXSEVVMDEYQKYVVNNASDIYLISIPSLRTPVXXT

SEQ ID NO: 69108 - protein, 34 aa, Artificial Sequence; identical to SEQ ID NO: 22531
  Cyclic GFR-binding peptide
  MOD_RES (1), (32), (33): Xaa is C or S

SEQ ID NO: 69109 - protein, 33 aa, Artificial Sequence
  Cyclic GFR-binding peptide
  MOD_RES (32), (33): Xaa is C or S
SEVVMDEYQKYVVNNASDIYLISIPSLRTPVXX

SEQ ID NO: 69110 - protein, 29 aa, Artificial Sequence
  Cyclic GFR-binding peptide
  MOD_RES (26), (27): Xaa is C or S
EYQKYLLVRGNDIYLMSIPSTKVPAXXTS

SEQ ID NO: 69111 - protein, 28 aa, Artificial Sequence
  Cyclic GFR-binding peptide
  MOD_RES (1), (1): Xaa is C or S
XSEVVMDEYQKYVVNNASDIYLISIPSL

SEQ ID NO: 69112 - protein, 28 aa, Artificial Sequence
  Cyclic GFR-binding peptide
  MOD_RES (1), (3): Xaa is C or S
XGXEEVIMEYQKYLLVRGNDIYLMSIPS

SEQ ID NO: 69113 - protein, 34 aa, Artificial Sequence
  Cyclic GFR-binding peptide
  MOD_RES (2), (4): Xaa is C or S
SXGXRDVVMGEYQKYIIQQKDNIYLMSIPSMKTP

SEQ ID NO: 69114 - protein, 25 aa, Artificial Sequence
  Cyclic GFR-binding peptide
EYQKYLLVRGNDIYLMSIPSTKVPA

SEQ ID NO: 69115 - protein, 30 aa, Artificial Sequence; identical to SEQ ID NO: 1993
  Cyclic GFR-binding peptide

SEQ ID NO: 69116 - protein, 29 aa, Artificial Sequence
  Cyclic GFR-binding peptide
  MOD_RES (2), (2): Xaa is C or S
GXEEVIMEYQKYLLVRGNDIYLMSIPSTK

SEQ ID NO: 69117 - protein, 37 aa, Artificial Sequence; identical to SEQ ID NO: 22534
  Cyclic GFR-binding peptide
  MOD_RES (2), (4), (35), (36): Xaa is C or S

SEQ ID NO: 69118 - protein, 36 aa, Artificial Sequence
  Cyclic GFR-binding peptide
  MOD_RES (30), (31): Xaa is C or S
VVMGEYQKYIIQQKDNIYLMSIPSMKTPTXXPGASG

SEQ ID NO: 69119 - protein, 33 aa, Artificial Sequence; identical to SEQ ID NO: 22537
  Cyclic GFR-binding peptide
  MOD_RES (31), (32): Xaa is C or S

SEQ ID NO: 69120 - protein, 33 aa, Artificial Sequence
  Cyclic GFR-binding peptide
  MOD_RES (30), (31): Xaa is C or S
VVMDEYQKYVVNNASDIYLISIPSLRTPVXXTP

SEQ ID NO: 69121 - protein, 36 aa, Artificial Sequence
  Cyclic GFR-binding peptide
  MOD_RES (30), (31): Xaa is C or S
VVMNEYQKYIVNSSDDIYLVSIPSLKTPAXXPKPVH

SEQ ID NO: 69122 - protein, 30 aa, Artificial Sequence
  Cyclic GFR-binding peptide
  MOD_RES (2), (4): Xaa is C or S
RXGXSEVVMDEYQKYVVNNASDIYLISIPS

SEQ ID NO: 69123 - protein, 23 aa, Artificial Sequence
  Cyclic GFR-binding peptide
MGEYQKYIIQQKDNIYLMSIPSM

SEQ ID NO: 69124 - protein, 31 aa, Artificial Sequence
  Cyclic GFR-binding peptide
  MOD_RES (26), (27): Xaa is C or S
EYQKYVVNNASDIYLISIPSLRTPVXXTPPT

SEQ ID NO: 69125 - protein, 33 aa, Artificial Sequence; identical to SEQ ID NO: 22542
  Cyclic GFR-binding peptide
  MOD_RES (1), (32), (33): Xaa is C or S

SEQ ID NO: 69126 - protein, 34 aa, Artificial Sequence; identical to SEQ ID NO: 22543
  Cyclic GFR-binding peptide
  MOD_RES (31), (32): Xaa is C or S

SEQ ID NO: 69127 - protein, 29 aa, Artificial Sequence
  Cyclic GFR-binding peptide
  MOD_RES (26), (27): Xaa is C or S
EYQKYVVNNASDIYLISIPSLRTPVXXTP

SEQ ID NO: 69128 - protein, 35 aa, Artificial Sequence
  Cyclic GFR-binding peptide
  MOD_RES (32), (33): Xaa is C or S
SEVVMDEYQKYVVNNASDIYLISIPSLRTPVXXTP

SEQ ID NO: 69129 - protein, 31 aa, Artificial Sequence
  Cyclic GFR-binding peptide
SEVVMDEYQKYVVNNASDIYLISIPSLRTPV

SEQ ID NO: 69130 - protein, 35 aa, Artificial Sequence
  Cyclic GFR-binding peptide
  MOD_RES (30), (31): Xaa is C or S
EVIMEYQKYLLVRGNDIYLMSIPSTKVPAXXTSPV

SEQ ID NO: 69131 - protein, 21 aa, Artificial Sequence
  Cyclic GFR-binding peptide
GEYQKYIIQQKDNIYLMSIPS

SEQ ID NO: 69132 - protein, 39 aa, Artificial Sequence; identical to SEQ ID NO: 22548
  Cyclic GFR-binding peptide
  MOD_RES (2), (4), (36), (37): Xaa is C or S

SEQ ID NO: 69133 - protein, 25 aa, Artificial Sequence
  Cyclic GFR-binding peptide
MEYQKYLLVRGNDIYLMSIPSTKVP

SEQ ID NO: 69134 - protein, 27 aa, Artificial Sequence
  Cyclic GFR-binding peptide
MGEYQKYIIQQKDNIYLMSIPSMKTPT

SEQ ID NO: 69135 - protein, 29 aa, Artificial Sequence
  Cyclic GFR-binding peptide
  MOD_RES (1), (1): Xaa is C or S
XRDVVMGEYQKYIIQQKDNIYLMSIPSMK

SEQ ID NO: 69136 - protein, 38 aa, Artificial Sequence
  Cyclic GFR-binding peptide
  MOD_RES (1), (3), (35), (36): Xaa is C or S
XGXSEVVMDEYQKYVVNNASDIYLISIPSLRTPVXXTP

SEQ ID NO: 69137 - protein, 33 aa, Artificial Sequence
  Cyclic GFR-binding peptide
  MOD_RES (29), (30): Xaa is C or S
VIMEYQKYLLVRGNDIYLMSIPSTKVPAXXTSP

SEQ ID NO: 69138 - protein, 24 aa, Artificial Sequence
  Cyclic GFR-binding peptide
EVIMEYQKYLLVRGNDIYLMSIPS

SEQ ID NO: 69139 - protein, 31 aa, Artificial Sequence
  Cyclic GFR-binding peptide
  MOD_RES (28), (29): Xaa is C or S
MGEYQKYIIQQKDNIYLMSIPSMKTPTXXPG

SEQ ID NO: 69140 - protein, 38 aa, Artificial Sequence
  Cyclic GFR-binding peptide
  MOD_RES (32), (33): Xaa is C or S
SEVVMDEYQKYVVNNASDIYLISIPSLRTPVXXTPPTS

SEQ ID NO: 69141 - protein, 33 aa, Artificial Sequence
  Cyclic GFR-binding peptide
  MOD_RES (27), (28): Xaa is C or S
GEYQKYIIQQKDNIYLMSIPSMKTPTXXPGASG

SEQ ID NO: 69142 - protein, 37 aa, Artificial Sequence; identical to SEQ ID NO: 22564
  Cyclic GFR-binding peptide
  MOD_RES (31), (32): Xaa is C or S

SEQ ID NO: 69143 - protein, 30 aa, Artificial Sequence
  Cyclic GFR-binding peptide
  MOD_RES (2), (4): Xaa is C or S
SXGXRDVVMGEYQKYIIQQKDNIYLMSIPS

SEQ ID NO: 69144 - protein, 33 aa, Artificial Sequence
  Cyclic GFR-binding peptide
  MOD_RES (1), (3): Xaa is C or S
XGXRDVVMGEYQKYIIQQKDNIYLMSIPSMKTP

SEQ ID NO: 69145 - protein, 41 aa, Artificial Sequence; identical to SEQ ID NO: 22565
  Cyclic GFR-binding peptide
  MOD_RES (2), (4), (35), (36): Xaa is C or S

SEQ ID NO: 69146 - protein, 32 aa, Artificial Sequence; identical to SEQ ID NO: 22566
  Cyclic GFR-binding peptide
  MOD_RES (31), (32): Xaa is C or S

SEQ ID NO: 69147 - protein, 29 aa, Artificial Sequence
  Cyclic GFR-binding peptide
  MOD_RES (27), (28): Xaa is C or S
DEYQKYVVNNASDIYLISIPSLRTPVXXT

SEQ ID NO: 69148 - protein, 26 aa, Artificial Sequence
  Cyclic GFR-binding peptide
GEYQKYIIQQKDNIYLMSIPSMKTPT

SEQ ID NO: 69149 - protein, 34 aa, Artificial Sequence
  Cyclic GFR-binding peptide
  MOD_RES (30), (31): Xaa is C or S
VVMGEYQKYIIQQKDNIYLMSIPSMKTPTXXPGA

SEQ ID NO: 69150 - protein, 30 aa, Artificial Sequence; identical to SEQ ID NO: 22570
  Cyclic GFR-binding peptide

SEQ ID NO: 69151 - protein, 35 aa, Artificial Sequence; identical to SEQ ID NO: 22573
  Cyclic GFR-binding peptide
  MOD_RES (1), (33), (34): Xaa is C or S

SEQ ID NO: 69152 - protein, 37 aa, Artificial Sequence; identical to SEQ ID NO: 22574
  Cyclic GFR-binding peptide
  MOD_RES (2), (33), (34): Xaa is C or S

SEQ ID NO: 69153 - protein, 34 aa, Artificial Sequence
  Cyclic GFR-binding peptide
  MOD_RES (30), (31): Xaa is C or S
VVMDEYQKYVVNNASDIYLISIPSLRTPVXXTPP

SEQ ID NO: 69154 - protein, 32 aa, Artificial Sequence
  Cyclic GFR-binding peptide
  MOD_RES (30), (31): Xaa is C or S
EVIMEYQKYLLVRGNDIYLMSIPSTKVPAXXT

SEQ ID NO: 69155 - protein, 35 aa, Artificial Sequence; identical to SEQ ID NO: 22576
  Cyclic GFR-binding peptide
  MOD_RES (2), (4), (35): Xaa is C or S

SEQ ID NO: 69156 - protein, 39 aa, Artificial Sequence
  Cyclic GFR-binding peptide
  MOD_RES (1), (3), (35), (36): Xaa is C or S
XGXSEVVMDEYQKYVVNNASDIYLISIPSLRTPVXXTPP

SEQ ID NO: 69157 - protein, 32 aa, Artificial Sequence
  Cyclic GFR-binding peptide
  MOD_RES (1), (3): Xaa is C or S
XGXEEVIMEYQKYLLVRGNDIYLMSIPSTKVP

SEQ ID NO: 69158 - protein, 26 aa, Artificial Sequence
  Cyclic GFR-binding peptide
  MOD_RES (26), (26): Xaa is C or S
EYQKYVVNNASDIYLISIPSLRTPVX

SEQ ID NO: 69159 - protein, 33 aa, Artificial Sequence
  Cyclic GFR-binding peptide
  MOD_RES (2), (4): Xaa is C or S
RXGXSEVVMDEYQKYVVNNASDIYLISIPSLRT

SEQ ID NO: 69160 - protein, 26 aa, Artificial Sequence
  Cyclic GFR-binding peptide
VMGEYQKYIIQQKDNIYLMSIPSMKT

SEQ ID NO: 69161 - protein, 26 aa, Artificial Sequence
  Cyclic GFR-binding peptide
IMEYQKYLLVRGNDIYLMSIPSTKVP

SEQ ID NO: 69162 - protein, 32 aa, Artificial Sequence
  Cyclic GFR-binding peptide
  MOD_RES (27), (28): Xaa is C or S
GEYQKYIIQQKDNIYLMSIPSMKTPTXXPGAS

SEQ ID NO: 69163 - protein, 31 aa, Artificial Sequence
  Cyclic GFR-binding peptide
  MOD_RES (31), (31): Xaa is C or S
EVVMDEYQKYVVNNASDIYLISIPSLRTPVX

SEQ ID NO: 69164 - protein, 26 aa, Artificial Sequence
  Cyclic GFR-binding peptide
MDEYQKYVVNNASDIYLISIPSLRTP

SEQ ID NO: 69165 - protein, 32 aa, Artificial Sequence
  Cyclic GFR-binding peptide
  MOD_RES (28), (29): Xaa is C or S
MGEYQKYIIQQKDNIYLMSIPSMKTPTXXPGA

SEQ ID NO: 69166 - protein, 34 aa, Artificial Sequence
  Cyclic GFR-binding peptide
  MOD_RES (28), (29): Xaa is C or S
MGEYQKYIIQQKDNIYLMSIPSMKTPTXXPGASG

SEQ ID NO: 69167 - protein, 32 aa, Artificial Sequence
  Cyclic GFR-binding peptide
  MOD_RES (2), (4): Xaa is C or S
LXGXEEVIMEYQKYLLVRGNDIYLMSIPSTKV

SEQ ID NO: 69168 - protein, 37 aa, Artificial Sequence
  Cyclic GFR-binding peptide
  MOD_RES (1), (33), (34): Xaa is C or S
XSEVVMDEYQKYVVNNASDIYLISIPSLRTPVXXTPP

SEQ ID NO: 69169 - protein, 22 aa, Artificial Sequence
  Cyclic GFR-binding peptide
MDEYQKYVVNNASDIYLISIPS

SEQ ID NO: 69170 - protein, 32 aa, Artificial Sequence
  Cyclic GFR-binding peptide
  MOD_RES (29), (30): Xaa is C or S
VIMEYQKYLLVRGNDIYLMSIPSTKVPAXXTS

SEQ ID NO: 69171 - protein, 38 aa, Artificial Sequence
  Cyclic GFR-binding peptide
  MOD_RES (1), (33), (34): Xaa is C or S
XSEVVMDEYQKYVVNNASDIYLISIPSLRTPVXXTPPT

SEQ ID NO: 69172 - protein, 32 aa, Artificial Sequence
  Cyclic GFR-binding peptide
  MOD_RES (27), (28): Xaa is C or S
DEYQKYVVNNASDIYLISIPSLRTPVXXTPPT

SEQ ID NO: 69173 - protein, 38 aa, Artificial Sequence; identical to SEQ ID NO: 22592
  Cyclic GFR-binding peptide
  MOD_RES (32), (33): Xaa is C or S

SEQ ID NO: 69174 - protein, 22 aa, Artificial Sequence
  Cyclic GFR-binding peptide
EYQKYIIQQKDNIYLMSIPSMK

SEQ ID NO: 69175 - protein, 39 aa, Artificial Sequence; identical to SEQ ID NO: 22595
  Cyclic GFR-binding peptide
  MOD_RES (2), (33), (34): Xaa is C or S

SEQ ID NO: 69176 - protein, 41 aa, Artificial Sequence; identical to SEQ ID NO: 22597
  Cyclic GFR-binding peptide
  MOD_RES (1), (3), (35), (36): Xaa is C or S

SEQ ID NO: 69177 - protein, 35 aa, Artificial Sequence
  Cyclic GFR-binding peptide
  MOD_RES (1), (33), (34): Xaa is C or S
XSEVVMDEYQKYVVNNASDIYLISIPSLRTPVXXT

SEQ ID NO: 69178 - protein, 42 aa, Artificial Sequence; identical to SEQ ID NO: 22598
  Cyclic GFR-binding peptide
  MOD_RES (2), (4), (36), (37): Xaa is C or S

SEQ ID NO: 69179 - protein, 40 aa, Artificial Sequence
  Cyclic GFR-binding peptide
  MOD_RES (2), (34), (35): Xaa is C or S
GXSEVVMDEYQKYVVNNASDIYLISIPSLRTPVXXTPPTS

SEQ ID NO: 69180 - protein, 31 aa, Artificial Sequence
  Cyclic GFR-binding peptide
  MOD_RES (2), (2): Xaa is C or S
GXRDVVMGEYQKYIIQQKDNIYLMSIPSMKT

SEQ ID NO: 69181 - protein, 31 aa, Artificial Sequence; identical to SEQ ID NO: 22605
  Cyclic GFR-binding peptide
  MOD_RES (1), (1): Xaa is C or S

SEQ ID NO: 69182 - protein, 27 aa, Artificial Sequence
  Cyclic GFR-binding peptide
  MOD_RES (26), (27): Xaa is C or S
EYQKYVVNNASDIYLISIPSLRTPVXX

SEQ ID NO: 69183 - protein, 29 aa, Artificial Sequence
  Cyclic GFR-binding peptide
  MOD_RES (2), (2): Xaa is C or S
GXRDVVMGEYQKYIIQQKDNIYLMSIPSM

SEQ ID NO: 69184 - protein, 37 aa, Artificial Sequence; identical to SEQ ID NO: 22614
  Cyclic GFR-binding peptide
  MOD_RES (2), (4), (36), (37): Xaa is C or S

SEQ ID NO: 69185 - protein, 24 aa, Artificial Sequence
  Cyclic GFR-binding peptide
VMGEYQKYIIQQKDNIYLMSIPSM

SEQ ID NO: 69186 - protein, 33 aa, Artificial Sequence
  Cyclic GFR-binding peptide
  MOD_RES (28), (29): Xaa is C or S
IMEYQKYLLVRGNDIYLMSIPSTKVPAXXTSPV

SEQ ID NO: 69187 - protein, 29 aa, Artificial Sequence
  Cyclic GFR-binding peptide
  MOD_RES (1), (3): Xaa is C or S
XGXEEVIMEYQKYLLVRGNDIYLMSIPST

SEQ ID NO: 69188 - protein, 28 aa, Artificial Sequence
  Cyclic GFR-binding peptide
RDVVMGEYQKYIIQQKDNIYLMSIPSMK

SEQ ID NO: 69189 - protein, 28 aa, Artificial Sequence
  Cyclic GFR-binding peptide
VVMGEYQKYIIQQKDNIYLMSIPSMKTP

SEQ ID NO: 69190 - protein, 33 aa, Artificial Sequence
  Cyclic GFR-binding peptide
  MOD_RES (27), (28): Xaa is C or S
NEYQKYIVNSSDDIYLVSIPSLKTPAXXPKPVH

SEQ ID NO: 69191 - protein, 29 aa, Artificial Sequence
  Cyclic GFR-binding peptide
  MOD_RES (29), (29): Xaa is C or S
VMGEYQKYIIQQKDNIYLMSIPSMKTPTX

SEQ ID NO: 69192 - protein, 39 aa, Artificial Sequence; identical to SEQ ID NO: 22622
  Cyclic GFR-binding peptide
  MOD_RES (1), (33), (34): Xaa is C or S

SEQ ID NO: 69193 - protein, 29 aa, Artificial Sequence
  Cyclic GFR-binding peptide
SEVVMDEYQKYVVNNASDIYLISIPSLRT

SEQ ID NO: 69194 - protein, 25 aa, Artificial Sequence
  Cyclic GFR-binding peptide
EYQKYIIQQKDNIYLMSIPSMKTPT

SEQ ID NO: 69195 - protein, 24 aa, Artificial Sequence
  Cyclic GFR-binding peptide
VVMDEYQKYVVNNASDIYLISIPS

SEQ ID NO: 69196 - protein, 30 aa, Artificial Sequence
  Cyclic GFR-binding peptide
  MOD_RES (1), (3): Xaa is C or S
XGXSEVVMDEYQKYVVNNASDIYLISIPSL

SEQ ID NO: 69197 - protein, 30 aa, Artificial Sequence
  Cyclic GFR-binding peptide
RDVVMGEYQKYIIQQKDNIYLMSIPSMKTP

SEQ ID NO: 69198 - protein, 27 aa, Artificial Sequence
  Cyclic GFR-binding peptide
EEVIMEYQKYLLVRGNDIYLMSIPSTK

SEQ ID NO: 69199 - protein, 27 aa, Artificial Sequence
  Cyclic GFR-binding peptide
VVMGEYQKYIIQQKDNIYLMSIPSMKT

SEQ ID NO: 69200 - protein, 31 aa, Artificial Sequence
  Cyclic GFR-binding peptide
  MOD_RES (29), (30): Xaa is C or S
VMGEYQKYIIQQKDNIYLMSIPSMKTPTXXP

SEQ ID NO: 69201 - protein, 25 aa, Artificial Sequence
  Cyclic GFR-binding peptide
IMEYQKYLLVRGNDIYLMSIPSTKV

SEQ ID NO: 69202 - protein, 32 aa, Artificial Sequence; identical to SEQ ID NO: 22624
  Cyclic GFR-binding peptide
  MOD_RES (32), (32): Xaa is C or S

SEQ ID NO: 69203 - protein, 34 aa, Artificial Sequence
  Cyclic GFR-binding peptide
  MOD_RES (29), (30): Xaa is C or S
VIMEYQKYLLVRGNDIYLMSIPSTKVPAXXTSPV

SEQ ID NO: 69204 - protein, 33 aa, Artificial Sequence
  Cyclic GFR-binding peptide
  MOD_RES (2), (4): Xaa is C or S
LXGXEEVIMEYQKYLLVRGNDIYLMSIPSTKVP

SEQ ID NO: 69205 - protein, 25 aa, Artificial Sequence
  Cyclic GFR-binding peptide
EVVMDEYQKYVVNNASDIYLISIPS

SEQ ID NO: 69206 - protein, 39 aa, Artificial Sequence
  Cyclic GFR-binding peptide
  MOD_RES (2), (4), (36), (37): Xaa is C or S
RXGXSEVVMDEYQKYVVNNASDIYLISIPSLRTPVXXTP

SEQ ID NO: 69207 - protein, 31 aa, Artificial Sequence
  Cyclic GFR-binding peptide
  MOD_RES (28), (29): Xaa is C or S
MDEYQKYVVNNASDIYLISIPSLRTPVXXTP

SEQ ID NO: 69208 - protein, 28 aa, Artificial Sequence
  Cyclic GFR-binding peptide
EEVIMEYQKYLLVRGNDIYLMSIPSTKV

SEQ ID NO: 69209 - protein, 25 aa, Artificial Sequence
  Cyclic GFR-binding peptide
VIMEYQKYLLVRGNDIYLMSIPSTK

SEQ ID NO: 69210 - protein, 28 aa, Artificial Sequence
  Cyclic GFR-binding peptide
  MOD_RES (27), (28): Xaa is C or S
DEYQKYVVNNASDIYLISIPSLRTPVXX

SEQ ID NO: 69211 - protein, 30 aa, Artificial Sequence
  Cyclic GFR-binding peptide
  MOD_RES (29), (30): Xaa is C or S
VIMEYQKYLLVRGNDIYLMSIPSTKVPAXX

SEQ ID NO: 69212 - protein, 32 aa, Artificial Sequence
  Cyclic GFR-binding peptide
  MOD_RES (1), (3): Xaa is C or S
XGXRDVVMGEYQKYIIQQKDNIYLMSIPSMKT

SEQ ID NO: 69213 - protein, 36 aa, Artificial Sequence
  Cyclic GFR-binding peptide
  MOD_RES (32), (33): Xaa is C or S
SEVVMDEYQKYVVNNASDIYLISIPSLRTPVXXTPP

SEQ ID NO: 69214 - protein, 35 aa, Artificial Sequence; identical to SEQ ID NO: 22633
  Cyclic GFR-binding peptide
  MOD_RES (32), (33): Xaa is C or S

SEQ ID NO: 69215 - protein, 31 aa, Artificial Sequence
  Cyclic GFR-binding peptide
  MOD_RES (2), (4): Xaa is C or S
RXGXSEVVMDEYQKYVVNNASDIYLISIPSL

SEQ ID NO: 69216 - protein, 27 aa, Artificial Sequence
  Cyclic GFR-binding peptide
  MOD_RES (27), (27): Xaa is C or S
DEYQKYVVNNASDIYLISIPSLRTPVX

SEQ ID NO: 69217 - protein, 28 aa, Artificial Sequence
  Cyclic GFR-binding peptide
VVMDEYQKYVVNNASDIYLISIPSLRTP

SEQ ID NO: 69218 - protein, 30 aa, Artificial Sequence
  Cyclic GFR-binding peptide
  MOD_RES (2), (2): Xaa is C or S
GXEEVIMEYQKYLLVRGNDIYLMSIPSTKV

SEQ ID NO: 69219 - protein, 27 aa, Artificial Sequence
  Cyclic GFR-binding peptide
  MOD_RES (27), (27): Xaa is C or S
GEYQKYIIQQKDNIYLMSIPSMKTPTX

SEQ ID NO: 69220 - protein, 24 aa, Artificial Sequence
  Cyclic GFR-binding peptide
MDEYQKYVVNNASDIYLISIPSLR

SEQ ID NO: 69221 - protein, 25 aa, Artificial Sequence
  Cyclic GFR-binding peptide
MGEYQKYIIQQKDNIYLMSIPSMKT

SEQ ID NO: 69222 - protein, 32 aa, Artificial Sequence
  Cyclic GFR-binding peptide
  MOD_RES (1), (3): Xaa is C or S
XGXSEVVMDEYQKYVVNNASDIYLISIPSLRT

SEQ ID NO: 69223 - protein, 38 aa, Artificial Sequence; identical to SEQ ID NO: 22639
  Cyclic GFR-binding peptide
  MOD_RES (1), (32), (33): Xaa is C or S

SEQ ID NO: 69224 - protein, 29 aa, Artificial Sequence
  Cyclic GFR-binding peptide
EEVIMEYQKYLLVRGNDIYLMSIPSTKVP

SEQ ID NO: 69225 - protein, 37 aa, Artificial Sequence
  Cyclic GFR-binding peptide
  MOD_RES (31), (32): Xaa is C or S
EVVMDEYQKYVVNNASDIYLISIPSLRTPVXXTPPTS

SEQ ID NO: 69226 - protein, 28 aa, Artificial Sequence
  Cyclic GFR-binding peptide
  MOD_RES (26), (27): Xaa is C or S
EYQKYLLVRGNDIYLMSIPSTKVPAXXT

SEQ ID NO: 69227 - protein, 25 aa, Artificial Sequence
  Cyclic GFR-binding peptide
EVIMEYQKYLLVRGNDIYLMSIPST

SEQ ID NO: 69228 - protein, 25 aa, Artificial Sequence
  Cyclic GFR-binding peptide
GEYQKYIIQQKDNIYLMSIPSMKTP

SEQ ID NO: 69229 - protein, 22 aa, Artificial Sequence
  Cyclic GFR-binding peptide
EYQKYLLVRGNDIYLMSIPSTK

SEQ ID NO: 69230 - protein, 32 aa, Artificial Sequence
  Cyclic GFR-binding peptide
  MOD_RES (2), (2): Xaa is C or S
GXSEVVMDEYQKYVVNNASDIYLISIPSLRTP

SEQ ID NO: 69231 - protein, 36 aa, Artificial Sequence; identical to SEQ ID NO: 22646
  Cyclic GFR-binding peptide
  MOD_RES (2), (33), (34): Xaa is C or S

SEQ ID NO: 69232 - protein, 32 aa, Artificial Sequence
  Cyclic GFR-binding peptide
  MOD_RES (2), (4): Xaa is C or S
SXGXRDVVMGEYQKYIIQQKDNIYLMSIPSMK

SEQ ID NO: 69233 - protein, 29 aa, Artificial Sequence
  Cyclic GFR-binding peptide
  MOD_RES (2), (2): Xaa is C or S
GXSEVVMDEYQKYVVNNASDIYLISIPSL

SEQ ID NO: 69234 - protein, 37 aa, Artificial Sequence; identical to SEQ ID NO: 22650
  Cyclic GFR-binding peptide
  MOD_RES (32), (33): Xaa is C or S

SEQ ID NO: 69235 - protein, 24 aa, Artificial Sequence
  Cyclic GFR-binding peptide
GEYQKYIIQQKDNIYLMSIPSMKT

SEQ ID NO: 69236 - protein, 38 aa, Artificial Sequence; identical to SEQ ID NO: 22462
  Cyclic GFR-binding peptide
  MOD_RES (2), (33), (34): Xaa is C or S

SEQ ID NO: 69237 - protein, 34 aa, Artificial Sequence
  Cyclic GFR-binding peptide
  MOD_RES (28), (29): Xaa is C or S
MDEYQKYVVNNASDIYLISIPSLRTPVXXTPPTS

SEQ ID NO: 69238 - protein, 26 aa, Artificial Sequence
  Cyclic GFR-binding peptide
EVIMEYQKYLLVRGNDIYLMSIPSTK

SEQ ID NO: 69239 - protein, 29 aa, Artificial Sequence
  Cyclic GFR-binding peptide
VVMDEYQKYVVNNASDIYLISIPSLRTPV

SEQ ID NO: 69240 - protein, 29 aa, Artificial Sequence
  Cyclic GFR-binding peptide
  MOD_RES (28), (29): Xaa is C or S
MGEYQKYIIQQKDNIYLMSIPSMKTPTXX

SEQ ID NO: 69241 - protein, 26 aa, Artificial Sequence
  Cyclic GFR-binding peptide
  MOD_RES (1), (1): Xaa is C or S
XEEVIMEYQKYLLVRGNDIYLMSIPS

SEQ ID NO: 69242 - protein, 26 aa, Artificial Sequence
  Cyclic GFR-binding peptide
VVMDEYQKYVVNNASDIYLISIPSLR

SEQ ID NO: 69243 - protein, 31 aa, Artificial Sequence
  Cyclic GFR-binding peptide
  MOD_RES (2), (2): Xaa is C or S
GXSEVVMDEYQKYVVNNASDIYLISIPSLRT

SEQ ID NO: 69244 - protein, 21 aa, Artificial Sequence
  Cyclic GFR-binding peptide
MEYQKYLLVRGNDIYLMSIPS

SEQ ID NO: 69245 - protein, 35 aa, Artificial Sequence; identical to SEQ ID NO: 22469
  Cyclic GFR-binding peptide
  MOD_RES (2), (33), (34): Xaa is C or S

SEQ ID NO: 69246 - protein, 37 aa, Artificial Sequence; identical to SEQ ID NO: 22470
  Cyclic GFR-binding peptide
  MOD_RES (1), (3), (34), (35): Xaa is C or S

SEQ ID NO: 69247 - protein, 33 aa, Artificial Sequence
  Cyclic GFR-binding peptide
  MOD_RES (1), (3): Xaa is C or S
XGXSEVVMDEYQKYVVNNASDIYLISIPSLRTP

SEQ ID NO: 69248 - protein, 23 aa, Artificial Sequence
  Cyclic GFR-binding peptide
VMGEYQKYIIQQKDNIYLMSIPS

SEQ ID NO: 69249 - protein, 36 aa, Artificial Sequence; identical to SEQ ID NO: 22473
  Cyclic GFR-binding peptide
  MOD_RES (1), (33), (34): Xaa is C or S

SEQ ID NO: 69250 - protein, 39 aa, Artificial Sequence
  Cyclic GFR-binding peptide
  MOD_RES (1), (33), (34): Xaa is C or S
XSEVVMDEYQKYVVNNASDIYLISIPSLRTPVXXTPPTS

SEQ ID NO: 69251 - protein, 34 aa, Artificial Sequence
  Cyclic GFR-binding peptide
  MOD_RES (1), (33), (34): Xaa is C or S
XSEVVMDEYQKYVVNNASDIYLISIPSLRTPVXX

SEQ ID NO: 69252 - protein, 24 aa, Artificial Sequence
  Cyclic GFR-binding peptide
IMEYQKYLLVRGNDIYLMSIPSTK

SEQ ID NO: 69253 - protein, 31 aa, Artificial Sequence
  Cyclic GFR-binding peptide
  MOD_RES (2), (2): Xaa is C or S
GXEEVIMEYQKYLLVRGNDIYLMSIPSTKVP

SEQ ID NO: 69254 - protein, 23 aa, Artificial Sequence
  Cyclic GFR-binding peptide
GEYQKYIIQQKDNIYLMSIPSMK

SEQ ID NO: 69255 - protein, 39 aa, Artificial Sequence; identical to SEQ ID NO: 22478
  Cyclic GFR-binding peptide
  MOD_RES (2), (34), (35): Xaa is C or S

SEQ ID NO: 69256 - protein, 25 aa, Artificial Sequence
  Cyclic GFR-binding peptide
DEYQKYVVNNASDIYLISIPSLRTP

SEQ ID NO: 69257 - protein, 27 aa, Artificial Sequence
  Cyclic GFR-binding peptide
EVIMEYQKYLLVRGNDIYLMSIPSTKV

SEQ ID NO: 69258 - protein, 37 aa, Artificial Sequence
  Cyclic GFR-binding peptide
  MOD_RES (2), (4), (36), (37): Xaa is C or S
RXGXSEVVMDEYQKYVVNNASDIYLISIPSLRTPVXX

SEQ ID NO: 69259 - protein, 28 aa, Artificial Sequence
  Cyclic GFR-binding peptide
  MOD_RES (2), (2): Xaa is C or S
GXRDVVMGEYQKYIIQQKDNIYLMSIPS

SEQ ID NO: 69260 - protein, 32 aa, Artificial Sequence
  Cyclic GFR-binding peptide
  MOD_RES (31), (32): Xaa is C or S
EVVMDEYQKYVVNNASDIYLISIPSLRTPVXX

SEQ ID NO: 69261 - protein, 31 aa, Artificial Sequence
  Cyclic GFR-binding peptide
  MOD_RES (30), (31): Xaa is C or S
VVMGEYQKYIIQQKDNIYLMSIPSMKTPTXX

SEQ ID NO: 69262 - protein, 35 aa, Artificial Sequence
  Cyclic GFR-binding peptide
  MOD_RES (2), (34), (35): Xaa is C or S
GXSEVVMDEYQKYVVNNASDIYLISIPSLRTPVXX

SEQ ID NO: 69263 - protein, 30 aa, Artificial Sequence
  Cyclic GFR-binding peptide
  MOD_RES (26), (27): Xaa is C or S
EYQKYLLVRGNDIYLMSIPSTKVPAXXTSP

SEQ ID NO: 69264 - protein, 36 aa, Artificial Sequence
  Cyclic GFR-binding peptide
  MOD_RES (31), (32): Xaa is C or S
EVVMDEYQKYVVNNASDIYLISIPSLRTPVXXTPPT

SEQ ID NO: 69265 - protein, 33 aa, Artificial Sequence
  Cyclic GFR-binding peptide
  MOD_RES (29), (30): Xaa is C or S
VMDEYQKYVVNNASDIYLISIPSLRTPVXXTPP

SEQ ID NO: 69266 - protein, 29 aa, Artificial Sequence
  Cyclic GFR-binding peptide
DVVMGEYQKYIIQQKDNIYLMSIPSMKTP

SEQ ID NO: 69267 - protein, 28 aa, Artificial Sequence
  Cyclic GFR-binding peptide
  MOD_RES (27), (28): Xaa is C or S
GEYQKYIIQQKDNIYLMSIPSMKTPTXX

SEQ ID NO: 69268 - protein, 27 aa, Artificial Sequence
  Cyclic GFR-binding peptide
VVMDEYQKYVVNNASDIYLISIPSLRT

SEQ ID NO: 69269 - protein, 27 aa, Artificial Sequence
  Cyclic GFR-binding peptide
VMDEYQKYVVNNASDIYLISIPSLRTP

SEQ ID NO: 69270 - protein, 32 aa, Artificial Sequence
  Cyclic GFR-binding peptide
  MOD_RES (30), (31): Xaa is C or S
VVMGEYQKYIIQQKDNIYLMSIPSMKTPTXXP

SEQ ID NO: 69271 - protein, 35 aa, Artificial Sequence; identical to SEQ ID NO: 22486
  Cyclic GFR-binding peptide
  MOD_RES (1), (3), (35): Xaa is C or S

SEQ ID NO: 69272 - protein, 30 aa, Artificial Sequence
  Cyclic GFR-binding peptide
  MOD_RES (1), (3): Xaa is C or S
XGXRDVVMGEYQKYIIQQKDNIYLMSIPSM

SEQ ID NO: 69273 - protein, 27 aa, Artificial Sequence
  Cyclic GFR-binding peptide
IMEYQKYLLVRGNDIYLMSIPSTKVPA

SEQ ID NO: 69274 - protein, 33 aa, Artificial Sequence
  Cyclic GFR-binding peptide
  MOD_RES (2), (4): Xaa is C or S
SXGXRDVVMGEYQKYIIQQKDNIYLMSIPSMKT

SEQ ID NO: 69275 - protein, 25 aa, Artificial Sequence
  Cyclic GFR-binding peptide
VVMGEYQKYIIQQKDNIYLMSIPSM

SEQ ID NO: 69276 - protein, 27 aa, Artificial Sequence
  Cyclic GFR-binding peptide
VMGEYQKYIIQQKDNIYLMSIPSMKTP

SEQ ID NO: 69277 - protein, 32 aa, Artificial Sequence; identical to SEQ ID NO: 22490
  Cyclic GFR-binding peptide
  MOD_RES (1), (1): Xaa is C or S

SEQ ID NO: 69278 - protein, 32 aa, Artificial Sequence
  Cyclic GFR-binding peptide
  MOD_RES (27), (28): Xaa is C or S
MEYQKYLLVRGNDIYLMSIPSTKVPAXXTSPV

SEQ ID NO: 69279 - protein, 29 aa, Artificial Sequence
  Cyclic GFR-binding peptide
AAAAAAAAAEYQKYVVNNASDIYLISIPS

SEQ ID NO: 69280 - protein, 37 aa, Artificial Sequence; identical to SEQ ID NO: 22491
  Cyclic GFR-binding peptide
  MOD_RES (1), (32), (33): Xaa is C or S

SEQ ID NO: 69281 - protein, 33 aa, Artificial Sequence
  Cyclic GFR-binding peptide
  MOD_RES (27), (28): Xaa is C or S
DEYQKYVVNNASDIYLISIPSLRTPVXXTPPTS

SEQ ID NO: 69282 - protein, 30 aa, Artificial Sequence
  Cyclic GFR-binding peptide
  MOD_RES (30), (30): Xaa is C or S
VVMDEYQKYVVNNASDIYLISIPSLRTPVX

SEQ ID NO: 69283 - protein, 31 aa, Artificial Sequence
  Cyclic GFR-binding peptide
  MOD_RES (27), (28): Xaa is C or S
DEYQKYVVNNASDIYLISIPSLRTPVXXTPP

SEQ ID NO: 69284 - protein, 38 aa, Artificial Sequence
  Cyclic GFR-binding peptide
  MOD_RES (2), (4), (36), (37): Xaa is C or S
RXGXSEVVMDEYQKYVVNNASDIYLISIPSLRTPVXXT

SEQ ID NO: 69285 - protein, 34 aa, Artificial Sequence
  Cyclic GFR-binding peptide
  MOD_RES (2), (4): Xaa is C or S
RXGXSEVVMDEYQKYVVNNASDIYLISIPSLRTP

SEQ ID NO: 69286 - protein, 31 aa, Artificial Sequence
  Cyclic GFR-binding peptide
  MOD_RES (29), (30): Xaa is C or S
VIMEYQKYLLVRGNDIYLMSIPSTKVPAXXT

SEQ ID NO: 69287 - protein, 32 aa, Artificial Sequence; identical to SEQ ID NO: 22495
  Cyclic GFR-binding peptide
  MOD_RES (31), (32): Xaa is C or S

SEQ ID NO: 69288 - protein, 24 aa, Artificial Sequence
  Cyclic GFR-binding peptide
EYQKYIIQQKDNIYLMSIPSMKTP

SEQ ID NO: 69289 - protein, 32 aa, Artificial Sequence
  Cyclic GFR-binding peptide
  MOD_RES (32), (32): Xaa is C or S
SEVVMDEYQKYVVNNASDIYLISIPSLRTPVX

SEQ ID NO: 69290 - protein, 35 aa, Artificial Sequence; identical to SEQ ID NO: 22498
  Cyclic GFR-binding peptide
  MOD_RES (2), (34), (35): Xaa is C or S

SEQ ID NO: 69291 - protein, 35 aa, Artificial Sequence; identical to SEQ ID NO: 22499
  Cyclic GFR-binding peptide
  MOD_RES (31), (32): Xaa is C or S

SEQ ID NO: 69292 - protein, 27 aa, Artificial Sequence
  Cyclic GFR-binding peptide
VIMEYQKYLLVRGNDIYLMSIPSTKVP

SEQ ID NO: 69293 - protein, 32 aa, Artificial Sequence
  Cyclic GFR-binding peptide
  MOD_RES (26), (27): Xaa is C or S
EYQKYLLVRGNDIYLMSIPSTKVPAXXTSPVR

SEQ ID NO: 69294 - protein, 21 aa, Artificial Sequence
  Cyclic GFR-binding peptide
EYQKYLLVRGNDIYLMSIPST

SEQ ID NO: 69295 - protein, 23 aa, Artificial Sequence
  Cyclic GFR-binding peptide
DEYQKYVVNNASDIYLISIPSLR

SEQ ID NO: 69296 - protein, 24 aa, Artificial Sequence
  Cyclic GFR-binding peptide
VMDEYQKYVVNNASDIYLISIPSL

SEQ ID NO: 69297 - protein, 28 aa, Artificial Sequence
  Cyclic GFR-binding peptide
EVVMDEYQKYVVNNASDIYLISIPSLRT

SEQ ID NO: 69298 - protein, 35 aa, Artificial Sequence
  Cyclic GFR-binding peptide
  MOD_RES (2), (4): Xaa is C or S
RXGXSEVVMDEYQKYVVNNASDIYLISIPSLRTPV

SEQ ID NO: 69299 - protein, 34 aa, Artificial Sequence; identical to SEQ ID NO: 22503
  Cyclic GFR-binding peptide
  MOD_RES (32), (33): Xaa is C or S

SEQ ID NO: 69300 - protein, 22 aa, Artificial Sequence
  Cyclic GFR-binding peptide
EYQKYVVNNASDIYLISIPSLR

SEQ ID NO: 69301 - protein, 26 aa, Artificial Sequence
  Cyclic GFR-binding peptide
DEYQKYVVNNASDIYLISIPSLRTPV

SEQ ID NO: 69302 - protein, 29 aa, Artificial Sequence
  Cyclic GFR-binding peptide
AAAAAAAAAEYQKYIIQQKDNIYLMSIPS

SEQ ID NO: 69303 - protein, 41 aa, Artificial Sequence; identical to SEQ ID NO: 22505
  Cyclic GFR-binding peptide
  MOD_RES (1), (3), (35), (36): Xaa is C or S

SEQ ID NO: 69304 - protein, 36 aa, Artificial Sequence
  Cyclic GFR-binding peptide
  MOD_RES (1), (3), (35), (36): Xaa is C or S
XGXSEVVMDEYQKYVVNNASDIYLISIPSLRTPVXX

SEQ ID NO: 69305 - protein, 33 aa, Artificial Sequence; identical to SEQ ID NO: 22506
  Cyclic GFR-binding peptide
  MOD_RES (31), (32): Xaa is C or S

SEQ ID NO: 69306 - protein, 23 aa, Artificial Sequence
  Cyclic GFR-binding peptide
MDEYQKYVVNNASDIYLISIPSL

SEQ ID NO: 69307 - protein, 26 aa, Artificial Sequence
  Cyclic GFR-binding peptide
  MOD_RES (26), (26): Xaa is C or S
EYQKYLLVRGNDIYLMSIPSTKVPAX

SEQ ID NO: 69308 - protein, 23 aa, Artificial Sequence
  Cyclic GFR-binding peptide
MEYQKYLLVRGNDIYLMSIPSTK

SEQ ID NO: 69309 - protein, 29 aa, Artificial Sequence
  Cyclic GFR-binding peptide
EVVMDEYQKYVVNNASDIYLISIPSLRTP

SEQ ID NO: 69310 - protein, 34 aa, Artificial Sequence
  Cyclic GFR-binding peptide
  MOD_RES (30), (31): Xaa is C or S
EVIMEYQKYLLVRGNDIYLMSIPSTKVPAXXTSP

SEQ ID NO: 69311 - protein, 34 aa, Artificial Sequence; identical to SEQ ID NO: 22512
  Cyclic GFR-binding peptide
  MOD_RES (2), (4): Xaa is C or S

SEQ ID NO: 69312 - protein, 36 aa, Artificial Sequence
  Cyclic GFR-binding peptide
  MOD_RES (2), (34), (35): Xaa is C or S
GXSEVVMDEYQKYVVNNASDIYLISIPSLRTPVXXT

SEQ ID NO: 69313 - protein, 33 aa, Artificial Sequence
  Cyclic GFR-binding peptide
  MOD_RES (28), (29): Xaa is C or S
MGEYQKYIIQQKDNIYLMSIPSMKTPTXXPGAS

SEQ ID NO: 69314 - protein, 25 aa, Artificial Sequence
  Cyclic GFR-binding peptide
VMGEYQKYIIQQKDNIYLMSIPSMK

SEQ ID NO: 69315 - protein, 30 aa, Artificial Sequence
  Cyclic GFR-binding peptide
  MOD_RES (1), (3): Xaa is C or S
XGXEEVIMEYQKYLLVRGNDIYLMSIPSTK

SEQ ID NO: 69316 - protein, 40 aa, Artificial Sequence; identical to SEQ ID NO: 22518
  Cyclic GFR-binding peptide
  MOD_RES (2), (4), (35), (36): Xaa is C or S

SEQ ID NO: 69317 - protein, 28 aa, Artificial Sequence
  Cyclic GFR-binding peptide
  MOD_RES (28), (28): Xaa is C or S
MGEYQKYIIQQKDNIYLMSIPSMKTPTX

SEQ ID NO: 69318 - protein, 25 aa, Artificial Sequence
  Cyclic GFR-binding peptide
EYQKYVVNNASDIYLISIPSLRTPV

SEQ ID NO: 69319 - protein, 27 aa, Artificial Sequence
  Cyclic GFR-binding peptide
RDVVMGEYQKYIIQQKDNIYLMSIPSM

SEQ ID NO: 69320 - protein, 34 aa, Artificial Sequence
  Cyclic GFR-binding peptide
  MOD_RES (1), (3): Xaa is C or S
XGXSEVVMDEYQKYVVNNASDIYLISIPSLRTPV

SEQ ID NO: 69321 - protein, 32 aa, Artificial Sequence
  Cyclic GFR-binding peptide
  MOD_RES (28), (29): Xaa is C or S
MDEYQKYVVNNASDIYLISIPSLRTPVXXTPP

SEQ ID NO: 69322 - protein, 38 aa, Artificial Sequence; identical to SEQ ID NO: 22521
  Cyclic GFR-binding peptide
  MOD_RES (1), (3), (35), (36): Xaa is C or S

SEQ ID NO: 69323 - protein, 25 aa, Artificial Sequence
  Cyclic GFR-binding peptide
MDEYQKYVVNNASDIYLISIPSLRT

SEQ ID NO: 69324 - protein, 36 aa, Artificial Sequence; identical to SEQ ID NO: 22526
  Cyclic GFR-binding peptide
  MOD_RES (2), (4), (35), (36): Xaa is C or S

SEQ ID NO: 69325 - protein, 36 aa, Artificial Sequence; identical to SEQ ID NO: 22528
  Cyclic GFR-binding peptide
  MOD_RES (2), (34), (35): Xaa is C or S

SEQ ID NO: 69326 - protein, 29 aa, Artificial Sequence
  Cyclic GFR-binding peptide
  MOD_RES (29), (29): Xaa is C or S
VIMEYQKYLLVRGNDIYLMSIPSTKVPAX

SEQ ID NO: 69327 - protein, 28 aa, Artificial Sequence
  Cyclic GFR-binding peptide
VMDEYQKYVVNNASDIYLISIPSLRTPV

SEQ ID NO: 69328 - protein, 22 aa, Artificial Sequence
  Cyclic GFR-binding peptide
MGEYQKYIIQQKDNIYLMSIPS

SEQ ID NO: 69329 - protein, 32 aa, Artificial Sequence
  Cyclic GFR-binding peptide
  MOD_RES (26), (27): Xaa is C or S
EYQKYIIQQKDNIYLMSIPSMKTPTXXPGASG

SEQ ID NO: 69330 - protein, 32 aa, Artificial Sequence
  Cyclic GFR-binding peptide
  MOD_RES (30), (31): Xaa is C or S
VVMDEYQKYVVNNASDIYLISIPSLRTPVXXT

SEQ ID NO: 69331 - protein, 35 aa, Artificial Sequence; identical to SEQ ID NO: 22533
  Cyclic GFR-binding peptide
  MOD_RES (1), (3), (34), (35): Xaa is C or S

SEQ ID NO: 69332 - protein, 25 aa, Artificial Sequence
  Cyclic GFR-binding peptide
VMDEYQKYVVNNASDIYLISIPSLR

SEQ ID NO: 69333 - protein, 30 aa, Artificial Sequence
  Cyclic GFR-binding peptide
  MOD_RES (28), (29): Xaa is C or S
MDEYQKYVVNNASDIYLISIPSLRTPVXXT

SEQ ID NO: 69334 - protein, 30 aa, Artificial Sequence
  Cyclic GFR-binding peptide
  MOD_RES (2), (4): Xaa is C or S
LXGXEEVIMEYQKYLLVRGNDIYLMSIPST

SEQ ID NO: 69335 - protein, 26 aa, Artificial Sequence
  Cyclic GFR-binding peptide
VVMGEYQKYIIQQKDNIYLMSIPSMK

SEQ ID NO: 69336 - protein, 31 aa, Artificial Sequence
  Cyclic GFR-binding peptide
  MOD_RES (26), (27): Xaa is C or S
EYQKYIIQQKDNIYLMSIPSMKTPTXXPGAS

SEQ ID NO: 69337 - protein, 29 aa, Artificial Sequence
  Cyclic GFR-binding peptide
  MOD_RES (27), (28): Xaa is C or S
GEYQKYIIQQKDNIYLMSIPSMKTPTXXP

SEQ ID NO: 69338 - protein, 30 aa, Artificial Sequence
  Cyclic GFR-binding peptide
  MOD_RES (28), (29): Xaa is C or S
IMEYQKYLLVRGNDIYLMSIPSTKVPAXXT

SEQ ID NO: 69339 - protein, 27 aa, Artificial Sequence
  Cyclic GFR-binding peptide
MDEYQKYVVNNASDIYLISIPSLRTPV

SEQ ID NO: 69340 - protein, 36 aa, Artificial Sequence
  Cyclic GFR-binding peptide
  MOD_RES (30), (31): Xaa is C or S
EVIMEYQKYLLVRGNDIYLMSIPSTKVPAXXTSPVR

SEQ ID NO: 69341 - protein, 31 aa, Artificial Sequence; identical to SEQ ID NO: 22539
  Cyclic GFR-binding peptide
  MOD_RES (31), (31): Xaa is C or S

SEQ ID NO: 69342 - protein, 34 aa, Artificial Sequence; identical to SEQ ID NO: 22541
  Cyclic GFR-binding peptide
  MOD_RES (2), (34): Xaa is C or S

SEQ ID NO: 69343 - protein, 36 aa, Artificial Sequence
  Cyclic GFR-binding peptide
  MOD_RES (30), (31): Xaa is C or S
VVMDEYQKYVVNNASDIYLISIPSLRTPVXXTPPTS

SEQ ID NO: 69344 - protein, 23 aa, Artificial Sequence
  Cyclic GFR-binding peptide
EYQKYIIQQKDNIYLMSIPSMKT

SEQ ID NO: 69345 - protein, 42 aa, Artificial Sequence; identical to SEQ ID NO: 22544
  Cyclic GFR-binding peptide
  MOD_RES (2), (4), (36), (37): Xaa is C or S

SEQ ID NO: 69346 - protein, 24 aa, Artificial Sequence
  Cyclic GFR-binding peptide
MGEYQKYIIQQKDNIYLMSIPSMK

SEQ ID NO: 69347 - protein, 28 aa, Artificial Sequence
  Cyclic GFR-binding peptide
  MOD_RES (27), (28): Xaa is C or S
MEYQKYLLVRGNDIYLMSIPSTKVPAXX

SEQ ID NO: 69348 - protein, 37 aa, Artificial Sequence; identical to SEQ ID NO: 22546
  Cyclic GFR-binding peptide
  MOD_RES (1), (3), (35), (36): Xaa is C or S

SEQ ID NO: 69349 - protein, 30 aa, Artificial Sequence
  Cyclic GFR-binding peptide
  MOD_RES (29), (30): Xaa is C or S
VMDEYQKYVVNNASDIYLISIPSLRTPVXX

SEQ ID NO: 69350 - protein, 36 aa, Artificial Sequence
  Cyclic GFR-binding peptide
  MOD_RES (2), (4), (36): Xaa is C or S
RXGXSEVVMDEYQKYVVNNASDIYLISIPSLRTPVX

SEQ ID NO: 69351 - protein, 26 aa, Artificial Sequence
  Cyclic GFR-binding peptide
RDVVMGEYQKYIIQQKDNIYLMSIPS

SEQ ID NO: 69352 - protein, 26 aa, Artificial Sequence
  Cyclic GFR-binding peptide
VIMEYQKYLLVRGNDIYLMSIPSTKV

SEQ ID NO: 69353 - protein, 34 aa, Artificial Sequence
  Cyclic GFR-binding peptide
  MOD_RES (29), (30): Xaa is C or S
VMGEYQKYIIQQKDNIYLMSIPSMKTPTXXPGAS

SEQ ID NO: 69354 - protein, 39 aa, Artificial Sequence; identical to SEQ ID NO: 22550
  Cyclic GFR-binding peptide
  MOD_RES (1), (33), (34): Xaa is C or S

SEQ ID NO: 69355 - protein, 32 aa, Artificial Sequence
  Cyclic GFR-binding peptide
  MOD_RES (28), (29): Xaa is C or S
IMEYQKYLLVRGNDIYLMSIPSTKVPAXXTSP

SEQ ID NO: 69356 - protein, 31 aa, Artificial Sequence
  Cyclic GFR-binding peptide
  MOD_RES (1), (3): Xaa is C or S
XGXEEVIMEYQKYLLVRGNDIYLMSIPSTKV

SEQ ID NO: 69357 - protein, 28 aa, Artificial Sequence
  Cyclic GFR-binding peptide
EVIMEYQKYLLVRGNDIYLMSIPSTKVP

SEQ ID NO: 69358 - protein, 32 aa, Artificial Sequence
  Cyclic GFR-binding peptide
  MOD_RES (1), (1): Xaa is C or S
XSEVVMDEYQKYVVNNASDIYLISIPSLRTPV

SEQ ID NO: 69359 - protein, 33 aa, Artificial Sequence; identical to SEQ ID NO: 22553
  Cyclic GFR-binding peptide
  MOD_RES (2), (2): Xaa is C or S

SEQ ID NO: 69360 - protein, 36 aa, Artificial Sequence; identical to SEQ ID NO: 22554
  Cyclic GFR-binding peptide
  MOD_RES (2), (4), (36): Xaa is C or S

SEQ ID NO: 69361 - protein, 39 aa, Artificial Sequence; identical to SEQ ID NO: 22555
  Cyclic GFR-binding peptide
  MOD_RES (2), (4), (35), (36): Xaa is C or S

SEQ ID NO: 69362 - protein, 28 aa, Artificial Sequence
  Cyclic GFR-binding peptide
  MOD_RES (2), (2): Xaa is C or S
GXEEVIMEYQKYLLVRGNDIYLMSIPST

SEQ ID NO: 69363 - protein, 27 aa, Artificial Sequence
  Cyclic GFR-binding peptide
  MOD_RES (26), (27): Xaa is C or S
EYQKYLLVRGNDIYLMSIPSTKVPAXX

SEQ ID NO: 69364 - protein, 26 aa, Artificial Sequence
  Cyclic GFR-binding peptide
VMDEYQKYVVNNASDIYLISIPSLRT

SEQ ID NO: 69365 - protein, 31 aa, Artificial Sequence; identical to SEQ ID NO: 22559
  Cyclic GFR-binding peptide
  MOD_RES (31), (31): Xaa is C or S

SEQ ID NO: 69366 - protein, 31 aa, Artificial Sequence
  Cyclic GFR-binding peptide
  MOD_RES (28), (29): Xaa is C or S
IMEYQKYLLVRGNDIYLMSIPSTKVPAXXTS

SEQ ID NO: 69367 - protein, 38 aa, Artificial Sequence; identical to SEQ ID NO: 22561
  Cyclic GFR-binding peptide
  MOD_RES (2), (4), (35), (36): Xaa is C or S

SEQ ID NO: 69368 - protein, 34 aa, Artificial Sequence
  Cyclic GFR-binding peptide
  MOD_RES (28), (29): Xaa is C or S
IMEYQKYLLVRGNDIYLMSIPSTKVPAXXTSPVR

SEQ ID NO: 69369 - protein, 39 aa, Artificial Sequence; identical to SEQ ID NO: 22562
  Cyclic GFR-binding peptide
  MOD_RES (1), (3), (35), (36): Xaa is C or S

SEQ ID NO: 69370 - protein, 26 aa, Artificial Sequence
  Cyclic GFR-binding peptide
EEVIMEYQKYLLVRGNDIYLMSIPST

SEQ ID NO: 69371 - protein, 21 aa, Artificial Sequence
  Cyclic GFR-binding peptide
DEYQKYVVNNASDIYLISIPS

SEQ ID NO: 69372 - protein, 20 aa, Artificial Sequence
  Cyclic GFR-binding peptide
EYQKYLLVRGNDIYLMSIPS

SEQ ID NO: 69373 - protein, 34 aa, Artificial Sequence; identical to SEQ ID NO: 22567
  Cyclic GFR-binding peptide
  MOD_RES (31), (32): Xaa is C or S

SEQ ID NO: 69374 - protein, 36 aa, Artificial Sequence; identical to SEQ ID NO: 22569
  Cyclic GFR-binding peptide
  MOD_RES (31), (32): Xaa is C or S

SEQ ID NO: 69375 - protein, 35 aa, Artificial Sequence
  Cyclic GFR-binding peptide
  MOD_RES (29), (30): Xaa is C or S
VMNEYQKYIVNSSDDIYLVSIPSLKTPAXXPKPVH

SEQ ID NO: 69376 - protein, 22 aa, Artificial Sequence
  Cyclic GFR-binding peptide
DEYQKYVVNNASDIYLISIPSL

SEQ ID NO: 69377 - protein, 26 aa, Artificial Sequence
  Cyclic GFR-binding peptide
SEVVMDEYQKYVVNNASDIYLISIPS

SEQ ID NO: 69378 - protein, 29 aa, Artificial Sequence
  Cyclic GFR-binding peptide
  MOD_RES (1), (1): Xaa is C or S
XEEVIMEYQKYLLVRGNDIYLMSIPSTKV

SEQ ID NO: 69379 - protein, 35 aa, Artificial Sequence; identical to SEQ ID NO: 22577
  Cyclic GFR-binding peptide
  MOD_RES (2), (4): Xaa is C or S

SEQ ID NO: 69380 - protein, 23 aa, Artificial Sequence
  Cyclic GFR-binding peptide
VMDEYQKYVVNNASDIYLISIPS

SEQ ID NO: 69381 - protein, 40 aa, Artificial Sequence; identical to SEQ ID NO: 22578
  Cyclic GFR-binding peptide
  MOD_RES (1), (3), (34), (35): Xaa is C or S

SEQ ID NO: 69382 - protein, 26 aa, Artificial Sequence
  Cyclic GFR-binding peptide
MEYQKYLLVRGNDIYLMSIPSTKVPA

SEQ ID NO: 69383 - protein, 31 aa, Artificial Sequence
  Cyclic GFR-binding peptide
  MOD_RES (1), (3): Xaa is C or S
XGXSEVVMDEYQKYVVNNASDIYLISIPSLR

SEQ ID NO: 69384 - protein, 30 aa, Artificial Sequence
  Cyclic GFR-binding peptide
  MOD_RES (1), (1): Xaa is C or S
XSEVVMDEYQKYVVNNASDIYLISIPSLRT

SEQ ID NO: 69385 - protein, 26 aa, Artificial Sequence
  Cyclic GFR-binding peptide
DVVMGEYQKYIIQQKDNIYLMSIPSM

SEQ ID NO: 69386 - protein, 30 aa, Artificial Sequence
  Cyclic GFR-binding peptide
  MOD_RES (1), (1): Xaa is C or S
XRDVVMGEYQKYIIQQKDNIYLMSIPSMKT

SEQ ID NO: 69387 - protein, 40 aa, Artificial Sequence; identical to SEQ ID NO: 22585
  Cyclic GFR-binding peptide
  MOD_RES (1), (3), (35), (36): Xaa is C or S

SEQ ID NO: 69388 - protein, 27 aa, Artificial Sequence
  Cyclic GFR-binding peptide
  MOD_RES (26), (27): Xaa is C or S
EYQKYIIQQKDNIYLMSIPSMKTPTXX

SEQ ID NO: 69389 - protein, 28 aa, Artificial Sequence
  Cyclic GFR-binding peptide
  MOD_RES (26), (27): Xaa is C or S
EYQKYVVNNASDIYLISIPSLRTPVXXT

SEQ ID NO: 69390 - protein, 33 aa, Artificial Sequence
  Cyclic GFR-binding peptide
  MOD_RES (1), (33): Xaa is C or S
XSEVVMDEYQKYVVNNASDIYLISIPSLRTPVX

SEQ ID NO: 69391 - protein, 37 aa, Artificial Sequence; identical to SEQ ID NO: 22588
  Cyclic GFR-binding peptide
  MOD_RES (31), (32): Xaa is C or S

SEQ ID NO: 69392 - protein, 34 aa, Artificial Sequence
  Cyclic GFR-binding peptide
  MOD_RES (28), (29): Xaa is C or S
MNEYQKYIVNSSDDIYLVSIPSLKTPAXXPKPVH

SEQ ID NO: 69393 - protein, 39 aa, Artificial Sequence; identical to SEQ ID NO: 22589
  Cyclic GFR-binding peptide
  MOD_RES (1), (3), (34), (35): Xaa is C or S

SEQ ID NO: 69394 - protein, 40 aa, Artificial Sequence
  Cyclic GFR-binding peptide
  MOD_RES (2), (4), (36), (37): Xaa is C or S
RXGXSEVVMDEYQKYVVNNASDIYLISIPSLRTPVXXTPP

SEQ ID NO: 69395 - protein, 23 aa, Artificial Sequence
  Cyclic GFR-binding peptide
EYQKYVVNNASDIYLISIPSLRT

SEQ ID NO: 69396 - protein, 33 aa, Artificial Sequence
  Cyclic GFR-binding peptide
  MOD_RES (31), (32): Xaa is C or S
EVVMDEYQKYVVNNASDIYLISIPSLRTPVXXT

SEQ ID NO: 69397 - protein, 28 aa, Artificial Sequence
  Cyclic GFR-binding peptide
  MOD_RES (28), (28): Xaa is C or S
MDEYQKYVVNNASDIYLISIPSLRTPVX

SEQ ID NO: 69398 - protein, 41 aa, Artificial Sequence
  Cyclic GFR-binding peptide
  MOD_RES (2), (4), (36), (37): Xaa is C or S
RXGXSEVVMDEYQKYVVNNASDIYLISIPSLRTPVXXTPPT

SEQ ID NO: 69399 - protein, 31 aa, Artificial Sequence
  Cyclic GFR-binding peptide
  MOD_RES (27), (28): Xaa is C or S
MEYQKYLLVRGNDIYLMSIPSTKVPAXXTSP

SEQ ID NO: 69400 - protein, 40 aa, Artificial Sequence; identical to SEQ ID NO: 22593
  Cyclic GFR-binding peptide
  MOD_RES (2), (34), (35): Xaa is C or S

SEQ ID NO: 69401 - protein, 34 aa, Artificial Sequence; identical to SEQ ID NO: 22594
  Cyclic GFR-binding peptide
  MOD_RES (1), (3), (34): Xaa is C or S

SEQ ID NO: 69402 - protein, 36 aa, Artificial Sequence; identical to SEQ ID NO: 22596
  Cyclic GFR-binding peptide
  MOD_RES (1), (3), (35), (36): Xaa is C or S

SEQ ID NO: 69403 - protein, 30 aa, Artificial Sequence
  Cyclic GFR-binding peptide
  MOD_RES (27), (28): Xaa is C or S
DEYQKYVVNNASDIYLISIPSLRTPVXXTP

SEQ ID NO: 69404 - protein, 31 aa, Artificial Sequence
  Cyclic GFR-binding peptide
  MOD_RES (1), (1): Xaa is C or S
XRDVVMGEYQKYIIQQKDNIYLMSIPSMKTP

SEQ ID NO: 69405 - protein, 35 aa, Artificial Sequence; identical to SEQ ID NO: 22601
  Cyclic GFR-binding peptide
  MOD_RES (1), (32), (33): Xaa is C or S

SEQ ID NO: 69406 - protein, 29 aa, Artificial Sequence
  Cyclic GFR-binding peptide
  MOD_RES (28), (29): Xaa is C or S
MDEYQKYVVNNASDIYLISIPSLRTPVXX

SEQ ID NO: 69407 - protein, 29 aa, Artificial Sequence
  Cyclic GFR-binding peptide
  MOD_RES (29), (29): Xaa is C or S
VMDEYQKYVVNNASDIYLISIPSLRTPVX

SEQ ID NO: 69408 - protein, 31 aa, Artificial Sequence
  Cyclic GFR-binding peptide
  MOD_RES (1), (1): Xaa is C or S
XSEVVMDEYQKYVVNNASDIYLISIPSLRTP

SEQ ID NO: 69409 - protein, 29 aa, Artificial Sequence
  Cyclic GFR-binding peptide
  MOD_RES (27), (28): Xaa is C or S
MEYQKYLLVRGNDIYLMSIPSTKVPAXXT

SEQ ID NO: 69410 - protein, 31 aa, Artificial Sequence
  Cyclic GFR-binding peptide
  MOD_RES (2), (4): Xaa is C or S
LXGXEEVIMEYQKYLLVRGNDIYLMSIPSTK

SEQ ID NO: 69411 - protein, 38 aa, Artificial Sequence; identical to SEQ ID NO: 22611
  Cyclic GFR-binding peptide
  MOD_RES (1), (33), (34): Xaa is C or S

SEQ ID NO: 69412 - protein, 35 aa, Artificial Sequence
  Cyclic GFR-binding peptide
  MOD_RES (29), (30): Xaa is C or S
VIMEYQKYLLVRGNDIYLMSIPSTKVPAXXTSPVR

SEQ ID NO: 69413 - protein, 38 aa, Artificial Sequence; identical to SEQ ID NO: 22613
  Cyclic GFR-binding peptide
  MOD_RES (2), (34), (35): Xaa is C or S

SEQ ID NO: 69414 - protein, 29 aa, Artificial Sequence
  Cyclic GFR-binding peptide
VVMGEYQKYIIQQKDNIYLMSIPSMKTPT

SEQ ID NO: 69415 - protein, 30 aa, Artificial Sequence
  Cyclic GFR-binding peptide
  MOD_RES (27), (28): Xaa is C or S
GEYQKYIIQQKDNIYLMSIPSMKTPTXXPG

SEQ ID NO: 69416 - protein, 35 aa, Artificial Sequence
  Cyclic GFR-binding peptide
  MOD_RES (29), (30): Xaa is C or S
VMDEYQKYVVNNASDIYLISIPSLRTPVXXTPPTS

SEQ ID NO: 69417 - protein, 29 aa, Artificial Sequence
  Cyclic GFR-binding peptide
RDVVMGEYQKYIIQQKDNIYLMSIPSMKT

SEQ ID NO: 69418 - protein, 30 aa, Artificial Sequence
  Cyclic GFR-binding peptide
SEVVMDEYQKYVVNNASDIYLISIPSLRTP

SEQ ID NO: 69419 - protein, 24 aa, Artificial Sequence
  Cyclic GFR-binding peptide
VIMEYQKYLLVRGNDIYLMSIPST

SEQ ID NO: 69420 - protein, 30 aa, Artificial Sequence
  Cyclic GFR-binding peptide
  MOD_RES (2), (2): Xaa is C or S
GXRDVVMGEYQKYIIQQKDNIYLMSIPSMK

SEQ ID NO: 69421 - protein, 37 aa, Artificial Sequence; identical to SEQ ID NO: 22617
  Cyclic GFR-binding peptide
  MOD_RES (31), (32): Xaa is C or S

SEQ ID NO: 69422 - protein, 29 aa, Artificial Sequence
  Cyclic GFR-binding peptide
  MOD_RES (1), (3): Xaa is C or S
XGXRDVVMGEYQKYIIQQKDNIYLMSIPS

SEQ ID NO: 69423 - protein, 28 aa, Artificial Sequence
  Cyclic GFR-binding peptide
  MOD_RES (1), (1): Xaa is C or S
XEEVIMEYQKYLLVRGNDIYLMSIPSTK

SEQ ID NO: 69424 - protein, 35 aa, Artificial Sequence
  Cyclic GFR-binding peptide
  MOD_RES (29), (30): Xaa is C or S
VMGEYQKYIIQQKDNIYLMSIPSMKTPTXXPGASG

SEQ ID NO: 69425 - protein, 29 aa, Artificial Sequence
  Cyclic GFR-binding peptide
  MOD_RES (26), (27): Xaa is C or S
EYQKYIIQQKDNIYLMSIPSMKTPTXXPG

SEQ ID NO: 69426 - protein, 26 aa, Artificial Sequence
  Cyclic GFR-binding peptide
EVVMDEYQKYVVNNASDIYLISIPSL

SEQ ID NO: 69427 - protein, 34 aa, Artificial Sequence
  Cyclic GFR-binding peptide
  MOD_RES (29), (30): Xaa is C or S
VMDEYQKYVVNNASDIYLISIPSLRTPVXXTPPT

SEQ ID NO: 69428 - protein, 27 aa, Artificial Sequence
  Cyclic GFR-binding peptide
  MOD_RES (1), (1): Xaa is C or S
XSEVVMDEYQKYVVNNASDIYLISIPS

SEQ ID NO: 69429 - protein, 35 aa, Artificial Sequence
  Cyclic GFR-binding peptide
  MOD_RES (1), (3), (35): Xaa is C or S
XGXSEVVMDEYQKYVVNNASDIYLISIPSLRTPVX

SEQ ID NO: 69430 - protein, 30 aa, Artificial Sequence
  Cyclic GFR-binding peptide
  MOD_RES (2), (2): Xaa is C or S
GXSEVVMDEYQKYVVNNASDIYLISIPSLR

SEQ ID NO: 69431 - protein, 30 aa, Artificial Sequence
  Cyclic GFR-binding peptide
  MOD_RES (30), (30): Xaa is C or S
EVIMEYQKYLLVRGNDIYLMSIPSTKVPAX

SEQ ID NO: 69432 - protein, 21 aa, Artificial Sequence
  Cyclic GFR-binding peptide
EYQKYVVNNASDIYLISIPSL

SEQ ID NO: 69433 - protein, 33 aa, Artificial Sequence; identical to SEQ ID NO: 22627
  Cyclic GFR-binding peptide
  MOD_RES (2), (33): Xaa is C or S

SEQ ID NO: 69434 - protein, 38 aa, Artificial Sequence; identical to SEQ ID NO: 22630
  Cyclic GFR-binding peptide
  MOD_RES (32), (33): Xaa is C or S

SEQ ID NO: 69435 - protein, 30 aa, Artificial Sequence
  Cyclic GFR-binding peptide
  MOD_RES (26), (27): Xaa is C or S
EYQKYVVNNASDIYLISIPSLRTPVXXTPP

SEQ ID NO: 69436 - protein, 20 aa, Artificial Sequence
  Cyclic GFR-binding peptide
EYQKYVVNNASDIYLISIPS

SEQ ID NO: 69437 - protein, 26 aa, Artificial Sequence
  Cyclic GFR-binding peptide
  MOD_RES (26), (26): Xaa is C or S
EYQKYIIQQKDNIYLMSIPSMKTPTX

SEQ ID NO: 69438 - protein, 27 aa, Artificial Sequence
  Cyclic GFR-binding peptide
DVVMGEYQKYIIQQKDNIYLMSIPSMK

SEQ ID NO: 69439 - protein, 41 aa, Artificial Sequence
  Cyclic GFR-binding peptide
  MOD_RES (1), (3), (35), (36): Xaa is C or S
XGXSEVVMDEYQKYVVNNASDIYLISIPSLRTPVXXTPPTS

SEQ ID NO: 69440 - protein, 38 aa, Artificial Sequence; identical to SEQ ID NO: 22634
  Cyclic GFR-binding peptide
  MOD_RES (2), (4), (36), (37): Xaa is C or S

SEQ ID NO: 69441 - protein, 35 aa, Artificial Sequence
  Cyclic GFR-binding peptide
  MOD_RES (31), (32): Xaa is C or S
EVVMDEYQKYVVNNASDIYLISIPSLRTPVXXTPP

SEQ ID NO: 69442 - protein, 27 aa, Artificial Sequence
  Cyclic GFR-binding peptide
SEVVMDEYQKYVVNNASDIYLISIPSL

SEQ ID NO: 69443 - protein, 34 aa, Artificial Sequence; identical to SEQ ID NO: 22636
  Cyclic GFR-binding peptide
  MOD_RES (2), (33), (34): Xaa is C or S

SEQ ID NO: 69444 - protein, 23 aa, Artificial Sequence
  Cyclic GFR-binding peptide
EYQKYLLVRGNDIYLMSIPSTKV

SEQ ID NO: 69445 - protein, 34 aa, Artificial Sequence
  Cyclic GFR-binding peptide
  MOD_RES (32), (33): Xaa is C or S
SEVVMDEYQKYVVNNASDIYLISIPSLRTPVXXT

SEQ ID NO: 69446 - protein, 31 aa, Artificial Sequence
  Cyclic GFR-binding peptide
  MOD_RES (26), (27): Xaa is C or S
EYQKYLLVRGNDIYLMSIPSTKVPAXXTSPV

SEQ ID NO: 69447 - protein, 31 aa, Artificial Sequence
  Cyclic GFR-binding peptide
  MOD_RES (27), (28): Xaa is C or S
GEYQKYIIQQKDNIYLMSIPSMKTPTXXPGA

SEQ ID NO: 69448 - protein, 29 aa, Artificial Sequence
  Cyclic GFR-binding peptide
AAAAAAAAAEYQKYLLVRGNDIYLMSIPS

SEQ ID NO: 69449 - protein, 42 aa, Artificial Sequence; identical to SEQ ID NO: 22642
  Cyclic GFR-binding peptide
  MOD_RES (2), (4), (36), (37): Xaa is C or S

SEQ ID NO: 69450 - protein, 34 aa, Artificial Sequence; identical to SEQ ID NO: 22644
  Cyclic GFR-binding peptide
  MOD_RES (1), (33), (34): Xaa is C or S

SEQ ID NO: 69451 - protein, 31 aa, Artificial Sequence
  Cyclic GFR-binding peptide
  MOD_RES (1), (3): Xaa is C or S
XGXRDVVMGEYQKYIIQQKDNIYLMSIPSMK

SEQ ID NO: 69452 - protein, 32 aa, Artificial Sequence
  Cyclic GFR-binding peptide
  MOD_RES (29), (30): Xaa is C or S
VMGEYQKYIIQQKDNIYLMSIPSMKTPTXXPG

SEQ ID NO: 69453 - protein, 29 aa, Artificial Sequence
  Cyclic GFR-binding peptide
EVIMEYQKYLLVRGNDIYLMSIPSTKVPA

SEQ ID NO: 69454 - protein, 28 aa, Artificial Sequence
  Cyclic GFR-binding peptide
SEVVMDEYQKYVVNNASDIYLISIPSLR

SEQ ID NO: 69455 - protein, 24 aa, Artificial Sequence
  Cyclic GFR-binding peptide
DEYQKYVVNNASDIYLISIPSLRT

SEQ ID NO: 69456 - protein, 28 aa, Artificial Sequence
  Cyclic GFR-binding peptide
DVVMGEYQKYIIQQKDNIYLMSIPSMKT

SEQ ID NO: 69457 - protein, 24 aa, Artificial Sequence
  Cyclic GFR-binding peptide
PVKTSPISMLYIDNGRVLLYKQYE

SEQ ID NO: 69458 - protein, 35 aa, Artificial Sequence; identical to SEQ ID NO: 22653
  Cyclic GFR-binding peptide
  MOD_RES (4), (5): Xaa is C or S

SEQ ID NO: 69459 - protein, 25 aa, Artificial Sequence
  Cyclic GFR-binding peptide
LSPISILYIDSANNVVYKQYEDMVV

SEQ ID NO: 69460 - protein, 27 aa, Artificial Sequence
  Cyclic GFR-binding peptide
  MOD_RES (26), (26): Xaa is C or S
SPISMLYIDNGRVLLYKQYEMIVEEXG

SEQ ID NO: 69461 - protein, 32 aa, Artificial Sequence; identical to SEQ ID NO: 22654
  Cyclic GFR-binding peptide
  MOD_RES (31), (31): Xaa is C or S

SEQ ID NO: 69462 - protein, 30 aa, Artificial Sequence
  Cyclic GFR-binding peptide
  MOD_RES (3), (4): Xaa is C or S
STXXAPVKTSPISMLYIDNGRVLLYKQYEM

SEQ ID NO: 69463 - protein, 21 aa, Artificial Sequence
  Cyclic GFR-binding peptide
MSPISMLYINDKQQIIYKQYE

SEQ ID NO: 69464 - protein, 32 aa, Artificial Sequence; identical to SEQ ID NO: 22657
  Cyclic GFR-binding peptide
  MOD_RES (1), (32): Xaa is C or S

SEQ ID NO: 69465 - protein, 28 aa, Artificial Sequence
  Cyclic GFR-binding peptide
  MOD_RES (27), (27): Xaa is C or S
SPISILYIDSANNVVYKQYEDMVVESXG

SEQ ID NO: 69466 - protein, 31 aa, Artificial Sequence
  Cyclic GFR-binding peptide
  MOD_RES (2), (3): Xaa is C or S
TXXVPTRLSPISILYIDSANNVVYKQYEDMV

SEQ ID NO: 69467 - protein, 27 aa, Artificial Sequence
  Cyclic GFR-binding peptide
RLSPISILYIDSANNVVYKQYEDMVVE

SEQ ID NO: 69468 - protein, 33 aa, Artificial Sequence; identical to SEQ ID NO: 22658
  Cyclic GFR-binding peptide
  MOD_RES (1), (33): Xaa is C or S

SEQ ID NO: 69469 - protein, 24 aa, Artificial Sequence
  Cyclic GFR-binding peptide
PTRLSPISILYIDSANNVVYKQYE

SEQ ID NO: 69470 - protein, 29 aa, Artificial Sequence
  Cyclic GFR-binding peptide
  MOD_RES (26), (28): Xaa is C or S
SPISMLYIDNGRVLLYKQYEMIVEEXGXL

SEQ ID NO: 69471 - protein, 33 aa, Artificial Sequence; identical to SEQ ID NO: 22664
  Cyclic GFR-binding peptide
  MOD_RES (1), (2): Xaa is C or S

SEQ ID NO: 69472 - protein, 29 aa, Artificial Sequence
  Cyclic GFR-binding peptide
  MOD_RES (1), (2): Xaa is C or S
XXAPVKTSPISMLYIDNGRVLLYKQYEMI

SEQ ID NO: 69473 - protein, 22 aa, Artificial Sequence
  Cyclic GFR-binding peptide
SPISMLYIDNGRVLLYKQYEMI

SEQ ID NO: 69474 - protein, 32 aa, Artificial Sequence
  Cyclic GFR-binding peptide
  MOD_RES (3), (4): Xaa is C or S
PTXXVPTRLSPISILYIDSANNVVYKQYEDMV

SEQ ID NO: 69475 - protein, 22 aa, Artificial Sequence
  Cyclic GFR-binding peptide
TSPISMLYIDNGRVLLYKQYEM

SEQ ID NO: 69476 - protein, 33 aa, Artificial Sequence
  Cyclic GFR-binding peptide
  MOD_RES (3), (4): Xaa is C or S
GPXXTPTKMSPISMLYINDKQQIIYKQYEGMVV

SEQ ID NO: 69477 - protein, 24 aa, Artificial Sequence
  Cyclic GFR-binding peptide
VKTSPISMLYIDNGRVLLYKQYEM

SEQ ID NO: 69478 - protein, 36 aa, Artificial Sequence
  Cyclic GFR-binding peptide
  MOD_RES (3), (4), (36): Xaa is C or S
PTXXVPTRLSPISILYIDSANNVVYKQYEDMVVESX

SEQ ID NO: 69479 - protein, 28 aa, Artificial Sequence
  Cyclic GFR-binding peptide
  MOD_RES (2), (3): Xaa is C or S
PXXTPTKMSPISMLYINDKQQIIYKQYE

SEQ ID NO: 69480 - protein, 33 aa, Artificial Sequence
  Cyclic GFR-binding peptide
  MOD_RES (3), (4): Xaa is C or S
STXXAPVKTSPISMLYIDNGRVLLYKQYEMIVE

SEQ ID NO: 69481 - protein, 36 aa, Artificial Sequence; identical to SEQ ID NO: 22670
  Cyclic GFR-binding peptide
  MOD_RES (4), (5), (36): Xaa is C or S

SEQ ID NO: 69482 - protein, 41 aa, Artificial Sequence; identical to SEQ ID NO: 22671
  Cyclic GFR-binding peptide
  MOD_RES (5), (6), (38), (40): Xaa is C or S

SEQ ID NO: 69483 - protein, 23 aa, Artificial Sequence
  Cyclic GFR-binding peptide
TSPISMLYIDNGRVLLYKQYEMI

SEQ ID NO: 69484 - protein, 35 aa, Artificial Sequence
  Cyclic GFR-binding peptide
  MOD_RES (5), (6): Xaa is C or S
SAGPXXTPTKMSPISMLYINDKQQIIYKQYEGMVV

SEQ ID NO: 69485 - protein, 33 aa, Artificial Sequence
  Cyclic GFR-binding peptide
  MOD_RES (6), (7): Xaa is C or S
RVPSTXXAPVKTSPISMLYIDNGRVLLYKQYEM

SEQ ID NO: 69486 - protein, 28 aa, Artificial Sequence
  Cyclic GFR-binding peptide
  MOD_RES (28), (28): Xaa is C or S
MSPISMLYINDKQQIIYKQYEGMVVDRX

SEQ ID NO: 69487 - protein, 30 aa, Artificial Sequence
  Cyclic GFR-binding peptide
  MOD_RES (2), (3): Xaa is C or S
PXXTPTKMSPISMLYINDKQQIIYKQYEGM

SEQ ID NO: 69488 - protein, 30 aa, Artificial Sequence
  Cyclic GFR-binding peptide
  MOD_RES (1), (1): Xaa is C or S
XTPTKMSPISMLYINDKQQIIYKQYEGMVV

SEQ ID NO: 69489 - protein, 39 aa, Artificial Sequence
  Cyclic GFR-binding peptide
  MOD_RES (5), (6), (38): Xaa is C or S
TPPTXXVPTRLSPISILYIDSANNVVYKQYEDMVVESXG

SEQ ID NO: 69490 - protein, 28 aa, Artificial Sequence
  Cyclic GFR-binding peptide
  MOD_RES (1), (1): Xaa is C or S
XAPVKTSPISMLYIDNGRVLLYKQYEMI

SEQ ID NO: 69491 - protein, 32 aa, Artificial Sequence
  Cyclic GFR-binding peptide
  MOD_RES (6), (7): Xaa is C or S
HVPKPXXAPTKLSPISVLYIDDSSNVIYKQYE

SEQ ID NO: 69492 - protein, 23 aa, Artificial Sequence
  Cyclic GFR-binding peptide
SPISMLYIDNGRVLLYKQYEMIV

SEQ ID NO: 69493 - protein, 35 aa, Artificial Sequence
  Cyclic GFR-binding peptide
  MOD_RES (5), (6): Xaa is C or S
TPPTXXVPTRLSPISILYIDSANNVVYKQYEDMVV

SEQ ID NO: 69494 - protein, 31 aa, Artificial Sequence
  Cyclic GFR-binding peptide
  MOD_RES (1), (2): Xaa is C or S
XXAPVKTSPISMLYIDNGRVLLYKQYEMIVE

SEQ ID NO: 69495 - protein, 30 aa, Artificial Sequence; identical to SEQ ID NO: 22682
  Cyclic GFR-binding peptide

SEQ ID NO: 69496 - protein, 32 aa, Artificial Sequence
  Cyclic GFR-binding peptide
  MOD_RES (29), (31): Xaa is C or S
RLSPISILYIDSANNVVYKQYEDMVVESXGXR

SEQ ID NO: 69497 - protein, 40 aa, Artificial Sequence
  Cyclic GFR-binding peptide
  MOD_RES (5), (6), (38), (40): Xaa is C or S
TPPTXXVPTRLSPISILYIDSANNVVYKQYEDMVVESXGX

SEQ ID NO: 69498 - protein, 25 aa, Artificial Sequence
  Cyclic GFR-binding peptide
SPISMLYINDKQQIIYKQYEGMVVD

SEQ ID NO: 69499 - protein, 40 aa, Artificial Sequence; identical to SEQ ID NO: 22687
  Cyclic GFR-binding peptide
  MOD_RES (6), (7), (39): Xaa is C or S

SEQ ID NO: 69500 - protein, 33 aa, Artificial Sequence; identical to SEQ ID NO: 22691
  Cyclic GFR-binding peptide
  MOD_RES (31), (33): Xaa is C or S

SEQ ID NO: 69501 - protein, 38 aa, Artificial Sequence
  Cyclic GFR-binding peptide
  MOD_RES (4), (5), (37): Xaa is C or S
PPTXXVPTRLSPISILYIDSANNVVYKQYEDMVVESXG

SEQ ID NO: 69502 - protein, 30 aa, Artificial Sequence
  Cyclic GFR-binding peptide
  MOD_RES (30), (30): Xaa is C or S
PVKTSPISMLYIDNGRVLLYKQYEMIVEEX

SEQ ID NO: 69503 - protein, 27 aa, Artificial Sequence
  Cyclic GFR-binding peptide
  MOD_RES (27), (27): Xaa is C or S
SPISMLYINDKQQIIYKQYEGMVVDRX

SEQ ID NO: 69504 - protein, 25 aa, Artificial Sequence
  Cyclic GFR-binding peptide
SPISMLYIDNGRVLLYKQYEMIVEE

SEQ ID NO: 69505 - protein, 28 aa, Artificial Sequence
  Cyclic GFR-binding peptide
APVKTSPISMLYIDNGRVLLYKQYEMIV

SEQ ID NO: 69506 - protein, 26 aa, Artificial Sequence
  Cyclic GFR-binding peptide
PTKMSPISMLYINDKQQIIYKQYEGM

SEQ ID NO: 69507 - protein, 37 aa, Artificial Sequence; identical to SEQ ID NO: 22692
  Cyclic GFR-binding peptide
  MOD_RES (3), (4), (36): Xaa is C or S

SEQ ID NO: 69508 - protein, 32 aa, Artificial Sequence
  Cyclic GFR-binding peptide
  MOD_RES (31), (31): Xaa is C or S
PTKMSPISMLYINDKQQIIYKQYEGMVVDRXG

SEQ ID NO: 69509 - protein, 28 aa, Artificial Sequence
  Cyclic GFR-binding peptide
TPTKMSPISMLYINDKQQIIYKQYEGMV

SEQ ID NO: 69510 - protein, 37 aa, Artificial Sequence
  Cyclic GFR-binding peptide
  MOD_RES (3), (4), (36): Xaa is C or S
PTXXVPTRLSPISILYIDSANNVVYKQYEDMVVESXG

SEQ ID NO: 69511 - protein, 34 aa, Artificial Sequence; identical to SEQ ID NO: 22697
  Cyclic GFR-binding peptide
  MOD_RES (32), (34): Xaa is C or S

SEQ ID NO: 69512 - protein, 38 aa, Artificial Sequence; identical to SEQ ID NO: 22698
  Cyclic GFR-binding peptide
  MOD_RES (4), (5), (36), (38): Xaa is C or S

SEQ ID NO: 69513 - protein, 22 aa, Artificial Sequence
  Cyclic GFR-binding peptide
MSPISMLYINDKQQIIYKQYEG

SEQ ID NO: 69514 - protein, 37 aa, Artificial Sequence; identical to SEQ ID NO: 22701
  Cyclic GFR-binding peptide
  MOD_RES (4), (5), (37): Xaa is C or S

SEQ ID NO: 69515 - protein, 37 aa, Artificial Sequence
  Cyclic GFR-binding peptide
  MOD_RES (5), (6): Xaa is C or S
TPPTXXVPTRLSPISILYIDSANNVVYKQYEDMVVES

SEQ ID NO: 69516 - protein, 36 aa, Artificial Sequence; identical to SEQ ID NO: 22703
  Cyclic GFR-binding peptide
  MOD_RES (4), (5): Xaa is C or S

SEQ ID NO: 69517 - protein, 30 aa, Artificial Sequence
  Cyclic GFR-binding peptide
  MOD_RES (1), (2): Xaa is C or S
XXTPTKMSPISMLYINDKQQIIYKQYEGMV

SEQ ID NO: 69518 - protein, 31 aa, Artificial Sequence
  Cyclic GFR-binding peptide
  MOD_RES (28), (30): Xaa is C or S
MSPISMLYINDKQQIIYKQYEGMVVDRXGXS

SEQ ID NO: 69519 - protein, 30 aa, Artificial Sequence
  Cyclic GFR-binding peptide
  MOD_RES (4), (5): Xaa is C or S
AGPXXTPTKMSPISMLYINDKQQIIYKQYE

SEQ ID NO: 69520 - protein, 36 aa, Artificial Sequence; identical to SEQ ID NO: 22706
  Cyclic GFR-binding peptide
  MOD_RES (2), (3), (34), (36): Xaa is C or S

SEQ ID NO: 69521 - protein, 29 aa, Artificial Sequence
  Cyclic GFR-binding peptide
  MOD_RES (27), (29): Xaa is C or S
SPISILYIDSANNVVYKQYEDMVVESXGX

SEQ ID NO: 69522 - protein, 27 aa, Artificial Sequence
  Cyclic GFR-binding peptide
  MOD_RES (1), (1): Xaa is C or S
XAPVKTSPISMLYIDNGRVLLYKQYEM

SEQ ID NO: 69523 - protein, 36 aa, Artificial Sequence; identical to SEQ ID NO: 22709
  Cyclic GFR-binding peptide
  MOD_RES (5), (6): Xaa is C or S

SEQ ID NO: 69524 - protein, 24 aa, Artificial Sequence
  Cyclic GFR-binding peptide
SPISMLYINDKQQIIYKQYEGMVV

SEQ ID NO: 69525 - protein, 29 aa, Artificial Sequence
  Cyclic GFR-binding peptide
  MOD_RES (29), (29): Xaa is C or S
RLSPISILYIDSANNVVYKQYEDMVVESX

SEQ ID NO: 69526 - protein, 33 aa, Artificial Sequence
  Cyclic GFR-binding peptide
  MOD_RES (32), (32): Xaa is C or S
VPTRLSPISILYIDSANNVVYKQYEDMVVESXG

SEQ ID NO: 69527 - protein, 33 aa, Artificial Sequence
  Cyclic GFR-binding peptide
  MOD_RES (4), (5): Xaa is C or S
AGPXXTPTKMSPISMLYINDKQQIIYKQYEGMV

SEQ ID NO: 69528 - protein, 31 aa, Artificial Sequence; identical to SEQ ID NO: 22713
  Cyclic GFR-binding peptide

SEQ ID NO: 69529 - protein, 32 aa, Artificial Sequence
  Cyclic GFR-binding peptide
  MOD_RES (6), (7): Xaa is C or S
STPPTXXVPTRLSPISILYIDSANNVVYKQYE

SEQ ID NO: 69530 - protein, 27 aa, Artificial Sequence
  Cyclic GFR-binding peptide
  MOD_RES (27), (27): Xaa is C or S
TSPISMLYIDNGRVLLYKQYEMIVEEX

SEQ ID NO: 69531 - protein, 40 aa, Artificial Sequence; identical to SEQ ID NO: 22717
  Cyclic GFR-binding peptide
  MOD_RES (4), (5), (37), (39): Xaa is C or S

SEQ ID NO: 69532 - protein, 33 aa, Artificial Sequence
  Cyclic GFR-binding peptide
  MOD_RES (5), (6): Xaa is C or S
TPPTXXVPTRLSPISILYIDSANNVVYKQYEDM

SEQ ID NO: 69533 - protein, 20 aa, Artificial Sequence
  Cyclic GFR-binding peptide
SPISMLYINDKQQIIYKQYE

SEQ ID NO: 69534 - protein, 34 aa, Artificial Sequence
  Cyclic GFR-binding peptide
  MOD_RES (3), (4): Xaa is C or S
PTXXVPTRLSPISILYIDSANNVVYKQYEDMVVE

SEQ ID NO: 69535 - protein, 31 aa, Artificial Sequence
  Cyclic GFR-binding peptide
  MOD_RES (1), (2): Xaa is C or S
XXVPTRLSPISILYIDSANNVVYKQYEDMVV

SEQ ID NO: 69536 - protein, 34 aa, Artificial Sequence
  Cyclic GFR-binding peptide
  MOD_RES (1), (33): Xaa is C or S
XVPTRLSPISILYIDSANNVVYKQYEDMVVESXG

SEQ ID NO: 69537 - protein, 37 aa, Artificial Sequence
  Cyclic GFR-binding peptide
  MOD_RES (2), (3), (35), (37): Xaa is C or S
TXXVPTRLSPISILYIDSANNVVYKQYEDMVVESXGX

SEQ ID NO: 69538 - protein, 34 aa, Artificial Sequence; identical to SEQ ID NO: 22721
  Cyclic GFR-binding peptide
  MOD_RES (2), (3), (34): Xaa is C or S

SEQ ID NO: 69539 - protein, 33 aa, Artificial Sequence
  Cyclic GFR-binding peptide
  MOD_RES (1), (2): Xaa is C or S
XXVPTRLSPISILYIDSANNVVYKQYEDMVVES

SEQ ID NO: 69540 - protein, 29 aa, Artificial Sequence
  Cyclic GFR-binding peptide
  MOD_RES (3), (4): Xaa is C or S
STXXAPVKTSPISMLYIDNGRVLLYKQYE

SEQ ID NO: 69541 - protein, 28 aa, Artificial Sequence
  Cyclic GFR-binding peptide
  MOD_RES (28), (28): Xaa is C or S
LSPISILYIDSANNVVYKQYEDMVVESX

SEQ ID NO: 69542 - protein, 28 aa, Artificial Sequence
  Cyclic GFR-binding peptide
  MOD_RES (26), (28): Xaa is C or S
SPISMLYIDNGRVLLYKQYEMIVEEXGX

SEQ ID NO: 69543 - protein, 34 aa, Artificial Sequence
  Cyclic GFR-binding peptide
  MOD_RES (31), (33): Xaa is C or S
PTKMSPISMLYINDKQQIIYKQYEGMVVDRXGXS

SEQ ID NO: 69544 - protein, 25 aa, Artificial Sequence
  Cyclic GFR-binding peptide
APVKTSPISMLYIDNGRVLLYKQYE

SEQ ID NO: 69545 - protein, 30 aa, Artificial Sequence; identical to SEQ ID NO: 958
  Cyclic GFR-binding peptide

SEQ ID NO: 69546 - protein, 29 aa, Artificial Sequence
  Cyclic GFR-binding peptide
  MOD_RES (28), (28): Xaa is C or S
KTSPISMLYIDNGRVLLYKQYEMIVEEXG

SEQ ID NO: 69547 - protein, 37 aa, Artificial Sequence; identical to SEQ ID NO: 22724
  Cyclic GFR-binding peptide
  MOD_RES (2), (3), (34), (36): Xaa is C or S

SEQ ID NO: 69548 - protein, 36 aa, Artificial Sequence
  Cyclic GFR-binding peptide
  MOD_RES (6), (7): Xaa is C or S
GSAGPXXTPTKMSPISMLYINDKQQIIYKQYEGMVV

SEQ ID NO: 69549 - protein, 33 aa, Artificial Sequence; identical to SEQ ID NO: 22727
  Cyclic GFR-binding peptide
  MOD_RES (2), (3): Xaa is C or S

SEQ ID NO: 69550 - protein, 33 aa, Artificial Sequence
  Cyclic GFR-binding peptide
  MOD_RES (3), (4): Xaa is C or S
PTXXVPTRLSPISILYIDSANNVVYKQYEDMVV

SEQ ID NO: 69551 - protein, 36 aa, Artificial Sequence
  Cyclic GFR-binding peptide
  MOD_RES (6), (7): Xaa is C or S
HVPKPXXAPTKLSPISVLYIDDSSNVIYKQYENMVV

SEQ ID NO: 69552 - protein, 30 aa, Artificial Sequence
  Cyclic GFR-binding peptide
  MOD_RES (27), (29): Xaa is C or S
SPISILYIDSANNVVYKQYEDMVVESXGXR

SEQ ID NO: 69553 - protein, 23 aa, Artificial Sequence
  Cyclic GFR-binding peptide
MSPISMLYINDKQQIIYKQYEGM

SEQ ID NO: 69554 - protein, 31 aa, Artificial Sequence
  Cyclic GFR-binding peptide
  MOD_RES (5), (6): Xaa is C or S
TPPTXXVPTRLSPISILYIDSANNVVYKQYE

SEQ ID NO: 69555 - protein, 33 aa, Artificial Sequence; identical to SEQ ID NO: 22732
  Cyclic GFR-binding peptide
  MOD_RES (1), (2), (33): Xaa is C or S

SEQ ID NO: 69556 - protein, 34 aa, Artificial Sequence; identical to SEQ ID NO: 22733
  Cyclic GFR-binding peptide
  MOD_RES (3), (4): Xaa is C or S

SEQ ID NO: 69557 - protein, 29 aa, Artificial Sequence
  Cyclic GFR-binding peptide
  MOD_RES (3), (4): Xaa is C or S
PTXXVPTRLSPISILYIDSANNVVYKQYE

SEQ ID NO: 69558 - protein, 35 aa, Artificial Sequence
  Cyclic GFR-binding peptide
  MOD_RES (3), (4): Xaa is C or S
PTXXVPTRLSPISILYIDSANNVVYKQYEDMVVES

SEQ ID NO: 69559 - protein, 35 aa, Artificial Sequence
  Cyclic GFR-binding peptide
  MOD_RES (5), (6): Xaa is C or S
VPSTXXAPVKTSPISMLYIDNGRVLLYKQYEMIVE

SEQ ID NO: 69560 - protein, 21 aa, Artificial Sequence
  Cyclic GFR-binding peptide
SPISMLYINDKQQIIYKQYEG

SEQ ID NO: 69561 - protein, 39 aa, Artificial Sequence; identical to SEQ ID NO: 22738
  Cyclic GFR-binding peptide
  MOD_RES (3), (4), (36), (38): Xaa is C or S

SEQ ID NO: 69562 - protein, 25 aa, Artificial Sequence
  Cyclic GFR-binding peptide
PVKTSPISMLYIDNGRVLLYKQYEM

SEQ ID NO: 69563 - protein, 27 aa, Artificial Sequence
  Cyclic GFR-binding peptide
TPTKMSPISMLYINDKQQIIYKQYEGM

SEQ ID NO: 69564 - protein, 29 aa, Artificial Sequence
  Cyclic GFR-binding peptide
  MOD_RES (29), (29): Xaa is C or S
KMSPISMLYINDKQQIIYKQYEGMVVDRX

SEQ ID NO: 69565 - protein, 38 aa, Artificial Sequence
  Cyclic GFR-binding peptide
  MOD_RES (3), (4), (36), (38): Xaa is C or S
PTXXVPTRLSPISILYIDSANNVVYKQYEDMVVESXGX

SEQ ID NO: 69566 - protein, 33 aa, Artificial Sequence
  Cyclic GFR-binding peptide
  MOD_RES (4), (5): Xaa is C or S
PSTXXAPVKTSPISMLYIDNGRVLLYKQYEMIV

SEQ ID NO: 69567 - protein, 24 aa, Artificial Sequence
  Cyclic GFR-binding peptide
SPISMLYIDNGRVLLYKQYEMIVE

SEQ ID NO: 69568 - protein, 31 aa, Artificial Sequence
  Cyclic GFR-binding peptide
  MOD_RES (3), (4): Xaa is C or S
GPXXTPTKMSPISMLYINDKQQIIYKQYEGM

SEQ ID NO: 69569 - protein, 38 aa, Artificial Sequence
  Cyclic GFR-binding peptide
  MOD_RES (6), (7): Xaa is C or S
STPPTXXVPTRLSPISILYIDSANNVVYKQYEDMVVES

SEQ ID NO: 69570 - protein, 33 aa, Artificial Sequence
  Cyclic GFR-binding peptide
  MOD_RES (6), (7): Xaa is C or S
GSAGPXXTPTKMSPISMLYINDKQQIIYKQYEG

SEQ ID NO: 69571 - protein, 37 aa, Artificial Sequence; identical to SEQ ID NO: 22754
  Cyclic GFR-binding peptide
  MOD_RES (6), (7): Xaa is C or S

SEQ ID NO: 69572 - protein, 30 aa, Artificial Sequence
  Cyclic GFR-binding peptide
  MOD_RES (27), (29): Xaa is C or S
SPISMLYINDKQQIIYKQYEGMVVDRXGXS

SEQ ID NO: 69573 - protein, 33 aa, Artificial Sequence
  Cyclic GFR-binding peptide
  MOD_RES (31), (33): Xaa is C or S
PTKMSPISMLYINDKQQIIYKQYEGMVVDRXGX

SEQ ID NO: 69574 - protein, 41 aa, Artificial Sequence; identical to SEQ ID NO: 22755
  Cyclic GFR-binding peptide
  MOD_RES (6), (7), (38), (40): Xaa is C or S

SEQ ID NO: 69575 - protein, 32 aa, Artificial Sequence; identical to SEQ ID NO: 22756
  Cyclic GFR-binding peptide
  MOD_RES (1), (2): Xaa is C or S

SEQ ID NO: 69576 - protein, 29 aa, Artificial Sequence
  Cyclic GFR-binding peptide
  MOD_RES (2), (3): Xaa is C or S
TXXVPTRLSPISILYIDSANNVVYKQYED

SEQ ID NO: 69577 - protein, 26 aa, Artificial Sequence
  Cyclic GFR-binding peptide
TPTKMSPISMLYINDKQQIIYKQYEG

SEQ ID NO: 69578 - protein, 34 aa, Artificial Sequence
  Cyclic GFR-binding peptide
  MOD_RES (4), (5): Xaa is C or S
AGPXXTPTKMSPISMLYINDKQQIIYKQYEGMVV

SEQ ID NO: 69579 - protein, 30 aa, Artificial Sequence; identical to SEQ ID NO: 22760
  Cyclic GFR-binding peptide

SEQ ID NO: 69580 - protein, 35 aa, Artificial Sequence; identical to SEQ ID NO: 22763
  Cyclic GFR-binding peptide
  MOD_RES (2), (3), (35): Xaa is C or S

SEQ ID NO: 69581 - protein, 37 aa, Artificial Sequence; identical to SEQ ID NO: 22764
  Cyclic GFR-binding peptide
  MOD_RES (4), (5), (36): Xaa is C or S

SEQ ID NO: 69582 - protein, 34 aa, Artificial Sequence
  Cyclic GFR-binding peptide
  MOD_RES (4), (5): Xaa is C or S
PPTXXVPTRLSPISILYIDSANNVVYKQYEDMVV

SEQ ID NO: 69583 - protein, 32 aa, Artificial Sequence
  Cyclic GFR-binding peptide
  MOD_RES (2), (3): Xaa is C or S
TXXAPVKTSPISMLYIDNGRVLLYKQYEMIVE

SEQ ID NO: 69584 - protein, 35 aa, Artificial Sequence; identical to SEQ ID NO: 22766
  Cyclic GFR-binding peptide
  MOD_RES (1), (32), (34): Xaa is C or S

SEQ ID NO: 69585 - protein, 39 aa, Artificial Sequence
  Cyclic GFR-binding peptide
  MOD_RES (4), (5), (37), (39): Xaa is C or S
PPTXXVPTRLSPISILYIDSANNVVYKQYEDMVVESXGX

SEQ ID NO: 69586 - protein, 32 aa, Artificial Sequence
  Cyclic GFR-binding peptide
  MOD_RES (30), (32): Xaa is C or S
PVKTSPISMLYIDNGRVLLYKQYEMIVEEXGX

SEQ ID NO: 69587 - protein, 26 aa, Artificial Sequence
  Cyclic GFR-binding peptide
  MOD_RES (1), (1): Xaa is C or S
XVPTRLSPISILYIDSANNVVYKQYE

SEQ ID NO: 69588 - protein, 33 aa, Artificial Sequence
  Cyclic GFR-binding peptide
  MOD_RES (30), (32): Xaa is C or S
TRLSPISILYIDSANNVVYKQYEDMVVESXGXR

SEQ ID NO: 69589 - protein, 26 aa, Artificial Sequence
  Cyclic GFR-binding peptide
TKMSPISMLYINDKQQIIYKQYEGMV

SEQ ID NO: 69590 - protein, 26 aa, Artificial Sequence
  Cyclic GFR-binding peptide
PVKTSPISMLYIDNGRVLLYKQYEMI

SEQ ID NO: 69591 - protein, 32 aa, Artificial Sequence
  Cyclic GFR-binding peptide
  MOD_RES (5), (6): Xaa is C or S
SAGPXXTPTKMSPISMLYINDKQQIIYKQYEG

SEQ ID NO: 69592 - protein, 31 aa, Artificial Sequence
  Cyclic GFR-binding peptide
  MOD_RES (1), (1): Xaa is C or S
XVPTRLSPISILYIDSANNVVYKQYEDMVVE

SEQ ID NO: 69593 - protein, 26 aa, Artificial Sequence
  Cyclic GFR-binding peptide
PTRLSPISILYIDSANNVVYKQYEDM

SEQ ID NO: 69594 - protein, 32 aa, Artificial Sequence
  Cyclic GFR-binding peptide
  MOD_RES (4), (5): Xaa is C or S
AGPXXTPTKMSPISMLYINDKQQIIYKQYEGM

SEQ ID NO: 69595 - protein, 34 aa, Artificial Sequence
  Cyclic GFR-binding peptide
  MOD_RES (6), (7): Xaa is C or S
GSAGPXXTPTKMSPISMLYINDKQQIIYKQYEGM

SEQ ID NO: 69596 - protein, 32 aa, Artificial Sequence
  Cyclic GFR-binding peptide
  MOD_RES (29), (31): Xaa is C or S
VKTSPISMLYIDNGRVLLYKQYEMIVEEXGXL

SEQ ID NO: 69597 - protein, 37 aa, Artificial Sequence
  Cyclic GFR-binding peptide
  MOD_RES (4), (5), (37): Xaa is C or S
PPTXXVPTRLSPISILYIDSANNVVYKQYEDMVVESX

SEQ ID NO: 69598 - protein, 22 aa, Artificial Sequence
  Cyclic GFR-binding peptide
SPISILYIDSANNVVYKQYEDM

SEQ ID NO: 69599 - protein, 32 aa, Artificial Sequence
  Cyclic GFR-binding peptide
  MOD_RES (3), (4): Xaa is C or S
STXXAPVKTSPISMLYIDNGRVLLYKQYEMIV

SEQ ID NO: 69600 - protein, 38 aa, Artificial Sequence
  Cyclic GFR-binding peptide
  MOD_RES (5), (6), (38): Xaa is C or S
TPPTXXVPTRLSPISILYIDSANNVVYKQYEDMVVESX

SEQ ID NO: 69601 - protein, 32 aa, Artificial Sequence
  Cyclic GFR-binding peptide
  MOD_RES (5), (6): Xaa is C or S
TPPTXXVPTRLSPISILYIDSANNVVYKQYED

SEQ ID NO: 69602 - protein, 38 aa, Artificial Sequence; identical to SEQ ID NO: 22782
  Cyclic GFR-binding peptide
  MOD_RES (6), (7): Xaa is C or S

SEQ ID NO: 69603 - protein, 22 aa, Artificial Sequence
  Cyclic GFR-binding peptide
KMSPISMLYINDKQQIIYKQYE

SEQ ID NO: 69604 - protein, 39 aa, Artificial Sequence; identical to SEQ ID NO: 22785
  Cyclic GFR-binding peptide
  MOD_RES (6), (7), (38): Xaa is C or S

SEQ ID NO: 69605 - protein, 41 aa, Artificial Sequence; identical to SEQ ID NO: 22787
  Cyclic GFR-binding peptide
  MOD_RES (6), (7), (39), (41): Xaa is C or S

SEQ ID NO: 69606 - protein, 35 aa, Artificial Sequence
  Cyclic GFR-binding peptide
  MOD_RES (2), (3), (35): Xaa is C or S
TXXVPTRLSPISILYIDSANNVVYKQYEDMVVESX

SEQ ID NO: 69607 - protein, 42 aa, Artificial Sequence; identical to SEQ ID NO: 22788
  Cyclic GFR-binding peptide
  MOD_RES (6), (7), (39), (41): Xaa is C or S

SEQ ID NO: 69608 - protein, 40 aa, Artificial Sequence
  Cyclic GFR-binding peptide
  MOD_RES (6), (7), (39): Xaa is C or S
STPPTXXVPTRLSPISILYIDSANNVVYKQYEDMVVESXG

SEQ ID NO: 69609 - protein, 31 aa, Artificial Sequence
  Cyclic GFR-binding peptide
  MOD_RES (30), (30): Xaa is C or S
TKMSPISMLYINDKQQIIYKQYEGMVVDRXG

SEQ ID NO: 69610 - protein, 31 aa, Artificial Sequence; identical to SEQ ID NO: 22795
  Cyclic GFR-binding peptide
  MOD_RES (31), (31): Xaa is C or S

SEQ ID NO: 69611 - protein, 27 aa, Artificial Sequence
  Cyclic GFR-binding peptide
  MOD_RES (1), (2): Xaa is C or S
XXVPTRLSPISILYIDSANNVVYKQYE

SEQ ID NO: 69612 - protein, 29 aa, Artificial Sequence
  Cyclic GFR-binding peptide
  MOD_RES (28), (28): Xaa is C or S
MSPISMLYINDKQQIIYKQYEGMVVDRXG

SEQ ID NO: 69613 - protein, 37 aa, Artificial Sequence; identical to SEQ ID NO: 22804
  Cyclic GFR-binding peptide
  MOD_RES (1), (2), (34), (36): Xaa is C or S

SEQ ID NO: 69614 - protein, 24 aa, Artificial Sequence
  Cyclic GFR-binding peptide
MSPISMLYINDKQQIIYKQYEGMV

SEQ ID NO: 69615 - protein, 33 aa, Artificial Sequence
  Cyclic GFR-binding peptide
  MOD_RES (5), (6): Xaa is C or S
VPSTXXAPVKTSPISMLYIDNGRVLLYKQYEMI

SEQ ID NO: 69616 - protein, 29 aa, Artificial Sequence
  Cyclic GFR-binding peptide
  MOD_RES (27), (29): Xaa is C or S
TSPISMLYIDNGRVLLYKQYEMIVEEXGX

SEQ ID NO: 69617 - protein, 28 aa, Artificial Sequence
  Cyclic GFR-binding peptide
KMSPISMLYINDKQQIIYKQYEGMVVDR

SEQ ID NO: 69618 - protein, 28 aa, Artificial Sequence
  Cyclic GFR-binding peptide
PTKMSPISMLYINDKQQIIYKQYEGMVV

SEQ ID NO: 69619 - protein, 33 aa, Artificial Sequence
  Cyclic GFR-binding peptide
  MOD_RES (6), (7): Xaa is C or S
HVPKPXXAPTKLSPISVLYIDDSSNVIYKQYEN

SEQ ID NO: 69620 - protein, 29 aa, Artificial Sequence
  Cyclic GFR-binding peptide
  MOD_RES (1), (1): Xaa is C or S
XTPTKMSPISMLYINDKQQIIYKQYEGMV

SEQ ID NO: 69621 - protein, 39 aa, Artificial Sequence; identical to SEQ ID NO: 22812
  Cyclic GFR-binding peptide
  MOD_RES (6), (7), (39): Xaa is C or S

SEQ ID NO: 69622 - protein, 29 aa, Artificial Sequence
  Cyclic GFR-binding peptide
TRLSPISILYIDSANNVVYKQYEDMVVES

SEQ ID NO: 69623 - protein, 25 aa, Artificial Sequence
  Cyclic GFR-binding peptide
TPTKMSPISMLYINDKQQIIYKQYE

SEQ ID NO: 69624 - protein, 24 aa, Artificial Sequence
  Cyclic GFR-binding peptide
SPISILYIDSANNVVYKQYEDMVV

SEQ ID NO: 69625 - protein, 30 aa, Artificial Sequence
  Cyclic GFR-binding peptide
  MOD_RES (28), (30): Xaa is C or S
LSPISILYIDSANNVVYKQYEDMVVESXGX

SEQ ID NO: 69626 - protein, 30 aa, Artificial Sequence
  Cyclic GFR-binding peptide
PTKMSPISMLYINDKQQIIYKQYEGMVVDR

SEQ ID NO: 69627 - protein, 27 aa, Artificial Sequence
  Cyclic GFR-binding peptide
KTSPISMLYIDNGRVLLYKQYEMIVEE

SEQ ID NO: 69628 - protein, 27 aa, Artificial Sequence
  Cyclic GFR-binding peptide
TKMSPISMLYINDKQQIIYKQYEGMVV

SEQ ID NO: 69629 - protein, 31 aa, Artificial Sequence
  Cyclic GFR-binding peptide
  MOD_RES (2), (3): Xaa is C or S
PXXTPTKMSPISMLYINDKQQIIYKQYEGMV

SEQ ID NO: 69630 - protein, 25 aa, Artificial Sequence
  Cyclic GFR-binding peptide
VKTSPISMLYIDNGRVLLYKQYEMI

SEQ ID NO: 69631 - protein, 32 aa, Artificial Sequence; identical to SEQ ID NO: 22814
  Cyclic GFR-binding peptide
  MOD_RES (1), (1): Xaa is C or S

SEQ ID NO: 69632 - protein, 34 aa, Artificial Sequence
  Cyclic GFR-binding peptide
  MOD_RES (5), (6): Xaa is C or S
VPSTXXAPVKTSPISMLYIDNGRVLLYKQYEMIV

SEQ ID NO: 69633 - protein, 33 aa, Artificial Sequence
  Cyclic GFR-binding peptide
  MOD_RES (30), (32): Xaa is C or S
PVKTSPISMLYIDNGRVLLYKQYEMIVEEXGXL

SEQ ID NO: 69634 - protein, 25 aa, Artificial Sequence
  Cyclic GFR-binding peptide
SPISILYIDSANNVVYKQYEDMVVE

SEQ ID NO: 69635 - protein, 39 aa, Artificial Sequence
  Cyclic GFR-binding peptide
  MOD_RES (3), (4), (36), (38): Xaa is C or S
PTXXVPTRLSPISILYIDSANNVVYKQYEDMVVESXGXR

SEQ ID NO: 69636 - protein, 31 aa, Artificial Sequence
  Cyclic GFR-binding peptide
  MOD_RES (3), (4): Xaa is C or S
PTXXVPTRLSPISILYIDSANNVVYKQYEDM

SEQ ID NO: 69637 - protein, 28 aa, Artificial Sequence
  Cyclic GFR-binding peptide
VKTSPISMLYIDNGRVLLYKQYEMIVEE

SEQ ID NO: 69638 - protein, 25 aa, Artificial Sequence
  Cyclic GFR-binding peptide
KTSPISMLYIDNGRVLLYKQYEMIV

SEQ ID NO: 69639 - protein, 28 aa, Artificial Sequence
  Cyclic GFR-binding peptide
  MOD_RES (1), (2): Xaa is C or S
XXVPTRLSPISILYIDSANNVVYKQYED

SEQ ID NO: 69640 - protein, 30 aa, Artificial Sequence
  Cyclic GFR-binding peptide
  MOD_RES (1), (2): Xaa is C or S
XXAPVKTSPISMLYIDNGRVLLYKQYEMIV

SEQ ID NO: 69641 - protein, 32 aa, Artificial Sequence
  Cyclic GFR-binding peptide
  MOD_RES (30), (32): Xaa is C or S
TKMSPISMLYINDKQQIIYKQYEGMVVDRXGX

SEQ ID NO: 69642 - protein, 36 aa, Artificial Sequence
  Cyclic GFR-binding peptide
  MOD_RES (4), (5): Xaa is C or S
PPTXXVPTRLSPISILYIDSANNVVYKQYEDMVVES

SEQ ID NO: 69643 - protein, 35 aa, Artificial Sequence; identical to SEQ ID NO: 22823
  Cyclic GFR-binding peptide
  MOD_RES (3), (4): Xaa is C or S

SEQ ID NO: 69644 - protein, 31 aa, Artificial Sequence
  Cyclic GFR-binding peptide
  MOD_RES (28), (30): Xaa is C or S
LSPISILYIDSANNVVYKQYEDMVVESXGXR

SEQ ID NO: 69645 - protein, 27 aa, Artificial Sequence
  Cyclic GFR-binding peptide
  MOD_RES (1), (1): Xaa is C or S
XVPTRLSPISILYIDSANNVVYKQYED

SEQ ID NO: 69646 - protein, 28 aa, Artificial Sequence
  Cyclic GFR-binding peptide
PTRLSPISILYIDSANNVVYKQYEDMVV

SEQ ID NO: 69647 - protein, 30 aa, Artificial Sequence
  Cyclic GFR-binding peptide
  MOD_RES (29), (29): Xaa is C or S
VKTSPISMLYIDNGRVLLYKQYEMIVEEXG

SEQ ID NO: 69648 - protein, 27 aa, Artificial Sequence
  Cyclic GFR-binding peptide
  MOD_RES (1), (1): Xaa is C or S
XTPTKMSPISMLYINDKQQIIYKQYEG

SEQ ID NO: 69649 - protein, 24 aa, Artificial Sequence
  Cyclic GFR-binding peptide
RLSPISILYIDSANNVVYKQYEDM

SEQ ID NO: 69650 - protein, 25 aa, Artificial Sequence
  Cyclic GFR-binding peptide
TKMSPISMLYINDKQQIIYKQYEGM

SEQ ID NO: 69651 - protein, 32 aa, Artificial Sequence
  Cyclic GFR-binding peptide
  MOD_RES (30), (32): Xaa is C or S
TRLSPISILYIDSANNVVYKQYEDMVVESXGX

SEQ ID NO: 69652 - protein, 38 aa, Artificial Sequence; identical to SEQ ID NO: 22829
  Cyclic GFR-binding peptide
  MOD_RES (6), (7), (38): Xaa is C or S

SEQ ID NO: 69653 - protein, 29 aa, Artificial Sequence
  Cyclic GFR-binding peptide
PVKTSPISMLYIDNGRVLLYKQYEMIVEE

SEQ ID NO: 69654 - protein, 37 aa, Artificial Sequence
  Cyclic GFR-binding peptide
  MOD_RES (6), (7): Xaa is C or S
STPPTXXVPTRLSPISILYIDSANNVVYKQYEDMVVE

SEQ ID NO: 69655 - protein, 28 aa, Artificial Sequence
  Cyclic GFR-binding peptide
  MOD_RES (2), (3): Xaa is C or S
TXXAPVKTSPISMLYIDNGRVLLYKQYE

SEQ ID NO: 69656 - protein, 25 aa, Artificial Sequence
  Cyclic GFR-binding peptide
TSPISMLYIDNGRVLLYKQYEMIVE

SEQ ID NO: 69657 - protein, 25 aa, Artificial Sequence
  Cyclic GFR-binding peptide
PTKMSPISMLYINDKQQIIYKQYEG

SEQ ID NO: 69658 - protein, 22 aa, Artificial Sequence
  Cyclic GFR-binding peptide
KTSPISMLYIDNGRVLLYKQYE

SEQ ID NO: 69659 - protein, 32 aa, Artificial Sequence
  Cyclic GFR-binding peptide
  MOD_RES (31), (31): Xaa is C or S
PTRLSPISILYIDSANNVVYKQYEDMVVESXG

SEQ ID NO: 69660 - protein, 36 aa, Artificial Sequence; identical to SEQ ID NO: 22836
  Cyclic GFR-binding peptide
  MOD_RES (3), (4), (35): Xaa is C or S

SEQ ID NO: 69661 - protein, 32 aa, Artificial Sequence
  Cyclic GFR-binding peptide
  MOD_RES (29), (31): Xaa is C or S
KMSPISMLYINDKQQIIYKQYEGMVVDRXGXS

SEQ ID NO: 69662 - protein, 29 aa, Artificial Sequence
  Cyclic GFR-binding peptide
  MOD_RES (28), (28): Xaa is C or S
LSPISILYIDSANNVVYKQYEDMVVESXG

SEQ ID NO: 69663 - protein, 37 aa, Artificial Sequence; identical to SEQ ID NO: 22840
  Cyclic GFR-binding peptide
  MOD_RES (5), (6): Xaa is C or S

SEQ ID NO: 69664 - protein, 24 aa, Artificial Sequence
  Cyclic GFR-binding peptide
TKMSPISMLYINDKQQIIYKQYEG

SEQ ID NO: 69665 - protein, 38 aa, Artificial Sequence; identical to SEQ ID NO: 22652
  Cyclic GFR-binding peptide
  MOD_RES (5), (6), (37): Xaa is C or S

SEQ ID NO: 69666 - protein, 34 aa, Artificial Sequence
  Cyclic GFR-binding peptide
  MOD_RES (6), (7): Xaa is C or S
STPPTXXVPTRLSPISILYIDSANNVVYKQYEDM

SEQ ID NO: 69667 - protein, 26 aa, Artificial Sequence
  Cyclic GFR-binding peptide
KTSPISMLYIDNGRVLLYKQYEMIVE

SEQ ID NO: 69668 - protein, 29 aa, Artificial Sequence
  Cyclic GFR-binding peptide
VPTRLSPISILYIDSANNVVYKQYEDMVV

SEQ ID NO: 69669 - protein, 29 aa, Artificial Sequence
  Cyclic GFR-binding peptide
  MOD_RES (1), (2): Xaa is C or S
XXTPTKMSPISMLYINDKQQIIYKQYEGM

SEQ ID NO: 69670 - protein, 26 aa, Artificial Sequence
  Cyclic GFR-binding peptide
  MOD_RES (26), (26): Xaa is C or S
SPISMLYIDNGRVLLYKQYEMIVEEX

SEQ ID NO: 69671 - protein, 26 aa, Artificial Sequence
  Cyclic GFR-binding peptide
RLSPISILYIDSANNVVYKQYEDMVV

SEQ ID NO: 69672 - protein, 31 aa, Artificial Sequence
  Cyclic GFR-binding peptide
  MOD_RES (30), (30): Xaa is C or S
TRLSPISILYIDSANNVVYKQYEDMVVESXG

SEQ ID NO: 69673 - protein, 21 aa, Artificial Sequence
  Cyclic GFR-binding peptide
SPISMLYIDNGRVLLYKQYEM

SEQ ID NO: 69674 - protein, 35 aa, Artificial Sequence; identical to SEQ ID NO: 22659
  Cyclic GFR-binding peptide
  MOD_RES (2), (3), (34): Xaa is C or S

SEQ ID NO: 69675 - protein, 37 aa, Artificial Sequence; identical to SEQ ID NO: 22660
  Cyclic GFR-binding peptide
  MOD_RES (3), (4), (35), (37): Xaa is C or S

SEQ ID NO: 69676 - protein, 33 aa, Artificial Sequence
  Cyclic GFR-binding peptide
  MOD_RES (31), (33): Xaa is C or S
PTRLSPISILYIDSANNVVYKQYEDMVVESXGX

SEQ ID NO: 69677 - protein, 23 aa, Artificial Sequence
  Cyclic GFR-binding peptide
SPISMLYINDKQQIIYKQYEGMV

SEQ ID NO: 69678 - protein, 36 aa, Artificial Sequence; identical to SEQ ID NO: 22663
  Cyclic GFR-binding peptide
  MOD_RES (3), (4), (36): Xaa is C or S

SEQ ID NO: 69679 - protein, 39 aa, Artificial Sequence
  Cyclic GFR-binding peptide
  MOD_RES (6), (7), (39): Xaa is C or S
STPPTXXVPTRLSPISILYIDSANNVVYKQYEDMVVESX

SEQ ID NO: 69680 - protein, 34 aa, Artificial Sequence
  Cyclic GFR-binding peptide
  MOD_RES (1), (2), (34): Xaa is C or S
XXVPTRLSPISILYIDSANNVVYKQYEDMVVESX

SEQ ID NO: 69681 - protein, 24 aa, Artificial Sequence
  Cyclic GFR-binding peptide
KTSPISMLYIDNGRVLLYKQYEMI

SEQ ID NO: 69682 - protein, 31 aa, Artificial Sequence
  Cyclic GFR-binding peptide
  MOD_RES (30), (30): Xaa is C or S
PVKTSPISMLYIDNGRVLLYKQYEMIVEEXG

SEQ ID NO: 69683 - protein, 23 aa, Artificial Sequence
  Cyclic GFR-binding peptide
KMSPISMLYINDKQQIIYKQYEG

SEQ ID NO: 69684 - protein, 39 aa, Artificial Sequence; identical to SEQ ID NO: 22668
  Cyclic GFR-binding peptide
  MOD_RES (5), (6), (38): Xaa is C or S

SEQ ID NO: 69685 - protein, 25 aa, Artificial Sequence
  Cyclic GFR-binding peptide
PTRLSPISILYIDSANNVVYKQYED

SEQ ID NO: 69686 - protein, 27 aa, Artificial Sequence
  Cyclic GFR-binding peptide
VKTSPISMLYIDNGRVLLYKQYEMIVE

SEQ ID NO: 69687 - protein, 37 aa, Artificial Sequence
  Cyclic GFR-binding peptide
  MOD_RES (1), (2), (34), (36): Xaa is C or S
XXVPTRLSPISILYIDSANNVVYKQYEDMVVESXGXR

SEQ ID NO: 69688 - protein, 28 aa, Artificial Sequence
  Cyclic GFR-binding peptide
  MOD_RES (27), (27): Xaa is C or S
SPISMLYINDKQQIIYKQYEGMVVDRXG

SEQ ID NO: 69689 - protein, 32 aa, Artificial Sequence
  Cyclic GFR-binding peptide
  MOD_RES (1), (2): Xaa is C or S
XXVPTRLSPISILYIDSANNVVYKQYEDMVVE

SEQ ID NO: 69690 - protein, 31 aa, Artificial Sequence
  Cyclic GFR-binding peptide
  MOD_RES (1), (2): Xaa is C or S
XXTPTKMSPISMLYINDKQQIIYKQYEGMVV

SEQ ID NO: 69691 - protein, 35 aa, Artificial Sequence
  Cyclic GFR-binding peptide
  MOD_RES (1), (2), (34): Xaa is C or S
XXVPTRLSPISILYIDSANNVVYKQYEDMVVESXG

SEQ ID NO: 69692 - protein, 30 aa, Artificial Sequence
  Cyclic GFR-binding peptide
  MOD_RES (4), (5): Xaa is C or S
PSTXXAPVKTSPISMLYIDNGRVLLYKQYE

SEQ ID NO: 69693 - protein, 36 aa, Artificial Sequence
  Cyclic GFR-binding peptide
  MOD_RES (5), (6): Xaa is C or S
TPPTXXVPTRLSPISILYIDSANNVVYKQYEDMVVE

SEQ ID NO: 69694 - protein, 33 aa, Artificial Sequence
  Cyclic GFR-binding peptide
  MOD_RES (4), (5): Xaa is C or S
PPTXXVPTRLSPISILYIDSANNVVYKQYEDMV

SEQ ID NO: 69695 - protein, 29 aa, Artificial Sequence
  Cyclic GFR-binding peptide
PTKMSPISMLYINDKQQIIYKQYEGMVVD

SEQ ID NO: 69696 - protein, 28 aa, Artificial Sequence
  Cyclic GFR-binding peptide
  MOD_RES (1), (2): Xaa is C or S
XXTPTKMSPISMLYINDKQQIIYKQYEG

SEQ ID NO: 69697 - protein, 27 aa, Artificial Sequence
  Cyclic GFR-binding peptide
TRLSPISILYIDSANNVVYKQYEDMVV

SEQ ID NO: 69698 - protein, 27 aa, Artificial Sequence
  Cyclic GFR-binding peptide
PTRLSPISILYIDSANNVVYKQYEDMV

SEQ ID NO: 69699 - protein, 32 aa, Artificial Sequence
  Cyclic GFR-binding peptide
  MOD_RES (2), (3): Xaa is C or S
PXXTPTKMSPISMLYINDKQQIIYKQYEGMVV

SEQ ID NO: 69700 - protein, 35 aa, Artificial Sequence; identical to SEQ ID NO: 22676
  Cyclic GFR-binding peptide
  MOD_RES (1), (33), (35): Xaa is C or S

SEQ ID NO: 69701 - protein, 30 aa, Artificial Sequence
  Cyclic GFR-binding peptide
  MOD_RES (28), (30): Xaa is C or S
MSPISMLYINDKQQIIYKQYEGMVVDRXGX

SEQ ID NO: 69702 - protein, 27 aa, Artificial Sequence
  Cyclic GFR-binding peptide
APVKTSPISMLYIDNGRVLLYKQYEMI

SEQ ID NO: 69703 - protein, 33 aa, Artificial Sequence
  Cyclic GFR-binding peptide
  MOD_RES (30), (32): Xaa is C or S
TKMSPISMLYINDKQQIIYKQYEGMVVDRXGXS

SEQ ID NO: 69704 - protein, 25 aa, Artificial Sequence
  Cyclic GFR-binding peptide
MSPISMLYINDKQQIIYKQYEGMVV

SEQ ID NO: 69705 - protein, 27 aa, Artificial Sequence
  Cyclic GFR-binding peptide
PTKMSPISMLYINDKQQIIYKQYEGMV

SEQ ID NO: 69706 - protein, 32 aa, Artificial Sequence; identical to SEQ ID NO: 22680
  Cyclic GFR-binding peptide
  MOD_RES (32), (32): Xaa is C or S

SEQ ID NO: 69707 - protein, 32 aa, Artificial Sequence
  Cyclic GFR-binding peptide
  MOD_RES (5), (6): Xaa is C or S
VPSTXXAPVKTSPISMLYIDNGRVLLYKQYEM

SEQ ID NO: 69708 - protein, 29 aa, Artificial Sequence
  Cyclic GFR-binding peptide
SPISILYIDSANNVVYKQYEAAAAAAAAA

SEQ ID NO: 69709 - protein, 37 aa, Artificial Sequence; identical to SEQ ID NO: 22681
  Cyclic GFR-binding peptide
  MOD_RES (5), (6), (37): Xaa is C or S

SEQ ID NO: 69710 - protein, 33 aa, Artificial Sequence
  Cyclic GFR-binding peptide
  MOD_RES (6), (7): Xaa is C or S
STPPTXXVPTRLSPISILYIDSANNVVYKQYED

SEQ ID NO: 69711 - protein, 30 aa, Artificial Sequence
  Cyclic GFR-binding peptide
  MOD_RES (1), (1): Xaa is C or S
XVPTRLSPISILYIDSANNVVYKQYEDMVV

SEQ ID NO: 69712 - protein, 31 aa, Artificial Sequence
  Cyclic GFR-binding peptide
  MOD_RES (4), (5): Xaa is C or S
PPTXXVPTRLSPISILYIDSANNVVYKQYED

SEQ ID NO: 69713 - protein, 38 aa, Artificial Sequence
  Cyclic GFR-binding peptide
  MOD_RES (2), (3), (35), (37): Xaa is C or S
TXXVPTRLSPISILYIDSANNVVYKQYEDMVVESXGXR

SEQ ID NO: 69714 - protein, 34 aa, Artificial Sequence
  Cyclic GFR-binding peptide
  MOD_RES (31), (33): Xaa is C or S
PTRLSPISILYIDSANNVVYKQYEDMVVESXGXR

SEQ ID NO: 69715 - protein, 31 aa, Artificial Sequence
  Cyclic GFR-binding peptide
  MOD_RES (2), (3): Xaa is C or S
TXXAPVKTSPISMLYIDNGRVLLYKQYEMIV

SEQ ID NO: 69716 - protein, 32 aa, Artificial Sequence; identical to SEQ ID NO: 22685
  Cyclic GFR-binding peptide
  MOD_RES (1), (2): Xaa is C or S

SEQ ID NO: 69717 - protein, 24 aa, Artificial Sequence
  Cyclic GFR-binding peptide
PTKMSPISMLYINDKQQIIYKQYE

SEQ ID NO: 69718 - protein, 32 aa, Artificial Sequence
  Cyclic GFR-binding peptide
  MOD_RES (1), (1): Xaa is C or S
XVPTRLSPISILYIDSANNVVYKQYEDMVVES

SEQ ID NO: 69719 - protein, 35 aa, Artificial Sequence; identical to SEQ ID NO: 22688
  Cyclic GFR-binding peptide
  MOD_RES (1), (2), (34): Xaa is C or S

SEQ ID NO: 69720 - protein, 35 aa, Artificial Sequence; identical to SEQ ID NO: 22689
  Cyclic GFR-binding peptide
  MOD_RES (4), (5): Xaa is C or S

SEQ ID NO: 69721 - protein, 27 aa, Artificial Sequence
  Cyclic GFR-binding peptide
PVKTSPISMLYIDNGRVLLYKQYEMIV

SEQ ID NO: 69722 - protein, 32 aa, Artificial Sequence
  Cyclic GFR-binding peptide
  MOD_RES (6), (7): Xaa is C or S
RVPSTXXAPVKTSPISMLYIDNGRVLLYKQYE

SEQ ID NO: 69723 - protein, 21 aa, Artificial Sequence
  Cyclic GFR-binding peptide
TSPISMLYIDNGRVLLYKQYE

SEQ ID NO: 69724 - protein, 23 aa, Artificial Sequence
  Cyclic GFR-binding peptide
RLSPISILYIDSANNVVYKQYED

SEQ ID NO: 69725 - protein, 24 aa, Artificial Sequence
  Cyclic GFR-binding peptide
LSPISILYIDSANNVVYKQYEDMV

SEQ ID NO: 69726 - protein, 28 aa, Artificial Sequence
  Cyclic GFR-binding peptide
TRLSPISILYIDSANNVVYKQYEDMVVE

SEQ ID NO: 69727 - protein, 35 aa, Artificial Sequence
  Cyclic GFR-binding peptide
  MOD_RES (32), (34): Xaa is C or S
VPTRLSPISILYIDSANNVVYKQYEDMVVESXGXR

SEQ ID NO: 69728 - protein, 34 aa, Artificial Sequence; identical to SEQ ID NO: 22693
  Cyclic GFR-binding peptide
  MOD_RES (2), (3): Xaa is C or S

SEQ ID NO: 69729 - protein, 22 aa, Artificial Sequence
  Cyclic GFR-binding peptide
RLSPISILYIDSANNVVYKQYE

SEQ ID NO: 69730 - protein, 26 aa, Artificial Sequence
  Cyclic GFR-binding peptide
VPTRLSPISILYIDSANNVVYKQYED

SEQ ID NO: 69731 - protein, 29 aa, Artificial Sequence
  Cyclic GFR-binding peptide
SPISMLYINDKQQIIYKQYEAAAAAAAAA

SEQ ID NO: 69732 - protein, 41 aa, Artificial Sequence; identical to SEQ ID NO: 22695
  Cyclic GFR-binding peptide
  MOD_RES (6), (7), (39), (41): Xaa is C or S

SEQ ID NO: 69733 - protein, 36 aa, Artificial Sequence
  Cyclic GFR-binding peptide
  MOD_RES (1), (2), (34), (36): Xaa is C or S
XXVPTRLSPISILYIDSANNVVYKQYEDMVVESXGX

SEQ ID NO: 69734 - protein, 33 aa, Artificial Sequence; identical to SEQ ID NO: 22696
  Cyclic GFR-binding peptide
  MOD_RES (2), (3): Xaa is C or S

SEQ ID NO: 69735 - protein, 23 aa, Artificial Sequence
  Cyclic GFR-binding peptide
LSPISILYIDSANNVVYKQYEDM

SEQ ID NO: 69736 - protein, 26 aa, Artificial Sequence
  Cyclic GFR-binding peptide
  MOD_RES (1), (1): Xaa is C or S
XAPVKTSPISMLYIDNGRVLLYKQYE

SEQ ID NO: 69737 - protein, 23 aa, Artificial Sequence
  Cyclic GFR-binding peptide
KTSPISMLYIDNGRVLLYKQYEM

SEQ ID NO: 69738 - protein, 29 aa, Artificial Sequence
  Cyclic GFR-binding peptide
PTRLSPISILYIDSANNVVYKQYEDMVVE

SEQ ID NO: 69739 - protein, 34 aa, Artificial Sequence
  Cyclic GFR-binding peptide
  MOD_RES (4), (5): Xaa is C or S
PSTXXAPVKTSPISMLYIDNGRVLLYKQYEMIVE

SEQ ID NO: 69740 - protein, 34 aa, Artificial Sequence; identical to SEQ ID NO: 22702
  Cyclic GFR-binding peptide
  MOD_RES (31), (33): Xaa is C or S

SEQ ID NO: 69741 - protein, 36 aa, Artificial Sequence
  Cyclic GFR-binding peptide
  MOD_RES (2), (3), (35): Xaa is C or S
TXXVPTRLSPISILYIDSANNVVYKQYEDMVVESXG

SEQ ID NO: 69742 - protein, 33 aa, Artificial Sequence
  Cyclic GFR-binding peptide
  MOD_RES (5), (6): Xaa is C or S
SAGPXXTPTKMSPISMLYINDKQQIIYKQYEGM

SEQ ID NO: 69743 - protein, 25 aa, Artificial Sequence
  Cyclic GFR-binding peptide
KMSPISMLYINDKQQIIYKQYEGMV

SEQ ID NO: 69744 - protein, 30 aa, Artificial Sequence
  Cyclic GFR-binding peptide
  MOD_RES (28), (30): Xaa is C or S
KTSPISMLYIDNGRVLLYKQYEMIVEEXGX

SEQ ID NO: 69745 - protein, 40 aa, Artificial Sequence; identical to SEQ ID NO: 22708
  Cyclic GFR-binding peptide
  MOD_RES (5), (6), (37), (39): Xaa is C or S

SEQ ID NO: 69746 - protein, 28 aa, Artificial Sequence
  Cyclic GFR-binding peptide
  MOD_RES (1), (1): Xaa is C or S
XTPTKMSPISMLYINDKQQIIYKQYEGM

SEQ ID NO: 69747 - protein, 25 aa, Artificial Sequence
  Cyclic GFR-binding peptide
VPTRLSPISILYIDSANNVVYKQYE

SEQ ID NO: 69748 - protein, 27 aa, Artificial Sequence
  Cyclic GFR-binding peptide
MSPISMLYINDKQQIIYKQYEGMVVDR

SEQ ID NO: 69749 - protein, 34 aa, Artificial Sequence
  Cyclic GFR-binding peptide
  MOD_RES (32), (34): Xaa is C or S
VPTRLSPISILYIDSANNVVYKQYEDMVVESXGX

SEQ ID NO: 69750 - protein, 32 aa, Artificial Sequence
  Cyclic GFR-binding peptide
  MOD_RES (4), (5): Xaa is C or S
PPTXXVPTRLSPISILYIDSANNVVYKQYEDM

SEQ ID NO: 69751 - protein, 38 aa, Artificial Sequence; identical to SEQ ID NO: 22711
  Cyclic GFR-binding peptide
  MOD_RES (3), (4), (36), (38): Xaa is C or S

SEQ ID NO: 69752 - protein, 25 aa, Artificial Sequence
  Cyclic GFR-binding peptide
TRLSPISILYIDSANNVVYKQYEDM

SEQ ID NO: 69753 - protein, 36 aa, Artificial Sequence; identical to SEQ ID NO: 22716
  Cyclic GFR-binding peptide
  MOD_RES (1), (2), (33), (35): Xaa is C or S

SEQ ID NO: 69754 - protein, 36 aa, Artificial Sequence; identical to SEQ ID NO: 22718
  Cyclic GFR-binding peptide
  MOD_RES (2), (3), (35): Xaa is C or S

SEQ ID NO: 69755 - protein, 29 aa, Artificial Sequence
  Cyclic GFR-binding peptide
  MOD_RES (1), (1): Xaa is C or S
XAPVKTSPISMLYIDNGRVLLYKQYEMIV

SEQ ID NO: 69756 - protein, 28 aa, Artificial Sequence
  Cyclic GFR-binding peptide
VPTRLSPISILYIDSANNVVYKQYEDMV

SEQ ID NO: 69757 - protein, 22 aa, Artificial Sequence
  Cyclic GFR-binding peptide
SPISMLYINDKQQIIYKQYEGM

SEQ ID NO: 69758 - protein, 32 aa, Artificial Sequence
  Cyclic GFR-binding peptide
  MOD_RES (6), (7): Xaa is C or S
GSAGPXXTPTKMSPISMLYINDKQQIIYKQYE

SEQ ID NO: 69759 - protein, 32 aa, Artificial Sequence
  Cyclic GFR-binding peptide
  MOD_RES (2), (3): Xaa is C or S
TXXVPTRLSPISILYIDSANNVVYKQYEDMVV

SEQ ID NO: 69760 - protein, 35 aa, Artificial Sequence; identical to SEQ ID NO: 22723
  Cyclic GFR-binding peptide
  MOD_RES (1), (2), (33), (35): Xaa is C or S

SEQ ID NO: 69761 - protein, 25 aa, Artificial Sequence
  Cyclic GFR-binding peptide
RLSPISILYIDSANNVVYKQYEDMV

SEQ ID NO: 69762 - protein, 30 aa, Artificial Sequence
  Cyclic GFR-binding peptide
  MOD_RES (2), (3): Xaa is C or S
TXXVPTRLSPISILYIDSANNVVYKQYEDM

SEQ ID NO: 69763 - protein, 30 aa, Artificial Sequence
  Cyclic GFR-binding peptide
  MOD_RES (27), (29): Xaa is C or S
TSPISMLYIDNGRVLLYKQYEMIVEEXGXL

SEQ ID NO: 69764 - protein, 26 aa, Artificial Sequence
  Cyclic GFR-binding peptide
KMSPISMLYINDKQQIIYKQYEGMVV

SEQ ID NO: 69765 - protein, 31 aa, Artificial Sequence
  Cyclic GFR-binding peptide
  MOD_RES (5), (6): Xaa is C or S
SAGPXXTPTKMSPISMLYINDKQQIIYKQYE

SEQ ID NO: 69766 - protein, 29 aa, Artificial Sequence
  Cyclic GFR-binding peptide
  MOD_RES (2), (3): Xaa is C or S
PXXTPTKMSPISMLYINDKQQIIYKQYEG

SEQ ID NO: 69767 - protein, 30 aa, Artificial Sequence
  Cyclic GFR-binding peptide
  MOD_RES (2), (3): Xaa is C or S
TXXAPVKTSPISMLYIDNGRVLLYKQYEMI

SEQ ID NO: 69768 - protein, 27 aa, Artificial Sequence
  Cyclic GFR-binding peptide
VPTRLSPISILYIDSANNVVYKQYEDM

SEQ ID NO: 69769 - protein, 36 aa, Artificial Sequence
  Cyclic GFR-binding peptide
  MOD_RES (6), (7): Xaa is C or S
RVPSTXXAPVKTSPISMLYIDNGRVLLYKQYEMIVE

SEQ ID NO: 69770 - protein, 31 aa, Artificial Sequence; identical to SEQ ID NO: 22729
  Cyclic GFR-binding peptide
  MOD_RES (1), (1): Xaa is C or S

SEQ ID NO: 69771 - protein, 34 aa, Artificial Sequence; identical to SEQ ID NO: 22731
  Cyclic GFR-binding peptide
  MOD_RES (1), (33): Xaa is C or S

SEQ ID NO: 69772 - protein, 36 aa, Artificial Sequence
  Cyclic GFR-binding peptide
  MOD_RES (6), (7): Xaa is C or S
STPPTXXVPTRLSPISILYIDSANNVVYKQYEDMVV

SEQ ID NO: 69773 - protein, 23 aa, Artificial Sequence
  Cyclic GFR-binding peptide
TKMSPISMLYINDKQQIIYKQYE

SEQ ID NO: 69774 - protein, 42 aa, Artificial Sequence; identical to SEQ ID NO: 22734
  Cyclic GFR-binding peptide
  MOD_RES (6), (7), (39), (41): Xaa is C or S

SEQ ID NO: 69775 - protein, 24 aa, Artificial Sequence
  Cyclic GFR-binding peptide
KMSPISMLYINDKQQIIYKQYEGM

SEQ ID NO: 69776 - protein, 28 aa, Artificial Sequence
  Cyclic GFR-binding peptide
  MOD_RES (1), (2): Xaa is C or S
XXAPVKTSPISMLYIDNGRVLLYKQYEM

SEQ ID NO: 69777 - protein, 37 aa, Artificial Sequence; identical to SEQ ID NO: 22736
  Cyclic GFR-binding peptide
  MOD_RES (2), (3), (35), (37): Xaa is C or S

SEQ ID NO: 69778 - protein, 30 aa, Artificial Sequence
  Cyclic GFR-binding peptide
  MOD_RES (1), (2): Xaa is C or S
XXVPTRLSPISILYIDSANNVVYKQYEDMV

SEQ ID NO: 69779 - protein, 36 aa, Artificial Sequence
  Cyclic GFR-binding peptide
  MOD_RES (1), (33), (35): Xaa is C or S
XVPTRLSPISILYIDSANNVVYKQYEDMVVESXGXR

SEQ ID NO: 69780 - protein, 26 aa, Artificial Sequence
  Cyclic GFR-binding peptide
SPISMLYINDKQQIIYKQYEGMVVDR

SEQ ID NO: 69781 - protein, 26 aa, Artificial Sequence
  Cyclic GFR-binding peptide
VKTSPISMLYIDNGRVLLYKQYEMIV

SEQ ID NO: 69782 - protein, 34 aa, Artificial Sequence
  Cyclic GFR-binding peptide
  MOD_RES (5), (6): Xaa is C or S
SAGPXXTPTKMSPISMLYINDKQQIIYKQYEGMV

SEQ ID NO: 69783 - protein, 39 aa, Artificial Sequence; identical to SEQ ID NO: 22740
  Cyclic GFR-binding peptide
  MOD_RES (6), (7), (39): Xaa is C or S

SEQ ID NO: 69784 - protein, 32 aa, Artificial Sequence
  Cyclic GFR-binding peptide
  MOD_RES (4), (5): Xaa is C or S
PSTXXAPVKTSPISMLYIDNGRVLLYKQYEMI

SEQ ID NO: 69785 - protein, 31 aa, Artificial Sequence
  Cyclic GFR-binding peptide
  MOD_RES (29), (31): Xaa is C or S
VKTSPISMLYIDNGRVLLYKQYEMIVEEXGX

SEQ ID NO: 69786 - protein, 28 aa, Artificial Sequence
  Cyclic GFR-binding peptide
PVKTSPISMLYIDNGRVLLYKQYEMIVE

SEQ ID NO: 69787 - protein, 32 aa, Artificial Sequence
  Cyclic GFR-binding peptide
  MOD_RES (32), (32): Xaa is C or S
VPTRLSPISILYIDSANNVVYKQYEDMVVESX

SEQ ID NO: 69788 - protein, 33 aa, Artificial Sequence; identical to SEQ ID NO: 22743
  Cyclic GFR-binding peptide
  MOD_RES (32), (32): Xaa is C or S

SEQ ID NO: 69789 - protein, 36 aa, Artificial Sequence; identical to SEQ ID NO: 22744
  Cyclic GFR-binding peptide
  MOD_RES (1), (33), (35): Xaa is C or S

SEQ ID NO: 69790 - protein, 39 aa, Artificial Sequence; identical to SEQ ID NO: 22745
  Cyclic GFR-binding peptide
  MOD_RES (4), (5), (36), (38): Xaa is C or S

SEQ ID NO: 69791 - protein, 28 aa, Artificial Sequence
  Cyclic GFR-binding peptide
  MOD_RES (27), (27): Xaa is C or S
TSPISMLYIDNGRVLLYKQYEMIVEEXG

SEQ ID NO: 69792 - protein, 27 aa, Artificial Sequence
  Cyclic GFR-binding peptide
  MOD_RES (1), (2): Xaa is C or S
XXAPVKTSPISMLYIDNGRVLLYKQYE

SEQ ID NO: 69793 - protein, 26 aa, Artificial Sequence
  Cyclic GFR-binding peptide
TRLSPISILYIDSANNVVYKQYEDMV

SEQ ID NO: 69794 - protein, 31 aa, Artificial Sequence; identical to SEQ ID NO: 22749
  Cyclic GFR-binding peptide
  MOD_RES (1), (1): Xaa is C or S

SEQ ID NO: 69795 - protein, 31 aa, Artificial Sequence
  Cyclic GFR-binding peptide
  MOD_RES (3), (4): Xaa is C or S
STXXAPVKTSPISMLYIDNGRVLLYKQYEMI

SEQ ID NO: 69796 - protein, 38 aa, Artificial Sequence; identical to SEQ ID NO: 22751
  Cyclic GFR-binding peptide
  MOD_RES (3), (4), (35), (37): Xaa is C or S

SEQ ID NO: 69797 - protein, 34 aa, Artificial Sequence
  Cyclic GFR-binding peptide
  MOD_RES (6), (7): Xaa is C or S
RVPSTXXAPVKTSPISMLYIDNGRVLLYKQYEMI

SEQ ID NO: 69798 - protein, 39 aa, Artificial Sequence; identical to SEQ ID NO: 22752
  Cyclic GFR-binding peptide
  MOD_RES (4), (5), (37), (39): Xaa is C or S

SEQ ID NO: 69799 - protein, 26 aa, Artificial Sequence
  Cyclic GFR-binding peptide
TSPISMLYIDNGRVLLYKQYEMIVEE

SEQ ID NO: 69800 - protein, 21 aa, Artificial Sequence
  Cyclic GFR-binding peptide
SPISILYIDSANNVVYKQYED

SEQ ID NO: 69801 - protein, 20 aa, Artificial Sequence
  Cyclic GFR-binding peptide
SPISMLYIDNGRVLLYKQYE

SEQ ID NO: 69802 - protein, 34 aa, Artificial Sequence; identical to SEQ ID NO: 22757
  Cyclic GFR-binding peptide
  MOD_RES (3), (4): Xaa is C or S

SEQ ID NO: 69803 - protein, 36 aa, Artificial Sequence; identical to SEQ ID NO: 22759
  Cyclic GFR-binding peptide
  MOD_RES (5), (6): Xaa is C or S

SEQ ID NO: 69804 - protein, 35 aa, Artificial Sequence
  Cyclic GFR-binding peptide
  MOD_RES (6), (7): Xaa is C or S
HVPKPXXAPTKLSPISVLYIDDSSNVIYKQYENMV

SEQ ID NO: 69805 - protein, 22 aa, Artificial Sequence
  Cyclic GFR-binding peptide
LSPISILYIDSANNVVYKQYED

SEQ ID NO: 69806 - protein, 26 aa, Artificial Sequence
  Cyclic GFR-binding peptide
SPISILYIDSANNVVYKQYEDMVVES

SEQ ID NO: 69807 - protein, 29 aa, Artificial Sequence
  Cyclic GFR-binding peptide
  MOD_RES (29), (29): Xaa is C or S
VKTSPISMLYIDNGRVLLYKQYEMIVEEX

SEQ ID NO: 69808 - protein, 35 aa, Artificial Sequence; identical to SEQ ID NO: 22767
  Cyclic GFR-binding peptide
  MOD_RES (32), (34): Xaa is C or S

SEQ ID NO: 69809 - protein, 23 aa, Artificial Sequence
  Cyclic GFR-binding peptide
SPISILYIDSANNVVYKQYEDMV

SEQ ID NO: 69810 - protein, 40 aa, Artificial Sequence; identical to SEQ ID NO: 22768
  Cyclic GFR-binding peptide
  MOD_RES (6), (7), (38), (40): Xaa is C or S

SEQ ID NO: 69811 - protein, 26 aa, Artificial Sequence
  Cyclic GFR-binding peptide
APVKTSPISMLYIDNGRVLLYKQYEM

SEQ ID NO: 69812 - protein, 31 aa, Artificial Sequence
  Cyclic GFR-binding peptide
  MOD_RES (29), (31): Xaa is C or S
RLSPISILYIDSANNVVYKQYEDMVVESXGX

SEQ ID NO: 69813 - protein, 30 aa, Artificial Sequence
  Cyclic GFR-binding peptide
  MOD_RES (30), (30): Xaa is C or S
TRLSPISILYIDSANNVVYKQYEDMVVESX

SEQ ID NO: 69814 - protein, 26 aa, Artificial Sequence
  Cyclic GFR-binding peptide
MSPISMLYINDKQQIIYKQYEGMVVD

SEQ ID NO: 69815 - protein, 30 aa, Artificial Sequence
  Cyclic GFR-binding peptide
  MOD_RES (30), (30): Xaa is C or S
TKMSPISMLYINDKQQIIYKQYEGMVVDRX

SEQ ID NO: 69816 - protein, 40 aa, Artificial Sequence; identical to SEQ ID NO: 22775
  Cyclic GFR-binding peptide
  MOD_RES (5), (6), (38), (40): Xaa is C or S

SEQ ID NO: 69817 - protein, 27 aa, Artificial Sequence
  Cyclic GFR-binding peptide
  MOD_RES (1), (2): Xaa is C or S
XXTPTKMSPISMLYINDKQQIIYKQYE

SEQ ID NO: 69818 - protein, 28 aa, Artificial Sequence
  Cyclic GFR-binding peptide
  MOD_RES (2), (3): Xaa is C or S
TXXVPTRLSPISILYIDSANNVVYKQYE

SEQ ID NO: 69819 - protein, 33 aa, Artificial Sequence
  Cyclic GFR-binding peptide
  MOD_RES (1), (33): Xaa is C or S
XVPTRLSPISILYIDSANNVVYKQYEDMVVESX

SEQ ID NO: 69820 - protein, 37 aa, Artificial Sequence; identical to SEQ ID NO: 22778
  Cyclic GFR-binding peptide
  MOD_RES (6), (7): Xaa is C or S

SEQ ID NO: 69821 - protein, 34 aa, Artificial Sequence
  Cyclic GFR-binding peptide
  MOD_RES (6), (7): Xaa is C or S
HVPKPXXAPTKLSPISVLYIDDSSNVIYKQYENM

SEQ ID NO: 69822 - protein, 39 aa, Artificial Sequence; identical to SEQ ID NO: 22779
  Cyclic GFR-binding peptide
  MOD_RES (5), (6), (37), (39): Xaa is C or S

SEQ ID NO: 69823 - protein, 40 aa, Artificial Sequence
  Cyclic GFR-binding peptide
  MOD_RES (4), (5), (37), (39): Xaa is C or S
PPTXXVPTRLSPISILYIDSANNVVYKQYEDMVVESXGXR

SEQ ID NO: 69824 - protein, 23 aa, Artificial Sequence
  Cyclic GFR-binding peptide
TRLSPISILYIDSANNVVYKQYE

SEQ ID NO: 69825 - protein, 33 aa, Artificial Sequence
  Cyclic GFR-binding peptide
  MOD_RES (2), (3): Xaa is C or S
TXXVPTRLSPISILYIDSANNVVYKQYEDMVVE

SEQ ID NO: 69826 - protein, 28 aa, Artificial Sequence
  Cyclic GFR-binding peptide
  MOD_RES (1), (1): Xaa is C or S
XVPTRLSPISILYIDSANNVVYKQYEDM

SEQ ID NO: 69827 - protein, 41 aa, Artificial Sequence
  Cyclic GFR-binding peptide
  MOD_RES (5), (6), (38), (40): Xaa is C or S
TPPTXXVPTRLSPISILYIDSANNVVYKQYEDMVVESXGXR

SEQ ID NO: 69828 - protein, 31 aa, Artificial Sequence
  Cyclic GFR-binding peptide
  MOD_RES (4), (5): Xaa is C or S
PSTXXAPVKTSPISMLYIDNGRVLLYKQYEM

SEQ ID NO: 69829 - protein, 40 aa, Artificial Sequence; identical to SEQ ID NO: 22783
  Cyclic GFR-binding peptide
  MOD_RES (6), (7), (39): Xaa is C or S

SEQ ID NO: 69830 - protein, 34 aa, Artificial Sequence; identical to SEQ ID NO: 22784
  Cyclic GFR-binding peptide
  MOD_RES (1), (32), (34): Xaa is C or S

SEQ ID NO: 69831 - protein, 36 aa, Artificial Sequence; identical to SEQ ID NO: 22786
  Cyclic GFR-binding peptide
  MOD_RES (1), (2), (34), (36): Xaa is C or S

SEQ ID NO: 69832 - protein, 30 aa, Artificial Sequence
  Cyclic GFR-binding peptide
  MOD_RES (3), (4): Xaa is C or S
PTXXVPTRLSPISILYIDSANNVVYKQYED

SEQ ID NO: 69833 - protein, 31 aa, Artificial Sequence
  Cyclic GFR-binding peptide
  MOD_RES (31), (31): Xaa is C or S
PTKMSPISMLYINDKQQIIYKQYEGMVVDRX

SEQ ID NO: 69834 - protein, 35 aa, Artificial Sequence; identical to SEQ ID NO: 22791
  Cyclic GFR-binding peptide
  MOD_RES (3), (4), (35): Xaa is C or S

SEQ ID NO: 69835 - protein, 29 aa, Artificial Sequence
  Cyclic GFR-binding peptide
  MOD_RES (1), (2): Xaa is C or S
XXVPTRLSPISILYIDSANNVVYKQYEDM

SEQ ID NO: 69836 - protein, 29 aa, Artificial Sequence
  Cyclic GFR-binding peptide
  MOD_RES (1), (1): Xaa is C or S
XVPTRLSPISILYIDSANNVVYKQYEDMV

SEQ ID NO: 69837 - protein, 31 aa, Artificial Sequence
  Cyclic GFR-binding peptide
  MOD_RES (31), (31): Xaa is C or S
PTRLSPISILYIDSANNVVYKQYEDMVVESX

SEQ ID NO: 69838 - protein, 29 aa, Artificial Sequence
  Cyclic GFR-binding peptide
  MOD_RES (2), (3): Xaa is C or S
TXXAPVKTSPISMLYIDNGRVLLYKQYEM

SEQ ID NO: 69839 - protein, 31 aa, Artificial Sequence
  Cyclic GFR-binding peptide
  MOD_RES (28), (30): Xaa is C or S
KTSPISMLYIDNGRVLLYKQYEMIVEEXGXL

SEQ ID NO: 69840 - protein, 38 aa, Artificial Sequence; identical to SEQ ID NO: 22801
  Cyclic GFR-binding peptide
  MOD_RES (5), (6), (38): Xaa is C or S

SEQ ID NO: 69841 - protein, 35 aa, Artificial Sequence
  Cyclic GFR-binding peptide
  MOD_RES (6), (7): Xaa is C or S
RVPSTXXAPVKTSPISMLYIDNGRVLLYKQYEMIV

SEQ ID NO: 69842 - protein, 38 aa, Artificial Sequence; identical to SEQ ID NO: 22803
  Cyclic GFR-binding peptide
  MOD_RES (4), (5), (37): Xaa is C or S

SEQ ID NO: 69843 - protein, 29 aa, Artificial Sequence
  Cyclic GFR-binding peptide
TPTKMSPISMLYINDKQQIIYKQYEGMVV

SEQ ID NO: 69844 - protein, 30 aa, Artificial Sequence
  Cyclic GFR-binding peptide
  MOD_RES (3), (4): Xaa is C or S
GPXXTPTKMSPISMLYINDKQQIIYKQYEG

SEQ ID NO: 69845 - protein, 35 aa, Artificial Sequence
  Cyclic GFR-binding peptide
  MOD_RES (6), (7): Xaa is C or S
STPPTXXVPTRLSPISILYIDSANNVVYKQYEDMV

SEQ ID NO: 69846 - protein, 29 aa, Artificial Sequence
  Cyclic GFR-binding peptide
TKMSPISMLYINDKQQIIYKQYEGMVVDR

SEQ ID NO: 69847 - protein, 30 aa, Artificial Sequence
  Cyclic GFR-binding peptide
PTRLSPISILYIDSANNVVYKQYEDMVVES

SEQ ID NO: 69848 - protein, 24 aa, Artificial Sequence
  Cyclic GFR-binding peptide
TSPISMLYIDNGRVLLYKQYEMIV

SEQ ID NO: 69849 - protein, 30 aa, Artificial Sequence
  Cyclic GFR-binding peptide
  MOD_RES (29), (29): Xaa is C or S
KMSPISMLYINDKQQIIYKQYEGMVVDRXG

SEQ ID NO: 69850 - protein, 37 aa, Artificial Sequence; identical to SEQ ID NO: 22807
  Cyclic GFR-binding peptide
  MOD_RES (6), (7): Xaa is C or S

SEQ ID NO: 69851 - protein, 29 aa, Artificial Sequence
  Cyclic GFR-binding peptide
  MOD_RES (27), (29): Xaa is C or S
SPISMLYINDKQQIIYKQYEGMVVDRXGX

SEQ ID NO: 69852 - protein, 28 aa, Artificial Sequence
  Cyclic GFR-binding peptide
  MOD_RES (28), (28): Xaa is C or S
KTSPISMLYIDNGRVLLYKQYEMIVEEX

SEQ ID NO: 69853 - protein, 35 aa, Artificial Sequence
  Cyclic GFR-binding peptide
  MOD_RES (6), (7): Xaa is C or S
GSAGPXXTPTKMSPISMLYINDKQQIIYKQYEGMV

SEQ ID NO: 69854 - protein, 29 aa, Artificial Sequence
  Cyclic GFR-binding peptide
  MOD_RES (3), (4): Xaa is C or S
GPXXTPTKMSPISMLYINDKQQIIYKQYE

SEQ ID NO: 69855 - protein, 26 aa, Artificial Sequence
  Cyclic GFR-binding peptide
LSPISILYIDSANNVVYKQYEDMVVE

SEQ ID NO: 69856 - protein, 34 aa, Artificial Sequence
  Cyclic GFR-binding peptide
  MOD_RES (5), (6): Xaa is C or S
TPPTXXVPTRLSPISILYIDSANNVVYKQYEDMV

SEQ ID NO: 69857 - protein, 27 aa, Artificial Sequence
  Cyclic GFR-binding peptide
  MOD_RES (27), (27): Xaa is C or S
SPISILYIDSANNVVYKQYEDMVVESX

SEQ ID NO: 69858 - protein, 35 aa, Artificial Sequence
  Cyclic GFR-binding peptide
  MOD_RES (1), (33), (35): Xaa is C or S
XVPTRLSPISILYIDSANNVVYKQYEDMVVESXGX

SEQ ID NO: 69859 - protein, 30 aa, Artificial Sequence
  Cyclic GFR-binding peptide
  MOD_RES (29), (29): Xaa is C or S
RLSPISILYIDSANNVVYKQYEDMVVESXG

SEQ ID NO: 69860 - protein, 30 aa, Artificial Sequence
  Cyclic GFR-binding peptide
  MOD_RES (1), (1): Xaa is C or S
XAPVKTSPISMLYIDNGRVLLYKQYEMIVE

SEQ ID NO: 69861 - protein, 21 aa, Artificial Sequence
  Cyclic GFR-binding peptide
LSPISILYIDSANNVVYKQYE

SEQ ID NO: 69862 - protein, 33 aa, Artificial Sequence; identical to SEQ ID NO: 22817
  Cyclic GFR-binding peptide
  MOD_RES (1), (32): Xaa is C or S

SEQ ID NO: 69863 - protein, 38 aa, Artificial Sequence; identical to SEQ ID NO: 22820
  Cyclic GFR-binding peptide
  MOD_RES (6), (7): Xaa is C or S

SEQ ID NO: 69864 - protein, 30 aa, Artificial Sequence
  Cyclic GFR-binding peptide
  MOD_RES (4), (5): Xaa is C or S
PPTXXVPTRLSPISILYIDSANNVVYKQYE

SEQ ID NO: 69865 - protein, 20 aa, Artificial Sequence
  Cyclic GFR-binding peptide
SPISILYIDSANNVVYKQYE

SEQ ID NO: 69866 - protein, 26 aa, Artificial Sequence
  Cyclic GFR-binding peptide
  MOD_RES (1), (1): Xaa is C or S
XTPTKMSPISMLYINDKQQIIYKQYE

SEQ ID NO: 69867 - protein, 27 aa, Artificial Sequence
  Cyclic GFR-binding peptide
KMSPISMLYINDKQQIIYKQYEGMVVD

SEQ ID NO: 69868 - protein, 41 aa, Artificial Sequence
  Cyclic GFR-binding peptide
  MOD_RES (6), (7), (39), (41): Xaa is C or S
STPPTXXVPTRLSPISILYIDSANNVVYKQYEDMVVESXGX

SEQ ID NO: 69869 - protein, 38 aa, Artificial Sequence; identical to SEQ ID NO: 22824
  Cyclic GFR-binding peptide
  MOD_RES (2), (3), (35), (37): Xaa is C or S

SEQ ID NO: 69870 - protein, 35 aa, Artificial Sequence
  Cyclic GFR-binding peptide
  MOD_RES (4), (5): Xaa is C or S
PPTXXVPTRLSPISILYIDSANNVVYKQYEDMVVE

SEQ ID NO: 69871 - protein, 27 aa, Artificial Sequence
  Cyclic GFR-binding peptide
LSPISILYIDSANNVVYKQYEDMVVES

SEQ ID NO: 69872 - protein, 34 aa, Artificial Sequence; identical to SEQ ID NO: 22826
  Cyclic GFR-binding peptide
  MOD_RES (1), (2), (33): Xaa is C or S

SEQ ID NO: 69873 - protein, 23 aa, Artificial Sequence
  Cyclic GFR-binding peptide
VKTSPISMLYIDNGRVLLYKQYE

SEQ ID NO: 69874 - protein, 34 aa, Artificial Sequence
  Cyclic GFR-binding peptide
  MOD_RES (2), (3): Xaa is C or S
TXXVPTRLSPISILYIDSANNVVYKQYEDMVVES

SEQ ID NO: 69875 - protein, 31 aa, Artificial Sequence
  Cyclic GFR-binding peptide
  MOD_RES (5), (6): Xaa is C or S
VPSTXXAPVKTSPISMLYIDNGRVLLYKQYE

SEQ ID NO: 69876 - protein, 31 aa, Artificial Sequence
  Cyclic GFR-binding peptide
  MOD_RES (4), (5): Xaa is C or S
AGPXXTPTKMSPISMLYINDKQQIIYKQYEG

SEQ ID NO: 69877 - protein, 29 aa, Artificial Sequence
  Cyclic GFR-binding peptide
SPISMLYIDNGRVLLYKQYEAAAAAAAAA

SEQ ID NO: 69878 - protein, 42 aa, Artificial Sequence; identical to SEQ ID NO: 22832
  Cyclic GFR-binding peptide
  MOD_RES (6), (7), (39), (41): Xaa is C or S

SEQ ID NO: 69879 - protein, 34 aa, Artificial Sequence; identical to SEQ ID NO: 22834
  Cyclic GFR-binding peptide
  MOD_RES (1), (2), (34): Xaa is C or S

SEQ ID NO: 69880 - protein, 31 aa, Artificial Sequence
  Cyclic GFR-binding peptide
  MOD_RES (29), (31): Xaa is C or S
KMSPISMLYINDKQQIIYKQYEGMVVDRXGX

SEQ ID NO: 69881 - protein, 32 aa, Artificial Sequence
  Cyclic GFR-binding peptide
  MOD_RES (3), (4): Xaa is C or S
GPXXTPTKMSPISMLYINDKQQIIYKQYEGMV

SEQ ID NO: 69882 - protein, 29 aa, Artificial Sequence
  Cyclic GFR-binding peptide
APVKTSPISMLYIDNGRVLLYKQYEMIVE

SEQ ID NO: 69883 - protein, 28 aa, Artificial Sequence
  Cyclic GFR-binding peptide
RLSPISILYIDSANNVVYKQYEDMVVES

SEQ ID NO: 69884 - protein, 24 aa, Artificial Sequence
  Cyclic GFR-binding peptide
TRLSPISILYIDSANNVVYKQYED

SEQ ID NO: 69885 - protein, 28 aa, Artificial Sequence
  Cyclic GFR-binding peptide
TKMSPISMLYINDKQQIIYKQYEGMVVD

SEQ ID NO: 69886 - protein, 27 aa, Artificial Sequence
  Cyclic GFR-binding peptide
EVVMDPYVKLVVNNAADFFLISLSSLR

SEQ ID NO: 69887 - protein, 28 aa, Artificial Sequence
  Cyclic GFR-binding peptide
  MOD_RES (27), (28): Xaa is C or S
GPYVKLIIQQKDNFFLMSLSSMKTPTXX

SEQ ID NO: 69888 - protein, 40 aa, Artificial Sequence; identical to SEQ ID NO: 22841
  Cyclic GFR-binding peptide
  MOD_RES (1), (3), (36), (37): Xaa is C or S

SEQ ID NO: 69889 - protein, 27 aa, Artificial Sequence
  Cyclic GFR-binding peptide
  MOD_RES (2), (2): Xaa is C or S
KXSKVIMPYVKLIKPTKGIFFLISLSS

SEQ ID NO: 69890 - protein, 38 aa, Artificial Sequence; identical to SEQ ID NO: 22843
  Cyclic GFR-binding peptide
  MOD_RES (2), (4), (35), (36): Xaa is C or S

SEQ ID NO: 69891 - protein, 41 aa, Artificial Sequence; identical to SEQ ID NO: 22844
  Cyclic GFR-binding peptide
  MOD_RES (1), (3), (35), (36): Xaa is C or S

SEQ ID NO: 69892 - protein, 26 aa, Artificial Sequence
  Cyclic GFR-binding peptide
SKVVMPYVKLVKPTRGVFFLISLSSL

SEQ ID NO: 69893 - protein, 23 aa, Artificial Sequence
  Cyclic GFR-binding peptide
PYVKLIIQQKDNFFLMSLSSMKT

SEQ ID NO: 69894 - protein, 32 aa, Artificial Sequence; identical to SEQ ID NO: 22846
  Cyclic GFR-binding peptide
  MOD_RES (1), (1): Xaa is C or S

SEQ ID NO: 69895 - protein, 31 aa, Artificial Sequence
  Cyclic GFR-binding peptide
  MOD_RES (26), (27): Xaa is C or S
PYVKLIKPTKGIFFLISLSSLDQSVXXPSAS

SEQ ID NO: 69896 - protein, 37 aa, Artificial Sequence; identical to SEQ ID NO: 22847
  Cyclic GFR-binding peptide
  MOD_RES (1), (3), (34), (35): Xaa is C or S

SEQ ID NO: 69897 - protein, 31 aa, Artificial Sequence; identical to SEQ ID NO: 22848
  Cyclic GFR-binding peptide
  MOD_RES (31), (31): Xaa is C or S

SEQ ID NO: 69898 - protein, 28 aa, Artificial Sequence
  Cyclic GFR-binding peptide
VIMPYVKLVKPKRGVFFLISLSSLAQPV

SEQ ID NO: 69899 - protein, 25 aa, Artificial Sequence
  Cyclic GFR-binding peptide
VMGPYVKLIIQQKDNFFLMSLSSMK

SEQ ID NO: 69900 - protein, 29 aa, Artificial Sequence
  Cyclic GFR-binding peptide
SRVVMNPYVKLIVNSSDDFFLVSLSSLKT

SEQ ID NO: 69901 - protein, 32 aa, Artificial Sequence
  Cyclic GFR-binding peptide
  MOD_RES (26), (26): Xaa is C or S
PYVKLIVNSSDDFFLVSLSSLKTPAXTPKTVH

SEQ ID NO: 69902 - protein, 31 aa, Artificial Sequence
  Cyclic GFR-binding peptide
  MOD_RES (29), (29): Xaa is C or S
VMNPYVKLIVNSSDDFFLVSLSSLKTPAXTP

SEQ ID NO: 69903 - protein, 31 aa, Artificial Sequence
  Cyclic GFR-binding peptide
  MOD_RES (1), (3): Xaa is C or S
XKXSKVVMPYVKLVKPTRGVFFLISLSSLDQ

SEQ ID NO: 69904 - protein, 32 aa, Artificial Sequence
  Cyclic GFR-binding peptide
  MOD_RES (1), (3): Xaa is C or S
XKXSKVVMPYVKLVKPTRGVFFLISLSSLDQP

SEQ ID NO: 69905 - protein, 32 aa, Artificial Sequence
  Cyclic GFR-binding peptide
  MOD_RES (2), (4): Xaa is C or S
RXGXGEVVMEPYVKLVVKDYEDFFLMSLSSLE

SEQ ID NO: 69906 - protein, 29 aa, Artificial Sequence
  Cyclic GFR-binding peptide
  MOD_RES (2), (2): Xaa is C or S
GXGEVVMDPYVKLVVKENEDFFLMSLSSL

SEQ ID NO: 69907 - protein, 27 aa, Artificial Sequence
  Cyclic GFR-binding peptide
VVMNPYVKLIVNSSDDFFLVSLSSLQT

SEQ ID NO: 69908 - protein, 34 aa, Artificial Sequence
  Cyclic GFR-binding peptide
  MOD_RES (1), (3): Xaa is C or S
XGXEAVSMGEPYVKLTPVGMDDFFLVSLSSLKTP

SEQ ID NO: 69909 - protein, 32 aa, Artificial Sequence; identical to SEQ ID NO: 22852
  Cyclic GFR-binding peptide
  MOD_RES (1), (1): Xaa is C or S

SEQ ID NO: 69910 - protein, 34 aa, Artificial Sequence; identical to SEQ ID NO: 22853
  Cyclic GFR-binding peptide
  MOD_RES (1), (33), (34): Xaa is C or S

SEQ ID NO: 69911 - protein, 26 aa, Artificial Sequence
  Cyclic GFR-binding peptide
RDVVMGPYVKLIIQQKDNFFLMSLSS

SEQ ID NO: 69912 - protein, 36 aa, Artificial Sequence
  Cyclic GFR-binding peptide
  MOD_RES (2), (4): Xaa is C or S
AXAXELHEELRPYVKLLKPKKRVYEFFLVSLSSHHV

SEQ ID NO: 69913 - protein, 26 aa, Artificial Sequence
  Cyclic GFR-binding peptide
QLFPYVKLHQGQHPKIRFFLMSLSSE

SEQ ID NO: 69914 - protein, 27 aa, Artificial Sequence
  Cyclic GFR-binding peptide
MGPYVKLYTVVGKDFFLISLSSLKTPV

SEQ ID NO: 69915 - protein, 30 aa, Artificial Sequence
  Cyclic GFR-binding peptide
  MOD_RES (27), (27): Xaa is C or S
NPYVKLIVNSSDDFFLVSLSSLKTPAXTPK

SEQ ID NO: 69916 - protein, 27 aa, Artificial Sequence
  Cyclic GFR-binding peptide
  MOD_RES (26), (27): Xaa is C or S
PYVKLIVNNSSDFFLVSLSSLKTPAXX

SEQ ID NO: 69917 - protein, 27 aa, Artificial Sequence
  Cyclic GFR-binding peptide
MGEPYVKLTPVGMDDFFLVSLSSLKTP

SEQ ID NO: 69918 - protein, 26 aa, Artificial Sequence
  Cyclic GFR-binding peptide
NPYVKLIVNSSDDFFLVSLSSLKTPA

SEQ ID NO: 69919 - protein, 34 aa, Artificial Sequence
  Cyclic GFR-binding peptide
  MOD_RES (2), (4): Xaa is C or S
RXEXKNHQLFPYVKLHQGQHPKIRFFLMSLSSEE

SEQ ID NO: 69920 - protein, 33 aa, Artificial Sequence; identical to SEQ ID NO: 22855
  Cyclic GFR-binding peptide
  MOD_RES (2), (33): Xaa is C or S

SEQ ID NO: 69921 - protein, 28 aa, Artificial Sequence
  Cyclic GFR-binding peptide
  MOD_RES (27), (28): Xaa is C or S
MPYVKLLLVRGNDFFLMSLSSTKVPAXX

SEQ ID NO: 69922 - protein, 41 aa, Artificial Sequence; identical to SEQ ID NO: 22857
  Cyclic GFR-binding peptide
  MOD_RES (2), (4), (37), (38): Xaa is C or S

SEQ ID NO: 69923 - protein, 36 aa, Artificial Sequence; identical to SEQ ID NO: 22858
  Cyclic GFR-binding peptide
  MOD_RES (1), (34), (35): Xaa is C or S

SEQ ID NO: 69924 - protein, 34 aa, Artificial Sequence
  Cyclic GFR-binding peptide
  MOD_RES (29), (29): Xaa is C or S
VMNPYVKLIVNSSDDFFLVSLSSLKTPAXTPKTV

SEQ ID NO: 69925 - protein, 40 aa, Artificial Sequence; identical to SEQ ID NO: 22859
  Cyclic GFR-binding peptide
  MOD_RES (2), (4): Xaa is C or S

SEQ ID NO: 69926 - protein, 36 aa, Artificial Sequence; identical to SEQ ID NO: 22861
  Cyclic GFR-binding peptide
  MOD_RES (2), (36): Xaa is C or S

SEQ ID NO: 69927 - protein, 23 aa, Artificial Sequence
  Cyclic GFR-binding peptide
DPYVKLVVKENEDFFLMSLSSLE

SEQ ID NO: 69928 - protein, 38 aa, Artificial Sequence; identical to SEQ ID NO: 22862
  Cyclic GFR-binding peptide
  MOD_RES (1), (33): Xaa is C or S

SEQ ID NO: 69929 - protein, 36 aa, Artificial Sequence; identical to SEQ ID NO: 22863
  Cyclic GFR-binding peptide
  MOD_RES (32), (33): Xaa is C or S

SEQ ID NO: 69930 - protein, 31 aa, Artificial Sequence
  Cyclic GFR-binding peptide
  MOD_RES (2), (2): Xaa is C or S
GXRDVVMGPYVKLIIQQKDNFFLMSLSSMKT

SEQ ID NO: 69931 - protein, 30 aa, Artificial Sequence
  Cyclic GFR-binding peptide
  MOD_RES (2), (2): Xaa is C or S
KXSKVVMPYVKLVKPTRGVFFLISLSSLDQ

SEQ ID NO: 69932 - protein, 25 aa, Artificial Sequence
  Cyclic GFR-binding peptide
GPYVKLIIQQKDNFFLMSLSSMKTP

SEQ ID NO: 69933 - protein, 41 aa, Artificial Sequence; identical to SEQ ID NO: 22868
  Cyclic GFR-binding peptide
  MOD_RES (2), (4), (36), (37): Xaa is C or S

SEQ ID NO: 69934 - protein, 39 aa, Artificial Sequence; identical to SEQ ID NO: 22871
  Cyclic GFR-binding peptide
  MOD_RES (1), (3), (34), (35): Xaa is C or S

SEQ ID NO: 69935 - protein, 33 aa, Artificial Sequence; identical to SEQ ID NO: 22872
  Cyclic GFR-binding peptide
  MOD_RES (1), (33): Xaa is C or S

SEQ ID NO: 69936 - protein, 28 aa, Artificial Sequence
  Cyclic GFR-binding peptide
  MOD_RES (2), (2): Xaa is C or S
GXGEVVMDPYVKLVVKENEDFFLMSLSS

SEQ ID NO: 69937 - protein, 33 aa, Artificial Sequence; identical to SEQ ID NO: 22873
  Cyclic GFR-binding peptide
  MOD_RES (31), (32): Xaa is C or S

SEQ ID NO: 69938 - protein, 29 aa, Artificial Sequence
  Cyclic GFR-binding peptide
  MOD_RES (2), (2): Xaa is C or S
GXEAVSMGEPYVKLTPVGMDDFFLVSLSS

SEQ ID NO: 69939 - protein, 32 aa, Artificial Sequence
  Cyclic GFR-binding peptide
  MOD_RES (1), (1): Xaa is C or S
XELHEELRPYVKLLKPKKRVYEFFLVSLSSHH

SEQ ID NO: 69940 - protein, 40 aa, Artificial Sequence; identical to SEQ ID NO: 22874
  Cyclic GFR-binding peptide
  MOD_RES (2), (4), (36), (37): Xaa is C or S

SEQ ID NO: 69941 - protein, 32 aa, Artificial Sequence
  Cyclic GFR-binding peptide
  MOD_RES (2), (4): Xaa is C or S
SXGXRDVVMGPYVKLIIQQKDNFFLMSLSSMK

SEQ ID NO: 69942 - protein, 31 aa, Artificial Sequence
  Cyclic GFR-binding peptide
  MOD_RES (27), (28): Xaa is C or S
MPYVKLVKPKRGVFFLISLSSLAQPVXXPAA

SEQ ID NO: 69943 - protein, 40 aa, Artificial Sequence; identical to SEQ ID NO: 22876
  Cyclic GFR-binding peptide
  MOD_RES (1), (3), (34), (35): Xaa is C or S

SEQ ID NO: 69944 - protein, 36 aa, Artificial Sequence; identical to SEQ ID NO: 22877
  Cyclic GFR-binding peptide
  MOD_RES (31), (32): Xaa is C or S

SEQ ID NO: 69945 - protein, 27 aa, Artificial Sequence
  Cyclic GFR-binding peptide
  MOD_RES (26), (27): Xaa is C or S
PYVKLYTVVGKDFFLISLSSLKTPVXX

SEQ ID NO: 69946 - protein, 34 aa, Artificial Sequence; identical to SEQ ID NO: 22878
  Cyclic GFR-binding peptide
  MOD_RES (32), (33): Xaa is C or S

SEQ ID NO: 69947 - protein, 29 aa, Artificial Sequence
  Cyclic GFR-binding peptide
  MOD_RES (28), (29): Xaa is C or S
MGPYVKLIIQQKDNFFLMSLSSMKTPTXX

SEQ ID NO: 69948 - protein, 29 aa, Artificial Sequence
  Cyclic GFR-binding peptide
SKVIMPYVKLIKPTKGIFFLISLSSLDQS

SEQ ID NO: 69949 - protein, 31 aa, Artificial Sequence
  Cyclic GFR-binding peptide
  MOD_RES (30), (30): Xaa is C or S
VVMNPYVKLIVNSSDDFFLVSLSSLKTPAXT

SEQ ID NO: 69950 - protein, 29 aa, Artificial Sequence
  Cyclic GFR-binding peptide
AAAAAAAAAPYVKLYTVVGKDFFLISLSS

SEQ ID NO: 69951 - protein, 28 aa, Artificial Sequence
  Cyclic GFR-binding peptide
SEVVMDPYVKLVVNNASDFFLISLSSLR

SEQ ID NO: 69952 - protein, 27 aa, Artificial Sequence
  Cyclic GFR-binding peptide
VMEPYVKLVVKDYEDFFLMSLSSLETP

SEQ ID NO: 69953 - protein, 34 aa, Artificial Sequence
  Cyclic GFR-binding peptide
  MOD_RES (30), (31): Xaa is C or S
EVIMPYVKLLLVRGNDFFLMSLSSTKVPAXXTSP

SEQ ID NO: 69954 - protein, 30 aa, Artificial Sequence
  Cyclic GFR-binding peptide
  MOD_RES (30), (30): Xaa is C or S
SMGEPYVKLTPVGMDDFFLVSLSSLKTPVX

SEQ ID NO: 69955 - protein, 34 aa, Artificial Sequence; identical to SEQ ID NO: 22883
  Cyclic GFR-binding peptide
  MOD_RES (2), (34): Xaa is C or S

SEQ ID NO: 69956 - protein, 34 aa, Artificial Sequence; identical to SEQ ID NO: 22885
  Cyclic GFR-binding peptide
  MOD_RES (31), (31): Xaa is C or S

SEQ ID NO: 69957 - protein, 33 aa, Artificial Sequence; identical to SEQ ID NO: 22887
  Cyclic GFR-binding peptide
  MOD_RES (32), (33): Xaa is C or S

SEQ ID NO: 69958 - protein, 34 aa, Artificial Sequence; identical to SEQ ID NO: 22888
  Cyclic GFR-binding peptide
  MOD_RES (32), (32): Xaa is C or S

SEQ ID NO: 69959 - protein, 34 aa, Artificial Sequence
  Cyclic GFR-binding peptide
  MOD_RES (29), (30): Xaa is C or S
VMDPYVKLVVKENEDFFLMSLSSLETPVXXAKPI

SEQ ID NO: 69960 - protein, 23 aa, Artificial Sequence
  Cyclic GFR-binding peptide
GPYVKLYTVVGKDFFLISLSSLK

SEQ ID NO: 69961 - protein, 34 aa, Artificial Sequence; identical to SEQ ID NO: 22889
  Cyclic GFR-binding peptide
  MOD_RES (1), (3): Xaa is C or S

SEQ ID NO: 69962 - protein, 26 aa, Artificial Sequence
  Cyclic GFR-binding peptide
DPYVKLVVNNAADFFLISLSSLRAPV

SEQ ID NO: 69963 - protein, 33 aa, Artificial Sequence; identical to SEQ ID NO: 22890
  Cyclic GFR-binding peptide
  MOD_RES (2), (2): Xaa is C or S

SEQ ID NO: 69964 - protein, 28 aa, Artificial Sequence
  Cyclic GFR-binding peptide
AEVVMDPYVKLVVNNAADFFLISLSSLR

SEQ ID NO: 69965 - protein, 29 aa, Artificial Sequence
  Cyclic GFR-binding peptide
  MOD_RES (1), (1): Xaa is C or S
XSKVVMPYVKLVKPTRGVFFLISLSSLDQ

SEQ ID NO: 69966 - protein, 27 aa, Artificial Sequence
  Cyclic GFR-binding peptide
  MOD_RES (26), (27): Xaa is C or S
PYVKLIIQQKDNFFLMSLSSMKTPTXX

SEQ ID NO: 69967 - protein, 25 aa, Artificial Sequence
  Cyclic GFR-binding peptide
VVMGPYVKLIIQQKDNFFLMSLSSM

SEQ ID NO: 69968 - protein, 26 aa, Artificial Sequence
  Cyclic GFR-binding peptide
VMNPYVKLIVNSSDDFFLVSLSSLQT

SEQ ID NO: 69969 - protein, 26 aa, Artificial Sequence
  Cyclic GFR-binding peptide
VVMPYVKLVKPTRGVFFLISLSSLDQ

SEQ ID NO: 69970 - protein, 36 aa, Artificial Sequence
  Cyclic GFR-binding peptide
  MOD_RES (30), (31): Xaa is C or S
SMGEPYVKLTPVGMDDFFLVSLSSLKTPVXXAKGVK

SEQ ID NO: 69971 - protein, 32 aa, Artificial Sequence; identical to SEQ ID NO: 22893
  Cyclic GFR-binding peptide
  MOD_RES (32), (32): Xaa is C or S

SEQ ID NO: 69972 - protein, 38 aa, Artificial Sequence; identical to SEQ ID NO: 22894
  Cyclic GFR-binding peptide
  MOD_RES (32), (33): Xaa is C or S

SEQ ID NO: 69973 - protein, 27 aa, Artificial Sequence
  Cyclic GFR-binding peptide
AMGPYVKLYTVVGKDFFLISLSSLKTP

SEQ ID NO: 69974 - protein, 39 aa, Artificial Sequence; identical to SEQ ID NO: 22895
  Cyclic GFR-binding peptide
  MOD_RES (1), (3), (34), (35): Xaa is C or S

SEQ ID NO: 69975 - protein, 30 aa, Artificial Sequence
  Cyclic GFR-binding peptide
  MOD_RES (2), (2): Xaa is C or S
GXESVAMGPYVKLYTVVGKDFFLISLSSLK

SEQ ID NO: 69976 - protein, 29 aa, Artificial Sequence
  Cyclic GFR-binding peptide
  MOD_RES (2), (2): Xaa is C or S
GXRDVVMGPYVKLIIQQKDNFFLMSLSSM

SEQ ID NO: 69977 - protein, 29 aa, Artificial Sequence
  Cyclic GFR-binding peptide
  MOD_RES (1), (1): Xaa is C or S
XEAVSMGEPYVKLTPVGMDDFFLVSLSSL

SEQ ID NO: 69978 - protein, 39 aa, Artificial Sequence; identical to SEQ ID NO: 22898
  Cyclic GFR-binding peptide
  MOD_RES (1), (33), (34): Xaa is C or S

SEQ ID NO: 69979 - protein, 29 aa, Artificial Sequence
  Cyclic GFR-binding peptide
  MOD_RES (28), (29): Xaa is C or S
IMPYVKLVKPKRGVFFLISLSSLAQPVXX

SEQ ID NO: 69980 - protein, 34 aa, Artificial Sequence; identical to SEQ ID NO: 22901
  Cyclic GFR-binding peptide
  MOD_RES (31), (32): Xaa is C or S

SEQ ID NO: 69981 - protein, 30 aa, Artificial Sequence; identical to SEQ ID NO: 1801
  Cyclic GFR-binding peptide

SEQ ID NO: 69982 - protein, 43 aa, Artificial Sequence; identical to SEQ ID NO: 22904
  Cyclic GFR-binding peptide
  MOD_RES (2), (4), (37), (38): Xaa is C or S

SEQ ID NO: 69983 - protein, 24 aa, Artificial Sequence
  Cyclic GFR-binding peptide
PYVKLVVKDYEDFFLMSLSSLETP

SEQ ID NO: 69984 - protein, 27 aa, Artificial Sequence
  Cyclic GFR-binding peptide
VSMGEPYVKLTPVGMDDFFLVSLSSLK

SEQ ID NO: 69985 - protein, 39 aa, Artificial Sequence; identical to SEQ ID NO: 22905
  Cyclic GFR-binding peptide
  MOD_RES (1), (3), (35), (36): Xaa is C or S

SEQ ID NO: 69986 - protein, 29 aa, Artificial Sequence
  Cyclic GFR-binding peptide
KVVMNPYVKLIVNNSSDFFLVSLSSLKTP

SEQ ID NO: 69987 - protein, 24 aa, Artificial Sequence
  Cyclic GFR-binding peptide
KVVMPYVKLVKPTRGVFFLISLSS

SEQ ID NO: 69988 - protein, 35 aa, Artificial Sequence
  Cyclic GFR-binding peptide
  MOD_RES (29), (30): Xaa is C or S
VIMPYVKLLLVRGNDFFLMSLSSTKVPAXXTSPVR

SEQ ID NO: 69989 - protein, 37 aa, Artificial Sequence
  Cyclic GFR-binding peptide
  MOD_RES (2), (4): Xaa is C or S
AXAXELHEELRPYVKLLKPKKRVYEFFLVSLSSHHVR

SEQ ID NO: 69990 - protein, 35 aa, Artificial Sequence; identical to SEQ ID NO: 22907
  Cyclic GFR-binding peptide
  MOD_RES (31), (32): Xaa is C or S

SEQ ID NO: 69991 - protein, 31 aa, Artificial Sequence
  Cyclic GFR-binding peptide
HQLFPYVKLHQGQHPKIRFFLMSLSSEETPV

SEQ ID NO: 69992 - protein, 30 aa, Artificial Sequence
  Cyclic GFR-binding peptide
  MOD_RES (1), (1): Xaa is C or S
XSEVVMDPYVKLVVNNASDFFLISLSSLRT

SEQ ID NO: 69993 - protein, 35 aa, Artificial Sequence; identical to SEQ ID NO: 22908
  Cyclic GFR-binding peptide
  MOD_RES (31), (32): Xaa is C or S

SEQ ID NO: 69994 - protein, 29 aa, Artificial Sequence
  Cyclic GFR-binding peptide
  MOD_RES (29), (29): Xaa is C or S
VMNPYVKLIVNSSDDFFLVSLSSLKTPAX

SEQ ID NO: 69995 - protein, 23 aa, Artificial Sequence
  Cyclic GFR-binding peptide
MGPYVKLYTVVGKDFFLISLSSL

SEQ ID NO: 69996 - protein, 31 aa, Artificial Sequence
  Cyclic GFR-binding peptide
  MOD_RES (1), (1): Xaa is C or S
XEAVSMGEPYVKLTPVGMDDFFLVSLSSLKT

SEQ ID NO: 69997 - protein, 28 aa, Artificial Sequence
  Cyclic GFR-binding peptide
  MOD_RES (26), (27): Xaa is C or S
PYVKLVKPKRGVFFLISLSSLAQPVXXP

SEQ ID NO: 69998 - protein, 27 aa, Artificial Sequence
  Cyclic GFR-binding peptide
VVMGPYVKLIIQQKDNFFLMSLSSMKT

SEQ ID NO: 69999 - protein, 37 aa, Artificial Sequence; identical to SEQ ID NO: 22911
  Cyclic GFR-binding peptide
  MOD_RES (2), (4), (35), (36): Xaa is C or S

SEQ ID NO: 70000 - protein, 26 aa, Artificial Sequence
  Cyclic GFR-binding peptide
DPYVKLVVKENEDFFLMSLSSLETPV

SEQ ID NO: 70001 - protein, 40 aa, Artificial Sequence; identical to SEQ ID NO: 22912
  Cyclic GFR-binding peptide
  MOD_RES (2), (4), (35), (36): Xaa is C or S

SEQ ID NO: 70002 - protein, 26 aa, Artificial Sequence
  Cyclic GFR-binding peptide
MGPYVKLYTVVGKDFFLISLSSLKTP

SEQ ID NO: 70003 - protein, 25 aa, Artificial Sequence
  Cyclic GFR-binding peptide
VMNPYVKLIVNSSDDFFLVSLSSLK

SEQ ID NO: 70004 - protein, 29 aa, Artificial Sequence
  Cyclic GFR-binding peptide
GEVVMEPYVKLVVKDYEDFFLMSLSSLET

SEQ ID NO: 70005 - protein, 31 aa, Artificial Sequence
  Cyclic GFR-binding peptide
  MOD_RES (29), (30): Xaa is C or S
VIMPYVKLIKPTKGIFFLISLSSLDQSVXXP

SEQ ID NO: 70006 - protein, 33 aa, Artificial Sequence
  Cyclic GFR-binding peptide
  MOD_RES (2), (4): Xaa is C or S
SXKXSKVIMPYVKLIKPTKGIFFLISLSSLDQS

SEQ ID NO: 70007 - protein, 35 aa, Artificial Sequence
  Cyclic GFR-binding peptide
  MOD_RES (29), (30): Xaa is C or S
VMNPYVKLIVNSSDDFFLVSLSSLKTPAXXPKPVY

SEQ ID NO: 70008 - protein, 33 aa, Artificial Sequence
  Cyclic GFR-binding peptide
  MOD_RES (27), (28): Xaa is C or S
NPYVKLIVNSSDDFFLVSLSSLKTPAXXPKPVY

SEQ ID NO: 70009 - protein, 35 aa, Artificial Sequence
  Cyclic GFR-binding peptide
  MOD_RES (29), (30): Xaa is C or S
VMGPYVKLIIQQKDNFFLMSLSSMKTPTXXPGASG

SEQ ID NO: 70010 - protein, 30 aa, Artificial Sequence
  Cyclic GFR-binding peptide
  MOD_RES (29), (30): Xaa is C or S
VIMPYVKLVKPKRGVFFLISLSSLAQPVXX

SEQ ID NO: 70011 - protein, 33 aa, Artificial Sequence; identical to SEQ ID NO: 22919
  Cyclic GFR-binding peptide
  MOD_RES (2), (2): Xaa is C or S

SEQ ID NO: 70012 - protein, 34 aa, Artificial Sequence; identical to SEQ ID NO: 22920
  Cyclic GFR-binding peptide
  MOD_RES (31), (32): Xaa is C or S

SEQ ID NO: 70013 - protein, 30 aa, Artificial Sequence
  Cyclic GFR-binding peptide
  MOD_RES (30), (30): Xaa is C or S
EVIMPYVKLLLVRGNDFFLMSLSSTKVPAX

SEQ ID NO: 70014 - protein, 32 aa, Artificial Sequence
  Cyclic GFR-binding peptide
  MOD_RES (29), (29): Xaa is C or S
FPYVKLHQGQHPKIRFFLMSLSSEETPVXELG

SEQ ID NO: 70015 - protein, 28 aa, Artificial Sequence
  Cyclic GFR-binding peptide
  MOD_RES (1), (1): Xaa is C or S
XESVAMGPYVKLYTVVGKDFFLISLSSL

SEQ ID NO: 70016 - protein, 27 aa, Artificial Sequence
  Cyclic GFR-binding peptide
  MOD_RES (2), (2): Xaa is C or S
KXSRVIMPYVKLVKPKRGVFFLISLSS

SEQ ID NO: 70017 - protein, 40 aa, Artificial Sequence; identical to SEQ ID NO: 22926
  Cyclic GFR-binding peptide
  MOD_RES (2), (4), (37), (38): Xaa is C or S

SEQ ID NO: 70018 - protein, 28 aa, Artificial Sequence
  Cyclic GFR-binding peptide
RVIMPYVKLVKPKRGVFFLISLSSLAQP

SEQ ID NO: 70019 - protein, 30 aa, Artificial Sequence
  Cyclic GFR-binding peptide
  MOD_RES (1), (3): Xaa is C or S
XGXGEVVMEPYVKLVVKDYEDFFLMSLSSL

SEQ ID NO: 70020 - protein, 28 aa, Artificial Sequence
  Cyclic GFR-binding peptide
  MOD_RES (27), (28): Xaa is C or S
EPYVKLVVKDYEDFFLMSLSSLETPVXX

SEQ ID NO: 70021 - protein, 36 aa, Artificial Sequence; identical to SEQ ID NO: 22930
  Cyclic GFR-binding peptide
  MOD_RES (1), (32), (33): Xaa is C or S

SEQ ID NO: 70022 - protein, 27 aa, Artificial Sequence
  Cyclic GFR-binding peptide
EVVMEPYVKLVVKDYEDFFLMSLSSLE

SEQ ID NO: 70023 - protein, 26 aa, Artificial Sequence
  Cyclic GFR-binding peptide
  MOD_RES (26), (26): Xaa is C or S
PYVKLVVKENEDFFLMSLSSLETPVX

SEQ ID NO: 70024 - protein, 41 aa, Artificial Sequence; identical to SEQ ID NO: 22933
  Cyclic GFR-binding peptide
  MOD_RES (2), (4), (36), (37): Xaa is C or S

SEQ ID NO: 70025 - protein, 30 aa, Artificial Sequence
  Cyclic GFR-binding peptide
  MOD_RES (29), (30): Xaa is C or S
VMDPYVKLVVNNASDFFLISLSSLRTPVXX

SEQ ID NO: 70026 - protein, 32 aa, Artificial Sequence
  Cyclic GFR-binding peptide
  MOD_RES (27), (28): Xaa is C or S
MPYVKLVKPTRGVFFLISLSSLDQPVXXPSAS

SEQ ID NO: 70027 - protein, 27 aa, Artificial Sequence
  Cyclic GFR-binding peptide
KVVMPYVKLVKPTRGVFFLISLSSLDQ

SEQ ID NO: 70028 - protein, 20 aa, Artificial Sequence
  Cyclic GFR-binding peptide
PYVKLVVNNASDFFLISLSS

SEQ ID NO: 70029 - protein, 30 aa, Artificial Sequence
  Cyclic GFR-binding peptide
EELRPYVKLLKPKKRVYEFFLVSLSSHHVR

SEQ ID NO: 70030 - protein, 34 aa, Artificial Sequence; identical to SEQ ID NO: 22936
  Cyclic GFR-binding peptide
  MOD_RES (2), (4): Xaa is C or S

SEQ ID NO: 70031 - protein, 34 aa, Artificial Sequence; identical to SEQ ID NO: 22938
  Cyclic GFR-binding peptide
  MOD_RES (1), (32), (33): Xaa is C or S

SEQ ID NO: 70032 - protein, 34 aa, Artificial Sequence; identical to SEQ ID NO: 22937
  Cyclic GFR-binding peptide
  MOD_RES (2), (34): Xaa is C or S

SEQ ID NO: 70033 - protein, 30 aa, Artificial Sequence
  Cyclic GFR-binding peptide
  MOD_RES (28), (29): Xaa is C or S
MDPYVKLVVNNASDFFLISLSSLRTPVXXT

SEQ ID NO: 70034 - protein, 37 aa, Artificial Sequence; identical to SEQ ID NO: 22939
  Cyclic GFR-binding peptide
  MOD_RES (31), (32): Xaa is C or S

SEQ ID NO: 70035 - protein, 38 aa, Artificial Sequence; identical to SEQ ID NO: 22940
  Cyclic GFR-binding peptide
  MOD_RES (1), (33), (34): Xaa is C or S

SEQ ID NO: 70036 - protein, 25 aa, Artificial Sequence
  Cyclic GFR-binding peptide
KVIMPYVKLIKPTKGIFFLISLSSL

SEQ ID NO: 70037 - protein, 29 aa, Artificial Sequence
  Cyclic GFR-binding peptide
  MOD_RES (28), (29): Xaa is C or S
MNPYVKLIVNSSDDFFLVSLSSLKTPAXX

SEQ ID NO: 70038 - protein, 30 aa, Artificial Sequence
  Cyclic GFR-binding peptide
  MOD_RES (26), (27): Xaa is C or S
PYVKLYTVVGKDFFLISLSSLKTPVXXAKS

SEQ ID NO: 70039 - protein, 38 aa, Artificial Sequence; identical to SEQ ID NO: 22942
  Cyclic GFR-binding peptide
  MOD_RES (36), (36): Xaa is C or S

SEQ ID NO: 70040 - protein, 38 aa, Artificial Sequence; identical to SEQ ID NO: 22943
  Cyclic GFR-binding peptide
  MOD_RES (37), (37): Xaa is C or S

SEQ ID NO: 70041 - protein, 23 aa, Artificial Sequence
  Cyclic GFR-binding peptide
MPYVKLLLVRGNDFFLMSLSSTK

SEQ ID NO: 70042 - protein, 38 aa, Artificial Sequence
  Cyclic GFR-binding peptide
  MOD_RES (32), (33): Xaa is C or S
GEVVMDPYVKLVVKENEDFFLMSLSSLETPVXXAKPIK

SEQ ID NO: 70043 - protein, 31 aa, Artificial Sequence
  Cyclic GFR-binding peptide
  MOD_RES (2), (2): Xaa is C or S
KXSRVIMPYVKLVKPKRGVFFLISLSSLAQP

SEQ ID NO: 70044 - protein, 25 aa, Artificial Sequence
  Cyclic GFR-binding peptide
VVMEPYVKLVVKDYEDFFLMSLSSL

SEQ ID NO: 70045 - protein, 32 aa, Artificial Sequence
  Cyclic GFR-binding peptide
  MOD_RES (1), (3): Xaa is C or S
XGXSEVVMDPYVKLVVNNASDFFLISLSSLRT

SEQ ID NO: 70046 - protein, 24 aa, Artificial Sequence
  Cyclic GFR-binding peptide
GPYVKLIIQQKDNFFLMSLSSMKT

SEQ ID NO: 70047 - protein, 25 aa, Artificial Sequence
  Cyclic GFR-binding peptide
PYVKLIVNSSDDFFLVSLSSLKTPA

SEQ ID NO: 70048 - protein, 33 aa, Artificial Sequence
  Cyclic GFR-binding peptide
  MOD_RES (29), (30): Xaa is C or S
MGEPYVKLTPVGMDDFFLVSLSSLKTPVXXAKG

SEQ ID NO: 70049 - protein, 36 aa, Artificial Sequence; identical to SEQ ID NO: 22946
  Cyclic GFR-binding peptide
  MOD_RES (1), (3), (35), (36): Xaa is C or S

SEQ ID NO: 70050 - protein, 28 aa, Artificial Sequence
  Cyclic GFR-binding peptide
VMDPYVKLVVNNASDFFLISLSSLRTPV

SEQ ID NO: 70051 - protein, 40 aa, Artificial Sequence; identical to SEQ ID NO: 22948
  Cyclic GFR-binding peptide
  MOD_RES (1), (3), (35), (36): Xaa is C or S

SEQ ID NO: 70052 - protein, 32 aa, Artificial Sequence
  Cyclic GFR-binding peptide
  MOD_RES (2), (2): Xaa is C or S
GXSEVVMDPYVKLVVNNASDFFLISLSSLRTP

SEQ ID NO: 70053 - protein, 34 aa, Artificial Sequence; identical to SEQ ID NO: 22949
  Cyclic GFR-binding peptide
  MOD_RES (2), (34): Xaa is C or S

SEQ ID NO: 70054 - protein, 25 aa, Artificial Sequence
  Cyclic GFR-binding peptide
GEPYVKLTPVGMDDFFLVSLSSLKT

SEQ ID NO: 70055 - protein, 27 aa, Artificial Sequence
  Cyclic GFR-binding peptide
VVMDPYVKLVVNNASDFFLISLSSLRT

SEQ ID NO: 70056 - protein, 32 aa, Artificial Sequence; identical to SEQ ID NO: 22953
  Cyclic GFR-binding peptide
  MOD_RES (32), (32): Xaa is C or S

SEQ ID NO: 70057 - protein, 24 aa, Artificial Sequence
  Cyclic GFR-binding peptide
VMDPYVKLVVNNAADFFLISLSSL

SEQ ID NO: 70058 - protein, 41 aa, Artificial Sequence
  Cyclic GFR-binding peptide
  MOD_RES (1), (3), (35), (36): Xaa is C or S
XGXGEVVMDPYVKLVVKENEDFFLMSLSSLETPVXXAKPIK

SEQ ID NO: 70059 - protein, 35 aa, Artificial Sequence; identical to SEQ ID NO: 22956
  Cyclic GFR-binding peptide
  MOD_RES (1), (3), (35): Xaa is C or S

SEQ ID NO: 70060 - protein, 30 aa, Artificial Sequence
  Cyclic GFR-binding peptide
  MOD_RES (27), (28): Xaa is C or S
NPYVKLIVNSSDDFFLVSLSSLKTPAXXPK

SEQ ID NO: 70061 - protein, 42 aa, Artificial Sequence; identical to SEQ ID NO: 22957
  Cyclic GFR-binding peptide
  MOD_RES (2), (4), (36), (37): Xaa is C or S

SEQ ID NO: 70062 - protein, 29 aa, Artificial Sequence
  Cyclic GFR-binding peptide
SMGEPYVKLTPVGMDDFFLVSLSSLKTPV

SEQ ID NO: 70063 - protein, 35 aa, Artificial Sequence; identical to SEQ ID NO: 22958
  Cyclic GFR-binding peptide
  MOD_RES (1), (32), (33): Xaa is C or S

SEQ ID NO: 70064 - protein, 25 aa, Artificial Sequence
  Cyclic GFR-binding peptide
VVMDPYVKLVVNNAADFFLISLSSL

SEQ ID NO: 70065 - protein, 40 aa, Artificial Sequence; identical to SEQ ID NO: 22959
  Cyclic GFR-binding peptide
  MOD_RES (1), (3), (35), (36): Xaa is C or S

SEQ ID NO: 70066 - protein, 29 aa, Artificial Sequence
  Cyclic GFR-binding peptide
RVVMNPYVKLIVNSSDDFFLVSLSSLKTP

SEQ ID NO: 70067 - protein, 31 aa, Artificial Sequence
  Cyclic GFR-binding peptide
  MOD_RES (30), (31): Xaa is C or S
VVMDPYVKLVVNNAADFFLISLSSLRAPVXX

SEQ ID NO: 70068 - protein, 34 aa, Artificial Sequence
  Cyclic GFR-binding peptide
  MOD_RES (30), (31): Xaa is C or S
VVMNPYVKLIVNSSDDFFLVSLSSLQTPAXXPKP

SEQ ID NO: 70069 - protein, 34 aa, Artificial Sequence; identical to SEQ ID NO: 22962
  Cyclic GFR-binding peptide

SEQ ID NO: 70070 - protein, 33 aa, Artificial Sequence; identical to SEQ ID NO: 22961
  Cyclic GFR-binding peptide
  MOD_RES (33), (33): Xaa is C or S

SEQ ID NO: 70071 - protein, 30 aa, Artificial Sequence; identical to SEQ ID NO: 1804
  Cyclic GFR-binding peptide

SEQ ID NO: 70072 - protein, 32 aa, Artificial Sequence
  Cyclic GFR-binding peptide
  MOD_RES (30), (31): Xaa is C or S
VAMGPYVKLYTVVGKDFFLISLSSLKTPVXXA

SEQ ID NO: 70073 - protein, 35 aa, Artificial Sequence
  Cyclic GFR-binding peptide
  MOD_RES (1), (3), (35): Xaa is C or S
XGXGEVVMDPYVKLVVKENEDFFLMSLSSLETPVX

SEQ ID NO: 70074 - protein, 37 aa, Artificial Sequence; identical to SEQ ID NO: 22965
  Cyclic GFR-binding peptide
  MOD_RES (1), (33), (34): Xaa is C or S

SEQ ID NO: 70075 - protein, 27 aa, Artificial Sequence
  Cyclic GFR-binding peptide
AVSMGEPYVKLTPVGMDDFFLVSLSSL

SEQ ID NO: 70076 - protein, 40 aa, Artificial Sequence; identical to SEQ ID NO: 22966
  Cyclic GFR-binding peptide
  MOD_RES (37), (37): Xaa is C or S

SEQ ID NO: 70077 - protein, 31 aa, Artificial Sequence
  Cyclic GFR-binding peptide
EAVSMGEPYVKLTPVGMDDFFLVSLSSLKTP

SEQ ID NO: 70078 - protein, 31 aa, Artificial Sequence; identical to SEQ ID NO: 22967
  Cyclic GFR-binding peptide
  MOD_RES (1), (1): Xaa is C or S

SEQ ID NO: 70079 - protein, 28 aa, Artificial Sequence
  Cyclic GFR-binding peptide
  MOD_RES (28), (28): Xaa is C or S
IMPYVKLVKPKRGVFFLISLSSLAQPVX

SEQ ID NO: 70080 - protein, 30 aa, Artificial Sequence
  Cyclic GFR-binding peptide
  MOD_RES (2), (2): Xaa is C or S
GXSRVVMNPYVKLIVNSSDDFFLVSLSSLK

SEQ ID NO: 70081 - protein, 32 aa, Artificial Sequence; identical to SEQ ID NO: 22971
  Cyclic GFR-binding peptide

SEQ ID NO: 70082 - protein, 41 aa, Artificial Sequence; identical to SEQ ID NO: 22975
  Cyclic GFR-binding peptide
  MOD_RES (1), (3), (35), (36): Xaa is C or S

SEQ ID NO: 70083 - protein, 29 aa, Artificial Sequence
  Cyclic GFR-binding peptide
  MOD_RES (27), (28): Xaa is C or S
NPYVKLIVNSSDDFFLVSLSSLKTPAXXP

SEQ ID NO: 70084 - protein, 39 aa, Artificial Sequence; identical to SEQ ID NO: 22976
  Cyclic GFR-binding peptide
  MOD_RES (2), (4), (35), (36): Xaa is C or S

SEQ ID NO: 70085 - protein, 25 aa, Artificial Sequence
  Cyclic GFR-binding peptide
IMPYVKLVKPKRGVFFLISLSSLAQ

SEQ ID NO: 70086 - protein, 39 aa, Artificial Sequence; identical to SEQ ID NO: 22977
  Cyclic GFR-binding peptide
  MOD_RES (2), (34), (35): Xaa is C or S

SEQ ID NO: 70087 - protein, 29 aa, Artificial Sequence
  Cyclic GFR-binding peptide
  MOD_RES (26), (27): Xaa is C or S
PYVKLTPVGMDDFFLVSLSSLKTPVXXAK

SEQ ID NO: 70088 - protein, 34 aa, Artificial Sequence; identical to SEQ ID NO: 22983
  Cyclic GFR-binding peptide
  MOD_RES (31), (32): Xaa is C or S

SEQ ID NO: 70089 - protein, 26 aa, Artificial Sequence
  Cyclic GFR-binding peptide
  MOD_RES (1), (1): Xaa is C or S
XSKVVMPYVKLVKPTRGVFFLISLSS

SEQ ID NO: 70090 - protein, 35 aa, Artificial Sequence
  Cyclic GFR-binding peptide
  MOD_RES (30), (31): Xaa is C or S
VVMNPYVKLIVNNSSDFFLVSLSSLKTPAXXAKPV

SEQ ID NO: 70091 - protein, 30 aa, Artificial Sequence
  Cyclic GFR-binding peptide
  MOD_RES (30), (30): Xaa is C or S
LFPYVKLHQGQHPKIRFFLMSLSSEETPVX

SEQ ID NO: 70092 - protein, 38 aa, Artificial Sequence
  Cyclic GFR-binding peptide
  MOD_RES (32), (32): Xaa is C or S
HQLFPYVKLHQGQHPKIRFFLMSLSSEETPVXELGEDN

SEQ ID NO: 70093 - protein, 28 aa, Artificial Sequence
  Cyclic GFR-binding peptide
SMGEPYVKLTPVGMDDFFLVSLSSLKTP

SEQ ID NO: 70094 - protein, 41 aa, Artificial Sequence; identical to SEQ ID NO: 22984
  Cyclic GFR-binding peptide
  MOD_RES (2), (4), (36), (37): Xaa is C or S

SEQ ID NO: 70095 - protein, 27 aa, Artificial Sequence
  Cyclic GFR-binding peptide
  MOD_RES (27), (27): Xaa is C or S
MPYVKLIKPTKGIFFLISLSSLDQSVX

SEQ ID NO: 70096 - protein, 35 aa, Artificial Sequence; identical to SEQ ID NO: 22986
  Cyclic GFR-binding peptide
  MOD_RES (34), (34): Xaa is C or S

SEQ ID NO: 70097 - protein, 25 aa, Artificial Sequence
  Cyclic GFR-binding peptide
VMDPYVKLVVNNASDFFLISLSSLR

SEQ ID NO: 70098 - protein, 24 aa, Artificial Sequence
  Cyclic GFR-binding peptide
IMPYVKLLLVRGNDFFLMSLSSTK

SEQ ID NO: 70099 - protein, 38 aa, Artificial Sequence; identical to SEQ ID NO: 22987
  Cyclic GFR-binding peptide
  MOD_RES (1), (3), (34), (35): Xaa is C or S

SEQ ID NO: 70100 - protein, 38 aa, Artificial Sequence; identical to SEQ ID NO: 22988
  Cyclic GFR-binding peptide
  MOD_RES (1), (32), (33): Xaa is C or S

SEQ ID NO: 70101 - protein, 31 aa, Artificial Sequence
  Cyclic GFR-binding peptide
  MOD_RES (30), (30): Xaa is C or S
LFPYVKLHQGQHPKIRFFLMSLSSEETPVXE

SEQ ID NO: 70102 - protein, 26 aa, Artificial Sequence
  Cyclic GFR-binding peptide
  MOD_RES (26), (26): Xaa is C or S
PYVKLVVNNASDFFLISLSSLRTPVX

SEQ ID NO: 70103 - protein, 36 aa, Artificial Sequence; identical to SEQ ID NO: 22992
  Cyclic GFR-binding peptide
  MOD_RES (2), (4), (35), (36): Xaa is C or S

SEQ ID NO: 70104 - protein, 39 aa, Artificial Sequence
  Cyclic GFR-binding peptide
  MOD_RES (2), (34), (35): Xaa is C or S
GXGEVVMDPYVKLVVKENEDFFLMSLSSLETPVXXAKPI

SEQ ID NO: 70105 - protein, 29 aa, Artificial Sequence
  Cyclic GFR-binding peptide
AAAAAAAAAPYVKLIKPTKGIFFLISLSS

SEQ ID NO: 70106 - protein, 37 aa, Artificial Sequence; identical to SEQ ID NO: 22994
  Cyclic GFR-binding peptide
  MOD_RES (1), (3), (35), (36): Xaa is C or S

SEQ ID NO: 70107 - protein, 22 aa, Artificial Sequence
  Cyclic GFR-binding peptide
NPYVKLIVNNSSDFFLVSLSSL

SEQ ID NO: 70108 - protein, 35 aa, Artificial Sequence
  Cyclic GFR-binding peptide
  MOD_RES (33), (33): Xaa is C or S
ELRPYVKLLKPKKRVYEFFLVSLSSHHVRSPQXKV

SEQ ID NO: 70109 - protein, 31 aa, Artificial Sequence; identical to SEQ ID NO: 22996
  Cyclic GFR-binding peptide
  MOD_RES (31), (31): Xaa is C or S

SEQ ID NO: 70110 - protein, 31 aa, Artificial Sequence
  Cyclic GFR-binding peptide
  MOD_RES (1), (3): Xaa is C or S
XGXGEVVMEPYVKLVVKDYEDFFLMSLSSLE

SEQ ID NO: 70111 - protein, 41 aa, Artificial Sequence; identical to SEQ ID NO: 22997
  Cyclic GFR-binding peptide
  MOD_RES (2), (4), (35), (36): Xaa is C or S

SEQ ID NO: 70112 - protein, 33 aa, Artificial Sequence
  Cyclic GFR-binding peptide
  MOD_RES (29), (30): Xaa is C or S
VMDPYVKLVVNNASDFFLISLSSLRTPVXXTPP

SEQ ID NO: 70113 - protein, 29 aa, Artificial Sequence
  Cyclic GFR-binding peptide
  MOD_RES (1), (1): Xaa is C or S
XSRVVMNPYVKLIVNSSDDFFLVSLSSLK

SEQ ID NO: 70114 - protein, 28 aa, Artificial Sequence
  Cyclic GFR-binding peptide
  MOD_RES (27), (28): Xaa is C or S
EPYVKLTPVGMDDFFLVSLSSLKTPVXX

SEQ ID NO: 70115 - protein, 28 aa, Artificial Sequence
  Cyclic GFR-binding peptide
  MOD_RES (28), (28): Xaa is C or S
MNPYVKLIVNSSDDFFLVSLSSLKTPAX

SEQ ID NO: 70116 - protein, 36 aa, Artificial Sequence; identical to SEQ ID NO: 23000
  Cyclic GFR-binding peptide
  MOD_RES (1), (33), (34): Xaa is C or S

SEQ ID NO: 70117 - protein, 36 aa, Artificial Sequence; identical to SEQ ID NO: 23001
  Cyclic GFR-binding peptide
  MOD_RES (31), (32): Xaa is C or S

SEQ ID NO: 70118 - protein, 35 aa, Artificial Sequence; identical to SEQ ID NO: 23002
  Cyclic GFR-binding peptide
  MOD_RES (1), (34), (35): Xaa is C or S

SEQ ID NO: 70119 - protein, 29 aa, Artificial Sequence
  Cyclic GFR-binding peptide
  MOD_RES (2), (4): Xaa is C or S
LXGXEEVIMPYVKLLLVRGNDFFLMSLSS

SEQ ID NO: 70120 - protein, 33 aa, Artificial Sequence
  Cyclic GFR-binding peptide
  MOD_RES (31), (31): Xaa is C or S
QLFPYVKLHQGQHPKIRFFLMSLSSEETPVXEL

SEQ ID NO: 70121 - protein, 25 aa, Artificial Sequence
  Cyclic GFR-binding peptide
GPYVKLYTVVGKDFFLISLSSLKTP

SEQ ID NO: 70122 - protein, 28 aa, Artificial Sequence
  Cyclic GFR-binding peptide
  MOD_RES (27), (28): Xaa is C or S
NPYVKLIVNSSDDFFLVSLSSLQTPAXX

SEQ ID NO: 70123 - protein, 40 aa, Artificial Sequence
  Cyclic GFR-binding peptide
  MOD_RES (1), (3), (35), (36): Xaa is C or S
XGXGEVVMDPYVKLVVKENEDFFLMSLSSLETPVXXAKPI

SEQ ID NO: 70124 - protein, 38 aa, Artificial Sequence; identical to SEQ ID NO: 23005
  Cyclic GFR-binding peptide
  MOD_RES (2), (4), (36), (37): Xaa is C or S

SEQ ID NO: 70125 - protein, 30 aa, Artificial Sequence
  Cyclic GFR-binding peptide
  MOD_RES (2), (4): Xaa is C or S
SXKXSRVIMPYVKLVKPKRGVFFLISLSSL

SEQ ID NO: 70126 - protein, 30 aa, Artificial Sequence
  Cyclic GFR-binding peptide
  MOD_RES (30), (30): Xaa is C or S
RVIMPYVKLVKPKRGVFFLISLSSLAQPVX

SEQ ID NO: 70127 - protein, 27 aa, Artificial Sequence
  Cyclic GFR-binding peptide
  MOD_RES (1), (1): Xaa is C or S
XAKVVMNPYVKLIVNNSSDFFLVSLSS

SEQ ID NO: 70128 - protein, 34 aa, Artificial Sequence
  Cyclic GFR-binding peptide
  MOD_RES (1), (3): Xaa is C or S
XEXKNHQLFPYVKLHQGQHPKIRFFLMSLSSEET

SEQ ID NO: 70129 - protein, 25 aa, Artificial Sequence
  Cyclic GFR-binding peptide
SRVIMPYVKLVKPKRGVFFLISLSS

SEQ ID NO: 70130 - protein, 43 aa, Artificial Sequence; identical to SEQ ID NO: 23008
  Cyclic GFR-binding peptide
  MOD_RES (2), (39): Xaa is C or S

SEQ ID NO: 70131 - protein, 34 aa, Artificial Sequence; identical to SEQ ID NO: 23009
  Cyclic GFR-binding peptide
  MOD_RES (1), (33), (34): Xaa is C or S

SEQ ID NO: 70132 - protein, 25 aa, Artificial Sequence
  Cyclic GFR-binding peptide
SVAMGPYVKLYTVVGKDFFLISLSS

SEQ ID NO: 70133 - protein, 30 aa, Artificial Sequence
  Cyclic GFR-binding peptide
  MOD_RES (28), (29): Xaa is C or S
MDPYVKLVVKENEDFFLMSLSSLETPVXXA

SEQ ID NO: 70134 - protein, 26 aa, Artificial Sequence
  Cyclic GFR-binding peptide
SEVVMDPYVKLVVNNASDFFLISLSS

SEQ ID NO: 70135 - protein, 36 aa, Artificial Sequence; identical to SEQ ID NO: 23010
  Cyclic GFR-binding peptide
  MOD_RES (1), (33), (34): Xaa is C or S

SEQ ID NO: 70136 - protein, 21 aa, Artificial Sequence
  Cyclic GFR-binding peptide
PYVKLVVKDYEDFFLMSLSSL

SEQ ID NO: 70137 - protein, 38 aa, Artificial Sequence; identical to SEQ ID NO: 23012
  Cyclic GFR-binding peptide
  MOD_RES (1), (3), (35), (36): Xaa is C or S

SEQ ID NO: 70138 - protein, 33 aa, Artificial Sequence
  Cyclic GFR-binding peptide
  MOD_RES (29), (30): Xaa is C or S
VMNPYVKLIVNSSDDFFLVSLSSLQTPAXXPKP

SEQ ID NO: 70139 - protein, 28 aa, Artificial Sequence
  Cyclic GFR-binding peptide
KVIMPYVKLIKPTKGIFFLISLSSLDQS

SEQ ID NO: 70140 - protein, 35 aa, Artificial Sequence; identical to SEQ ID NO: 23017
  Cyclic GFR-binding peptide
  MOD_RES (1), (3), (34), (35): Xaa is C or S

SEQ ID NO: 70141 - protein, 39 aa, Artificial Sequence; identical to SEQ ID NO: 23018
  Cyclic GFR-binding peptide
  MOD_RES (1), (3): Xaa is C or S

SEQ ID NO: 70142 - protein, 37 aa, Artificial Sequence; identical to SEQ ID NO: 23020
  Cyclic GFR-binding peptide
  MOD_RES (1), (3), (35): Xaa is C or S

SEQ ID NO: 70143 - protein, 33 aa, Artificial Sequence
  Cyclic GFR-binding peptide
  MOD_RES (28), (29): Xaa is C or S
MDPYVKLVVKENEDFFLMSLSSLETPVXXAKPI

SEQ ID NO: 70144 - protein, 20 aa, Artificial Sequence
  Cyclic GFR-binding peptide
PYVKLVKPKRGVFFLISLSS

SEQ ID NO: 70145 - protein, 37 aa, Artificial Sequence; identical to SEQ ID NO: 23023
  Cyclic GFR-binding peptide
  MOD_RES (2), (34): Xaa is C or S

SEQ ID NO: 70146 - protein, 34 aa, Artificial Sequence
  Cyclic GFR-binding peptide
  MOD_RES (28), (29): Xaa is C or S
MGPYVKLYTVVGKDFFLISLSSLKTPVXXAKSAK

SEQ ID NO: 70147 - protein, 28 aa, Artificial Sequence
  Cyclic GFR-binding peptide
  MOD_RES (26), (27): Xaa is C or S
PYVKLIKPTKGIFFLISLSSLDQSVXXP

SEQ ID NO: 70148 - protein, 25 aa, Artificial Sequence
  Cyclic GFR-binding peptide
MNPYVKLIVNSSDDFFLVSLSSLQT

SEQ ID NO: 70149 - protein, 28 aa, Artificial Sequence
  Cyclic GFR-binding peptide
  MOD_RES (28), (28): Xaa is C or S
GEPYVKLTPVGMDDFFLVSLSSLKTPVX

SEQ ID NO: 70150 - protein, 38 aa, Artificial Sequence; identical to SEQ ID NO: 23026
  Cyclic GFR-binding peptide
  MOD_RES (1), (3), (34), (35): Xaa is C or S

SEQ ID NO: 70151 - protein, 31 aa, Artificial Sequence
  Cyclic GFR-binding peptide
  MOD_RES (1), (3): Xaa is C or S
XGXGEVVMDPYVKLVVKENEDFFLMSLSSLE

SEQ ID NO: 70152 - protein, 26 aa, Artificial Sequence
  Cyclic GFR-binding peptide
AEVVMDPYVKLVVNNAADFFLISLSS

SEQ ID NO: 70153 - protein, 25 aa, Artificial Sequence
  Cyclic GFR-binding peptide
SKVVMPYVKLVKPTRGVFFLISLSS

SEQ ID NO: 70154 - protein, 28 aa, Artificial Sequence
  Cyclic GFR-binding peptide
LHEELRPYVKLLKPKKRVYEFFLVSLSS

SEQ ID NO: 70155 - protein, 37 aa, Artificial Sequence; identical to SEQ ID NO: 23027
  Cyclic GFR-binding peptide
  MOD_RES (1), (1): Xaa is C or S

SEQ ID NO: 70156 - protein, 36 aa, Artificial Sequence
  Cyclic GFR-binding peptide
  MOD_RES (1), (33), (34): Xaa is C or S
XGEVVMDPYVKLVVKENEDFFLMSLSSLETPVXXAK

SEQ ID NO: 70157 - protein, 29 aa, Artificial Sequence
  Cyclic GFR-binding peptide
  MOD_RES (29), (29): Xaa is C or S
VMNPYVKLIVNNSSDFFLVSLSSLKTPAX

SEQ ID NO: 70158 - protein, 32 aa, Artificial Sequence
  Cyclic GFR-binding peptide
  MOD_RES (2), (4): Xaa is C or S
RXGXGEVVMDPYVKLVVKENEDFFLMSLSSLE

SEQ ID NO: 70159 - protein, 35 aa, Artificial Sequence; identical to SEQ ID NO: 23029
  Cyclic GFR-binding peptide
  MOD_RES (2), (4), (35): Xaa is C or S

SEQ ID NO: 70160 - protein, 37 aa, Artificial Sequence
  Cyclic GFR-binding peptide
  MOD_RES (31), (32): Xaa is C or S
VSMGEPYVKLTPVGMDDFFLVSLSSLKTPVXXAKGVK

SEQ ID NO: 70161 - protein, 26 aa, Artificial Sequence
  Cyclic GFR-binding peptide
VMDPYVKLVVKENEDFFLMSLSSLET

SEQ ID NO: 70162 - protein, 28 aa, Artificial Sequence
  Cyclic GFR-binding peptide
KVVMNPYVKLIVNNSSDFFLVSLSSLKT

SEQ ID NO: 70163 - protein, 32 aa, Artificial Sequence
  Cyclic GFR-binding peptide
  MOD_RES (27), (28): Xaa is C or S
MPYVKLIKPTKGIFFLISLSSLDQSVXXPSAS

SEQ ID NO: 70164 - protein, 24 aa, Artificial Sequence
  Cyclic GFR-binding peptide
GPYVKLYTVVGKDFFLISLSSLKT

SEQ ID NO: 70165 - protein, 33 aa, Artificial Sequence
  Cyclic GFR-binding peptide
  MOD_RES (28), (29): Xaa is C or S
MGPYVKLIIQQKDNFFLMSLSSMKTPTXXPGAS

SEQ ID NO: 70166 - protein, 35 aa, Artificial Sequence
  Cyclic GFR-binding peptide
  MOD_RES (29), (29): Xaa is C or S
FPYVKLHQGQHPKIRFFLMSLSSEETPVXELGEDN

SEQ ID NO: 70167 - protein, 29 aa, Artificial Sequence
  Cyclic GFR-binding peptide
KVVMPYVKLVKPTRGVFFLISLSSLDQPV

SEQ ID NO: 70168 - protein, 30 aa, Artificial Sequence
  Cyclic GFR-binding peptide
EVVMDPYVKLVVKENEDFFLMSLSSLETPV

SEQ ID NO: 70169 - protein, 29 aa, Artificial Sequence
  Cyclic GFR-binding peptide
AAAAAAAAAPYVKLIIQQKDNFFLMSLSS

SEQ ID NO: 70170 - protein, 33 aa, Artificial Sequence; identical to SEQ ID NO: 23036
  Cyclic GFR-binding peptide
  MOD_RES (31), (32): Xaa is C or S

SEQ ID NO: 70171 - protein, 25 aa, Artificial Sequence
  Cyclic GFR-binding peptide
MNPYVKLIVNNSSDFFLVSLSSLKT

SEQ ID NO: 70172 - protein, 34 aa, Artificial Sequence
  Cyclic GFR-binding peptide
  MOD_RES (29), (29): Xaa is C or S
FPYVKLHQGQHPKIRFFLMSLSSEETPVXELGED

SEQ ID NO: 70173 - protein, 28 aa, Artificial Sequence
  Cyclic GFR-binding peptide
VAMGPYVKLYTVVGKDFFLISLSSLKTP

SEQ ID NO: 70174 - protein, 33 aa, Artificial Sequence
  Cyclic GFR-binding peptide
  MOD_RES (30), (31): Xaa is C or S
VVMDPYVKLVVKENEDFFLMSLSSLETPVXXAK

SEQ ID NO: 70175 - protein, 36 aa, Artificial Sequence; identical to SEQ ID NO: 23039
  Cyclic GFR-binding peptide
  MOD_RES (1), (3): Xaa is C or S

SEQ ID NO: 70176 - protein, 38 aa, Artificial Sequence; identical to SEQ ID NO: 23041
  Cyclic GFR-binding peptide
  MOD_RES (2), (34), (35): Xaa is C or S

SEQ ID NO: 70177 - protein, 34 aa, Artificial Sequence; identical to SEQ ID NO: 23042
  Cyclic GFR-binding peptide
  MOD_RES (32), (33): Xaa is C or S

SEQ ID NO: 70178 - protein, 31 aa, Artificial Sequence
  Cyclic GFR-binding peptide
  MOD_RES (29), (30): Xaa is C or S
VMGPYVKLIIQQKDNFFLMSLSSMKTPTXXP

SEQ ID NO: 70179 - protein, 26 aa, Artificial Sequence
  Cyclic GFR-binding peptide
EVVMEPYVKLVVKDYEDFFLMSLSSL

SEQ ID NO: 70180 - protein, 38 aa, Artificial Sequence; identical to SEQ ID NO: 23044
  Cyclic GFR-binding peptide
  MOD_RES (1), (32), (33): Xaa is C or S

SEQ ID NO: 70181 - protein, 30 aa, Artificial Sequence
  Cyclic GFR-binding peptide
  MOD_RES (28), (29): Xaa is C or S
MDPYVKLVVNNAADFFLISLSSLRAPVXXS

SEQ ID NO: 70182 - protein, 34 aa, Artificial Sequence; identical to SEQ ID NO: 23045
  Cyclic GFR-binding peptide
  MOD_RES (1), (3): Xaa is C or S

SEQ ID NO: 70183 - protein, 26 aa, Artificial Sequence
  Cyclic GFR-binding peptide
DVVMGPYVKLIIQQKDNFFLMSLSSM

SEQ ID NO: 70184 - protein, 30 aa, Artificial Sequence
  Cyclic GFR-binding peptide
HEELRPYVKLLKPKKRVYEFFLVSLSSHHV

SEQ ID NO: 70185 - protein, 27 aa, Artificial Sequence
  Cyclic GFR-binding peptide
VIMPYVKLIKPTKGIFFLISLSSLDQS

SEQ ID NO: 70186 - protein, 34 aa, Artificial Sequence
  Cyclic GFR-binding peptide
  MOD_RES (33), (33): Xaa is C or S
ELRPYVKLLKPKKRVYEFFLVSLSSHHVRSPQXK

SEQ ID NO: 70187 - protein, 41 aa, Artificial Sequence; identical to SEQ ID NO: 23049
  Cyclic GFR-binding peptide
  MOD_RES (2), (4), (36), (37): Xaa is C or S

SEQ ID NO: 70188 - protein, 32 aa, Artificial Sequence
  Cyclic GFR-binding peptide
  MOD_RES (27), (28): Xaa is C or S
DPYVKLVVNNAADFFLISLSSLRAPVXXSAPA

SEQ ID NO: 70189 - protein, 33 aa, Artificial Sequence
  Cyclic GFR-binding peptide
  MOD_RES (28), (29): Xaa is C or S
IMPYVKLLLVRGNDFFLMSLSSTKVPAXXTSPV

SEQ ID NO: 70190 - protein, 23 aa, Artificial Sequence
  Cyclic GFR-binding peptide
PYVKLYTVVGKDFFLISLSSLKT

SEQ ID NO: 70191 - protein, 36 aa, Artificial Sequence; identical to SEQ ID NO: 23051
  Cyclic GFR-binding peptide
  MOD_RES (2), (34), (35): Xaa is C or S

SEQ ID NO: 70192 - protein, 36 aa, Artificial Sequence; identical to SEQ ID NO: 23052
  Cyclic GFR-binding peptide
  MOD_RES (2), (4), (36): Xaa is C or S

SEQ ID NO: 70193 - protein, 28 aa, Artificial Sequence
  Cyclic GFR-binding peptide
  MOD_RES (1), (3): Xaa is C or S
XGXEEVIMPYVKLLLVRGNDFFLMSLSS

SEQ ID NO: 70194 - protein, 37 aa, Artificial Sequence; identical to SEQ ID NO: 23053
  Cyclic GFR-binding peptide
  MOD_RES (1), (33), (34): Xaa is C or S

SEQ ID NO: 70195 - protein, 34 aa, Artificial Sequence; identical to SEQ ID NO: 23054
  Cyclic GFR-binding peptide
  MOD_RES (2), (2): Xaa is C or S

SEQ ID NO: 70196 - protein, 34 aa, Artificial Sequence
  Cyclic GFR-binding peptide
  MOD_RES (29), (30): Xaa is C or S
VMEPYVKLVVKDYEDFFLMSLSSLETPVXXAKPI

SEQ ID NO: 70197 - protein, 33 aa, Artificial Sequence; identical to SEQ ID NO: 23055
  Cyclic GFR-binding peptide
  MOD_RES (1), (3): Xaa is C or S

SEQ ID NO: 70198 - protein, 25 aa, Artificial Sequence
  Cyclic GFR-binding peptide
MGEPYVKLTPVGMDDFFLVSLSSLK

SEQ ID NO: 70199 - protein, 31 aa, Artificial Sequence
  Cyclic GFR-binding peptide
ELHEELRPYVKLLKPKKRVYEFFLVSLSSHH

SEQ ID NO: 70200 - protein, 34 aa, Artificial Sequence
  Cyclic GFR-binding peptide
  MOD_RES (29), (30): Xaa is C or S
VMNPYVKLIVNSSDDFFLVSLSSLQTPAXXPKPV

SEQ ID NO: 70201 - protein, 23 aa, Artificial Sequence
  Cyclic GFR-binding peptide
VMNPYVKLIVNSSDDFFLVSLSS

SEQ ID NO: 70202 - protein, 32 aa, Artificial Sequence
  Cyclic GFR-binding peptide
  MOD_RES (27), (28): Xaa is C or S
NPYVKLIVNSSDDFFLVSLSSLQTPAXXPKPV

SEQ ID NO: 70203 - protein, 25 aa, Artificial Sequence
  Cyclic GFR-binding peptide
SMGEPYVKLTPVGMDDFFLVSLSSL

SEQ ID NO: 70204 - protein, 25 aa, Artificial Sequence
  Cyclic GFR-binding peptide
EPYVKLTPVGMDDFFLVSLSSLKTP

SEQ ID NO: 70205 - protein, 22 aa, Artificial Sequence
  Cyclic GFR-binding peptide
PYVKLVKPKRGVFFLISLSSLA

SEQ ID NO: 70206 - protein, 34 aa, Artificial Sequence; identical to SEQ ID NO: 23059
  Cyclic GFR-binding peptide
  MOD_RES (31), (32): Xaa is C or S

SEQ ID NO: 70207 - protein, 38 aa, Artificial Sequence; identical to SEQ ID NO: 23060
  Cyclic GFR-binding peptide
  MOD_RES (1), (3): Xaa is C or S

SEQ ID NO: 70208 - protein, 30 aa, Artificial Sequence
  Cyclic GFR-binding peptide
  MOD_RES (27), (28): Xaa is C or S
DPYVKLVVKENEDFFLMSLSSLETPVXXAK

SEQ ID NO: 70209 - protein, 42 aa, Artificial Sequence; identical to SEQ ID NO: 23061
  Cyclic GFR-binding peptide
  MOD_RES (1), (3), (37): Xaa is C or S

SEQ ID NO: 70210 - protein, 34 aa, Artificial Sequence
  Cyclic GFR-binding peptide
  MOD_RES (29), (30): Xaa is C or S
VIMPYVKLIKPTKGIFFLISLSSLDQSVXXPSAS

SEQ ID NO: 70211 - protein, 27 aa, Artificial Sequence
  Cyclic GFR-binding peptide
VMGPYVKLIIQQKDNFFLMSLSSMKTP

SEQ ID NO: 70212 - protein, 26 aa, Artificial Sequence
  Cyclic GFR-binding peptide
LRPYVKLLKPKKRVYEFFLVSLSSHH

SEQ ID NO: 70213 - protein, 33 aa, Artificial Sequence; identical to SEQ ID NO: 23062
  Cyclic GFR-binding peptide
  MOD_RES (1), (32), (33): Xaa is C or S

SEQ ID NO: 70214 - protein, 36 aa, Artificial Sequence; identical to SEQ ID NO: 23063
  Cyclic GFR-binding peptide
  MOD_RES (1), (1): Xaa is C or S

SEQ ID NO: 70215 - protein, 38 aa, Artificial Sequence; identical to SEQ ID NO: 23064
  Cyclic GFR-binding peptide
  MOD_RES (2), (34), (35): Xaa is C or S

SEQ ID NO: 70216 - protein, 33 aa, Artificial Sequence
  Cyclic GFR-binding peptide
  MOD_RES (27), (28): Xaa is C or S
NPYVKLIVNSSDDFFLVSLSSLQTPAXXPKPVT

SEQ ID NO: 70217 - protein, 38 aa, Artificial Sequence; identical to SEQ ID NO: 23065
  Cyclic GFR-binding peptide
  MOD_RES (1), (3), (36), (37): Xaa is C or S

SEQ ID NO: 70218 - protein, 30 aa, Artificial Sequence
  Cyclic GFR-binding peptide
  MOD_RES (26), (27): Xaa is C or S
PYVKLVVNNAADFFLISLSSLRAPVXXSAP

SEQ ID NO: 70219 - protein, 36 aa, Artificial Sequence; identical to SEQ ID NO: 23068
  Cyclic GFR-binding peptide
  MOD_RES (31), (32): Xaa is C or S

SEQ ID NO: 70220 - protein, 25 aa, Artificial Sequence
  Cyclic GFR-binding peptide
PYVKLVVNNASDFFLISLSSLRTPV

SEQ ID NO: 70221 - protein, 36 aa, Artificial Sequence
  Cyclic GFR-binding peptide
  MOD_RES (30), (30): Xaa is C or S
VVMNPYVKLIVNSSDDFFLVSLSSLKTPAXTPKTVH

SEQ ID NO: 70222 - protein, 33 aa, Artificial Sequence
  Cyclic GFR-binding peptide
  MOD_RES (30), (31): Xaa is C or S
VVMNPYVKLIVNNSSDFFLVSLSSLKTPAXXAK

SEQ ID NO: 70223 - protein, 36 aa, Artificial Sequence; identical to SEQ ID NO: 23074
  Cyclic GFR-binding peptide
  MOD_RES (31), (32): Xaa is C or S

SEQ ID NO: 70224 - protein, 27 aa, Artificial Sequence
  Cyclic GFR-binding peptide
VIMPYVKLLLVRGNDFFLMSLSSTKVP

SEQ ID NO: 70225 - protein, 25 aa, Artificial Sequence
  Cyclic GFR-binding peptide
EVVMEPYVKLVVKDYEDFFLMSLSS

SEQ ID NO: 70226 - protein, 33 aa, Artificial Sequence; identical to SEQ ID NO: 23071
  Cyclic GFR-binding peptide
  MOD_RES (1), (33): Xaa is C or S

SEQ ID NO: 70227 - protein, 33 aa, Artificial Sequence; identical to SEQ ID NO: 23072
  Cyclic GFR-binding peptide
  MOD_RES (1), (33): Xaa is C or S

SEQ ID NO: 70228 - protein, 34 aa, Artificial Sequence; identical to SEQ ID NO: 23073
  Cyclic GFR-binding peptide
  MOD_RES (31), (32): Xaa is C or S

SEQ ID NO: 70229 - protein, 32 aa, Artificial Sequence
  Cyclic GFR-binding peptide
  MOD_RES (29), (30): Xaa is C or S
VIMPYVKLLLVRGNDFFLMSLSSTKVPAXXTS

SEQ ID NO: 70230 - protein, 28 aa, Artificial Sequence
  Cyclic GFR-binding peptide
  MOD_RES (1), (1): Xaa is C or S
XSRVIMPYVKLVKPKRGVFFLISLSSLA

SEQ ID NO: 70231 - protein, 33 aa, Artificial Sequence
  Cyclic GFR-binding peptide
  MOD_RES (29), (29): Xaa is C or S
VMNPYVKLIVNSSDDFFLVSLSSLKTPAXTPKT

SEQ ID NO: 70232 - protein, 37 aa, Artificial Sequence; identical to SEQ ID NO: 23075
  Cyclic GFR-binding peptide
  MOD_RES (31), (32): Xaa is C or S

SEQ ID NO: 70233 - protein, 35 aa, Artificial Sequence; identical to SEQ ID NO: 23077
  Cyclic GFR-binding peptide
  MOD_RES (1), (33), (34): Xaa is C or S

SEQ ID NO: 70234 - protein, 29 aa, Artificial Sequence
  Cyclic GFR-binding peptide
RVIMPYVKLVKPKRGVFFLISLSSLAQPV

SEQ ID NO: 70235 - protein, 28 aa, Artificial Sequence
  Cyclic GFR-binding peptide
  MOD_RES (28), (28): Xaa is C or S
MNPYVKLIVNSSDDFFLVSLSSLQTPAX

SEQ ID NO: 70236 - protein, 32 aa, Artificial Sequence
  Cyclic GFR-binding peptide
  MOD_RES (29), (30): Xaa is C or S
VMGPYVKLIIQQKDNFFLMSLSSMKTPTXXPG

SEQ ID NO: 70237 - protein, 30 aa, Artificial Sequence
  Cyclic GFR-binding peptide
  MOD_RES (1), (3): Xaa is C or S
XGXGEVVMDPYVKLVVKENEDFFLMSLSSL

SEQ ID NO: 70238 - protein, 30 aa, Artificial Sequence
  Cyclic GFR-binding peptide
  MOD_RES (2), (4): Xaa is C or S
RXGXAEVVMDPYVKLVVNNAADFFLISLSS

SEQ ID NO: 70239 - protein, 32 aa, Artificial Sequence
  Cyclic GFR-binding peptide
  MOD_RES (2), (2): Xaa is C or S
GXESVAMGPYVKLYTVVGKDFFLISLSSLKTP

SEQ ID NO: 70240 - protein, 22 aa, Artificial Sequence
  Cyclic GFR-binding peptide
MPYVKLIKPTKGIFFLISLSSL

SEQ ID NO: 70241 - protein, 27 aa, Artificial Sequence
  Cyclic GFR-binding peptide
  MOD_RES (27), (27): Xaa is C or S
MPYVKLVKPTRGVFFLISLSSLDQPVX

SEQ ID NO: 70242 - protein, 23 aa, Artificial Sequence
  Cyclic GFR-binding peptide
PYVKLVKPKRGVFFLISLSSLAQ

SEQ ID NO: 70243 - protein, 32 aa, Artificial Sequence; identical to SEQ ID NO: 23079
  Cyclic GFR-binding peptide
  MOD_RES (32), (32): Xaa is C or S

SEQ ID NO: 70244 - protein, 31 aa, Artificial Sequence
  Cyclic GFR-binding peptide
  MOD_RES (30), (31): Xaa is C or S
VVMEPYVKLVVKDYEDFFLMSLSSLETPVXX

SEQ ID NO: 70245 - protein, 31 aa, Artificial Sequence; identical to SEQ ID NO: 23082
  Cyclic GFR-binding peptide
  MOD_RES (31), (31): Xaa is C or S

SEQ ID NO: 70246 - protein, 28 aa, Artificial Sequence
  Cyclic GFR-binding peptide
LFPYVKLHQGQHPKIRFFLMSLSSEETP

SEQ ID NO: 70247 - protein, 29 aa, Artificial Sequence
  Cyclic GFR-binding peptide
EAVSMGEPYVKLTPVGMDDFFLVSLSSLK

SEQ ID NO: 70248 - protein, 27 aa, Artificial Sequence
  Cyclic GFR-binding peptide
LFPYVKLHQGQHPKIRFFLMSLSSEET

SEQ ID NO: 70249 - protein, 28 aa, Artificial Sequence
  Cyclic GFR-binding peptide
EVVMDPYVKLVVKENEDFFLMSLSSLET

SEQ ID NO: 70250 - protein, 38 aa, Artificial Sequence; identical to SEQ ID NO: 23085
  Cyclic GFR-binding peptide
  MOD_RES (2), (4), (36), (37): Xaa is C or S

SEQ ID NO: 70251 - protein, 30 aa, Artificial Sequence
  Cyclic GFR-binding peptide
  MOD_RES (1), (3): Xaa is C or S
XGXAKVVMNPYVKLIVNNSSDFFLVSLSSL

SEQ ID NO: 70252 - protein, 31 aa, Artificial Sequence
  Cyclic GFR-binding peptide
  MOD_RES (27), (28): Xaa is C or S
DPYVKLVVNNASDFFLISLSSLRTPVXXTPP

SEQ ID NO: 70253 - protein, 42 aa, Artificial Sequence; identical to SEQ ID NO: 23086
  Cyclic GFR-binding peptide
  MOD_RES (2), (4), (38): Xaa is C or S

SEQ ID NO: 70254 - protein, 37 aa, Artificial Sequence; identical to SEQ ID NO: 23088
  Cyclic GFR-binding peptide
  MOD_RES (1), (35): Xaa is C or S

SEQ ID NO: 70255 - protein, 29 aa, Artificial Sequence
  Cyclic GFR-binding peptide
  MOD_RES (1), (3): Xaa is C or S
XGXSEVVMDPYVKLVVNNASDFFLISLSS

SEQ ID NO: 70256 - protein, 31 aa, Artificial Sequence; identical to SEQ ID NO: 23091
  Cyclic GFR-binding peptide

SEQ ID NO: 70257 - protein, 33 aa, Artificial Sequence
  Cyclic GFR-binding peptide
  MOD_RES (31), (31): Xaa is C or S
RPYVKLLKPKKRVYEFFLVSLSSHHVRSPQXKV

SEQ ID NO: 70258 - protein, 30 aa, Artificial Sequence; identical to SEQ ID NO: 23093
  Cyclic GFR-binding peptide

SEQ ID NO: 70259 - protein, 20 aa, Artificial Sequence
  Cyclic GFR-binding peptide
PYVKLIIQQKDNFFLMSLSS

SEQ ID NO: 70260 - protein, 32 aa, Artificial Sequence; identical to SEQ ID NO: 23095
  Cyclic GFR-binding peptide
  MOD_RES (1), (32): Xaa is C or S

SEQ ID NO: 70261 - protein, 37 aa, Artificial Sequence
  Cyclic GFR-binding peptide
  MOD_RES (32), (33): Xaa is C or S
AVSMGEPYVKLTPVGMDDFFLVSLSSLKTPVXXAKGV

SEQ ID NO: 70262 - protein, 25 aa, Artificial Sequence
  Cyclic GFR-binding peptide
VIMPYVKLVKPKRGVFFLISLSSLA

SEQ ID NO: 70263 - protein, 31 aa, Artificial Sequence
  Cyclic GFR-binding peptide
  MOD_RES (27), (28): Xaa is C or S
NPYVKLIVNSSDDFFLVSLSSLKTPAXXPKP

SEQ ID NO: 70264 - protein, 40 aa, Artificial Sequence; identical to SEQ ID NO: 23098
  Cyclic GFR-binding peptide
  MOD_RES (1), (3), (35), (36): Xaa is C or S

SEQ ID NO: 70265 - protein, 25 aa, Artificial Sequence
  Cyclic GFR-binding peptide
NPYVKLIVNSSDDFFLVSLSSLKTP

SEQ ID NO: 70266 - protein, 36 aa, Artificial Sequence; identical to SEQ ID NO: 23100
  Cyclic GFR-binding peptide
  MOD_RES (1), (3), (35), (36): Xaa is C or S

SEQ ID NO: 70267 - protein, 40 aa, Artificial Sequence; identical to SEQ ID NO: 23101
  Cyclic GFR-binding peptide
  MOD_RES (1), (3), (35), (36): Xaa is C or S

SEQ ID NO: 70268 - protein, 38 aa, Artificial Sequence; identical to SEQ ID NO: 23102
  Cyclic GFR-binding peptide
  MOD_RES (34), (34): Xaa is C or S

SEQ ID NO: 70269 - protein, 33 aa, Artificial Sequence; identical to SEQ ID NO: 23103
  Cyclic GFR-binding peptide
  MOD_RES (32), (33): Xaa is C or S

SEQ ID NO: 70270 - protein, 28 aa, Artificial Sequence
  Cyclic GFR-binding peptide
VMNPYVKLIVNSSDDFFLVSLSSLQTPA

SEQ ID NO: 70271 - protein, 29 aa, Artificial Sequence
  Cyclic GFR-binding peptide
EVVMDPYVKLVVKENEDFFLMSLSSLETP

SEQ ID NO: 70272 - protein, 27 aa, Artificial Sequence
  Cyclic GFR-binding peptide
VMNPYVKLIVNNSSDFFLVSLSSLKTP

SEQ ID NO: 70273 - protein, 32 aa, Artificial Sequence
  Cyclic GFR-binding peptide
  MOD_RES (1), (1): Xaa is C or S
XEAVSMGEPYVKLTPVGMDDFFLVSLSSLKTP

SEQ ID NO: 70274 - protein, 32 aa, Artificial Sequence
  Cyclic GFR-binding peptide
  MOD_RES (26), (27): Xaa is C or S
PYVKLTPVGMDDFFLVSLSSLKTPVXXAKGVK

SEQ ID NO: 70275 - protein, 32 aa, Artificial Sequence
  Cyclic GFR-binding peptide
  MOD_RES (2), (4): Xaa is C or S
SXKXSKVIMPYVKLIKPTKGIFFLISLSSLDQ

SEQ ID NO: 70276 - protein, 31 aa, Artificial Sequence
  Cyclic GFR-binding peptide
  MOD_RES (30), (31): Xaa is C or S
VVMGPYVKLIIQQKDNFFLMSLSSMKTPTXX

SEQ ID NO: 70277 - protein, 28 aa, Artificial Sequence
  Cyclic GFR-binding peptide
  MOD_RES (26), (27): Xaa is C or S
PYVKLVVKENEDFFLMSLSSLETPVXXA

SEQ ID NO: 70278 - protein, 39 aa, Artificial Sequence; identical to SEQ ID NO: 23106
  Cyclic GFR-binding peptide
  MOD_RES (2), (34), (35): Xaa is C or S

SEQ ID NO: 70279 - protein, 34 aa, Artificial Sequence
  Cyclic GFR-binding peptide
  MOD_RES (2), (4): Xaa is C or S
HXGXAKVVMNPYVKLIVNNSSDFFLVSLSSLKTP

SEQ ID NO: 70280 - protein, 32 aa, Artificial Sequence
  Cyclic GFR-binding peptide
  MOD_RES (2), (2): Xaa is C or S
AXELHEELRPYVKLLKPKKRVYEFFLVSLSSH

SEQ ID NO: 70281 - protein, 35 aa, Artificial Sequence; identical to SEQ ID NO: 23114
  Cyclic GFR-binding peptide
  MOD_RES (31), (32): Xaa is C or S

SEQ ID NO: 70282 - protein, 29 aa, Artificial Sequence
  Cyclic GFR-binding peptide
  MOD_RES (26), (27): Xaa is C or S
PYVKLIVNNSSDFFLVSLSSLKTPAXXAK

SEQ ID NO: 70283 - protein, 25 aa, Artificial Sequence
  Cyclic GFR-binding peptide
KVVMPYVKLVKPTRGVFFLISLSSL

SEQ ID NO: 70284 - protein, 29 aa, Artificial Sequence
  Cyclic GFR-binding peptide
EELRPYVKLLKPKKRVYEFFLVSLSSHHV

SEQ ID NO: 70285 - protein, 27 aa, Artificial Sequence
  Cyclic GFR-binding peptide
DVVMGPYVKLIIQQKDNFFLMSLSSMK

SEQ ID NO: 70286 - protein, 32 aa, Artificial Sequence
  Cyclic GFR-binding peptide
  MOD_RES (1), (3): Xaa is C or S
XEXKNHQLFPYVKLHQGQHPKIRFFLMSLSSE

SEQ ID NO: 70287 - protein, 35 aa, Artificial Sequence; identical to SEQ ID NO: 23117
  Cyclic GFR-binding peptide
  MOD_RES (2), (33), (34): Xaa is C or S

SEQ ID NO: 70288 - protein, 20 aa, Artificial Sequence
  Cyclic GFR-binding peptide
PYVKLIVNNSSDFFLVSLSS

SEQ ID NO: 70289 - protein, 31 aa, Artificial Sequence
  Cyclic GFR-binding peptide
  MOD_RES (26), (27): Xaa is C or S
PYVKLIVNSSDDFFLVSLSSLQTPAXXPKPV

SEQ ID NO: 70290 - protein, 38 aa, Artificial Sequence; identical to SEQ ID NO: 23118
  Cyclic GFR-binding peptide
  MOD_RES (2), (34), (35): Xaa is C or S

SEQ ID NO: 70291 - protein, 41 aa, Artificial Sequence; identical to SEQ ID NO: 23120
  Cyclic GFR-binding peptide
  MOD_RES (2), (36): Xaa is C or S

SEQ ID NO: 70292 - protein, 31 aa, Artificial Sequence
  Cyclic GFR-binding peptide
  MOD_RES (28), (29): Xaa is C or S
MDPYVKLVVNNASDFFLISLSSLRTPVXXTP

SEQ ID NO: 70293 - protein, 36 aa, Artificial Sequence
  Cyclic GFR-binding peptide
  MOD_RES (31), (32): Xaa is C or S
VSMGEPYVKLTPVGMDDFFLVSLSSLKTPVXXAKGV

SEQ ID NO: 70294 - protein, 37 aa, Artificial Sequence; identical to SEQ ID NO: 23122
  Cyclic GFR-binding peptide
  MOD_RES (2), (34), (35): Xaa is C or S

SEQ ID NO: 70295 - protein, 27 aa, Artificial Sequence
  Cyclic GFR-binding peptide
EVIMPYVKLLLVRGNDFFLMSLSSTKV

SEQ ID NO: 70296 - protein, 25 aa, Artificial Sequence
  Cyclic GFR-binding peptide
MNPYVKLIVNSSDDFFLVSLSSLKT

SEQ ID NO: 70297 - protein, 39 aa, Artificial Sequence; identical to SEQ ID NO: 23123
  Cyclic GFR-binding peptide
  MOD_RES (1), (3), (34), (35): Xaa is C or S

SEQ ID NO: 70298 - protein, 31 aa, Artificial Sequence
  Cyclic GFR-binding peptide
GEVVMDPYVKLVVKENEDFFLMSLSSLETPV

SEQ ID NO: 70299 - protein, 36 aa, Artificial Sequence; identical to SEQ ID NO: 23124
  Cyclic GFR-binding peptide
  MOD_RES (1), (32), (33): Xaa is C or S

SEQ ID NO: 70300 - protein, 33 aa, Artificial Sequence
  Cyclic GFR-binding peptide
  MOD_RES (27), (28): Xaa is C or S
MPYVKLIKPTKGIFFLISLSSLDQSVXXPSASA

SEQ ID NO: 70301 - protein, 36 aa, Artificial Sequence; identical to SEQ ID NO: 23127
  Cyclic GFR-binding peptide
  MOD_RES (2), (33), (34): Xaa is C or S

SEQ ID NO: 70302 - protein, 39 aa, Artificial Sequence; identical to SEQ ID NO: 23128
  Cyclic GFR-binding peptide
  MOD_RES (2), (4), (37), (38): Xaa is C or S

SEQ ID NO: 70303 - protein, 32 aa, Artificial Sequence
  Cyclic GFR-binding peptide
  MOD_RES (31), (31): Xaa is C or S
QLFPYVKLHQGQHPKIRFFLMSLSSEETPVXE

SEQ ID NO: 70304 - protein, 35 aa, Artificial Sequence; identical to SEQ ID NO: 23129
  Cyclic GFR-binding peptide
  MOD_RES (31), (32): Xaa is C or S

SEQ ID NO: 70305 - protein, 32 aa, Artificial Sequence
  Cyclic GFR-binding peptide
  MOD_RES (30), (31): Xaa is C or S
EVIMPYVKLLLVRGNDFFLMSLSSTKVPAXXT

SEQ ID NO: 70306 - protein, 38 aa, Artificial Sequence; identical to SEQ ID NO: 23130
  Cyclic GFR-binding peptide
  MOD_RES (2), (33), (34): Xaa is C or S

SEQ ID NO: 70307 - protein, 34 aa, Artificial Sequence; identical to SEQ ID NO: 23131
  Cyclic GFR-binding peptide
  MOD_RES (31), (32): Xaa is C or S

SEQ ID NO: 70308 - protein, 29 aa, Artificial Sequence
  Cyclic GFR-binding peptide
  MOD_RES (1), (3): Xaa is C or S
XKXSKVIMPYVKLIKPTKGIFFLISLSSL

SEQ ID NO: 70309 - protein, 26 aa, Artificial Sequence
  Cyclic GFR-binding peptide
  MOD_RES (26), (26): Xaa is C or S
PYVKLVVKDYEDFFLMSLSSLETPVX

SEQ ID NO: 70310 - protein, 36 aa, Artificial Sequence; identical to SEQ ID NO: 23132
  Cyclic GFR-binding peptide
  MOD_RES (2), (35), (36): Xaa is C or S

SEQ ID NO: 70311 - protein, 29 aa, Artificial Sequence
  Cyclic GFR-binding peptide
  MOD_RES (2), (4): Xaa is C or S
SXKXSKVVMPYVKLVKPTRGVFFLISLSS

SEQ ID NO: 70312 - protein, 36 aa, Artificial Sequence; identical to SEQ ID NO: 23133
  Cyclic GFR-binding peptide
  MOD_RES (1), (32), (33): Xaa is C or S

SEQ ID NO: 70313 - protein, 35 aa, Artificial Sequence; identical to SEQ ID NO: 23137
  Cyclic GFR-binding peptide
  MOD_RES (2), (35): Xaa is C or S

SEQ ID NO: 70314 - protein, 38 aa, Artificial Sequence; identical to SEQ ID NO: 23138
  Cyclic GFR-binding peptide
  MOD_RES (2), (4), (36), (37): Xaa is C or S

SEQ ID NO: 70315 - protein, 30 aa, Artificial Sequence
  Cyclic GFR-binding peptide
  MOD_RES (28), (29): Xaa is C or S
GEPYVKLTPVGMDDFFLVSLSSLKTPVXXA

SEQ ID NO: 70316 - protein, 33 aa, Artificial Sequence; identical to SEQ ID NO: 23140
  Cyclic GFR-binding peptide

SEQ ID NO: 70317 - protein, 41 aa, Artificial Sequence; identical to SEQ ID NO: 23141
  Cyclic GFR-binding peptide
  MOD_RES (1), (35): Xaa is C or S

SEQ ID NO: 70318 - protein, 31 aa, Artificial Sequence
  Cyclic GFR-binding peptide
  MOD_RES (28), (29): Xaa is C or S
IMPYVKLIKPTKGIFFLISLSSLDQSVXXPS

SEQ ID NO: 70319 - protein, 41 aa, Artificial Sequence
  Cyclic GFR-binding peptide
  MOD_RES (2), (4), (36), (37): Xaa is C or S
RXGXGEVVMDPYVKLVVKENEDFFLMSLSSLETPVXXAKPI

SEQ ID NO: 70320 - protein, 31 aa, Artificial Sequence
  Cyclic GFR-binding peptide
  MOD_RES (28), (29): Xaa is C or S
MGPYVKLYTVVGKDFFLISLSSLKTPVXXAK

SEQ ID NO: 70321 - protein, 37 aa, Artificial Sequence
  Cyclic GFR-binding peptide
  MOD_RES (1), (33), (34): Xaa is C or S
XGEVVMDPYVKLVVKENEDFFLMSLSSLETPVXXAKP

SEQ ID NO: 70322 - protein, 26 aa, Artificial Sequence
  Cyclic GFR-binding peptide
GPYVKLYTVVGKDFFLISLSSLKTPV

SEQ ID NO: 70323 - protein, 39 aa, Artificial Sequence; identical to SEQ ID NO: 23143
  Cyclic GFR-binding peptide
  MOD_RES (2), (33), (34): Xaa is C or S

SEQ ID NO: 70324 - protein, 24 aa, Artificial Sequence
  Cyclic GFR-binding peptide
VVMDPYVKLVVKENEDFFLMSLSS

SEQ ID NO: 70325 - protein, 22 aa, Artificial Sequence
  Cyclic GFR-binding peptide
GEPYVKLTPVGMDDFFLVSLSS

SEQ ID NO: 70326 - protein, 36 aa, Artificial Sequence; identical to SEQ ID NO: 23145
  Cyclic GFR-binding peptide
  MOD_RES (32), (33): Xaa is C or S

SEQ ID NO: 70327 - protein, 37 aa, Artificial Sequence; identical to SEQ ID NO: 23146
  Cyclic GFR-binding peptide
  MOD_RES (31), (32): Xaa is C or S

SEQ ID NO: 70328 - protein, 30 aa, Artificial Sequence
  Cyclic GFR-binding peptide
AKVVMNPYVKLIVNNSSDFFLVSLSSLKTP

SEQ ID NO: 70329 - protein, 23 aa, Artificial Sequence
  Cyclic GFR-binding peptide
PYVKLVVNNAADFFLISLSSLRA

SEQ ID NO: 70330 - protein, 26 aa, Artificial Sequence
  Cyclic GFR-binding peptide
DPYVKLVVNNASDFFLISLSSLRTPV

SEQ ID NO: 70331 - protein, 30 aa, Artificial Sequence; identical to SEQ ID NO: 23147
  Cyclic GFR-binding peptide

SEQ ID NO: 70332 - protein, 25 aa, Artificial Sequence
  Cyclic GFR-binding peptide
PYVKLIKPTKGIFFLISLSSLDQSV

SEQ ID NO: 70333 - protein, 32 aa, Artificial Sequence; identical to SEQ ID NO: 23148
  Cyclic GFR-binding peptide
  MOD_RES (31), (32): Xaa is C or S

SEQ ID NO: 70334 - protein, 36 aa, Artificial Sequence; identical to SEQ ID NO: 23149
  Cyclic GFR-binding peptide
  MOD_RES (31), (31): Xaa is C or S

SEQ ID NO: 70335 - protein, 33 aa, Artificial Sequence; identical to SEQ ID NO: 23150
  Cyclic GFR-binding peptide
  MOD_RES (2), (2): Xaa is C or S

SEQ ID NO: 70336 - protein, 39 aa, Artificial Sequence; identical to SEQ ID NO: 23154
  Cyclic GFR-binding peptide
  MOD_RES (1), (33), (34): Xaa is C or S

SEQ ID NO: 70337 - protein, 35 aa, Artificial Sequence; identical to SEQ ID NO: 23156
  Cyclic GFR-binding peptide
  MOD_RES (1), (33), (34): Xaa is C or S

SEQ ID NO: 70338 - protein, 37 aa, Artificial Sequence
  Cyclic GFR-binding peptide
  MOD_RES (34), (34): Xaa is C or S
EELRPYVKLLKPKKRVYEFFLVSLSSHHVRSPQXKVS

SEQ ID NO: 70339 - protein, 32 aa, Artificial Sequence
  Cyclic GFR-binding peptide
  MOD_RES (1), (3): Xaa is C or S
XKXSKVIMPYVKLIKPTKGIFFLISLSSLDQS

SEQ ID NO: 70340 - protein, 38 aa, Artificial Sequence; identical to SEQ ID NO: 23155
  Cyclic GFR-binding peptide
  MOD_RES (2), (34), (35): Xaa is C or S

SEQ ID NO: 70341 - protein, 30 aa, Artificial Sequence
  Cyclic GFR-binding peptide
  MOD_RES (26), (27): Xaa is C or S
PYVKLIIQQKDNFFLMSLSSMKTPTXXPGA

SEQ ID NO: 70342 - protein, 22 aa, Artificial Sequence
  Cyclic GFR-binding peptide
PYVKLIIQQKDNFFLMSLSSMK

SEQ ID NO: 70343 - protein, 38 aa, Artificial Sequence; identical to SEQ ID NO: 23158
  Cyclic GFR-binding peptide
  MOD_RES (32), (33): Xaa is C or S

SEQ ID NO: 70344 - protein, 24 aa, Artificial Sequence
  Cyclic GFR-binding peptide
PYVKLVVKENEDFFLMSLSSLETP

SEQ ID NO: 70345 - protein, 33 aa, Artificial Sequence
  Cyclic GFR-binding peptide
  MOD_RES (1), (3): Xaa is C or S
XGXESVAMGPYVKLYTVVGKDFFLISLSSLKTP

SEQ ID NO: 70346 - protein, 32 aa, Artificial Sequence; identical to SEQ ID NO: 23159
  Cyclic GFR-binding peptide
  MOD_RES (32), (32): Xaa is C or S

SEQ ID NO: 70347 - protein, 37 aa, Artificial Sequence; identical to SEQ ID NO: 23160
  Cyclic GFR-binding peptide
  MOD_RES (2), (4), (35), (36): Xaa is C or S

SEQ ID NO: 70348 - protein, 43 aa, Artificial Sequence; identical to SEQ ID NO: 23161
  Cyclic GFR-binding peptide
  MOD_RES (2), (4), (41): Xaa is C or S

SEQ ID NO: 70349 - protein, 32 aa, Artificial Sequence
  Cyclic GFR-binding peptide
  MOD_RES (30), (30): Xaa is C or S
VVMNPYVKLIVNSSDDFFLVSLSSLKTPAXTP

SEQ ID NO: 70350 - protein, 29 aa, Artificial Sequence
  Cyclic GFR-binding peptide
AAAAAAAAAPYVKLIVNSSDDFFLVSLSS

SEQ ID NO: 70351 - protein, 35 aa, Artificial Sequence
  Cyclic GFR-binding peptide
  MOD_RES (29), (30): Xaa is C or S
VMNPYVKLIVNNSSDFFLVSLSSLKTPAXXAKPVA

SEQ ID NO: 70352 - protein, 28 aa, Artificial Sequence
  Cyclic GFR-binding peptide
  MOD_RES (1), (1): Xaa is C or S
XAKVVMNPYVKLIVNNSSDFFLVSLSSL

SEQ ID NO: 70353 - protein, 30 aa, Artificial Sequence
  Cyclic GFR-binding peptide
  MOD_RES (29), (30): Xaa is C or S
VIMPYVKLIKPTKGIFFLISLSSLDQSVXX

SEQ ID NO: 70354 - protein, 31 aa, Artificial Sequence
  Cyclic GFR-binding peptide
  MOD_RES (26), (27): Xaa is C or S
PYVKLVVKDYEDFFLMSLSSLETPVXXAKPI

SEQ ID NO: 70355 - protein, 39 aa, Artificial Sequence
  Cyclic GFR-binding peptide
  MOD_RES (1), (33), (34): Xaa is C or S
XGEVVMDPYVKLVVKENEDFFLMSLSSLETPVXXAKPIK

SEQ ID NO: 70356 - protein, 33 aa, Artificial Sequence
  Cyclic GFR-binding peptide
  MOD_RES (29), (30): Xaa is C or S
VMEPYVKLVVKDYEDFFLMSLSSLETPVXXAKP

SEQ ID NO: 70357 - protein, 25 aa, Artificial Sequence
  Cyclic GFR-binding peptide
PYVKLVVKENEDFFLMSLSSLETPV

SEQ ID NO: 70358 - protein, 28 aa, Artificial Sequence
  Cyclic GFR-binding peptide
  MOD_RES (2), (2): Xaa is C or S
GXEEVIMPYVKLLLVRGNDFFLMSLSST

SEQ ID NO: 70359 - protein, 25 aa, Artificial Sequence
  Cyclic GFR-binding peptide
DVVMGPYVKLIIQQKDNFFLMSLSS

SEQ ID NO: 70360 - protein, 34 aa, Artificial Sequence
  Cyclic GFR-binding peptide
  MOD_RES (29), (30): Xaa is C or S
VMNPYVKLIVNSSDDFFLVSLSSLKTPAXXPKPV

SEQ ID NO: 70361 - protein, 32 aa, Artificial Sequence
  Cyclic GFR-binding peptide
  MOD_RES (2), (4): Xaa is C or S
SXKXSRVIMPYVKLVKPKRGVFFLISLSSLAQ

SEQ ID NO: 70362 - protein, 26 aa, Artificial Sequence
  Cyclic GFR-binding peptide
SKVIMPYVKLIKPTKGIFFLISLSSL

SEQ ID NO: 70363 - protein, 30 aa, Artificial Sequence
  Cyclic GFR-binding peptide
HQLFPYVKLHQGQHPKIRFFLMSLSSEETP

SEQ ID NO: 70364 - protein, 34 aa, Artificial Sequence
  Cyclic GFR-binding peptide
  MOD_RES (34), (34): Xaa is C or S
EELRPYVKLLKPKKRVYEFFLVSLSSHHVRSPQX

SEQ ID NO: 70365 - protein, 21 aa, Artificial Sequence
  Cyclic GFR-binding peptide
MPYVKLLLVRGNDFFLMSLSS

SEQ ID NO: 70366 - protein, 33 aa, Artificial Sequence; identical to SEQ ID NO: 23167
  Cyclic GFR-binding peptide
  MOD_RES (2), (33): Xaa is C or S

SEQ ID NO: 70367 - protein, 36 aa, Artificial Sequence
  Cyclic GFR-binding peptide
  MOD_RES (32), (33): Xaa is C or S
GEVVMDPYVKLVVKENEDFFLMSLSSLETPVXXAKP

SEQ ID NO: 70368 - protein, 25 aa, Artificial Sequence
  Cyclic GFR-binding peptide
EVIMPYVKLLLVRGNDFFLMSLSST

SEQ ID NO: 70369 - protein, 34 aa, Artificial Sequence
  Cyclic GFR-binding peptide
  MOD_RES (30), (30): Xaa is C or S
PYVKLLKPKKRVYEFFLVSLSSHHVRSPQXKVSS

SEQ ID NO: 70370 - protein, 30 aa, Artificial Sequence
  Cyclic GFR-binding peptide
  MOD_RES (30), (30): Xaa is C or S
KVIMPYVKLIKPTKGIFFLISLSSLDQSVX

SEQ ID NO: 70371 - protein, 25 aa, Artificial Sequence
  Cyclic GFR-binding peptide
IMPYVKLIKPTKGIFFLISLSSLDQ

SEQ ID NO: 70372 - protein, 32 aa, Artificial Sequence
  Cyclic GFR-binding peptide
  MOD_RES (26), (27): Xaa is C or S
PYVKLVVNNASDFFLISLSSLRTPVXXTPPTS

SEQ ID NO: 70373 - protein, 31 aa, Artificial Sequence
  Cyclic GFR-binding peptide
NHQLFPYVKLHQGQHPKIRFFLMSLSSEETP

SEQ ID NO: 70374 - protein, 26 aa, Artificial Sequence
  Cyclic GFR-binding peptide
SVAMGPYVKLYTVVGKDFFLISLSSL

SEQ ID NO: 70375 - protein, 25 aa, Artificial Sequence
  Cyclic GFR-binding peptide
VIMPYVKLIKPTKGIFFLISLSSLD

SEQ ID NO: 70376 - protein, 27 aa, Artificial Sequence
  Cyclic GFR-binding peptide
  MOD_RES (26), (27): Xaa is C or S
PYVKLVVNNAADFFLISLSSLRAPVXX

SEQ ID NO: 70377 - protein, 31 aa, Artificial Sequence; identical to SEQ ID NO: 23173
  Cyclic GFR-binding peptide
  MOD_RES (31), (31): Xaa is C or S

SEQ ID NO: 70378 - protein, 41 aa, Artificial Sequence; identical to SEQ ID NO: 23175
  Cyclic GFR-binding peptide
  MOD_RES (1), (3), (35), (36): Xaa is C or S

SEQ ID NO: 70379 - protein, 25 aa, Artificial Sequence
  Cyclic GFR-binding peptide
VIMPYVKLLLVRGNDFFLMSLSSTK

SEQ ID NO: 70380 - protein, 39 aa, Artificial Sequence; identical to SEQ ID NO: 23176
  Cyclic GFR-binding peptide
  MOD_RES (2), (4), (36), (37): Xaa is C or S

SEQ ID NO: 70381 - protein, 30 aa, Artificial Sequence
  Cyclic GFR-binding peptide
  MOD_RES (29), (30): Xaa is C or S
MGEPYVKLTPVGMDDFFLVSLSSLKTPVXX

SEQ ID NO: 70382 - protein, 40 aa, Artificial Sequence; identical to SEQ ID NO: 23177
  Cyclic GFR-binding peptide
  MOD_RES (2), (36): Xaa is C or S

SEQ ID NO: 70383 - protein, 30 aa, Artificial Sequence
  Cyclic GFR-binding peptide
  MOD_RES (2), (4): Xaa is C or S
RXGXSEVVMDPYVKLVVNNASDFFLISLSS

SEQ ID NO: 70384 - protein, 34 aa, Artificial Sequence
  Cyclic GFR-binding peptide
  MOD_RES (2), (4): Xaa is C or S
AXAXELHEELRPYVKLLKPKKRVYEFFLVSLSSH

SEQ ID NO: 70385 - protein, 37 aa, Artificial Sequence; identical to SEQ ID NO: 23180
  Cyclic GFR-binding peptide
  MOD_RES (32), (33): Xaa is C or S

SEQ ID NO: 70386 - protein, 34 aa, Artificial Sequence
  Cyclic GFR-binding peptide
  MOD_RES (2), (4): Xaa is C or S
RXGXAEVVMDPYVKLVVNNAADFFLISLSSLRAP

SEQ ID NO: 70387 - protein, 35 aa, Artificial Sequence
  Cyclic GFR-binding peptide
  MOD_RES (31), (32): Xaa is C or S
EVVMDPYVKLVVKENEDFFLMSLSSLETPVXXAKP

SEQ ID NO: 70388 - protein, 40 aa, Artificial Sequence; identical to SEQ ID NO: 23183
  Cyclic GFR-binding peptide
  MOD_RES (1), (3), (40): Xaa is C or S

SEQ ID NO: 70389 - protein, 36 aa, Artificial Sequence; identical to SEQ ID NO: 23182
  Cyclic GFR-binding peptide
  MOD_RES (1), (33), (34): Xaa is C or S

SEQ ID NO: 70390 - protein, 31 aa, Artificial Sequence
  Cyclic GFR-binding peptide
  MOD_RES (28), (29): Xaa is C or S
MNPYVKLIVNSSDDFFLVSLSSLQTPAXXPK

SEQ ID NO: 70391 - protein, 31 aa, Artificial Sequence
  Cyclic GFR-binding peptide
  MOD_RES (30), (31): Xaa is C or S
VVMNPYVKLIVNNSSDFFLVSLSSLKTPAXX

SEQ ID NO: 70392 - protein, 40 aa, Artificial Sequence
  Cyclic GFR-binding peptide
  MOD_RES (2), (4), (36), (37): Xaa is C or S
RXGXGEVVMDPYVKLVVKENEDFFLMSLSSLETPVXXAKP

SEQ ID NO: 70393 - protein, 39 aa, Artificial Sequence; identical to SEQ ID NO: 23188
  Cyclic GFR-binding peptide
  MOD_RES (1), (3), (35), (36): Xaa is C or S

SEQ ID NO: 70394 - protein, 41 aa, Artificial Sequence; identical to SEQ ID NO: 23189
  Cyclic GFR-binding peptide
  MOD_RES (2), (4), (36), (37): Xaa is C or S

SEQ ID NO: 70395 - protein, 43 aa, Artificial Sequence; identical to SEQ ID NO: 23190
  Cyclic GFR-binding peptide
  MOD_RES (2), (4), (38): Xaa is C or S

SEQ ID NO: 70396 - protein, 35 aa, Artificial Sequence; identical to SEQ ID NO: 23191
  Cyclic GFR-binding peptide
  MOD_RES (2), (34): Xaa is C or S

SEQ ID NO: 70397 - protein, 23 aa, Artificial Sequence
  Cyclic GFR-binding peptide
PYVKLVKPTRGVFFLISLSSLDQ

SEQ ID NO: 70398 - protein, 25 aa, Artificial Sequence
  Cyclic GFR-binding peptide
MDPYVKLVVKENEDFFLMSLSSLET

SEQ ID NO: 70399 - protein, 32 aa, Artificial Sequence
  Cyclic GFR-binding peptide
  MOD_RES (30), (31): Xaa is C or S
VVMNPYVKLIVNSSDDFFLVSLSSLKTPAXXP

SEQ ID NO: 70400 - protein, 30 aa, Artificial Sequence
  Cyclic GFR-binding peptide
  MOD_RES (29), (30): Xaa is C or S
VMNPYVKLIVNSSDDFFLVSLSSLQTPAXX

SEQ ID NO: 70401 - protein, 21 aa, Artificial Sequence
  Cyclic GFR-binding peptide
PYVKLIVNNSSDFFLVSLSSL

SEQ ID NO: 70402 - protein, 24 aa, Artificial Sequence
  Cyclic GFR-binding peptide
VVMDPYVKLVVNNAADFFLISLSS

SEQ ID NO: 70403 - protein, 36 aa, Artificial Sequence; identical to SEQ ID NO: 23194
  Cyclic GFR-binding peptide
  MOD_RES (2), (4), (36): Xaa is C or S

SEQ ID NO: 70404 - protein, 31 aa, Artificial Sequence
  Cyclic GFR-binding peptide
  MOD_RES (28), (29): Xaa is C or S
MEPYVKLVVKDYEDFFLMSLSSLETPVXXAK

SEQ ID NO: 70405 - protein, 34 aa, Artificial Sequence
  Cyclic GFR-binding peptide
  MOD_RES (30), (31): Xaa is C or S
VVMDPYVKLVVNNAADFFLISLSSLRAPVXXSAP

SEQ ID NO: 70406 - protein, 38 aa, Artificial Sequence; identical to SEQ ID NO: 23195
  Cyclic GFR-binding peptide
  MOD_RES (2), (4), (36), (37): Xaa is C or S

SEQ ID NO: 70407 - protein, 30 aa, Artificial Sequence
  Cyclic GFR-binding peptide
  MOD_RES (1), (1): Xaa is C or S
XSRVIMPYVKLVKPKRGVFFLISLSSLAQP

SEQ ID NO: 70408 - protein, 34 aa, Artificial Sequence; identical to SEQ ID NO: 23197
  Cyclic GFR-binding peptide
  MOD_RES (1), (3): Xaa is C or S

SEQ ID NO: 70409 - protein, 37 aa, Artificial Sequence; identical to SEQ ID NO: 23198
  Cyclic GFR-binding peptide
  MOD_RES (2), (4), (36), (37): Xaa is C or S

SEQ ID NO: 70410 - protein, 37 aa, Artificial Sequence; identical to SEQ ID NO: 23199
  Cyclic GFR-binding peptide
  MOD_RES (2), (34), (35): Xaa is C or S

SEQ ID NO: 70411 - protein, 37 aa, Artificial Sequence
  Cyclic GFR-binding peptide
  MOD_RES (31), (31): Xaa is C or S
QLFPYVKLHQGQHPKIRFFLMSLSSEETPVXELGEDN

SEQ ID NO: 70412 - protein, 33 aa, Artificial Sequence
  Cyclic GFR-binding peptide
  MOD_RES (2), (4): Xaa is C or S
HXGXAKVVMNPYVKLIVNNSSDFFLVSLSSLKT

SEQ ID NO: 70413 - protein, 28 aa, Artificial Sequence
  Cyclic GFR-binding peptide
  MOD_RES (26), (27): Xaa is C or S
PYVKLVKPTRGVFFLISLSSLDQPVXXP

SEQ ID NO: 70414 - protein, 29 aa, Artificial Sequence
  Cyclic GFR-binding peptide
  MOD_RES (26), (27): Xaa is C or S
PYVKLYTVVGKDFFLISLSSLKTPVXXAK

SEQ ID NO: 70415 - protein, 39 aa, Artificial Sequence; identical to SEQ ID NO: 23203
  Cyclic GFR-binding peptide
  MOD_RES (2), (33), (34): Xaa is C or S

SEQ ID NO: 70416 - protein, 38 aa, Artificial Sequence; identical to SEQ ID NO: 23204
  Cyclic GFR-binding peptide
  MOD_RES (1), (33), (34): Xaa is C or S

SEQ ID NO: 70417 - protein, 27 aa, Artificial Sequence
  Cyclic GFR-binding peptide
GEVVMDPYVKLVVKENEDFFLMSLSSL

SEQ ID NO: 70418 - protein, 28 aa, Artificial Sequence
  Cyclic GFR-binding peptide
VVMNPYVKLIVNNSSDFFLVSLSSLKTP

SEQ ID NO: 70419 - protein, 33 aa, Artificial Sequence
  Cyclic GFR-binding peptide
  MOD_RES (2), (4): Xaa is C or S
SXKXSKVVMPYVKLVKPTRGVFFLISLSSLDQP

SEQ ID NO: 70420 - protein, 33 aa, Artificial Sequence
  Cyclic GFR-binding peptide
  MOD_RES (30), (31): Xaa is C or S
VVMEPYVKLVVKDYEDFFLMSLSSLETPVXXAK

SEQ ID NO: 70421 - protein, 33 aa, Artificial Sequence
  Cyclic GFR-binding peptide
  MOD_RES (32), (33): Xaa is C or S
AVSMGEPYVKLTPVGMDDFFLVSLSSLKTPVXX

SEQ ID NO: 70422 - protein, 34 aa, Artificial Sequence
  Cyclic GFR-binding peptide
  MOD_RES (29), (30): Xaa is C or S
MGEPYVKLTPVGMDDFFLVSLSSLKTPVXXAKGV

SEQ ID NO: 70423 - protein, 41 aa, Artificial Sequence; identical to SEQ ID NO: 23207
  Cyclic GFR-binding peptide
  MOD_RES (2), (35), (36): Xaa is C or S

SEQ ID NO: 70424 - protein, 31 aa, Artificial Sequence
  Cyclic GFR-binding peptide
  MOD_RES (2), (2): Xaa is C or S
GXEAVSMGEPYVKLTPVGMDDFFLVSLSSLK

SEQ ID NO: 70425 - protein, 27 aa, Artificial Sequence
  Cyclic GFR-binding peptide
GEVVMEPYVKLVVKDYEDFFLMSLSSL

SEQ ID NO: 70426 - protein, 30 aa, Artificial Sequence
  Cyclic GFR-binding peptide
  MOD_RES (26), (26): Xaa is C or S
PYVKLIVNSSDDFFLVSLSSLKTPAXTPKT

SEQ ID NO: 70427 - protein, 34 aa, Artificial Sequence; identical to SEQ ID NO: 23209
  Cyclic GFR-binding peptide
  MOD_RES (2), (4): Xaa is C or S

SEQ ID NO: 70428 - protein, 33 aa, Artificial Sequence
  Cyclic GFR-binding peptide
  MOD_RES (27), (28): Xaa is C or S
GPYVKLIIQQKDNFFLMSLSSMKTPTXXPGASG

SEQ ID NO: 70429 - protein, 30 aa, Artificial Sequence
  Cyclic GFR-binding peptide
  MOD_RES (27), (28): Xaa is C or S
MPYVKLVKPTRGVFFLISLSSLDQPVXXPS

SEQ ID NO: 70430 - protein, 30 aa, Artificial Sequence
  Cyclic GFR-binding peptide
AEVVMDPYVKLVVNNAADFFLISLSSLRAP

SEQ ID NO: 70431 - protein, 41 aa, Artificial Sequence; identical to SEQ ID NO: 23213
  Cyclic GFR-binding peptide
  MOD_RES (2), (39): Xaa is C or S

SEQ ID NO: 70432 - protein, 30 aa, Artificial Sequence
  Cyclic GFR-binding peptide
  MOD_RES (2), (4): Xaa is C or S
SXGXRDVVMGPYVKLIIQQKDNFFLMSLSS

SEQ ID NO: 70433 - protein, 28 aa, Artificial Sequence
  Cyclic GFR-binding peptide
  MOD_RES (2), (2): Xaa is C or S
KXSKVIMPYVKLIKPTKGIFFLISLSSL

SEQ ID NO: 70434 - protein, 34 aa, Artificial Sequence
  Cyclic GFR-binding peptide
  MOD_RES (30), (31): Xaa is C or S
VAMGPYVKLYTVVGKDFFLISLSSLKTPVXXAKS

SEQ ID NO: 70435 - protein, 32 aa, Artificial Sequence
  Cyclic GFR-binding peptide
  MOD_RES (29), (30): Xaa is C or S
VIMPYVKLVKPKRGVFFLISLSSLAQPVXXPA

SEQ ID NO: 70436 - protein, 29 aa, Artificial Sequence
  Cyclic GFR-binding peptide
  MOD_RES (28), (29): Xaa is C or S
MNPYVKLIVNSSDDFFLVSLSSLQTPAXX

SEQ ID NO: 70437 - protein, 29 aa, Artificial Sequence
  Cyclic GFR-binding peptide
EVIMPYVKLLLVRGNDFFLMSLSSTKVPA

SEQ ID NO: 70438 - protein, 32 aa, Artificial Sequence; identical to SEQ ID NO: 23214
  Cyclic GFR-binding peptide
  MOD_RES (32), (32): Xaa is C or S

SEQ ID NO: 70439 - protein, 33 aa, Artificial Sequence
  Cyclic GFR-binding peptide
  MOD_RES (1), (3): Xaa is C or S
XAXELHEELRPYVKLLKPKKRVYEFFLVSLSSH

SEQ ID NO: 70440 - protein, 34 aa, Artificial Sequence; identical to SEQ ID NO: 23215
  Cyclic GFR-binding peptide
  MOD_RES (1), (3): Xaa is C or S

SEQ ID NO: 70441 - protein, 31 aa, Artificial Sequence
  Cyclic GFR-binding peptide
  MOD_RES (31), (31): Xaa is C or S
QLFPYVKLHQGQHPKIRFFLMSLSSEETPVX

SEQ ID NO: 70442 - protein, 34 aa, Artificial Sequence
  Cyclic GFR-binding peptide
  MOD_RES (28), (29): Xaa is C or S
MDPYVKLVVKENEDFFLMSLSSLETPVXXAKPIK

SEQ ID NO: 70443 - protein, 30 aa, Artificial Sequence; identical to SEQ ID NO: 1807
  Cyclic GFR-binding peptide

SEQ ID NO: 70444 - protein, 26 aa, Artificial Sequence
  Cyclic GFR-binding peptide
SRVIMPYVKLVKPKRGVFFLISLSSL

SEQ ID NO: 70445 - protein, 23 aa, Artificial Sequence
  Cyclic GFR-binding peptide
AMGPYVKLYTVVGKDFFLISLSS

SEQ ID NO: 70446 - protein, 37 aa, Artificial Sequence; identical to SEQ ID NO: 23219
  Cyclic GFR-binding peptide
  MOD_RES (2), (33), (34): Xaa is C or S

SEQ ID NO: 70447 - protein, 27 aa, Artificial Sequence
  Cyclic GFR-binding peptide
  MOD_RES (26), (27): Xaa is C or S
PYVKLVKPTRGVFFLISLSSLDQPVXX

SEQ ID NO: 70448 - protein, 25 aa, Artificial Sequence
  Cyclic GFR-binding peptide
VMNPYVKLIVNNSSDFFLVSLSSLK

SEQ ID NO: 70449 - protein, 30 aa, Artificial Sequence
  Cyclic GFR-binding peptide
  MOD_RES (1), (1): Xaa is C or S
XEEVIMPYVKLLLVRGNDFFLMSLSSTKVP

SEQ ID NO: 70450 - protein, 29 aa, Artificial Sequence
  Cyclic GFR-binding peptide
  MOD_RES (2), (2): Xaa is C or S
KXSKVVMPYVKLVKPTRGVFFLISLSSLD

SEQ ID NO: 70451 - protein, 32 aa, Artificial Sequence
  Cyclic GFR-binding peptide
  MOD_RES (2), (4): Xaa is C or S
SXKXSKVVMPYVKLVKPTRGVFFLISLSSLDQ

SEQ ID NO: 70452 - protein, 22 aa, Artificial Sequence
  Cyclic GFR-binding peptide
MEPYVKLVVKDYEDFFLMSLSS

SEQ ID NO: 70453 - protein, 24 aa, Artificial Sequence
  Cyclic GFR-binding peptide
PYVKLHQGQHPKIRFFLMSLSSEE

SEQ ID NO: 70454 - protein, 27 aa, Artificial Sequence
  Cyclic GFR-binding peptide
  MOD_RES (1), (1): Xaa is C or S
XSKVVMPYVKLVKPTRGVFFLISLSSL

SEQ ID NO: 70455 - protein, 35 aa, Artificial Sequence
  Cyclic GFR-binding peptide
  MOD_RES (29), (30): Xaa is C or S
VMDPYVKLVVNNASDFFLISLSSLRTPVXXTPPTS

SEQ ID NO: 70456 - protein, 34 aa, Artificial Sequence; identical to SEQ ID NO: 23222
  Cyclic GFR-binding peptide
  MOD_RES (1), (32), (33): Xaa is C or S

SEQ ID NO: 70457 - protein, 27 aa, Artificial Sequence
  Cyclic GFR-binding peptide
MDPYVKLVVKENEDFFLMSLSSLETPV

SEQ ID NO: 70458 - protein, 25 aa, Artificial Sequence
  Cyclic GFR-binding peptide
MGPYVKLIIQQKDNFFLMSLSSMKT

SEQ ID NO: 70459 - protein, 36 aa, Artificial Sequence; identical to SEQ ID NO: 23223
  Cyclic GFR-binding peptide
  MOD_RES (32), (33): Xaa is C or S

SEQ ID NO: 70460 - protein, 33 aa, Artificial Sequence
  Cyclic GFR-binding peptide
  MOD_RES (29), (30): Xaa is C or S
VMDPYVKLVVNNAADFFLISLSSLRAPVXXSAP

SEQ ID NO: 70461 - protein, 32 aa, Artificial Sequence; identical to SEQ ID NO: 23225
  Cyclic GFR-binding peptide
  MOD_RES (2), (2): Xaa is C or S

SEQ ID NO: 70462 - protein, 38 aa, Artificial Sequence; identical to SEQ ID NO: 23228
  Cyclic GFR-binding peptide
  MOD_RES (1), (3), (37): Xaa is C or S

SEQ ID NO: 70463 - protein, 29 aa, Artificial Sequence
  Cyclic GFR-binding peptide
  MOD_RES (29), (29): Xaa is C or S
VMGPYVKLIIQQKDNFFLMSLSSMKTPTX

SEQ ID NO: 70464 - protein, 38 aa, Artificial Sequence; identical to SEQ ID NO: 23227
  Cyclic GFR-binding peptide
  MOD_RES (1), (3), (35), (36): Xaa is C or S

SEQ ID NO: 70465 - protein, 36 aa, Artificial Sequence
  Cyclic GFR-binding peptide
  MOD_RES (31), (31): Xaa is C or S
QLFPYVKLHQGQHPKIRFFLMSLSSEETPVXELGED

SEQ ID NO: 70466 - protein, 31 aa, Artificial Sequence
  Cyclic GFR-binding peptide
  MOD_RES (26), (27): Xaa is C or S
PYVKLVVKENEDFFLMSLSSLETPVXXAKPI

SEQ ID NO: 70467 - protein, 40 aa, Artificial Sequence; identical to SEQ ID NO: 23232
  Cyclic GFR-binding peptide
  MOD_RES (2), (4), (36), (37): Xaa is C or S

SEQ ID NO: 70468 - protein, 30 aa, Artificial Sequence
  Cyclic GFR-binding peptide
RDVVMGPYVKLIIQQKDNFFLMSLSSMKTP

SEQ ID NO: 70469 - protein, 31 aa, Artificial Sequence
  Cyclic GFR-binding peptide
  MOD_RES (28), (29): Xaa is C or S
IMPYVKLVKPKRGVFFLISLSSLAQPVXXPA

SEQ ID NO: 70470 - protein, 24 aa, Artificial Sequence
  Cyclic GFR-binding peptide
VMEPYVKLVVKDYEDFFLMSLSSL

SEQ ID NO: 70471 - protein, 34 aa, Artificial Sequence
  Cyclic GFR-binding peptide
  MOD_RES (30), (31): Xaa is C or S
KVVMPYVKLVKPTRGVFFLISLSSLDQPVXXPSA

SEQ ID NO: 70472 - protein, 32 aa, Artificial Sequence
  Cyclic GFR-binding peptide
  MOD_RES (30), (31): Xaa is C or S
KVVMPYVKLVKPTRGVFFLISLSSLDQPVXXP

SEQ ID NO: 70473 - protein, 38 aa, Artificial Sequence; identical to SEQ ID NO: 23237
  Cyclic GFR-binding peptide
  MOD_RES (1), (3), (34), (35): Xaa is C or S

SEQ ID NO: 70474 - protein, 29 aa, Artificial Sequence
  Cyclic GFR-binding peptide
AAAAAAAAAPYVKLVKPKRGVFFLISLSS

SEQ ID NO: 70475 - protein, 33 aa, Artificial Sequence
  Cyclic GFR-binding peptide
ELHEELRPYVKLLKPKKRVYEFFLVSLSSHHVR

SEQ ID NO: 70476 - protein, 37 aa, Artificial Sequence; identical to SEQ ID NO: 23239
  Cyclic GFR-binding peptide
  MOD_RES (32), (33): Xaa is C or S

SEQ ID NO: 70477 - protein, 34 aa, Artificial Sequence; identical to SEQ ID NO: 23240
  Cyclic GFR-binding peptide
  MOD_RES (2), (4): Xaa is C or S

SEQ ID NO: 70478 - protein, 29 aa, Artificial Sequence
  Cyclic GFR-binding peptide
  MOD_RES (28), (29): Xaa is C or S
MDPYVKLVVNNAADFFLISLSSLRAPVXX

SEQ ID NO: 70479 - protein, 28 aa, Artificial Sequence
  Cyclic GFR-binding peptide
VVMGPYVKLIIQQKDNFFLMSLSSMKTP

SEQ ID NO: 70480 - protein, 31 aa, Artificial Sequence
  Cyclic GFR-binding peptide
  MOD_RES (30), (31): Xaa is C or S
VVMDPYVKLVVKENEDFFLMSLSSLETPVXX

SEQ ID NO: 70481 - protein, 29 aa, Artificial Sequence
  Cyclic GFR-binding peptide
AAAAAAAAAPYVKLVKPTRGVFFLISLSS

SEQ ID NO: 70482 - protein, 38 aa, Artificial Sequence; identical to SEQ ID NO: 23241
  Cyclic GFR-binding peptide
  MOD_RES (2), (4), (38): Xaa is C or S

SEQ ID NO: 70483 - protein, 25 aa, Artificial Sequence
  Cyclic GFR-binding peptide
PYVKLLKPKKRVYEFFLVSLSSHHV

SEQ ID NO: 70484 - protein, 29 aa, Artificial Sequence
  Cyclic GFR-binding peptide
  MOD_RES (27), (28): Xaa is C or S
MPYVKLIKPTKGIFFLISLSSLDQSVXXP

SEQ ID NO: 70485 - protein, 36 aa, Artificial Sequence; identical to SEQ ID NO: 23244
  Cyclic GFR-binding peptide
  MOD_RES (1), (33): Xaa is C or S

SEQ ID NO: 70486 - protein, 37 aa, Artificial Sequence; identical to SEQ ID NO: 23246
  Cyclic GFR-binding peptide
  MOD_RES (35), (35): Xaa is C or S

SEQ ID NO: 70487 - protein, 28 aa, Artificial Sequence
  Cyclic GFR-binding peptide
  MOD_RES (26), (27): Xaa is C or S
PYVKLVVKDYEDFFLMSLSSLETPVXXA

SEQ ID NO: 70488 - protein, 28 aa, Artificial Sequence
  Cyclic GFR-binding peptide
RVVMNPYVKLIVNSSDDFFLVSLSSLQT

SEQ ID NO: 70489 - protein, 33 aa, Artificial Sequence
  Cyclic GFR-binding peptide
  MOD_RES (28), (28): Xaa is C or S
PYVKLHQGQHPKIRFFLMSLSSEETPVXELGED

SEQ ID NO: 70490 - protein, 29 aa, Artificial Sequence
  Cyclic GFR-binding peptide
AAAAAAAAAPYVKLTPVGMDDFFLVSLSS

SEQ ID NO: 70491 - protein, 31 aa, Artificial Sequence; identical to SEQ ID NO: 23248
  Cyclic GFR-binding peptide
  MOD_RES (31), (31): Xaa is C or S

SEQ ID NO: 70492 - protein, 37 aa, Artificial Sequence; identical to SEQ ID NO: 23249
  Cyclic GFR-binding peptide
  MOD_RES (2), (34), (35): Xaa is C or S

SEQ ID NO: 70493 - protein, 29 aa, Artificial Sequence
  Cyclic GFR-binding peptide
  MOD_RES (26), (27): Xaa is C or S
PYVKLVVNNASDFFLISLSSLRTPVXXTP

SEQ ID NO: 70494 - protein, 32 aa, Artificial Sequence
  Cyclic GFR-binding peptide
  MOD_RES (2), (2): Xaa is C or S
GXEAVSMGEPYVKLTPVGMDDFFLVSLSSLKT

SEQ ID NO: 70495 - protein, 28 aa, Artificial Sequence
  Cyclic GFR-binding peptide
  MOD_RES (1), (1): Xaa is C or S
XRDVVMGPYVKLIIQQKDNFFLMSLSSM

SEQ ID NO: 70496 - protein, 31 aa, Artificial Sequence
  Cyclic GFR-binding peptide
AAAAAAAAAPYVKLHQGQHPKIRFFLMSLSS

SEQ ID NO: 70497 - protein, 21 aa, Artificial Sequence
  Cyclic GFR-binding peptide
PYVKLLLVRGNDFFLMSLSST

SEQ ID NO: 70498 - protein, 38 aa, Artificial Sequence; identical to SEQ ID NO: 23253
  Cyclic GFR-binding peptide
  MOD_RES (2), (4), (37), (38): Xaa is C or S

SEQ ID NO: 70499 - protein, 29 aa, Artificial Sequence
  Cyclic GFR-binding peptide
AAAAAAAAAPYVKLVVNKNEDFFLISLSS

SEQ ID NO: 70500 - protein, 25 aa, Artificial Sequence
  Cyclic GFR-binding peptide
KVVMNPYVKLIVNNSSDFFLVSLSS

SEQ ID NO: 70501 - protein, 33 aa, Artificial Sequence
  Cyclic GFR-binding peptide
  MOD_RES (2), (4): Xaa is C or S
SXGXRDVVMGPYVKLIIQQKDNFFLMSLSSMKT

SEQ ID NO: 70502 - protein, 33 aa, Artificial Sequence; identical to SEQ ID NO: 23255
  Cyclic GFR-binding peptide
  MOD_RES (31), (32): Xaa is C or S

SEQ ID NO: 70503 - protein, 26 aa, Artificial Sequence
  Cyclic GFR-binding peptide
MPYVKLVKPKRGVFFLISLSSLAQPV

SEQ ID NO: 70504 - protein, 42 aa, Artificial Sequence; identical to SEQ ID NO: 23259
  Cyclic GFR-binding peptide
  MOD_RES (2), (4), (36), (37): Xaa is C or S

SEQ ID NO: 70505 - protein, 30 aa, Artificial Sequence
  Cyclic GFR-binding peptide
KNHQLFPYVKLHQGQHPKIRFFLMSLSSEE

SEQ ID NO: 70506 - protein, 29 aa, Artificial Sequence
  Cyclic GFR-binding peptide
SKVVMPYVKLVKPTRGVFFLISLSSLDQP

SEQ ID NO: 70507 - protein, 33 aa, Artificial Sequence
  Cyclic GFR-binding peptide
  MOD_RES (1), (3): Xaa is C or S
XGXGEVVMDPYVKLVVKENEDFFLMSLSSLETP

SEQ ID NO: 70508 - protein, 30 aa, Artificial Sequence
  Cyclic GFR-binding peptide
VSMGEPYVKLTPVGMDDFFLVSLSSLKTPV

SEQ ID NO: 70509 - protein, 37 aa, Artificial Sequence; identical to SEQ ID NO: 23262
  Cyclic GFR-binding peptide
  MOD_RES (1), (3), (35), (36): Xaa is C or S

SEQ ID NO: 70510 - protein, 28 aa, Artificial Sequence
  Cyclic GFR-binding peptide
VVMNPYVKLIVNSSDDFFLVSLSSLQTP

SEQ ID NO: 70511 - protein, 37 aa, Artificial Sequence; identical to SEQ ID NO: 23264
  Cyclic GFR-binding peptide
  MOD_RES (31), (32): Xaa is C or S

SEQ ID NO: 70512 - protein, 31 aa, Artificial Sequence
  Cyclic GFR-binding peptide
  MOD_RES (29), (30): Xaa is C or S
VVMPYVKLVKPTRGVFFLISLSSLDQPVXXP

SEQ ID NO: 70513 - protein, 31 aa, Artificial Sequence
  Cyclic GFR-binding peptide
  MOD_RES (29), (30): Xaa is C or S
MGEPYVKLTPVGMDDFFLVSLSSLKTPVXXA

SEQ ID NO: 70514 - protein, 38 aa, Artificial Sequence; identical to SEQ ID NO: 23266
  Cyclic GFR-binding peptide
  MOD_RES (2), (4), (36), (37): Xaa is C or S

SEQ ID NO: 70515 - protein, 31 aa, Artificial Sequence
  Cyclic GFR-binding peptide
  MOD_RES (26), (27): Xaa is C or S
PYVKLVKPKRGVFFLISLSSLAQPVXXPAAS

SEQ ID NO: 70516 - protein, 22 aa, Artificial Sequence
  Cyclic GFR-binding peptide
IMPYVKLIKPTKGIFFLISLSS

SEQ ID NO: 70517 - protein, 28 aa, Artificial Sequence
  Cyclic GFR-binding peptide
  MOD_RES (1), (1): Xaa is C or S
XEEVIMPYVKLLLVRGNDFFLMSLSSTK

SEQ ID NO: 70518 - protein, 29 aa, Artificial Sequence
  Cyclic GFR-binding peptide
  MOD_RES (26), (27): Xaa is C or S
PYVKLVVKENEDFFLMSLSSLETPVXXAK

SEQ ID NO: 70519 - protein, 31 aa, Artificial Sequence
  Cyclic GFR-binding peptide
  MOD_RES (28), (29): Xaa is C or S
IMPYVKLLLVRGNDFFLMSLSSTKVPAXXTS

SEQ ID NO: 70520 - protein, 33 aa, Artificial Sequence
  Cyclic GFR-binding peptide
  MOD_RES (1), (3): Xaa is C or S
XGXAKVVMNPYVKLIVNNSSDFFLVSLSSLKTP

SEQ ID NO: 70521 - protein, 25 aa, Artificial Sequence
  Cyclic GFR-binding peptide
VMDPYVKLVVNNAADFFLISLSSLR

SEQ ID NO: 70522 - protein, 32 aa, Artificial Sequence
  Cyclic GFR-binding peptide
  MOD_RES (1), (3): Xaa is C or S
XGXAKVVMNPYVKLIVNNSSDFFLVSLSSLKT

SEQ ID NO: 70523 - protein, 24 aa, Artificial Sequence
  Cyclic GFR-binding peptide
PYVKLVKPTRGVFFLISLSSLDQP

SEQ ID NO: 70524 - protein, 29 aa, Artificial Sequence
  Cyclic GFR-binding peptide
  MOD_RES (2), (4): Xaa is C or S
SXKXSKVIMPYVKLIKPTKGIFFLISLSS

SEQ ID NO: 70525 - protein, 29 aa, Artificial Sequence
  Cyclic GFR-binding peptide
VVMNPYVKLIVNSSDDFFLVSLSSLQTPA

SEQ ID NO: 70526 - protein, 27 aa, Artificial Sequence
  Cyclic GFR-binding peptide
  MOD_RES (26), (27): Xaa is C or S
PYVKLIKPTKGIFFLISLSSLDQSVXX

SEQ ID NO: 70527 - protein, 32 aa, Artificial Sequence; identical to SEQ ID NO: 23273
  Cyclic GFR-binding peptide
  MOD_RES (1), (32): Xaa is C or S

SEQ ID NO: 70528 - protein, 28 aa, Artificial Sequence
  Cyclic GFR-binding peptide
RPYVKLLKPKKRVYEFFLVSLSSHHVRS

SEQ ID NO: 70529 - protein, 27 aa, Artificial Sequence
  Cyclic GFR-binding peptide
  MOD_RES (1), (1): Xaa is C or S
XGEVVMDPYVKLVVKENEDFFLMSLSS

SEQ ID NO: 70530 - protein, 28 aa, Artificial Sequence
  Cyclic GFR-binding peptide
MGEPYVKLTPVGMDDFFLVSLSSLKTPV

SEQ ID NO: 70531 - protein, 32 aa, Artificial Sequence
  Cyclic GFR-binding peptide
  MOD_RES (26), (27): Xaa is C or S
PYVKLVVKDYEDFFLMSLSSLETPVXXAKPIS

SEQ ID NO: 70532 - protein, 24 aa, Artificial Sequence
  Cyclic GFR-binding peptide
VMNPYVKLIVNSSDDFFLVSLSSL

SEQ ID NO: 70533 - protein, 23 aa, Artificial Sequence
  Cyclic GFR-binding peptide
EPYVKLVVKDYEDFFLMSLSSLE

SEQ ID NO: 70534 - protein, 32 aa, Artificial Sequence; identical to SEQ ID NO: 23278
  Cyclic GFR-binding peptide
  MOD_RES (31), (32): Xaa is C or S

SEQ ID NO: 70535 - protein, 37 aa, Artificial Sequence; identical to SEQ ID NO: 23279
  Cyclic GFR-binding peptide
  MOD_RES (2), (33), (34): Xaa is C or S

SEQ ID NO: 70536 - protein, 35 aa, Artificial Sequence; identical to SEQ ID NO: 23281
  Cyclic GFR-binding peptide
  MOD_RES (2), (4): Xaa is C or S

SEQ ID NO: 70537 - protein, 29 aa, Artificial Sequence
  Cyclic GFR-binding peptide
VVMNPYVKLIVNSSDDFFLVSLSSLKTPA

SEQ ID NO: 70538 - protein, 26 aa, Artificial Sequence
  Cyclic GFR-binding peptide
EVVMDPYVKLVVNNASDFFLISLSSL

SEQ ID NO: 70539 - protein, 25 aa, Artificial Sequence
  Cyclic GFR-binding peptide
VMDPYVKLVVKENEDFFLMSLSSLE

SEQ ID NO: 70540 - protein, 32 aa, Artificial Sequence; identical to SEQ ID NO: 23282
  Cyclic GFR-binding peptide
  MOD_RES (1), (1): Xaa is C or S

SEQ ID NO: 70541 - protein, 31 aa, Artificial Sequence; identical to SEQ ID NO: 23284
  Cyclic GFR-binding peptide

SEQ ID NO: 70542 - protein, 33 aa, Artificial Sequence; identical to SEQ ID NO: 23285
  Cyclic GFR-binding peptide
  MOD_RES (31), (32): Xaa is C or S

SEQ ID NO: 70543 - protein, 26 aa, Artificial Sequence
  Cyclic GFR-binding peptide
VAMGPYVKLYTVVGKDFFLISLSSLK

SEQ ID NO: 70544 - protein, 24 aa, Artificial Sequence
  Cyclic GFR-binding peptide
AMGPYVKLYTVVGKDFFLISLSSL

SEQ ID NO: 70545 - protein, 26 aa, Artificial Sequence
  Cyclic GFR-binding peptide
MPYVKLVKPTRGVFFLISLSSLDQPV

SEQ ID NO: 70546 - protein, 32 aa, Artificial Sequence
  Cyclic GFR-binding peptide
  MOD_RES (30), (31): Xaa is C or S
VVMEPYVKLVVKDYEDFFLMSLSSLETPVXXA

SEQ ID NO: 70547 - protein, 31 aa, Artificial Sequence
  Cyclic GFR-binding peptide
  MOD_RES (29), (30): Xaa is C or S
VMEPYVKLVVKDYEDFFLMSLSSLETPVXXA

SEQ ID NO: 70548 - protein, 27 aa, Artificial Sequence
  Cyclic GFR-binding peptide
ELRPYVKLLKPKKRVYEFFLVSLSSHH

SEQ ID NO: 70549 - protein, 30 aa, Artificial Sequence
  Cyclic GFR-binding peptide
  MOD_RES (28), (29): Xaa is C or S
VMPYVKLVKPTRGVFFLISLSSLDQPVXXP

SEQ ID NO: 70550 - protein, 29 aa, Artificial Sequence
  Cyclic GFR-binding peptide
  MOD_RES (2), (2): Xaa is C or S
GXAEVVMDPYVKLVVNNAADFFLISLSSL

SEQ ID NO: 70551 - protein, 27 aa, Artificial Sequence
  Cyclic GFR-binding peptide
SKVIMPYVKLIKPTKGIFFLISLSSLD

SEQ ID NO: 70552 - protein, 36 aa, Artificial Sequence
  Cyclic GFR-binding peptide
  MOD_RES (32), (33): Xaa is C or S
AVSMGEPYVKLTPVGMDDFFLVSLSSLKTPVXXAKG

SEQ ID NO: 70553 - protein, 26 aa, Artificial Sequence
  Cyclic GFR-binding peptide
EPYVKLTPVGMDDFFLVSLSSLKTPV

SEQ ID NO: 70554 - protein, 27 aa, Artificial Sequence
  Cyclic GFR-binding peptide
  MOD_RES (1), (1): Xaa is C or S
XSEVVMDPYVKLVVNNASDFFLISLSS

SEQ ID NO: 70555 - protein, 36 aa, Artificial Sequence; identical to SEQ ID NO: 23291
  Cyclic GFR-binding peptide
  MOD_RES (2), (33), (34): Xaa is C or S

SEQ ID NO: 70556 - protein, 24 aa, Artificial Sequence
  Cyclic GFR-binding peptide
GEPYVKLTPVGMDDFFLVSLSSLK

SEQ ID NO: 70557 - protein, 29 aa, Artificial Sequence
  Cyclic GFR-binding peptide
PYVKLLKPKKRVYEFFLVSLSSHHVRSPQ

SEQ ID NO: 70558 - protein, 24 aa, Artificial Sequence
  Cyclic GFR-binding peptide
VMDPYVKLVVNNASDFFLISLSSL

SEQ ID NO: 70559 - protein, 24 aa, Artificial Sequence
  Cyclic GFR-binding peptide
EPYVKLVVKDYEDFFLMSLSSLET

SEQ ID NO: 70560 - protein, 29 aa, Artificial Sequence
  Cyclic GFR-binding peptide
HEELRPYVKLLKPKKRVYEFFLVSLSSHH

SEQ ID NO: 70561 - protein, 28 aa, Artificial Sequence
  Cyclic GFR-binding peptide
VVMDPYVKLVVNNASDFFLISLSSLRTP

SEQ ID NO: 70562 - protein, 28 aa, Artificial Sequence
  Cyclic GFR-binding peptide
  MOD_RES (2), (2): Xaa is C or S
GXSEVVMDPYVKLVVNNASDFFLISLSS

SEQ ID NO: 70563 - protein, 32 aa, Artificial Sequence
  Cyclic GFR-binding peptide
  MOD_RES (30), (31): Xaa is C or S
VVMDPYVKLVVNNAADFFLISLSSLRAPVXXS

SEQ ID NO: 70564 - protein, 30 aa, Artificial Sequence
  Cyclic GFR-binding peptide
GEVVMEPYVKLVVKDYEDFFLMSLSSLETP

SEQ ID NO: 70565 - protein, 20 aa, Artificial Sequence
  Cyclic GFR-binding peptide
PYVKLTPVGMDDFFLVSLSS

SEQ ID NO: 70566 - protein, 33 aa, Artificial Sequence; identical to SEQ ID NO: 23294
  Cyclic GFR-binding peptide
  MOD_RES (2), (33): Xaa is C or S

SEQ ID NO: 70567 - protein, 33 aa, Artificial Sequence
  Cyclic GFR-binding peptide
  MOD_RES (1), (3): Xaa is C or S
XGXAEVVMDPYVKLVVNNAADFFLISLSSLRAP

SEQ ID NO: 70568 - protein, 36 aa, Artificial Sequence; identical to SEQ ID NO: 23295
  Cyclic GFR-binding peptide
  MOD_RES (1), (3), (34), (35): Xaa is C or S

SEQ ID NO: 70569 - protein, 28 aa, Artificial Sequence
  Cyclic GFR-binding peptide
GEVVMEPYVKLVVKDYEDFFLMSLSSLE

SEQ ID NO: 70570 - protein, 39 aa, Artificial Sequence; identical to SEQ ID NO: 23296
  Cyclic GFR-binding peptide
  MOD_RES (1), (33), (34): Xaa is C or S

SEQ ID NO: 70571 - protein, 33 aa, Artificial Sequence; identical to SEQ ID NO: 23297
  Cyclic GFR-binding peptide
  MOD_RES (1), (33): Xaa is C or S

SEQ ID NO: 70572 - protein, 23 aa, Artificial Sequence
  Cyclic GFR-binding peptide
RPYVKLLKPKKRVYEFFLVSLSS

SEQ ID NO: 70573 - protein, 35 aa, Artificial Sequence; identical to SEQ ID NO: 23298
  Cyclic GFR-binding peptide
  MOD_RES (2), (4): Xaa is C or S

SEQ ID NO: 70574 - protein, 28 aa, Artificial Sequence
  Cyclic GFR-binding peptide
  MOD_RES (28), (28): Xaa is C or S
MDPYVKLVVNNASDFFLISLSSLRTPVX

SEQ ID NO: 70575 - protein, 31 aa, Artificial Sequence
  Cyclic GFR-binding peptide
  MOD_RES (29), (30): Xaa is C or S
VIMPYVKLVKPKRGVFFLISLSSLAQPVXXP

SEQ ID NO: 70576 - protein, 26 aa, Artificial Sequence
  Cyclic GFR-binding peptide
MDPYVKLVVNNAADFFLISLSSLRAP

SEQ ID NO: 70577 - protein, 32 aa, Artificial Sequence
  Cyclic GFR-binding peptide
  MOD_RES (26), (27): Xaa is C or S
PYVKLIVNSSDDFFLVSLSSLKTPAXXPKPVY

SEQ ID NO: 70578 - protein, 32 aa, Artificial Sequence
  Cyclic GFR-binding peptide
  MOD_RES (1), (3): Xaa is C or S
XGXESVAMGPYVKLYTVVGKDFFLISLSSLKT

SEQ ID NO: 70579 - protein, 39 aa, Artificial Sequence; identical to SEQ ID NO: 23301
  Cyclic GFR-binding peptide
  MOD_RES (2), (4), (35), (36): Xaa is C or S

SEQ ID NO: 70580 - protein, 31 aa, Artificial Sequence
  Cyclic GFR-binding peptide
  MOD_RES (2), (2): Xaa is C or S
GXEEVIMPYVKLLLVRGNDFFLMSLSSTKVP

SEQ ID NO: 70581 - protein, 22 aa, Artificial Sequence
  Cyclic GFR-binding peptide
PYVKLIVNSSDDFFLVSLSSLQ

SEQ ID NO: 70582 - protein, 35 aa, Artificial Sequence; identical to SEQ ID NO: 23302
  Cyclic GFR-binding peptide
  MOD_RES (32), (33): Xaa is C or S

SEQ ID NO: 70583 - protein, 32 aa, Artificial Sequence
  Cyclic GFR-binding peptide
  MOD_RES (2), (2): Xaa is C or S
GXSRVVMNPYVKLIVNSSDDFFLVSLSSLKTP

SEQ ID NO: 70584 - protein, 36 aa, Artificial Sequence; identical to SEQ ID NO: 23303
  Cyclic GFR-binding peptide
  MOD_RES (1), (3), (34), (35): Xaa is C or S

SEQ ID NO: 70585 - protein, 26 aa, Artificial Sequence
  Cyclic GFR-binding peptide
HQLFPYVKLHQGQHPKIRFFLMSLSS

SEQ ID NO: 70586 - protein, 38 aa, Artificial Sequence; identical to SEQ ID NO: 23304
  Cyclic GFR-binding peptide
  MOD_RES (2), (34), (35): Xaa is C or S

SEQ ID NO: 70587 - protein, 33 aa, Artificial Sequence
  Cyclic GFR-binding peptide
  MOD_RES (2), (4): Xaa is C or S
HXGXSRVVMNPYVKLIVNSSDDFFLVSLSSLKT

SEQ ID NO: 70588 - protein, 21 aa, Artificial Sequence
  Cyclic GFR-binding peptide
DPYVKLVVNNASDFFLISLSS

SEQ ID NO: 70589 - protein, 27 aa, Artificial Sequence
  Cyclic GFR-binding peptide
MDPYVKLVVNNAADFFLISLSSLRAPV

SEQ ID NO: 70590 - protein, 32 aa, Artificial Sequence
  Cyclic GFR-binding peptide
  MOD_RES (1), (3): Xaa is C or S
XGXGEVVMEPYVKLVVKDYEDFFLMSLSSLET

SEQ ID NO: 70591 - protein, 37 aa, Artificial Sequence; identical to SEQ ID NO: 23308
  Cyclic GFR-binding peptide
  MOD_RES (1), (32), (33): Xaa is C or S

SEQ ID NO: 70592 - protein, 37 aa, Artificial Sequence; identical to SEQ ID NO: 23307
  Cyclic GFR-binding peptide
  MOD_RES (2), (34), (35): Xaa is C or S

SEQ ID NO: 70593 - protein, 34 aa, Artificial Sequence; identical to SEQ ID NO: 23309
  Cyclic GFR-binding peptide
  MOD_RES (32), (33): Xaa is C or S

SEQ ID NO: 70594 - protein, 36 aa, Artificial Sequence; identical to SEQ ID NO: 23310
  Cyclic GFR-binding peptide
  MOD_RES (2), (34): Xaa is C or S

SEQ ID NO: 70595 - protein, 32 aa, Artificial Sequence
  Cyclic GFR-binding peptide
  MOD_RES (1), (3): Xaa is C or S
XGXAEVVMDPYVKLVVNNAADFFLISLSSLRA

SEQ ID NO: 70596 - protein, 30 aa, Artificial Sequence
  Cyclic GFR-binding peptide
  MOD_RES (2), (4): Xaa is C or S
SXKXSKVIMPYVKLIKPTKGIFFLISLSSL

SEQ ID NO: 70597 - protein, 39 aa, Artificial Sequence; identical to SEQ ID NO: 23312
  Cyclic GFR-binding peptide
  MOD_RES (1), (3), (35), (36): Xaa is C or S

SEQ ID NO: 70598 - protein, 40 aa, Artificial Sequence; identical to SEQ ID NO: 23313
  Cyclic GFR-binding peptide
  MOD_RES (2), (39): Xaa is C or S

SEQ ID NO: 70599 - protein, 31 aa, Artificial Sequence
  Cyclic GFR-binding peptide
  MOD_RES (30), (31): Xaa is C or S
VVMDPYVKLVVNNASDFFLISLSSLRTPVXX

SEQ ID NO: 70600 - protein, 33 aa, Artificial Sequence
  Cyclic GFR-binding peptide
  MOD_RES (1), (3): Xaa is C or S
XGXGEVVMEPYVKLVVKDYEDFFLMSLSSLETP

SEQ ID NO: 70601 - protein, 28 aa, Artificial Sequence
  Cyclic GFR-binding peptide
  MOD_RES (28), (28): Xaa is C or S
MDPYVKLVVKENEDFFLMSLSSLETPVX

SEQ ID NO: 70602 - protein, 31 aa, Artificial Sequence
  Cyclic GFR-binding peptide
  MOD_RES (27), (28): Xaa is C or S
MPYVKLLLVRGNDFFLMSLSSTKVPAXXTSP

SEQ ID NO: 70603 - protein, 31 aa, Artificial Sequence
  Cyclic GFR-binding peptide
  MOD_RES (1), (3): Xaa is C or S
XEXKNHQLFPYVKLHQGQHPKIRFFLMSLSS

SEQ ID NO: 70604 - protein, 28 aa, Artificial Sequence
  Cyclic GFR-binding peptide
VMGPYVKLIIQQKDNFFLMSLSSMKTPT

SEQ ID NO: 70605 - protein, 27 aa, Artificial Sequence
  Cyclic GFR-binding peptide
  MOD_RES (26), (27): Xaa is C or S
PYVKLVKPKRGVFFLISLSSLAQPVXX

SEQ ID NO: 70606 - protein, 31 aa, Artificial Sequence; identical to SEQ ID NO: 23318
  Cyclic GFR-binding peptide

SEQ ID NO: 70607 - protein, 45 aa, Artificial Sequence; identical to SEQ ID NO: 23319
  Cyclic GFR-binding peptide
  MOD_RES (2), (4), (41): Xaa is C or S

SEQ ID NO: 70608 - protein, 20 aa, Artificial Sequence
  Cyclic GFR-binding peptide
PYVKLYTVVGKDFFLISLSS

SEQ ID NO: 70609 - protein, 33 aa, Artificial Sequence
  Cyclic GFR-binding peptide
  MOD_RES (2), (2): Xaa is C or S
GXEAVSMGEPYVKLTPVGMDDFFLVSLSSLKTP

SEQ ID NO: 70610 - protein, 26 aa, Artificial Sequence
  Cyclic GFR-binding peptide
  MOD_RES (26), (26): Xaa is C or S
PYVKLTPVGMDDFFLVSLSSLKTPVX

SEQ ID NO: 70611 - protein, 30 aa, Artificial Sequence
  Cyclic GFR-binding peptide
  MOD_RES (30), (30): Xaa is C or S
KVVMPYVKLVKPTRGVFFLISLSSLDQPVX

SEQ ID NO: 70612 - protein, 27 aa, Artificial Sequence
  Cyclic GFR-binding peptide
  MOD_RES (27), (27): Xaa is C or S
GPYVKLYTVVGKDFFLISLSSLKTPVX

SEQ ID NO: 70613 - protein, 35 aa, Artificial Sequence
  Cyclic GFR-binding peptide
  MOD_RES (2), (4): Xaa is C or S
AXAXELHEELRPYVKLLKPKKRVYEFFLVSLSSHH

SEQ ID NO: 70614 - protein, 32 aa, Artificial Sequence
  Cyclic GFR-binding peptide
  MOD_RES (27), (28): Xaa is C or S
MPYVKLVKPKRGVFFLISLSSLAQPVXXPAAS

SEQ ID NO: 70615 - protein, 31 aa, Artificial Sequence
  Cyclic GFR-binding peptide
  MOD_RES (29), (30): Xaa is C or S
VMDPYVKLVVNNAADFFLISLSSLRAPVXXS

SEQ ID NO: 70616 - protein, 32 aa, Artificial Sequence
  Cyclic GFR-binding peptide
  MOD_RES (2), (2): Xaa is C or S
GXGEVVMEPYVKLVVKDYEDFFLMSLSSLETP

SEQ ID NO: 70617 - protein, 29 aa, Artificial Sequence
  Cyclic GFR-binding peptide
  MOD_RES (28), (29): Xaa is C or S
IMPYVKLIKPTKGIFFLISLSSLDQSVXX

SEQ ID NO: 70618 - protein, 32 aa, Artificial Sequence
  Cyclic GFR-binding peptide
  MOD_RES (1), (3): Xaa is C or S
XAXELHEELRPYVKLLKPKKRVYEFFLVSLSS

SEQ ID NO: 70619 - protein, 32 aa, Artificial Sequence
  Cyclic GFR-binding peptide
  MOD_RES (2), (4): Xaa is C or S
RXGXAEVVMDPYVKLVVNNAADFFLISLSSLR

SEQ ID NO: 70620 - protein, 28 aa, Artificial Sequence
  Cyclic GFR-binding peptide
  MOD_RES (28), (28): Xaa is C or S
PYVKLHQGQHPKIRFFLMSLSSEETPVX

SEQ ID NO: 70621 - protein, 26 aa, Artificial Sequence
  Cyclic GFR-binding peptide
MDPYVKLVVNNASDFFLISLSSLRTP

SEQ ID NO: 70622 - protein, 29 aa, Artificial Sequence
  Cyclic GFR-binding peptide
  MOD_RES (26), (27): Xaa is C or S
PYVKLIVNSSDDFFLVSLSSLQTPAXXPK

SEQ ID NO: 70623 - protein, 29 aa, Artificial Sequence
  Cyclic GFR-binding peptide
  MOD_RES (28), (29): Xaa is C or S
MDPYVKLVVKENEDFFLMSLSSLETPVXX

SEQ ID NO: 70624 - protein, 26 aa, Artificial Sequence
  Cyclic GFR-binding peptide
ELRPYVKLLKPKKRVYEFFLVSLSSH

SEQ ID NO: 70625 - protein, 39 aa, Artificial Sequence; identical to SEQ ID NO: 23325
  Cyclic GFR-binding peptide
  MOD_RES (2), (33), (34): Xaa is C or S

SEQ ID NO: 70626 - protein, 31 aa, Artificial Sequence
  Cyclic GFR-binding peptide
  MOD_RES (2), (4): Xaa is C or S
LXGXEEVIMPYVKLLLVRGNDFFLMSLSSTK

SEQ ID NO: 70627 - protein, 34 aa, Artificial Sequence
  Cyclic GFR-binding peptide
  MOD_RES (31), (31): Xaa is C or S
RPYVKLLKPKKRVYEFFLVSLSSHHVRSPQXKVS

SEQ ID NO: 70628 - protein, 24 aa, Artificial Sequence
  Cyclic GFR-binding peptide
MGEPYVKLTPVGMDDFFLVSLSSL

SEQ ID NO: 70629 - protein, 28 aa, Artificial Sequence
  Cyclic GFR-binding peptide
  MOD_RES (2), (2): Xaa is C or S
GXAKVVMNPYVKLIVNNSSDFFLVSLSS

SEQ ID NO: 70630 - protein, 30 aa, Artificial Sequence
  Cyclic GFR-binding peptide
  MOD_RES (29), (30): Xaa is C or S
VMEPYVKLVVKDYEDFFLMSLSSLETPVXX

SEQ ID NO: 70631 - protein, 36 aa, Artificial Sequence; identical to SEQ ID NO: 23326
  Cyclic GFR-binding peptide
  MOD_RES (34), (34): Xaa is C or S

SEQ ID NO: 70632 - protein, 26 aa, Artificial Sequence
  Cyclic GFR-binding peptide
MNPYVKLIVNSSDDFFLVSLSSLKTP

SEQ ID NO: 70633 - protein, 32 aa, Artificial Sequence
  Cyclic GFR-binding peptide
  MOD_RES (32), (32): Xaa is C or S
AVSMGEPYVKLTPVGMDDFFLVSLSSLKTPVX

SEQ ID NO: 70634 - protein, 34 aa, Artificial Sequence; identical to SEQ ID NO: 23327
  Cyclic GFR-binding peptide
  MOD_RES (1), (1): Xaa is C or S

SEQ ID NO: 70635 - protein, 27 aa, Artificial Sequence
  Cyclic GFR-binding peptide
  MOD_RES (1), (1): Xaa is C or S
XEEVIMPYVKLLLVRGNDFFLMSLSST

SEQ ID NO: 70636 - protein, 39 aa, Artificial Sequence; identical to SEQ ID NO: 23328
  Cyclic GFR-binding peptide
  MOD_RES (2), (34), (35): Xaa is C or S

SEQ ID NO: 70637 - protein, 31 aa, Artificial Sequence
  Cyclic GFR-binding peptide
  MOD_RES (26), (27): Xaa is C or S
PYVKLLLVRGNDFFLMSLSSTKVPAXXTSPV

SEQ ID NO: 70638 - protein, 42 aa, Artificial Sequence; identical to SEQ ID NO: 23330
  Cyclic GFR-binding peptide
  MOD_RES (2), (4), (36), (37): Xaa is C or S

SEQ ID NO: 70639 - protein, 33 aa, Artificial Sequence; identical to SEQ ID NO: 23331
  Cyclic GFR-binding peptide
  MOD_RES (1), (33): Xaa is C or S

SEQ ID NO: 70640 - protein, 26 aa, Artificial Sequence
  Cyclic GFR-binding peptide
MGEPYVKLTPVGMDDFFLVSLSSLKT

SEQ ID NO: 70641 - protein, 26 aa, Artificial Sequence
  Cyclic GFR-binding peptide
ARVVMNPYVKLIVNSSDDFFLVSLSS

SEQ ID NO: 70642 - protein, 32 aa, Artificial Sequence; identical to SEQ ID NO: 23332
  Cyclic GFR-binding peptide
  MOD_RES (31), (32): Xaa is C or S

SEQ ID NO: 70643 - protein, 35 aa, Artificial Sequence
  Cyclic GFR-binding peptide
  MOD_RES (30), (31): Xaa is C or S
VVMGPYVKLIIQQKDNFFLMSLSSMKTPTXXPGAS

SEQ ID NO: 70644 - protein, 31 aa, Artificial Sequence
  Cyclic GFR-binding peptide
  MOD_RES (26), (27): Xaa is C or S
PYVKLIVNSSDDFFLVSLSSLKTPAXXPKPV

SEQ ID NO: 70645 - protein, 37 aa, Artificial Sequence; identical to SEQ ID NO: 23333
  Cyclic GFR-binding peptide
  MOD_RES (31), (32): Xaa is C or S

SEQ ID NO: 70646 - protein, 33 aa, Artificial Sequence
  Cyclic GFR-binding peptide
  MOD_RES (28), (29): Xaa is C or S
MDPYVKLVVNNAADFFLISLSSLRAPVXXSAPA

SEQ ID NO: 70647 - protein, 38 aa, Artificial Sequence; identical to SEQ ID NO: 23334
  Cyclic GFR-binding peptide
  MOD_RES (2), (34): Xaa is C or S

SEQ ID NO: 70648 - protein, 31 aa, Artificial Sequence
  Cyclic GFR-binding peptide
  MOD_RES (2), (4): Xaa is C or S
RXGXEAVSMGEPYVKLTPVGMDDFFLVSLSS

SEQ ID NO: 70649 - protein, 30 aa, Artificial Sequence
  Cyclic GFR-binding peptide
  MOD_RES (29), (30): Xaa is C or S
VMDPYVKLVVNNAADFFLISLSSLRAPVXX

SEQ ID NO: 70650 - protein, 40 aa, Artificial Sequence; identical to SEQ ID NO: 23335
  Cyclic GFR-binding peptide
  MOD_RES (2), (4), (36), (37): Xaa is C or S

SEQ ID NO: 70651 - protein, 29 aa, Artificial Sequence
  Cyclic GFR-binding peptide
VAMGPYVKLYTVVGKDFFLISLSSLKTPV

SEQ ID NO: 70652 - protein, 36 aa, Artificial Sequence; identical to SEQ ID NO: 23336
  Cyclic GFR-binding peptide
  MOD_RES (1), (3), (35), (36): Xaa is C or S

SEQ ID NO: 70653 - protein, 34 aa, Artificial Sequence
  Cyclic GFR-binding peptide
  MOD_RES (30), (30): Xaa is C or S
LFPYVKLHQGQHPKIRFFLMSLSSEETPVXELGE

SEQ ID NO: 70654 - protein, 31 aa, Artificial Sequence
  Cyclic GFR-binding peptide
LHEELRPYVKLLKPKKRVYEFFLVSLSSHHV

SEQ ID NO: 70655 - protein, 26 aa, Artificial Sequence
  Cyclic GFR-binding peptide
SRVVMNPYVKLIVNSSDDFFLVSLSS

SEQ ID NO: 70656 - protein, 26 aa, Artificial Sequence
  Cyclic GFR-binding peptide
NPYVKLIVNNSSDFFLVSLSSLKTPA

SEQ ID NO: 70657 - protein, 31 aa, Artificial Sequence
  Cyclic GFR-binding peptide
  MOD_RES (28), (29): Xaa is C or S
VMPYVKLVKPTRGVFFLISLSSLDQPVXXPS

SEQ ID NO: 70658 - protein, 31 aa, Artificial Sequence
  Cyclic GFR-binding peptide
  MOD_RES (26), (27): Xaa is C or S
PYVKLVKPTRGVFFLISLSSLDQPVXXPSAS

SEQ ID NO: 70659 - protein, 39 aa, Artificial Sequence; identical to SEQ ID NO: 23342
  Cyclic GFR-binding peptide
  MOD_RES (2), (34), (35): Xaa is C or S

SEQ ID NO: 70660 - protein, 38 aa, Artificial Sequence; identical to SEQ ID NO: 23343
  Cyclic GFR-binding peptide
  MOD_RES (35), (35): Xaa is C or S

SEQ ID NO: 70661 - protein, 31 aa, Artificial Sequence; identical to SEQ ID NO: 23346
  Cyclic GFR-binding peptide

SEQ ID NO: 70662 - protein, 30 aa, Artificial Sequence
  Cyclic GFR-binding peptide
  MOD_RES (26), (27): Xaa is C or S
PYVKLLLVRGNDFFLMSLSSTKVPAXXTSP

SEQ ID NO: 70663 - protein, 32 aa, Artificial Sequence
  Cyclic GFR-binding peptide
  MOD_RES (1), (1): Xaa is C or S
XKNHQLFPYVKLHQGQHPKIRFFLMSLSSEET

SEQ ID NO: 70664 - protein, 35 aa, Artificial Sequence; identical to SEQ ID NO: 23347
  Cyclic GFR-binding peptide
  MOD_RES (1), (3): Xaa is C or S

SEQ ID NO: 70665 - protein, 35 aa, Artificial Sequence; identical to SEQ ID NO: 23349
  Cyclic GFR-binding peptide
  MOD_RES (1), (3), (35): Xaa is C or S

SEQ ID NO: 70666 - protein, 35 aa, Artificial Sequence
  Cyclic GFR-binding peptide
  MOD_RES (30), (31): Xaa is C or S
VVMDPYVKLVVNNASDFFLISLSSLRTPVXXTPPT

SEQ ID NO: 70667 - protein, 29 aa, Artificial Sequence
  Cyclic GFR-binding peptide
  MOD_RES (2), (2): Xaa is C or S
GXESVAMGPYVKLYTVVGKDFFLISLSSL

SEQ ID NO: 70668 - protein, 41 aa, Artificial Sequence; identical to SEQ ID NO: 23350
  Cyclic GFR-binding peptide
  MOD_RES (2), (4), (35), (36): Xaa is C or S

SEQ ID NO: 70669 - protein, 32 aa, Artificial Sequence
  Cyclic GFR-binding peptide
  MOD_RES (1), (3): Xaa is C or S
XGXGEVVMDPYVKLVVKENEDFFLMSLSSLET

SEQ ID NO: 70670 - protein, 31 aa, Artificial Sequence; identical to SEQ ID NO: 23353
  Cyclic GFR-binding peptide
  MOD_RES (1), (1): Xaa is C or S

SEQ ID NO: 70671 - protein, 30 aa, Artificial Sequence
  Cyclic GFR-binding peptide
  MOD_RES (30), (30): Xaa is C or S
VVMNPYVKLIVNSSDDFFLVSLSSLKTPAX

SEQ ID NO: 70672 - protein, 29 aa, Artificial Sequence
  Cyclic GFR-binding peptide
  MOD_RES (29), (29): Xaa is C or S
MGEPYVKLTPVGMDDFFLVSLSSLKTPVX

SEQ ID NO: 70673 - protein, 24 aa, Artificial Sequence
  Cyclic GFR-binding peptide
KVIMPYVKLIKPTKGIFFLISLSS

SEQ ID NO: 70674 - protein, 38 aa, Artificial Sequence; identical to SEQ ID NO: 23354
  Cyclic GFR-binding peptide
  MOD_RES (32), (33): Xaa is C or S

SEQ ID NO: 70675 - protein, 32 aa, Artificial Sequence
  Cyclic GFR-binding peptide
  MOD_RES (28), (29): Xaa is C or S
MDPYVKLVVNNASDFFLISLSSLRTPVXXTPP

SEQ ID NO: 70676 - protein, 31 aa, Artificial Sequence
  Cyclic GFR-binding peptide
  MOD_RES (1), (3): Xaa is C or S
XGXSEVVMDPYVKLVVNNASDFFLISLSSLR

SEQ ID NO: 70677 - protein, 30 aa, Artificial Sequence
  Cyclic GFR-binding peptide
  MOD_RES (26), (27): Xaa is C or S
PYVKLVVKDYEDFFLMSLSSLETPVXXAKP

SEQ ID NO: 70678 - protein, 31 aa, Artificial Sequence
  Cyclic GFR-binding peptide
  MOD_RES (27), (28): Xaa is C or S
DPYVKLVVNNAADFFLISLSSLRAPVXXSAP

SEQ ID NO: 70679 - protein, 31 aa, Artificial Sequence
  Cyclic GFR-binding peptide
  MOD_RES (2), (2): Xaa is C or S
GXESVAMGPYVKLYTVVGKDFFLISLSSLKT

SEQ ID NO: 70680 - protein, 29 aa, Artificial Sequence
  Cyclic GFR-binding peptide
  MOD_RES (29), (29): Xaa is C or S
AMGPYVKLYTVVGKDFFLISLSSLKTPVX

SEQ ID NO: 70681 - protein, 33 aa, Artificial Sequence; identical to SEQ ID NO: 23357
  Cyclic GFR-binding peptide
  MOD_RES (1), (33): Xaa is C or S

SEQ ID NO: 70682 - protein, 33 aa, Artificial Sequence
  Cyclic GFR-binding peptide
  MOD_RES (29), (30): Xaa is C or S
VMDPYVKLVVKENEDFFLMSLSSLETPVXXAKP

SEQ ID NO: 70683 - protein, 31 aa, Artificial Sequence
  Cyclic GFR-binding peptide
  MOD_RES (1), (3): Xaa is C or S
XGXEAVSMGEPYVKLTPVGMDDFFLVSLSSL

SEQ ID NO: 70684 - protein, 33 aa, Artificial Sequence; identical to SEQ ID NO: 23360
  Cyclic GFR-binding peptide
  MOD_RES (31), (32): Xaa is C or S

SEQ ID NO: 70685 - protein, 37 aa, Artificial Sequence; identical to SEQ ID NO: 23361
  Cyclic GFR-binding peptide
  MOD_RES (1), (34), (35): Xaa is C or S

SEQ ID NO: 70686 - protein, 32 aa, Artificial Sequence; identical to SEQ ID NO: 23363
  Cyclic GFR-binding peptide
  MOD_RES (1), (32): Xaa is C or S

SEQ ID NO: 70687 - protein, 28 aa, Artificial Sequence
  Cyclic GFR-binding peptide
  MOD_RES (27), (28): Xaa is C or S
DPYVKLVVNNAADFFLISLSSLRAPVXX

SEQ ID NO: 70688 - protein, 31 aa, Artificial Sequence
  Cyclic GFR-binding peptide
KNHQLFPYVKLHQGQHPKIRFFLMSLSSEET

SEQ ID NO: 70689 - protein, 33 aa, Artificial Sequence
  Cyclic GFR-binding peptide
  MOD_RES (30), (31): Xaa is C or S
VVMNPYVKLIVNSSDDFFLVSLSSLKTPAXXPK

SEQ ID NO: 70690 - protein, 34 aa, Artificial Sequence; identical to SEQ ID NO: 23365
  Cyclic GFR-binding peptide
  MOD_RES (33), (34): Xaa is C or S

SEQ ID NO: 70691 - protein, 28 aa, Artificial Sequence
  Cyclic GFR-binding peptide
  MOD_RES (1), (3): Xaa is C or S
XKXSKVIMPYVKLIKPTKGIFFLISLSS

SEQ ID NO: 70692 - protein, 25 aa, Artificial Sequence
  Cyclic GFR-binding peptide
NPYVKLIVNNSSDFFLVSLSSLKTP

SEQ ID NO: 70693 - protein, 29 aa, Artificial Sequence
  Cyclic GFR-binding peptide
EVVMEPYVKLVVKDYEDFFLMSLSSLETP

SEQ ID NO: 70694 - protein, 32 aa, Artificial Sequence
  Cyclic GFR-binding peptide
  MOD_RES (29), (30): Xaa is C or S
VIMPYVKLIKPTKGIFFLISLSSLDQSVXXPS

SEQ ID NO: 70695 - protein, 32 aa, Artificial Sequence; identical to SEQ ID NO: 23369
  Cyclic GFR-binding peptide

SEQ ID NO: 70696 - protein, 31 aa, Artificial Sequence
  Cyclic GFR-binding peptide
  MOD_RES (26), (27): Xaa is C or S
PYVKLIIQQKDNFFLMSLSSMKTPTXXPGAS

SEQ ID NO: 70697 - protein, 26 aa, Artificial Sequence
  Cyclic GFR-binding peptide
PYVKLHQGQHPKIRFFLMSLSSEETP

SEQ ID NO: 70698 - protein, 33 aa, Artificial Sequence
  Cyclic GFR-binding peptide
  MOD_RES (29), (30): Xaa is C or S
VVMPYVKLVKPTRGVFFLISLSSLDQPVXXPSA

SEQ ID NO: 70699 - protein, 20 aa, Artificial Sequence
  Cyclic GFR-binding peptide
PYVKLIVNSSDDFFLVSLSS

SEQ ID NO: 70700 - protein, 34 aa, Artificial Sequence; identical to SEQ ID NO: 23371
  Cyclic GFR-binding peptide
  MOD_RES (32), (33): Xaa is C or S

SEQ ID NO: 70701 - protein, 37 aa, Artificial Sequence; identical to SEQ ID NO: 23372
  Cyclic GFR-binding peptide
  MOD_RES (32), (32): Xaa is C or S

SEQ ID NO: 70702 - protein, 25 aa, Artificial Sequence
  Cyclic GFR-binding peptide
EVVMDPYVKLVVNNAADFFLISLSS

SEQ ID NO: 70703 - protein, 35 aa, Artificial Sequence; identical to SEQ ID NO: 23373
  Cyclic GFR-binding peptide
  MOD_RES (1), (32), (33): Xaa is C or S

SEQ ID NO: 70704 - protein, 30 aa, Artificial Sequence
  Cyclic GFR-binding peptide
  MOD_RES (26), (27): Xaa is C or S
PYVKLVVNNASDFFLISLSSLRTPVXXTPP

SEQ ID NO: 70705 - protein, 29 aa, Artificial Sequence
  Cyclic GFR-binding peptide
RVVMNPYVKLIVNSSDDFFLVSLSSLQTP

SEQ ID NO: 70706 - protein, 23 aa, Artificial Sequence
  Cyclic GFR-binding peptide
GEPYVKLTPVGMDDFFLVSLSSL

SEQ ID NO: 70707 - protein, 25 aa, Artificial Sequence
  Cyclic GFR-binding peptide
LRPYVKLLKPKKRVYEFFLVSLSSH

SEQ ID NO: 70708 - protein, 23 aa, Artificial Sequence
  Cyclic GFR-binding peptide
PYVKLHQGQHPKIRFFLMSLSSE

SEQ ID NO: 70709 - protein, 30 aa, Artificial Sequence
  Cyclic GFR-binding peptide
  MOD_RES (26), (27): Xaa is C or S
PYVKLVKPKRGVFFLISLSSLAQPVXXPAA

SEQ ID NO: 70710 - protein, 27 aa, Artificial Sequence
  Cyclic GFR-binding peptide
EAVSMGEPYVKLTPVGMDDFFLVSLSS

SEQ ID NO: 70711 - protein, 26 aa, Artificial Sequence
  Cyclic GFR-binding peptide
  MOD_RES (26), (26): Xaa is C or S
PYVKLIVNSSDDFFLVSLSSLQTPAX

SEQ ID NO: 70712 - protein, 27 aa, Artificial Sequence
  Cyclic GFR-binding peptide
  MOD_RES (26), (27): Xaa is C or S
PYVKLVVKDYEDFFLMSLSSLETPVXX

SEQ ID NO: 70713 - protein, 29 aa, Artificial Sequence
  Cyclic GFR-binding peptide
  MOD_RES (26), (27): Xaa is C or S
PYVKLLLVRGNDFFLMSLSSTKVPAXXTS

SEQ ID NO: 70714 - protein, 41 aa, Artificial Sequence; identical to SEQ ID NO: 23379
  Cyclic GFR-binding peptide
  MOD_RES (2), (4), (36): Xaa is C or S

SEQ ID NO: 70715 - protein, 24 aa, Artificial Sequence
  Cyclic GFR-binding peptide
VMDPYVKLVVKENEDFFLMSLSSL

SEQ ID NO: 70716 - protein, 30 aa, Artificial Sequence
  Cyclic GFR-binding peptide
  MOD_RES (30), (30): Xaa is C or S
VVMDPYVKLVVNNASDFFLISLSSLRTPVX

SEQ ID NO: 70717 - protein, 32 aa, Artificial Sequence; identical to SEQ ID NO: 23380
  Cyclic GFR-binding peptide
  MOD_RES (31), (32): Xaa is C or S

SEQ ID NO: 70718 - protein, 27 aa, Artificial Sequence
  Cyclic GFR-binding peptide
KVVMNPYVKLIVNNSSDFFLVSLSSLK

SEQ ID NO: 70719 - protein, 29 aa, Artificial Sequence
  Cyclic GFR-binding peptide
DVVMGPYVKLIIQQKDNFFLMSLSSMKTP

SEQ ID NO: 70720 - protein, 26 aa, Artificial Sequence
  Cyclic GFR-binding peptide
GEVVMDPYVKLVVKENEDFFLMSLSS

SEQ ID NO: 70721 - protein, 31 aa, Artificial Sequence
  Cyclic GFR-binding peptide
LRPYVKLLKPKKRVYEFFLVSLSSHHVRSPQ

SEQ ID NO: 70722 - protein, 26 aa, Artificial Sequence
  Cyclic GFR-binding peptide
MEPYVKLVVKDYEDFFLMSLSSLETP

SEQ ID NO: 70723 - protein, 30 aa, Artificial Sequence
  Cyclic GFR-binding peptide
  MOD_RES (27), (28): Xaa is C or S
NPYVKLIVNNSSDFFLVSLSSLKTPAXXAK

SEQ ID NO: 70724 - protein, 39 aa, Artificial Sequence; identical to SEQ ID NO: 23389
  Cyclic GFR-binding peptide
  MOD_RES (1), (38): Xaa is C or S

SEQ ID NO: 70725 - protein, 22 aa, Artificial Sequence
  Cyclic GFR-binding peptide
EPYVKLTPVGMDDFFLVSLSSL

SEQ ID NO: 70726 - protein, 39 aa, Artificial Sequence; identical to SEQ ID NO: 23390
  Cyclic GFR-binding peptide
  MOD_RES (1), (33), (34): Xaa is C or S

SEQ ID NO: 70727 - protein, 34 aa, Artificial Sequence; identical to SEQ ID NO: 23391
  Cyclic GFR-binding peptide
  MOD_RES (2), (33), (34): Xaa is C or S

SEQ ID NO: 70728 - protein, 29 aa, Artificial Sequence
  Cyclic GFR-binding peptide
RPYVKLLKPKKRVYEFFLVSLSSHHVRSP

SEQ ID NO: 70729 - protein, 36 aa, Artificial Sequence
  Cyclic GFR-binding peptide
  MOD_RES (34), (34): Xaa is C or S
EELRPYVKLLKPKKRVYEFFLVSLSSHHVRSPQXKV

SEQ ID NO: 70730 - protein, 32 aa, Artificial Sequence
  Cyclic GFR-binding peptide
  MOD_RES (2), (4): Xaa is C or S
RXGXSEVVMDPYVKLVVNNASDFFLISLSSLR

SEQ ID NO: 70731 - protein, 28 aa, Artificial Sequence
  Cyclic GFR-binding peptide
KVVMPYVKLVKPTRGVFFLISLSSLDQP

SEQ ID NO: 70732 - protein, 30 aa, Artificial Sequence
  Cyclic GFR-binding peptide
  MOD_RES (1), (1): Xaa is C or S
XEAVSMGEPYVKLTPVGMDDFFLVSLSSLK

SEQ ID NO: 70733 - protein, 32 aa, Artificial Sequence
  Cyclic GFR-binding peptide
  MOD_RES (26), (27): Xaa is C or S
PYVKLVKPTRGVFFLISLSSLDQPVXXPSASA

SEQ ID NO: 70734 - protein, 36 aa, Artificial Sequence
  Cyclic GFR-binding peptide
  MOD_RES (2), (4): Xaa is C or S
RXEXKNHQLFPYVKLHQGQHPKIRFFLMSLSSEETP

SEQ ID NO: 70735 - protein, 32 aa, Artificial Sequence
  Cyclic GFR-binding peptide
  MOD_RES (28), (29): Xaa is C or S
MNPYVKLIVNSSDDFFLVSLSSLKTPAXXPKP

SEQ ID NO: 70736 - protein, 32 aa, Artificial Sequence
  Cyclic GFR-binding peptide
  MOD_RES (1), (1): Xaa is C or S
XGEVVMDPYVKLVVKENEDFFLMSLSSLETPV

SEQ ID NO: 70737 - protein, 33 aa, Artificial Sequence
  Cyclic GFR-binding peptide
  MOD_RES (27), (28): Xaa is C or S
NPYVKLIVNNSSDFFLVSLSSLKTPAXXAKPVA

SEQ ID NO: 70738 - protein, 32 aa, Artificial Sequence
  Cyclic GFR-binding peptide
  MOD_RES (30), (30): Xaa is C or S
LFPYVKLHQGQHPKIRFFLMSLSSEETPVXEL

SEQ ID NO: 70739 - protein, 27 aa, Artificial Sequence
  Cyclic GFR-binding peptide
RVIMPYVKLVKPKRGVFFLISLSSLAQ

SEQ ID NO: 70740 - protein, 31 aa, Artificial Sequence; identical to SEQ ID NO: 23395
  Cyclic GFR-binding peptide
  MOD_RES (31), (31): Xaa is C or S

SEQ ID NO: 70741 - protein, 35 aa, Artificial Sequence; identical to SEQ ID NO: 23398
  Cyclic GFR-binding peptide
  MOD_RES (1), (3), (34), (35): Xaa is C or S

SEQ ID NO: 70742 - protein, 29 aa, Artificial Sequence
  Cyclic GFR-binding peptide
  MOD_RES (28), (29): Xaa is C or S
MDPYVKLVVNNASDFFLISLSSLRTPVXX

SEQ ID NO: 70743 - protein, 24 aa, Artificial Sequence
  Cyclic GFR-binding peptide
MPYVKLVKPTRGVFFLISLSSLDQ

SEQ ID NO: 70744 - protein, 36 aa, Artificial Sequence; identical to SEQ ID NO: 23400
  Cyclic GFR-binding peptide
  MOD_RES (2), (4), (36): Xaa is C or S

SEQ ID NO: 70745 - protein, 33 aa, Artificial Sequence; identical to SEQ ID NO: 23401
  Cyclic GFR-binding peptide
  MOD_RES (32), (33): Xaa is C or S

SEQ ID NO: 70746 - protein, 34 aa, Artificial Sequence
  Cyclic GFR-binding peptide
  MOD_RES (28), (29): Xaa is C or S
MNPYVKLIVNSSDDFFLVSLSSLKTPAXXPKPVH

SEQ ID NO: 70747 - protein, 31 aa, Artificial Sequence
  Cyclic GFR-binding peptide
  MOD_RES (28), (29): Xaa is C or S
MDPYVKLVVNNAADFFLISLSSLRAPVXXSA

SEQ ID NO: 70748 - protein, 30 aa, Artificial Sequence
  Cyclic GFR-binding peptide
  MOD_RES (30), (30): Xaa is C or S
PYVKLLKPKKRVYEFFLVSLSSHHVRSPQX

SEQ ID NO: 70749 - protein, 21 aa, Artificial Sequence
  Cyclic GFR-binding peptide
PYVKLVVKENEDFFLMSLSSL

SEQ ID NO: 70750 - protein, 23 aa, Artificial Sequence
  Cyclic GFR-binding peptide
MEPYVKLVVKDYEDFFLMSLSSL

SEQ ID NO: 70751 - protein, 28 aa, Artificial Sequence
  Cyclic GFR-binding peptide
  MOD_RES (27), (28): Xaa is C or S
GPYVKLYTVVGKDFFLISLSSLKTPVXX

SEQ ID NO: 70752 - protein, 29 aa, Artificial Sequence
  Cyclic GFR-binding peptide
AAAAAAAAAPYVKLVVNNASDFFLISLSS

SEQ ID NO: 70753 - protein, 21 aa, Artificial Sequence
  Cyclic GFR-binding peptide
DPYVKLVVNNAADFFLISLSS

SEQ ID NO: 70754 - protein, 23 aa, Artificial Sequence
  Cyclic GFR-binding peptide
IMPYVKLVKPKRGVFFLISLSSL

SEQ ID NO: 70755 - protein, 38 aa, Artificial Sequence; identical to SEQ ID NO: 23407
  Cyclic GFR-binding peptide
  MOD_RES (2), (4), (35), (36): Xaa is C or S

SEQ ID NO: 70756 - protein, 23 aa, Artificial Sequence
  Cyclic GFR-binding peptide
VMDPYVKLVVNNASDFFLISLSS

SEQ ID NO: 70757 - protein, 35 aa, Artificial Sequence; identical to SEQ ID NO: 23408
  Cyclic GFR-binding peptide
  MOD_RES (1), (3), (35): Xaa is C or S

SEQ ID NO: 70758 - protein, 34 aa, Artificial Sequence
  Cyclic GFR-binding peptide
  MOD_RES (28), (29): Xaa is C or S
MGPYVKLIIQQKDNFFLMSLSSMKTPTXXPGASG

SEQ ID NO: 70759 - protein, 24 aa, Artificial Sequence
  Cyclic GFR-binding peptide
PYVKLIVNNSSDFFLVSLSSLKTP

SEQ ID NO: 70760 - protein, 38 aa, Artificial Sequence; identical to SEQ ID NO: 23413
  Cyclic GFR-binding peptide
  MOD_RES (2), (34), (35): Xaa is C or S

SEQ ID NO: 70761 - protein, 24 aa, Artificial Sequence
  Cyclic GFR-binding peptide
PYVKLTPVGMDDFFLVSLSSLKTP

SEQ ID NO: 70762 - protein, 29 aa, Artificial Sequence
  Cyclic GFR-binding peptide
  MOD_RES (1), (3): Xaa is C or S
XGXAKVVMNPYVKLIVNNSSDFFLVSLSS

SEQ ID NO: 70763 - protein, 33 aa, Artificial Sequence
  Cyclic GFR-binding peptide
  MOD_RES (30), (31): Xaa is C or S
EVIMPYVKLLLVRGNDFFLMSLSSTKVPAXXTS

SEQ ID NO: 70764 - protein, 26 aa, Artificial Sequence
  Cyclic GFR-binding peptide
RPYVKLLKPKKRVYEFFLVSLSSHHV

SEQ ID NO: 70765 - protein, 33 aa, Artificial Sequence
  Cyclic GFR-binding peptide
  MOD_RES (28), (29): Xaa is C or S
MGPYVKLYTVVGKDFFLISLSSLKTPVXXAKSA

SEQ ID NO: 70766 - protein, 33 aa, Artificial Sequence
  Cyclic GFR-binding peptide
  MOD_RES (1), (3): Xaa is C or S
XGXARVVMNPYVKLIVNSSDDFFLVSLSSLQTP

SEQ ID NO: 70767 - protein, 38 aa, Artificial Sequence; identical to SEQ ID NO: 23419
  Cyclic GFR-binding peptide
  MOD_RES (2), (4), (36), (37): Xaa is C or S

SEQ ID NO: 70768 - protein, 33 aa, Artificial Sequence
  Cyclic GFR-binding peptide
  MOD_RES (29), (29): Xaa is C or S
FPYVKLHQGQHPKIRFFLMSLSSEETPVXELGE

SEQ ID NO: 70769 - protein, 29 aa, Artificial Sequence
  Cyclic GFR-binding peptide
VVMDPYVKLVVNNASDFFLISLSSLRTPV

SEQ ID NO: 70770 - protein, 33 aa, Artificial Sequence
  Cyclic GFR-binding peptide
  MOD_RES (30), (30): Xaa is C or S
PYVKLLKPKKRVYEFFLVSLSSHHVRSPQXKVS

SEQ ID NO: 70771 - protein, 36 aa, Artificial Sequence; identical to SEQ ID NO: 23420
  Cyclic GFR-binding peptide
  MOD_RES (31), (32): Xaa is C or S

SEQ ID NO: 70772 - protein, 26 aa, Artificial Sequence
  Cyclic GFR-binding peptide
  MOD_RES (26), (26): Xaa is C or S
PYVKLYTVVGKDFFLISLSSLKTPVX

SEQ ID NO: 70773 - protein, 31 aa, Artificial Sequence
  Cyclic GFR-binding peptide
  MOD_RES (27), (28): Xaa is C or S
MPYVKLIKPTKGIFFLISLSSLDQSVXXPSA

SEQ ID NO: 70774 - protein, 28 aa, Artificial Sequence
  Cyclic GFR-binding peptide
  MOD_RES (2), (2): Xaa is C or S
KXSRVIMPYVKLVKPKRGVFFLISLSSL

SEQ ID NO: 70775 - protein, 25 aa, Artificial Sequence
  Cyclic GFR-binding peptide
VSMGEPYVKLTPVGMDDFFLVSLSS

SEQ ID NO: 70776 - protein, 34 aa, Artificial Sequence; identical to SEQ ID NO: 23427
  Cyclic GFR-binding peptide
  MOD_RES (2), (34): Xaa is C or S

SEQ ID NO: 70777 - protein, 24 aa, Artificial Sequence
  Cyclic GFR-binding peptide
PYVKLIVNSSDDFFLVSLSSLKTP

SEQ ID NO: 70778 - protein, 31 aa, Artificial Sequence
  Cyclic GFR-binding peptide
  MOD_RES (2), (4): Xaa is C or S
SXKXSRVIMPYVKLVKPKRGVFFLISLSSLA

SEQ ID NO: 70779 - protein, 38 aa, Artificial Sequence
  Cyclic GFR-binding peptide
  MOD_RES (1), (3), (35), (36): Xaa is C or S
XGXGEVVMDPYVKLVVKENEDFFLMSLSSLETPVXXAK

SEQ ID NO: 70780 - protein, 29 aa, Artificial Sequence
  Cyclic GFR-binding peptide
  MOD_RES (27), (28): Xaa is C or S
DPYVKLVVKENEDFFLMSLSSLETPVXXA

SEQ ID NO: 70781 - protein, 38 aa, Artificial Sequence; identical to SEQ ID NO: 23429
  Cyclic GFR-binding peptide
  MOD_RES (1), (38): Xaa is C or S

SEQ ID NO: 70782 - protein, 22 aa, Artificial Sequence
  Cyclic GFR-binding peptide
MGPYVKLIIQQKDNFFLMSLSS

SEQ ID NO: 70783 - protein, 35 aa, Artificial Sequence
  Cyclic GFR-binding peptide
  MOD_RES (30), (31): Xaa is C or S
KVVMPYVKLVKPTRGVFFLISLSSLDQPVXXPSAS

SEQ ID NO: 70784 - protein, 26 aa, Artificial Sequence
  Cyclic GFR-binding peptide
GEVVMEPYVKLVVKDYEDFFLMSLSS

SEQ ID NO: 70785 - protein, 31 aa, Artificial Sequence
  Cyclic GFR-binding peptide
  MOD_RES (2), (2): Xaa is C or S
GXAEVVMDPYVKLVVNNAADFFLISLSSLRA

SEQ ID NO: 70786 - protein, 43 aa, Artificial Sequence; identical to SEQ ID NO: 23430
  Cyclic GFR-binding peptide
  MOD_RES (1), (3), (37): Xaa is C or S

SEQ ID NO: 70787 - protein, 29 aa, Artificial Sequence
  Cyclic GFR-binding peptide
ELRPYVKLLKPKKRVYEFFLVSLSSHHVR

SEQ ID NO: 70788 - protein, 32 aa, Artificial Sequence
  Cyclic GFR-binding peptide
  MOD_RES (28), (29): Xaa is C or S
MDPYVKLVVNNAADFFLISLSSLRAPVXXSAP

SEQ ID NO: 70789 - protein, 25 aa, Artificial Sequence
  Cyclic GFR-binding peptide
DPYVKLVVKENEDFFLMSLSSLETP

SEQ ID NO: 70790 - protein, 28 aa, Artificial Sequence
  Cyclic GFR-binding peptide
  MOD_RES (27), (28): Xaa is C or S
NPYVKLIVNNSSDFFLVSLSSLKTPAXX

SEQ ID NO: 70791 - protein, 40 aa, Artificial Sequence; identical to SEQ ID NO: 23431
  Cyclic GFR-binding peptide
  MOD_RES (2), (35), (36): Xaa is C or S

SEQ ID NO: 70792 - protein, 30 aa, Artificial Sequence
  Cyclic GFR-binding peptide
  MOD_RES (1), (1): Xaa is C or S
XRDVVMGPYVKLIIQQKDNFFLMSLSSMKT

SEQ ID NO: 70793 - protein, 23 aa, Artificial Sequence
  Cyclic GFR-binding peptide
VMNPYVKLIVNNSSDFFLVSLSS

SEQ ID NO: 70794 - protein, 30 aa, Artificial Sequence
  Cyclic GFR-binding peptide
  MOD_RES (28), (29): Xaa is C or S
IMPYVKLIKPTKGIFFLISLSSLDQSVXXP

SEQ ID NO: 70795 - protein, 41 aa, Artificial Sequence; identical to SEQ ID NO: 23436
  Cyclic GFR-binding peptide
  MOD_RES (2), (4), (36), (37): Xaa is C or S

SEQ ID NO: 70796 - protein, 36 aa, Artificial Sequence
  Cyclic GFR-binding peptide
  MOD_RES (32), (32): Xaa is C or S
LRPYVKLLKPKKRVYEFFLVSLSSHHVRSPQXKVSS

SEQ ID NO: 70797 - protein, 40 aa, Artificial Sequence; identical to SEQ ID NO: 23437
  Cyclic GFR-binding peptide
  MOD_RES (36), (36): Xaa is C or S

SEQ ID NO: 70798 - protein, 37 aa, Artificial Sequence; identical to SEQ ID NO: 23439
  Cyclic GFR-binding peptide
  MOD_RES (37), (37): Xaa is C or S

SEQ ID NO: 70799 - protein, 37 aa, Artificial Sequence; identical to SEQ ID NO: 23440
  Cyclic GFR-binding peptide
  MOD_RES (1), (3), (34), (35): Xaa is C or S

SEQ ID NO: 70800 - protein, 34 aa, Artificial Sequence
  Cyclic GFR-binding peptide
  MOD_RES (2), (34): Xaa is C or S
GXGEVVMDPYVKLVVKENEDFFLMSLSSLETPVX

SEQ ID NO: 70801 - protein, 39 aa, Artificial Sequence; identical to SEQ ID NO: 23441
  Cyclic GFR-binding peptide
  MOD_RES (2), (4), (36): Xaa is C or S

SEQ ID NO: 70802 - protein, 39 aa, Artificial Sequence
  Cyclic GFR-binding peptide
  MOD_RES (1), (3), (35), (36): Xaa is C or S
XGXGEVVMDPYVKLVVKENEDFFLMSLSSLETPVXXAKP

SEQ ID NO: 70803 - protein, 34 aa, Artificial Sequence
  Cyclic GFR-binding peptide
  MOD_RES (2), (4): Xaa is C or S
RXGXGEVVMEPYVKLVVKDYEDFFLMSLSSLETP

SEQ ID NO: 70804 - protein, 25 aa, Artificial Sequence
  Cyclic GFR-binding peptide
RVIMPYVKLVKPKRGVFFLISLSSL

SEQ ID NO: 70805 - protein, 35 aa, Artificial Sequence; identical to SEQ ID NO: 23443
  Cyclic GFR-binding peptide
  MOD_RES (2), (4): Xaa is C or S

SEQ ID NO: 70806 - protein, 32 aa, Artificial Sequence; identical to SEQ ID NO: 23444
  Cyclic GFR-binding peptide
  MOD_RES (31), (32): Xaa is C or S

SEQ ID NO: 70807 - protein, 39 aa, Artificial Sequence; identical to SEQ ID NO: 23445
  Cyclic GFR-binding peptide
  MOD_RES (1), (3), (36), (37): Xaa is C or S

SEQ ID NO: 70808 - protein, 34 aa, Artificial Sequence
  Cyclic GFR-binding peptide
  MOD_RES (30), (31): Xaa is C or S
VVMGPYVKLIIQQKDNFFLMSLSSMKTPTXXPGA

SEQ ID NO: 70809 - protein, 29 aa, Artificial Sequence
  Cyclic GFR-binding peptide
  MOD_RES (2), (2): Xaa is C or S
GXEEVIMPYVKLLLVRGNDFFLMSLSSTK

SEQ ID NO: 70810 - protein, 23 aa, Artificial Sequence
  Cyclic GFR-binding peptide
MDPYVKLVVNNASDFFLISLSSL

SEQ ID NO: 70811 - protein, 25 aa, Artificial Sequence
  Cyclic GFR-binding peptide
VMEPYVKLVVKDYEDFFLMSLSSLE

SEQ ID NO: 70812 - protein, 41 aa, Artificial Sequence; identical to SEQ ID NO: 23447
  Cyclic GFR-binding peptide
  MOD_RES (1), (3), (35), (36): Xaa is C or S

SEQ ID NO: 70813 - protein, 25 aa, Artificial Sequence
  Cyclic GFR-binding peptide
PYVKLVVNNAADFFLISLSSLRAPV

SEQ ID NO: 70814 - protein, 32 aa, Artificial Sequence; identical to SEQ ID NO: 23449
  Cyclic GFR-binding peptide
  MOD_RES (1), (1): Xaa is C or S

SEQ ID NO: 70815 - protein, 33 aa, Artificial Sequence; identical to SEQ ID NO: 23450
  Cyclic GFR-binding peptide
  MOD_RES (1), (32), (33): Xaa is C or S

SEQ ID NO: 70816 - protein, 28 aa, Artificial Sequence
  Cyclic GFR-binding peptide
GEVVMDPYVKLVVKENEDFFLMSLSSLE

SEQ ID NO: 70817 - protein, 37 aa, Artificial Sequence; identical to SEQ ID NO: 23452
  Cyclic GFR-binding peptide
  MOD_RES (31), (32): Xaa is C or S

SEQ ID NO: 70818 - protein, 39 aa, Artificial Sequence; identical to SEQ ID NO: 23457
  Cyclic GFR-binding peptide
  MOD_RES (2), (4), (35), (36): Xaa is C or S

SEQ ID NO: 70819 - protein, 32 aa, Artificial Sequence
  Cyclic GFR-binding peptide
  MOD_RES (29), (30): Xaa is C or S
VMDPYVKLVVKENEDFFLMSLSSLETPVXXAK

SEQ ID NO: 70820 - protein, 22 aa, Artificial Sequence
  Cyclic GFR-binding peptide
NPYVKLIVNSSDDFFLVSLSSL

SEQ ID NO: 70821 - protein, 29 aa, Artificial Sequence
  Cyclic GFR-binding peptide
AAAAAAAAAPYVKLVVKENEDFFLMSLSS

SEQ ID NO: 70822 - protein, 24 aa, Artificial Sequence
  Cyclic GFR-binding peptide
DPYVKLVVNNASDFFLISLSSLRT

SEQ ID NO: 70823 - protein, 26 aa, Artificial Sequence
  Cyclic GFR-binding peptide
  MOD_RES (1), (1): Xaa is C or S
XEEVIMPYVKLLLVRGNDFFLMSLSS

SEQ ID NO: 70824 - protein, 22 aa, Artificial Sequence
  Cyclic GFR-binding peptide
PYVKLVVNNASDFFLISLSSLR

SEQ ID NO: 70825 - protein, 30 aa, Artificial Sequence
  Cyclic GFR-binding peptide
  MOD_RES (2), (4): Xaa is C or S
SXKXSKVVMPYVKLVKPTRGVFFLISLSSL

SEQ ID NO: 70826 - protein, 30 aa, Artificial Sequence; identical to SEQ ID NO: 23459
  Cyclic GFR-binding peptide

SEQ ID NO: 70827 - protein, 34 aa, Artificial Sequence
  Cyclic GFR-binding peptide
  MOD_RES (31), (31): Xaa is C or S
QLFPYVKLHQGQHPKIRFFLMSLSSEETPVXELG

SEQ ID NO: 70828 - protein, 25 aa, Artificial Sequence
  Cyclic GFR-binding peptide
MDPYVKLVVNNAADFFLISLSSLRA

SEQ ID NO: 70829 - protein, 28 aa, Artificial Sequence
  Cyclic GFR-binding peptide
  MOD_RES (26), (27): Xaa is C or S
PYVKLIVNSSDDFFLVSLSSLKTPAXXP

SEQ ID NO: 70830 - protein, 40 aa, Artificial Sequence; identical to SEQ ID NO: 23461
  Cyclic GFR-binding peptide
  MOD_RES (2), (4), (36), (37): Xaa is C or S

SEQ ID NO: 70831 - protein, 33 aa, Artificial Sequence; identical to SEQ ID NO: 23462
  Cyclic GFR-binding peptide
  MOD_RES (31), (32): Xaa is C or S

SEQ ID NO: 70832 - protein, 34 aa, Artificial Sequence
  Cyclic GFR-binding peptide
  MOD_RES (1), (3): Xaa is C or S
XGXGEVVMDPYVKLVVKENEDFFLMSLSSLETPV

SEQ ID NO: 70833 - protein, 30 aa, Artificial Sequence
  Cyclic GFR-binding peptide
  MOD_RES (27), (28): Xaa is C or S
MPYVKLIKPTKGIFFLISLSSLDQSVXXPS

SEQ ID NO: 70834 - protein, 34 aa, Artificial Sequence; identical to SEQ ID NO: 23465
  Cyclic GFR-binding peptide
  MOD_RES (31), (32): Xaa is C or S

SEQ ID NO: 70835 - protein, 30 aa, Artificial Sequence
  Cyclic GFR-binding peptide
ESVAMGPYVKLYTVVGKDFFLISLSSLKTP

SEQ ID NO: 70836 - protein, 32 aa, Artificial Sequence
  Cyclic GFR-binding peptide
  MOD_RES (29), (30): Xaa is C or S
VMNPYVKLIVNSSDDFFLVSLSSLKTPAXXPK

SEQ ID NO: 70837 - protein, 25 aa, Artificial Sequence
  Cyclic GFR-binding peptide
EPYVKLVVKDYEDFFLMSLSSLETP

SEQ ID NO: 70838 - protein, 27 aa, Artificial Sequence
  Cyclic GFR-binding peptide
  MOD_RES (27), (27): Xaa is C or S
DPYVKLVVNNAADFFLISLSSLRAPVX

SEQ ID NO: 70839 - protein, 29 aa, Artificial Sequence
  Cyclic GFR-binding peptide
  MOD_RES (27), (28): Xaa is C or S
EPYVKLVVKDYEDFFLMSLSSLETPVXXA

SEQ ID NO: 70840 - protein, 21 aa, Artificial Sequence
  Cyclic GFR-binding peptide
MPYVKLVKPTRGVFFLISLSS

SEQ ID NO: 70841 - protein, 36 aa, Artificial Sequence; identical to SEQ ID NO: 23467
  Cyclic GFR-binding peptide
  MOD_RES (2), (34), (35): Xaa is C or S

SEQ ID NO: 70842 - protein, 31 aa, Artificial Sequence
  Cyclic GFR-binding peptide
  MOD_RES (29), (30): Xaa is C or S
VMDPYVKLVVKENEDFFLMSLSSLETPVXXA

SEQ ID NO: 70843 - protein, 21 aa, Artificial Sequence
  Cyclic GFR-binding peptide
PYVKLVVNNASDFFLISLSSL

SEQ ID NO: 70844 - protein, 37 aa, Artificial Sequence; identical to SEQ ID NO: 23469
  Cyclic GFR-binding peptide
  MOD_RES (2), (4), (36), (37): Xaa is C or S

SEQ ID NO: 70845 - protein, 28 aa, Artificial Sequence
  Cyclic GFR-binding peptide
  MOD_RES (26), (27): Xaa is C or S
PYVKLTPVGMDDFFLVSLSSLKTPVXXA

SEQ ID NO: 70846 - protein, 28 aa, Artificial Sequence
  Cyclic GFR-binding peptide
  MOD_RES (1), (1): Xaa is C or S
XSKVIMPYVKLIKPTKGIFFLISLSSLD

SEQ ID NO: 70847 - protein, 21 aa, Artificial Sequence
  Cyclic GFR-binding peptide
PYVKLIKPTKGIFFLISLSSL

SEQ ID NO: 70848 - protein, 40 aa, Artificial Sequence; identical to SEQ ID NO: 23470
  Cyclic GFR-binding peptide
  MOD_RES (2), (34), (35): Xaa is C or S

SEQ ID NO: 70849 - protein, 30 aa, Artificial Sequence
  Cyclic GFR-binding peptide
  MOD_RES (27), (28): Xaa is C or S
DPYVKLVVNNASDFFLISLSSLRTPVXXTP

SEQ ID NO: 70850 - protein, 28 aa, Artificial Sequence
  Cyclic GFR-binding peptide
  MOD_RES (27), (27): Xaa is C or S
NPYVKLIVNSSDDFFLVSLSSLKTPAXT

SEQ ID NO: 70851 - protein, 33 aa, Artificial Sequence
  Cyclic GFR-binding peptide
  MOD_RES (29), (30): Xaa is C or S
VMNPYVKLIVNSSDDFFLVSLSSLKTPAXXPKP

SEQ ID NO: 70852 - protein, 27 aa, Artificial Sequence
  Cyclic GFR-binding peptide
KVIMPYVKLIKPTKGIFFLISLSSLDQ

SEQ ID NO: 70853 - protein, 31 aa, Artificial Sequence
  Cyclic GFR-binding peptide
  MOD_RES (1), (1): Xaa is C or S
XAEVVMDPYVKLVVNNAADFFLISLSSLRAP

SEQ ID NO: 70854 - protein, 28 aa, Artificial Sequence
  Cyclic GFR-binding peptide
ESVAMGPYVKLYTVVGKDFFLISLSSLK

SEQ ID NO: 70855 - protein, 26 aa, Artificial Sequence
  Cyclic GFR-binding peptide
  MOD_RES (26), (26): Xaa is C or S
PYVKLLLVRGNDFFLMSLSSTKVPAX

SEQ ID NO: 70856 - protein, 25 aa, Artificial Sequence
  Cyclic GFR-binding peptide
EEVIMPYVKLLLVRGNDFFLMSLSS

SEQ ID NO: 70857 - protein, 27 aa, Artificial Sequence
  Cyclic GFR-binding peptide
MNPYVKLIVNSSDDFFLVSLSSLKTPA

SEQ ID NO: 70858 - protein, 32 aa, Artificial Sequence
  Cyclic GFR-binding peptide
  MOD_RES (26), (27): Xaa is C or S
PYVKLVVKENEDFFLMSLSSLETPVXXAKPIK

SEQ ID NO: 70859 - protein, 32 aa, Artificial Sequence
  Cyclic GFR-binding peptide
  MOD_RES (1), (3): Xaa is C or S
XGXARVVMNPYVKLIVNSSDDFFLVSLSSLQT

SEQ ID NO: 70860 - protein, 33 aa, Artificial Sequence
  Cyclic GFR-binding peptide
  MOD_RES (29), (30): Xaa is C or S
VIMPYVKLVKPKRGVFFLISLSSLAQPVXXPAA

SEQ ID NO: 70861 - protein, 30 aa, Artificial Sequence
  Cyclic GFR-binding peptide
GEVVMDPYVKLVVKENEDFFLMSLSSLETP

SEQ ID NO: 70862 - protein, 31 aa, Artificial Sequence
  Cyclic GFR-binding peptide
  MOD_RES (27), (28): Xaa is C or S
EPYVKLVVKDYEDFFLMSLSSLETPVXXAKP

SEQ ID NO: 70863 - protein, 38 aa, Artificial Sequence; identical to SEQ ID NO: 23476
  Cyclic GFR-binding peptide
  MOD_RES (1), (33), (34): Xaa is C or S

SEQ ID NO: 70864 - protein, 35 aa, Artificial Sequence
  Cyclic GFR-binding peptide
  MOD_RES (32), (33): Xaa is C or S
AVSMGEPYVKLTPVGMDDFFLVSLSSLKTPVXXAK

SEQ ID NO: 70865 - protein, 31 aa, Artificial Sequence
  Cyclic GFR-binding peptide
  MOD_RES (1), (1): Xaa is C or S
XGEVVMDPYVKLVVKENEDFFLMSLSSLETP

SEQ ID NO: 70866 - protein, 27 aa, Artificial Sequence
  Cyclic GFR-binding peptide
  MOD_RES (27), (27): Xaa is C or S
NPYVKLIVNNSSDFFLVSLSSLKTPAX

SEQ ID NO: 70867 - protein, 35 aa, Artificial Sequence
  Cyclic GFR-binding peptide
  MOD_RES (29), (30): Xaa is C or S
VMNPYVKLIVNSSDDFFLVSLSSLKTPAXXPKPVH

SEQ ID NO: 70868 - protein, 27 aa, Artificial Sequence
  Cyclic GFR-binding peptide
  MOD_RES (26), (27): Xaa is C or S
PYVKLIVNSSDDFFLVSLSSLQTPAXX

SEQ ID NO: 70869 - protein, 34 aa, Artificial Sequence
  Cyclic GFR-binding peptide
  MOD_RES (28), (29): Xaa is C or S
MEPYVKLVVKDYEDFFLMSLSSLETPVXXAKPIS

SEQ ID NO: 70870 - protein, 31 aa, Artificial Sequence; identical to SEQ ID NO: 23480
  Cyclic GFR-binding peptide
  MOD_RES (31), (31): Xaa is C or S

SEQ ID NO: 70871 - protein, 24 aa, Artificial Sequence
  Cyclic GFR-binding peptide
NPYVKLIVNNSSDFFLVSLSSLKT

SEQ ID NO: 70872 - protein, 41 aa, Artificial Sequence; identical to SEQ ID NO: 23482
  Cyclic GFR-binding peptide
  MOD_RES (1), (3), (35), (36): Xaa is C or S

SEQ ID NO: 70873 - protein, 32 aa, Artificial Sequence
  Cyclic GFR-binding peptide
  MOD_RES (2), (2): Xaa is C or S
EXKNHQLFPYVKLHQGQHPKIRFFLMSLSSEE

SEQ ID NO: 70874 - protein, 35 aa, Artificial Sequence
  Cyclic GFR-binding peptide
  MOD_RES (2), (2): Xaa is C or S
AXELHEELRPYVKLLKPKKRVYEFFLVSLSSHHVR

SEQ ID NO: 70875 - protein, 30 aa, Artificial Sequence
  Cyclic GFR-binding peptide
  MOD_RES (27), (28): Xaa is C or S
DPYVKLVVNNAADFFLISLSSLRAPVXXSA

SEQ ID NO: 70876 - protein, 22 aa, Artificial Sequence
  Cyclic GFR-binding peptide
PYVKLIKPTKGIFFLISLSSLD

SEQ ID NO: 70877 - protein, 29 aa, Artificial Sequence
  Cyclic GFR-binding peptide
  MOD_RES (1), (1): Xaa is C or S
XEEVIMPYVKLLLVRGNDFFLMSLSSTKV

SEQ ID NO: 70878 - protein, 21 aa, Artificial Sequence
  Cyclic GFR-binding peptide
MPYVKLVKPKRGVFFLISLSS

SEQ ID NO: 70879 - protein, 31 aa, Artificial Sequence; identical to SEQ ID NO: 23484
  Cyclic GFR-binding peptide
  MOD_RES (31), (31): Xaa is C or S

SEQ ID NO: 70880 - protein, 29 aa, Artificial Sequence
  Cyclic GFR-binding peptide
  MOD_RES (1), (1): Xaa is C or S
XKNHQLFPYVKLHQGQHPKIRFFLMSLSS

SEQ ID NO: 70881 - protein, 32 aa, Artificial Sequence
  Cyclic GFR-binding peptide
  MOD_RES (30), (31): Xaa is C or S
VVMDPYVKLVVKENEDFFLMSLSSLETPVXXA

SEQ ID NO: 70882 - protein, 30 aa, Artificial Sequence
  Cyclic GFR-binding peptide
  MOD_RES (30), (30): Xaa is C or S
VAMGPYVKLYTVVGKDFFLISLSSLKTPVX

SEQ ID NO: 70883 - protein, 31 aa, Artificial Sequence
  Cyclic GFR-binding peptide
  MOD_RES (29), (30): Xaa is C or S
VMNPYVKLIVNSSDDFFLVSLSSLKTPAXXP

SEQ ID NO: 70884 - protein, 39 aa, Artificial Sequence; identical to SEQ ID NO: 23487
  Cyclic GFR-binding peptide
  MOD_RES (2), (34), (35): Xaa is C or S

SEQ ID NO: 70885 - protein, 22 aa, Artificial Sequence
  Cyclic GFR-binding peptide
VMPYVKLVKPTRGVFFLISLSS

SEQ ID NO: 70886 - protein, 23 aa, Artificial Sequence
  Cyclic GFR-binding peptide
DPYVKLVVNNASDFFLISLSSLR

SEQ ID NO: 70887 - protein, 23 aa, Artificial Sequence
  Cyclic GFR-binding peptide
MPYVKLVKPTRGVFFLISLSSLD

SEQ ID NO: 70888 - protein, 22 aa, Artificial Sequence
  Cyclic GFR-binding peptide
MGPYVKLYTVVGKDFFLISLSS

SEQ ID NO: 70889 - protein, 39 aa, Artificial Sequence; identical to SEQ ID NO: 23488
  Cyclic GFR-binding peptide
  MOD_RES (1), (3), (35), (36): Xaa is C or S

SEQ ID NO: 70890 - protein, 26 aa, Artificial Sequence
  Cyclic GFR-binding peptide
EVIMPYVKLLLVRGNDFFLMSLSSTK

SEQ ID NO: 70891 - protein, 38 aa, Artificial Sequence; identical to SEQ ID NO: 23490
  Cyclic GFR-binding peptide
  MOD_RES (1), (32), (33): Xaa is C or S

SEQ ID NO: 70892 - protein, 30 aa, Artificial Sequence
  Cyclic GFR-binding peptide
ELHEELRPYVKLLKPKKRVYEFFLVSLSSH

SEQ ID NO: 70893 - protein, 31 aa, Artificial Sequence
  Cyclic GFR-binding peptide
  MOD_RES (2), (4): Xaa is C or S
RXGXESVAMGPYVKLYTVVGKDFFLISLSSL

SEQ ID NO: 70894 - protein, 30 aa, Artificial Sequence
  Cyclic GFR-binding peptide
  MOD_RES (1), (3): Xaa is C or S
XKXSKVIMPYVKLIKPTKGIFFLISLSSLD

SEQ ID NO: 70895 - protein, 39 aa, Artificial Sequence; identical to SEQ ID NO: 23493
  Cyclic GFR-binding peptide
  MOD_RES (37), (37): Xaa is C or S

SEQ ID NO: 70896 - protein, 33 aa, Artificial Sequence
  Cyclic GFR-binding peptide
  MOD_RES (27), (28): Xaa is C or S
DPYVKLVVNNASDFFLISLSSLRTPVXXTPPTS

SEQ ID NO: 70897 - protein, 38 aa, Artificial Sequence; identical to SEQ ID NO: 23495
  Cyclic GFR-binding peptide
  MOD_RES (32), (32): Xaa is C or S

SEQ ID NO: 70898 - protein, 35 aa, Artificial Sequence; identical to SEQ ID NO: 23496
  Cyclic GFR-binding peptide
  MOD_RES (1), (33), (34): Xaa is C or S

SEQ ID NO: 70899 - protein, 32 aa, Artificial Sequence
  Cyclic GFR-binding peptide
  MOD_RES (27), (28): Xaa is C or S
NPYVKLIVNNSSDFFLVSLSSLKTPAXXAKPV

SEQ ID NO: 70900 - protein, 36 aa, Artificial Sequence
  Cyclic GFR-binding peptide
  MOD_RES (30), (31): Xaa is C or S
KVIMPYVKLIKPTKGIFFLISLSSLDQSVXXPSASA

SEQ ID NO: 70901 - protein, 33 aa, Artificial Sequence
  Cyclic GFR-binding peptide
  MOD_RES (2), (4): Xaa is C or S
AXAXELHEELRPYVKLLKPKKRVYEFFLVSLSS

SEQ ID NO: 70902 - protein, 31 aa, Artificial Sequence
  Cyclic GFR-binding peptide
  MOD_RES (1), (1): Xaa is C or S
XARVVMNPYVKLIVNSSDDFFLVSLSSLQTP

SEQ ID NO: 70903 - protein, 31 aa, Artificial Sequence
  Cyclic GFR-binding peptide
  MOD_RES (2), (4): Xaa is C or S
SXKXSKVVMPYVKLVKPTRGVFFLISLSSLD

SEQ ID NO: 70904 - protein, 29 aa, Artificial Sequence
  Cyclic GFR-binding peptide
  MOD_RES (26), (27): Xaa is C or S
PYVKLIIQQKDNFFLMSLSSMKTPTXXPG

SEQ ID NO: 70905 - protein, 37 aa, Artificial Sequence; identical to SEQ ID NO: 23498
  Cyclic GFR-binding peptide
  MOD_RES (1), (33), (34): Xaa is C or S

SEQ ID NO: 70906 - protein, 36 aa, Artificial Sequence; identical to SEQ ID NO: 23499
  Cyclic GFR-binding peptide
  MOD_RES (2), (2): Xaa is C or S

SEQ ID NO: 70907 - protein, 31 aa, Artificial Sequence
  Cyclic GFR-binding peptide
  MOD_RES (1), (1): Xaa is C or S
XGEVVMEPYVKLVVKDYEDFFLMSLSSLETP

SEQ ID NO: 70908 - protein, 27 aa, Artificial Sequence
  Cyclic GFR-binding peptide
PYVKLLKPKKRVYEFFLVSLSSHHVRS

SEQ ID NO: 70909 - protein, 32 aa, Artificial Sequence; identical to SEQ ID NO: 23500
  Cyclic GFR-binding peptide
  MOD_RES (1), (1): Xaa is C or S

SEQ ID NO: 70910 - protein, 30 aa, Artificial Sequence
  Cyclic GFR-binding peptide
  MOD_RES (1), (1): Xaa is C or S
XESVAMGPYVKLYTVVGKDFFLISLSSLKT

SEQ ID NO: 70911 - protein, 37 aa, Artificial Sequence; identical to SEQ ID NO: 23501
  Cyclic GFR-binding peptide
  MOD_RES (2), (4), (36), (37): Xaa is C or S

SEQ ID NO: 70912 - protein, 29 aa, Artificial Sequence
  Cyclic GFR-binding peptide
  MOD_RES (1), (3): Xaa is C or S
XKXSKVVMPYVKLVKPTRGVFFLISLSSL

SEQ ID NO: 70913 - protein, 23 aa, Artificial Sequence
  Cyclic GFR-binding peptide
MNPYVKLIVNSSDDFFLVSLSSL

SEQ ID NO: 70914 - protein, 21 aa, Artificial Sequence
  Cyclic GFR-binding peptide
GPYVKLYTVVGKDFFLISLSS

SEQ ID NO: 70915 - protein, 34 aa, Artificial Sequence
  Cyclic GFR-binding peptide
  MOD_RES (32), (32): Xaa is C or S
HQLFPYVKLHQGQHPKIRFFLMSLSSEETPVXEL

SEQ ID NO: 70916 - protein, 35 aa, Artificial Sequence; identical to SEQ ID NO: 23503
  Cyclic GFR-binding peptide
  MOD_RES (2), (34), (35): Xaa is C or S

SEQ ID NO: 70917 - protein, 33 aa, Artificial Sequence; identical to SEQ ID NO: 23505
  Cyclic GFR-binding peptide
  MOD_RES (31), (32): Xaa is C or S

SEQ ID NO: 70918 - protein, 31 aa, Artificial Sequence; identical to SEQ ID NO: 23506
  Cyclic GFR-binding peptide

SEQ ID NO: 70919 - protein, 31 aa, Artificial Sequence
  Cyclic GFR-binding peptide
  MOD_RES (1), (3): Xaa is C or S
XGXAEVVMDPYVKLVVNNAADFFLISLSSLR

SEQ ID NO: 70920 - protein, 41 aa, Artificial Sequence; identical to SEQ ID NO: 23507
  Cyclic GFR-binding peptide
  MOD_RES (1), (3), (35), (36): Xaa is C or S

SEQ ID NO: 70921 - protein, 41 aa, Artificial Sequence; identical to SEQ ID NO: 23508
  Cyclic GFR-binding peptide
  MOD_RES (1), (38): Xaa is C or S

SEQ ID NO: 70922 - protein, 30 aa, Artificial Sequence
  Cyclic GFR-binding peptide
  MOD_RES (27), (28): Xaa is C or S
GPYVKLIIQQKDNFFLMSLSSMKTPTXXPG

SEQ ID NO: 70923 - protein, 30 aa, Artificial Sequence
  Cyclic GFR-binding peptide
  MOD_RES (29), (30): Xaa is C or S
VMDPYVKLVVKENEDFFLMSLSSLETPVXX

SEQ ID NO: 70924 - protein, 30 aa, Artificial Sequence
  Cyclic GFR-binding peptide
  MOD_RES (26), (27): Xaa is C or S
PYVKLIVNSSDDFFLVSLSSLKTPAXXPKP

SEQ ID NO: 70925 - protein, 27 aa, Artificial Sequence
  Cyclic GFR-binding peptide
  MOD_RES (27), (27): Xaa is C or S
MPYVKLVKPKRGVFFLISLSSLAQPVX

SEQ ID NO: 70926 - protein, 31 aa, Artificial Sequence
  Cyclic GFR-binding peptide
  MOD_RES (1), (3): Xaa is C or S
XGXRDVVMGPYVKLIIQQKDNFFLMSLSSMK

SEQ ID NO: 70927 - protein, 27 aa, Artificial Sequence
  Cyclic GFR-binding peptide
  MOD_RES (26), (27): Xaa is C or S
PYVKLTPVGMDDFFLVSLSSLKTPVXX

SEQ ID NO: 70928 - protein, 38 aa, Artificial Sequence; identical to SEQ ID NO: 23510
  Cyclic GFR-binding peptide
  MOD_RES (1), (3), (35), (36): Xaa is C or S

SEQ ID NO: 70929 - protein, 24 aa, Artificial Sequence
  Cyclic GFR-binding peptide
DPYVKLVVKENEDFFLMSLSSLET

SEQ ID NO: 70930 - protein, 41 aa, Artificial Sequence; identical to SEQ ID NO: 23512
  Cyclic GFR-binding peptide
  MOD_RES (2), (4), (41): Xaa is C or S

SEQ ID NO: 70931 - protein, 33 aa, Artificial Sequence
  Cyclic GFR-binding peptide
  MOD_RES (27), (28): Xaa is C or S
DPYVKLVVNNAADFFLISLSSLRAPVXXSAPAA

SEQ ID NO: 70932 - protein, 38 aa, Artificial Sequence; identical to SEQ ID NO: 23514
  Cyclic GFR-binding peptide
  MOD_RES (1), (3), (35), (36): Xaa is C or S

SEQ ID NO: 70933 - protein, 26 aa, Artificial Sequence
  Cyclic GFR-binding peptide
VVMGPYVKLIIQQKDNFFLMSLSSMK

SEQ ID NO: 70934 - protein, 32 aa, Artificial Sequence
  Cyclic GFR-binding peptide
  MOD_RES (2), (4): Xaa is C or S
RXEXKNHQLFPYVKLHQGQHPKIRFFLMSLSS

SEQ ID NO: 70935 - protein, 35 aa, Artificial Sequence; identical to SEQ ID NO: 23515
  Cyclic GFR-binding peptide
  MOD_RES (1), (33), (34): Xaa is C or S

SEQ ID NO: 70936 - protein, 30 aa, Artificial Sequence; identical to SEQ ID NO: 23516
  Cyclic GFR-binding peptide

SEQ ID NO: 70937 - protein, 40 aa, Artificial Sequence; identical to SEQ ID NO: 23517
  Cyclic GFR-binding peptide
  MOD_RES (1), (34), (35): Xaa is C or S

SEQ ID NO: 70938 - protein, 36 aa, Artificial Sequence; identical to SEQ ID NO: 23518
  Cyclic GFR-binding peptide
  MOD_RES (2), (4): Xaa is C or S

SEQ ID NO: 70939 - protein, 32 aa, Artificial Sequence
  Cyclic GFR-binding peptide
  MOD_RES (28), (29): Xaa is C or S
MNPYVKLIVNSSDDFFLVSLSSLQTPAXXPKP

SEQ ID NO: 70940 - protein, 39 aa, Artificial Sequence; identical to SEQ ID NO: 23519
  Cyclic GFR-binding peptide
  MOD_RES (2), (4), (36), (37): Xaa is C or S

SEQ ID NO: 70941 - protein, 33 aa, Artificial Sequence
  Cyclic GFR-binding peptide
  MOD_RES (27), (27): Xaa is C or S
NPYVKLIVNSSDDFFLVSLSSLKTPAXTPKTVH

SEQ ID NO: 70942 - protein, 36 aa, Artificial Sequence
  Cyclic GFR-binding peptide
  MOD_RES (30), (31): Xaa is C or S
VVMDPYVKLVVKENEDFFLMSLSSLETPVXXAKPIK

SEQ ID NO: 70943 - protein, 33 aa, Artificial Sequence
  Cyclic GFR-binding peptide
  MOD_RES (30), (31): Xaa is C or S
VVMNPYVKLIVNSSDDFFLVSLSSLQTPAXXPK

SEQ ID NO: 70944 - protein, 27 aa, Artificial Sequence
  Cyclic GFR-binding peptide
RVVMNPYVKLIVNSSDDFFLVSLSSLK

SEQ ID NO: 70945 - protein, 24 aa, Artificial Sequence
  Cyclic GFR-binding peptide
PYVKLYTVVGKDFFLISLSSLKTP

SEQ ID NO: 70946 - protein, 22 aa, Artificial Sequence
  Cyclic GFR-binding peptide
DPYVKLVVKENEDFFLMSLSSL

SEQ ID NO: 70947 - protein, 31 aa, Artificial Sequence
  Cyclic GFR-binding peptide
  MOD_RES (31), (31): Xaa is C or S
EVVMDPYVKLVVKENEDFFLMSLSSLETPVX

SEQ ID NO: 70948 - protein, 29 aa, Artificial Sequence
  Cyclic GFR-binding peptide
  MOD_RES (1), (3): Xaa is C or S
XGXSRVVMNPYVKLIVNSSDDFFLVSLSS

SEQ ID NO: 70949 - protein, 29 aa, Artificial Sequence
  Cyclic GFR-binding peptide
  MOD_RES (29), (29): Xaa is C or S
FPYVKLHQGQHPKIRFFLMSLSSEETPVX

SEQ ID NO: 70950 - protein, 26 aa, Artificial Sequence
  Cyclic GFR-binding peptide
KVVMPYVKLVKPTRGVFFLISLSSLD

SEQ ID NO: 70951 - protein, 38 aa, Artificial Sequence; identical to SEQ ID NO: 23521
  Cyclic GFR-binding peptide
  MOD_RES (2), (36): Xaa is C or S

SEQ ID NO: 70952 - protein, 29 aa, Artificial Sequence
  Cyclic GFR-binding peptide
  MOD_RES (1), (1): Xaa is C or S
XSRVIMPYVKLVKPKRGVFFLISLSSLAQ

SEQ ID NO: 70953 - protein, 32 aa, Artificial Sequence; identical to SEQ ID NO: 23523
  Cyclic GFR-binding peptide
  MOD_RES (2), (2): Xaa is C or S

SEQ ID NO: 70954 - protein, 30 aa, Artificial Sequence
  Cyclic GFR-binding peptide
  MOD_RES (1), (1): Xaa is C or S
XAKVVMNPYVKLIVNNSSDFFLVSLSSLKT

SEQ ID NO: 70955 - protein, 22 aa, Artificial Sequence
  Cyclic GFR-binding peptide
EPYVKLVVKDYEDFFLMSLSSL

SEQ ID NO: 70956 - protein, 36 aa, Artificial Sequence; identical to SEQ ID NO: 23524
  Cyclic GFR-binding peptide
  MOD_RES (1), (33), (34): Xaa is C or S

SEQ ID NO: 70957 - protein, 30 aa, Artificial Sequence
  Cyclic GFR-binding peptide
NHQLFPYVKLHQGQHPKIRFFLMSLSSEET

SEQ ID NO: 70958 - protein, 28 aa, Artificial Sequence
  Cyclic GFR-binding peptide
EAVSMGEPYVKLTPVGMDDFFLVSLSSL

SEQ ID NO: 70959 - protein, 25 aa, Artificial Sequence
  Cyclic GFR-binding peptide
PYVKLHQGQHPKIRFFLMSLSSEET

SEQ ID NO: 70960 - protein, 30 aa, Artificial Sequence
  Cyclic GFR-binding peptide
  MOD_RES (2), (2): Xaa is C or S
GXSEVVMDPYVKLVVNNASDFFLISLSSLR

SEQ ID NO: 70961 - protein, 35 aa, Artificial Sequence; identical to SEQ ID NO: 23527
  Cyclic GFR-binding peptide
  MOD_RES (1), (32), (33): Xaa is C or S

SEQ ID NO: 70962 - protein, 28 aa, Artificial Sequence
  Cyclic GFR-binding peptide
AMGPYVKLYTVVGKDFFLISLSSLKTPV

SEQ ID NO: 70963 - protein, 34 aa, Artificial Sequence
  Cyclic GFR-binding peptide
  MOD_RES (30), (31): Xaa is C or S
VVMDPYVKLVVKENEDFFLMSLSSLETPVXXAKP

SEQ ID NO: 70964 - protein, 33 aa, Artificial Sequence; identical to SEQ ID NO: 23532
  Cyclic GFR-binding peptide
  MOD_RES (2), (2): Xaa is C or S

SEQ ID NO: 70965 - protein, 32 aa, Artificial Sequence
  Cyclic GFR-binding peptide
  MOD_RES (28), (28): Xaa is C or S
MNPYVKLIVNSSDDFFLVSLSSLKTPAXTPKT

SEQ ID NO: 70966 - protein, 32 aa, Artificial Sequence
  Cyclic GFR-binding peptide
  MOD_RES (2), (2): Xaa is C or S
GXARVVMNPYVKLIVNSSDDFFLVSLSSLQTP

SEQ ID NO: 70967 - protein, 30 aa, Artificial Sequence
  Cyclic GFR-binding peptide
  MOD_RES (30), (30): Xaa is C or S
VVMDPYVKLVVKENEDFFLMSLSSLETPVX

SEQ ID NO: 70968 - protein, 40 aa, Artificial Sequence; identical to SEQ ID NO: 23535
  Cyclic GFR-binding peptide
  MOD_RES (2), (4), (38): Xaa is C or S

SEQ ID NO: 70969 - protein, 42 aa, Artificial Sequence; identical to SEQ ID NO: 23536
  Cyclic GFR-binding peptide
  MOD_RES (2), (4), (36), (37): Xaa is C or S

SEQ ID NO: 70970 - protein, 32 aa, Artificial Sequence
  Cyclic GFR-binding peptide
  MOD_RES (2), (4): Xaa is C or S
RXGXEAVSMGEPYVKLTPVGMDDFFLVSLSSL

SEQ ID NO: 70971 - protein, 26 aa, Artificial Sequence
  Cyclic GFR-binding peptide
VVMNPYVKLIVNSSDDFFLVSLSSLQ

SEQ ID NO: 70972 - protein, 28 aa, Artificial Sequence
  Cyclic GFR-binding peptide
SKVVMPYVKLVKPTRGVFFLISLSSLDQ

SEQ ID NO: 70973 - protein, 39 aa, Artificial Sequence; identical to SEQ ID NO: 23538
  Cyclic GFR-binding peptide
  MOD_RES (2), (4), (36), (37): Xaa is C or S

SEQ ID NO: 70974 - protein, 31 aa, Artificial Sequence
  Cyclic GFR-binding peptide
EELRPYVKLLKPKKRVYEFFLVSLSSHHVRS

SEQ ID NO: 70975 - protein, 28 aa, Artificial Sequence
  Cyclic GFR-binding peptide
VVMPYVKLVKPTRGVFFLISLSSLDQPV

SEQ ID NO: 70976 - protein, 24 aa, Artificial Sequence
  Cyclic GFR-binding peptide
MEPYVKLVVKDYEDFFLMSLSSLE

SEQ ID NO: 70977 - protein, 26 aa, Artificial Sequence
  Cyclic GFR-binding peptide
EEVIMPYVKLLLVRGNDFFLMSLSST

SEQ ID NO: 70978 - protein, 29 aa, Artificial Sequence
  Cyclic GFR-binding peptide
  MOD_RES (29), (29): Xaa is C or S
VVMPYVKLVKPTRGVFFLISLSSLDQPVX

SEQ ID NO: 70979 - protein, 35 aa, Artificial Sequence
  Cyclic GFR-binding peptide
  MOD_RES (30), (31): Xaa is C or S
SMGEPYVKLTPVGMDDFFLVSLSSLKTPVXXAKGV

SEQ ID NO: 70980 - protein, 32 aa, Artificial Sequence
  Cyclic GFR-binding peptide
  MOD_RES (1), (3): Xaa is C or S
XGXSRVVMNPYVKLIVNSSDDFFLVSLSSLKT

SEQ ID NO: 70981 - protein, 33 aa, Artificial Sequence
  Cyclic GFR-binding peptide
  MOD_RES (29), (30): Xaa is C or S
VMGPYVKLIIQQKDNFFLMSLSSMKTPTXXPGA

SEQ ID NO: 70982 - protein, 25 aa, Artificial Sequence
  Cyclic GFR-binding peptide
PYVKLIVNNSSDFFLVSLSSLKTPA

SEQ ID NO: 70983 - protein, 29 aa, Artificial Sequence
  Cyclic GFR-binding peptide
AAAAAAAAAPYVKLIVNNSSDFFLVSLSS

SEQ ID NO: 70984 - protein, 40 aa, Artificial Sequence; identical to SEQ ID NO: 23544
  Cyclic GFR-binding peptide
  MOD_RES (1), (3), (34), (35): Xaa is C or S

SEQ ID NO: 70985 - protein, 29 aa, Artificial Sequence
  Cyclic GFR-binding peptide
  MOD_RES (26), (27): Xaa is C or S
PYVKLVVNNAADFFLISLSSLRAPVXXSA

SEQ ID NO: 70986 - protein, 33 aa, Artificial Sequence
  Cyclic GFR-binding peptide
  MOD_RES (2), (4): Xaa is C or S
RXGXEAVSMGEPYVKLTPVGMDDFFLVSLSSLK

SEQ ID NO: 70987 - protein, 36 aa, Artificial Sequence
  Cyclic GFR-binding peptide
  MOD_RES (30), (31): Xaa is C or S
EVIMPYVKLLLVRGNDFFLMSLSSTKVPAXXTSPVR

SEQ ID NO: 70988 - protein, 33 aa, Artificial Sequence; identical to SEQ ID NO: 23545
  Cyclic GFR-binding peptide
  MOD_RES (1), (3): Xaa is C or S

SEQ ID NO: 70989 - protein, 33 aa, Artificial Sequence
  Cyclic GFR-binding peptide
  MOD_RES (1), (3): Xaa is C or S
XGXSRVVMNPYVKLIVNSSDDFFLVSLSSLKTP

SEQ ID NO: 70990 - protein, 28 aa, Artificial Sequence
  Cyclic GFR-binding peptide
VVMNPYVKLIVNSSDDFFLVSLSSLKTP

SEQ ID NO: 70991 - protein, 25 aa, Artificial Sequence
  Cyclic GFR-binding peptide
LFPYVKLHQGQHPKIRFFLMSLSSE

SEQ ID NO: 70992 - protein, 28 aa, Artificial Sequence
  Cyclic GFR-binding peptide
  MOD_RES (1), (1): Xaa is C or S
XEAVSMGEPYVKLTPVGMDDFFLVSLSS

SEQ ID NO: 70993 - protein, 25 aa, Artificial Sequence
  Cyclic GFR-binding peptide
MDPYVKLVVNNASDFFLISLSSLRT

SEQ ID NO: 70994 - protein, 35 aa, Artificial Sequence
  Cyclic GFR-binding peptide
  MOD_RES (29), (30): Xaa is C or S
VMDPYVKLVVKENEDFFLMSLSSLETPVXXAKPIK

SEQ ID NO: 70995 - protein, 35 aa, Artificial Sequence; identical to SEQ ID NO: 23546
  Cyclic GFR-binding peptide
  MOD_RES (2), (4): Xaa is C or S

SEQ ID NO: 70996 - protein, 34 aa, Artificial Sequence; identical to SEQ ID NO: 23547
  Cyclic GFR-binding peptide
  MOD_RES (32), (33): Xaa is C or S

SEQ ID NO: 70997 - protein, 31 aa, Artificial Sequence
  Cyclic GFR-binding peptide
  MOD_RES (27), (28): Xaa is C or S
GPYVKLIIQQKDNFFLMSLSSMKTPTXXPGA

SEQ ID NO: 70998 - protein, 39 aa, Artificial Sequence; identical to SEQ ID NO: 23548
  Cyclic GFR-binding peptide
  MOD_RES (2), (34), (35): Xaa is C or S

SEQ ID NO: 70999 - protein, 33 aa, Artificial Sequence; identical to SEQ ID NO: 23549
  Cyclic GFR-binding peptide
  MOD_RES (2), (2): Xaa is C or S

SEQ ID NO: 71000 - protein, 29 aa, Artificial Sequence
  Cyclic GFR-binding peptide
  MOD_RES (29), (29): Xaa is C or S
VIMPYVKLLLVRGNDFFLMSLSSTKVPAX

SEQ ID NO: 71001 - protein, 34 aa, Artificial Sequence; identical to SEQ ID NO: 23550
  Cyclic GFR-binding peptide
  MOD_RES (31), (32): Xaa is C or S

SEQ ID NO: 71002 - protein, 27 aa, Artificial Sequence
  Cyclic GFR-binding peptide
  MOD_RES (26), (27): Xaa is C or S
PYVKLLLVRGNDFFLMSLSSTKVPAXX

SEQ ID NO: 71003 - protein, 34 aa, Artificial Sequence; identical to SEQ ID NO: 23551
  Cyclic GFR-binding peptide
  MOD_RES (1), (3): Xaa is C or S

SEQ ID NO: 71004 - protein, 37 aa, Artificial Sequence; identical to SEQ ID NO: 23552
  Cyclic GFR-binding peptide
  MOD_RES (31), (31): Xaa is C or S

SEQ ID NO: 71005 - protein, 27 aa, Artificial Sequence
  Cyclic GFR-binding peptide
VVMPYVKLVKPTRGVFFLISLSSLDQP

SEQ ID NO: 71006 - protein, 37 aa, Artificial Sequence; identical to SEQ ID NO: 23557
  Cyclic GFR-binding peptide
  MOD_RES (2), (36): Xaa is C or S

SEQ ID NO: 71007 - protein, 35 aa, Artificial Sequence; identical to SEQ ID NO: 23556
  Cyclic GFR-binding peptide
  MOD_RES (2), (33), (34): Xaa is C or S

SEQ ID NO: 71008 - protein, 28 aa, Artificial Sequence
  Cyclic GFR-binding peptide
RVVMNPYVKLIVNSSDDFFLVSLSSLKT

SEQ ID NO: 71009 - protein, 39 aa, Artificial Sequence; identical to SEQ ID NO: 23558
  Cyclic GFR-binding peptide
  MOD_RES (1), (3), (34), (35): Xaa is C or S

SEQ ID NO: 71010 - protein, 31 aa, Artificial Sequence
  Cyclic GFR-binding peptide
  MOD_RES (30), (31): Xaa is C or S
KVVMPYVKLVKPTRGVFFLISLSSLDQPVXX

SEQ ID NO: 71011 - protein, 33 aa, Artificial Sequence
  Cyclic GFR-binding peptide
  MOD_RES (30), (31): Xaa is C or S
KVIMPYVKLIKPTKGIFFLISLSSLDQSVXXPS

SEQ ID NO: 71012 - protein, 37 aa, Artificial Sequence; identical to SEQ ID NO: 23559
  Cyclic GFR-binding peptide
  MOD_RES (2), (34), (35): Xaa is C or S

SEQ ID NO: 71013 - protein, 36 aa, Artificial Sequence; identical to SEQ ID NO: 23560
  Cyclic GFR-binding peptide
  MOD_RES (1), (3), (36): Xaa is C or S

SEQ ID NO: 71014 - protein, 32 aa, Artificial Sequence
  Cyclic GFR-binding peptide
  MOD_RES (31), (32): Xaa is C or S
EVVMDPYVKLVVKENEDFFLMSLSSLETPVXX

SEQ ID NO: 71015 - protein, 32 aa, Artificial Sequence
  Cyclic GFR-binding peptide
  MOD_RES (26), (27): Xaa is C or S
PYVKLVKPKRGVFFLISLSSLAQPVXXPAASA

SEQ ID NO: 71016 - protein, 35 aa, Artificial Sequence; identical to SEQ ID NO: 23564
  Cyclic GFR-binding peptide
  MOD_RES (32), (33): Xaa is C or S

SEQ ID NO: 71017 - protein, 28 aa, Artificial Sequence
  Cyclic GFR-binding peptide
FPYVKLHQGQHPKIRFFLMSLSSEETPV

SEQ ID NO: 71018 - protein, 23 aa, Artificial Sequence
  Cyclic GFR-binding peptide
PYVKLIVNSSDDFFLVSLSSLQT

SEQ ID NO: 71019 - protein, 26 aa, Artificial Sequence
  Cyclic GFR-binding peptide
VVMDPYVKLVVNNASDFFLISLSSLR

SEQ ID NO: 71020 - protein, 28 aa, Artificial Sequence
  Cyclic GFR-binding peptide
  MOD_RES (26), (27): Xaa is C or S
PYVKLVVNNASDFFLISLSSLRTPVXXT

SEQ ID NO: 71021 - protein, 38 aa, Artificial Sequence; identical to SEQ ID NO: 23567
  Cyclic GFR-binding peptide
  MOD_RES (32), (33): Xaa is C or S

SEQ ID NO: 71022 - protein, 31 aa, Artificial Sequence
  Cyclic GFR-binding peptide
  MOD_RES (30), (31): Xaa is C or S
VVMNPYVKLIVNSSDDFFLVSLSSLKTPAXX

SEQ ID NO: 71023 - protein, 32 aa, Artificial Sequence
  Cyclic GFR-binding peptide
  MOD_RES (32), (32): Xaa is C or S
LRPYVKLLKPKKRVYEFFLVSLSSHHVRSPQX

SEQ ID NO: 71024 - protein, 33 aa, Artificial Sequence
  Cyclic GFR-binding peptide
  MOD_RES (2), (4): Xaa is C or S
RXGXGEVVMEPYVKLVVKDYEDFFLMSLSSLET

SEQ ID NO: 71025 - protein, 27 aa, Artificial Sequence
  Cyclic GFR-binding peptide
MDPYVKLVVNNASDFFLISLSSLRTPV

SEQ ID NO: 71026 - protein, 33 aa, Artificial Sequence; identical to SEQ ID NO: 23568
  Cyclic GFR-binding peptide
  MOD_RES (1), (33): Xaa is C or S

SEQ ID NO: 71027 - protein, 29 aa, Artificial Sequence
  Cyclic GFR-binding peptide
VVMDPYVKLVVKENEDFFLMSLSSLETPV

SEQ ID NO: 71028 - protein, 34 aa, Artificial Sequence; identical to SEQ ID NO: 23569
  Cyclic GFR-binding peptide
  MOD_RES (1), (34): Xaa is C or S

SEQ ID NO: 71029 - protein, 34 aa, Artificial Sequence
  Cyclic GFR-binding peptide
  MOD_RES (1), (33), (34): Xaa is C or S
XGEVVMDPYVKLVVKENEDFFLMSLSSLETPVXX

SEQ ID NO: 71030 - protein, 34 aa, Artificial Sequence
  Cyclic GFR-binding peptide
  MOD_RES (2), (4): Xaa is C or S
HXGXSRVVMNPYVKLIVNSSDDFFLVSLSSLKTP

SEQ ID NO: 71031 - protein, 38 aa, Artificial Sequence; identical to SEQ ID NO: 23570
  Cyclic GFR-binding peptide
  MOD_RES (2), (35), (36): Xaa is C or S

SEQ ID NO: 71032 - protein, 26 aa, Artificial Sequence
  Cyclic GFR-binding peptide
VMEPYVKLVVKDYEDFFLMSLSSLET

SEQ ID NO: 71033 - protein, 30 aa, Artificial Sequence
  Cyclic GFR-binding peptide
  MOD_RES (2), (4): Xaa is C or S
HXGXAKVVMNPYVKLIVNNSSDFFLVSLSS

SEQ ID NO: 71034 - protein, 28 aa, Artificial Sequence
  Cyclic GFR-binding peptide
  MOD_RES (28), (28): Xaa is C or S
MDPYVKLVVNNAADFFLISLSSLRAPVX

SEQ ID NO: 71035 - protein, 34 aa, Artificial Sequence
  Cyclic GFR-binding peptide
  MOD_RES (32), (33): Xaa is C or S
GEVVMDPYVKLVVKENEDFFLMSLSSLETPVXXA

SEQ ID NO: 71036 - protein, 36 aa, Artificial Sequence; identical to SEQ ID NO: 23571
  Cyclic GFR-binding peptide
  MOD_RES (31), (32): Xaa is C or S

SEQ ID NO: 71037 - protein, 26 aa, Artificial Sequence
  Cyclic GFR-binding peptide
MPYVKLLLVRGNDFFLMSLSSTKVPA

SEQ ID NO: 71038 - protein, 30 aa, Artificial Sequence
  Cyclic GFR-binding peptide
  MOD_RES (30), (30): Xaa is C or S
VVMNPYVKLIVNSSDDFFLVSLSSLQTPAX

SEQ ID NO: 71039 - protein, 40 aa, Artificial Sequence; identical to SEQ ID NO: 23572
  Cyclic GFR-binding peptide
  MOD_RES (34), (34): Xaa is C or S

SEQ ID NO: 71040 - protein, 22 aa, Artificial Sequence
  Cyclic GFR-binding peptide
PYVKLHQGQHPKIRFFLMSLSS

SEQ ID NO: 71041 - protein, 23 aa, Artificial Sequence
  Cyclic GFR-binding peptide
VIMPYVKLLLVRGNDFFLMSLSS

SEQ ID NO: 71042 - protein, 34 aa, Artificial Sequence
  Cyclic GFR-binding peptide
  MOD_RES (31), (32): Xaa is C or S
EVVMDPYVKLVVKENEDFFLMSLSSLETPVXXAK

SEQ ID NO: 71043 - protein, 35 aa, Artificial Sequence; identical to SEQ ID NO: 23574
  Cyclic GFR-binding peptide
  MOD_RES (2), (34), (35): Xaa is C or S

SEQ ID NO: 71044 - protein, 33 aa, Artificial Sequence; identical to SEQ ID NO: 23575
  Cyclic GFR-binding peptide
  MOD_RES (2), (2): Xaa is C or S

SEQ ID NO: 71045 - protein, 42 aa, Artificial Sequence; identical to SEQ ID NO: 23576
  Cyclic GFR-binding peptide
  MOD_RES (1), (3), (40): Xaa is C or S

SEQ ID NO: 71046 - protein, 26 aa, Artificial Sequence
  Cyclic GFR-binding peptide
VMDPYVKLVVNNASDFFLISLSSLRT

SEQ ID NO: 71047 - protein, 31 aa, Artificial Sequence
  Cyclic GFR-binding peptide
  MOD_RES (29), (29): Xaa is C or S
FPYVKLHQGQHPKIRFFLMSLSSEETPVXEL

SEQ ID NO: 71048 - protein, 34 aa, Artificial Sequence; identical to SEQ ID NO: 23579
  Cyclic GFR-binding peptide
  MOD_RES (1), (3), (34): Xaa is C or S

SEQ ID NO: 71049 - protein, 32 aa, Artificial Sequence
  Cyclic GFR-binding peptide
  MOD_RES (28), (29): Xaa is C or S
MDPYVKLVVKENEDFFLMSLSSLETPVXXAKP

SEQ ID NO: 71050 - protein, 36 aa, Artificial Sequence
  Cyclic GFR-binding peptide
  MOD_RES (30), (31): Xaa is C or S
VVMGPYVKLIIQQKDNFFLMSLSSMKTPTXXPGASG

SEQ ID NO: 71051 - protein, 35 aa, Artificial Sequence
  Cyclic GFR-binding peptide
  MOD_RES (32), (32): Xaa is C or S
HQLFPYVKLHQGQHPKIRFFLMSLSSEETPVXELG

SEQ ID NO: 71052 - protein, 37 aa, Artificial Sequence; identical to SEQ ID NO: 23581
  Cyclic GFR-binding peptide
  MOD_RES (32), (33): Xaa is C or S

SEQ ID NO: 71053 - protein, 30 aa, Artificial Sequence
  Cyclic GFR-binding peptide
  MOD_RES (28), (29): Xaa is C or S
IMPYVKLLLVRGNDFFLMSLSSTKVPAXXT

SEQ ID NO: 71054 - protein, 31 aa, Artificial Sequence
  Cyclic GFR-binding peptide
  MOD_RES (2), (4): Xaa is C or S
RXGXGEVVMEPYVKLVVKDYEDFFLMSLSSL

SEQ ID NO: 71055 - protein, 35 aa, Artificial Sequence
  Cyclic GFR-binding peptide
  MOD_RES (2), (4): Xaa is C or S
RXGXEAVSMGEPYVKLTPVGMDDFFLVSLSSLKTP

SEQ ID NO: 71056 - protein, 29 aa, Artificial Sequence
  Cyclic GFR-binding peptide
  MOD_RES (26), (27): Xaa is C or S
PYVKLVKPTRGVFFLISLSSLDQPVXXPS

SEQ ID NO: 71057 - protein, 35 aa, Artificial Sequence
  Cyclic GFR-binding peptide
  MOD_RES (30), (30): Xaa is C or S
VVMNPYVKLIVNSSDDFFLVSLSSLKTPAXTPKTV

SEQ ID NO: 71058 - protein, 29 aa, Artificial Sequence
  Cyclic GFR-binding peptide
  MOD_RES (1), (3): Xaa is C or S
XGXRDVVMGPYVKLIIQQKDNFFLMSLSS

SEQ ID NO: 71059 - protein, 27 aa, Artificial Sequence
  Cyclic GFR-binding peptide
FPYVKLHQGQHPKIRFFLMSLSSEETP

SEQ ID NO: 71060 - protein, 37 aa, Artificial Sequence; identical to SEQ ID NO: 23589
  Cyclic GFR-binding peptide
  MOD_RES (31), (32): Xaa is C or S

SEQ ID NO: 71061 - protein, 26 aa, Artificial Sequence
  Cyclic GFR-binding peptide
VIMPYVKLVKPKRGVFFLISLSSLAQ

SEQ ID NO: 71062 - protein, 34 aa, Artificial Sequence
  Cyclic GFR-binding peptide
  MOD_RES (28), (29): Xaa is C or S
MDPYVKLVVNNASDFFLISLSSLRTPVXXTPPTS

SEQ ID NO: 71063 - protein, 33 aa, Artificial Sequence
  Cyclic GFR-binding peptide
  MOD_RES (1), (33): Xaa is C or S
XGEVVMDPYVKLVVKENEDFFLMSLSSLETPVX

SEQ ID NO: 71064 - protein, 22 aa, Artificial Sequence
  Cyclic GFR-binding peptide
MDPYVKLVVNNAADFFLISLSS

SEQ ID NO: 71065 - protein, 25 aa, Artificial Sequence
  Cyclic GFR-binding peptide
DPYVKLVVNNASDFFLISLSSLRTP

SEQ ID NO: 71066 - protein, 40 aa, Artificial Sequence; identical to SEQ ID NO: 23591
  Cyclic GFR-binding peptide
  MOD_RES (1), (3), (34), (35): Xaa is C or S

SEQ ID NO: 71067 - protein, 38 aa, Artificial Sequence; identical to SEQ ID NO: 23592
  Cyclic GFR-binding peptide
  MOD_RES (1), (33), (34): Xaa is C or S

SEQ ID NO: 71068 - protein, 34 aa, Artificial Sequence; identical to SEQ ID NO: 23594
  Cyclic GFR-binding peptide
  MOD_RES (1), (33), (34): Xaa is C or S

SEQ ID NO: 71069 - protein, 22 aa, Artificial Sequence
  Cyclic GFR-binding peptide
MNPYVKLIVNNSSDFFLVSLSS

SEQ ID NO: 71070 - protein, 34 aa, Artificial Sequence; identical to SEQ ID NO: 23595
  Cyclic GFR-binding peptide
  MOD_RES (2), (33), (34): Xaa is C or S

SEQ ID NO: 71071 - protein, 24 aa, Artificial Sequence
  Cyclic GFR-binding peptide
VIMPYVKLVKPKRGVFFLISLSSL

SEQ ID NO: 71072 - protein, 31 aa, Artificial Sequence
  Cyclic GFR-binding peptide
  MOD_RES (31), (31): Xaa is C or S
RPYVKLLKPKKRVYEFFLVSLSSHHVRSPQX

SEQ ID NO: 71073 - protein, 35 aa, Artificial Sequence; identical to SEQ ID NO: 23597
  Cyclic GFR-binding peptide
  MOD_RES (1), (1): Xaa is C or S

SEQ ID NO: 71074 - protein, 36 aa, Artificial Sequence; identical to SEQ ID NO: 23596
  Cyclic GFR-binding peptide
  MOD_RES (1), (33), (34): Xaa is C or S

SEQ ID NO: 71075 - protein, 27 aa, Artificial Sequence
  Cyclic GFR-binding peptide
VMNPYVKLIVNSSDDFFLVSLSSLKTP

SEQ ID NO: 71076 - protein, 31 aa, Artificial Sequence
  Cyclic GFR-binding peptide
  MOD_RES (27), (28): Xaa is C or S
DPYVKLVVKENEDFFLMSLSSLETPVXXAKP

SEQ ID NO: 71077 - protein, 28 aa, Artificial Sequence
  Cyclic GFR-binding peptide
  MOD_RES (2), (2): Xaa is C or S
KXSKVVMPYVKLVKPTRGVFFLISLSSL

SEQ ID NO: 71078 - protein, 23 aa, Artificial Sequence
  Cyclic GFR-binding peptide
PYVKLVVNNASDFFLISLSSLRT

SEQ ID NO: 71079 - protein, 36 aa, Artificial Sequence; identical to SEQ ID NO: 23599
  Cyclic GFR-binding peptide
  MOD_RES (31), (32): Xaa is C or S

SEQ ID NO: 71080 - protein, 25 aa, Artificial Sequence
  Cyclic GFR-binding peptide
VMNPYVKLIVNSSDDFFLVSLSSLQ

SEQ ID NO: 71081 - protein, 36 aa, Artificial Sequence; identical to SEQ ID NO: 23600
  Cyclic GFR-binding peptide
  MOD_RES (1), (35): Xaa is C or S

SEQ ID NO: 71082 - protein, 27 aa, Artificial Sequence
  Cyclic GFR-binding peptide
PYVKLHQGQHPKIRFFLMSLSSEETPV

SEQ ID NO: 71083 - protein, 29 aa, Artificial Sequence
  Cyclic GFR-binding peptide
  MOD_RES (1), (1): Xaa is C or S
XAKVVMNPYVKLIVNNSSDFFLVSLSSLK

SEQ ID NO: 71084 - protein, 32 aa, Artificial Sequence
  Cyclic GFR-binding peptide
  MOD_RES (28), (29): Xaa is C or S
IMPYVKLIKPTKGIFFLISLSSLDQSVXXPSA

SEQ ID NO: 71085 - protein, 35 aa, Artificial Sequence; identical to SEQ ID NO: 23603
  Cyclic GFR-binding peptide
  MOD_RES (1), (3), (34), (35): Xaa is C or S

SEQ ID NO: 71086 - protein, 34 aa, Artificial Sequence; identical to SEQ ID NO: 23604
  Cyclic GFR-binding peptide

SEQ ID NO: 71087 - protein, 27 aa, Artificial Sequence
  Cyclic GFR-binding peptide
  MOD_RES (1), (1): Xaa is C or S
XSRVVMNPYVKLIVNSSDDFFLVSLSS

SEQ ID NO: 71088 - protein, 38 aa, Artificial Sequence; identical to SEQ ID NO: 23605
  Cyclic GFR-binding peptide
  MOD_RES (1), (3), (35): Xaa is C or S

SEQ ID NO: 71089 - protein, 30 aa, Artificial Sequence; identical to SEQ ID NO: 23606
  Cyclic GFR-binding peptide

SEQ ID NO: 71090 - protein, 29 aa, Artificial Sequence
  Cyclic GFR-binding peptide
LRPYVKLLKPKKRVYEFFLVSLSSHHVRS

SEQ ID NO: 71091 - protein, 29 aa, Artificial Sequence
  Cyclic GFR-binding peptide
SRVIMPYVKLVKPKRGVFFLISLSSLAQP

SEQ ID NO: 71092 - protein, 37 aa, Artificial Sequence; identical to SEQ ID NO: 23609
  Cyclic GFR-binding peptide
  MOD_RES (2), (4), (36), (37): Xaa is C or S

SEQ ID NO: 71093 - protein, 37 aa, Artificial Sequence; identical to SEQ ID NO: 23610
  Cyclic GFR-binding peptide
  MOD_RES (2), (4), (36), (37): Xaa is C or S

SEQ ID NO: 71094 - protein, 40 aa, Artificial Sequence; identical to SEQ ID NO: 23611
  Cyclic GFR-binding peptide
  MOD_RES (2), (4), (36): Xaa is C or S

SEQ ID NO: 71095 - protein, 24 aa, Artificial Sequence
  Cyclic GFR-binding peptide
VVMNPYVKLIVNNSSDFFLVSLSS

SEQ ID NO: 71096 - protein, 29 aa, Artificial Sequence
  Cyclic GFR-binding peptide
VVMGPYVKLIIQQKDNFFLMSLSSMKTPT

SEQ ID NO: 71097 - protein, 31 aa, Artificial Sequence
  Cyclic GFR-binding peptide
  MOD_RES (2), (4): Xaa is C or S
HXGXARVVMNPYVKLIVNSSDDFFLVSLSSL

SEQ ID NO: 71098 - protein, 28 aa, Artificial Sequence
  Cyclic GFR-binding peptide
QLFPYVKLHQGQHPKIRFFLMSLSSEET

SEQ ID NO: 71099 - protein, 25 aa, Artificial Sequence
  Cyclic GFR-binding peptide
VVMNPYVKLIVNSSDDFFLVSLSSL

SEQ ID NO: 71100 - protein, 28 aa, Artificial Sequence
  Cyclic GFR-binding peptide
RDVVMGPYVKLIIQQKDNFFLMSLSSMK

SEQ ID NO: 71101 - protein, 25 aa, Artificial Sequence
  Cyclic GFR-binding peptide
PYVKLTPVGMDDFFLVSLSSLKTPV

SEQ ID NO: 71102 - protein, 31 aa, Artificial Sequence
  Cyclic GFR-binding peptide
  MOD_RES (27), (28): Xaa is C or S
NPYVKLIVNSSDDFFLVSLSSLQTPAXXPKP

SEQ ID NO: 71103 - protein, 31 aa, Artificial Sequence; identical to SEQ ID NO: 23616
  Cyclic GFR-binding peptide

SEQ ID NO: 71104 - protein, 31 aa, Artificial Sequence
  Cyclic GFR-binding peptide
  MOD_RES (26), (27): Xaa is C or S
PYVKLVVNNASDFFLISLSSLRTPVXXTPPT

SEQ ID NO: 71105 - protein, 30 aa, Artificial Sequence
  Cyclic GFR-binding peptide
SEVVMDPYVKLVVNNASDFFLISLSSLRTP

SEQ ID NO: 71106 - protein, 36 aa, Artificial Sequence; identical to SEQ ID NO: 23620
  Cyclic GFR-binding peptide
  MOD_RES (1), (3), (35), (36): Xaa is C or S

SEQ ID NO: 71107 - protein, 37 aa, Artificial Sequence; identical to SEQ ID NO: 23621
  Cyclic GFR-binding peptide
  MOD_RES (1), (3), (35), (36): Xaa is C or S

SEQ ID NO: 71108 - protein, 36 aa, Artificial Sequence; identical to SEQ ID NO: 23623
  Cyclic GFR-binding peptide
  MOD_RES (1), (33), (34): Xaa is C or S

SEQ ID NO: 71109 - protein, 42 aa, Artificial Sequence; identical to SEQ ID NO: 23624
  Cyclic GFR-binding peptide
  MOD_RES (2), (4), (36), (37): Xaa is C or S

SEQ ID NO: 71110 - protein, 38 aa, Artificial Sequence; identical to SEQ ID NO: 23626
  Cyclic GFR-binding peptide
  MOD_RES (1), (34), (35): Xaa is C or S

SEQ ID NO: 71111 - protein, 24 aa, Artificial Sequence
  Cyclic GFR-binding peptide
VIMPYVKLIKPTKGIFFLISLSSL

SEQ ID NO: 71112 - protein, 35 aa, Artificial Sequence
  Cyclic GFR-binding peptide
  MOD_RES (1), (3): Xaa is C or S
XAXELHEELRPYVKLLKPKKRVYEFFLVSLSSHHV

SEQ ID NO: 71113 - protein, 23 aa, Artificial Sequence
  Cyclic GFR-binding peptide
VVMPYVKLVKPTRGVFFLISLSS

SEQ ID NO: 71114 - protein, 23 aa, Artificial Sequence
  Cyclic GFR-binding peptide
PYVKLVVKENEDFFLMSLSSLET

SEQ ID NO: 71115 - protein, 34 aa, Artificial Sequence; identical to SEQ ID NO: 23627
  Cyclic GFR-binding peptide
  MOD_RES (2), (34): Xaa is C or S

SEQ ID NO: 71116 - protein, 30 aa, Artificial Sequence
  Cyclic GFR-binding peptide
  MOD_RES (2), (2): Xaa is C or S
GXAKVVMNPYVKLIVNNSSDFFLVSLSSLK

SEQ ID NO: 71117 - protein, 33 aa, Artificial Sequence; identical to SEQ ID NO: 23628
  Cyclic GFR-binding peptide

SEQ ID NO: 71118 - protein, 24 aa, Artificial Sequence
  Cyclic GFR-binding peptide
RVIMPYVKLVKPKRGVFFLISLSS

SEQ ID NO: 71119 - protein, 30 aa, Artificial Sequence
  Cyclic GFR-binding peptide
  MOD_RES (30), (30): Xaa is C or S
VVMDPYVKLVVNNAADFFLISLSSLRAPVX

SEQ ID NO: 71120 - protein, 29 aa, Artificial Sequence
  Cyclic GFR-binding peptide
  MOD_RES (1), (1): Xaa is C or S
XSEVVMDPYVKLVVNNASDFFLISLSSLR

SEQ ID NO: 71121 - protein, 30 aa, Artificial Sequence
  Cyclic GFR-binding peptide
  MOD_RES (27), (28): Xaa is C or S
MPYVKLVKPKRGVFFLISLSSLAQPVXXPA

SEQ ID NO: 71122 - protein, 30 aa, Artificial Sequence
  Cyclic GFR-binding peptide
  MOD_RES (29), (30): Xaa is C or S
VMNPYVKLIVNSSDDFFLVSLSSLKTPAXX

SEQ ID NO: 71123 - protein, 36 aa, Artificial Sequence
  Cyclic GFR-binding peptide
  MOD_RES (30), (31): Xaa is C or S
VVMNPYVKLIVNSSDDFFLVSLSSLKTPAXXPKPVY

SEQ ID NO: 71124 - protein, 28 aa, Artificial Sequence
  Cyclic GFR-binding peptide
VIMPYVKLLLVRGNDFFLMSLSSTKVPA

SEQ ID NO: 71125 - protein, 29 aa, Artificial Sequence
  Cyclic GFR-binding peptide
  MOD_RES (2), (2): Xaa is C or S
GXARVVMNPYVKLIVNSSDDFFLVSLSSL

SEQ ID NO: 71126 - protein, 30 aa, Artificial Sequence
  Cyclic GFR-binding peptide
  MOD_RES (29), (30): Xaa is C or S
VMNPYVKLIVNNSSDFFLVSLSSLKTPAXX

SEQ ID NO: 71127 - protein, 29 aa, Artificial Sequence
  Cyclic GFR-binding peptide
VVMEPYVKLVVKDYEDFFLMSLSSLETPV

SEQ ID NO: 71128 - protein, 23 aa, Artificial Sequence
  Cyclic GFR-binding peptide
VMEPYVKLVVKDYEDFFLMSLSS

SEQ ID NO: 71129 - protein, 27 aa, Artificial Sequence
  Cyclic GFR-binding peptide
SRVVMNPYVKLIVNSSDDFFLVSLSSL

SEQ ID NO: 71130 - protein, 29 aa, Artificial Sequence
  Cyclic GFR-binding peptide
AEVVMDPYVKLVVNNAADFFLISLSSLRA

SEQ ID NO: 71131 - protein, 33 aa, Artificial Sequence
  Cyclic GFR-binding peptide
  MOD_RES (27), (28): Xaa is C or S
MPYVKLLLVRGNDFFLMSLSSTKVPAXXTSPVR

SEQ ID NO: 71132 - protein, 35 aa, Artificial Sequence; identical to SEQ ID NO: 23633
  Cyclic GFR-binding peptide
  MOD_RES (1), (3), (35): Xaa is C or S

SEQ ID NO: 71133 - protein, 35 aa, Artificial Sequence
  Cyclic GFR-binding peptide
  MOD_RES (29), (30): Xaa is C or S
VVMPYVKLVKPTRGVFFLISLSSLDQPVXXPSASA

SEQ ID NO: 71134 - protein, 40 aa, Artificial Sequence; identical to SEQ ID NO: 23634
  Cyclic GFR-binding peptide
  MOD_RES (2), (34), (35): Xaa is C or S

SEQ ID NO: 71135 - protein, 28 aa, Artificial Sequence
  Cyclic GFR-binding peptide
  MOD_RES (27), (28): Xaa is C or S
MPYVKLIKPTKGIFFLISLSSLDQSVXX

SEQ ID NO: 71136 - protein, 34 aa, Artificial Sequence; identical to SEQ ID NO: 23635
  Cyclic GFR-binding peptide
  MOD_RES (2), (33), (34): Xaa is C or S

SEQ ID NO: 71137 - protein, 27 aa, Artificial Sequence
  Cyclic GFR-binding peptide
MNPYVKLIVNSSDDFFLVSLSSLQTPA

SEQ ID NO: 71138 - protein, 33 aa, Artificial Sequence; identical to SEQ ID NO: 23636
  Cyclic GFR-binding peptide
  MOD_RES (32), (32): Xaa is C or S

SEQ ID NO: 71139 - protein, 32 aa, Artificial Sequence
  Cyclic GFR-binding peptide
  MOD_RES (31), (31): Xaa is C or S
RPYVKLLKPKKRVYEFFLVSLSSHHVRSPQXK

SEQ ID NO: 71140 - protein, 32 aa, Artificial Sequence
  Cyclic GFR-binding peptide
  MOD_RES (28), (28): Xaa is C or S
PYVKLHQGQHPKIRFFLMSLSSEETPVXELGE

SEQ ID NO: 71141 - protein, 31 aa, Artificial Sequence
  Cyclic GFR-binding peptide
  MOD_RES (30), (31): Xaa is C or S
VAMGPYVKLYTVVGKDFFLISLSSLKTPVXX

SEQ ID NO: 71142 - protein, 27 aa, Artificial Sequence
  Cyclic GFR-binding peptide
ARVVMNPYVKLIVNSSDDFFLVSLSSL

SEQ ID NO: 71143 - protein, 27 aa, Artificial Sequence
  Cyclic GFR-binding peptide
VVMDPYVKLVVKENEDFFLMSLSSLET

SEQ ID NO: 71144 - protein, 33 aa, Artificial Sequence; identical to SEQ ID NO: 23639
  Cyclic GFR-binding peptide
  MOD_RES (31), (32): Xaa is C or S

SEQ ID NO: 71145 - protein, 24 aa, Artificial Sequence
  Cyclic GFR-binding peptide
VVMDPYVKLVVNNASDFFLISLSS

SEQ ID NO: 71146 - protein, 28 aa, Artificial Sequence
  Cyclic GFR-binding peptide
  MOD_RES (26), (27): Xaa is C or S
PYVKLIVNNSSDFFLVSLSSLKTPAXXA

SEQ ID NO: 71147 - protein, 24 aa, Artificial Sequence
  Cyclic GFR-binding peptide
LRPYVKLLKPKKRVYEFFLVSLSS

SEQ ID NO: 71148 - protein, 39 aa, Artificial Sequence; identical to SEQ ID NO: 23640
  Cyclic GFR-binding peptide
  MOD_RES (1), (33), (34): Xaa is C or S

SEQ ID NO: 71149 - protein, 31 aa, Artificial Sequence
  Cyclic GFR-binding peptide
  MOD_RES (1), (1): Xaa is C or S
XAKVVMNPYVKLIVNNSSDFFLVSLSSLKTP

SEQ ID NO: 71150 - protein, 31 aa, Artificial Sequence
  Cyclic GFR-binding peptide
  MOD_RES (1), (3): Xaa is C or S
XKXSKVIMPYVKLIKPTKGIFFLISLSSLDQ

SEQ ID NO: 71151 - protein, 27 aa, Artificial Sequence
  Cyclic GFR-binding peptide
VVMNPYVKLIVNSSDDFFLVSLSSLKT

SEQ ID NO: 71152 - protein, 37 aa, Artificial Sequence; identical to SEQ ID NO: 23643
  Cyclic GFR-binding peptide
  MOD_RES (2), (33), (34): Xaa is C or S

SEQ ID NO: 71153 - protein, 36 aa, Artificial Sequence; identical to SEQ ID NO: 23645
  Cyclic GFR-binding peptide
  MOD_RES (33), (34): Xaa is C or S

SEQ ID NO: 71154 - protein, 33 aa, Artificial Sequence
  Cyclic GFR-binding peptide
  MOD_RES (29), (30): Xaa is C or S
VIMPYVKLIKPTKGIFFLISLSSLDQSVXXPSA

SEQ ID NO: 71155 - protein, 31 aa, Artificial Sequence
  Cyclic GFR-binding peptide
  MOD_RES (2), (2): Xaa is C or S
KXSKVIMPYVKLIKPTKGIFFLISLSSLDQS

SEQ ID NO: 71156 - protein, 28 aa, Artificial Sequence
  Cyclic GFR-binding peptide
NHQLFPYVKLHQGQHPKIRFFLMSLSSE

SEQ ID NO: 71157 - protein, 26 aa, Artificial Sequence
  Cyclic GFR-binding peptide
VVMNPYVKLIVNSSDDFFLVSLSSLK

SEQ ID NO: 71158 - protein, 36 aa, Artificial Sequence; identical to SEQ ID NO: 23646
  Cyclic GFR-binding peptide
  MOD_RES (2), (34), (35): Xaa is C or S

SEQ ID NO: 71159 - protein, 31 aa, Artificial Sequence
  Cyclic GFR-binding peptide
  MOD_RES (27), (28): Xaa is C or S
EPYVKLTPVGMDDFFLVSLSSLKTPVXXAKG

SEQ ID NO: 71160 - protein, 39 aa, Artificial Sequence; identical to SEQ ID NO: 23647
  Cyclic GFR-binding peptide
  MOD_RES (1), (3), (35), (36): Xaa is C or S

SEQ ID NO: 71161 - protein, 39 aa, Artificial Sequence; identical to SEQ ID NO: 23649
  Cyclic GFR-binding peptide
  MOD_RES (2), (4): Xaa is C or S

SEQ ID NO: 71162 - protein, 29 aa, Artificial Sequence
  Cyclic GFR-binding peptide
  MOD_RES (1), (3): Xaa is C or S
XGXGEVVMEPYVKLVVKDYEDFFLMSLSS

SEQ ID NO: 71163 - protein, 22 aa, Artificial Sequence
  Cyclic GFR-binding peptide
MPYVKLLLVRGNDFFLMSLSST

SEQ ID NO: 71164 - protein, 32 aa, Artificial Sequence; identical to SEQ ID NO: 23651
  Cyclic GFR-binding peptide
  MOD_RES (31), (32): Xaa is C or S

SEQ ID NO: 71165 - protein, 33 aa, Artificial Sequence
  Cyclic GFR-binding peptide
  MOD_RES (31), (32): Xaa is C or S
EVVMDPYVKLVVKENEDFFLMSLSSLETPVXXA

SEQ ID NO: 71166 - protein, 29 aa, Artificial Sequence
  Cyclic GFR-binding peptide
  MOD_RES (28), (29): Xaa is C or S
IMPYVKLLLVRGNDFFLMSLSSTKVPAXX

SEQ ID NO: 71167 - protein, 22 aa, Artificial Sequence
  Cyclic GFR-binding peptide
IMPYVKLLLVRGNDFFLMSLSS

SEQ ID NO: 71168 - protein, 28 aa, Artificial Sequence
  Cyclic GFR-binding peptide
VMNPYVKLIVNNSSDFFLVSLSSLKTPA

SEQ ID NO: 71169 - protein, 30 aa, Artificial Sequence
  Cyclic GFR-binding peptide
  MOD_RES (26), (27): Xaa is C or S
PYVKLIKPTKGIFFLISLSSLDQSVXXPSA

SEQ ID NO: 71170 - protein, 29 aa, Artificial Sequence
  Cyclic GFR-binding peptide
  MOD_RES (28), (28): Xaa is C or S
PYVKLHQGQHPKIRFFLMSLSSEETPVXE

SEQ ID NO: 71171 - protein, 32 aa, Artificial Sequence
  Cyclic GFR-binding peptide
  MOD_RES (29), (30): Xaa is C or S
VVMPYVKLVKPTRGVFFLISLSSLDQPVXXPS

SEQ ID NO: 71172 - protein, 29 aa, Artificial Sequence
  Cyclic GFR-binding peptide
KNHQLFPYVKLHQGQHPKIRFFLMSLSSE

SEQ ID NO: 71173 - protein, 31 aa, Artificial Sequence; identical to SEQ ID NO: 23652
  Cyclic GFR-binding peptide
  MOD_RES (31), (31): Xaa is C or S

SEQ ID NO: 71174 - protein, 36 aa, Artificial Sequence; identical to SEQ ID NO: 23653
  Cyclic GFR-binding peptide

SEQ ID NO: 71175 - protein, 25 aa, Artificial Sequence
  Cyclic GFR-binding peptide
QLFPYVKLHQGQHPKIRFFLMSLSS

SEQ ID NO: 71176 - protein, 25 aa, Artificial Sequence
  Cyclic GFR-binding peptide
MPYVKLLLVRGNDFFLMSLSSTKVP

SEQ ID NO: 71177 - protein, 29 aa, Artificial Sequence
  Cyclic GFR-binding peptide
  MOD_RES (29), (29): Xaa is C or S
VMDPYVKLVVNNASDFFLISLSSLRTPVX

SEQ ID NO: 71178 - protein, 40 aa, Artificial Sequence; identical to SEQ ID NO: 23658
  Cyclic GFR-binding peptide
  MOD_RES (2), (34), (35): Xaa is C or S

SEQ ID NO: 71179 - protein, 24 aa, Artificial Sequence
  Cyclic GFR-binding peptide
MPYVKLLLVRGNDFFLMSLSSTKV

SEQ ID NO: 71180 - protein, 28 aa, Artificial Sequence
  Cyclic GFR-binding peptide
  MOD_RES (26), (27): Xaa is C or S
PYVKLYTVVGKDFFLISLSSLKTPVXXA

SEQ ID NO: 71181 - protein, 32 aa, Artificial Sequence; identical to SEQ ID NO: 23660
  Cyclic GFR-binding peptide
  MOD_RES (1), (1): Xaa is C or S

SEQ ID NO: 71182 - protein, 31 aa, Artificial Sequence
  Cyclic GFR-binding peptide
  MOD_RES (1), (3): Xaa is C or S
XGXESVAMGPYVKLYTVVGKDFFLISLSSLK

SEQ ID NO: 71183 - protein, 29 aa, Artificial Sequence
  Cyclic GFR-binding peptide
ARVVMNPYVKLIVNSSDDFFLVSLSSLQT

SEQ ID NO: 71184 - protein, 33 aa, Artificial Sequence
  Cyclic GFR-binding peptide
  MOD_RES (28), (29): Xaa is C or S
IMPYVKLVKPKRGVFFLISLSSLAQPVXXPAAS

SEQ ID NO: 71185 - protein, 33 aa, Artificial Sequence
  Cyclic GFR-binding peptide
  MOD_RES (27), (28): Xaa is C or S
GPYVKLYTVVGKDFFLISLSSLKTPVXXAKSAK

SEQ ID NO: 71186 - protein, 26 aa, Artificial Sequence
  Cyclic GFR-binding peptide
AKVVMNPYVKLIVNNSSDFFLVSLSS

SEQ ID NO: 71187 - protein, 33 aa, Artificial Sequence; identical to SEQ ID NO: 23661
  Cyclic GFR-binding peptide
  MOD_RES (32), (33): Xaa is C or S

SEQ ID NO: 71188 - protein, 23 aa, Artificial Sequence
  Cyclic GFR-binding peptide
IMPYVKLLLVRGNDFFLMSLSST

SEQ ID NO: 71189 - protein, 29 aa, Artificial Sequence
  Cyclic GFR-binding peptide
  MOD_RES (29), (29): Xaa is C or S
VIMPYVKLVKPKRGVFFLISLSSLAQPVX

SEQ ID NO: 71190 - protein, 36 aa, Artificial Sequence; identical to SEQ ID NO: 23664
  Cyclic GFR-binding peptide
  MOD_RES (32), (32): Xaa is C or S

SEQ ID NO: 71191 - protein, 34 aa, Artificial Sequence; identical to SEQ ID NO: 23665
  Cyclic GFR-binding peptide
  MOD_RES (33), (33): Xaa is C or S

SEQ ID NO: 71192 - protein, 23 aa, Artificial Sequence
  Cyclic GFR-binding peptide
VMDPYVKLVVNNAADFFLISLSS

SEQ ID NO: 71193 - protein, 32 aa, Artificial Sequence; identical to SEQ ID NO: 23667
  Cyclic GFR-binding peptide
  MOD_RES (31), (32): Xaa is C or S

SEQ ID NO: 71194 - protein, 27 aa, Artificial Sequence
  Cyclic GFR-binding peptide
  MOD_RES (27), (27): Xaa is C or S
EPYVKLTPVGMDDFFLVSLSSLKTPVX

SEQ ID NO: 71195 - protein, 24 aa, Artificial Sequence
  Cyclic GFR-binding peptide
MNPYVKLIVNSSDDFFLVSLSSLK

SEQ ID NO: 71196 - protein, 35 aa, Artificial Sequence
  Cyclic GFR-binding peptide
  MOD_RES (29), (30): Xaa is C or S
MGEPYVKLTPVGMDDFFLVSLSSLKTPVXXAKGVK

SEQ ID NO: 71197 - protein, 24 aa, Artificial Sequence
  Cyclic GFR-binding peptide
VVMGPYVKLIIQQKDNFFLMSLSS

SEQ ID NO: 71198 - protein, 31 aa, Artificial Sequence
  Cyclic GFR-binding peptide
AAAAAAAAAPYVKLLKPKKRVYEFFLVSLSS

SEQ ID NO: 71199 - protein, 20 aa, Artificial Sequence
  Cyclic GFR-binding peptide
PYVKLLLVRGNDFFLMSLSS

SEQ ID NO: 71200 - protein, 24 aa, Artificial Sequence
  Cyclic GFR-binding peptide
IMPYVKLVKPKRGVFFLISLSSLA

SEQ ID NO: 71201 - protein, 27 aa, Artificial Sequence
  Cyclic GFR-binding peptide
  MOD_RES (27), (27): Xaa is C or S
NPYVKLIVNSSDDFFLVSLSSLQTPAX

SEQ ID NO: 71202 - protein, 37 aa, Artificial Sequence; identical to SEQ ID NO: 23671
  Cyclic GFR-binding peptide
  MOD_RES (1), (33), (34): Xaa is C or S

SEQ ID NO: 71203 - protein, 35 aa, Artificial Sequence
  Cyclic GFR-binding peptide
  MOD_RES (29), (29): Xaa is C or S
VMNPYVKLIVNSSDDFFLVSLSSLKTPAXTPKTVH

SEQ ID NO: 71204 - protein, 31 aa, Artificial Sequence
  Cyclic GFR-binding peptide
  MOD_RES (1), (1): Xaa is C or S
XKNHQLFPYVKLHQGQHPKIRFFLMSLSSEE

SEQ ID NO: 71205 - protein, 42 aa, Artificial Sequence; identical to SEQ ID NO: 23673
  Cyclic GFR-binding peptide
  MOD_RES (2), (4), (36), (37): Xaa is C or S

SEQ ID NO: 71206 - protein, 30 aa, Artificial Sequence
  Cyclic GFR-binding peptide
  MOD_RES (1), (3): Xaa is C or S
XGXEAVSMGEPYVKLTPVGMDDFFLVSLSS

SEQ ID NO: 71207 - protein, 21 aa, Artificial Sequence
  Cyclic GFR-binding peptide
PYVKLTPVGMDDFFLVSLSSL

SEQ ID NO: 71208 - protein, 35 aa, Artificial Sequence
  Cyclic GFR-binding peptide
  MOD_RES (30), (31): Xaa is C or S
VAMGPYVKLYTVVGKDFFLISLSSLKTPVXXAKSA

SEQ ID NO: 71209 - protein, 36 aa, Artificial Sequence
  Cyclic GFR-binding peptide
  MOD_RES (30), (31): Xaa is C or S
VAMGPYVKLYTVVGKDFFLISLSSLKTPVXXAKSAK

SEQ ID NO: 71210 - protein, 34 aa, Artificial Sequence; identical to SEQ ID NO: 23678
  Cyclic GFR-binding peptide
  MOD_RES (1), (32), (33): Xaa is C or S

SEQ ID NO: 71211 - protein, 23 aa, Artificial Sequence
  Cyclic GFR-binding peptide
NPYVKLIVNNSSDFFLVSLSSLK

SEQ ID NO: 71212 - protein, 34 aa, Artificial Sequence; identical to SEQ ID NO: 23679
  Cyclic GFR-binding peptide
  MOD_RES (1), (3), (34): Xaa is C or S

SEQ ID NO: 71213 - protein, 26 aa, Artificial Sequence
  Cyclic GFR-binding peptide
KVIMPYVKLIKPTKGIFFLISLSSLD

SEQ ID NO: 71214 - protein, 35 aa, Artificial Sequence; identical to SEQ ID NO: 23681
  Cyclic GFR-binding peptide
  MOD_RES (31), (32): Xaa is C or S

SEQ ID NO: 71215 - protein, 31 aa, Artificial Sequence
  Cyclic GFR-binding peptide
  MOD_RES (26), (27): Xaa is C or S
PYVKLYTVVGKDFFLISLSSLKTPVXXAKSA

SEQ ID NO: 71216 - protein, 28 aa, Artificial Sequence
  Cyclic GFR-binding peptide
ELRPYVKLLKPKKRVYEFFLVSLSSHHV

SEQ ID NO: 71217 - protein, 34 aa, Artificial Sequence; identical to SEQ ID NO: 23683
  Cyclic GFR-binding peptide
  MOD_RES (32), (33): Xaa is C or S

SEQ ID NO: 71218 - protein, 29 aa, Artificial Sequence
  Cyclic GFR-binding peptide
  MOD_RES (28), (28): Xaa is C or S
MNPYVKLIVNSSDDFFLVSLSSLKTPAXT

SEQ ID NO: 71219 - protein, 36 aa, Artificial Sequence
  Cyclic GFR-binding peptide
  MOD_RES (30), (31): Xaa is C or S
RVIMPYVKLVKPKRGVFFLISLSSLAQPVXXPAASA

SEQ ID NO: 71220 - protein, 31 aa, Artificial Sequence
  Cyclic GFR-binding peptide
  MOD_RES (1), (3): Xaa is C or S
XGXAKVVMNPYVKLIVNNSSDFFLVSLSSLK

SEQ ID NO: 71221 - protein, 33 aa, Artificial Sequence
  Cyclic GFR-binding peptide
  MOD_RES (1), (3): Xaa is C or S
XGXSEVVMDPYVKLVVNNASDFFLISLSSLRTP

SEQ ID NO: 71222 - protein, 30 aa, Artificial Sequence
  Cyclic GFR-binding peptide
  MOD_RES (30), (30): Xaa is C or S
VVMNPYVKLIVNNSSDFFLVSLSSLKTPAX

SEQ ID NO: 71223 - protein, 34 aa, Artificial Sequence
  Cyclic GFR-binding peptide
  MOD_RES (29), (30): Xaa is C or S
VMNPYVKLIVNNSSDFFLVSLSSLKTPAXXAKPV

SEQ ID NO: 71224 - protein, 29 aa, Artificial Sequence
  Cyclic GFR-binding peptide
LHEELRPYVKLLKPKKRVYEFFLVSLSSH

SEQ ID NO: 71225 - protein, 28 aa, Artificial Sequence
  Cyclic GFR-binding peptide
  MOD_RES (26), (27): Xaa is C or S
PYVKLLLVRGNDFFLMSLSSTKVPAXXT

SEQ ID NO: 71226 - protein, 39 aa, Artificial Sequence; identical to SEQ ID NO: 23689
  Cyclic GFR-binding peptide
  MOD_RES (2), (4), (38): Xaa is C or S

SEQ ID NO: 71227 - protein, 37 aa, Artificial Sequence; identical to SEQ ID NO: 23690
  Cyclic GFR-binding peptide
  MOD_RES (1), (32), (33): Xaa is C or S

SEQ ID NO: 71228 - protein, 30 aa, Artificial Sequence
  Cyclic GFR-binding peptide
  MOD_RES (28), (29): Xaa is C or S
MNPYVKLIVNSSDDFFLVSLSSLQTPAXXP

SEQ ID NO: 71229 - protein, 29 aa, Artificial Sequence
  Cyclic GFR-binding peptide
  MOD_RES (26), (27): Xaa is C or S
PYVKLVKPKRGVFFLISLSSLAQPVXXPA

SEQ ID NO: 71230 - protein, 39 aa, Artificial Sequence; identical to SEQ ID NO: 23691
  Cyclic GFR-binding peptide
  MOD_RES (1), (3), (35): Xaa is C or S

SEQ ID NO: 71231 - protein, 38 aa, Artificial Sequence; identical to SEQ ID NO: 23692
  Cyclic GFR-binding peptide
  MOD_RES (32), (33): Xaa is C or S

SEQ ID NO: 71232 - protein, 32 aa, Artificial Sequence; identical to SEQ ID NO: 23693
  Cyclic GFR-binding peptide
  MOD_RES (1), (1): Xaa is C or S

SEQ ID NO: 71233 - protein, 34 aa, Artificial Sequence; identical to SEQ ID NO: 23694
  Cyclic GFR-binding peptide
  MOD_RES (1), (33), (34): Xaa is C or S

SEQ ID NO: 71234 - protein, 27 aa, Artificial Sequence
  Cyclic GFR-binding peptide
MNPYVKLIVNNSSDFFLVSLSSLKTPA

SEQ ID NO: 71235 - protein, 36 aa, Artificial Sequence; identical to SEQ ID NO: 23696
  Cyclic GFR-binding peptide
  MOD_RES (32), (33): Xaa is C or S

SEQ ID NO: 71236 - protein, 31 aa, Artificial Sequence
  Cyclic GFR-binding peptide
  MOD_RES (30), (31): Xaa is C or S
VVMNPYVKLIVNSSDDFFLVSLSSLQTPAXX

SEQ ID NO: 71237 - protein, 34 aa, Artificial Sequence
  Cyclic GFR-binding peptide
  MOD_RES (28), (29): Xaa is C or S
MDPYVKLVVNNAADFFLISLSSLRAPVXXSAPAA

SEQ ID NO: 71238 - protein, 34 aa, Artificial Sequence
  Cyclic GFR-binding peptide
  MOD_RES (29), (30): Xaa is C or S
VMDPYVKLVVNNASDFFLISLSSLRTPVXXTPPT

SEQ ID NO: 71239 - protein, 33 aa, Artificial Sequence
  Cyclic GFR-binding peptide
  MOD_RES (28), (29): Xaa is C or S
MNPYVKLIVNNSSDFFLVSLSSLKTPAXXAKPV

SEQ ID NO: 71240 - protein, 35 aa, Artificial Sequence; identical to SEQ ID NO: 23698
  Cyclic GFR-binding peptide
  MOD_RES (33), (34): Xaa is C or S

SEQ ID NO: 71241 - protein, 32 aa, Artificial Sequence
  Cyclic GFR-binding peptide
  MOD_RES (28), (29): Xaa is C or S
MGPYVKLYTVVGKDFFLISLSSLKTPVXXAKS

SEQ ID NO: 71242 - protein, 28 aa, Artificial Sequence
  Cyclic GFR-binding peptide
VSMGEPYVKLTPVGMDDFFLVSLSSLKT

SEQ ID NO: 71243 - protein, 31 aa, Artificial Sequence; identical to SEQ ID NO: 23699
  Cyclic GFR-binding peptide

SEQ ID NO: 71244 - protein, 32 aa, Artificial Sequence
  Cyclic GFR-binding peptide
  MOD_RES (2), (2): Xaa is C or S
GXGEVVMDPYVKLVVKENEDFFLMSLSSLETP

SEQ ID NO: 71245 - protein, 35 aa, Artificial Sequence; identical to SEQ ID NO: 23700
  Cyclic GFR-binding peptide
  MOD_RES (2), (4), (35): Xaa is C or S

SEQ ID NO: 71246 - protein, 24 aa, Artificial Sequence
  Cyclic GFR-binding peptide
PYVKLIKPTKGIFFLISLSSLDQS

SEQ ID NO: 71247 - protein, 29 aa, Artificial Sequence
  Cyclic GFR-binding peptide
ELHEELRPYVKLLKPKKRVYEFFLVSLSS

SEQ ID NO: 71248 - protein, 32 aa, Artificial Sequence; identical to SEQ ID NO: 23701
  Cyclic GFR-binding peptide
  MOD_RES (1), (1): Xaa is C or S

SEQ ID NO: 71249 - protein, 28 aa, Artificial Sequence
  Cyclic GFR-binding peptide
LRPYVKLLKPKKRVYEFFLVSLSSHHVR

SEQ ID NO: 71250 - protein, 29 aa, Artificial Sequence
  Cyclic GFR-binding peptide
  MOD_RES (1), (3): Xaa is C or S
XGXEEVIMPYVKLLLVRGNDFFLMSLSST

SEQ ID NO: 71251 - protein, 25 aa, Artificial Sequence
  Cyclic GFR-binding peptide
MPYVKLVKPTRGVFFLISLSSLDQP

SEQ ID NO: 71252 - protein, 32 aa, Artificial Sequence
  Cyclic GFR-binding peptide
  MOD_RES (29), (30): Xaa is C or S
VMNPYVKLIVNSSDDFFLVSLSSLQTPAXXPK

SEQ ID NO: 71253 - protein, 38 aa, Artificial Sequence; identical to SEQ ID NO: 23706
  Cyclic GFR-binding peptide
  MOD_RES (2), (34), (35): Xaa is C or S

SEQ ID NO: 71254 - protein, 30 aa, Artificial Sequence
  Cyclic GFR-binding peptide
  MOD_RES (29), (30): Xaa is C or S
VVMPYVKLVKPTRGVFFLISLSSLDQPVXX

SEQ ID NO: 71255 - protein, 35 aa, Artificial Sequence; identical to SEQ ID NO: 23707
  Cyclic GFR-binding peptide
  MOD_RES (32), (33): Xaa is C or S

SEQ ID NO: 71256 - protein, 36 aa, Artificial Sequence; identical to SEQ ID NO: 23708
  Cyclic GFR-binding peptide
  MOD_RES (2), (4), (35), (36): Xaa is C or S

SEQ ID NO: 71257 - protein, 30 aa, Artificial Sequence
  Cyclic GFR-binding peptide
  MOD_RES (30), (30): Xaa is C or S
VVMEPYVKLVVKDYEDFFLMSLSSLETPVX

SEQ ID NO: 71258 - protein, 29 aa, Artificial Sequence
  Cyclic GFR-binding peptide
AVSMGEPYVKLTPVGMDDFFLVSLSSLKT

SEQ ID NO: 71259 - protein, 39 aa, Artificial Sequence; identical to SEQ ID NO: 23709
  Cyclic GFR-binding peptide
  MOD_RES (2), (4), (36), (37): Xaa is C or S

SEQ ID NO: 71260 - protein, 30 aa, Artificial Sequence
  Cyclic GFR-binding peptide
  MOD_RES (30), (30): Xaa is C or S
VVMGPYVKLIIQQKDNFFLMSLSSMKTPTX

SEQ ID NO: 71261 - protein, 24 aa, Artificial Sequence
  Cyclic GFR-binding peptide
PYVKLVKPKRGVFFLISLSSLAQP

SEQ ID NO: 71262 - protein, 24 aa, Artificial Sequence
  Cyclic GFR-binding peptide
LFPYVKLHQGQHPKIRFFLMSLSS

SEQ ID NO: 71263 - protein, 36 aa, Artificial Sequence; identical to SEQ ID NO: 23710
  Cyclic GFR-binding peptide
  MOD_RES (1), (3), (35), (36): Xaa is C or S

SEQ ID NO: 71264 - protein, 27 aa, Artificial Sequence
  Cyclic GFR-binding peptide
  MOD_RES (1), (1): Xaa is C or S
XSRVIMPYVKLVKPKRGVFFLISLSSL

SEQ ID NO: 71265 - protein, 32 aa, Artificial Sequence
  Cyclic GFR-binding peptide
  MOD_RES (30), (31): Xaa is C or S
VVMNPYVKLIVNSSDDFFLVSLSSLQTPAXXP

SEQ ID NO: 71266 - protein, 37 aa, Artificial Sequence; identical to SEQ ID NO: 23711
  Cyclic GFR-binding peptide
  MOD_RES (1), (33): Xaa is C or S

SEQ ID NO: 71267 - protein, 20 aa, Artificial Sequence
  Cyclic GFR-binding peptide
PYVKLVVKENEDFFLMSLSS

SEQ ID NO: 71268 - protein, 28 aa, Artificial Sequence
  Cyclic GFR-binding peptide
  MOD_RES (27), (28): Xaa is C or S
MPYVKLVKPKRGVFFLISLSSLAQPVXX

SEQ ID NO: 71269 - protein, 28 aa, Artificial Sequence
  Cyclic GFR-binding peptide
  MOD_RES (28), (28): Xaa is C or S
IMPYVKLLLVRGNDFFLMSLSSTKVPAX

SEQ ID NO: 71270 - protein, 22 aa, Artificial Sequence
  Cyclic GFR-binding peptide
PYVKLLLVRGNDFFLMSLSSTK

SEQ ID NO: 71271 - protein, 26 aa, Artificial Sequence
  Cyclic GFR-binding peptide
VVMDPYVKLVVNNAADFFLISLSSLR

SEQ ID NO: 71272 - protein, 36 aa, Artificial Sequence; identical to SEQ ID NO: 23715
  Cyclic GFR-binding peptide
  MOD_RES (2), (4), (36): Xaa is C or S

SEQ ID NO: 71273 - protein, 27 aa, Artificial Sequence
  Cyclic GFR-binding peptide
IMPYVKLVKPKRGVFFLISLSSLAQPV

SEQ ID NO: 71274 - protein, 33 aa, Artificial Sequence; identical to SEQ ID NO: 23716
  Cyclic GFR-binding peptide
  MOD_RES (1), (33): Xaa is C or S

SEQ ID NO: 71275 - protein, 35 aa, Artificial Sequence; identical to SEQ ID NO: 23718
  Cyclic GFR-binding peptide
  MOD_RES (2), (4): Xaa is C or S

SEQ ID NO: 71276 - protein, 38 aa, Artificial Sequence; identical to SEQ ID NO: 23719
  Cyclic GFR-binding peptide
  MOD_RES (2), (2): Xaa is C or S

SEQ ID NO: 71277 - protein, 35 aa, Artificial Sequence
  Cyclic GFR-binding peptide
  MOD_RES (30), (31): Xaa is C or S
RVIMPYVKLVKPKRGVFFLISLSSLAQPVXXPAAS

SEQ ID NO: 71278 - protein, 36 aa, Artificial Sequence; identical to SEQ ID NO: 23722
  Cyclic GFR-binding peptide
  MOD_RES (2), (34), (35): Xaa is C or S

SEQ ID NO: 71279 - protein, 38 aa, Artificial Sequence; identical to SEQ ID NO: 23723
  Cyclic GFR-binding peptide
  MOD_RES (2), (33), (34): Xaa is C or S

SEQ ID NO: 71280 - protein, 39 aa, Artificial Sequence; identical to SEQ ID NO: 23725
  Cyclic GFR-binding peptide
  MOD_RES (2), (34): Xaa is C or S

SEQ ID NO: 71281 - protein, 37 aa, Artificial Sequence
  Cyclic GFR-binding peptide
  MOD_RES (2), (34), (35): Xaa is C or S
GXGEVVMDPYVKLVVKENEDFFLMSLSSLETPVXXAK

SEQ ID NO: 71282 - protein, 34 aa, Artificial Sequence; identical to SEQ ID NO: 23726
  Cyclic GFR-binding peptide
  MOD_RES (1), (33): Xaa is C or S

SEQ ID NO: 71283 - protein, 36 aa, Artificial Sequence
  Cyclic GFR-binding peptide
  MOD_RES (31), (32): Xaa is C or S
EVVMDPYVKLVVKENEDFFLMSLSSLETPVXXAKPI

SEQ ID NO: 71284 - protein, 26 aa, Artificial Sequence
  Cyclic GFR-binding peptide
VVMDPYVKLVVKENEDFFLMSLSSLE

SEQ ID NO: 71285 - protein, 40 aa, Artificial Sequence; identical to SEQ ID NO: 23727
  Cyclic GFR-binding peptide
  MOD_RES (1), (38): Xaa is C or S

SEQ ID NO: 71286 - protein, 31 aa, Artificial Sequence
  Cyclic GFR-binding peptide
  MOD_RES (30), (31): Xaa is C or S
EVIMPYVKLLLVRGNDFFLMSLSSTKVPAXX

SEQ ID NO: 71287 - protein, 37 aa, Artificial Sequence; identical to SEQ ID NO: 23728
  Cyclic GFR-binding peptide
  MOD_RES (2), (4), (36): Xaa is C or S

SEQ ID NO: 71288 - protein, 29 aa, Artificial Sequence
  Cyclic GFR-binding peptide
  MOD_RES (27), (28): Xaa is C or S
MPYVKLLLVRGNDFFLMSLSSTKVPAXXT

SEQ ID NO: 71289 - protein, 33 aa, Artificial Sequence
  Cyclic GFR-binding peptide
  MOD_RES (27), (28): Xaa is C or S
EPYVKLVVKDYEDFFLMSLSSLETPVXXAKPIS

SEQ ID NO: 71290 - protein, 40 aa, Artificial Sequence; identical to SEQ ID NO: 23729
  Cyclic GFR-binding peptide
  MOD_RES (2), (4), (36), (37): Xaa is C or S

SEQ ID NO: 71291 - protein, 32 aa, Artificial Sequence
  Cyclic GFR-binding peptide
  MOD_RES (2), (2): Xaa is C or S
GXAEVVMDPYVKLVVNNAADFFLISLSSLRAP

SEQ ID NO: 71292 - protein, 20 aa, Artificial Sequence
  Cyclic GFR-binding peptide
PYVKLVVKDYEDFFLMSLSS

SEQ ID NO: 71293 - protein, 30 aa, Artificial Sequence
  Cyclic GFR-binding peptide
  MOD_RES (26), (27): Xaa is C or S
PYVKLIVNNSSDFFLVSLSSLKTPAXXAKP

SEQ ID NO: 71294 - protein, 31 aa, Artificial Sequence
  Cyclic GFR-binding peptide
  MOD_RES (2), (4): Xaa is C or S
SXKXSKVIMPYVKLIKPTKGIFFLISLSSLD

SEQ ID NO: 71295 - protein, 33 aa, Artificial Sequence
  Cyclic GFR-binding peptide
  MOD_RES (28), (29): Xaa is C or S
GEPYVKLTPVGMDDFFLVSLSSLKTPVXXAKGV

SEQ ID NO: 71296 - protein, 32 aa, Artificial Sequence
  Cyclic GFR-binding peptide
  MOD_RES (2), (4): Xaa is C or S
HXGXAKVVMNPYVKLIVNNSSDFFLVSLSSLK

SEQ ID NO: 71297 - protein, 31 aa, Artificial Sequence
  Cyclic GFR-binding peptide
  MOD_RES (28), (29): Xaa is C or S
GEPYVKLTPVGMDDFFLVSLSSLKTPVXXAK

SEQ ID NO: 71298 - protein, 23 aa, Artificial Sequence
  Cyclic GFR-binding peptide
PYVKLIKPTKGIFFLISLSSLDQ

SEQ ID NO: 71299 - protein, 24 aa, Artificial Sequence
  Cyclic GFR-binding peptide
NPYVKLIVNSSDDFFLVSLSSLQT

SEQ ID NO: 71300 - protein, 32 aa, Artificial Sequence
  Cyclic GFR-binding peptide
  MOD_RES (27), (27): Xaa is C or S
NPYVKLIVNSSDDFFLVSLSSLKTPAXTPKTV

SEQ ID NO: 71301 - protein, 33 aa, Artificial Sequence
  Cyclic GFR-binding peptide
  MOD_RES (30), (30): Xaa is C or S
LFPYVKLHQGQHPKIRFFLMSLSSEETPVXELG

SEQ ID NO: 71302 - protein, 27 aa, Artificial Sequence
  Cyclic GFR-binding peptide
VVMEPYVKLVVKDYEDFFLMSLSSLET

SEQ ID NO: 71303 - protein, 39 aa, Artificial Sequence; identical to SEQ ID NO: 23735
  Cyclic GFR-binding peptide
  MOD_RES (33), (34): Xaa is C or S

SEQ ID NO: 71304 - protein, 32 aa, Artificial Sequence
  Cyclic GFR-binding peptide
  MOD_RES (27), (28): Xaa is C or S
NPYVKLIVNSSDDFFLVSLSSLKTPAXXPKPV

SEQ ID NO: 71305 - protein, 32 aa, Artificial Sequence; identical to SEQ ID NO: 23738
  Cyclic GFR-binding peptide
  MOD_RES (31), (32): Xaa is C or S

SEQ ID NO: 71306 - protein, 34 aa, Artificial Sequence; identical to SEQ ID NO: 23739
  Cyclic GFR-binding peptide
  MOD_RES (31), (32): Xaa is C or S

SEQ ID NO: 71307 - protein, 40 aa, Artificial Sequence
  Cyclic GFR-binding peptide
  MOD_RES (2), (34), (35): Xaa is C or S
GXGEVVMDPYVKLVVKENEDFFLMSLSSLETPVXXAKPIK

SEQ ID NO: 71308 - protein, 26 aa, Artificial Sequence
  Cyclic GFR-binding peptide
  MOD_RES (26), (26): Xaa is C or S
PYVKLIIQQKDNFFLMSLSSMKTPTX

SEQ ID NO: 71309 - protein, 32 aa, Artificial Sequence
  Cyclic GFR-binding peptide
  MOD_RES (29), (30): Xaa is C or S
MGEPYVKLTPVGMDDFFLVSLSSLKTPVXXAK

SEQ ID NO: 71310 - protein, 28 aa, Artificial Sequence
  Cyclic GFR-binding peptide
  MOD_RES (1), (3): Xaa is C or S
XKXSRVIMPYVKLVKPKRGVFFLISLSS

SEQ ID NO: 71311 - protein, 30 aa, Artificial Sequence
  Cyclic GFR-binding peptide
  MOD_RES (29), (30): Xaa is C or S
VIMPYVKLLLVRGNDFFLMSLSSTKVPAXX

SEQ ID NO: 71312 - protein, 26 aa, Artificial Sequence
  Cyclic GFR-binding peptide
RVIMPYVKLVKPKRGVFFLISLSSLA

SEQ ID NO: 71313 - protein, 33 aa, Artificial Sequence
  Cyclic GFR-binding peptide
  MOD_RES (30), (31): Xaa is C or S
VVMDPYVKLVVNNAADFFLISLSSLRAPVXXSA

SEQ ID NO: 71314 - protein, 34 aa, Artificial Sequence
  Cyclic GFR-binding peptide
  MOD_RES (29), (30): Xaa is C or S
AMGPYVKLYTVVGKDFFLISLSSLKTPVXXAKSA

SEQ ID NO: 71315 - protein, 35 aa, Artificial Sequence; identical to SEQ ID NO: 23744
  Cyclic GFR-binding peptide
  MOD_RES (1), (3), (35): Xaa is C or S

SEQ ID NO: 71316 - protein, 27 aa, Artificial Sequence
  Cyclic GFR-binding peptide
  MOD_RES (1), (1): Xaa is C or S
XGEVVMEPYVKLVVKDYEDFFLMSLSS

SEQ ID NO: 71317 - protein, 23 aa, Artificial Sequence
  Cyclic GFR-binding peptide
PYVKLLKPKKRVYEFFLVSLSSH

SEQ ID NO: 71318 - protein, 29 aa, Artificial Sequence
  Cyclic GFR-binding peptide
  MOD_RES (2), (2): Xaa is C or S
KXSRVIMPYVKLVKPKRGVFFLISLSSLA

SEQ ID NO: 71319 - protein, 28 aa, Artificial Sequence
  Cyclic GFR-binding peptide
SRVIMPYVKLVKPKRGVFFLISLSSLAQ

SEQ ID NO: 71320 - protein, 31 aa, Artificial Sequence; identical to SEQ ID NO: 23745
  Cyclic GFR-binding peptide
  MOD_RES (1), (1): Xaa is C or S

SEQ ID NO: 71321 - protein, 32 aa, Artificial Sequence; identical to SEQ ID NO: 23746
  Cyclic GFR-binding peptide
  MOD_RES (2), (2): Xaa is C or S

SEQ ID NO: 71322 - protein, 26 aa, Artificial Sequence
  Cyclic GFR-binding peptide
MGPYVKLIIQQKDNFFLMSLSSMKTP

SEQ ID NO: 71323 - protein, 20 aa, Artificial Sequence
  Cyclic GFR-binding peptide
PYVKLIKPTKGIFFLISLSS

SEQ ID NO: 71324 - protein, 30 aa, Artificial Sequence; identical to SEQ ID NO: 1808
  Cyclic GFR-binding peptide

SEQ ID NO: 71325 - protein, 35 aa, Artificial Sequence
  Cyclic GFR-binding peptide
  MOD_RES (2), (4): Xaa is C or S
RXGXGEVVMDPYVKLVVKENEDFFLMSLSSLETPV

SEQ ID NO: 71326 - protein, 32 aa, Artificial Sequence; identical to SEQ ID NO: 23747
  Cyclic GFR-binding peptide
  MOD_RES (32), (32): Xaa is C or S

SEQ ID NO: 71327 - protein, 25 aa, Artificial Sequence
  Cyclic GFR-binding peptide
PYVKLLLVRGNDFFLMSLSSTKVPA

SEQ ID NO: 71328 - protein, 25 aa, Artificial Sequence
  Cyclic GFR-binding peptide
MPYVKLVKPKRGVFFLISLSSLAQP

SEQ ID NO: 71329 - protein, 29 aa, Artificial Sequence
  Cyclic GFR-binding peptide
  MOD_RES (1), (3): Xaa is C or S
XGXGEVVMDPYVKLVVKENEDFFLMSLSS

SEQ ID NO: 71330 - protein, 37 aa, Artificial Sequence
  Cyclic GFR-binding peptide
  MOD_RES (32), (32): Xaa is C or S
HQLFPYVKLHQGQHPKIRFFLMSLSSEETPVXELGED

SEQ ID NO: 71331 - protein, 30 aa, Artificial Sequence
  Cyclic GFR-binding peptide
  MOD_RES (1), (1): Xaa is C or S
XARVVMNPYVKLIVNSSDDFFLVSLSSLQT

SEQ ID NO: 71332 - protein, 29 aa, Artificial Sequence
  Cyclic GFR-binding peptide
  MOD_RES (2), (4): Xaa is C or S
SXKXSRVIMPYVKLVKPKRGVFFLISLSS

SEQ ID NO: 71333 - protein, 32 aa, Artificial Sequence
  Cyclic GFR-binding peptide
  MOD_RES (1), (3): Xaa is C or S
XGXEEVIMPYVKLLLVRGNDFFLMSLSSTKVP

SEQ ID NO: 71334 - protein, 36 aa, Artificial Sequence; identical to SEQ ID NO: 23750
  Cyclic GFR-binding peptide
  MOD_RES (1), (32), (33): Xaa is C or S

SEQ ID NO: 71335 - protein, 28 aa, Artificial Sequence
  Cyclic GFR-binding peptide
  MOD_RES (27), (28): Xaa is C or S
MPYVKLVKPTRGVFFLISLSSLDQPVXX

SEQ ID NO: 71336 - protein, 35 aa, Artificial Sequence; identical to SEQ ID NO: 23751
  Cyclic GFR-binding peptide
  MOD_RES (1), (3), (34), (35): Xaa is C or S

SEQ ID NO: 71337 - protein, 36 aa, Artificial Sequence; identical to SEQ ID NO: 23752
  Cyclic GFR-binding peptide
  MOD_RES (35), (35): Xaa is C or S

SEQ ID NO: 71338 - protein, 30 aa, Artificial Sequence
  Cyclic GFR-binding peptide
  MOD_RES (1), (1): Xaa is C or S
XGEVVMEPYVKLVVKDYEDFFLMSLSSLET

SEQ ID NO: 71339 - protein, 33 aa, Artificial Sequence; identical to SEQ ID NO: 23756
  Cyclic GFR-binding peptide
  MOD_RES (2), (33): Xaa is C or S

SEQ ID NO: 71340 - protein, 27 aa, Artificial Sequence
  Cyclic GFR-binding peptide
  MOD_RES (27), (27): Xaa is C or S
MPYVKLLLVRGNDFFLMSLSSTKVPAX

SEQ ID NO: 71341 - protein, 38 aa, Artificial Sequence; identical to SEQ ID NO: 23755
  Cyclic GFR-binding peptide
  MOD_RES (2), (34), (35): Xaa is C or S

SEQ ID NO: 71342 - protein, 30 aa, Artificial Sequence
  Cyclic GFR-binding peptide
  MOD_RES (28), (29): Xaa is C or S
MGPYVKLIIQQKDNFFLMSLSSMKTPTXXP

SEQ ID NO: 71343 - protein, 26 aa, Artificial Sequence
  Cyclic GFR-binding peptide
VIMPYVKLIKPTKGIFFLISLSSLDQ

SEQ ID NO: 71344 - protein, 30 aa, Artificial Sequence
  Cyclic GFR-binding peptide
  MOD_RES (2), (2): Xaa is C or S
GXAEVVMDPYVKLVVNNAADFFLISLSSLR

SEQ ID NO: 71345 - protein, 32 aa, Artificial Sequence
  Cyclic GFR-binding peptide
  MOD_RES (26), (27): Xaa is C or S
PYVKLIVNSSDDFFLVSLSSLQTPAXXPKPVT

SEQ ID NO: 71346 - protein, 36 aa, Artificial Sequence
  Cyclic GFR-binding peptide
  MOD_RES (30), (30): Xaa is C or S
LFPYVKLHQGQHPKIRFFLMSLSSEETPVXELGEDN

SEQ ID NO: 71347 - protein, 37 aa, Artificial Sequence; identical to SEQ ID NO: 23759
  Cyclic GFR-binding peptide
  MOD_RES (32), (33): Xaa is C or S

SEQ ID NO: 71348 - protein, 42 aa, Artificial Sequence; identical to SEQ ID NO: 23760
  Cyclic GFR-binding peptide
  MOD_RES (2), (4), (41): Xaa is C or S

SEQ ID NO: 71349 - protein, 24 aa, Artificial Sequence
  Cyclic GFR-binding peptide
VIMPYVKLLLVRGNDFFLMSLSST

SEQ ID NO: 71350 - protein, 32 aa, Artificial Sequence
  Cyclic GFR-binding peptide
  MOD_RES (28), (29): Xaa is C or S
GEPYVKLTPVGMDDFFLVSLSSLKTPVXXAKG

SEQ ID NO: 71351 - protein, 21 aa, Artificial Sequence
  Cyclic GFR-binding peptide
PYVKLIVNSSDDFFLVSLSSL

SEQ ID NO: 71352 - protein, 33 aa, Artificial Sequence
  Cyclic GFR-binding peptide
EELRPYVKLLKPKKRVYEFFLVSLSSHHVRSPQ

SEQ ID NO: 71353 - protein, 22 aa, Artificial Sequence
  Cyclic GFR-binding peptide
GPYVKLYTVVGKDFFLISLSSL

SEQ ID NO: 71354 - protein, 32 aa, Artificial Sequence; identical to SEQ ID NO: 23761
  Cyclic GFR-binding peptide
  MOD_RES (2), (2): Xaa is C or S

SEQ ID NO: 71355 - protein, 28 aa, Artificial Sequence
  Cyclic GFR-binding peptide
  MOD_RES (2), (2): Xaa is C or S
GXARVVMNPYVKLIVNSSDDFFLVSLSS

SEQ ID NO: 71356 - protein, 29 aa, Artificial Sequence
  Cyclic GFR-binding peptide
  MOD_RES (26), (26): Xaa is C or S
PYVKLIVNSSDDFFLVSLSSLKTPAXTPK

SEQ ID NO: 71357 - protein, 36 aa, Artificial Sequence
  Cyclic GFR-binding peptide
  MOD_RES (32), (32): Xaa is C or S
HQLFPYVKLHQGQHPKIRFFLMSLSSEETPVXELGE

SEQ ID NO: 71358 - protein, 40 aa, Artificial Sequence; identical to SEQ ID NO: 23764
  Cyclic GFR-binding peptide
  MOD_RES (2), (4), (36), (37): Xaa is C or S

SEQ ID NO: 71359 - protein, 35 aa, Artificial Sequence; identical to SEQ ID NO: 23766
  Cyclic GFR-binding peptide
  MOD_RES (1), (35): Xaa is C or S

SEQ ID NO: 71360 - protein, 25 aa, Artificial Sequence
  Cyclic GFR-binding peptide
NPYVKLIVNSSDDFFLVSLSSLQTP

SEQ ID NO: 71361 - protein, 21 aa, Artificial Sequence
  Cyclic GFR-binding peptide
DPYVKLVVKENEDFFLMSLSS

SEQ ID NO: 71362 - protein, 34 aa, Artificial Sequence; identical to SEQ ID NO: 23767
  Cyclic GFR-binding peptide
  MOD_RES (2), (34): Xaa is C or S

SEQ ID NO: 71363 - protein, 24 aa, Artificial Sequence
  Cyclic GFR-binding peptide
MDPYVKLVVNNAADFFLISLSSLR

SEQ ID NO: 71364 - protein, 30 aa, Artificial Sequence
  Cyclic GFR-binding peptide
  MOD_RES (2), (2): Xaa is C or S
KXSKVIMPYVKLIKPTKGIFFLISLSSLDQ

SEQ ID NO: 71365 - protein, 33 aa, Artificial Sequence
  Cyclic GFR-binding peptide
  MOD_RES (28), (29): Xaa is C or S
MEPYVKLVVKDYEDFFLMSLSSLETPVXXAKPI

SEQ ID NO: 71366 - protein, 32 aa, Artificial Sequence
  Cyclic GFR-binding peptide
  MOD_RES (29), (30): Xaa is C or S
AMGPYVKLYTVVGKDFFLISLSSLKTPVXXAK

SEQ ID NO: 71367 - protein, 31 aa, Artificial Sequence
  Cyclic GFR-binding peptide
  MOD_RES (29), (30): Xaa is C or S
VMDPYVKLVVNNASDFFLISLSSLRTPVXXT

SEQ ID NO: 71368 - protein, 26 aa, Artificial Sequence
  Cyclic GFR-binding peptide
  MOD_RES (26), (26): Xaa is C or S
PYVKLVKPKRGVFFLISLSSLAQPVX

SEQ ID NO: 71369 - protein, 31 aa, Artificial Sequence
  Cyclic GFR-binding peptide
  MOD_RES (1), (3): Xaa is C or S
XGXEEVIMPYVKLLLVRGNDFFLMSLSSTKV

SEQ ID NO: 71370 - protein, 27 aa, Artificial Sequence
  Cyclic GFR-binding peptide
  MOD_RES (1), (1): Xaa is C or S
XAEVVMDPYVKLVVNNAADFFLISLSS

SEQ ID NO: 71371 - protein, 30 aa, Artificial Sequence
  Cyclic GFR-binding peptide
  MOD_RES (2), (2): Xaa is C or S
GXGEVVMDPYVKLVVKENEDFFLMSLSSLE

SEQ ID NO: 71372 - protein, 37 aa, Artificial Sequence; identical to SEQ ID NO: 23770
  Cyclic GFR-binding peptide
  MOD_RES (32), (33): Xaa is C or S

SEQ ID NO: 71373 - protein, 30 aa, Artificial Sequence
  Cyclic GFR-binding peptide
  MOD_RES (28), (29): Xaa is C or S
MEPYVKLVVKDYEDFFLMSLSSLETPVXXA

SEQ ID NO: 71374 - protein, 40 aa, Artificial Sequence; identical to SEQ ID NO: 23771
  Cyclic GFR-binding peptide
  MOD_RES (1), (3), (35), (36): Xaa is C or S

SEQ ID NO: 71375 - protein, 33 aa, Artificial Sequence
  Cyclic GFR-binding peptide
  MOD_RES (2), (4): Xaa is C or S
RXGXAEVVMDPYVKLVVNNAADFFLISLSSLRA

SEQ ID NO: 71376 - protein, 38 aa, Artificial Sequence
  Cyclic GFR-binding peptide
  MOD_RES (1), (33), (34): Xaa is C or S
XGEVVMDPYVKLVVKENEDFFLMSLSSLETPVXXAKPI

SEQ ID NO: 71377 - protein, 31 aa, Artificial Sequence
  Cyclic GFR-binding peptide
  MOD_RES (28), (28): Xaa is C or S
PYVKLHQGQHPKIRFFLMSLSSEETPVXELG

SEQ ID NO: 71378 - protein, 23 aa, Artificial Sequence
  Cyclic GFR-binding peptide
PYVKLLLVRGNDFFLMSLSSTKV

SEQ ID NO: 71379 - protein, 33 aa, Artificial Sequence; identical to SEQ ID NO: 23774
  Cyclic GFR-binding peptide
  MOD_RES (1), (1): Xaa is C or S

SEQ ID NO: 71380 - protein, 29 aa, Artificial Sequence
  Cyclic GFR-binding peptide
  MOD_RES (1), (1): Xaa is C or S
XRDVVMGPYVKLIIQQKDNFFLMSLSSMK

SEQ ID NO: 71381 - protein, 28 aa, Artificial Sequence
  Cyclic GFR-binding peptide
PYVKLLKPKKRVYEFFLVSLSSHHVRSP

SEQ ID NO: 71382 - protein, 31 aa, Artificial Sequence
  Cyclic GFR-binding peptide
  MOD_RES (27), (28): Xaa is C or S
NPYVKLIVNNSSDFFLVSLSSLKTPAXXAKP

SEQ ID NO: 71383 - protein, 39 aa, Artificial Sequence; identical to SEQ ID NO: 23775
  Cyclic GFR-binding peptide
  MOD_RES (36), (36): Xaa is C or S

SEQ ID NO: 71384 - protein, 32 aa, Artificial Sequence
  Cyclic GFR-binding peptide
  MOD_RES (2), (2): Xaa is C or S
GXAKVVMNPYVKLIVNNSSDFFLVSLSSLKTP

SEQ ID NO: 71385 - protein, 36 aa, Artificial Sequence; identical to SEQ ID NO: 23777
  Cyclic GFR-binding peptide
  MOD_RES (31), (32): Xaa is C or S

SEQ ID NO: 71386 - protein, 34 aa, Artificial Sequence
  Cyclic GFR-binding peptide
  MOD_RES (30), (30): Xaa is C or S
VVMNPYVKLIVNSSDDFFLVSLSSLKTPAXTPKT

SEQ ID NO: 71387 - protein, 25 aa, Artificial Sequence
  Cyclic GFR-binding peptide
MPYVKLIKPTKGIFFLISLSSLDQS

SEQ ID NO: 71388 - protein, 32 aa, Artificial Sequence; identical to SEQ ID NO: 23780
  Cyclic GFR-binding peptide
  MOD_RES (31), (32): Xaa is C or S

SEQ ID NO: 71389 - protein, 34 aa, Artificial Sequence; identical to SEQ ID NO: 23779
  Cyclic GFR-binding peptide
  MOD_RES (1), (3): Xaa is C or S

SEQ ID NO: 71390 - protein, 28 aa, Artificial Sequence
  Cyclic GFR-binding peptide
EVVMDPYVKLVVNNAADFFLISLSSLRA

SEQ ID NO: 71391 - protein, 24 aa, Artificial Sequence
  Cyclic GFR-binding peptide
MNPYVKLIVNSSDDFFLVSLSSLQ

SEQ ID NO: 71392 - protein, 27 aa, Artificial Sequence
  Cyclic GFR-binding peptide
  MOD_RES (26), (27): Xaa is C or S
PYVKLVVKENEDFFLMSLSSLETPVXX

SEQ ID NO: 71393 - protein, 39 aa, Artificial Sequence; identical to SEQ ID NO: 23782
  Cyclic GFR-binding peptide
  MOD_RES (1), (33), (34): Xaa is C or S

SEQ ID NO: 71394 - protein, 31 aa, Artificial Sequence
  Cyclic GFR-binding peptide
  MOD_RES (2), (2): Xaa is C or S
AXELHEELRPYVKLLKPKKRVYEFFLVSLSS

SEQ ID NO: 71395 - protein, 33 aa, Artificial Sequence
  Cyclic GFR-binding peptide
  MOD_RES (29), (30): Xaa is C or S
VMNPYVKLIVNNSSDFFLVSLSSLKTPAXXAKP

SEQ ID NO: 71396 - protein, 35 aa, Artificial Sequence; identical to SEQ ID NO: 23786
  Cyclic GFR-binding peptide
  MOD_RES (31), (31): Xaa is C or S

SEQ ID NO: 71397 - protein, 25 aa, Artificial Sequence
  Cyclic GFR-binding peptide
VVMNPYVKLIVNNSSDFFLVSLSSL

SEQ ID NO: 71398 - protein, 32 aa, Artificial Sequence
  Cyclic GFR-binding peptide
  MOD_RES (29), (30): Xaa is C or S
VMDPYVKLVVNNASDFFLISLSSLRTPVXXTP

SEQ ID NO: 71399 - protein, 35 aa, Artificial Sequence
  Cyclic GFR-binding peptide
  MOD_RES (30), (31): Xaa is C or S
VVMNPYVKLIVNSSDDFFLVSLSSLKTPAXXPKPV

SEQ ID NO: 71400 - protein, 33 aa, Artificial Sequence
  Cyclic GFR-binding peptide
  MOD_RES (32), (32): Xaa is C or S
HQLFPYVKLHQGQHPKIRFFLMSLSSEETPVXE

SEQ ID NO: 71401 - protein, 32 aa, Artificial Sequence
  Cyclic GFR-binding peptide
  MOD_RES (29), (29): Xaa is C or S
VMNPYVKLIVNSSDDFFLVSLSSLKTPAXTPK

SEQ ID NO: 71402 - protein, 32 aa, Artificial Sequence
  Cyclic GFR-binding peptide
  MOD_RES (27), (28): Xaa is C or S
DPYVKLVVNNASDFFLISLSSLRTPVXXTPPT

SEQ ID NO: 71403 - protein, 40 aa, Artificial Sequence; identical to SEQ ID NO: 23791
  Cyclic GFR-binding peptide
  MOD_RES (1), (3), (35): Xaa is C or S

SEQ ID NO: 71404 - protein, 24 aa, Artificial Sequence
  Cyclic GFR-binding peptide
RPYVKLLKPKKRVYEFFLVSLSSH

SEQ ID NO: 71405 - protein, 40 aa, Artificial Sequence; identical to SEQ ID NO: 23793
  Cyclic GFR-binding peptide
  MOD_RES (1), (3), (34), (35): Xaa is C or S

SEQ ID NO: 71406 - protein, 28 aa, Artificial Sequence
  Cyclic GFR-binding peptide
EVIMPYVKLLLVRGNDFFLMSLSSTKVP

SEQ ID NO: 71407 - protein, 29 aa, Artificial Sequence
  Cyclic GFR-binding peptide
  MOD_RES (27), (28): Xaa is C or S
EPYVKLTPVGMDDFFLVSLSSLKTPVXXA

SEQ ID NO: 71408 - protein, 24 aa, Artificial Sequence
  Cyclic GFR-binding peptide
VAMGPYVKLYTVVGKDFFLISLSS

SEQ ID NO: 71409 - protein, 28 aa, Artificial Sequence
  Cyclic GFR-binding peptide
  MOD_RES (28), (28): Xaa is C or S
VMPYVKLVKPTRGVFFLISLSSLDQPVX

SEQ ID NO: 71410 - protein, 22 aa, Artificial Sequence
  Cyclic GFR-binding peptide
MDPYVKLVVKENEDFFLMSLSS

SEQ ID NO: 71411 - protein, 38 aa, Artificial Sequence; identical to SEQ ID NO: 23798
  Cyclic GFR-binding peptide
  MOD_RES (2), (4), (35), (36): Xaa is C or S

SEQ ID NO: 71412 - protein, 35 aa, Artificial Sequence; identical to SEQ ID NO: 23799
  Cyclic GFR-binding peptide
  MOD_RES (2), (34), (35): Xaa is C or S

SEQ ID NO: 71413 - protein, 28 aa, Artificial Sequence
  Cyclic GFR-binding peptide
  MOD_RES (1), (1): Xaa is C or S
XSEVVMDPYVKLVVNNASDFFLISLSSL

SEQ ID NO: 71414 - protein, 24 aa, Artificial Sequence
  Cyclic GFR-binding peptide
VVMNPYVKLIVNSSDDFFLVSLSS

SEQ ID NO: 71415 - protein, 28 aa, Artificial Sequence
  Cyclic GFR-binding peptide
  MOD_RES (28), (28): Xaa is C or S
MGPYVKLYTVVGKDFFLISLSSLKTPVX

SEQ ID NO: 71416 - protein, 38 aa, Artificial Sequence; identical to SEQ ID NO: 23801
  Cyclic GFR-binding peptide
  MOD_RES (1), (3), (35), (36): Xaa is C or S

SEQ ID NO: 71417 - protein, 30 aa, Artificial Sequence
  Cyclic GFR-binding peptide
  MOD_RES (27), (28): Xaa is C or S
EPYVKLTPVGMDDFFLVSLSSLKTPVXXAK

SEQ ID NO: 71418 - protein, 29 aa, Artificial Sequence
  Cyclic GFR-binding peptide
EEVIMPYVKLLLVRGNDFFLMSLSSTKVP

SEQ ID NO: 71419 - protein, 33 aa, Artificial Sequence
  Cyclic GFR-binding peptide
  MOD_RES (30), (31): Xaa is C or S
RVIMPYVKLVKPKRGVFFLISLSSLAQPVXXPA

SEQ ID NO: 71420 - protein, 22 aa, Artificial Sequence
  Cyclic GFR-binding peptide
PYVKLIVNNSSDFFLVSLSSLK

SEQ ID NO: 71421 - protein, 22 aa, Artificial Sequence
  Cyclic GFR-binding peptide
MPYVKLVKPKRGVFFLISLSSL

SEQ ID NO: 71422 - protein, 33 aa, Artificial Sequence
  Cyclic GFR-binding peptide
  MOD_RES (1), (3): Xaa is C or S
XGXEAVSMGEPYVKLTPVGMDDFFLVSLSSLKT

SEQ ID NO: 71423 - protein, 34 aa, Artificial Sequence
  Cyclic GFR-binding peptide
  MOD_RES (2), (4): Xaa is C or S
SXGXRDVVMGPYVKLIIQQKDNFFLMSLSSMKTP

SEQ ID NO: 71424 - protein, 33 aa, Artificial Sequence; identical to SEQ ID NO: 23804
  Cyclic GFR-binding peptide
  MOD_RES (32), (33): Xaa is C or S

SEQ ID NO: 71425 - protein, 30 aa, Artificial Sequence
  Cyclic GFR-binding peptide
RPYVKLLKPKKRVYEFFLVSLSSHHVRSPQ

SEQ ID NO: 71426 - protein, 31 aa, Artificial Sequence
  Cyclic GFR-binding peptide
  MOD_RES (26), (27): Xaa is C or S
PYVKLVVNNAADFFLISLSSLRAPVXXSAPA

SEQ ID NO: 71427 - protein, 39 aa, Artificial Sequence; identical to SEQ ID NO: 23806
  Cyclic GFR-binding peptide
  MOD_RES (34), (34): Xaa is C or S

SEQ ID NO: 71428 - protein, 38 aa, Artificial Sequence; identical to SEQ ID NO: 23807
  Cyclic GFR-binding peptide
  MOD_RES (2), (4): Xaa is C or S

SEQ ID NO: 71429 - protein, 27 aa, Artificial Sequence
  Cyclic GFR-binding peptide
HEELRPYVKLLKPKKRVYEFFLVSLSS

SEQ ID NO: 71430 - protein, 30 aa, Artificial Sequence
  Cyclic GFR-binding peptide
  MOD_RES (2), (4): Xaa is C or S
HXGXSRVVMNPYVKLIVNSSDDFFLVSLSS

SEQ ID NO: 71431 - protein, 36 aa, Artificial Sequence; identical to SEQ ID NO: 23808
  Cyclic GFR-binding peptide
  MOD_RES (32), (33): Xaa is C or S

SEQ ID NO: 71432 - protein, 37 aa, Artificial Sequence
  Cyclic GFR-binding peptide
  MOD_RES (2), (4), (36), (37): Xaa is C or S
RXGXGEVVMDPYVKLVVKENEDFFLMSLSSLETPVXX

SEQ ID NO: 71433 - protein, 33 aa, Artificial Sequence
  Cyclic GFR-binding peptide
  MOD_RES (29), (30): Xaa is C or S
VIMPYVKLLLVRGNDFFLMSLSSTKVPAXXTSP

SEQ ID NO: 71434 - protein, 28 aa, Artificial Sequence
  Cyclic GFR-binding peptide
EVVMEPYVKLVVKDYEDFFLMSLSSLET

SEQ ID NO: 71435 - protein, 26 aa, Artificial Sequence
  Cyclic GFR-binding peptide
  MOD_RES (26), (26): Xaa is C or S
PYVKLIKPTKGIFFLISLSSLDQSVX

SEQ ID NO: 71436 - protein, 32 aa, Artificial Sequence
  Cyclic GFR-binding peptide
  MOD_RES (30), (31): Xaa is C or S
VVMNPYVKLIVNNSSDFFLVSLSSLKTPAXXA

SEQ ID NO: 71437 - protein, 33 aa, Artificial Sequence
  Cyclic GFR-binding peptide
  MOD_RES (30), (31): Xaa is C or S
VVMGPYVKLIIQQKDNFFLMSLSSMKTPTXXPG

SEQ ID NO: 71438 - protein, 41 aa, Artificial Sequence; identical to SEQ ID NO: 23811
  Cyclic GFR-binding peptide
  MOD_RES (1), (3), (35), (36): Xaa is C or S

SEQ ID NO: 71439 - protein, 30 aa, Artificial Sequence
  Cyclic GFR-binding peptide
  MOD_RES (2), (2): Xaa is C or S
GXRDVVMGPYVKLIIQQKDNFFLMSLSSMK

SEQ ID NO: 71440 - protein, 36 aa, Artificial Sequence; identical to SEQ ID NO: 23812
  Cyclic GFR-binding peptide
  MOD_RES (1), (33), (34): Xaa is C or S

SEQ ID NO: 71441 - protein, 32 aa, Artificial Sequence
  Cyclic GFR-binding peptide
  MOD_RES (2), (4): Xaa is C or S
RXGXESVAMGPYVKLYTVVGKDFFLISLSSLK

SEQ ID NO: 71442 - protein, 38 aa, Artificial Sequence
  Cyclic GFR-binding peptide
  MOD_RES (32), (33): Xaa is C or S
AVSMGEPYVKLTPVGMDDFFLVSLSSLKTPVXXAKGVK

SEQ ID NO: 71443 - protein, 41 aa, Artificial Sequence; identical to SEQ ID NO: 23814
  Cyclic GFR-binding peptide
  MOD_RES (2), (4), (35), (36): Xaa is C or S

SEQ ID NO: 71444 - protein, 38 aa, Artificial Sequence; identical to SEQ ID NO: 23815
  Cyclic GFR-binding peptide
  MOD_RES (2), (33), (34): Xaa is C or S

SEQ ID NO: 71445 - protein, 30 aa, Artificial Sequence
  Cyclic GFR-binding peptide
EAVSMGEPYVKLTPVGMDDFFLVSLSSLKT

SEQ ID NO: 71446 - protein, 35 aa, Artificial Sequence; identical to SEQ ID NO: 23818
  Cyclic GFR-binding peptide
  MOD_RES (31), (32): Xaa is C or S

SEQ ID NO: 71447 - protein, 30 aa, Artificial Sequence
  Cyclic GFR-binding peptide
  MOD_RES (2), (2): Xaa is C or S
GXEEVIMPYVKLLLVRGNDFFLMSLSSTKV

SEQ ID NO: 71448 - protein, 28 aa, Artificial Sequence
  Cyclic GFR-binding peptide
  MOD_RES (2), (2): Xaa is C or S
GXGEVVMEPYVKLVVKDYEDFFLMSLSS

SEQ ID NO: 71449 - protein, 33 aa, Artificial Sequence
  Cyclic GFR-binding peptide
  MOD_RES (28), (29): Xaa is C or S
MNPYVKLIVNSSDDFFLVSLSSLKTPAXXPKPV

SEQ ID NO: 71450 - protein, 30 aa, Artificial Sequence
  Cyclic GFR-binding peptide
  MOD_RES (29), (29): Xaa is C or S
FPYVKLHQGQHPKIRFFLMSLSSEETPVXE

SEQ ID NO: 71451 - protein, 23 aa, Artificial Sequence
  Cyclic GFR-binding peptide
VMDPYVKLVVKENEDFFLMSLSS

SEQ ID NO: 71452 - protein, 33 aa, Artificial Sequence
  Cyclic GFR-binding peptide
  MOD_RES (1), (1): Xaa is C or S
XELHEELRPYVKLLKPKKRVYEFFLVSLSSHHV

SEQ ID NO: 71453 - protein, 36 aa, Artificial Sequence; identical to SEQ ID NO: 23820
  Cyclic GFR-binding peptide
  MOD_RES (33), (33): Xaa is C or S

SEQ ID NO: 71454 - protein, 34 aa, Artificial Sequence; identical to SEQ ID NO: 23822
  Cyclic GFR-binding peptide
  MOD_RES (1), (33), (34): Xaa is C or S

SEQ ID NO: 71455 - protein, 25 aa, Artificial Sequence
  Cyclic GFR-binding peptide
IMPYVKLLLVRGNDFFLMSLSSTKV

SEQ ID NO: 71456 - protein, 35 aa, Artificial Sequence; identical to SEQ ID NO: 23823
  Cyclic GFR-binding peptide
  MOD_RES (1), (33), (34): Xaa is C or S

SEQ ID NO: 71457 - protein, 37 aa, Artificial Sequence; identical to SEQ ID NO: 23825
  Cyclic GFR-binding peptide
  MOD_RES (1), (3): Xaa is C or S

SEQ ID NO: 71458 - protein, 25 aa, Artificial Sequence
  Cyclic GFR-binding peptide
PYVKLVVKDYEDFFLMSLSSLETPV

SEQ ID NO: 71459 - protein, 27 aa, Artificial Sequence
  Cyclic GFR-binding peptide
RVVMNPYVKLIVNSSDDFFLVSLSSLQ

SEQ ID NO: 71460 - protein, 35 aa, Artificial Sequence
  Cyclic GFR-binding peptide
  MOD_RES (31), (31): Xaa is C or S
QLFPYVKLHQGQHPKIRFFLMSLSSEETPVXELGE

SEQ ID NO: 71461 - protein, 34 aa, Artificial Sequence
  Cyclic GFR-binding peptide
  MOD_RES (30), (31): Xaa is C or S
VVMEPYVKLVVKDYEDFFLMSLSSLETPVXXAKP

SEQ ID NO: 71462 - protein, 26 aa, Artificial Sequence
  Cyclic GFR-binding peptide
VMDPYVKLVVNNAADFFLISLSSLRA

SEQ ID NO: 71463 - protein, 40 aa, Artificial Sequence; identical to SEQ ID NO: 23829
  Cyclic GFR-binding peptide
  MOD_RES (1), (3), (35), (36): Xaa is C or S

SEQ ID NO: 71464 - protein, 25 aa, Artificial Sequence
  Cyclic GFR-binding peptide
MEPYVKLVVKDYEDFFLMSLSSLET

SEQ ID NO: 71465 - protein, 28 aa, Artificial Sequence
  Cyclic GFR-binding peptide
  MOD_RES (2), (2): Xaa is C or S
GXSRVVMNPYVKLIVNSSDDFFLVSLSS

SEQ ID NO: 71466 - protein, 25 aa, Artificial Sequence
  Cyclic GFR-binding peptide
RVVMNPYVKLIVNSSDDFFLVSLSS

SEQ ID NO: 71467 - protein, 27 aa, Artificial Sequence
  Cyclic GFR-binding peptide
IMPYVKLIKPTKGIFFLISLSSLDQSV

SEQ ID NO: 71468 - protein, 29 aa, Artificial Sequence
  Cyclic GFR-binding peptide
  MOD_RES (2), (2): Xaa is C or S
GXSRVVMNPYVKLIVNSSDDFFLVSLSSL

SEQ ID NO: 71469 - protein, 30 aa, Artificial Sequence
  Cyclic GFR-binding peptide
  MOD_RES (2), (4): Xaa is C or S
RXGXESVAMGPYVKLYTVVGKDFFLISLSS

SEQ ID NO: 71470 - protein, 36 aa, Artificial Sequence; identical to SEQ ID NO: 23832
  Cyclic GFR-binding peptide
  MOD_RES (1), (3), (35): Xaa is C or S

SEQ ID NO: 71471 - protein, 21 aa, Artificial Sequence
  Cyclic GFR-binding peptide
NPYVKLIVNSSDDFFLVSLSS

SEQ ID NO: 71472 - protein, 34 aa, Artificial Sequence; identical to SEQ ID NO: 23833
  Cyclic GFR-binding peptide
  MOD_RES (2), (4): Xaa is C or S

SEQ ID NO: 71473 - protein, 36 aa, Artificial Sequence; identical to SEQ ID NO: 23834
  Cyclic GFR-binding peptide
  MOD_RES (1), (33), (34): Xaa is C or S

SEQ ID NO: 71474 - protein, 33 aa, Artificial Sequence
  Cyclic GFR-binding peptide
  MOD_RES (2), (4): Xaa is C or S
SXKXSRVIMPYVKLVKPKRGVFFLISLSSLAQP

SEQ ID NO: 71475 - protein, 35 aa, Artificial Sequence; identical to SEQ ID NO: 23836
  Cyclic GFR-binding peptide
  MOD_RES (32), (33): Xaa is C or S

SEQ ID NO: 71476 - protein, 29 aa, Artificial Sequence
  Cyclic GFR-binding peptide
  MOD_RES (1), (1): Xaa is C or S
XESVAMGPYVKLYTVVGKDFFLISLSSLK

SEQ ID NO: 71477 - protein, 36 aa, Artificial Sequence; identical to SEQ ID NO: 23838
  Cyclic GFR-binding peptide
  MOD_RES (1), (3), (34), (35): Xaa is C or S

SEQ ID NO: 71478 - protein, 27 aa, Artificial Sequence
  Cyclic GFR-binding peptide
SRVIMPYVKLVKPKRGVFFLISLSSLA

SEQ ID NO: 71479 - protein, 42 aa, Artificial Sequence; identical to SEQ ID NO: 23839
  Cyclic GFR-binding peptide
  MOD_RES (2), (4), (36): Xaa is C or S

SEQ ID NO: 71480 - protein, 27 aa, Artificial Sequence
  Cyclic GFR-binding peptide
GEPYVKLTPVGMDDFFLVSLSSLKTPV

SEQ ID NO: 71481 - protein, 34 aa, Artificial Sequence
  Cyclic GFR-binding peptide
  MOD_RES (28), (29): Xaa is C or S
MNPYVKLIVNSSDDFFLVSLSSLQTPAXXPKPVT

SEQ ID NO: 71482 - protein, 38 aa, Artificial Sequence; identical to SEQ ID NO: 23841
  Cyclic GFR-binding peptide
  MOD_RES (1), (33), (34): Xaa is C or S

SEQ ID NO: 71483 - protein, 35 aa, Artificial Sequence; identical to SEQ ID NO: 23842
  Cyclic GFR-binding peptide

SEQ ID NO: 71484 - protein, 35 aa, Artificial Sequence; identical to SEQ ID NO: 23843
  Cyclic GFR-binding peptide
  MOD_RES (31), (32): Xaa is C or S

SEQ ID NO: 71485 - protein, 31 aa, Artificial Sequence
  Cyclic GFR-binding peptide
  MOD_RES (2), (2): Xaa is C or S
GXGEVVMEPYVKLVVKDYEDFFLMSLSSLET

SEQ ID NO: 71486 - protein, 21 aa, Artificial Sequence
  Cyclic GFR-binding peptide
PYVKLYTVVGKDFFLISLSSL

SEQ ID NO: 71487 - protein, 26 aa, Artificial Sequence
  Cyclic GFR-binding peptide
EVVMDPYVKLVVKENEDFFLMSLSSL

SEQ ID NO: 71488 - protein, 32 aa, Artificial Sequence
  Cyclic GFR-binding peptide
  MOD_RES (27), (28): Xaa is C or S
DPYVKLVVKENEDFFLMSLSSLETPVXXAKPI

SEQ ID NO: 71489 - protein, 29 aa, Artificial Sequence
  Cyclic GFR-binding peptide
  MOD_RES (1), (3): Xaa is C or S
XKXSRVIMPYVKLVKPKRGVFFLISLSSL

SEQ ID NO: 71490 - protein, 36 aa, Artificial Sequence; identical to SEQ ID NO: 23846
  Cyclic GFR-binding peptide
  MOD_RES (36), (36): Xaa is C or S

SEQ ID NO: 71491 - protein, 26 aa, Artificial Sequence
  Cyclic GFR-binding peptide
  MOD_RES (26), (26): Xaa is C or S
PYVKLVKPTRGVFFLISLSSLDQPVX

SEQ ID NO: 71492 - protein, 27 aa, Artificial Sequence
  Cyclic GFR-binding peptide
VVMNPYVKLIVNNSSDFFLVSLSSLKT

SEQ ID NO: 71493 - protein, 25 aa, Artificial Sequence
  Cyclic GFR-binding peptide
VMPYVKLVKPTRGVFFLISLSSLDQ

SEQ ID NO: 71494 - protein, 38 aa, Artificial Sequence; identical to SEQ ID NO: 23848
  Cyclic GFR-binding peptide
  MOD_RES (2), (4), (36), (37): Xaa is C or S

SEQ ID NO: 71495 - protein, 26 aa, Artificial Sequence
  Cyclic GFR-binding peptide
GEPYVKLTPVGMDDFFLVSLSSLKTP

SEQ ID NO: 71496 - protein, 22 aa, Artificial Sequence
  Cyclic GFR-binding peptide
PYVKLVKPTRGVFFLISLSSLD

SEQ ID NO: 71497 - protein, 32 aa, Artificial Sequence
  Cyclic GFR-binding peptide
  MOD_RES (1), (3): Xaa is C or S
XGXEAVSMGEPYVKLTPVGMDDFFLVSLSSLK

SEQ ID NO: 71498 - protein, 42 aa, Artificial Sequence; identical to SEQ ID NO: 23851
  Cyclic GFR-binding peptide
  MOD_RES (2), (4), (37), (38): Xaa is C or S

SEQ ID NO: 71499 - protein, 39 aa, Artificial Sequence
  Cyclic GFR-binding peptide
  MOD_RES (2), (4), (36), (37): Xaa is C or S
RXGXGEVVMDPYVKLVVKENEDFFLMSLSSLETPVXXAK

SEQ ID NO: 71500 - protein, 25 aa, Artificial Sequence
  Cyclic GFR-binding peptide
MGPYVKLYTVVGKDFFLISLSSLKT

SEQ ID NO: 71501 - protein, 21 aa, Artificial Sequence
  Cyclic GFR-binding peptide
GPYVKLIIQQKDNFFLMSLSS

SEQ ID NO: 71502 - protein, 22 aa, Artificial Sequence
  Cyclic GFR-binding peptide
PYVKLVVKENEDFFLMSLSSLE

SEQ ID NO: 71503 - protein, 27 aa, Artificial Sequence
  Cyclic GFR-binding peptide
AEVVMDPYVKLVVNNAADFFLISLSSL

SEQ ID NO: 71504 - protein, 30 aa, Artificial Sequence
  Cyclic GFR-binding peptide
  MOD_RES (29), (29): Xaa is C or S
VMNPYVKLIVNSSDDFFLVSLSSLKTPAXT

SEQ ID NO: 71505 - protein, 34 aa, Artificial Sequence; identical to SEQ ID NO: 23853
  Cyclic GFR-binding peptide
  MOD_RES (31), (32): Xaa is C or S

SEQ ID NO: 71506 - protein, 34 aa, Artificial Sequence
  Cyclic GFR-binding peptide
  MOD_RES (28), (28): Xaa is C or S
PYVKLHQGQHPKIRFFLMSLSSEETPVXELGEDN

SEQ ID NO: 71507 - protein, 36 aa, Artificial Sequence
  Cyclic GFR-binding peptide
  MOD_RES (1), (3), (35), (36): Xaa is C or S
XGXGEVVMDPYVKLVVKENEDFFLMSLSSLETPVXX

SEQ ID NO: 71508 - protein, 33 aa, Artificial Sequence
  Cyclic GFR-binding peptide
  MOD_RES (32), (32): Xaa is C or S
LRPYVKLLKPKKRVYEFFLVSLSSHHVRSPQXK

SEQ ID NO: 71509 - protein, 32 aa, Artificial Sequence
  Cyclic GFR-binding peptide
  MOD_RES (28), (29): Xaa is C or S
IMPYVKLVKPKRGVFFLISLSSLAQPVXXPAA

SEQ ID NO: 71510 - protein, 29 aa, Artificial Sequence
  Cyclic GFR-binding peptide
  MOD_RES (27), (28): Xaa is C or S
DPYVKLVVNNAADFFLISLSSLRAPVXXS

SEQ ID NO: 71511 - protein, 35 aa, Artificial Sequence; identical to SEQ ID NO: 23854
  Cyclic GFR-binding peptide
  MOD_RES (2), (4), (35): Xaa is C or S

SEQ ID NO: 71512 - protein, 22 aa, Artificial Sequence
  Cyclic GFR-binding peptide
PYVKLVVKDYEDFFLMSLSSLE

SEQ ID NO: 71513 - protein, 31 aa, Artificial Sequence
  Cyclic GFR-binding peptide
  MOD_RES (2), (2): Xaa is C or S
KXSKVVMPYVKLVKPTRGVFFLISLSSLDQP

SEQ ID NO: 71514 - protein, 28 aa, Artificial Sequence
  Cyclic GFR-binding peptide
HQLFPYVKLHQGQHPKIRFFLMSLSSEE

SEQ ID NO: 71515 - protein, 35 aa, Artificial Sequence
  Cyclic GFR-binding peptide
  MOD_RES (30), (31): Xaa is C or S
VVMDPYVKLVVNNAADFFLISLSSLRAPVXXSAPA

SEQ ID NO: 71516 - protein, 39 aa, Artificial Sequence; identical to SEQ ID NO: 23857
  Cyclic GFR-binding peptide
  MOD_RES (2), (4), (36), (37): Xaa is C or S

SEQ ID NO: 71517 - protein, 30 aa, Artificial Sequence
  Cyclic GFR-binding peptide
  MOD_RES (1), (1): Xaa is C or S
XKNHQLFPYVKLHQGQHPKIRFFLMSLSSE

SEQ ID NO: 71518 - protein, 36 aa, Artificial Sequence
  Cyclic GFR-binding peptide
  MOD_RES (30), (31): Xaa is C or S
VVMEPYVKLVVKDYEDFFLMSLSSLETPVXXAKPIS

SEQ ID NO: 71519 - protein, 26 aa, Artificial Sequence
  Cyclic GFR-binding peptide
NPYVKLIVNSSDDFFLVSLSSLQTPA

SEQ ID NO: 71520 - protein, 30 aa, Artificial Sequence
  Cyclic GFR-binding peptide
  MOD_RES (1), (3): Xaa is C or S
XKXSKVVMPYVKLVKPTRGVFFLISLSSLD

SEQ ID NO: 71521 - protein, 35 aa, Artificial Sequence; identical to SEQ ID NO: 23858
  Cyclic GFR-binding peptide
  MOD_RES (31), (32): Xaa is C or S

SEQ ID NO: 71522 - protein, 39 aa, Artificial Sequence; identical to SEQ ID NO: 23859
  Cyclic GFR-binding peptide
  MOD_RES (2), (36): Xaa is C or S

SEQ ID NO: 71523 - protein, 24 aa, Artificial Sequence
  Cyclic GFR-binding peptide
PYVKLLKPKKRVYEFFLVSLSSHH

SEQ ID NO: 71524 - protein, 30 aa, Artificial Sequence
  Cyclic GFR-binding peptide
  MOD_RES (27), (28): Xaa is C or S
EPYVKLVVKDYEDFFLMSLSSLETPVXXAK

SEQ ID NO: 71525 - protein, 25 aa, Artificial Sequence
  Cyclic GFR-binding peptide
EVVMDPYVKLVVKENEDFFLMSLSS

SEQ ID NO: 71526 - protein, 28 aa, Artificial Sequence
  Cyclic GFR-binding peptide
DVVMGPYVKLIIQQKDNFFLMSLSSMKT

SEQ ID NO: 71527 - protein, 22 aa, Artificial Sequence
  Cyclic GFR-binding peptide
MNPYVKLIVNSSDDFFLVSLSS

SEQ ID NO: 71528 - protein, 33 aa, Artificial Sequence; identical to SEQ ID NO: 23862
  Cyclic GFR-binding peptide
  MOD_RES (32), (33): Xaa is C or S

SEQ ID NO: 71529 - protein, 36 aa, Artificial Sequence
  Cyclic GFR-binding peptide
  MOD_RES (2), (4), (36): Xaa is C or S
RXGXGEVVMDPYVKLVVKENEDFFLMSLSSLETPVX

SEQ ID NO: 71530 - protein, 23 aa, Artificial Sequence
  Cyclic GFR-binding peptide
PYVKLIVNNSSDFFLVSLSSLKT

SEQ ID NO: 71531 - protein, 35 aa, Artificial Sequence; identical to SEQ ID NO: 23863
  Cyclic GFR-binding peptide
  MOD_RES (2), (34), (35): Xaa is C or S

SEQ ID NO: 71532 - protein, 39 aa, Artificial Sequence; identical to SEQ ID NO: 23864
  Cyclic GFR-binding peptide
  MOD_RES (1), (3), (37): Xaa is C or S

SEQ ID NO: 71533 - protein, 39 aa, Artificial Sequence; identical to SEQ ID NO: 23866
  Cyclic GFR-binding peptide
  MOD_RES (1), (33): Xaa is C or S

SEQ ID NO: 71534 - protein, 32 aa, Artificial Sequence
  Cyclic GFR-binding peptide
  MOD_RES (29), (30): Xaa is C or S
VMDPYVKLVVNNAADFFLISLSSLRAPVXXSA

SEQ ID NO: 71535 - protein, 31 aa, Artificial Sequence
  Cyclic GFR-binding peptide
  MOD_RES (30), (31): Xaa is C or S
RVIMPYVKLVKPKRGVFFLISLSSLAQPVXX

SEQ ID NO: 71536 - protein, 34 aa, Artificial Sequence
  Cyclic GFR-binding peptide
  MOD_RES (28), (29): Xaa is C or S
VMPYVKLVKPTRGVFFLISLSSLDQPVXXPSASA

SEQ ID NO: 71537 - protein, 28 aa, Artificial Sequence
  Cyclic GFR-binding peptide
VVMDPYVKLVVNNAADFFLISLSSLRAP

SEQ ID NO: 71538 - protein, 29 aa, Artificial Sequence
  Cyclic GFR-binding peptide
  MOD_RES (29), (29): Xaa is C or S
VMEPYVKLVVKDYEDFFLMSLSSLETPVX

SEQ ID NO: 71539 - protein, 35 aa, Artificial Sequence; identical to SEQ ID NO: 23870
  Cyclic GFR-binding peptide
  MOD_RES (2), (4): Xaa is C or S

SEQ ID NO: 71540 - protein, 34 aa, Artificial Sequence
  Cyclic GFR-binding peptide
  MOD_RES (2), (4): Xaa is C or S
HXGXARVVMNPYVKLIVNSSDDFFLVSLSSLQTP

SEQ ID NO: 71541 - protein, 30 aa, Artificial Sequence
  Cyclic GFR-binding peptide
  MOD_RES (1), (3): Xaa is C or S
XGXSRVVMNPYVKLIVNSSDDFFLVSLSSL

SEQ ID NO: 71542 - protein, 40 aa, Artificial Sequence; identical to SEQ ID NO: 23874
  Cyclic GFR-binding peptide
  MOD_RES (2), (34), (35): Xaa is C or S

SEQ ID NO: 71543 - protein, 26 aa, Artificial Sequence
  Cyclic GFR-binding peptide
RVVMNPYVKLIVNSSDDFFLVSLSSL

SEQ ID NO: 71544 - protein, 27 aa, Artificial Sequence
  Cyclic GFR-binding peptide
SEVVMDPYVKLVVNNASDFFLISLSSL

SEQ ID NO: 71545 - protein, 37 aa, Artificial Sequence; identical to SEQ ID NO: 23877
  Cyclic GFR-binding peptide
  MOD_RES (2), (34), (35): Xaa is C or S

SEQ ID NO: 71546 - protein, 27 aa, Artificial Sequence
  Cyclic GFR-binding peptide
EEVIMPYVKLLLVRGNDFFLMSLSSTK

SEQ ID NO: 71547 - protein, 25 aa, Artificial Sequence
  Cyclic GFR-binding peptide
EVVMDPYVKLVVNNASDFFLISLSS

SEQ ID NO: 71548 - protein, 29 aa, Artificial Sequence
  Cyclic GFR-binding peptide
  MOD_RES (28), (29): Xaa is C or S
MGPYVKLYTVVGKDFFLISLSSLKTPVXX

SEQ ID NO: 71549 - protein, 26 aa, Artificial Sequence
  Cyclic GFR-binding peptide
  MOD_RES (26), (26): Xaa is C or S
PYVKLVVNNAADFFLISLSSLRAPVX

SEQ ID NO: 71550 - protein, 31 aa, Artificial Sequence
  Cyclic GFR-binding peptide
  MOD_RES (27), (28): Xaa is C or S
MPYVKLVKPTRGVFFLISLSSLDQPVXXPSA

SEQ ID NO: 71551 - protein, 36 aa, Artificial Sequence; identical to SEQ ID NO: 23879
  Cyclic GFR-binding peptide
  MOD_RES (2), (4), (36): Xaa is C or S

SEQ ID NO: 71552 - protein, 32 aa, Artificial Sequence
  Cyclic GFR-binding peptide
  MOD_RES (30), (31): Xaa is C or S
KVIMPYVKLIKPTKGIFFLISLSSLDQSVXXP

SEQ ID NO: 71553 - protein, 38 aa, Artificial Sequence
  Cyclic GFR-binding peptide
  MOD_RES (2), (34), (35): Xaa is C or S
GXGEVVMDPYVKLVVKENEDFFLMSLSSLETPVXXAKP

SEQ ID NO: 71554 - protein, 30 aa, Artificial Sequence
  Cyclic GFR-binding peptide
  MOD_RES (1), (3): Xaa is C or S
XGXRDVVMGPYVKLIIQQKDNFFLMSLSSM

SEQ ID NO: 71555 - protein, 29 aa, Artificial Sequence
  Cyclic GFR-binding peptide
  MOD_RES (28), (29): Xaa is C or S
VMPYVKLVKPTRGVFFLISLSSLDQPVXX

SEQ ID NO: 71556 - protein, 24 aa, Artificial Sequence
  Cyclic GFR-binding peptide
VMGPYVKLIIQQKDNFFLMSLSSM

SEQ ID NO: 71557 - protein, 27 aa, Artificial Sequence
  Cyclic GFR-binding peptide
MEPYVKLVVKDYEDFFLMSLSSLETPV

SEQ ID NO: 71558 - protein, 30 aa, Artificial Sequence
  Cyclic GFR-binding peptide
  MOD_RES (1), (3): Xaa is C or S
XGXEEVIMPYVKLLLVRGNDFFLMSLSSTK

SEQ ID NO: 71559 - protein, 39 aa, Artificial Sequence; identical to SEQ ID NO: 23883
  Cyclic GFR-binding peptide
  MOD_RES (1), (33), (34): Xaa is C or S

SEQ ID NO: 71560 - protein, 37 aa, Artificial Sequence; identical to SEQ ID NO: 23884
  Cyclic GFR-binding peptide
  MOD_RES (1), (33), (34): Xaa is C or S

SEQ ID NO: 71561 - protein, 27 aa, Artificial Sequence
  Cyclic GFR-binding peptide
  MOD_RES (2), (2): Xaa is C or S
GXEEVIMPYVKLLLVRGNDFFLMSLSS

SEQ ID NO: 71562 - protein, 30 aa, Artificial Sequence
  Cyclic GFR-binding peptide
  MOD_RES (2), (2): Xaa is C or S
EXKNHQLFPYVKLHQGQHPKIRFFLMSLSS

SEQ ID NO: 71563 - protein, 31 aa, Artificial Sequence
  Cyclic GFR-binding peptide
  MOD_RES (1), (1): Xaa is C or S
XESVAMGPYVKLYTVVGKDFFLISLSSLKTP

SEQ ID NO: 71564 - protein, 31 aa, Artificial Sequence
  Cyclic GFR-binding peptide
  MOD_RES (1), (3): Xaa is C or S
XKXSRVIMPYVKLVKPKRGVFFLISLSSLAQ

SEQ ID NO: 71565 - protein, 26 aa, Artificial Sequence
  Cyclic GFR-binding peptide
IMPYVKLVKPKRGVFFLISLSSLAQP

SEQ ID NO: 71566 - protein, 36 aa, Artificial Sequence
  Cyclic GFR-binding peptide
  MOD_RES (30), (31): Xaa is C or S
VVMNPYVKLIVNSSDDFFLVSLSSLQTPAXXPKPVT

SEQ ID NO: 71567 - protein, 32 aa, Artificial Sequence
  Cyclic GFR-binding peptide
  MOD_RES (32), (32): Xaa is C or S
HQLFPYVKLHQGQHPKIRFFLMSLSSEETPVX

SEQ ID NO: 71568 - protein, 30 aa, Artificial Sequence
  Cyclic GFR-binding peptide
  MOD_RES (27), (28): Xaa is C or S
NPYVKLIVNSSDDFFLVSLSSLQTPAXXPK

SEQ ID NO: 71569 - protein, 24 aa, Artificial Sequence
  Cyclic GFR-binding peptide
MDPYVKLVVNNASDFFLISLSSLR

SEQ ID NO: 71570 - protein, 37 aa, Artificial Sequence; identical to SEQ ID NO: 23889
  Cyclic GFR-binding peptide
  MOD_RES (1), (3), (35), (36): Xaa is C or S

SEQ ID NO: 71571 - protein, 29 aa, Artificial Sequence
  Cyclic GFR-binding peptide
HQLFPYVKLHQGQHPKIRFFLMSLSSEET

SEQ ID NO: 71572 - protein, 26 aa, Artificial Sequence
  Cyclic GFR-binding peptide
VVMEPYVKLVVKDYEDFFLMSLSSLE

SEQ ID NO: 71573 - protein, 29 aa, Artificial Sequence
  Cyclic GFR-binding peptide
AKVVMNPYVKLIVNNSSDFFLVSLSSLKT

SEQ ID NO: 71574 - protein, 32 aa, Artificial Sequence
  Cyclic GFR-binding peptide
  MOD_RES (2), (4): Xaa is C or S
HXGXSRVVMNPYVKLIVNSSDDFFLVSLSSLK

SEQ ID NO: 71575 - protein, 37 aa, Artificial Sequence; identical to SEQ ID NO: 23891
  Cyclic GFR-binding peptide
  MOD_RES (34), (34): Xaa is C or S

SEQ ID NO: 71576 - protein, 39 aa, Artificial Sequence; identical to SEQ ID NO: 23892
  Cyclic GFR-binding peptide
  MOD_RES (2), (34), (35): Xaa is C or S

SEQ ID NO: 71577 - protein, 32 aa, Artificial Sequence
  Cyclic GFR-binding peptide
EELRPYVKLLKPKKRVYEFFLVSLSSHHVRSP

SEQ ID NO: 71578 - protein, 38 aa, Artificial Sequence; identical to SEQ ID NO: 23895
  Cyclic GFR-binding peptide
  MOD_RES (1), (3), (34), (35): Xaa is C or S

SEQ ID NO: 71579 - protein, 34 aa, Artificial Sequence
  Cyclic GFR-binding peptide
  MOD_RES (2), (4): Xaa is C or S
RXGXEAVSMGEPYVKLTPVGMDDFFLVSLSSLKT

SEQ ID NO: 71580 - protein, 30 aa, Artificial Sequence
  Cyclic GFR-binding peptide
  MOD_RES (27), (28): Xaa is C or S
MPYVKLLLVRGNDFFLMSLSSTKVPAXXTS

SEQ ID NO: 71581 - protein, 37 aa, Artificial Sequence; identical to SEQ ID NO: 23899
  Cyclic GFR-binding peptide
  MOD_RES (31), (32): Xaa is C or S

SEQ ID NO: 71582 - protein, 33 aa, Artificial Sequence
  Cyclic GFR-binding peptide
  MOD_RES (2), (4): Xaa is C or S
HXGXARVVMNPYVKLIVNSSDDFFLVSLSSLQT

SEQ ID NO: 71583 - protein, 35 aa, Artificial Sequence
  Cyclic GFR-binding peptide
  MOD_RES (31), (32): Xaa is C or S
VSMGEPYVKLTPVGMDDFFLVSLSSLKTPVXXAKG

SEQ ID NO: 71584 - protein, 33 aa, Artificial Sequence
  Cyclic GFR-binding peptide
  MOD_RES (2), (2): Xaa is C or S
AXELHEELRPYVKLLKPKKRVYEFFLVSLSSHH

SEQ ID NO: 71585 - protein, 30 aa, Artificial Sequence; identical to SEQ ID NO: 1806
  Cyclic GFR-binding peptide

SEQ ID NO: 71586 - protein, 28 aa, Artificial Sequence
  Cyclic GFR-binding peptide
  MOD_RES (2), (2): Xaa is C or S
GXRDVVMGPYVKLIIQQKDNFFLMSLSS

SEQ ID NO: 71587 - protein, 37 aa, Artificial Sequence; identical to SEQ ID NO: 23901
  Cyclic GFR-binding peptide
  MOD_RES (1), (3), (35), (36): Xaa is C or S

SEQ ID NO: 71588 - protein, 37 aa, Artificial Sequence; identical to SEQ ID NO: 23902
  Cyclic GFR-binding peptide
  MOD_RES (1), (33), (34): Xaa is C or S

SEQ ID NO: 71589 - protein, 33 aa, Artificial Sequence; identical to SEQ ID NO: 23903
  Cyclic GFR-binding peptide
  MOD_RES (1), (3): Xaa is C or S

SEQ ID NO: 71590 - protein, 35 aa, Artificial Sequence; identical to SEQ ID NO: 23904
  Cyclic GFR-binding peptide
  MOD_RES (2), (2): Xaa is C or S

SEQ ID NO: 71591 - protein, 35 aa, Artificial Sequence; identical to SEQ ID NO: 23905
  Cyclic GFR-binding peptide
  MOD_RES (2), (33), (34): Xaa is C or S

SEQ ID NO: 71592 - protein, 28 aa, Artificial Sequence
  Cyclic GFR-binding peptide
  MOD_RES (1), (1): Xaa is C or S
XARVVMNPYVKLIVNSSDDFFLVSLSSL

SEQ ID NO: 71593 - protein, 33 aa, Artificial Sequence; identical to SEQ ID NO: 23907
  Cyclic GFR-binding peptide
  MOD_RES (2), (2): Xaa is C or S

SEQ ID NO: 71594 - protein, 36 aa, Artificial Sequence; identical to SEQ ID NO: 23908
  Cyclic GFR-binding peptide
  MOD_RES (31), (32): Xaa is C or S

SEQ ID NO: 71595 - protein, 33 aa, Artificial Sequence
  Cyclic GFR-binding peptide
  MOD_RES (30), (31): Xaa is C or S
VAMGPYVKLYTVVGKDFFLISLSSLKTPVXXAK

SEQ ID NO: 71596 - protein, 41 aa, Artificial Sequence; identical to SEQ ID NO: 23909
  Cyclic GFR-binding peptide
  MOD_RES (2), (4), (36), (37): Xaa is C or S

SEQ ID NO: 71597 - protein, 31 aa, Artificial Sequence
  Cyclic GFR-binding peptide
  MOD_RES (1), (1): Xaa is C or S
XRDVVMGPYVKLIIQQKDNFFLMSLSSMKTP

SEQ ID NO: 71598 - protein, 37 aa, Artificial Sequence; identical to SEQ ID NO: 23910
  Cyclic GFR-binding peptide
  MOD_RES (2), (2): Xaa is C or S

SEQ ID NO: 71599 - protein, 30 aa, Artificial Sequence
  Cyclic GFR-binding peptide
  MOD_RES (2), (4): Xaa is C or S
RXGXGEVVMEPYVKLVVKDYEDFFLMSLSS

SEQ ID NO: 71600 - protein, 23 aa, Artificial Sequence
  Cyclic GFR-binding peptide
DPYVKLVVNNAADFFLISLSSLR

SEQ ID NO: 71601 - protein, 30 aa, Artificial Sequence
  Cyclic GFR-binding peptide
  MOD_RES (26), (27): Xaa is C or S
PYVKLVKPTRGVFFLISLSSLDQPVXXPSA

SEQ ID NO: 71602 - protein, 22 aa, Artificial Sequence
  Cyclic GFR-binding peptide
IMPYVKLVKPKRGVFFLISLSS

SEQ ID NO: 71603 - protein, 28 aa, Artificial Sequence
  Cyclic GFR-binding peptide
  MOD_RES (28), (28): Xaa is C or S
IMPYVKLIKPTKGIFFLISLSSLDQSVX

SEQ ID NO: 71604 - protein, 34 aa, Artificial Sequence
  Cyclic GFR-binding peptide
  MOD_RES (30), (31): Xaa is C or S
KVIMPYVKLIKPTKGIFFLISLSSLDQSVXXPSA

SEQ ID NO: 71605 - protein, 35 aa, Artificial Sequence; identical to SEQ ID NO: 23912
  Cyclic GFR-binding peptide
  MOD_RES (2), (34), (35): Xaa is C or S

SEQ ID NO: 71606 - protein, 31 aa, Artificial Sequence
  Cyclic GFR-binding peptide
  MOD_RES (28), (29): Xaa is C or S
MDPYVKLVVKENEDFFLMSLSSLETPVXXAK

SEQ ID NO: 71607 - protein, 38 aa, Artificial Sequence; identical to SEQ ID NO: 23915
  Cyclic GFR-binding peptide
  MOD_RES (1), (3), (35), (36): Xaa is C or S

SEQ ID NO: 71608 - protein, 36 aa, Artificial Sequence; identical to SEQ ID NO: 23916
  Cyclic GFR-binding peptide
  MOD_RES (31), (32): Xaa is C or S

SEQ ID NO: 71609 - protein, 29 aa, Artificial Sequence
  Cyclic GFR-binding peptide
  MOD_RES (1), (1): Xaa is C or S
XAEVVMDPYVKLVVNNAADFFLISLSSLR

SEQ ID NO: 71610 - protein, 31 aa, Artificial Sequence
  Cyclic GFR-binding peptide
  MOD_RES (2), (2): Xaa is C or S
GXSRVVMNPYVKLIVNSSDDFFLVSLSSLKT

SEQ ID NO: 71611 - protein, 29 aa, Artificial Sequence
  Cyclic GFR-binding peptide
  MOD_RES (27), (28): Xaa is C or S
GPYVKLIIQQKDNFFLMSLSSMKTPTXXP

SEQ ID NO: 71612 - protein, 33 aa, Artificial Sequence; identical to SEQ ID NO: 23917
  Cyclic GFR-binding peptide
  MOD_RES (32), (33): Xaa is C or S

SEQ ID NO: 71613 - protein, 34 aa, Artificial Sequence
  Cyclic GFR-binding peptide
  MOD_RES (2), (2): Xaa is C or S
AXELHEELRPYVKLLKPKKRVYEFFLVSLSSHHV

SEQ ID NO: 71614 - protein, 31 aa, Artificial Sequence
  Cyclic GFR-binding peptide
  MOD_RES (2), (4): Xaa is C or S
HXGXAKVVMNPYVKLIVNNSSDFFLVSLSSL

SEQ ID NO: 71615 - protein, 39 aa, Artificial Sequence; identical to SEQ ID NO: 23918
  Cyclic GFR-binding peptide
  MOD_RES (1), (34), (35): Xaa is C or S

SEQ ID NO: 71616 - protein, 43 aa, Artificial Sequence; identical to SEQ ID NO: 23919
  Cyclic GFR-binding peptide
  MOD_RES (1), (3), (40): Xaa is C or S

SEQ ID NO: 71617 - protein, 37 aa, Artificial Sequence; identical to SEQ ID NO: 23920
  Cyclic GFR-binding peptide
  MOD_RES (1), (32), (33): Xaa is C or S

SEQ ID NO: 71618 - protein, 30 aa, Artificial Sequence
  Cyclic GFR-binding peptide
ELRPYVKLLKPKKRVYEFFLVSLSSHHVRS

SEQ ID NO: 71619 - protein, 33 aa, Artificial Sequence
  Cyclic GFR-binding peptide
  MOD_RES (32), (33): Xaa is C or S
GEVVMDPYVKLVVKENEDFFLMSLSSLETPVXX

SEQ ID NO: 71620 - protein, 21 aa, Artificial Sequence
  Cyclic GFR-binding peptide
NPYVKLIVNNSSDFFLVSLSS

SEQ ID NO: 71621 - protein, 29 aa, Artificial Sequence
  Cyclic GFR-binding peptide
AAAAAAAAAPYVKLLLVRGNDFFLMSLSS

SEQ ID NO: 71622 - protein, 27 aa, Artificial Sequence
  Cyclic GFR-binding peptide
EVVMDPYVKLVVKENEDFFLMSLSSLE

SEQ ID NO: 71623 - protein, 36 aa, Artificial Sequence; identical to SEQ ID NO: 23924
  Cyclic GFR-binding peptide
  MOD_RES (32), (33): Xaa is C or S

SEQ ID NO: 71624 - protein, 35 aa, Artificial Sequence
  Cyclic GFR-binding peptide
  MOD_RES (29), (30): Xaa is C or S
VMNPYVKLIVNSSDDFFLVSLSSLQTPAXXPKPVT

SEQ ID NO: 71625 - protein, 23 aa, Artificial Sequence
  Cyclic GFR-binding peptide
NPYVKLIVNSSDDFFLVSLSSLK

SEQ ID NO: 71626 - protein, 34 aa, Artificial Sequence; identical to SEQ ID NO: 23925
  Cyclic GFR-binding peptide
  MOD_RES (1), (3): Xaa is C or S

SEQ ID NO: 71627 - protein, 28 aa, Artificial Sequence
  Cyclic GFR-binding peptide
VMNPYVKLIVNSSDDFFLVSLSSLKTPA

SEQ ID NO: 71628 - protein, 34 aa, Artificial Sequence; identical to SEQ ID NO: 23927
  Cyclic GFR-binding peptide
  MOD_RES (1), (3), (34): Xaa is C or S

SEQ ID NO: 71629 - protein, 39 aa, Artificial Sequence; identical to SEQ ID NO: 23929
  Cyclic GFR-binding peptide
  MOD_RES (2), (4), (35), (36): Xaa is C or S

SEQ ID NO: 71630 - protein, 40 aa, Artificial Sequence; identical to SEQ ID NO: 23930
  Cyclic GFR-binding peptide
  MOD_RES (1), (35): Xaa is C or S

SEQ ID NO: 71631 - protein, 32 aa, Artificial Sequence
  Cyclic GFR-binding peptide
  MOD_RES (28), (29): Xaa is C or S
VMPYVKLVKPTRGVFFLISLSSLDQPVXXPSA

SEQ ID NO: 71632 - protein, 36 aa, Artificial Sequence; identical to SEQ ID NO: 23931
  Cyclic GFR-binding peptide
  MOD_RES (2), (34), (35): Xaa is C or S

SEQ ID NO: 71633 - protein, 27 aa, Artificial Sequence
  Cyclic GFR-binding peptide
VVMDPYVKLVVNNAADFFLISLSSLRA

SEQ ID NO: 71634 - protein, 41 aa, Artificial Sequence; identical to SEQ ID NO: 23932
  Cyclic GFR-binding peptide
  MOD_RES (1), (3), (36), (37): Xaa is C or S

SEQ ID NO: 71635 - protein, 34 aa, Artificial Sequence; identical to SEQ ID NO: 23933
  Cyclic GFR-binding peptide
  MOD_RES (1), (3), (34): Xaa is C or S

SEQ ID NO: 71636 - protein, 29 aa, Artificial Sequence
  Cyclic GFR-binding peptide
  MOD_RES (1), (3): Xaa is C or S
XGXESVAMGPYVKLYTVVGKDFFLISLSS

SEQ ID NO: 71637 - protein, 42 aa, Artificial Sequence; identical to SEQ ID NO: 23934
  Cyclic GFR-binding peptide
  MOD_RES (2), (36): Xaa is C or S

SEQ ID NO: 71638 - protein, 29 aa, Artificial Sequence
  Cyclic GFR-binding peptide
  MOD_RES (27), (28): Xaa is C or S
MPYVKLVKPKRGVFFLISLSSLAQPVXXP

SEQ ID NO: 71639 - protein, 35 aa, Artificial Sequence
  Cyclic GFR-binding peptide
  MOD_RES (30), (30): Xaa is C or S
LFPYVKLHQGQHPKIRFFLMSLSSEETPVXELGED

SEQ ID NO: 71640 - protein, 32 aa, Artificial Sequence
  Cyclic GFR-binding peptide
  MOD_RES (29), (30): Xaa is C or S
VMEPYVKLVVKDYEDFFLMSLSSLETPVXXAK

SEQ ID NO: 71641 - protein, 25 aa, Artificial Sequence
  Cyclic GFR-binding peptide
RPYVKLLKPKKRVYEFFLVSLSSHH

SEQ ID NO: 71642 - protein, 31 aa, Artificial Sequence
  Cyclic GFR-binding peptide
  MOD_RES (1), (1): Xaa is C or S
XSEVVMDPYVKLVVNNASDFFLISLSSLRTP

SEQ ID NO: 71643 - protein, 34 aa, Artificial Sequence; identical to SEQ ID NO: 23939
  Cyclic GFR-binding peptide
  MOD_RES (1), (3): Xaa is C or S

SEQ ID NO: 71644 - protein, 39 aa, Artificial Sequence; identical to SEQ ID NO: 23941
  Cyclic GFR-binding peptide
  MOD_RES (1), (33), (34): Xaa is C or S

SEQ ID NO: 71645 - protein, 26 aa, Artificial Sequence
  Cyclic GFR-binding peptide
MNPYVKLIVNSSDDFFLVSLSSLQTP

SEQ ID NO: 71646 - protein, 35 aa, Artificial Sequence; identical to SEQ ID NO: 23942
  Cyclic GFR-binding peptide
  MOD_RES (2), (34), (35): Xaa is C or S

SEQ ID NO: 71647 - protein, 30 aa, Artificial Sequence
  Cyclic GFR-binding peptide
  MOD_RES (2), (4): Xaa is C or S
RXGXGEVVMDPYVKLVVKENEDFFLMSLSS

SEQ ID NO: 71648 - protein, 40 aa, Artificial Sequence; identical to SEQ ID NO: 23949
  Cyclic GFR-binding peptide
  MOD_RES (2), (4), (35), (36): Xaa is C or S

SEQ ID NO: 71649 - protein, 28 aa, Artificial Sequence
  Cyclic GFR-binding peptide
AKVVMNPYVKLIVNNSSDFFLVSLSSLK

SEQ ID NO: 71650 - protein, 24 aa, Artificial Sequence
  Cyclic GFR-binding peptide
PYVKLIIQQKDNFFLMSLSSMKTP

SEQ ID NO: 71651 - protein, 29 aa, Artificial Sequence
  Cyclic GFR-binding peptide
VSMGEPYVKLTPVGMDDFFLVSLSSLKTP

SEQ ID NO: 71652 - protein, 22 aa, Artificial Sequence
  Cyclic GFR-binding peptide
DPYVKLVVNNASDFFLISLSSL

SEQ ID NO: 71653 - protein, 30 aa, Artificial Sequence
  Cyclic GFR-binding peptide
  MOD_RES (28), (29): Xaa is C or S
MNPYVKLIVNNSSDFFLVSLSSLKTPAXXA

SEQ ID NO: 71654 - protein, 40 aa, Artificial Sequence; identical to SEQ ID NO: 23955
  Cyclic GFR-binding peptide
  MOD_RES (2), (4), (35), (36): Xaa is C or S

SEQ ID NO: 71655 - protein, 26 aa, Artificial Sequence
  Cyclic GFR-binding peptide
ESVAMGPYVKLYTVVGKDFFLISLSS

SEQ ID NO: 71656 - protein, 33 aa, Artificial Sequence
  Cyclic GFR-binding peptide
  MOD_RES (27), (28): Xaa is C or S
MPYVKLVKPKRGVFFLISLSSLAQPVXXPAASA

SEQ ID NO: 71657 - protein, 33 aa, Artificial Sequence; identical to SEQ ID NO: 23957
  Cyclic GFR-binding peptide
  MOD_RES (2), (2): Xaa is C or S

SEQ ID NO: 71658 - protein, 36 aa, Artificial Sequence; identical to SEQ ID NO: 23958
  Cyclic GFR-binding peptide
  MOD_RES (1), (3), (34), (35): Xaa is C or S

SEQ ID NO: 71659 - protein, 28 aa, Artificial Sequence
  Cyclic GFR-binding peptide
  MOD_RES (1), (1): Xaa is C or S
XAEVVMDPYVKLVVNNAADFFLISLSSL

SEQ ID NO: 71660 - protein, 31 aa, Artificial Sequence; identical to SEQ ID NO: 23959
  Cyclic GFR-binding peptide

SEQ ID NO: 71661 - protein, 34 aa, Artificial Sequence
  Cyclic GFR-binding peptide
  MOD_RES (30), (31): Xaa is C or S
VVMNPYVKLIVNSSDDFFLVSLSSLKTPAXXPKP

SEQ ID NO: 71662 - protein, 34 aa, Artificial Sequence; identical to SEQ ID NO: 23960
  Cyclic GFR-binding peptide
  MOD_RES (2), (33), (34): Xaa is C or S

SEQ ID NO: 71663 - protein, 29 aa, Artificial Sequence
  Cyclic GFR-binding peptide
  MOD_RES (1), (3): Xaa is C or S
XGXAEVVMDPYVKLVVNNAADFFLISLSS

SEQ ID NO: 71664 - protein, 32 aa, Artificial Sequence; identical to SEQ ID NO: 23961
  Cyclic GFR-binding peptide
  MOD_RES (31), (32): Xaa is C or S

SEQ ID NO: 71665 - protein, 37 aa, Artificial Sequence; identical to SEQ ID NO: 23962
  Cyclic GFR-binding peptide
  MOD_RES (2), (35), (36): Xaa is C or S

SEQ ID NO: 71666 - protein, 25 aa, Artificial Sequence
  Cyclic GFR-binding peptide
PYVKLIVNSSDDFFLVSLSSLQTPA

SEQ ID NO: 71667 - protein, 24 aa, Artificial Sequence
  Cyclic GFR-binding peptide
IMPYVKLIKPTKGIFFLISLSSLD

SEQ ID NO: 71668 - protein, 30 aa, Artificial Sequence
  Cyclic GFR-binding peptide
  MOD_RES (28), (29): Xaa is C or S
IMPYVKLVKPKRGVFFLISLSSLAQPVXXP

SEQ ID NO: 71669 - protein, 35 aa, Artificial Sequence
  Cyclic GFR-binding peptide
  MOD_RES (32), (32): Xaa is C or S
LRPYVKLLKPKKRVYEFFLVSLSSHHVRSPQXKVS

SEQ ID NO: 71670 - protein, 34 aa, Artificial Sequence
  Cyclic GFR-binding peptide
  MOD_RES (28), (29): Xaa is C or S
IMPYVKLIKPTKGIFFLISLSSLDQSVXXPSASA

SEQ ID NO: 71671 - protein, 29 aa, Artificial Sequence
  Cyclic GFR-binding peptide
  MOD_RES (2), (2): Xaa is C or S
GXGEVVMEPYVKLVVKDYEDFFLMSLSSL

SEQ ID NO: 71672 - protein, 26 aa, Artificial Sequence
  Cyclic GFR-binding peptide
EELRPYVKLLKPKKRVYEFFLVSLSS

SEQ ID NO: 71673 - protein, 27 aa, Artificial Sequence
  Cyclic GFR-binding peptide
  MOD_RES (1), (1): Xaa is C or S
XRDVVMGPYVKLIIQQKDNFFLMSLSS

SEQ ID NO: 71674 - protein, 30 aa, Artificial Sequence
  Cyclic GFR-binding peptide
  MOD_RES (1), (1): Xaa is C or S
XSRVVMNPYVKLIVNSSDDFFLVSLSSLKT

SEQ ID NO: 71675 - protein, 31 aa, Artificial Sequence; identical to SEQ ID NO: 23967
  Cyclic GFR-binding peptide
  MOD_RES (31), (31): Xaa is C or S

SEQ ID NO: 71676 - protein, 28 aa, Artificial Sequence
  Cyclic GFR-binding peptide
EEVIMPYVKLLLVRGNDFFLMSLSSTKV

SEQ ID NO: 71677 - protein, 35 aa, Artificial Sequence; identical to SEQ ID NO: 23969
  Cyclic GFR-binding peptide
  MOD_RES (31), (32): Xaa is C or S

SEQ ID NO: 71678 - protein, 41 aa, Artificial Sequence; identical to SEQ ID NO: 23970
  Cyclic GFR-binding peptide
  MOD_RES (2), (4), (35), (36): Xaa is C or S

SEQ ID NO: 71679 - protein, 26 aa, Artificial Sequence
  Cyclic GFR-binding peptide
AVSMGEPYVKLTPVGMDDFFLVSLSS

SEQ ID NO: 71680 - protein, 34 aa, Artificial Sequence; identical to SEQ ID NO: 23971
  Cyclic GFR-binding peptide
  MOD_RES (34), (34): Xaa is C or S

SEQ ID NO: 71681 - protein, 36 aa, Artificial Sequence; identical to SEQ ID NO: 23972
  Cyclic GFR-binding peptide
  MOD_RES (2), (34), (35): Xaa is C or S

SEQ ID NO: 71682 - protein, 31 aa, Artificial Sequence
  Cyclic GFR-binding peptide
  MOD_RES (2), (2): Xaa is C or S
GXARVVMNPYVKLIVNSSDDFFLVSLSSLQT

SEQ ID NO: 71683 - protein, 21 aa, Artificial Sequence
  Cyclic GFR-binding peptide
PYVKLVKPTRGVFFLISLSSL

SEQ ID NO: 71684 - protein, 29 aa, Artificial Sequence
  Cyclic GFR-binding peptide
KVIMPYVKLIKPTKGIFFLISLSSLDQSV

SEQ ID NO: 71685 - protein, 39 aa, Artificial Sequence; identical to SEQ ID NO: 23973
  Cyclic GFR-binding peptide
  MOD_RES (1), (3), (35), (36): Xaa is C or S

SEQ ID NO: 71686 - protein, 28 aa, Artificial Sequence
  Cyclic GFR-binding peptide
EVVMDPYVKLVVNNASDFFLISLSSLRT

SEQ ID NO: 71687 - protein, 35 aa, Artificial Sequence
  Cyclic GFR-binding peptide
  MOD_RES (29), (30): Xaa is C or S
VIMPYVKLIKPTKGIFFLISLSSLDQSVXXPSASA

SEQ ID NO: 71688 - protein, 37 aa, Artificial Sequence; identical to SEQ ID NO: 23975
  Cyclic GFR-binding peptide
  MOD_RES (1), (33), (34): Xaa is C or S

SEQ ID NO: 71689 - protein, 30 aa, Artificial Sequence
  Cyclic GFR-binding peptide
  MOD_RES (1), (1): Xaa is C or S
XSKVVMPYVKLVKPTRGVFFLISLSSLDQP

SEQ ID NO: 71690 - protein, 35 aa, Artificial Sequence
  Cyclic GFR-binding peptide
  MOD_RES (30), (31): Xaa is C or S
KVIMPYVKLIKPTKGIFFLISLSSLDQSVXXPSAS

SEQ ID NO: 71691 - protein, 30 aa, Artificial Sequence
  Cyclic GFR-binding peptide
  MOD_RES (1), (1): Xaa is C or S
XAEVVMDPYVKLVVNNAADFFLISLSSLRA

SEQ ID NO: 71692 - protein, 27 aa, Artificial Sequence
  Cyclic GFR-binding peptide
VMPYVKLVKPTRGVFFLISLSSLDQPV

SEQ ID NO: 71693 - protein, 28 aa, Artificial Sequence
  Cyclic GFR-binding peptide
SRVVMNPYVKLIVNSSDDFFLVSLSSLK

SEQ ID NO: 71694 - protein, 25 aa, Artificial Sequence
  Cyclic GFR-binding peptide
VAMGPYVKLYTVVGKDFFLISLSSL

SEQ ID NO: 71695 - protein, 39 aa, Artificial Sequence; identical to SEQ ID NO: 23980
  Cyclic GFR-binding peptide
  MOD_RES (2), (34), (35): Xaa is C or S

SEQ ID NO: 71696 - protein, 32 aa, Artificial Sequence; identical to SEQ ID NO: 23982
  Cyclic GFR-binding peptide
  MOD_RES (31), (31): Xaa is C or S

SEQ ID NO: 71697 - protein, 34 aa, Artificial Sequence
  Cyclic GFR-binding peptide
  MOD_RES (32), (32): Xaa is C or S
LRPYVKLLKPKKRVYEFFLVSLSSHHVRSPQXKV

SEQ ID NO: 71698 - protein, 32 aa, Artificial Sequence; identical to SEQ ID NO: 23983
  Cyclic GFR-binding peptide
  MOD_RES (32), (32): Xaa is C or S

SEQ ID NO: 71699 - protein, 39 aa, Artificial Sequence; identical to SEQ ID NO: 23984
  Cyclic GFR-binding peptide
  MOD_RES (33), (33): Xaa is C or S

SEQ ID NO: 71700 - protein, 42 aa, Artificial Sequence; identical to SEQ ID NO: 23985
  Cyclic GFR-binding peptide
  MOD_RES (2), (39): Xaa is C or S

SEQ ID NO: 71701 - protein, 38 aa, Artificial Sequence; identical to SEQ ID NO: 23986
  Cyclic GFR-binding peptide
  MOD_RES (2), (4), (36), (37): Xaa is C or S

SEQ ID NO: 71702 - protein, 38 aa, Artificial Sequence; identical to SEQ ID NO: 23987
  Cyclic GFR-binding peptide
  MOD_RES (1), (3), (35), (36): Xaa is C or S

SEQ ID NO: 71703 - protein, 42 aa, Artificial Sequence; identical to SEQ ID NO: 23988
  Cyclic GFR-binding peptide
  MOD_RES (1), (38): Xaa is C or S

SEQ ID NO: 71704 - protein, 24 aa, Artificial Sequence
  Cyclic GFR-binding peptide
PYVKLVVNNASDFFLISLSSLRTP

SEQ ID NO: 71705 - protein, 23 aa, Artificial Sequence
  Cyclic GFR-binding peptide
FPYVKLHQGQHPKIRFFLMSLSS

SEQ ID NO: 71706 - protein, 30 aa, Artificial Sequence
  Cyclic GFR-binding peptide
  MOD_RES (2), (4): Xaa is C or S
HXGXARVVMNPYVKLIVNSSDDFFLVSLSS

SEQ ID NO: 71707 - protein, 40 aa, Artificial Sequence; identical to SEQ ID NO: 23990
  Cyclic GFR-binding peptide
  MOD_RES (2), (34), (35): Xaa is C or S

SEQ ID NO: 71708 - protein, 30 aa, Artificial Sequence
  Cyclic GFR-binding peptide
SRVVMNPYVKLIVNSSDDFFLVSLSSLKTP

SEQ ID NO: 71709 - protein, 37 aa, Artificial Sequence; identical to SEQ ID NO: 23991
  Cyclic GFR-binding peptide
  MOD_RES (1), (33), (34): Xaa is C or S

SEQ ID NO: 71710 - protein, 35 aa, Artificial Sequence; identical to SEQ ID NO: 23992
  Cyclic GFR-binding peptide
  MOD_RES (2), (4), (35): Xaa is C or S

SEQ ID NO: 71711 - protein, 31 aa, Artificial Sequence
  Cyclic GFR-binding peptide
  MOD_RES (2), (2): Xaa is C or S
GXSEVVMDPYVKLVVNNASDFFLISLSSLRT

SEQ ID NO: 71712 - protein, 29 aa, Artificial Sequence
  Cyclic GFR-binding peptide
  MOD_RES (1), (1): Xaa is C or S
XSKVIMPYVKLIKPTKGIFFLISLSSLDQ

SEQ ID NO: 71713 - protein, 35 aa, Artificial Sequence; identical to SEQ ID NO: 23995
  Cyclic GFR-binding peptide
  MOD_RES (35), (35): Xaa is C or S

SEQ ID NO: 71714 - protein, 31 aa, Artificial Sequence
  Cyclic GFR-binding peptide
  MOD_RES (28), (29): Xaa is C or S
MNPYVKLIVNSSDDFFLVSLSSLKTPAXXPK

SEQ ID NO: 71715 - protein, 34 aa, Artificial Sequence
  Cyclic GFR-binding peptide
  MOD_RES (1), (1): Xaa is C or S
XELHEELRPYVKLLKPKKRVYEFFLVSLSSHHVR

SEQ ID NO: 71716 - protein, 32 aa, Artificial Sequence; identical to SEQ ID NO: 23997
  Cyclic GFR-binding peptide
  MOD_RES (31), (32): Xaa is C or S

SEQ ID NO: 71717 - protein, 30 aa, Artificial Sequence
  Cyclic GFR-binding peptide
  MOD_RES (29), (30): Xaa is C or S
VMGPYVKLIIQQKDNFFLMSLSSMKTPTXX

SEQ ID NO: 71718 - protein, 24 aa, Artificial Sequence
  Cyclic GFR-binding peptide
SMGEPYVKLTPVGMDDFFLVSLSS

SEQ ID NO: 71719 - protein, 36 aa, Artificial Sequence
  Cyclic GFR-binding peptide
  MOD_RES (33), (33): Xaa is C or S
ELRPYVKLLKPKKRVYEFFLVSLSSHHVRSPQXKVS

SEQ ID NO: 71720 - protein, 37 aa, Artificial Sequence; identical to SEQ ID NO: 23998
  Cyclic GFR-binding peptide
  MOD_RES (31), (32): Xaa is C or S

SEQ ID NO: 71721 - protein, 38 aa, Artificial Sequence; identical to SEQ ID NO: 24000
  Cyclic GFR-binding peptide
  MOD_RES (32), (33): Xaa is C or S

SEQ ID NO: 71722 - protein, 22 aa, Artificial Sequence
  Cyclic GFR-binding peptide
PYVKLVVNNAADFFLISLSSLR

SEQ ID NO: 71723 - protein, 32 aa, Artificial Sequence
  Cyclic GFR-binding peptide
  MOD_RES (32), (32): Xaa is C or S
GEVVMDPYVKLVVKENEDFFLMSLSSLETPVX

SEQ ID NO: 71724 - protein, 34 aa, Artificial Sequence; identical to SEQ ID NO: 24002
  Cyclic GFR-binding peptide
  MOD_RES (31), (32): Xaa is C or S

SEQ ID NO: 71725 - protein, 30 aa, Artificial Sequence
  Cyclic GFR-binding peptide
  MOD_RES (28), (29): Xaa is C or S
MGPYVKLYTVVGKDFFLISLSSLKTPVXXA

SEQ ID NO: 71726 - protein, 23 aa, Artificial Sequence
  Cyclic GFR-binding peptide
EPYVKLTPVGMDDFFLVSLSSLK

SEQ ID NO: 71727 - protein, 28 aa, Artificial Sequence
  Cyclic GFR-binding peptide
  MOD_RES (26), (27): Xaa is C or S
PYVKLIIQQKDNFFLMSLSSMKTPTXXP

SEQ ID NO: 71728 - protein, 29 aa, Artificial Sequence
  Cyclic GFR-binding peptide
NHQLFPYVKLHQGQHPKIRFFLMSLSSEE

SEQ ID NO: 71729 - protein, 39 aa, Artificial Sequence; identical to SEQ ID NO: 24005
  Cyclic GFR-binding peptide
  MOD_RES (1), (3), (35), (36): Xaa is C or S

SEQ ID NO: 71730 - protein, 34 aa, Artificial Sequence; identical to SEQ ID NO: 24006
  Cyclic GFR-binding peptide
  MOD_RES (32), (33): Xaa is C or S

SEQ ID NO: 71731 - protein, 31 aa, Artificial Sequence
  Cyclic GFR-binding peptide
  MOD_RES (28), (29): Xaa is C or S
MGPYVKLIIQQKDNFFLMSLSSMKTPTXXPG

SEQ ID NO: 71732 - protein, 37 aa, Artificial Sequence; identical to SEQ ID NO: 24008
  Cyclic GFR-binding peptide
  MOD_RES (1), (3), (37): Xaa is C or S

SEQ ID NO: 71733 - protein, 39 aa, Artificial Sequence; identical to SEQ ID NO: 24009
  Cyclic GFR-binding peptide
  MOD_RES (2), (4), (36), (37): Xaa is C or S

SEQ ID NO: 71734 - protein, 29 aa, Artificial Sequence
  Cyclic GFR-binding peptide
RDVVMGPYVKLIIQQKDNFFLMSLSSMKT

SEQ ID NO: 71735 - protein, 34 aa, Artificial Sequence
  Cyclic GFR-binding peptide
  MOD_RES (28), (29): Xaa is C or S
IMPYVKLLLVRGNDFFLMSLSSTKVPAXXTSPVR

SEQ ID NO: 71736 - protein, 37 aa, Artificial Sequence; identical to SEQ ID NO: 24011
  Cyclic GFR-binding peptide
  MOD_RES (31), (32): Xaa is C or S

SEQ ID NO: 71737 - protein, 27 aa, Artificial Sequence
  Cyclic GFR-binding peptide
  MOD_RES (1), (1): Xaa is C or S
XARVVMNPYVKLIVNSSDDFFLVSLSS

SEQ ID NO: 71738 - protein, 35 aa, Artificial Sequence; identical to SEQ ID NO: 24013
  Cyclic GFR-binding peptide
  MOD_RES (2), (33), (34): Xaa is C or S

SEQ ID NO: 71739 - protein, 33 aa, Artificial Sequence; identical to SEQ ID NO: 24014
  Cyclic GFR-binding peptide
  MOD_RES (31), (31): Xaa is C or S

SEQ ID NO: 71740 - protein, 30 aa, Artificial Sequence
  Cyclic GFR-binding peptide
  MOD_RES (26), (27): Xaa is C or S
PYVKLIVNSSDDFFLVSLSSLQTPAXXPKP

SEQ ID NO: 71741 - protein, 31 aa, Artificial Sequence
  Cyclic GFR-binding peptide
  MOD_RES (1), (1): Xaa is C or S
XELHEELRPYVKLLKPKKRVYEFFLVSLSSH

SEQ ID NO: 71742 - protein, 28 aa, Artificial Sequence
  Cyclic GFR-binding peptide
SVAMGPYVKLYTVVGKDFFLISLSSLKT

SEQ ID NO: 71743 - protein, 30 aa, Artificial Sequence
  Cyclic GFR-binding peptide
  MOD_RES (1), (3): Xaa is C or S
XGXAEVVMDPYVKLVVNNAADFFLISLSSL

SEQ ID NO: 71744 - protein, 40 aa, Artificial Sequence; identical to SEQ ID NO: 24016
  Cyclic GFR-binding peptide
  MOD_RES (1), (3), (35), (36): Xaa is C or S

SEQ ID NO: 71745 - protein, 31 aa, Artificial Sequence
  Cyclic GFR-binding peptide
  MOD_RES (28), (28): Xaa is C or S
MNPYVKLIVNSSDDFFLVSLSSLKTPAXTPK

SEQ ID NO: 71746 - protein, 28 aa, Artificial Sequence
  Cyclic GFR-binding peptide
VVMDPYVKLVVKENEDFFLMSLSSLETP

SEQ ID NO: 71747 - protein, 37 aa, Artificial Sequence; identical to SEQ ID NO: 24018
  Cyclic GFR-binding peptide
  MOD_RES (2), (4), (37): Xaa is C or S

SEQ ID NO: 71748 - protein, 36 aa, Artificial Sequence
  Cyclic GFR-binding peptide
  MOD_RES (30), (31): Xaa is C or S
KVVMPYVKLVKPTRGVFFLISLSSLDQPVXXPSASA

SEQ ID NO: 71749 - protein, 39 aa, Artificial Sequence; identical to SEQ ID NO: 24019
  Cyclic GFR-binding peptide
  MOD_RES (2), (4), (36), (37): Xaa is C or S

SEQ ID NO: 71750 - protein, 33 aa, Artificial Sequence; identical to SEQ ID NO: 24020
  Cyclic GFR-binding peptide
  MOD_RES (31), (32): Xaa is C or S

SEQ ID NO: 71751 - protein, 26 aa, Artificial Sequence
  Cyclic GFR-binding peptide
VMPYVKLVKPTRGVFFLISLSSLDQP

SEQ ID NO: 71752 - protein, 29 aa, Artificial Sequence
  Cyclic GFR-binding peptide
  MOD_RES (2), (2): Xaa is C or S
GXSEVVMDPYVKLVVNNASDFFLISLSSL

SEQ ID NO: 71753 - protein, 26 aa, Artificial Sequence
  Cyclic GFR-binding peptide
VMNPYVKLIVNNSSDFFLVSLSSLKT

SEQ ID NO: 71754 - protein, 33 aa, Artificial Sequence
  Cyclic GFR-binding peptide
  MOD_RES (2), (4): Xaa is C or S
RXEXKNHQLFPYVKLHQGQHPKIRFFLMSLSSE

SEQ ID NO: 71755 - protein, 35 aa, Artificial Sequence; identical to SEQ ID NO: 24022
  Cyclic GFR-binding peptide
  MOD_RES (1), (33): Xaa is C or S

SEQ ID NO: 71756 - protein, 34 aa, Artificial Sequence; identical to SEQ ID NO: 24023
  Cyclic GFR-binding peptide

SEQ ID NO: 71757 - protein, 37 aa, Artificial Sequence
  Cyclic GFR-binding peptide
  MOD_RES (1), (3), (35), (36): Xaa is C or S
XGXGEVVMDPYVKLVVKENEDFFLMSLSSLETPVXXA

SEQ ID NO: 71758 - protein, 35 aa, Artificial Sequence
  Cyclic GFR-binding peptide
  MOD_RES (1), (3): Xaa is C or S
XEXKNHQLFPYVKLHQGQHPKIRFFLMSLSSEETP

SEQ ID NO: 71759 - protein, 28 aa, Artificial Sequence
  Cyclic GFR-binding peptide
  MOD_RES (1), (3): Xaa is C or S
XKXSKVVMPYVKLVKPTRGVFFLISLSS

SEQ ID NO: 71760 - protein, 34 aa, Artificial Sequence; identical to SEQ ID NO: 24027
  Cyclic GFR-binding peptide
  MOD_RES (1), (33), (34): Xaa is C or S

SEQ ID NO: 71761 - protein, 27 aa, Artificial Sequence
  Cyclic GFR-binding peptide
VMNPYVKLIVNSSDDFFLVSLSSLQTP

SEQ ID NO: 71762 - protein, 29 aa, Artificial Sequence
  Cyclic GFR-binding peptide
SEVVMDPYVKLVVNNASDFFLISLSSLRT

SEQ ID NO: 71763 - protein, 35 aa, Artificial Sequence; identical to SEQ ID NO: 24029
  Cyclic GFR-binding peptide
  MOD_RES (2), (4): Xaa is C or S

SEQ ID NO: 71764 - protein, 29 aa, Artificial Sequence
  Cyclic GFR-binding peptide
  MOD_RES (26), (27): Xaa is C or S
PYVKLIVNSSDDFFLVSLSSLKTPAXXPK

SEQ ID NO: 71765 - protein, 23 aa, Artificial Sequence
  Cyclic GFR-binding peptide
VIMPYVKLVKPKRGVFFLISLSS

SEQ ID NO: 71766 - protein, 32 aa, Artificial Sequence
  Cyclic GFR-binding peptide
  MOD_RES (2), (2): Xaa is C or S
GXRDVVMGPYVKLIIQQKDNFFLMSLSSMKTP

SEQ ID NO: 71767 - protein, 31 aa, Artificial Sequence
  Cyclic GFR-binding peptide
  MOD_RES (29), (30): Xaa is C or S
AMGPYVKLYTVVGKDFFLISLSSLKTPVXXA

SEQ ID NO: 71768 - protein, 34 aa, Artificial Sequence; identical to SEQ ID NO: 24032
  Cyclic GFR-binding peptide
  MOD_RES (1), (33), (34): Xaa is C or S

SEQ ID NO: 71769 - protein, 27 aa, Artificial Sequence
  Cyclic GFR-binding peptide
  MOD_RES (1), (1): Xaa is C or S
XSKVIMPYVKLIKPTKGIFFLISLSSL

SEQ ID NO: 71770 - protein, 33 aa, Artificial Sequence; identical to SEQ ID NO: 24034
  Cyclic GFR-binding peptide
  MOD_RES (31), (32): Xaa is C or S

SEQ ID NO: 71771 - protein, 33 aa, Artificial Sequence; identical to SEQ ID NO: 24033
  Cyclic GFR-binding peptide
  MOD_RES (1), (3): Xaa is C or S

SEQ ID NO: 71772 - protein, 35 aa, Artificial Sequence
  Cyclic GFR-binding peptide
  MOD_RES (32), (33): Xaa is C or S
GEVVMDPYVKLVVKENEDFFLMSLSSLETPVXXAK

SEQ ID NO: 71773 - protein, 39 aa, Artificial Sequence; identical to SEQ ID NO: 24036
  Cyclic GFR-binding peptide
  MOD_RES (35), (35): Xaa is C or S

SEQ ID NO: 71774 - protein, 33 aa, Artificial Sequence; identical to SEQ ID NO: 24037
  Cyclic GFR-binding peptide
  MOD_RES (31), (32): Xaa is C or S

SEQ ID NO: 71775 - protein, 21 aa, Artificial Sequence
  Cyclic GFR-binding peptide
EPYVKLTPVGMDDFFLVSLSS

SEQ ID NO: 71776 - protein, 26 aa, Artificial Sequence
  Cyclic GFR-binding peptide
PYVKLLKPKKRVYEFFLVSLSSHHVR

SEQ ID NO: 71777 - protein, 28 aa, Artificial Sequence
  Cyclic GFR-binding peptide
  MOD_RES (2), (2): Xaa is C or S
GXESVAMGPYVKLYTVVGKDFFLISLSS

SEQ ID NO: 71778 - protein, 37 aa, Artificial Sequence; identical to SEQ ID NO: 24038
  Cyclic GFR-binding peptide
  MOD_RES (33), (34): Xaa is C or S

SEQ ID NO: 71779 - protein, 22 aa, Artificial Sequence
  Cyclic GFR-binding peptide
PYVKLTPVGMDDFFLVSLSSLK

SEQ ID NO: 71780 - protein, 33 aa, Artificial Sequence; identical to SEQ ID NO: 24039
  Cyclic GFR-binding peptide
  MOD_RES (32), (33): Xaa is C or S

SEQ ID NO: 71781 - protein, 27 aa, Artificial Sequence
  Cyclic GFR-binding peptide
VAMGPYVKLYTVVGKDFFLISLSSLKT

SEQ ID NO: 71782 - protein, 37 aa, Artificial Sequence; identical to SEQ ID NO: 24042
  Cyclic GFR-binding peptide
  MOD_RES (1), (3), (34), (35): Xaa is C or S

SEQ ID NO: 71783 - protein, 31 aa, Artificial Sequence
  Cyclic GFR-binding peptide
  MOD_RES (2), (2): Xaa is C or S
GXGEVVMDPYVKLVVKENEDFFLMSLSSLET

SEQ ID NO: 71784 - protein, 34 aa, Artificial Sequence
  Cyclic GFR-binding peptide
  MOD_RES (28), (29): Xaa is C or S
IMPYVKLVKPKRGVFFLISLSSLAQPVXXPAASA

SEQ ID NO: 71785 - protein, 37 aa, Artificial Sequence; identical to SEQ ID NO: 24044
  Cyclic GFR-binding peptide
  MOD_RES (31), (32): Xaa is C or S

SEQ ID NO: 71786 - protein, 27 aa, Artificial Sequence
  Cyclic GFR-binding peptide
  MOD_RES (27), (27): Xaa is C or S
DPYVKLVVKENEDFFLMSLSSLETPVX

SEQ ID NO: 71787 - protein, 31 aa, Artificial Sequence
  Cyclic GFR-binding peptide
AVSMGEPYVKLTPVGMDDFFLVSLSSLKTPV

SEQ ID NO: 71788 - protein, 22 aa, Artificial Sequence
  Cyclic GFR-binding peptide
GPYVKLIIQQKDNFFLMSLSSM

SEQ ID NO: 71789 - protein, 30 aa, Artificial Sequence
  Cyclic GFR-binding peptide
AVSMGEPYVKLTPVGMDDFFLVSLSSLKTP

SEQ ID NO: 71790 - protein, 38 aa, Artificial Sequence; identical to SEQ ID NO: 24047
  Cyclic GFR-binding peptide
  MOD_RES (2), (4), (36): Xaa is C or S

SEQ ID NO: 71791 - protein, 33 aa, Artificial Sequence
  Cyclic GFR-binding peptide
  MOD_RES (31), (32): Xaa is C or S
VSMGEPYVKLTPVGMDDFFLVSLSSLKTPVXXA

SEQ ID NO: 71792 - protein, 26 aa, Artificial Sequence
  Cyclic GFR-binding peptide
  MOD_RES (26), (26): Xaa is C or S
PYVKLIVNSSDDFFLVSLSSLKTPAX

SEQ ID NO: 71793 - protein, 37 aa, Artificial Sequence; identical to SEQ ID NO: 24048
  Cyclic GFR-binding peptide
  MOD_RES (2), (4), (35), (36): Xaa is C or S

SEQ ID NO: 71794 - protein, 30 aa, Artificial Sequence; identical to SEQ ID NO: 24049
  Cyclic GFR-binding peptide

SEQ ID NO: 71795 - protein, 37 aa, Artificial Sequence; identical to SEQ ID NO: 24050
  Cyclic GFR-binding peptide
  MOD_RES (31), (32): Xaa is C or S

SEQ ID NO: 71796 - protein, 36 aa, Artificial Sequence; identical to SEQ ID NO: 24051
  Cyclic GFR-binding peptide
  MOD_RES (2), (4), (36): Xaa is C or S

SEQ ID NO: 71797 - protein, 36 aa, Artificial Sequence; identical to SEQ ID NO: 24052
  Cyclic GFR-binding peptide
  MOD_RES (32), (33): Xaa is C or S

SEQ ID NO: 71798 - protein, 26 aa, Artificial Sequence
  Cyclic GFR-binding peptide
  MOD_RES (1), (1): Xaa is C or S
XSRVIMPYVKLVKPKRGVFFLISLSS

SEQ ID NO: 71799 - protein, 35 aa, Artificial Sequence
  Cyclic GFR-binding peptide
  MOD_RES (29), (30): Xaa is C or S
AMGPYVKLYTVVGKDFFLISLSSLKTPVXXAKSAK

SEQ ID NO: 71800 - protein, 27 aa, Artificial Sequence
  Cyclic GFR-binding peptide
RPYVKLLKPKKRVYEFFLVSLSSHHVR

SEQ ID NO: 71801 - protein, 31 aa, Artificial Sequence
  Cyclic GFR-binding peptide
  MOD_RES (26), (26): Xaa is C or S
PYVKLIVNSSDDFFLVSLSSLKTPAXTPKTV

SEQ ID NO: 71802 - protein, 30 aa, Artificial Sequence
  Cyclic GFR-binding peptide
  MOD_RES (2), (4): Xaa is C or S
LXGXEEVIMPYVKLLLVRGNDFFLMSLSST

SEQ ID NO: 71803 - protein, 32 aa, Artificial Sequence
  Cyclic GFR-binding peptide
  MOD_RES (28), (29): Xaa is C or S
IMPYVKLLLVRGNDFFLMSLSSTKVPAXXTSP

SEQ ID NO: 71804 - protein, 29 aa, Artificial Sequence
  Cyclic GFR-binding peptide
  MOD_RES (27), (28): Xaa is C or S
NPYVKLIVNSSDDFFLVSLSSLQTPAXXP

SEQ ID NO: 71805 - protein, 22 aa, Artificial Sequence
  Cyclic GFR-binding peptide
DPYVKLVVNNAADFFLISLSSL

SEQ ID NO: 71806 - protein, 26 aa, Artificial Sequence
  Cyclic GFR-binding peptide
KVVMNPYVKLIVNNSSDFFLVSLSSL

SEQ ID NO: 71807 - protein, 32 aa, Artificial Sequence; identical to SEQ ID NO: 24055
  Cyclic GFR-binding peptide
  MOD_RES (32), (32): Xaa is C or S

SEQ ID NO: 71808 - protein, 24 aa, Artificial Sequence
  Cyclic GFR-binding peptide
PYVKLVVNNAADFFLISLSSLRAP

SEQ ID NO: 71809 - protein, 38 aa, Artificial Sequence; identical to SEQ ID NO: 24056
  Cyclic GFR-binding peptide
  MOD_RES (2), (4), (35), (36): Xaa is C or S

SEQ ID NO: 71810 - protein, 31 aa, Artificial Sequence
  Cyclic GFR-binding peptide
  MOD_RES (29), (30): Xaa is C or S
VIMPYVKLLLVRGNDFFLMSLSSTKVPAXXT

SEQ ID NO: 71811 - protein, 21 aa, Artificial Sequence
  Cyclic GFR-binding peptide
PYVKLVVNNAADFFLISLSSL

SEQ ID NO: 71812 - protein, 35 aa, Artificial Sequence
  Cyclic GFR-binding peptide
  MOD_RES (1), (33), (34): Xaa is C or S
XGEVVMDPYVKLVVKENEDFFLMSLSSLETPVXXA

SEQ ID NO: 71813 - protein, 34 aa, Artificial Sequence
  Cyclic GFR-binding peptide
  MOD_RES (29), (30): Xaa is C or S
VMGPYVKLIIQQKDNFFLMSLSSMKTPTXXPGAS

SEQ ID NO: 71814 - protein, 28 aa, Artificial Sequence
  Cyclic GFR-binding peptide
  MOD_RES (28), (28): Xaa is C or S
MEPYVKLVVKDYEDFFLMSLSSLETPVX

SEQ ID NO: 71815 - protein, 34 aa, Artificial Sequence
  Cyclic GFR-binding peptide
  MOD_RES (29), (30): Xaa is C or S
VIMPYVKLLLVRGNDFFLMSLSSTKVPAXXTSPV

SEQ ID NO: 71816 - protein, 33 aa, Artificial Sequence
  Cyclic GFR-binding peptide
  MOD_RES (1), (1): Xaa is C or S
XKNHQLFPYVKLHQGQHPKIRFFLMSLSSEETP

SEQ ID NO: 71817 - protein, 24 aa, Artificial Sequence
  Cyclic GFR-binding peptide
VVMEPYVKLVVKDYEDFFLMSLSS

SEQ ID NO: 71818 - protein, 27 aa, Artificial Sequence
  Cyclic GFR-binding peptide
EELRPYVKLLKPKKRVYEFFLVSLSSH

SEQ ID NO: 71819 - protein, 36 aa, Artificial Sequence; identical to SEQ ID NO: 24063
  Cyclic GFR-binding peptide
  MOD_RES (1), (3), (35), (36): Xaa is C or S

SEQ ID NO: 71820 - protein, 44 aa, Artificial Sequence; identical to SEQ ID NO: 24064
  Cyclic GFR-binding peptide
  MOD_RES (1), (3), (40): Xaa is C or S

SEQ ID NO: 71821 - protein, 38 aa, Artificial Sequence; identical to SEQ ID NO: 24065
  Cyclic GFR-binding peptide
  MOD_RES (2), (33), (34): Xaa is C or S

SEQ ID NO: 71822 - protein, 34 aa, Artificial Sequence; identical to SEQ ID NO: 24066
  Cyclic GFR-binding peptide
  MOD_RES (1), (33), (34): Xaa is C or S

SEQ ID NO: 71823 - protein, 32 aa, Artificial Sequence
  Cyclic GFR-binding peptide
  MOD_RES (28), (29): Xaa is C or S
MGPYVKLIIQQKDNFFLMSLSSMKTPTXXPGA

SEQ ID NO: 71824 - protein, 39 aa, Artificial Sequence; identical to SEQ ID NO: 24068
  Cyclic GFR-binding peptide
  MOD_RES (1), (35): Xaa is C or S

SEQ ID NO: 71825 - protein, 30 aa, Artificial Sequence
  Cyclic GFR-binding peptide
ARVVMNPYVKLIVNSSDDFFLVSLSSLQTP

SEQ ID NO: 71826 - protein, 25 aa, Artificial Sequence
  Cyclic GFR-binding peptide
DPYVKLVVNNAADFFLISLSSLRAP

SEQ ID NO: 71827 - protein, 28 aa, Artificial Sequence
  Cyclic GFR-binding peptide
EELRPYVKLLKPKKRVYEFFLVSLSSHH

SEQ ID NO: 71828 - protein, 30 aa, Artificial Sequence
  Cyclic GFR-binding peptide
  MOD_RES (26), (27): Xaa is C or S
PYVKLVVKENEDFFLMSLSSLETPVXXAKP

SEQ ID NO: 71829 - protein, 29 aa, Artificial Sequence
  Cyclic GFR-binding peptide
  MOD_RES (29), (29): Xaa is C or S
VIMPYVKLIKPTKGIFFLISLSSLDQSVX

SEQ ID NO: 71830 - protein, 31 aa, Artificial Sequence; identical to SEQ ID NO: 24069
  Cyclic GFR-binding peptide
  MOD_RES (31), (31): Xaa is C or S

SEQ ID NO: 71831 - protein, 24 aa, Artificial Sequence
  Cyclic GFR-binding peptide
EPYVKLTPVGMDDFFLVSLSSLKT

SEQ ID NO: 71832 - protein, 23 aa, Artificial Sequence
  Cyclic GFR-binding peptide
MPYVKLVKPKRGVFFLISLSSLA

SEQ ID NO: 71833 - protein, 38 aa, Artificial Sequence; identical to SEQ ID NO: 24070
  Cyclic GFR-binding peptide
  MOD_RES (1), (35): Xaa is C or S

SEQ ID NO: 71834 - protein, 34 aa, Artificial Sequence; identical to SEQ ID NO: 24071
  Cyclic GFR-binding peptide
  MOD_RES (2), (34): Xaa is C or S

SEQ ID NO: 71835 - protein, 31 aa, Artificial Sequence
  Cyclic GFR-binding peptide
  MOD_RES (1), (3): Xaa is C or S
XGXSRVVMNPYVKLIVNSSDDFFLVSLSSLK

SEQ ID NO: 71836 - protein, 33 aa, Artificial Sequence
  Cyclic GFR-binding peptide
  MOD_RES (28), (29): Xaa is C or S
MNPYVKLIVNSSDDFFLVSLSSLQTPAXXPKPV

SEQ ID NO: 71837 - protein, 27 aa, Artificial Sequence
  Cyclic GFR-binding peptide
SVAMGPYVKLYTVVGKDFFLISLSSLK

SEQ ID NO: 71838 - protein, 34 aa, Artificial Sequence
  Cyclic GFR-binding peptide
  MOD_RES (28), (29): Xaa is C or S
MNPYVKLIVNNSSDFFLVSLSSLKTPAXXAKPVA

SEQ ID NO: 71839 - protein, 32 aa, Artificial Sequence
  Cyclic GFR-binding peptide
  MOD_RES (26), (27): Xaa is C or S
PYVKLVVNNAADFFLISLSSLRAPVXXSAPAA

SEQ ID NO: 71840 - protein, 33 aa, Artificial Sequence
  Cyclic GFR-binding peptide
  MOD_RES (28), (28): Xaa is C or S
MNPYVKLIVNSSDDFFLVSLSSLKTPAXTPKTV

SEQ ID NO: 71841 - protein, 29 aa, Artificial Sequence
  Cyclic GFR-binding peptide
  MOD_RES (26), (27): Xaa is C or S
PYVKLIKPTKGIFFLISLSSLDQSVXXPS

SEQ ID NO: 71842 - protein, 35 aa, Artificial Sequence; identical to SEQ ID NO: 24076
  Cyclic GFR-binding peptide
  MOD_RES (2), (4): Xaa is C or S

SEQ ID NO: 71843 - protein, 29 aa, Artificial Sequence
  Cyclic GFR-binding peptide
  MOD_RES (29), (29): Xaa is C or S
VMDPYVKLVVKENEDFFLMSLSSLETPVX

SEQ ID NO: 71844 - protein, 36 aa, Artificial Sequence; identical to SEQ ID NO: 24078
  Cyclic GFR-binding peptide
  MOD_RES (2), (4), (35), (36): Xaa is C or S

SEQ ID NO: 71845 - protein, 33 aa, Artificial Sequence
  Cyclic GFR-binding peptide
  MOD_RES (1), (3): Xaa is C or S
XEXKNHQLFPYVKLHQGQHPKIRFFLMSLSSEE

SEQ ID NO: 71846 - protein, 38 aa, Artificial Sequence; identical to SEQ ID NO: 24079
  Cyclic GFR-binding peptide
  MOD_RES (1), (33), (34): Xaa is C or S

SEQ ID NO: 71847 - protein, 29 aa, Artificial Sequence
  Cyclic GFR-binding peptide
  MOD_RES (27), (28): Xaa is C or S
MPYVKLVKPTRGVFFLISLSSLDQPVXXP

SEQ ID NO: 71848 - protein, 29 aa, Artificial Sequence
  Cyclic GFR-binding peptide
AAAAAAAAAPYVKLVVKDYEDFFLMSLSS

SEQ ID NO: 71849 - protein, 28 aa, Artificial Sequence
  Cyclic GFR-binding peptide
  MOD_RES (27), (28): Xaa is C or S
NPYVKLIVNSSDDFFLVSLSSLKTPAXX

SEQ ID NO: 71850 - protein, 32 aa, Artificial Sequence
  Cyclic GFR-binding peptide
  MOD_RES (30), (31): Xaa is C or S
VVMGPYVKLIIQQKDNFFLMSLSSMKTPTXXP

SEQ ID NO: 71851 - protein, 27 aa, Artificial Sequence
  Cyclic GFR-binding peptide
ESVAMGPYVKLYTVVGKDFFLISLSSL

SEQ ID NO: 71852 - protein, 32 aa, Artificial Sequence
  Cyclic GFR-binding peptide
  MOD_RES (26), (27): Xaa is C or S
PYVKLIIQQKDNFFLMSLSSMKTPTXXPGASG

SEQ ID NO: 71853 - protein, 26 aa, Artificial Sequence
  Cyclic GFR-binding peptide
IMPYVKLLLVRGNDFFLMSLSSTKVP

SEQ ID NO: 71854 - protein, 23 aa, Artificial Sequence
  Cyclic GFR-binding peptide
PYVKLIVNSSDDFFLVSLSSLKT

SEQ ID NO: 71855 - protein, 28 aa, Artificial Sequence
  Cyclic GFR-binding peptide
ARVVMNPYVKLIVNSSDDFFLVSLSSLQ

SEQ ID NO: 71856 - protein, 30 aa, Artificial Sequence
  Cyclic GFR-binding peptide
  MOD_RES (1), (1): Xaa is C or S
XGEVVMDPYVKLVVKENEDFFLMSLSSLET

SEQ ID NO: 71857 - protein, 27 aa, Artificial Sequence
  Cyclic GFR-binding peptide
VMDPYVKLVVNNASDFFLISLSSLRTP

SEQ ID NO: 71858 - protein, 29 aa, Artificial Sequence
  Cyclic GFR-binding peptide
  MOD_RES (27), (27): Xaa is C or S
NPYVKLIVNSSDDFFLVSLSSLKTPAXTP

SEQ ID NO: 71859 - protein, 29 aa, Artificial Sequence
  Cyclic GFR-binding peptide
  MOD_RES (29), (29): Xaa is C or S
VMNPYVKLIVNSSDDFFLVSLSSLQTPAX

SEQ ID NO: 71860 - protein, 29 aa, Artificial Sequence
  Cyclic GFR-binding peptide
  MOD_RES (27), (28): Xaa is C or S
GPYVKLYTVVGKDFFLISLSSLKTPVXXA

SEQ ID NO: 71861 - protein, 30 aa, Artificial Sequence
  Cyclic GFR-binding peptide
  MOD_RES (26), (27): Xaa is C or S
PYVKLTPVGMDDFFLVSLSSLKTPVXXAKG

SEQ ID NO: 71862 - protein, 31 aa, Artificial Sequence
  Cyclic GFR-binding peptide
  MOD_RES (26), (27): Xaa is C or S
PYVKLTPVGMDDFFLVSLSSLKTPVXXAKGV

SEQ ID NO: 71863 - protein, 35 aa, Artificial Sequence
  Cyclic GFR-binding peptide
  MOD_RES (2), (4): Xaa is C or S
RXEXKNHQLFPYVKLHQGQHPKIRFFLMSLSSEET

SEQ ID NO: 71864 - protein, 24 aa, Artificial Sequence
  Cyclic GFR-binding peptide
VMPYVKLVKPTRGVFFLISLSSLD

SEQ ID NO: 71865 - protein, 31 aa, Artificial Sequence
  Cyclic GFR-binding peptide
  MOD_RES (30), (30): Xaa is C or S
PYVKLLKPKKRVYEFFLVSLSSHHVRSPQXK

SEQ ID NO: 71866 - protein, 22 aa, Artificial Sequence
  Cyclic GFR-binding peptide
PYVKLLKPKKRVYEFFLVSLSS

SEQ ID NO: 71867 - protein, 31 aa, Artificial Sequence
  Cyclic GFR-binding peptide
  MOD_RES (28), (29): Xaa is C or S
MNPYVKLIVNNSSDFFLVSLSSLKTPAXXAK

SEQ ID NO: 71868 - protein, 37 aa, Artificial Sequence; identical to SEQ ID NO: 24083
  Cyclic GFR-binding peptide
  MOD_RES (31), (32): Xaa is C or S

SEQ ID NO: 71869 - protein, 22 aa, Artificial Sequence
  Cyclic GFR-binding peptide
MDPYVKLVVNNASDFFLISLSS

SEQ ID NO: 71870 - protein, 32 aa, Artificial Sequence
  Cyclic GFR-binding peptide
  MOD_RES (27), (28): Xaa is C or S
EPYVKLVVKDYEDFFLMSLSSLETPVXXAKPI

SEQ ID NO: 71871 - protein, 31 aa, Artificial Sequence
  Cyclic GFR-binding peptide
HEELRPYVKLLKPKKRVYEFFLVSLSSHHVR

SEQ ID NO: 71872 - protein, 28 aa, Artificial Sequence
  Cyclic GFR-binding peptide
VMEPYVKLVVKDYEDFFLMSLSSLETPV

SEQ ID NO: 71873 - protein, 35 aa, Artificial Sequence; identical to SEQ ID NO: 24085
  Cyclic GFR-binding peptide
  MOD_RES (1), (33), (34): Xaa is C or S

SEQ ID NO: 71874 - protein, 32 aa, Artificial Sequence
  Cyclic GFR-binding peptide
  MOD_RES (26), (27): Xaa is C or S
PYVKLYTVVGKDFFLISLSSLKTPVXXAKSAK

SEQ ID NO: 71875 - protein, 30 aa, Artificial Sequence
  Cyclic GFR-binding peptide
  MOD_RES (1), (3): Xaa is C or S
XGXARVVMNPYVKLIVNSSDDFFLVSLSSL

SEQ ID NO: 71876 - protein, 35 aa, Artificial Sequence; identical to SEQ ID NO: 24087
  Cyclic GFR-binding peptide
  MOD_RES (1), (32), (33): Xaa is C or S

SEQ ID NO: 71877 - protein, 35 aa, Artificial Sequence
  Cyclic GFR-binding peptide
  MOD_RES (2), (34), (35): Xaa is C or S
GXGEVVMDPYVKLVVKENEDFFLMSLSSLETPVXX

SEQ ID NO: 71878 - protein, 35 aa, Artificial Sequence
  Cyclic GFR-binding peptide
  MOD_RES (29), (30): Xaa is C or S
VIMPYVKLVKPKRGVFFLISLSSLAQPVXXPAASA

SEQ ID NO: 71879 - protein, 26 aa, Artificial Sequence
  Cyclic GFR-binding peptide
FPYVKLHQGQHPKIRFFLMSLSSEET

SEQ ID NO: 71880 - protein, 30 aa, Artificial Sequence
  Cyclic GFR-binding peptide
QLFPYVKLHQGQHPKIRFFLMSLSSEETPV

SEQ ID NO: 71881 - protein, 37 aa, Artificial Sequence; identical to SEQ ID NO: 24089
  Cyclic GFR-binding peptide
  MOD_RES (32), (33): Xaa is C or S

SEQ ID NO: 71882 - protein, 24 aa, Artificial Sequence
  Cyclic GFR-binding peptide
PYVKLIVNSSDDFFLVSLSSLQTP

SEQ ID NO: 71883 - protein, 27 aa, Artificial Sequence
  Cyclic GFR-binding peptide
RDVVMGPYVKLIIQQKDNFFLMSLSSM

SEQ ID NO: 71884 - protein, 29 aa, Artificial Sequence
  Cyclic GFR-binding peptide
  MOD_RES (27), (28): Xaa is C or S
NPYVKLIVNNSSDFFLVSLSSLKTPAXXA

SEQ ID NO: 71885 - protein, 30 aa, Artificial Sequence
  Cyclic GFR-binding peptide
  MOD_RES (27), (28): Xaa is C or S
GPYVKLYTVVGKDFFLISLSSLKTPVXXAK

SEQ ID NO: 71886 - protein, 35 aa, Artificial Sequence; identical to SEQ ID NO: 24093
  Cyclic GFR-binding peptide
  MOD_RES (32), (32): Xaa is C or S

SEQ ID NO: 71887 - protein, 36 aa, Artificial Sequence; identical to SEQ ID NO: 24094
  Cyclic GFR-binding peptide
  MOD_RES (1), (3), (35), (36): Xaa is C or S

SEQ ID NO: 71888 - protein, 21 aa, Artificial Sequence
  Cyclic GFR-binding peptide
PYVKLIIQQKDNFFLMSLSSM

SEQ ID NO: 71889 - protein, 32 aa, Artificial Sequence
  Cyclic GFR-binding peptide
  MOD_RES (27), (28): Xaa is C or S
MPYVKLLLVRGNDFFLMSLSSTKVPAXXTSPV

SEQ ID NO: 71890 - protein, 32 aa, Artificial Sequence
  Cyclic GFR-binding peptide
  MOD_RES (29), (30): Xaa is C or S
VMNPYVKLIVNNSSDFFLVSLSSLKTPAXXAK

SEQ ID NO: 71891 - protein, 37 aa, Artificial Sequence; identical to SEQ ID NO: 24097
  Cyclic GFR-binding peptide
  MOD_RES (1), (3), (35), (36): Xaa is C or S

SEQ ID NO: 71892 - protein, 38 aa, Artificial Sequence; identical to SEQ ID NO: 24098
  Cyclic GFR-binding peptide
  MOD_RES (1), (33), (34): Xaa is C or S

SEQ ID NO: 71893 - protein, 27 aa, Artificial Sequence
  Cyclic GFR-binding peptide
AKVVMNPYVKLIVNNSSDFFLVSLSSL

SEQ ID NO: 71894 - protein, 34 aa, Artificial Sequence; identical to SEQ ID NO: 24099
  Cyclic GFR-binding peptide
  MOD_RES (2), (34): Xaa is C or S

SEQ ID NO: 71895 - protein, 34 aa, Artificial Sequence
  Cyclic GFR-binding peptide
  MOD_RES (2), (4): Xaa is C or S
RXGXGEVVMDPYVKLVVKENEDFFLMSLSSLETP

SEQ ID NO: 71896 - protein, 24 aa, Artificial Sequence
  Cyclic GFR-binding peptide
VMNPYVKLIVNNSSDFFLVSLSSL

SEQ ID NO: 71897 - protein, 26 aa, Artificial Sequence
  Cyclic GFR-binding peptide
AMGPYVKLYTVVGKDFFLISLSSLKT

SEQ ID NO: 71898 - protein, 36 aa, Artificial Sequence; identical to SEQ ID NO: 24100
  Cyclic GFR-binding peptide
  MOD_RES (2), (4), (35), (36): Xaa is C or S

SEQ ID NO: 71899 - protein, 35 aa, Artificial Sequence; identical to SEQ ID NO: 24101
  Cyclic GFR-binding peptide
  MOD_RES (1), (3), (35): Xaa is C or S

SEQ ID NO: 71900 - protein, 37 aa, Artificial Sequence; identical to SEQ ID NO: 24102
  Cyclic GFR-binding peptide
  MOD_RES (1), (3), (35), (36): Xaa is C or S

SEQ ID NO: 71901 - protein, 24 aa, Artificial Sequence
  Cyclic GFR-binding peptide
MNPYVKLIVNNSSDFFLVSLSSLK

SEQ ID NO: 71902 - protein, 26 aa, Artificial Sequence
  Cyclic GFR-binding peptide
VMNPYVKLIVNSSDDFFLVSLSSLKT

SEQ ID NO: 71903 - protein, 28 aa, Artificial Sequence
  Cyclic GFR-binding peptide
HEELRPYVKLLKPKKRVYEFFLVSLSSH

SEQ ID NO: 71904 - protein, 36 aa, Artificial Sequence; identical to SEQ ID NO: 24104
  Cyclic GFR-binding peptide
  MOD_RES (2), (33), (34): Xaa is C or S

SEQ ID NO: 71905 - protein, 36 aa, Artificial Sequence
  Cyclic GFR-binding peptide
  MOD_RES (2), (34), (35): Xaa is C or S
GXGEVVMDPYVKLVVKENEDFFLMSLSSLETPVXXA

SEQ ID NO: 71906 - protein, 34 aa, Artificial Sequence
  Cyclic GFR-binding peptide
  MOD_RES (2), (4): Xaa is C or S
RXGXSEVVMDPYVKLVVNNASDFFLISLSSLRTP

SEQ ID NO: 71907 - protein, 35 aa, Artificial Sequence; identical to SEQ ID NO: 24105
  Cyclic GFR-binding peptide
  MOD_RES (1), (3), (35): Xaa is C or S

SEQ ID NO: 71908 - protein, 27 aa, Artificial Sequence
  Cyclic GFR-binding peptide
VIMPYVKLVKPKRGVFFLISLSSLAQP

SEQ ID NO: 71909 - protein, 35 aa, Artificial Sequence; identical to SEQ ID NO: 24107
  Cyclic GFR-binding peptide
  MOD_RES (31), (32): Xaa is C or S

SEQ ID NO: 71910 - protein, 35 aa, Artificial Sequence; identical to SEQ ID NO: 24108
  Cyclic GFR-binding peptide
  MOD_RES (31), (32): Xaa is C or S

SEQ ID NO: 71911 - protein, 23 aa, Artificial Sequence
  Cyclic GFR-binding peptide
MDPYVKLVVKENEDFFLMSLSSL

SEQ ID NO: 71912 - protein, 36 aa, Artificial Sequence; identical to SEQ ID NO: 24110
  Cyclic GFR-binding peptide
  MOD_RES (32), (33): Xaa is C or S

SEQ ID NO: 71913 - protein, 37 aa, Artificial Sequence; identical to SEQ ID NO: 24112
  Cyclic GFR-binding peptide
  MOD_RES (2), (4), (36), (37): Xaa is C or S

SEQ ID NO: 71914 - protein, 30 aa, Artificial Sequence
  Cyclic GFR-binding peptide
LHEELRPYVKLLKPKKRVYEFFLVSLSSHH

SEQ ID NO: 71915 - protein, 27 aa, Artificial Sequence
  Cyclic GFR-binding peptide
LRPYVKLLKPKKRVYEFFLVSLSSHHV

SEQ ID NO: 71916 - protein, 32 aa, Artificial Sequence
  Cyclic GFR-binding peptide
ELRPYVKLLKPKKRVYEFFLVSLSSHHVRSPQ

SEQ ID NO: 71917 - protein, 32 aa, Artificial Sequence
  Cyclic GFR-binding peptide
KNHQLFPYVKLHQGQHPKIRFFLMSLSSEETP

SEQ ID NO: 71918 - protein, 27 aa, Artificial Sequence
  Cyclic GFR-binding peptide
  MOD_RES (27), (27): Xaa is C or S
NPYVKLIVNSSDDFFLVSLSSLKTPAX

SEQ ID NO: 71919 - protein, 30 aa, Artificial Sequence
  Cyclic GFR-binding peptide
  MOD_RES (28), (28): Xaa is C or S
PYVKLHQGQHPKIRFFLMSLSSEETPVXEL

SEQ ID NO: 71920 - protein, 24 aa, Artificial Sequence
  Cyclic GFR-binding peptide
NPYVKLIVNSSDDFFLVSLSSLKT

SEQ ID NO: 71921 - protein, 33 aa, Artificial Sequence
  Cyclic GFR-binding peptide
  MOD_RES (27), (28): Xaa is C or S
DPYVKLVVKENEDFFLMSLSSLETPVXXAKPIK

SEQ ID NO: 71922 - protein, 37 aa, Artificial Sequence; identical to SEQ ID NO: 24124
  Cyclic GFR-binding peptide
  MOD_RES (1), (32), (33): Xaa is C or S

SEQ ID NO: 71923 - protein, 34 aa, Artificial Sequence
  Cyclic GFR-binding peptide
  MOD_RES (30), (31): Xaa is C or S
VVMNPYVKLIVNNSSDFFLVSLSSLKTPAXXAKP

SEQ ID NO: 71924 - protein, 29 aa, Artificial Sequence
  Cyclic GFR-binding peptide
  MOD_RES (1), (3): Xaa is C or S
XGXARVVMNPYVKLIVNSSDDFFLVSLSS

SEQ ID NO: 71925 - protein, 37 aa, Artificial Sequence; identical to SEQ ID NO: 24127
  Cyclic GFR-binding peptide
  MOD_RES (2), (4), (36), (37): Xaa is C or S

SEQ ID NO: 71926 - protein, 29 aa, Artificial Sequence
  Cyclic GFR-binding peptide
  MOD_RES (28), (29): Xaa is C or S
MEPYVKLVVKDYEDFFLMSLSSLETPVXX

SEQ ID NO: 71927 - protein, 28 aa, Artificial Sequence
  Cyclic GFR-binding peptide
VIMPYVKLIKPTKGIFFLISLSSLDQSV

SEQ ID NO: 71928 - protein, 35 aa, Artificial Sequence
  Cyclic GFR-binding peptide
  MOD_RES (34), (34): Xaa is C or S
EELRPYVKLLKPKKRVYEFFLVSLSSHHVRSPQXK

SEQ ID NO: 71929 - protein, 36 aa, Artificial Sequence; identical to SEQ ID NO: 24129
  Cyclic GFR-binding peptide
  MOD_RES (2), (33), (34): Xaa is C or S

SEQ ID NO: 71930 - protein, 35 aa, Artificial Sequence; identical to SEQ ID NO: 24130
  Cyclic GFR-binding peptide
  MOD_RES (31), (32): Xaa is C or S

SEQ ID NO: 71931 - protein, 26 aa, Artificial Sequence
  Cyclic GFR-binding peptide
MDPYVKLVVKENEDFFLMSLSSLETP

SEQ ID NO: 71932 - protein, 41 aa, Artificial Sequence; identical to SEQ ID NO: 24131
  Cyclic GFR-binding peptide
  MOD_RES (2), (4), (36), (37): Xaa is C or S

SEQ ID NO: 71933 - protein, 31 aa, Artificial Sequence
  Cyclic GFR-binding peptide
  MOD_RES (2), (4): Xaa is C or S
SXGXRDVVMGPYVKLIIQQKDNFFLMSLSSM

SEQ ID NO: 71934 - protein, 27 aa, Artificial Sequence
  Cyclic GFR-binding peptide
HQLFPYVKLHQGQHPKIRFFLMSLSSE

SEQ ID NO: 71935 - protein, 27 aa, Artificial Sequence
  Cyclic GFR-binding peptide
  MOD_RES (2), (2): Xaa is C or S
KXSKVVMPYVKLVKPTRGVFFLISLSS

SEQ ID NO: 71936 - protein, 33 aa, Artificial Sequence
  Cyclic GFR-binding peptide
  MOD_RES (2), (2): Xaa is C or S
GXGEVVMDPYVKLVVKENEDFFLMSLSSLETPV

SEQ ID NO: 71937 - protein, 29 aa, Artificial Sequence
  Cyclic GFR-binding peptide
  MOD_RES (27), (28): Xaa is C or S
DPYVKLVVNNASDFFLISLSSLRTPVXXT

SEQ ID NO: 71938 - protein, 25 aa, Artificial Sequence
  Cyclic GFR-binding peptide
SKVIMPYVKLIKPTKGIFFLISLSS

SEQ ID NO: 71939 - protein, 33 aa, Artificial Sequence
  Cyclic GFR-binding peptide
  MOD_RES (29), (30): Xaa is C or S
AMGPYVKLYTVVGKDFFLISLSSLKTPVXXAKS

SEQ ID NO: 71940 - protein, 34 aa, Artificial Sequence
  Cyclic GFR-binding peptide
  MOD_RES (28), (28): Xaa is C or S
MNPYVKLIVNSSDDFFLVSLSSLKTPAXTPKTVH

SEQ ID NO: 71941 - protein, 37 aa, Artificial Sequence
  Cyclic GFR-binding peptide
  MOD_RES (33), (33): Xaa is C or S
ELRPYVKLLKPKKRVYEFFLVSLSSHHVRSPQXKVSS

SEQ ID NO: 71942 - protein, 38 aa, Artificial Sequence; identical to SEQ ID NO: 24136
  Cyclic GFR-binding peptide
  MOD_RES (33), (34): Xaa is C or S

SEQ ID NO: 71943 - protein, 33 aa, Artificial Sequence; identical to SEQ ID NO: 24135
  Cyclic GFR-binding peptide

SEQ ID NO: 71944 - protein, 38 aa, Artificial Sequence; identical to SEQ ID NO: 24137
  Cyclic GFR-binding peptide
  MOD_RES (1), (32), (33): Xaa is C or S

SEQ ID NO: 71945 - protein, 28 aa, Artificial Sequence
  Cyclic GFR-binding peptide
KNHQLFPYVKLHQGQHPKIRFFLMSLSS

SEQ ID NO: 71946 - protein, 26 aa, Artificial Sequence
  Cyclic GFR-binding peptide
EPYVKLVVKDYEDFFLMSLSSLETPV

SEQ ID NO: 71947 - protein, 26 aa, Artificial Sequence
  Cyclic GFR-binding peptide
GPYVKLIIQQKDNFFLMSLSSMKTPT

SEQ ID NO: 71948 - protein, 35 aa, Artificial Sequence
  Cyclic GFR-binding peptide
  MOD_RES (30), (31): Xaa is C or S
VVMDPYVKLVVKENEDFFLMSLSSLETPVXXAKPI

SEQ ID NO: 71949 - protein, 37 aa, Artificial Sequence; identical to SEQ ID NO: 24141
  Cyclic GFR-binding peptide
  MOD_RES (1), (3), (34), (35): Xaa is C or S

SEQ ID NO: 71950 - protein, 32 aa, Artificial Sequence
  Cyclic GFR-binding peptide
  MOD_RES (28), (29): Xaa is C or S
MNPYVKLIVNNSSDFFLVSLSSLKTPAXXAKP

SEQ ID NO: 71951 - protein, 21 aa, Artificial Sequence
  Cyclic GFR-binding peptide
PYVKLVKPKRGVFFLISLSSL

SEQ ID NO: 71952 - protein, 23 aa, Artificial Sequence
  Cyclic GFR-binding peptide
MNPYVKLIVNNSSDFFLVSLSSL

SEQ ID NO: 71953 - protein, 39 aa, Artificial Sequence; identical to SEQ ID NO: 24144
  Cyclic GFR-binding peptide
  MOD_RES (2), (4), (36), (37): Xaa is C or S

SEQ ID NO: 71954 - protein, 26 aa, Artificial Sequence
  Cyclic GFR-binding peptide
  MOD_RES (26), (26): Xaa is C or S
PYVKLIVNNSSDFFLVSLSSLKTPAX

SEQ ID NO: 71955 - protein, 23 aa, Artificial Sequence
  Cyclic GFR-binding peptide
NPYVKLIVNSSDDFFLVSLSSLQ

SEQ ID NO: 71956 - protein, 39 aa, Artificial Sequence; identical to SEQ ID NO: 24146
  Cyclic GFR-binding peptide
  MOD_RES (2), (33), (34): Xaa is C or S

SEQ ID NO: 71957 - protein, 31 aa, Artificial Sequence
  Cyclic GFR-binding peptide
  MOD_RES (2), (4): Xaa is C or S
RXGXAEVVMDPYVKLVVNNAADFFLISLSSL

SEQ ID NO: 71958 - protein, 40 aa, Artificial Sequence; identical to SEQ ID NO: 24147
  Cyclic GFR-binding peptide
  MOD_RES (2), (34), (35): Xaa is C or S

SEQ ID NO: 71959 - protein, 30 aa, Artificial Sequence
  Cyclic GFR-binding peptide
  MOD_RES (1), (3): Xaa is C or S
XGXSEVVMDPYVKLVVNNASDFFLISLSSL

SEQ ID NO: 71960 - protein, 25 aa, Artificial Sequence
  Cyclic GFR-binding peptide
VVMDPYVKLVVNNASDFFLISLSSL

SEQ ID NO: 71961 - protein, 31 aa, Artificial Sequence
  Cyclic GFR-binding peptide
ELRPYVKLLKPKKRVYEFFLVSLSSHHVRSP

SEQ ID NO: 71962 - protein, 33 aa, Artificial Sequence
  Cyclic GFR-binding peptide
  MOD_RES (33), (33): Xaa is C or S
ELRPYVKLLKPKKRVYEFFLVSLSSHHVRSPQX

SEQ ID NO: 71963 - protein, 23 aa, Artificial Sequence
  Cyclic GFR-binding peptide
VIMPYVKLIKPTKGIFFLISLSS

SEQ ID NO: 71964 - protein, 25 aa, Artificial Sequence
  Cyclic GFR-binding peptide
PYVKLVKPTRGVFFLISLSSLDQPV

SEQ ID NO: 71965 - protein, 29 aa, Artificial Sequence
  Cyclic GFR-binding peptide
VVMNPYVKLIVNNSSDFFLVSLSSLKTPA

SEQ ID NO: 71966 - protein, 35 aa, Artificial Sequence; identical to SEQ ID NO: 24151
  Cyclic GFR-binding peptide
  MOD_RES (1), (3), (35): Xaa is C or S

SEQ ID NO: 71967 - protein, 32 aa, Artificial Sequence; identical to SEQ ID NO: 24152
  Cyclic GFR-binding peptide

SEQ ID NO: 71968 - protein, 29 aa, Artificial Sequence
  Cyclic GFR-binding peptide
GEVVMDPYVKLVVKENEDFFLMSLSSLET

SEQ ID NO: 71969 - protein, 23 aa, Artificial Sequence
  Cyclic GFR-binding peptide
MDPYVKLVVNNAADFFLISLSSL

SEQ ID NO: 71970 - protein, 27 aa, Artificial Sequence
  Cyclic GFR-binding peptide
  MOD_RES (1), (1): Xaa is C or S
XESVAMGPYVKLYTVVGKDFFLISLSS

SEQ ID NO: 71971 - protein, 24 aa, Artificial Sequence
  Cyclic GFR-binding peptide
VVMPYVKLVKPTRGVFFLISLSSL

SEQ ID NO: 71972 - protein, 37 aa, Artificial Sequence; identical to SEQ ID NO: 24153
  Cyclic GFR-binding peptide
  MOD_RES (33), (33): Xaa is C or S

SEQ ID NO: 71973 - protein, 30 aa, Artificial Sequence
  Cyclic GFR-binding peptide
  MOD_RES (1), (3): Xaa is C or S
XKXSRVIMPYVKLVKPKRGVFFLISLSSLA

SEQ ID NO: 71974 - protein, 41 aa, Artificial Sequence; identical to SEQ ID NO: 24154
  Cyclic GFR-binding peptide
  MOD_RES (1), (3), (35): Xaa is C or S

SEQ ID NO: 71975 - protein, 34 aa, Artificial Sequence
  Cyclic GFR-binding peptide
  MOD_RES (30), (31): Xaa is C or S
SMGEPYVKLTPVGMDDFFLVSLSSLKTPVXXAKG

SEQ ID NO: 71976 - protein, 28 aa, Artificial Sequence
  Cyclic GFR-binding peptide
VVMEPYVKLVVKDYEDFFLMSLSSLETP

SEQ ID NO: 71977 - protein, 41 aa, Artificial Sequence; identical to SEQ ID NO: 24155
  Cyclic GFR-binding peptide
  MOD_RES (1), (3), (35), (36): Xaa is C or S

SEQ ID NO: 71978 - protein, 28 aa, Artificial Sequence
  Cyclic GFR-binding peptide
  MOD_RES (27), (28): Xaa is C or S
DPYVKLVVNNASDFFLISLSSLRTPVXX

SEQ ID NO: 71979 - protein, 36 aa, Artificial Sequence; identical to SEQ ID NO: 24157
  Cyclic GFR-binding peptide
  MOD_RES (2), (34), (35): Xaa is C or S

SEQ ID NO: 71980 - protein, 34 aa, Artificial Sequence; identical to SEQ ID NO: 24161
  Cyclic GFR-binding peptide
  MOD_RES (31), (32): Xaa is C or S

SEQ ID NO: 71981 - protein, 31 aa, Artificial Sequence
  Cyclic GFR-binding peptide
  MOD_RES (29), (30): Xaa is C or S
VMNPYVKLIVNSSDDFFLVSLSSLQTPAXXP

SEQ ID NO: 71982 - protein, 30 aa, Artificial Sequence
  Cyclic GFR-binding peptide
  MOD_RES (1), (1): Xaa is C or S
XSKVIMPYVKLIKPTKGIFFLISLSSLDQS

SEQ ID NO: 71983 - protein, 37 aa, Artificial Sequence
  Cyclic GFR-binding peptide
  MOD_RES (31), (32): Xaa is C or S
EVVMDPYVKLVVKENEDFFLMSLSSLETPVXXAKPIK

SEQ ID NO: 71984 - protein, 30 aa, Artificial Sequence
  Cyclic GFR-binding peptide
  MOD_RES (28), (29): Xaa is C or S
MNPYVKLIVNSSDDFFLVSLSSLKTPAXXP

SEQ ID NO: 71985 - protein, 36 aa, Artificial Sequence; identical to SEQ ID NO: 24165
  Cyclic GFR-binding peptide
  MOD_RES (2), (34), (35): Xaa is C or S

SEQ ID NO: 71986 - protein, 32 aa, Artificial Sequence
  Cyclic GFR-binding peptide
  MOD_RES (27), (28): Xaa is C or S
GPYVKLIIQQKDNFFLMSLSSMKTPTXXPGAS

SEQ ID NO: 71987 - protein, 41 aa, Artificial Sequence; identical to SEQ ID NO: 24166
  Cyclic GFR-binding peptide
  MOD_RES (1), (3), (37): Xaa is C or S

SEQ ID NO: 71988 - protein, 35 aa, Artificial Sequence
  Cyclic GFR-binding peptide
  MOD_RES (30), (31): Xaa is C or S
VVMNPYVKLIVNSSDDFFLVSLSSLQTPAXXPKPV

SEQ ID NO: 71989 - protein, 22 aa, Artificial Sequence
  Cyclic GFR-binding peptide
MPYVKLVKPTRGVFFLISLSSL

SEQ ID NO: 71990 - protein, 27 aa, Artificial Sequence
  Cyclic GFR-binding peptide
SMGEPYVKLTPVGMDDFFLVSLSSLKT

SEQ ID NO: 71991 - protein, 23 aa, Artificial Sequence
  Cyclic GFR-binding peptide
PYVKLVVKDYEDFFLMSLSSLET

SEQ ID NO: 71992 - protein, 27 aa, Artificial Sequence
  Cyclic GFR-binding peptide
  MOD_RES (27), (27): Xaa is C or S
DPYVKLVVNNASDFFLISLSSLRTPVX

SEQ ID NO: 71993 - protein, 24 aa, Artificial Sequence
  Cyclic GFR-binding peptide
DPYVKLVVNNAADFFLISLSSLRA

SEQ ID NO: 71994 - protein, 27 aa, Artificial Sequence
  Cyclic GFR-binding peptide
VMDPYVKLVVKENEDFFLMSLSSLETP

SEQ ID NO: 71995 - protein, 28 aa, Artificial Sequence
  Cyclic GFR-binding peptide
  MOD_RES (1), (1): Xaa is C or S
XSKVVMPYVKLVKPTRGVFFLISLSSLD

SEQ ID NO: 71996 - protein, 33 aa, Artificial Sequence; identical to SEQ ID NO: 24171
  Cyclic GFR-binding peptide
  MOD_RES (1), (32), (33): Xaa is C or S

SEQ ID NO: 71997 - protein, 33 aa, Artificial Sequence
  Cyclic GFR-binding peptide
  MOD_RES (2), (2): Xaa is C or S
EXKNHQLFPYVKLHQGQHPKIRFFLMSLSSEET

SEQ ID NO: 71998 - protein, 42 aa, Artificial Sequence; identical to SEQ ID NO: 24172
  Cyclic GFR-binding peptide
  MOD_RES (2), (4), (36), (37): Xaa is C or S

SEQ ID NO: 71999 - protein, 40 aa, Artificial Sequence; identical to SEQ ID NO: 24173
  Cyclic GFR-binding peptide
  MOD_RES (2), (34): Xaa is C or S

SEQ ID NO: 72000 - protein, 34 aa, Artificial Sequence
  Cyclic GFR-binding peptide
  MOD_RES (32), (33): Xaa is C or S
AVSMGEPYVKLTPVGMDDFFLVSLSSLKTPVXXA

SEQ ID NO: 72001 - protein, 34 aa, Artificial Sequence
  Cyclic GFR-binding peptide
  MOD_RES (30), (31): Xaa is C or S
RVIMPYVKLVKPKRGVFFLISLSSLAQPVXXPAA

SEQ ID NO: 72002 - protein, 36 aa, Artificial Sequence; identical to SEQ ID NO: 24175
  Cyclic GFR-binding peptide
  MOD_RES (1), (3), (35), (36): Xaa is C or S

SEQ ID NO: 72003 - protein, 38 aa, Artificial Sequence; identical to SEQ ID NO: 24176
  Cyclic GFR-binding peptide
  MOD_RES (1), (33), (34): Xaa is C or S

SEQ ID NO: 72004 - protein, 29 aa, Artificial Sequence
  Cyclic GFR-binding peptide
  MOD_RES (1), (1): Xaa is C or S
XARVVMNPYVKLIVNSSDDFFLVSLSSLQ

SEQ ID NO: 72005 - protein, 26 aa, Artificial Sequence
  Cyclic GFR-binding peptide
MNPYVKLIVNNSSDFFLVSLSSLKTP

SEQ ID NO: 72006 - protein, 28 aa, Artificial Sequence
  Cyclic GFR-binding peptide
  MOD_RES (26), (27): Xaa is C or S
PYVKLIVNSSDDFFLVSLSSLQTPAXXP

SEQ ID NO: 72007 - protein, 26 aa, Artificial Sequence
  Cyclic GFR-binding peptide
EVVMDPYVKLVVNNAADFFLISLSSL

SEQ ID NO: 72008 - protein, 40 aa, Artificial Sequence; identical to SEQ ID NO: 24178
  Cyclic GFR-binding peptide
  MOD_RES (2), (34), (35): Xaa is C or S

SEQ ID NO: 72009 - protein, 38 aa, Artificial Sequence
  Cyclic GFR-binding peptide
  MOD_RES (34), (34): Xaa is C or S
EELRPYVKLLKPKKRVYEFFLVSLSSHHVRSPQXKVSS

SEQ ID NO: 72010 - protein, 41 aa, Artificial Sequence; identical to SEQ ID NO: 24180
  Cyclic GFR-binding peptide
  MOD_RES (1), (3), (40): Xaa is C or S

SEQ ID NO: 72011 - protein, 23 aa, Artificial Sequence
  Cyclic GFR-binding peptide
GPYVKLIIQQKDNFFLMSLSSMK

SEQ ID NO: 72012 - protein, 40 aa, Artificial Sequence; identical to SEQ ID NO: 24181
  Cyclic GFR-binding peptide
  MOD_RES (2), (34), (35): Xaa is C or S

SEQ ID NO: 72013 - protein, 33 aa, Artificial Sequence
  Cyclic GFR-binding peptide
  MOD_RES (30), (30): Xaa is C or S
VVMNPYVKLIVNSSDDFFLVSLSSLKTPAXTPK

SEQ ID NO: 72014 - protein, 35 aa, Artificial Sequence
  Cyclic GFR-binding peptide
  MOD_RES (29), (30): Xaa is C or S
VMDPYVKLVVNNAADFFLISLSSLRAPVXXSAPAA

SEQ ID NO: 72015 - protein, 29 aa, Artificial Sequence
  Cyclic GFR-binding peptide
  MOD_RES (1), (1): Xaa is C or S
XGEVVMEPYVKLVVKDYEDFFLMSLSSLE

SEQ ID NO: 72016 - protein, 26 aa, Artificial Sequence
  Cyclic GFR-binding peptide
VVMNPYVKLIVNNSSDFFLVSLSSLK

SEQ ID NO: 72017 - protein, 29 aa, Artificial Sequence
  Cyclic GFR-binding peptide
VVMDPYVKLVVNNAADFFLISLSSLRAPV

SEQ ID NO: 72018 - protein, 33 aa, Artificial Sequence
  Cyclic GFR-binding peptide
  MOD_RES (2), (4): Xaa is C or S
RXGXGEVVMDPYVKLVVKENEDFFLMSLSSLET

SEQ ID NO: 72019 - protein, 31 aa, Artificial Sequence
  Cyclic GFR-binding peptide
  MOD_RES (2), (4): Xaa is C or S
HXGXSRVVMNPYVKLIVNSSDDFFLVSLSSL

SEQ ID NO: 72020 - protein, 41 aa, Artificial Sequence; identical to SEQ ID NO: 24184
  Cyclic GFR-binding peptide
  MOD_RES (37), (37): Xaa is C or S

SEQ ID NO: 72021 - protein, 31 aa, Artificial Sequence
  Cyclic GFR-binding peptide
  MOD_RES (27), (27): Xaa is C or S
NPYVKLIVNSSDDFFLVSLSSLKTPAXTPKT

SEQ ID NO: 72022 - protein, 44 aa, Artificial Sequence; identical to SEQ ID NO: 24187
  Cyclic GFR-binding peptide
  MOD_RES (2), (4), (41): Xaa is C or S

SEQ ID NO: 72023 - protein, 42 aa, Artificial Sequence; identical to SEQ ID NO: 24189
  Cyclic GFR-binding peptide
  MOD_RES (2), (4), (36), (37): Xaa is C or S

SEQ ID NO: 72024 - protein, 34 aa, Artificial Sequence
  Cyclic GFR-binding peptide
  MOD_RES (30), (31): Xaa is C or S
VVMDPYVKLVVNNASDFFLISLSSLRTPVXXTPP

SEQ ID NO: 72025 - protein, 26 aa, Artificial Sequence
  Cyclic GFR-binding peptide
SMGEPYVKLTPVGMDDFFLVSLSSLK

SEQ ID NO: 72026 - protein, 40 aa, Artificial Sequence; identical to SEQ ID NO: 24191
  Cyclic GFR-binding peptide
  MOD_RES (2), (34), (35): Xaa is C or S

SEQ ID NO: 72027 - protein, 28 aa, Artificial Sequence
  Cyclic GFR-binding peptide
  MOD_RES (28), (28): Xaa is C or S
MGPYVKLIIQQKDNFFLMSLSSMKTPTX

SEQ ID NO: 72028 - protein, 40 aa, Artificial Sequence; identical to SEQ ID NO: 24192
  Cyclic GFR-binding peptide
  MOD_RES (2), (4), (35), (36): Xaa is C or S

SEQ ID NO: 72029 - protein, 37 aa, Artificial Sequence; identical to SEQ ID NO: 24193
  Cyclic GFR-binding peptide
  MOD_RES (2), (4), (36), (37): Xaa is C or S

SEQ ID NO: 72030 - protein, 34 aa, Artificial Sequence
  Cyclic GFR-binding peptide
  MOD_RES (31), (32): Xaa is C or S
VSMGEPYVKLTPVGMDDFFLVSLSSLKTPVXXAK

SEQ ID NO: 72031 - protein, 31 aa, Artificial Sequence
  Cyclic GFR-binding peptide
  MOD_RES (30), (31): Xaa is C or S
KVIMPYVKLIKPTKGIFFLISLSSLDQSVXX

SEQ ID NO: 72032 - protein, 29 aa, Artificial Sequence
  Cyclic GFR-binding peptide
EVVMDPYVKLVVNNAADFFLISLSSLRAP

SEQ ID NO: 72033 - protein, 27 aa, Artificial Sequence
  Cyclic GFR-binding peptide
  MOD_RES (26), (26): Xaa is C or S
PYVKLIVNSSDDFFLVSLSSLKTPAXT

SEQ ID NO: 72034 - protein, 37 aa, Artificial Sequence; identical to SEQ ID NO: 24194
  Cyclic GFR-binding peptide
  MOD_RES (36), (36): Xaa is C or S

SEQ ID NO: 72035 - protein, 24 aa, Artificial Sequence
  Cyclic GFR-binding peptide
MPYVKLIKPTKGIFFLISLSSLDQ

SEQ ID NO: 72036 - protein, 34 aa, Artificial Sequence; identical to SEQ ID NO: 24199
  Cyclic GFR-binding peptide
  MOD_RES (32), (33): Xaa is C or S

SEQ ID NO: 72037 - protein, 30 aa, Artificial Sequence
  Cyclic GFR-binding peptide
  MOD_RES (2), (2): Xaa is C or S
GXARVVMNPYVKLIVNSSDDFFLVSLSSLQ

SEQ ID NO: 72038 - protein, 27 aa, Artificial Sequence
  Cyclic GFR-binding peptide
EVVMDPYVKLVVNNASDFFLISLSSLR

SEQ ID NO: 72039 - protein, 33 aa, Artificial Sequence
  Cyclic GFR-binding peptide
  MOD_RES (28), (29): Xaa is C or S
MDPYVKLVVNNASDFFLISLSSLRTPVXXTPPT

SEQ ID NO: 72040 - protein, 37 aa, Artificial Sequence; identical to SEQ ID NO: 24201
  Cyclic GFR-binding peptide
  MOD_RES (1), (3), (35), (36): Xaa is C or S

SEQ ID NO: 72041 - protein, 35 aa, Artificial Sequence; identical to SEQ ID NO: 24202
  Cyclic GFR-binding peptide

SEQ ID NO: 72042 - protein, 42 aa, Artificial Sequence; identical to SEQ ID NO: 24203
  Cyclic GFR-binding peptide
  MOD_RES (2), (4), (36), (37): Xaa is C or S

SEQ ID NO: 72043 - protein, 27 aa, Artificial Sequence
  Cyclic GFR-binding peptide
IMPYVKLLLVRGNDFFLMSLSSTKVPA

SEQ ID NO: 72044 - protein, 32 aa, Artificial Sequence
  Cyclic GFR-binding peptide
  MOD_RES (26), (27): Xaa is C or S
PYVKLIVNNSSDFFLVSLSSLKTPAXXAKPVA

SEQ ID NO: 72045 - protein, 21 aa, Artificial Sequence
  Cyclic GFR-binding peptide
MPYVKLIKPTKGIFFLISLSS

SEQ ID NO: 72046 - protein, 24 aa, Artificial Sequence
  Cyclic GFR-binding peptide
FPYVKLHQGQHPKIRFFLMSLSSE

SEQ ID NO: 72047 - protein, 37 aa, Artificial Sequence; identical to SEQ ID NO: 24208
  Cyclic GFR-binding peptide
  MOD_RES (32), (33): Xaa is C or S

SEQ ID NO: 72048 - protein, 34 aa, Artificial Sequence
  Cyclic GFR-binding peptide
  MOD_RES (1), (3): Xaa is C or S
XAXELHEELRPYVKLLKPKKRVYEFFLVSLSSHH

SEQ ID NO: 72049 - protein, 25 aa, Artificial Sequence
  Cyclic GFR-binding peptide
PYVKLYTVVGKDFFLISLSSLKTPV

SEQ ID NO: 72050 - protein, 32 aa, Artificial Sequence
  Cyclic GFR-binding peptide
  MOD_RES (26), (27): Xaa is C or S
PYVKLIKPTKGIFFLISLSSLDQSVXXPSASA

SEQ ID NO: 72051 - protein, 29 aa, Artificial Sequence
  Cyclic GFR-binding peptide
  MOD_RES (1), (1): Xaa is C or S
XGEVVMDPYVKLVVKENEDFFLMSLSSLE

SEQ ID NO: 72052 - protein, 34 aa, Artificial Sequence
  Cyclic GFR-binding peptide
  MOD_RES (29), (30): Xaa is C or S
VVMPYVKLVKPTRGVFFLISLSSLDQPVXXPSAS

SEQ ID NO: 72053 - protein, 24 aa, Artificial Sequence
  Cyclic GFR-binding peptide
MGPYVKLYTVVGKDFFLISLSSLK

SEQ ID NO: 72054 - protein, 32 aa, Artificial Sequence
  Cyclic GFR-binding peptide
  MOD_RES (30), (31): Xaa is C or S
SMGEPYVKLTPVGMDDFFLVSLSSLKTPVXXA

SEQ ID NO: 72055 - protein, 32 aa, Artificial Sequence
  Cyclic GFR-binding peptide
  MOD_RES (30), (30): Xaa is C or S
PYVKLLKPKKRVYEFFLVSLSSHHVRSPQXKV

SEQ ID NO: 72056 - protein, 23 aa, Artificial Sequence
  Cyclic GFR-binding peptide
VMGPYVKLIIQQKDNFFLMSLSS

SEQ ID NO: 72057 - protein, 39 aa, Artificial Sequence; identical to SEQ ID NO: 24211
  Cyclic GFR-binding peptide
  MOD_RES (2), (35), (36): Xaa is C or S

SEQ ID NO: 72058 - protein, 26 aa, Artificial Sequence
  Cyclic GFR-binding peptide
VIMPYVKLLLVRGNDFFLMSLSSTKV

SEQ ID NO: 72059 - protein, 32 aa, Artificial Sequence
  Cyclic GFR-binding peptide
  MOD_RES (30), (31): Xaa is C or S
RVIMPYVKLVKPKRGVFFLISLSSLAQPVXXP

SEQ ID NO: 72060 - protein, 26 aa, Artificial Sequence
  Cyclic GFR-binding peptide
IMPYVKLIKPTKGIFFLISLSSLDQS

SEQ ID NO: 72061 - protein, 24 aa, Artificial Sequence
  Cyclic GFR-binding peptide
MPYVKLVKPKRGVFFLISLSSLAQ

SEQ ID NO: 72062 - protein, 37 aa, Artificial Sequence; identical to SEQ ID NO: 24214
  Cyclic GFR-binding peptide
  MOD_RES (1), (3), (36), (37): Xaa is C or S

SEQ ID NO: 72063 - protein, 28 aa, Artificial Sequence
  Cyclic GFR-binding peptide
  MOD_RES (26), (27): Xaa is C or S
PYVKLVVNNAADFFLISLSSLRAPVXXS

SEQ ID NO: 72064 - protein, 32 aa, Artificial Sequence; identical to SEQ ID NO: 24217
  Cyclic GFR-binding peptide
  MOD_RES (31), (32): Xaa is C or S

SEQ ID NO: 72065 - protein, 33 aa, Artificial Sequence
  Cyclic GFR-binding peptide
  MOD_RES (2), (4): Xaa is C or S
RXGXESVAMGPYVKLYTVVGKDFFLISLSSLKT

SEQ ID NO: 72066 - protein, 36 aa, Artificial Sequence; identical to SEQ ID NO: 24219
  Cyclic GFR-binding peptide
  MOD_RES (31), (32): Xaa is C or S

SEQ ID NO: 72067 - protein, 38 aa, Artificial Sequence; identical to SEQ ID NO: 24222
  Cyclic GFR-binding peptide
  MOD_RES (32), (33): Xaa is C or S

SEQ ID NO: 72068 - protein, 23 aa, Artificial Sequence
  Cyclic GFR-binding peptide
VMPYVKLVKPTRGVFFLISLSSL

SEQ ID NO: 72069 - protein, 27 aa, Artificial Sequence
  Cyclic GFR-binding peptide
QLFPYVKLHQGQHPKIRFFLMSLSSEE

SEQ ID NO: 72070 - protein, 26 aa, Artificial Sequence
  Cyclic GFR-binding peptide
  MOD_RES (1), (1): Xaa is C or S
XSKVIMPYVKLIKPTKGIFFLISLSS

SEQ ID NO: 72071 - protein, 40 aa, Artificial Sequence; identical to SEQ ID NO: 24226
  Cyclic GFR-binding peptide
  MOD_RES (2), (4), (36), (37): Xaa is C or S

SEQ ID NO: 72072 - protein, 32 aa, Artificial Sequence
  Cyclic GFR-binding peptide
  MOD_RES (2), (4): Xaa is C or S
HXGXARVVMNPYVKLIVNSSDDFFLVSLSSLQ

SEQ ID NO: 72073 - protein, 35 aa, Artificial Sequence; identical to SEQ ID NO: 24228
  Cyclic GFR-binding peptide
  MOD_RES (1), (33), (34): Xaa is C or S

SEQ ID NO: 72074 - protein, 25 aa, Artificial Sequence
  Cyclic GFR-binding peptide
FPYVKLHQGQHPKIRFFLMSLSSEE

SEQ ID NO: 72075 - protein, 38 aa, Artificial Sequence; identical to SEQ ID NO: 24230
  Cyclic GFR-binding peptide
  MOD_RES (33), (33): Xaa is C or S

SEQ ID NO: 72076 - protein, 40 aa, Artificial Sequence; identical to SEQ ID NO: 24232
  Cyclic GFR-binding peptide
  MOD_RES (1), (3), (35), (36): Xaa is C or S

SEQ ID NO: 72077 - protein, 36 aa, Artificial Sequence; identical to SEQ ID NO: 24233
  Cyclic GFR-binding peptide
  MOD_RES (31), (32): Xaa is C or S

SEQ ID NO: 72078 - protein, 36 aa, Artificial Sequence
  Cyclic GFR-binding peptide
  MOD_RES (30), (31): Xaa is C or S
VVMDPYVKLVVNNAADFFLISLSSLRAPVXXSAPAA

SEQ ID NO: 72079 - protein, 25 aa, Artificial Sequence
  Cyclic GFR-binding peptide
PYVKLVKPKRGVFFLISLSSLAQPV

SEQ ID NO: 72080 - protein, 32 aa, Artificial Sequence
  Cyclic GFR-binding peptide
  MOD_RES (30), (31): Xaa is C or S
VVMDPYVKLVVNNASDFFLISLSSLRTPVXXT

SEQ ID NO: 72081 - protein, 32 aa, Artificial Sequence
  Cyclic GFR-binding peptide
  MOD_RES (1), (3): Xaa is C or S
XKXSRVIMPYVKLVKPKRGVFFLISLSSLAQP

SEQ ID NO: 72082 - protein, 31 aa, Artificial Sequence; identical to SEQ ID NO: 24234
  Cyclic GFR-binding peptide
  MOD_RES (31), (31): Xaa is C or S

SEQ ID NO: 72083 - protein, 37 aa, Artificial Sequence; identical to SEQ ID NO: 24235
  Cyclic GFR-binding peptide
  MOD_RES (2), (34), (35): Xaa is C or S

SEQ ID NO: 72084 - protein, 29 aa, Artificial Sequence
  Cyclic GFR-binding peptide
  MOD_RES (2), (2): Xaa is C or S
KXSKVIMPYVKLIKPTKGIFFLISLSSLD

SEQ ID NO: 72085 - protein, 29 aa, Artificial Sequence
  Cyclic GFR-binding peptide
  MOD_RES (28), (29): Xaa is C or S
GEPYVKLTPVGMDDFFLVSLSSLKTPVXX

SEQ ID NO: 72086 - protein, 30 aa, Artificial Sequence
  Cyclic GFR-binding peptide
  MOD_RES (1), (1): Xaa is C or S
XELHEELRPYVKLLKPKKRVYEFFLVSLSS

SEQ ID NO: 72087 - protein, 35 aa, Artificial Sequence; identical to SEQ ID NO: 24237
  Cyclic GFR-binding peptide
  MOD_RES (32), (33): Xaa is C or S

SEQ ID NO: 72088 - protein, 39 aa, Artificial Sequence; identical to SEQ ID NO: 24236
  Cyclic GFR-binding peptide
  MOD_RES (1), (3), (35), (36): Xaa is C or S

SEQ ID NO: 72089 - protein, 32 aa, Artificial Sequence
  Cyclic GFR-binding peptide
  MOD_RES (28), (29): Xaa is C or S
MEPYVKLVVKDYEDFFLMSLSSLETPVXXAKP

SEQ ID NO: 72090 - protein, 35 aa, Artificial Sequence
  Cyclic GFR-binding peptide
  MOD_RES (30), (31): Xaa is C or S
EVIMPYVKLLLVRGNDFFLMSLSSTKVPAXXTSPV

SEQ ID NO: 72091 - protein, 20 aa, Artificial Sequence
  Cyclic GFR-binding peptide
PYVKLVVNNAADFFLISLSS

SEQ ID NO: 72092 - protein, 42 aa, Artificial Sequence; identical to SEQ ID NO: 24238
  Cyclic GFR-binding peptide
  MOD_RES (1), (3), (36), (37): Xaa is C or S

SEQ ID NO: 72093 - protein, 31 aa, Artificial Sequence
  Cyclic GFR-binding peptide
  MOD_RES (27), (28): Xaa is C or S
GPYVKLYTVVGKDFFLISLSSLKTPVXXAKS

SEQ ID NO: 72094 - protein, 28 aa, Artificial Sequence
  Cyclic GFR-binding peptide
  MOD_RES (28), (28): Xaa is C or S
MNPYVKLIVNNSSDFFLVSLSSLKTPAX

SEQ ID NO: 72095 - protein, 31 aa, Artificial Sequence
  Cyclic GFR-binding peptide
  MOD_RES (26), (27): Xaa is C or S
PYVKLIVNNSSDFFLVSLSSLKTPAXXAKPV

SEQ ID NO: 72096 - protein, 33 aa, Artificial Sequence
  Cyclic GFR-binding peptide
  MOD_RES (27), (28): Xaa is C or S
NPYVKLIVNSSDDFFLVSLSSLKTPAXXPKPVH

SEQ ID NO: 72097 - protein, 35 aa, Artificial Sequence; identical to SEQ ID NO: 24240
  Cyclic GFR-binding peptide
  MOD_RES (2), (34), (35): Xaa is C or S

SEQ ID NO: 72098 - protein, 32 aa, Artificial Sequence
  Cyclic GFR-binding peptide
LHEELRPYVKLLKPKKRVYEFFLVSLSSHHVR

SEQ ID NO: 72099 - protein, 38 aa, Artificial Sequence; identical to SEQ ID NO: 24242
  Cyclic GFR-binding peptide
  MOD_RES (32), (33): Xaa is C or S

SEQ ID NO: 72100 - protein, 33 aa, Artificial Sequence; identical to SEQ ID NO: 24244
  Cyclic GFR-binding peptide
  MOD_RES (31), (32): Xaa is C or S

SEQ ID NO: 72101 - protein, 36 aa, Artificial Sequence; identical to SEQ ID NO: 24246
  Cyclic GFR-binding peptide
  MOD_RES (2), (4), (36): Xaa is C or S

SEQ ID NO: 72102 - protein, 30 aa, Artificial Sequence
  Cyclic GFR-binding peptide
  MOD_RES (2), (2): Xaa is C or S
GXGEVVMEPYVKLVVKDYEDFFLMSLSSLE

SEQ ID NO: 72103 - protein, 39 aa, Artificial Sequence; identical to SEQ ID NO: 24248
  Cyclic GFR-binding peptide
  MOD_RES (1), (33), (34): Xaa is C or S

SEQ ID NO: 72104 - protein, 37 aa, Artificial Sequence; identical to SEQ ID NO: 24249
  Cyclic GFR-binding peptide
  MOD_RES (2), (34), (35): Xaa is C or S

SEQ ID NO: 72105 - protein, 29 aa, Artificial Sequence
  Cyclic GFR-binding peptide
  MOD_RES (2), (2): Xaa is C or S
GXAKVVMNPYVKLIVNNSSDFFLVSLSSL

SEQ ID NO: 72106 - protein, 29 aa, Artificial Sequence
  Cyclic GFR-binding peptide
SVAMGPYVKLYTVVGKDFFLISLSSLKTP

SEQ ID NO: 72107 - protein, 20 aa, Artificial Sequence
  Cyclic GFR-binding peptide
PYVKLVKPTRGVFFLISLSS

SEQ ID NO: 72108 - protein, 30 aa, Artificial Sequence; identical to SEQ ID NO: 1803
  Cyclic GFR-binding peptide

SEQ ID NO: 72109 - protein, 31 aa, Artificial Sequence
  Cyclic GFR-binding peptide
  MOD_RES (1), (1): Xaa is C or S
XSRVVMNPYVKLIVNSSDDFFLVSLSSLKTP

SEQ ID NO: 72110 - protein, 21 aa, Artificial Sequence
  Cyclic GFR-binding peptide
EPYVKLVVKDYEDFFLMSLSS

SEQ ID NO: 72111 - protein, 36 aa, Artificial Sequence; identical to SEQ ID NO: 24251
  Cyclic GFR-binding peptide
  MOD_RES (2), (4), (36): Xaa is C or S

SEQ ID NO: 72112 - protein, 34 aa, Artificial Sequence
  Cyclic GFR-binding peptide
  MOD_RES (2), (2): Xaa is C or S
EXKNHQLFPYVKLHQGQHPKIRFFLMSLSSEETP

SEQ ID NO: 72113 - protein, 29 aa, Artificial Sequence
  Cyclic GFR-binding peptide
  MOD_RES (26), (27): Xaa is C or S
PYVKLVVKDYEDFFLMSLSSLETPVXXAK

SEQ ID NO: 72114 - protein, 34 aa, Artificial Sequence
  Cyclic GFR-binding peptide
  MOD_RES (28), (29): Xaa is C or S
MNPYVKLIVNSSDDFFLVSLSSLKTPAXXPKPVY

SEQ ID NO: 72115 - protein, 35 aa, Artificial Sequence
  Cyclic GFR-binding peptide
  MOD_RES (31), (31): Xaa is C or S
RPYVKLLKPKKRVYEFFLVSLSSHHVRSPQXKVSS

SEQ ID NO: 72116 - protein, 31 aa, Artificial Sequence
  Cyclic GFR-binding peptide
  MOD_RES (29), (30): Xaa is C or S
VMNPYVKLIVNNSSDFFLVSLSSLKTPAXXA

SEQ ID NO: 72117 - protein, 32 aa, Artificial Sequence
  Cyclic GFR-binding peptide
  MOD_RES (27), (28): Xaa is C or S
EPYVKLTPVGMDDFFLVSLSSLKTPVXXAKGV

SEQ ID NO: 72118 - protein, 27 aa, Artificial Sequence
  Cyclic GFR-binding peptide
NHQLFPYVKLHQGQHPKIRFFLMSLSS

SEQ ID NO: 72119 - protein, 33 aa, Artificial Sequence
  Cyclic GFR-binding peptide
  MOD_RES (2), (4): Xaa is C or S
LXGXEEVIMPYVKLLLVRGNDFFLMSLSSTKVP

SEQ ID NO: 72120 - protein, 31 aa, Artificial Sequence
  Cyclic GFR-binding peptide
  MOD_RES (2), (2): Xaa is C or S
EXKNHQLFPYVKLHQGQHPKIRFFLMSLSSE

SEQ ID NO: 72121 - protein, 35 aa, Artificial Sequence
  Cyclic GFR-binding peptide
  MOD_RES (29), (30): Xaa is C or S
VMEPYVKLVVKDYEDFFLMSLSSLETPVXXAKPIS

SEQ ID NO: 72122 - protein, 26 aa, Artificial Sequence
  Cyclic GFR-binding peptide
VMGPYVKLIIQQKDNFFLMSLSSMKT

SEQ ID NO: 72123 - protein, 28 aa, Artificial Sequence
  Cyclic GFR-binding peptide
AVSMGEPYVKLTPVGMDDFFLVSLSSLK

SEQ ID NO: 72124 - protein, 30 aa, Artificial Sequence
  Cyclic GFR-binding peptide
  MOD_RES (29), (30): Xaa is C or S
AMGPYVKLYTVVGKDFFLISLSSLKTPVXX

SEQ ID NO: 72125 - protein, 41 aa, Artificial Sequence; identical to SEQ ID NO: 24255
  Cyclic GFR-binding peptide
  MOD_RES (2), (4), (38): Xaa is C or S

SEQ ID NO: 72126 - protein, 32 aa, Artificial Sequence
  Cyclic GFR-binding peptide
  MOD_RES (2), (4): Xaa is C or S
LXGXEEVIMPYVKLLLVRGNDFFLMSLSSTKV

SEQ ID NO: 72127 - protein, 25 aa, Artificial Sequence
  Cyclic GFR-binding peptide
VVMDPYVKLVVKENEDFFLMSLSSL

SEQ ID NO: 72128 - protein, 27 aa, Artificial Sequence
  Cyclic GFR-binding peptide
MGPYVKLIIQQKDNFFLMSLSSMKTPT

SEQ ID NO: 72129 - protein, 38 aa, Artificial Sequence; identical to SEQ ID NO: 24256
  Cyclic GFR-binding peptide
  MOD_RES (1), (3), (35), (36): Xaa is C or S

SEQ ID NO: 72130 - protein, 37 aa, Artificial Sequence; identical to SEQ ID NO: 24257
  Cyclic GFR-binding peptide
  MOD_RES (32), (33): Xaa is C or S

SEQ ID NO: 72131 - protein, 22 aa, Artificial Sequence
  Cyclic GFR-binding peptide
PYVKLYTVVGKDFFLISLSSLK

SEQ ID NO: 72132 - protein, 31 aa, Artificial Sequence
  Cyclic GFR-binding peptide
  MOD_RES (2), (2): Xaa is C or S
GXAKVVMNPYVKLIVNNSSDFFLVSLSSLKT

SEQ ID NO: 72133 - protein, 29 aa, Artificial Sequence
  Cyclic GFR-binding peptide
LFPYVKLHQGQHPKIRFFLMSLSSEETPV

SEQ ID NO: 72134 - protein, 41 aa, Artificial Sequence; identical to SEQ ID NO: 24258
  Cyclic GFR-binding peptide
  MOD_RES (1), (3), (35), (36): Xaa is C or S

SEQ ID NO: 72135 - protein, 37 aa, Artificial Sequence
  Cyclic GFR-binding peptide
  MOD_RES (32), (33): Xaa is C or S
GEVVMDPYVKLVVKENEDFFLMSLSSLETPVXXAKPI

SEQ ID NO: 72136 - protein, 26 aa, Artificial Sequence
  Cyclic GFR-binding peptide
LFPYVKLHQGQHPKIRFFLMSLSSEE

SEQ ID NO: 72137 - protein, 33 aa, Artificial Sequence
  Cyclic GFR-binding peptide
  MOD_RES (28), (29): Xaa is C or S
VMPYVKLVKPTRGVFFLISLSSLDQPVXXPSAS

SEQ ID NO: 72138 - protein, 44 aa, Artificial Sequence; identical to SEQ ID NO: 24260
  Cyclic GFR-binding peptide
  MOD_RES (2), (4), (38): Xaa is C or S

SEQ ID NO: 72139 - protein, 32 aa, Artificial Sequence
  Cyclic GFR-binding peptide
  MOD_RES (26), (27): Xaa is C or S
PYVKLLLVRGNDFFLMSLSSTKVPAXXTSPVR

SEQ ID NO: 72140 - protein, 23 aa, Artificial Sequence
  Cyclic GFR-binding peptide
PYVKLTPVGMDDFFLVSLSSLKT

SEQ ID NO: 72141 - protein, 33 aa, Artificial Sequence
  Cyclic GFR-binding peptide
  MOD_RES (27), (28): Xaa is C or S
EPYVKLTPVGMDDFFLVSLSSLKTPVXXAKGVK

SEQ ID NO: 72142 - protein, 29 aa, Artificial Sequence
  Cyclic GFR-binding peptide
  MOD_RES (29), (29): Xaa is C or S
VMDPYVKLVVNNAADFFLISLSSLRAPVX

SEQ ID NO: 72143 - protein, 27 aa, Artificial Sequence
  Cyclic GFR-binding peptide
  MOD_RES (26), (27): Xaa is C or S
PYVKLVVNNASDFFLISLSSLRTPVXX

SEQ ID NO: 72144 - protein, 28 aa, Artificial Sequence
  Cyclic GFR-binding peptide
VMDPYVKLVVNNAADFFLISLSSLRAPV

SEQ ID NO: 72145 - protein, 23 aa, Artificial Sequence
  Cyclic GFR-binding peptide
MGPYVKLIIQQKDNFFLMSLSSM

SEQ ID NO: 72146 - protein, 27 aa, Artificial Sequence
  Cyclic GFR-binding peptide
VMDPYVKLVVNNAADFFLISLSSLRAP

SEQ ID NO: 72147 - protein, 28 aa, Artificial Sequence
  Cyclic GFR-binding peptide
  MOD_RES (1), (1): Xaa is C or S
XSRVVMNPYVKLIVNSSDDFFLVSLSSL

SEQ ID NO: 72148 - protein, 30 aa, Artificial Sequence
  Cyclic GFR-binding peptide
  MOD_RES (1), (3): Xaa is C or S
XGXESVAMGPYVKLYTVVGKDFFLISLSSL

SEQ ID NO: 72149 - protein, 29 aa, Artificial Sequence
  Cyclic GFR-binding peptide
AAAAAAAAAPYVKLVVNNAADFFLISLSS

SEQ ID NO: 72150 - protein, 31 aa, Artificial Sequence
  Cyclic GFR-binding peptide
  MOD_RES (2), (4): Xaa is C or S
RXGXGEVVMDPYVKLVVKENEDFFLMSLSSL

SEQ ID NO: 72151 - protein, 28 aa, Artificial Sequence
  Cyclic GFR-binding peptide
  MOD_RES (27), (28): Xaa is C or S
DPYVKLVVKENEDFFLMSLSSLETPVXX

SEQ ID NO: 72152 - protein, 28 aa, Artificial Sequence
  Cyclic GFR-binding peptide
  MOD_RES (1), (1): Xaa is C or S
XGEVVMDPYVKLVVKENEDFFLMSLSSL

SEQ ID NO: 72153 - protein, 35 aa, Artificial Sequence; identical to SEQ ID NO: 24265
  Cyclic GFR-binding peptide
  MOD_RES (2), (34), (35): Xaa is C or S

SEQ ID NO: 72154 - protein, 29 aa, Artificial Sequence
  Cyclic GFR-binding peptide
ESVAMGPYVKLYTVVGKDFFLISLSSLKT

SEQ ID NO: 72155 - protein, 26 aa, Artificial Sequence
  Cyclic GFR-binding peptide
MPYVKLIKPTKGIFFLISLSSLDQSV

SEQ ID NO: 72156 - protein, 36 aa, Artificial Sequence
  Cyclic GFR-binding peptide
  MOD_RES (30), (31): Xaa is C or S
VVMDPYVKLVVNNASDFFLISLSSLRTPVXXTPPTS

SEQ ID NO: 72157 - protein, 37 aa, Artificial Sequence; identical to SEQ ID NO: 24266
  Cyclic GFR-binding peptide
  MOD_RES (2), (33), (34): Xaa is C or S

SEQ ID NO: 72158 - protein, 34 aa, Artificial Sequence
  Cyclic GFR-binding peptide
  MOD_RES (2), (4): Xaa is C or S
RXGXESVAMGPYVKLYTVVGKDFFLISLSSLKTP

SEQ ID NO: 72159 - protein, 28 aa, Artificial Sequence
  Cyclic GFR-binding peptide
  MOD_RES (2), (2): Xaa is C or S
GXAEVVMDPYVKLVVNNAADFFLISLSS

SEQ ID NO: 72160 - protein, 36 aa, Artificial Sequence
  Cyclic GFR-binding peptide
  MOD_RES (30), (31): Xaa is C or S
VVMNPYVKLIVNSSDDFFLVSLSSLKTPAXXPKPVH

SEQ ID NO: 72161 - protein, 27 aa, Artificial Sequence
  Cyclic GFR-binding peptide
  MOD_RES (27), (27): Xaa is C or S
EPYVKLVVKDYEDFFLMSLSSLETPVX

SEQ ID NO: 72162 - protein, 36 aa, Artificial Sequence
  Cyclic GFR-binding peptide
  MOD_RES (30), (31): Xaa is C or S
VVMNPYVKLIVNNSSDFFLVSLSSLKTPAXXAKPVA

SEQ ID NO: 72163 - protein, 25 aa, Artificial Sequence
  Cyclic GFR-binding peptide
ELRPYVKLLKPKKRVYEFFLVSLSS

SEQ ID NO: 72164 - protein, 38 aa, Artificial Sequence
  Cyclic GFR-binding peptide
  MOD_RES (2), (4), (36), (37): Xaa is C or S
RXGXGEVVMDPYVKLVVKENEDFFLMSLSSLETPVXXA

SEQ ID NO: 72165 - protein, 24 aa, Artificial Sequence
  Cyclic GFR-binding peptide
PYVKLLLVRGNDFFLMSLSSTKVP

SEQ ID NO: 72166 - protein, 30 aa, Artificial Sequence
  Cyclic GFR-binding peptide
  MOD_RES (2), (2): Xaa is C or S
KXSRVIMPYVKLVKPKRGVFFLISLSSLAQ

SEQ ID NO: 72167 - protein, 33 aa, Artificial Sequence
  Cyclic GFR-binding peptide
  MOD_RES (30), (31): Xaa is C or S
KVVMPYVKLVKPTRGVFFLISLSSLDQPVXXPS

SEQ ID NO: 72168 - protein, 23 aa, Artificial Sequence
  Cyclic GFR-binding peptide
IMPYVKLIKPTKGIFFLISLSSL

SEQ ID NO: 72169 - protein, 33 aa, Artificial Sequence
  Cyclic GFR-binding peptide
  MOD_RES (30), (31): Xaa is C or S
VVMDPYVKLVVNNASDFFLISLSSLRTPVXXTP

SEQ ID NO: 72170 - protein, 24 aa, Artificial Sequence
  Cyclic GFR-binding peptide
MDPYVKLVVKENEDFFLMSLSSLE

SEQ ID NO: 72171 - protein, 35 aa, Artificial Sequence
  Cyclic GFR-binding peptide
  MOD_RES (30), (31): Xaa is C or S
VVMEPYVKLVVKDYEDFFLMSLSSLETPVXXAKPI

SEQ ID NO: 72172 - protein, 29 aa, Artificial Sequence
  Cyclic GFR-binding peptide
EVVMDPYVKLVVNNASDFFLISLSSLRTP

SEQ ID NO: 72173 - protein, 28 aa, Artificial Sequence
  Cyclic GFR-binding peptide
VMDPYVKLVVKENEDFFLMSLSSLETPV

SEQ ID NO: 72174 - protein, 25 aa, Artificial Sequence
  Cyclic GFR-binding peptide
AMGPYVKLYTVVGKDFFLISLSSLK

SEQ ID NO: 72175 - protein, 33 aa, Artificial Sequence; identical to SEQ ID NO: 24268
  Cyclic GFR-binding peptide
  MOD_RES (33), (33): Xaa is C or S

SEQ ID NO: 72176 - protein, 39 aa, Artificial Sequence; identical to SEQ ID NO: 24270
  Cyclic GFR-binding peptide
  MOD_RES (2), (39): Xaa is C or S

SEQ ID NO: 72177 - protein, 35 aa, Artificial Sequence; identical to SEQ ID NO: 24271
  Cyclic GFR-binding peptide
  MOD_RES (32), (33): Xaa is C or S

SEQ ID NO: 72178 - protein, 26 aa, Artificial Sequence
  Cyclic GFR-binding peptide
VSMGEPYVKLTPVGMDDFFLVSLSSL

SEQ ID NO: 72179 - protein, 35 aa, Artificial Sequence; identical to SEQ ID NO: 24273
  Cyclic GFR-binding peptide
  MOD_RES (1), (33), (34): Xaa is C or S

SEQ ID NO: 72180 - protein, 28 aa, Artificial Sequence
  Cyclic GFR-binding peptide
SKVIMPYVKLIKPTKGIFFLISLSSLDQ

SEQ ID NO: 72181 - protein, 25 aa, Artificial Sequence
  Cyclic GFR-binding peptide
VVMPYVKLVKPTRGVFFLISLSSLD

SEQ ID NO: 72182 - protein, 32 aa, Artificial Sequence; identical to SEQ ID NO: 24275
  Cyclic GFR-binding peptide
  MOD_RES (1), (32): Xaa is C or S

SEQ ID NO: 72183 - protein, 32 aa, Artificial Sequence
  Cyclic GFR-binding peptide
  MOD_RES (1), (3): Xaa is C or S
XGXRDVVMGPYVKLIIQQKDNFFLMSLSSMKT

SEQ ID NO: 72184 - protein, 32 aa, Artificial Sequence
  Cyclic GFR-binding peptide
  MOD_RES (27), (28): Xaa is C or S
GPYVKLYTVVGKDFFLISLSSLKTPVXXAKSA

SEQ ID NO: 72185 - protein, 37 aa, Artificial Sequence; identical to SEQ ID NO: 24276
  Cyclic GFR-binding peptide
  MOD_RES (2), (4): Xaa is C or S

SEQ ID NO: 72186 - protein, 31 aa, Artificial Sequence
  Cyclic GFR-binding peptide
  MOD_RES (2), (4): Xaa is C or S
RXGXSEVVMDPYVKLVVNNASDFFLISLSSL

SEQ ID NO: 72187 - protein, 31 aa, Artificial Sequence; identical to SEQ ID NO: 24277
  Cyclic GFR-binding peptide
  MOD_RES (1), (1): Xaa is C or S

SEQ ID NO: 72188 - protein, 27 aa, Artificial Sequence
  Cyclic GFR-binding peptide
SKVVMPYVKLVKPTRGVFFLISLSSLD

SEQ ID NO: 72189 - protein, 30 aa, Artificial Sequence
  Cyclic GFR-binding peptide
  MOD_RES (2), (2): Xaa is C or S
GXEAVSMGEPYVKLTPVGMDDFFLVSLSSL

SEQ ID NO: 72190 - protein, 33 aa, Artificial Sequence
  Cyclic GFR-binding peptide
  MOD_RES (2), (4): Xaa is C or S
RXGXSEVVMDPYVKLVVNNASDFFLISLSSLRT

SEQ ID NO: 72191 - protein, 33 aa, Artificial Sequence; identical to SEQ ID NO: 24279
  Cyclic GFR-binding peptide
  MOD_RES (1), (32), (33): Xaa is C or S

SEQ ID NO: 72192 - protein, 29 aa, Artificial Sequence
  Cyclic GFR-binding peptide
QLFPYVKLHQGQHPKIRFFLMSLSSEETP

SEQ ID NO: 72193 - protein, 37 aa, Artificial Sequence; identical to SEQ ID NO: 24280
  Cyclic GFR-binding peptide
  MOD_RES (2), (4), (35), (36): Xaa is C or S

SEQ ID NO: 72194 - protein, 35 aa, Artificial Sequence; identical to SEQ ID NO: 24282
  Cyclic GFR-binding peptide
  MOD_RES (32), (33): Xaa is C or S

SEQ ID NO: 72195 - protein, 24 aa, Artificial Sequence
  Cyclic GFR-binding peptide
EVIMPYVKLLLVRGNDFFLMSLSS

SEQ ID NO: 72196 - protein, 38 aa, Artificial Sequence; identical to SEQ ID NO: 24283
  Cyclic GFR-binding peptide
  MOD_RES (32), (33): Xaa is C or S

SEQ ID NO: 72197 - protein, 33 aa, Artificial Sequence
  Cyclic GFR-binding peptide
  MOD_RES (1), (3): Xaa is C or S
XGXRDVVMGPYVKLIIQQKDNFFLMSLSSMKTP

SEQ ID NO: 72198 - protein, 36 aa, Artificial Sequence
  Cyclic GFR-binding peptide
  MOD_RES (1), (3): Xaa is C or S
XAXELHEELRPYVKLLKPKKRVYEFFLVSLSSHHVR

SEQ ID NO: 72199 - protein, 23 aa, Artificial Sequence
  Cyclic GFR-binding peptide
MGEPYVKLTPVGMDDFFLVSLSS

SEQ ID NO: 72200 - protein, 33 aa, Artificial Sequence
  Cyclic GFR-binding peptide
  MOD_RES (28), (29): Xaa is C or S
IMPYVKLIKPTKGIFFLISLSSLDQSVXXPSAS

SEQ ID NO: 72201 - protein, 42 aa, Artificial Sequence; identical to SEQ ID NO: 24285
  Cyclic GFR-binding peptide
  MOD_RES (2), (4), (36), (37): Xaa is C or S

SEQ ID NO: 72202 - protein, 31 aa, Artificial Sequence
  Cyclic GFR-binding peptide
  MOD_RES (31), (31): Xaa is C or S
VSMGEPYVKLTPVGMDDFFLVSLSSLKTPVX

SEQ ID NO: 72203 - protein, 28 aa, Artificial Sequence
  Cyclic GFR-binding peptide
  MOD_RES (26), (26): Xaa is C or S
PYVKLIVNSSDDFFLVSLSSLKTPAXTP

SEQ ID NO: 72204 - protein, 35 aa, Artificial Sequence; identical to SEQ ID NO: 24286
  Cyclic GFR-binding peptide
  MOD_RES (33), (33): Xaa is C or S

SEQ ID NO: 72205 - protein, 34 aa, Artificial Sequence
  Cyclic GFR-binding peptide
  MOD_RES (29), (30): Xaa is C or S
VMDPYVKLVVNNAADFFLISLSSLRAPVXXSAPA

SEQ ID NO: 72206 - protein, 40 aa, Artificial Sequence; identical to SEQ ID NO: 24287
  Cyclic GFR-binding peptide
  MOD_RES (2), (4), (36), (37): Xaa is C or S

SEQ ID NO: 72207 - protein, 34 aa, Artificial Sequence
  Cyclic GFR-binding peptide
  MOD_RES (29), (30): Xaa is C or S
VIMPYVKLVKPKRGVFFLISLSSLAQPVXXPAAS

SEQ ID NO: 72208 - protein, 27 aa, Artificial Sequence
  Cyclic GFR-binding peptide
  MOD_RES (26), (27): Xaa is C or S
PYVKLIVNSSDDFFLVSLSSLKTPAXX

SEQ ID NO: 72209 - protein, 22 aa, Artificial Sequence
  Cyclic GFR-binding peptide
PYVKLIVNSSDDFFLVSLSSLK

SEQ ID NO: 72210 - protein, 34 aa, Artificial Sequence
  Cyclic GFR-binding peptide
  MOD_RES (28), (29): Xaa is C or S
GEPYVKLTPVGMDDFFLVSLSSLKTPVXXAKGVK

SEQ ID NO: 72211 - protein, 32 aa, Artificial Sequence
  Cyclic GFR-binding peptide
  MOD_RES (31), (32): Xaa is C or S
VSMGEPYVKLTPVGMDDFFLVSLSSLKTPVXX

SEQ ID NO: 72212 - protein, 28 aa, Artificial Sequence
  Cyclic GFR-binding peptide
  MOD_RES (1), (1): Xaa is C or S
XGEVVMEPYVKLVVKDYEDFFLMSLSSL

SEQ ID NO: 72213 - protein, 23 aa, Artificial Sequence
  Cyclic GFR-binding peptide
MPYVKLIKPTKGIFFLISLSSLD

SEQ ID NO: 72214 - protein, 24 aa, Artificial Sequence
  Cyclic GFR-binding peptide
MGPYVKLIIQQKDNFFLMSLSSMK

SEQ ID NO: 72215 - protein, 33 aa, Artificial Sequence
  Cyclic GFR-binding peptide
  MOD_RES (27), (28): Xaa is C or S
MPYVKLVKPTRGVFFLISLSSLDQPVXXPSASA

SEQ ID NO: 72216 - protein, 31 aa, Artificial Sequence
  Cyclic GFR-binding peptide
  MOD_RES (1), (3): Xaa is C or S
XGXARVVMNPYVKLIVNSSDDFFLVSLSSLQ

SEQ ID NO: 72217 - protein, 30 aa, Artificial Sequence
  Cyclic GFR-binding peptide
  MOD_RES (28), (28): Xaa is C or S
MNPYVKLIVNSSDDFFLVSLSSLKTPAXTP

SEQ ID NO: 72218 - protein, 25 aa, Artificial Sequence
  Cyclic GFR-binding peptide
PYVKLIIQQKDNFFLMSLSSMKTPT

SEQ ID NO: 72219 - protein, 34 aa, Artificial Sequence; identical to SEQ ID NO: 24291
  Cyclic GFR-binding peptide
  MOD_RES (1), (32), (33): Xaa is C or S

SEQ ID NO: 72220 - protein, 32 aa, Artificial Sequence
  Cyclic GFR-binding peptide
ELHEELRPYVKLLKPKKRVYEFFLVSLSSHHV

SEQ ID NO: 72221 - protein, 30 aa, Artificial Sequence
  Cyclic GFR-binding peptide
LRPYVKLLKPKKRVYEFFLVSLSSHHVRSP

SEQ ID NO: 72222 - protein, 35 aa, Artificial Sequence; identical to SEQ ID NO: 24293
  Cyclic GFR-binding peptide
  MOD_RES (32), (33): Xaa is C or S

SEQ ID NO: 72223 - protein, 33 aa, Artificial Sequence
  Cyclic GFR-binding peptide
  MOD_RES (30), (31): Xaa is C or S
SMGEPYVKLTPVGMDDFFLVSLSSLKTPVXXAK

SEQ ID NO: 72224 - protein, 32 aa, Artificial Sequence
  Cyclic GFR-binding peptide
  MOD_RES (26), (27): Xaa is C or S
PYVKLIVNSSDDFFLVSLSSLKTPAXXPKPVH

SEQ ID NO: 72225 - protein, 31 aa, Artificial Sequence
  Cyclic GFR-binding peptide
  MOD_RES (30), (31): Xaa is C or S
SMGEPYVKLTPVGMDDFFLVSLSSLKTPVXX

SEQ ID NO: 72226 - protein, 27 aa, Artificial Sequence
  Cyclic GFR-binding peptide
  MOD_RES (27), (27): Xaa is C or S
GPYVKLIIQQKDNFFLMSLSSMKTPTX

SEQ ID NO: 72227 - protein, 29 aa, Artificial Sequence
  Cyclic GFR-binding peptide
  MOD_RES (28), (29): Xaa is C or S
MNPYVKLIVNNSSDFFLVSLSSLKTPAXX

SEQ ID NO: 72228 - protein, 40 aa, Artificial Sequence; identical to SEQ ID NO: 24296
  Cyclic GFR-binding peptide
  MOD_RES (1), (3), (37): Xaa is C or S

SEQ ID NO: 72229 - protein, 27 aa, Artificial Sequence
  Cyclic GFR-binding peptide
RLSSLSILFFDAANNVVLKVYPDMVVE

SEQ ID NO: 72230 - protein, 28 aa, Artificial Sequence
  Cyclic GFR-binding peptide
  MOD_RES (1), (2): Xaa is C or S
XXTPTKMSSLSMLFFNDKQQIILKVYPG

SEQ ID NO: 72231 - protein, 40 aa, Artificial Sequence; identical to SEQ ID NO: 24297
  Cyclic GFR-binding peptide
  MOD_RES (4), (5), (38), (40): Xaa is C or S

SEQ ID NO: 72232 - protein, 27 aa, Artificial Sequence
  Cyclic GFR-binding peptide
  MOD_RES (26), (26): Xaa is C or S
SSLSILFFIGKTPKILKVYPMIVKSXK

SEQ ID NO: 72233 - protein, 38 aa, Artificial Sequence; identical to SEQ ID NO: 24299
  Cyclic GFR-binding peptide
  MOD_RES (3), (4), (35), (37): Xaa is C or S

SEQ ID NO: 72234 - protein, 41 aa, Artificial Sequence; identical to SEQ ID NO: 24300
  Cyclic GFR-binding peptide
  MOD_RES (6), (7), (39), (41): Xaa is C or S

SEQ ID NO: 72235 - protein, 26 aa, Artificial Sequence
  Cyclic GFR-binding peptide
LSSLSILFFVGRTPKVLKVYPMVVKS

SEQ ID NO: 72236 - protein, 23 aa, Artificial Sequence
  Cyclic GFR-binding peptide
TKMSSLSMLFFNDKQQIILKVYP

SEQ ID NO: 72237 - protein, 32 aa, Artificial Sequence; identical to SEQ ID NO: 24302
  Cyclic GFR-binding peptide
  MOD_RES (32), (32): Xaa is C or S

SEQ ID NO: 72238 - protein, 31 aa, Artificial Sequence
  Cyclic GFR-binding peptide
  MOD_RES (5), (6): Xaa is C or S
SASPXXVSQDLSSLSILFFIGKTPKILKVYP

SEQ ID NO: 72239 - protein, 37 aa, Artificial Sequence; identical to SEQ ID NO: 24303
  Cyclic GFR-binding peptide
  MOD_RES (3), (4), (35), (37): Xaa is C or S

SEQ ID NO: 72240 - protein, 31 aa, Artificial Sequence; identical to SEQ ID NO: 24304
  Cyclic GFR-binding peptide
  MOD_RES (1), (1): Xaa is C or S

SEQ ID NO: 72241 - protein, 28 aa, Artificial Sequence
  Cyclic GFR-binding peptide
VPQALSSLSILFFVGRKPKVLKVYPMIV

SEQ ID NO: 72242 - protein, 25 aa, Artificial Sequence
  Cyclic GFR-binding peptide
KMSSLSMLFFNDKQQIILKVYPGMV

SEQ ID NO: 72243 - protein, 29 aa, Artificial Sequence
  Cyclic GFR-binding peptide
TKLSSLSVLFFDDSSNVILKVYPNMVVRS

SEQ ID NO: 72244 - protein, 32 aa, Artificial Sequence
  Cyclic GFR-binding peptide
  MOD_RES (7), (7): Xaa is C or S
HVTKPTXAPTKLSSLSVLFFDDSSNVILKVYP

SEQ ID NO: 72245 - protein, 31 aa, Artificial Sequence
  Cyclic GFR-binding peptide
  MOD_RES (3), (3): Xaa is C or S
PTXAPTKLSSLSVLFFDDSSNVILKVYPNMV

SEQ ID NO: 72246 - protein, 31 aa, Artificial Sequence
  Cyclic GFR-binding peptide
  MOD_RES (29), (31): Xaa is C or S
QDLSSLSILFFVGRTPKVLKVYPMVVKSXKX

SEQ ID NO: 72247 - protein, 32 aa, Artificial Sequence
  Cyclic GFR-binding peptide
  MOD_RES (30), (32): Xaa is C or S
PQDLSSLSILFFVGRTPKVLKVYPMVVKSXKX

SEQ ID NO: 72248 - protein, 32 aa, Artificial Sequence
  Cyclic GFR-binding peptide
  MOD_RES (29), (31): Xaa is C or S
ELSSLSMLFFDEYDKVVLKVYPEMVVEGXGXR

SEQ ID NO: 72249 - protein, 29 aa, Artificial Sequence
  Cyclic GFR-binding peptide
  MOD_RES (28), (28): Xaa is C or S
LSSLSMLFFDENEKVVLKVYPDMVVEGXG

SEQ ID NO: 72250 - protein, 27 aa, Artificial Sequence
  Cyclic GFR-binding peptide
TQLSSLSVLFFDDSSNVILKVYPNMVV

SEQ ID NO: 72251 - protein, 34 aa, Artificial Sequence
  Cyclic GFR-binding peptide
  MOD_RES (32), (34): Xaa is C or S
PTKLSSLSVLFFDDMGVPTLKVYPEGMSVAEXGX

SEQ ID NO: 72252 - protein, 32 aa, Artificial Sequence; identical to SEQ ID NO: 24308
  Cyclic GFR-binding peptide
  MOD_RES (32), (32): Xaa is C or S

SEQ ID NO: 72253 - protein, 34 aa, Artificial Sequence; identical to SEQ ID NO: 24309
  Cyclic GFR-binding peptide
  MOD_RES (1), (2), (34): Xaa is C or S

SEQ ID NO: 72254 - protein, 26 aa, Artificial Sequence
  Cyclic GFR-binding peptide
SSLSMLFFNDKQQIILKVYPGMVVDR

SEQ ID NO: 72255 - protein, 36 aa, Artificial Sequence
  Cyclic GFR-binding peptide
  MOD_RES (33), (35): Xaa is C or S
VHHSSLSVLFFEYVRKKPKLLKVYPRLEEHLEXAXA

SEQ ID NO: 72256 - protein, 26 aa, Artificial Sequence
  Cyclic GFR-binding peptide
ESSLSMLFFRIKPHQGQHLKVYPFLQ

SEQ ID NO: 72257 - protein, 27 aa, Artificial Sequence
  Cyclic GFR-binding peptide
VPTKLSSLSILFFDKGVVTYLKVYPGM

SEQ ID NO: 72258 - protein, 30 aa, Artificial Sequence
  Cyclic GFR-binding peptide
  MOD_RES (4), (4): Xaa is C or S
KPTXAPTKLSSLSVLFFDDSSNVILKVYPN

SEQ ID NO: 72259 - protein, 27 aa, Artificial Sequence
  Cyclic GFR-binding peptide
  MOD_RES (1), (2): Xaa is C or S
XXAPTKLSSLSVLFFDSSNNVILKVYP

SEQ ID NO: 72260 - protein, 27 aa, Artificial Sequence
  Cyclic GFR-binding peptide
PTKLSSLSVLFFDDMGVPTLKVYPEGM

SEQ ID NO: 72261 - protein, 26 aa, Artificial Sequence
  Cyclic GFR-binding peptide
APTKLSSLSVLFFDDSSNVILKVYPN

SEQ ID NO: 72262 - protein, 34 aa, Artificial Sequence
  Cyclic GFR-binding peptide
  MOD_RES (31), (33): Xaa is C or S
EESSLSMLFFRIKPHQGQHLKVYPFLQHNKXEXR

SEQ ID NO: 72263 - protein, 33 aa, Artificial Sequence; identical to SEQ ID NO: 24311
  Cyclic GFR-binding peptide
  MOD_RES (1), (32): Xaa is C or S

SEQ ID NO: 72264 - protein, 28 aa, Artificial Sequence
  Cyclic GFR-binding peptide
  MOD_RES (1), (2): Xaa is C or S
XXAPVKTSSLSMLFFDNGRVLLLKVYPM

SEQ ID NO: 72265 - protein, 41 aa, Artificial Sequence; identical to SEQ ID NO: 24313
  Cyclic GFR-binding peptide
  MOD_RES (4), (5), (38), (40): Xaa is C or S

SEQ ID NO: 72266 - protein, 36 aa, Artificial Sequence; identical to SEQ ID NO: 24314
  Cyclic GFR-binding peptide
  MOD_RES (2), (3), (36): Xaa is C or S

SEQ ID NO: 72267 - protein, 34 aa, Artificial Sequence
  Cyclic GFR-binding peptide
  MOD_RES (6), (6): Xaa is C or S
VTKPTXAPTKLSSLSVLFFDDSSNVILKVYPNMV

SEQ ID NO: 72268 - protein, 40 aa, Artificial Sequence; identical to SEQ ID NO: 24315
  Cyclic GFR-binding peptide
  MOD_RES (37), (39): Xaa is C or S

SEQ ID NO: 72269 - protein, 36 aa, Artificial Sequence; identical to SEQ ID NO: 24317
  Cyclic GFR-binding peptide
  MOD_RES (1), (35): Xaa is C or S

SEQ ID NO: 72270 - protein, 23 aa, Artificial Sequence
  Cyclic GFR-binding peptide
ELSSLSMLFFDENEKVVLKVYPD

SEQ ID NO: 72271 - protein, 38 aa, Artificial Sequence; identical to SEQ ID NO: 24318
  Cyclic GFR-binding peptide
  MOD_RES (6), (38): Xaa is C or S

SEQ ID NO: 72272 - protein, 36 aa, Artificial Sequence; identical to SEQ ID NO: 24319
  Cyclic GFR-binding peptide
  MOD_RES (4), (5): Xaa is C or S

SEQ ID NO: 72273 - protein, 31 aa, Artificial Sequence
  Cyclic GFR-binding peptide
  MOD_RES (30), (30): Xaa is C or S
TKMSSLSMLFFNDKQQIILKVYPGMVVDRXG

SEQ ID NO: 72274 - protein, 30 aa, Artificial Sequence
  Cyclic GFR-binding peptide
  MOD_RES (29), (29): Xaa is C or S
QDLSSLSILFFVGRTPKVLKVYPMVVKSXK

SEQ ID NO: 72275 - protein, 25 aa, Artificial Sequence
  Cyclic GFR-binding peptide
PTKMSSLSMLFFNDKQQIILKVYPG

SEQ ID NO: 72276 - protein, 41 aa, Artificial Sequence; identical to SEQ ID NO: 24324
  Cyclic GFR-binding peptide
  MOD_RES (5), (6), (38), (40): Xaa is C or S

SEQ ID NO: 72277 - protein, 39 aa, Artificial Sequence; identical to SEQ ID NO: 24327
  Cyclic GFR-binding peptide
  MOD_RES (5), (6), (37), (39): Xaa is C or S

SEQ ID NO: 72278 - protein, 33 aa, Artificial Sequence; identical to SEQ ID NO: 24328
  Cyclic GFR-binding peptide
  MOD_RES (1), (33): Xaa is C or S

SEQ ID NO: 72279 - protein, 28 aa, Artificial Sequence
  Cyclic GFR-binding peptide
  MOD_RES (27), (27): Xaa is C or S
SSLSMLFFDENEKVVLKVYPDMVVEGXG

SEQ ID NO: 72280 - protein, 33 aa, Artificial Sequence; identical to SEQ ID NO: 24329
  Cyclic GFR-binding peptide
  MOD_RES (2), (3): Xaa is C or S

SEQ ID NO: 72281 - protein, 29 aa, Artificial Sequence
  Cyclic GFR-binding peptide
  MOD_RES (28), (28): Xaa is C or S
SSLSVLFFDDMGVPTLKVYPEGMSVAEXG

SEQ ID NO: 72282 - protein, 32 aa, Artificial Sequence
  Cyclic GFR-binding peptide
  MOD_RES (32), (32): Xaa is C or S
HHSSLSVLFFEYVRKKPKLLKVYPRLEEHLEX

SEQ ID NO: 72283 - protein, 40 aa, Artificial Sequence; identical to SEQ ID NO: 24330
  Cyclic GFR-binding peptide
  MOD_RES (4), (5), (37), (39): Xaa is C or S

SEQ ID NO: 72284 - protein, 32 aa, Artificial Sequence
  Cyclic GFR-binding peptide
  MOD_RES (29), (31): Xaa is C or S
KMSSLSMLFFNDKQQIILKVYPGMVVDRXGXS

SEQ ID NO: 72285 - protein, 31 aa, Artificial Sequence
  Cyclic GFR-binding peptide
  MOD_RES (4), (5): Xaa is C or S
AAPXXVPQALSSLSILFFVGRKPKVLKVYPM

SEQ ID NO: 72286 - protein, 40 aa, Artificial Sequence; identical to SEQ ID NO: 24332
  Cyclic GFR-binding peptide
  MOD_RES (6), (7), (38), (40): Xaa is C or S

SEQ ID NO: 72287 - protein, 36 aa, Artificial Sequence; identical to SEQ ID NO: 24333
  Cyclic GFR-binding peptide
  MOD_RES (5), (6): Xaa is C or S

SEQ ID NO: 72288 - protein, 27 aa, Artificial Sequence
  Cyclic GFR-binding peptide
  MOD_RES (1), (2): Xaa is C or S
XXVPTKLSSLSILFFDKGVVTYLKVYP

SEQ ID NO: 72289 - protein, 34 aa, Artificial Sequence; identical to SEQ ID NO: 24334
  Cyclic GFR-binding peptide
  MOD_RES (2), (3): Xaa is C or S

SEQ ID NO: 72290 - protein, 29 aa, Artificial Sequence
  Cyclic GFR-binding peptide
  MOD_RES (1), (2): Xaa is C or S
XXTPTKMSSLSMLFFNDKQQIILKVYPGM

SEQ ID NO: 72291 - protein, 29 aa, Artificial Sequence
  Cyclic GFR-binding peptide
SQDLSSLSILFFIGKTPKILKVYPMIVKS

SEQ ID NO: 72292 - protein, 31 aa, Artificial Sequence
  Cyclic GFR-binding peptide
  MOD_RES (2), (2): Xaa is C or S
TXAPTKLSSLSVLFFDDSSNVILKVYPNMVV

SEQ ID NO: 72293 - protein, 29 aa, Artificial Sequence
  Cyclic GFR-binding peptide
SSLSILFFDKGVVTYLKVYPAAAAAAAAA

SEQ ID NO: 72294 - protein, 28 aa, Artificial Sequence
  Cyclic GFR-binding peptide
RLSSLSILFFDSANNVVLKVYPDMVVES

SEQ ID NO: 72295 - protein, 27 aa, Artificial Sequence
  Cyclic GFR-binding peptide
PTELSSLSMLFFDEYDKVVLKVYPEMV

SEQ ID NO: 72296 - protein, 34 aa, Artificial Sequence
  Cyclic GFR-binding peptide
  MOD_RES (4), (5): Xaa is C or S
PSTXXAPVKTSSLSMLFFDNGRVLLLKVYPMIVE

SEQ ID NO: 72297 - protein, 30 aa, Artificial Sequence
  Cyclic GFR-binding peptide
  MOD_RES (1), (1): Xaa is C or S
XVPTKLSSLSVLFFDDMGVPTLKVYPEGMS

SEQ ID NO: 72298 - protein, 34 aa, Artificial Sequence; identical to SEQ ID NO: 24339
  Cyclic GFR-binding peptide
  MOD_RES (1), (33): Xaa is C or S

SEQ ID NO: 72299 - protein, 34 aa, Artificial Sequence; identical to SEQ ID NO: 24341
  Cyclic GFR-binding peptide
  MOD_RES (4), (4): Xaa is C or S

SEQ ID NO: 72300 - protein, 33 aa, Artificial Sequence; identical to SEQ ID NO: 24343
  Cyclic GFR-binding peptide
  MOD_RES (1), (2): Xaa is C or S

SEQ ID NO: 72301 - protein, 34 aa, Artificial Sequence; identical to SEQ ID NO: 24344
  Cyclic GFR-binding peptide
  MOD_RES (3), (3): Xaa is C or S

SEQ ID NO: 72302 - protein, 34 aa, Artificial Sequence
  Cyclic GFR-binding peptide
  MOD_RES (5), (6): Xaa is C or S
IPKAXXVPTELSSLSMLFFDENEKVVLKVYPDMV

SEQ ID NO: 72303 - protein, 23 aa, Artificial Sequence
  Cyclic GFR-binding peptide
KLSSLSILFFDKGVVTYLKVYPG

SEQ ID NO: 72304 - protein, 34 aa, Artificial Sequence; identical to SEQ ID NO: 24345
  Cyclic GFR-binding peptide
  MOD_RES (32), (34): Xaa is C or S

SEQ ID NO: 72305 - protein, 26 aa, Artificial Sequence
  Cyclic GFR-binding peptide
VPARLSSLSILFFDAANNVVLKVYPD

SEQ ID NO: 72306 - protein, 33 aa, Artificial Sequence; identical to SEQ ID NO: 24346
  Cyclic GFR-binding peptide
  MOD_RES (32), (32): Xaa is C or S

SEQ ID NO: 72307 - protein, 28 aa, Artificial Sequence
  Cyclic GFR-binding peptide
RLSSLSILFFDAANNVVLKVYPDMVVEA

SEQ ID NO: 72308 - protein, 29 aa, Artificial Sequence
  Cyclic GFR-binding peptide
  MOD_RES (29), (29): Xaa is C or S
QDLSSLSILFFVGRTPKVLKVYPMVVKSX

SEQ ID NO: 72309 - protein, 27 aa, Artificial Sequence
  Cyclic GFR-binding peptide
  MOD_RES (1), (2): Xaa is C or S
XXTPTKMSSLSMLFFNDKQQIILKVYP

SEQ ID NO: 72310 - protein, 25 aa, Artificial Sequence
  Cyclic GFR-binding peptide
MSSLSMLFFNDKQQIILKVYPGMVV

SEQ ID NO: 72311 - protein, 26 aa, Artificial Sequence
  Cyclic GFR-binding peptide
TQLSSLSVLFFDDSSNVILKVYPNMV

SEQ ID NO: 72312 - protein, 26 aa, Artificial Sequence
  Cyclic GFR-binding peptide
QDLSSLSILFFVGRTPKVLKVYPMVV

SEQ ID NO: 72313 - protein, 36 aa, Artificial Sequence
  Cyclic GFR-binding peptide
  MOD_RES (6), (7): Xaa is C or S
KVGKAXXVPTKLSSLSVLFFDDMGVPTLKVYPEGMS

SEQ ID NO: 72314 - protein, 32 aa, Artificial Sequence; identical to SEQ ID NO: 24349
  Cyclic GFR-binding peptide
  MOD_RES (1), (1): Xaa is C or S

SEQ ID NO: 72315 - protein, 38 aa, Artificial Sequence; identical to SEQ ID NO: 24350
  Cyclic GFR-binding peptide
  MOD_RES (6), (7): Xaa is C or S

SEQ ID NO: 72316 - protein, 27 aa, Artificial Sequence
  Cyclic GFR-binding peptide
PTKLSSLSILFFDKGVVTYLKVYPGMA

SEQ ID NO: 72317 - protein, 39 aa, Artificial Sequence; identical to SEQ ID NO: 24351
  Cyclic GFR-binding peptide
  MOD_RES (5), (6), (37), (39): Xaa is C or S

SEQ ID NO: 72318 - protein, 30 aa, Artificial Sequence
  Cyclic GFR-binding peptide
  MOD_RES (29), (29): Xaa is C or S
KLSSLSILFFDKGVVTYLKVYPGMAVSEXG

SEQ ID NO: 72319 - protein, 29 aa, Artificial Sequence
  Cyclic GFR-binding peptide
  MOD_RES (28), (28): Xaa is C or S
MSSLSMLFFNDKQQIILKVYPGMVVDRXG

SEQ ID NO: 72320 - protein, 29 aa, Artificial Sequence
  Cyclic GFR-binding peptide
  MOD_RES (29), (29): Xaa is C or S
LSSLSVLFFDDMGVPTLKVYPEGMSVAEX

SEQ ID NO: 72321 - protein, 39 aa, Artificial Sequence; identical to SEQ ID NO: 24354
  Cyclic GFR-binding peptide
  MOD_RES (6), (7), (39): Xaa is C or S

SEQ ID NO: 72322 - protein, 29 aa, Artificial Sequence
  Cyclic GFR-binding peptide
  MOD_RES (1), (2): Xaa is C or S
XXVPQALSSLSILFFVGRKPKVLKVYPMI

SEQ ID NO: 72323 - protein, 34 aa, Artificial Sequence; identical to SEQ ID NO: 24357
  Cyclic GFR-binding peptide
  MOD_RES (3), (4): Xaa is C or S

SEQ ID NO: 72324 - protein, 30 aa, Artificial Sequence; identical to SEQ ID NO: 766
  Cyclic GFR-binding peptide

SEQ ID NO: 72325 - protein, 43 aa, Artificial Sequence; identical to SEQ ID NO: 24360
  Cyclic GFR-binding peptide
  MOD_RES (6), (7), (40), (42): Xaa is C or S

SEQ ID NO: 72326 - protein, 24 aa, Artificial Sequence
  Cyclic GFR-binding peptide
PTELSSLSMLFFDEYDKVVLKVYP

SEQ ID NO: 72327 - protein, 27 aa, Artificial Sequence
  Cyclic GFR-binding peptide
KLSSLSVLFFDDMGVPTLKVYPEGMSV

SEQ ID NO: 72328 - protein, 39 aa, Artificial Sequence; identical to SEQ ID NO: 24361
  Cyclic GFR-binding peptide
  MOD_RES (4), (5), (37), (39): Xaa is C or S

SEQ ID NO: 72329 - protein, 29 aa, Artificial Sequence
  Cyclic GFR-binding peptide
PTKLSSLSVLFFDSSNNVILKVYPNMVVK

SEQ ID NO: 72330 - protein, 24 aa, Artificial Sequence
  Cyclic GFR-binding peptide
SSLSILFFVGRTPKVLKVYPMVVK

SEQ ID NO: 72331 - protein, 35 aa, Artificial Sequence
  Cyclic GFR-binding peptide
  MOD_RES (6), (7): Xaa is C or S
RVPSTXXAPVKTSSLSMLFFDNGRVLLLKVYPMIV

SEQ ID NO: 72332 - protein, 37 aa, Artificial Sequence
  Cyclic GFR-binding peptide
  MOD_RES (34), (36): Xaa is C or S
RVHHSSLSVLFFEYVRKKPKLLKVYPRLEEHLEXAXA

SEQ ID NO: 72333 - protein, 35 aa, Artificial Sequence; identical to SEQ ID NO: 24363
  Cyclic GFR-binding peptide
  MOD_RES (4), (5): Xaa is C or S

SEQ ID NO: 72334 - protein, 31 aa, Artificial Sequence
  Cyclic GFR-binding peptide
VPTEESSLSMLFFRIKPHQGQHLKVYPFLQH

SEQ ID NO: 72335 - protein, 30 aa, Artificial Sequence
  Cyclic GFR-binding peptide
  MOD_RES (30), (30): Xaa is C or S
TRLSSLSILFFDSANNVVLKVYPDMVVESX

SEQ ID NO: 72336 - protein, 35 aa, Artificial Sequence; identical to SEQ ID NO: 24364
  Cyclic GFR-binding peptide
  MOD_RES (4), (5): Xaa is C or S

SEQ ID NO: 72337 - protein, 29 aa, Artificial Sequence
  Cyclic GFR-binding peptide
  MOD_RES (1), (1): Xaa is C or S
XAPTKLSSLSVLFFDDSSNVILKVYPNMV

SEQ ID NO: 72338 - protein, 23 aa, Artificial Sequence
  Cyclic GFR-binding peptide
LSSLSILFFDKGVVTYLKVYPGM

SEQ ID NO: 72339 - protein, 31 aa, Artificial Sequence
  Cyclic GFR-binding peptide
  MOD_RES (31), (31): Xaa is C or S
TKLSSLSVLFFDDMGVPTLKVYPEGMSVAEX

SEQ ID NO: 72340 - protein, 28 aa, Artificial Sequence
  Cyclic GFR-binding peptide
  MOD_RES (2), (3): Xaa is C or S
PXXVPQALSSLSILFFVGRKPKVLKVYP

SEQ ID NO: 72341 - protein, 27 aa, Artificial Sequence
  Cyclic GFR-binding peptide
TKMSSLSMLFFNDKQQIILKVYPGMVV

SEQ ID NO: 72342 - protein, 37 aa, Artificial Sequence; identical to SEQ ID NO: 24367
  Cyclic GFR-binding peptide
  MOD_RES (2), (3), (34), (36): Xaa is C or S

SEQ ID NO: 72343 - protein, 26 aa, Artificial Sequence
  Cyclic GFR-binding peptide
VPTELSSLSMLFFDENEKVVLKVYPD

SEQ ID NO: 72344 - protein, 40 aa, Artificial Sequence; identical to SEQ ID NO: 24368
  Cyclic GFR-binding peptide
  MOD_RES (5), (6), (37), (39): Xaa is C or S

SEQ ID NO: 72345 - protein, 26 aa, Artificial Sequence
  Cyclic GFR-binding peptide
PTKLSSLSILFFDKGVVTYLKVYPGM

SEQ ID NO: 72346 - protein, 25 aa, Artificial Sequence
  Cyclic GFR-binding peptide
KLSSLSVLFFDDSSNVILKVYPNMV

SEQ ID NO: 72347 - protein, 29 aa, Artificial Sequence
  Cyclic GFR-binding peptide
TELSSLSMLFFDEYDKVVLKVYPEMVVEG

SEQ ID NO: 72348 - protein, 31 aa, Artificial Sequence
  Cyclic GFR-binding peptide
  MOD_RES (2), (3): Xaa is C or S
PXXVSQDLSSLSILFFIGKTPKILKVYPMIV

SEQ ID NO: 72349 - protein, 33 aa, Artificial Sequence
  Cyclic GFR-binding peptide
  MOD_RES (30), (32): Xaa is C or S
SQDLSSLSILFFIGKTPKILKVYPMIVKSXKXS

SEQ ID NO: 72350 - protein, 35 aa, Artificial Sequence
  Cyclic GFR-binding peptide
  MOD_RES (6), (7): Xaa is C or S
YVPKPXXAPTKLSSLSVLFFDDSSNVILKVYPNMV

SEQ ID NO: 72351 - protein, 33 aa, Artificial Sequence
  Cyclic GFR-binding peptide
  MOD_RES (6), (7): Xaa is C or S
YVPKPXXAPTKLSSLSVLFFDDSSNVILKVYPN

SEQ ID NO: 72352 - protein, 35 aa, Artificial Sequence
  Cyclic GFR-binding peptide
  MOD_RES (6), (7): Xaa is C or S
GSAGPXXTPTKMSSLSMLFFNDKQQIILKVYPGMV

SEQ ID NO: 72353 - protein, 30 aa, Artificial Sequence
  Cyclic GFR-binding peptide
  MOD_RES (1), (2): Xaa is C or S
XXVPQALSSLSILFFVGRKPKVLKVYPMIV

SEQ ID NO: 72354 - protein, 33 aa, Artificial Sequence; identical to SEQ ID NO: 24375
  Cyclic GFR-binding peptide
  MOD_RES (32), (32): Xaa is C or S

SEQ ID NO: 72355 - protein, 34 aa, Artificial Sequence; identical to SEQ ID NO: 24376
  Cyclic GFR-binding peptide
  MOD_RES (3), (4): Xaa is C or S

SEQ ID NO: 72356 - protein, 30 aa, Artificial Sequence
  Cyclic GFR-binding peptide
  MOD_RES (1), (1): Xaa is C or S
XAPVKTSSLSMLFFDNGRVLLLKVYPMIVE

SEQ ID NO: 72357 - protein, 32 aa, Artificial Sequence
  Cyclic GFR-binding peptide
  MOD_RES (4), (4): Xaa is C or S
GLEXVPTEESSLSMLFFRIKPHQGQHLKVYPF

SEQ ID NO: 72358 - protein, 28 aa, Artificial Sequence
  Cyclic GFR-binding peptide
  MOD_RES (28), (28): Xaa is C or S
LSSLSILFFDKGVVTYLKVYPGMAVSEX

SEQ ID NO: 72359 - protein, 27 aa, Artificial Sequence
  Cyclic GFR-binding peptide
  MOD_RES (26), (26): Xaa is C or S
SSLSILFFVGRKPKVLKVYPMIVRSXK

SEQ ID NO: 72360 - protein, 40 aa, Artificial Sequence; identical to SEQ ID NO: 24382
  Cyclic GFR-binding peptide
  MOD_RES (3), (4), (37), (39): Xaa is C or S

SEQ ID NO: 72361 - protein, 28 aa, Artificial Sequence
  Cyclic GFR-binding peptide
PQALSSLSILFFVGRKPKVLKVYPMIVR

SEQ ID NO: 72362 - protein, 30 aa, Artificial Sequence
  Cyclic GFR-binding peptide
  MOD_RES (28), (30): Xaa is C or S
LSSLSMLFFDEYDKVVLKVYPEMVVEGXGX

SEQ ID NO: 72363 - protein, 28 aa, Artificial Sequence
  Cyclic GFR-binding peptide
  MOD_RES (1), (2): Xaa is C or S
XXVPTELSSLSMLFFDEYDKVVLKVYPE

SEQ ID NO: 72364 - protein, 36 aa, Artificial Sequence; identical to SEQ ID NO: 24386
  Cyclic GFR-binding peptide
  MOD_RES (4), (5), (36): Xaa is C or S

SEQ ID NO: 72365 - protein, 27 aa, Artificial Sequence
  Cyclic GFR-binding peptide
ELSSLSMLFFDEYDKVVLKVYPEMVVE

SEQ ID NO: 72366 - protein, 26 aa, Artificial Sequence
  Cyclic GFR-binding peptide
  MOD_RES (1), (1): Xaa is C or S
XVPTELSSLSMLFFDENEKVVLKVYP

SEQ ID NO: 72367 - protein, 41 aa, Artificial Sequence; identical to SEQ ID NO: 24389
  Cyclic GFR-binding peptide
  MOD_RES (5), (6), (38), (40): Xaa is C or S

SEQ ID NO: 72368 - protein, 30 aa, Artificial Sequence
  Cyclic GFR-binding peptide
  MOD_RES (1), (2): Xaa is C or S
XXVPTRLSSLSILFFDSANNVVLKVYPDMV

SEQ ID NO: 72369 - protein, 32 aa, Artificial Sequence
  Cyclic GFR-binding peptide
  MOD_RES (5), (6): Xaa is C or S
SASPXXVPQDLSSLSILFFVGRTPKVLKVYPM

SEQ ID NO: 72370 - protein, 27 aa, Artificial Sequence
  Cyclic GFR-binding peptide
QDLSSLSILFFVGRTPKVLKVYPMVVK

SEQ ID NO: 72371 - protein, 20 aa, Artificial Sequence
  Cyclic GFR-binding peptide
SSLSILFFDSANNVVLKVYP

SEQ ID NO: 72372 - protein, 30 aa, Artificial Sequence
  Cyclic GFR-binding peptide
RVHHSSLSVLFFEYVRKKPKLLKVYPRLEE

SEQ ID NO: 72373 - protein, 34 aa, Artificial Sequence; identical to SEQ ID NO: 24392
  Cyclic GFR-binding peptide
  MOD_RES (31), (33): Xaa is C or S

SEQ ID NO: 72374 - protein, 34 aa, Artificial Sequence; identical to SEQ ID NO: 24394
  Cyclic GFR-binding peptide
  MOD_RES (2), (3), (34): Xaa is C or S

SEQ ID NO: 72375 - protein, 34 aa, Artificial Sequence; identical to SEQ ID NO: 24393
  Cyclic GFR-binding peptide
  MOD_RES (1), (33): Xaa is C or S

SEQ ID NO: 72376 - protein, 30 aa, Artificial Sequence
  Cyclic GFR-binding peptide
  MOD_RES (2), (3): Xaa is C or S
TXXVPTRLSSLSILFFDSANNVVLKVYPDM

SEQ ID NO: 72377 - protein, 37 aa, Artificial Sequence; identical to SEQ ID NO: 24395
  Cyclic GFR-binding peptide
  MOD_RES (6), (7): Xaa is C or S

SEQ ID NO: 72378 - protein, 38 aa, Artificial Sequence; identical to SEQ ID NO: 24396
  Cyclic GFR-binding peptide
  MOD_RES (5), (6), (38): Xaa is C or S

SEQ ID NO: 72379 - protein, 25 aa, Artificial Sequence
  Cyclic GFR-binding peptide
LSSLSILFFIGKTPKILKVYPMIVK

SEQ ID NO: 72380 - protein, 29 aa, Artificial Sequence
  Cyclic GFR-binding peptide
  MOD_RES (1), (2): Xaa is C or S
XXAPTKLSSLSVLFFDDSSNVILKVYPNM

SEQ ID NO: 72381 - protein, 30 aa, Artificial Sequence
  Cyclic GFR-binding peptide
  MOD_RES (4), (5): Xaa is C or S
SKAXXVPTKLSSLSILFFDKGVVTYLKVYP

SEQ ID NO: 72382 - protein, 38 aa, Artificial Sequence; identical to SEQ ID NO: 24398
  Cyclic GFR-binding peptide
  MOD_RES (3), (3): Xaa is C or S

SEQ ID NO: 72383 - protein, 38 aa, Artificial Sequence; identical to SEQ ID NO: 24399
  Cyclic GFR-binding peptide
  MOD_RES (2), (2): Xaa is C or S

SEQ ID NO: 72384 - protein, 23 aa, Artificial Sequence
  Cyclic GFR-binding peptide
KTSSLSMLFFDNGRVLLLKVYPM

SEQ ID NO: 72385 - protein, 38 aa, Artificial Sequence
  Cyclic GFR-binding peptide
  MOD_RES (6), (7): Xaa is C or S
KIPKAXXVPTELSSLSMLFFDENEKVVLKVYPDMVVEG

SEQ ID NO: 72386 - protein, 31 aa, Artificial Sequence
  Cyclic GFR-binding peptide
  MOD_RES (30), (30): Xaa is C or S
PQALSSLSILFFVGRKPKVLKVYPMIVRSXK

SEQ ID NO: 72387 - protein, 25 aa, Artificial Sequence
  Cyclic GFR-binding peptide
LSSLSMLFFDEYDKVVLKVYPEMVV

SEQ ID NO: 72388 - protein, 32 aa, Artificial Sequence
  Cyclic GFR-binding peptide
  MOD_RES (30), (32): Xaa is C or S
TRLSSLSILFFDSANNVVLKVYPDMVVESXGX

SEQ ID NO: 72389 - protein, 24 aa, Artificial Sequence
  Cyclic GFR-binding peptide
TKMSSLSMLFFNDKQQIILKVYPG

SEQ ID NO: 72390 - protein, 25 aa, Artificial Sequence
  Cyclic GFR-binding peptide
APTKLSSLSVLFFDDSSNVILKVYP

SEQ ID NO: 72391 - protein, 33 aa, Artificial Sequence
  Cyclic GFR-binding peptide
  MOD_RES (4), (5): Xaa is C or S
GKAXXVPTKLSSLSVLFFDDMGVPTLKVYPEGM

SEQ ID NO: 72392 - protein, 36 aa, Artificial Sequence; identical to SEQ ID NO: 24402
  Cyclic GFR-binding peptide
  MOD_RES (1), (2), (34), (36): Xaa is C or S

SEQ ID NO: 72393 - protein, 28 aa, Artificial Sequence
  Cyclic GFR-binding peptide
VPTRLSSLSILFFDSANNVVLKVYPDMV

SEQ ID NO: 72394 - protein, 40 aa, Artificial Sequence; identical to SEQ ID NO: 24404
  Cyclic GFR-binding peptide
  MOD_RES (5), (6), (38), (40): Xaa is C or S

SEQ ID NO: 72395 - protein, 32 aa, Artificial Sequence
  Cyclic GFR-binding peptide
  MOD_RES (31), (31): Xaa is C or S
PTRLSSLSILFFDSANNVVLKVYPDMVVESXG

SEQ ID NO: 72396 - protein, 34 aa, Artificial Sequence; identical to SEQ ID NO: 24405
  Cyclic GFR-binding peptide
  MOD_RES (1), (33): Xaa is C or S

SEQ ID NO: 72397 - protein, 25 aa, Artificial Sequence
  Cyclic GFR-binding peptide
TKLSSLSVLFFDDMGVPTLKVYPEG

SEQ ID NO: 72398 - protein, 27 aa, Artificial Sequence
  Cyclic GFR-binding peptide
TRLSSLSILFFDSANNVVLKVYPDMVV

SEQ ID NO: 72399 - protein, 32 aa, Artificial Sequence; identical to SEQ ID NO: 24409
  Cyclic GFR-binding peptide
  MOD_RES (1), (1): Xaa is C or S

SEQ ID NO: 72400 - protein, 24 aa, Artificial Sequence
  Cyclic GFR-binding peptide
LSSLSILFFDAANNVVLKVYPDMV

SEQ ID NO: 72401 - protein, 41 aa, Artificial Sequence
  Cyclic GFR-binding peptide
  MOD_RES (6), (7), (39), (41): Xaa is C or S
KIPKAXXVPTELSSLSMLFFDENEKVVLKVYPDMVVEGXGX

SEQ ID NO: 72402 - protein, 35 aa, Artificial Sequence; identical to SEQ ID NO: 24412
  Cyclic GFR-binding peptide
  MOD_RES (1), (33), (35): Xaa is C or S

SEQ ID NO: 72403 - protein, 30 aa, Artificial Sequence
  Cyclic GFR-binding peptide
  MOD_RES (3), (4): Xaa is C or S
KPXXAPTKLSSLSVLFFDDSSNVILKVYPN

SEQ ID NO: 72404 - protein, 42 aa, Artificial Sequence; identical to SEQ ID NO: 24413
  Cyclic GFR-binding peptide
  MOD_RES (6), (7), (39), (41): Xaa is C or S

SEQ ID NO: 72405 - protein, 29 aa, Artificial Sequence
  Cyclic GFR-binding peptide
VPTKLSSLSVLFFDDMGVPTLKVYPEGMS

SEQ ID NO: 72406 - protein, 35 aa, Artificial Sequence; identical to SEQ ID NO: 24414
  Cyclic GFR-binding peptide
  MOD_RES (3), (4), (35): Xaa is C or S

SEQ ID NO: 72407 - protein, 25 aa, Artificial Sequence
  Cyclic GFR-binding peptide
LSSLSILFFDAANNVVLKVYPDMVV

SEQ ID NO: 72408 - protein, 40 aa, Artificial Sequence; identical to SEQ ID NO: 24415
  Cyclic GFR-binding peptide
  MOD_RES (5), (6), (38), (40): Xaa is C or S

SEQ ID NO: 72409 - protein, 29 aa, Artificial Sequence
  Cyclic GFR-binding peptide
PTKLSSLSVLFFDDSSNVILKVYPNMVVR

SEQ ID NO: 72410 - protein, 31 aa, Artificial Sequence
  Cyclic GFR-binding peptide
  MOD_RES (1), (2): Xaa is C or S
XXVPARLSSLSILFFDAANNVVLKVYPDMVV

SEQ ID NO: 72411 - protein, 34 aa, Artificial Sequence
  Cyclic GFR-binding peptide
  MOD_RES (4), (5): Xaa is C or S
PKPXXAPTQLSSLSVLFFDDSSNVILKVYPNMVV

SEQ ID NO: 72412 - protein, 34 aa, Artificial Sequence; identical to SEQ ID NO: 24418
  Cyclic GFR-binding peptide

SEQ ID NO: 72413 - protein, 33 aa, Artificial Sequence; identical to SEQ ID NO: 24417
  Cyclic GFR-binding peptide
  MOD_RES (1), (1): Xaa is C or S

SEQ ID NO: 72414 - protein, 30 aa, Artificial Sequence; identical to SEQ ID NO: 769
  Cyclic GFR-binding peptide

SEQ ID NO: 72415 - protein, 32 aa, Artificial Sequence
  Cyclic GFR-binding peptide
  MOD_RES (2), (3): Xaa is C or S
AXXVPTKLSSLSILFFDKGVVTYLKVYPGMAV

SEQ ID NO: 72416 - protein, 35 aa, Artificial Sequence
  Cyclic GFR-binding peptide
  MOD_RES (1), (33), (35): Xaa is C or S
XVPTELSSLSMLFFDENEKVVLKVYPDMVVEGXGX

SEQ ID NO: 72417 - protein, 37 aa, Artificial Sequence; identical to SEQ ID NO: 24421
  Cyclic GFR-binding peptide
  MOD_RES (4), (5), (37): Xaa is C or S

SEQ ID NO: 72418 - protein, 27 aa, Artificial Sequence
  Cyclic GFR-binding peptide
LSSLSVLFFDDMGVPTLKVYPEGMSVA

SEQ ID NO: 72419 - protein, 40 aa, Artificial Sequence; identical to SEQ ID NO: 24422
  Cyclic GFR-binding peptide
  MOD_RES (4), (4): Xaa is C or S

SEQ ID NO: 72420 - protein, 31 aa, Artificial Sequence
  Cyclic GFR-binding peptide
PTKLSSLSVLFFDDMGVPTLKVYPEGMSVAE

SEQ ID NO: 72421 - protein, 31 aa, Artificial Sequence; identical to SEQ ID NO: 24423
  Cyclic GFR-binding peptide
  MOD_RES (31), (31): Xaa is C or S

SEQ ID NO: 72422 - protein, 28 aa, Artificial Sequence
  Cyclic GFR-binding peptide
  MOD_RES (1), (1): Xaa is C or S
XVPQALSSLSILFFVGRKPKVLKVYPMI

SEQ ID NO: 72423 - protein, 30 aa, Artificial Sequence
  Cyclic GFR-binding peptide
  MOD_RES (29), (29): Xaa is C or S
KLSSLSVLFFDDSSNVILKVYPNMVVRSXG

SEQ ID NO: 72424 - protein, 32 aa, Artificial Sequence; identical to SEQ ID NO: 24427
  Cyclic GFR-binding peptide

SEQ ID NO: 72425 - protein, 41 aa, Artificial Sequence; identical to SEQ ID NO: 24431
  Cyclic GFR-binding peptide
  MOD_RES (6), (7), (39), (41): Xaa is C or S

SEQ ID NO: 72426 - protein, 29 aa, Artificial Sequence
  Cyclic GFR-binding peptide
  MOD_RES (2), (3): Xaa is C or S
PXXAPTKLSSLSVLFFDDSSNVILKVYPN

SEQ ID NO: 72427 - protein, 39 aa, Artificial Sequence; identical to SEQ ID NO: 24432
  Cyclic GFR-binding peptide
  MOD_RES (4), (5), (36), (38): Xaa is C or S

SEQ ID NO: 72428 - protein, 25 aa, Artificial Sequence
  Cyclic GFR-binding peptide
QALSSLSILFFVGRKPKVLKVYPMI

SEQ ID NO: 72429 - protein, 39 aa, Artificial Sequence; identical to SEQ ID NO: 24433
  Cyclic GFR-binding peptide
  MOD_RES (5), (6), (38): Xaa is C or S

SEQ ID NO: 72430 - protein, 29 aa, Artificial Sequence
  Cyclic GFR-binding peptide
  MOD_RES (3), (4): Xaa is C or S
KAXXVPTKLSSLSVLFFDDMGVPTLKVYP

SEQ ID NO: 72431 - protein, 34 aa, Artificial Sequence; identical to SEQ ID NO: 24439
  Cyclic GFR-binding peptide
  MOD_RES (3), (4): Xaa is C or S

SEQ ID NO: 72432 - protein, 26 aa, Artificial Sequence
  Cyclic GFR-binding peptide
  MOD_RES (26), (26): Xaa is C or S
SSLSILFFVGRTPKVLKVYPMVVKSX

SEQ ID NO: 72433 - protein, 35 aa, Artificial Sequence
  Cyclic GFR-binding peptide
  MOD_RES (5), (6): Xaa is C or S
VPKAXXAPTKLSSLSVLFFDSSNNVILKVYPNMVV

SEQ ID NO: 72434 - protein, 30 aa, Artificial Sequence
  Cyclic GFR-binding peptide
  MOD_RES (1), (1): Xaa is C or S
XVPTEESSLSMLFFRIKPHQGQHLKVYPFL

SEQ ID NO: 72435 - protein, 38 aa, Artificial Sequence
  Cyclic GFR-binding peptide
  MOD_RES (7), (7): Xaa is C or S
NDEGLEXVPTEESSLSMLFFRIKPHQGQHLKVYPFLQH

SEQ ID NO: 72436 - protein, 28 aa, Artificial Sequence
  Cyclic GFR-binding peptide
PTKLSSLSVLFFDDMGVPTLKVYPEGMS

SEQ ID NO: 72437 - protein, 41 aa, Artificial Sequence; identical to SEQ ID NO: 24440
  Cyclic GFR-binding peptide
  MOD_RES (5), (6), (38), (40): Xaa is C or S

SEQ ID NO: 72438 - protein, 27 aa, Artificial Sequence
  Cyclic GFR-binding peptide
  MOD_RES (1), (1): Xaa is C or S
XVSQDLSSLSILFFIGKTPKILKVYPM

SEQ ID NO: 72439 - protein, 35 aa, Artificial Sequence; identical to SEQ ID NO: 24442
  Cyclic GFR-binding peptide
  MOD_RES (2), (2): Xaa is C or S

SEQ ID NO: 72440 - protein, 25 aa, Artificial Sequence
  Cyclic GFR-binding peptide
RLSSLSILFFDSANNVVLKVYPDMV

SEQ ID NO: 72441 - protein, 24 aa, Artificial Sequence
  Cyclic GFR-binding peptide
KTSSLSMLFFDNGRVLLLKVYPMI

SEQ ID NO: 72442 - protein, 38 aa, Artificial Sequence; identical to SEQ ID NO: 24443
  Cyclic GFR-binding peptide
  MOD_RES (4), (5), (36), (38): Xaa is C or S

SEQ ID NO: 72443 - protein, 38 aa, Artificial Sequence; identical to SEQ ID NO: 24444
  Cyclic GFR-binding peptide
  MOD_RES (6), (7), (38): Xaa is C or S

SEQ ID NO: 72444 - protein, 31 aa, Artificial Sequence
  Cyclic GFR-binding peptide
  MOD_RES (2), (2): Xaa is C or S
EXVPTEESSLSMLFFRIKPHQGQHLKVYPFL

SEQ ID NO: 72445 - protein, 26 aa, Artificial Sequence
  Cyclic GFR-binding peptide
  MOD_RES (1), (1): Xaa is C or S
XVPTRLSSLSILFFDSANNVVLKVYP

SEQ ID NO: 72446 - protein, 36 aa, Artificial Sequence; identical to SEQ ID NO: 24448
  Cyclic GFR-binding peptide
  MOD_RES (1), (2), (33), (35): Xaa is C or S

SEQ ID NO: 72447 - protein, 39 aa, Artificial Sequence
  Cyclic GFR-binding peptide
  MOD_RES (5), (6), (38): Xaa is C or S
IPKAXXVPTELSSLSMLFFDENEKVVLKVYPDMVVEGXG

SEQ ID NO: 72448 - protein, 29 aa, Artificial Sequence
  Cyclic GFR-binding peptide
SSLSILFFIGKTPKILKVYPAAAAAAAAA

SEQ ID NO: 72449 - protein, 37 aa, Artificial Sequence; identical to SEQ ID NO: 24450
  Cyclic GFR-binding peptide
  MOD_RES (2), (3), (35), (37): Xaa is C or S

SEQ ID NO: 72450 - protein, 22 aa, Artificial Sequence
  Cyclic GFR-binding peptide
LSSLSVLFFDSSNNVILKVYPN

SEQ ID NO: 72451 - protein, 35 aa, Artificial Sequence
  Cyclic GFR-binding peptide
  MOD_RES (3), (3): Xaa is C or S
VKXQPSRVHHSSLSVLFFEYVRKKPKLLKVYPRLE

SEQ ID NO: 72452 - protein, 31 aa, Artificial Sequence; identical to SEQ ID NO: 24452
  Cyclic GFR-binding peptide
  MOD_RES (1), (1): Xaa is C or S

SEQ ID NO: 72453 - protein, 31 aa, Artificial Sequence
  Cyclic GFR-binding peptide
  MOD_RES (29), (31): Xaa is C or S
ELSSLSMLFFDEYDKVVLKVYPEMVVEGXGX

SEQ ID NO: 72454 - protein, 41 aa, Artificial Sequence; identical to SEQ ID NO: 24453
  Cyclic GFR-binding peptide
  MOD_RES (6), (7), (38), (40): Xaa is C or S

SEQ ID NO: 72455 - protein, 33 aa, Artificial Sequence
  Cyclic GFR-binding peptide
  MOD_RES (4), (5): Xaa is C or S
PPTXXVPTRLSSLSILFFDSANNVVLKVYPDMV

SEQ ID NO: 72456 - protein, 29 aa, Artificial Sequence
  Cyclic GFR-binding peptide
  MOD_RES (29), (29): Xaa is C or S
KLSSLSVLFFDDSSNVILKVYPNMVVRSX

SEQ ID NO: 72457 - protein, 28 aa, Artificial Sequence
  Cyclic GFR-binding peptide
  MOD_RES (1), (2): Xaa is C or S
XXVPTKLSSLSVLFFDDMGVPTLKVYPE

SEQ ID NO: 72458 - protein, 28 aa, Artificial Sequence
  Cyclic GFR-binding peptide
  MOD_RES (1), (1): Xaa is C or S
XAPTKLSSLSVLFFDDSSNVILKVYPNM

SEQ ID NO: 72459 - protein, 36 aa, Artificial Sequence; identical to SEQ ID NO: 24456
  Cyclic GFR-binding peptide
  MOD_RES (3), (4), (36): Xaa is C or S

SEQ ID NO: 72460 - protein, 36 aa, Artificial Sequence; identical to SEQ ID NO: 24457
  Cyclic GFR-binding peptide
  MOD_RES (5), (6): Xaa is C or S

SEQ ID NO: 72461 - protein, 35 aa, Artificial Sequence; identical to SEQ ID NO: 24458
  Cyclic GFR-binding peptide
  MOD_RES (1), (2), (35): Xaa is C or S

SEQ ID NO: 72462 - protein, 29 aa, Artificial Sequence
  Cyclic GFR-binding peptide
  MOD_RES (26), (28): Xaa is C or S
SSLSMLFFDNGRVLLLKVYPMIVEEXGXL

SEQ ID NO: 72463 - protein, 33 aa, Artificial Sequence
  Cyclic GFR-binding peptide
  MOD_RES (3), (3): Xaa is C or S
LEXVPTEESSLSMLFFRIKPHQGQHLKVYPFLQ

SEQ ID NO: 72464 - protein, 25 aa, Artificial Sequence
  Cyclic GFR-binding peptide
PTKLSSLSILFFDKGVVTYLKVYPG

SEQ ID NO: 72465 - protein, 28 aa, Artificial Sequence
  Cyclic GFR-binding peptide
  MOD_RES (1), (2): Xaa is C or S
XXAPTQLSSLSVLFFDDSSNVILKVYPN

SEQ ID NO: 72466 - protein, 40 aa, Artificial Sequence
  Cyclic GFR-binding peptide
  MOD_RES (5), (6), (38), (40): Xaa is C or S
IPKAXXVPTELSSLSMLFFDENEKVVLKVYPDMVVEGXGX

SEQ ID NO: 72467 - protein, 38 aa, Artificial Sequence; identical to SEQ ID NO: 24461
  Cyclic GFR-binding peptide
  MOD_RES (2), (3), (35), (37): Xaa is C or S

SEQ ID NO: 72468 - protein, 30 aa, Artificial Sequence
  Cyclic GFR-binding peptide
  MOD_RES (27), (29): Xaa is C or S
LSSLSILFFVGRKPKVLKVYPMIVRSXKXS

SEQ ID NO: 72469 - protein, 30 aa, Artificial Sequence
  Cyclic GFR-binding peptide
  MOD_RES (1), (1): Xaa is C or S
XVPQALSSLSILFFVGRKPKVLKVYPMIVR

SEQ ID NO: 72470 - protein, 27 aa, Artificial Sequence
  Cyclic GFR-binding peptide
  MOD_RES (27), (27): Xaa is C or S
SSLSVLFFDSSNNVILKVYPNMVVKAX

SEQ ID NO: 72471 - protein, 34 aa, Artificial Sequence
  Cyclic GFR-binding peptide
  MOD_RES (32), (34): Xaa is C or S
TEESSLSMLFFRIKPHQGQHLKVYPFLQHNKXEX

SEQ ID NO: 72472 - protein, 25 aa, Artificial Sequence
  Cyclic GFR-binding peptide
SSLSILFFVGRKPKVLKVYPMIVRS

SEQ ID NO: 72473 - protein, 43 aa, Artificial Sequence; identical to SEQ ID NO: 24464
  Cyclic GFR-binding peptide
  MOD_RES (5), (42): Xaa is C or S

SEQ ID NO: 72474 - protein, 34 aa, Artificial Sequence; identical to SEQ ID NO: 24465
  Cyclic GFR-binding peptide
  MOD_RES (1), (2), (34): Xaa is C or S

SEQ ID NO: 72475 - protein, 25 aa, Artificial Sequence
  Cyclic GFR-binding peptide
SSLSILFFDKGVVTYLKVYPGMAVS

SEQ ID NO: 72476 - protein, 30 aa, Artificial Sequence
  Cyclic GFR-binding peptide
  MOD_RES (2), (3): Xaa is C or S
AXXVPTELSSLSMLFFDENEKVVLKVYPDM

SEQ ID NO: 72477 - protein, 26 aa, Artificial Sequence
  Cyclic GFR-binding peptide
SSLSILFFDSANNVVLKVYPDMVVES

SEQ ID NO: 72478 - protein, 36 aa, Artificial Sequence; identical to SEQ ID NO: 24466
  Cyclic GFR-binding peptide
  MOD_RES (3), (4), (36): Xaa is C or S

SEQ ID NO: 72479 - protein, 21 aa, Artificial Sequence
  Cyclic GFR-binding peptide
LSSLSMLFFDEYDKVVLKVYP

SEQ ID NO: 72480 - protein, 38 aa, Artificial Sequence; identical to SEQ ID NO: 24468
  Cyclic GFR-binding peptide
  MOD_RES (3), (4), (36), (38): Xaa is C or S

SEQ ID NO: 72481 - protein, 33 aa, Artificial Sequence
  Cyclic GFR-binding peptide
  MOD_RES (4), (5): Xaa is C or S
PKPXXAPTQLSSLSVLFFDDSSNVILKVYPNMV

SEQ ID NO: 72482 - protein, 28 aa, Artificial Sequence
  Cyclic GFR-binding peptide
SQDLSSLSILFFIGKTPKILKVYPMIVK

SEQ ID NO: 72483 - protein, 35 aa, Artificial Sequence; identical to SEQ ID NO: 24473
  Cyclic GFR-binding peptide
  MOD_RES (1), (2), (33), (35): Xaa is C or S

SEQ ID NO: 72484 - protein, 39 aa, Artificial Sequence; identical to SEQ ID NO: 24474
  Cyclic GFR-binding peptide
  MOD_RES (37), (39): Xaa is C or S

SEQ ID NO: 72485 - protein, 37 aa, Artificial Sequence; identical to SEQ ID NO: 24476
  Cyclic GFR-binding peptide
  MOD_RES (3), (35), (37): Xaa is C or S

SEQ ID NO: 72486 - protein, 33 aa, Artificial Sequence
  Cyclic GFR-binding peptide
  MOD_RES (5), (6): Xaa is C or S
IPKAXXVPTELSSLSMLFFDENEKVVLKVYPDM

SEQ ID NO: 72487 - protein, 20 aa, Artificial Sequence
  Cyclic GFR-binding peptide
SSLSILFFVGRKPKVLKVYP

SEQ ID NO: 72488 - protein, 37 aa, Artificial Sequence; identical to SEQ ID NO: 24479
  Cyclic GFR-binding peptide
  MOD_RES (4), (36): Xaa is C or S

SEQ ID NO: 72489 - protein, 34 aa, Artificial Sequence
  Cyclic GFR-binding peptide
  MOD_RES (6), (7): Xaa is C or S
KASKAXXVPTKLSSLSILFFDKGVVTYLKVYPGM

SEQ ID NO: 72490 - protein, 28 aa, Artificial Sequence
  Cyclic GFR-binding peptide
  MOD_RES (2), (3): Xaa is C or S
PXXVSQDLSSLSILFFIGKTPKILKVYP

SEQ ID NO: 72491 - protein, 25 aa, Artificial Sequence
  Cyclic GFR-binding peptide
TQLSSLSVLFFDDSSNVILKVYPNM

SEQ ID NO: 72492 - protein, 28 aa, Artificial Sequence
  Cyclic GFR-binding peptide
  MOD_RES (1), (1): Xaa is C or S
XVPTKLSSLSVLFFDDMGVPTLKVYPEG

SEQ ID NO: 72493 - protein, 38 aa, Artificial Sequence; identical to SEQ ID NO: 24482
  Cyclic GFR-binding peptide
  MOD_RES (4), (5), (36), (38): Xaa is C or S

SEQ ID NO: 72494 - protein, 31 aa, Artificial Sequence
  Cyclic GFR-binding peptide
  MOD_RES (29), (31): Xaa is C or S
ELSSLSMLFFDENEKVVLKVYPDMVVEGXGX

SEQ ID NO: 72495 - protein, 26 aa, Artificial Sequence
  Cyclic GFR-binding peptide
SSLSILFFDAANNVVLKVYPDMVVEA

SEQ ID NO: 72496 - protein, 25 aa, Artificial Sequence
  Cyclic GFR-binding peptide
SSLSILFFVGRTPKVLKVYPMVVKS

SEQ ID NO: 72497 - protein, 28 aa, Artificial Sequence
  Cyclic GFR-binding peptide
SSLSVLFFEYVRKKPKLLKVYPRLEEHL

SEQ ID NO: 72498 - protein, 37 aa, Artificial Sequence; identical to SEQ ID NO: 24483
  Cyclic GFR-binding peptide
  MOD_RES (37), (37): Xaa is C or S

SEQ ID NO: 72499 - protein, 36 aa, Artificial Sequence
  Cyclic GFR-binding peptide
  MOD_RES (3), (4), (36): Xaa is C or S
KAXXVPTELSSLSMLFFDENEKVVLKVYPDMVVEGX

SEQ ID NO: 72500 - protein, 29 aa, Artificial Sequence
  Cyclic GFR-binding peptide
  MOD_RES (1), (1): Xaa is C or S
XAPTKLSSLSVLFFDSSNNVILKVYPNMV

SEQ ID NO: 72501 - protein, 32 aa, Artificial Sequence
  Cyclic GFR-binding peptide
  MOD_RES (29), (31): Xaa is C or S
ELSSLSMLFFDENEKVVLKVYPDMVVEGXGXR

SEQ ID NO: 72502 - protein, 35 aa, Artificial Sequence; identical to SEQ ID NO: 24485
  Cyclic GFR-binding peptide
  MOD_RES (1), (32), (34): Xaa is C or S

SEQ ID NO: 72503 - protein, 37 aa, Artificial Sequence
  Cyclic GFR-binding peptide
  MOD_RES (6), (7): Xaa is C or S
KVGKAXXVPTKLSSLSVLFFDDMGVPTLKVYPEGMSV

SEQ ID NO: 72504 - protein, 26 aa, Artificial Sequence
  Cyclic GFR-binding peptide
TELSSLSMLFFDENEKVVLKVYPDMV

SEQ ID NO: 72505 - protein, 28 aa, Artificial Sequence
  Cyclic GFR-binding peptide
TKLSSLSVLFFDSSNNVILKVYPNMVVK

SEQ ID NO: 72506 - protein, 32 aa, Artificial Sequence
  Cyclic GFR-binding peptide
  MOD_RES (5), (6): Xaa is C or S
SASPXXVSQDLSSLSILFFIGKTPKILKVYPM

SEQ ID NO: 72507 - protein, 24 aa, Artificial Sequence
  Cyclic GFR-binding peptide
TKLSSLSILFFDKGVVTYLKVYPG

SEQ ID NO: 72508 - protein, 33 aa, Artificial Sequence
  Cyclic GFR-binding peptide
  MOD_RES (5), (6): Xaa is C or S
SAGPXXTPTKMSSLSMLFFNDKQQIILKVYPGM

SEQ ID NO: 72509 - protein, 35 aa, Artificial Sequence
  Cyclic GFR-binding peptide
  MOD_RES (7), (7): Xaa is C or S
NDEGLEXVPTEESSLSMLFFRIKPHQGQHLKVYPF

SEQ ID NO: 72510 - protein, 29 aa, Artificial Sequence
  Cyclic GFR-binding peptide
VPQDLSSLSILFFVGRTPKVLKVYPMVVK

SEQ ID NO: 72511 - protein, 30 aa, Artificial Sequence
  Cyclic GFR-binding peptide
VPTELSSLSMLFFDENEKVVLKVYPDMVVE

SEQ ID NO: 72512 - protein, 29 aa, Artificial Sequence
  Cyclic GFR-binding peptide
SSLSMLFFNDKQQIILKVYPAAAAAAAAA

SEQ ID NO: 72513 - protein, 33 aa, Artificial Sequence; identical to SEQ ID NO: 24492
  Cyclic GFR-binding peptide
  MOD_RES (2), (3): Xaa is C or S

SEQ ID NO: 72514 - protein, 25 aa, Artificial Sequence
  Cyclic GFR-binding peptide
TKLSSLSVLFFDSSNNVILKVYPNM

SEQ ID NO: 72515 - protein, 34 aa, Artificial Sequence
  Cyclic GFR-binding peptide
  MOD_RES (6), (6): Xaa is C or S
DEGLEXVPTEESSLSMLFFRIKPHQGQHLKVYPF

SEQ ID NO: 72516 - protein, 28 aa, Artificial Sequence
  Cyclic GFR-binding peptide
PTKLSSLSILFFDKGVVTYLKVYPGMAV

SEQ ID NO: 72517 - protein, 33 aa, Artificial Sequence
  Cyclic GFR-binding peptide
  MOD_RES (3), (4): Xaa is C or S
KAXXVPTELSSLSMLFFDENEKVVLKVYPDMVV

SEQ ID NO: 72518 - protein, 36 aa, Artificial Sequence; identical to SEQ ID NO: 24495
  Cyclic GFR-binding peptide
  MOD_RES (34), (36): Xaa is C or S

SEQ ID NO: 72519 - protein, 38 aa, Artificial Sequence; identical to SEQ ID NO: 24497
  Cyclic GFR-binding peptide
  MOD_RES (4), (5), (37): Xaa is C or S

SEQ ID NO: 72520 - protein, 34 aa, Artificial Sequence; identical to SEQ ID NO: 24498
  Cyclic GFR-binding peptide
  MOD_RES (2), (3): Xaa is C or S

SEQ ID NO: 72521 - protein, 31 aa, Artificial Sequence
  Cyclic GFR-binding peptide
  MOD_RES (2), (3): Xaa is C or S
PXXTPTKMSSLSMLFFNDKQQIILKVYPGMV

SEQ ID NO: 72522 - protein, 26 aa, Artificial Sequence
  Cyclic GFR-binding peptide
LSSLSMLFFDEYDKVVLKVYPEMVVE

SEQ ID NO: 72523 - protein, 38 aa, Artificial Sequence; identical to SEQ ID NO: 24500
  Cyclic GFR-binding peptide
  MOD_RES (6), (7), (38): Xaa is C or S

SEQ ID NO: 72524 - protein, 30 aa, Artificial Sequence
  Cyclic GFR-binding peptide
  MOD_RES (2), (3): Xaa is C or S
SXXVPARLSSLSILFFDAANNVVLKVYPDM

SEQ ID NO: 72525 - protein, 34 aa, Artificial Sequence; identical to SEQ ID NO: 24501
  Cyclic GFR-binding peptide
  MOD_RES (32), (34): Xaa is C or S

SEQ ID NO: 72526 - protein, 26 aa, Artificial Sequence
  Cyclic GFR-binding peptide
MSSLSMLFFNDKQQIILKVYPGMVVD

SEQ ID NO: 72527 - protein, 30 aa, Artificial Sequence
  Cyclic GFR-binding peptide
VHHSSLSVLFFEYVRKKPKLLKVYPRLEEH

SEQ ID NO: 72528 - protein, 27 aa, Artificial Sequence
  Cyclic GFR-binding peptide
SQDLSSLSILFFIGKTPKILKVYPMIV

SEQ ID NO: 72529 - protein, 34 aa, Artificial Sequence
  Cyclic GFR-binding peptide
  MOD_RES (2), (2): Xaa is C or S
KXQPSRVHHSSLSVLFFEYVRKKPKLLKVYPRLE

SEQ ID NO: 72530 - protein, 41 aa, Artificial Sequence; identical to SEQ ID NO: 24505
  Cyclic GFR-binding peptide
  MOD_RES (5), (6), (38), (40): Xaa is C or S

SEQ ID NO: 72531 - protein, 32 aa, Artificial Sequence
  Cyclic GFR-binding peptide
  MOD_RES (5), (6): Xaa is C or S
APASXXVPARLSSLSILFFDAANNVVLKVYPD

SEQ ID NO: 72532 - protein, 33 aa, Artificial Sequence
  Cyclic GFR-binding peptide
  MOD_RES (5), (6): Xaa is C or S
VPSTXXAPVKTSSLSMLFFDNGRVLLLKVYPMI

SEQ ID NO: 72533 - protein, 23 aa, Artificial Sequence
  Cyclic GFR-binding peptide
TKLSSLSILFFDKGVVTYLKVYP

SEQ ID NO: 72534 - protein, 36 aa, Artificial Sequence; identical to SEQ ID NO: 24507
  Cyclic GFR-binding peptide
  MOD_RES (2), (3), (35): Xaa is C or S

SEQ ID NO: 72535 - protein, 36 aa, Artificial Sequence; identical to SEQ ID NO: 24508
  Cyclic GFR-binding peptide
  MOD_RES (1), (33), (35): Xaa is C or S

SEQ ID NO: 72536 - protein, 28 aa, Artificial Sequence
  Cyclic GFR-binding peptide
  MOD_RES (26), (28): Xaa is C or S
SSLSMLFFDNGRVLLLKVYPMIVEEXGX

SEQ ID NO: 72537 - protein, 37 aa, Artificial Sequence; identical to SEQ ID NO: 24509
  Cyclic GFR-binding peptide
  MOD_RES (4), (5), (37): Xaa is C or S

SEQ ID NO: 72538 - protein, 34 aa, Artificial Sequence; identical to SEQ ID NO: 24510
  Cyclic GFR-binding peptide
  MOD_RES (33), (33): Xaa is C or S

SEQ ID NO: 72539 - protein, 34 aa, Artificial Sequence
  Cyclic GFR-binding peptide
  MOD_RES (5), (6): Xaa is C or S
IPKAXXVPTELSSLSMLFFDEYDKVVLKVYPEMV

SEQ ID NO: 72540 - protein, 33 aa, Artificial Sequence; identical to SEQ ID NO: 24511
  Cyclic GFR-binding peptide
  MOD_RES (31), (33): Xaa is C or S

SEQ ID NO: 72541 - protein, 25 aa, Artificial Sequence
  Cyclic GFR-binding peptide
KLSSLSVLFFDDMGVPTLKVYPEGM

SEQ ID NO: 72542 - protein, 31 aa, Artificial Sequence
  Cyclic GFR-binding peptide
HHSSLSVLFFEYVRKKPKLLKVYPRLEEHLE

SEQ ID NO: 72543 - protein, 34 aa, Artificial Sequence
  Cyclic GFR-binding peptide
  MOD_RES (5), (6): Xaa is C or S
VPKPXXAPTQLSSLSVLFFDDSSNVILKVYPNMV

SEQ ID NO: 72544 - protein, 23 aa, Artificial Sequence
  Cyclic GFR-binding peptide
SSLSVLFFDDSSNVILKVYPNMV

SEQ ID NO: 72545 - protein, 32 aa, Artificial Sequence
  Cyclic GFR-binding peptide
  MOD_RES (5), (6): Xaa is C or S
VPKPXXAPTQLSSLSVLFFDDSSNVILKVYPN

SEQ ID NO: 72546 - protein, 25 aa, Artificial Sequence
  Cyclic GFR-binding peptide
LSSLSVLFFDDMGVPTLKVYPEGMS

SEQ ID NO: 72547 - protein, 25 aa, Artificial Sequence
  Cyclic GFR-binding peptide
PTKLSSLSVLFFDDMGVPTLKVYPE

SEQ ID NO: 72548 - protein, 22 aa, Artificial Sequence
  Cyclic GFR-binding peptide
ALSSLSILFFVGRKPKVLKVYP

SEQ ID NO: 72549 - protein, 34 aa, Artificial Sequence; identical to SEQ ID NO: 24515
  Cyclic GFR-binding peptide
  MOD_RES (3), (4): Xaa is C or S

SEQ ID NO: 72550 - protein, 38 aa, Artificial Sequence; identical to SEQ ID NO: 24516
  Cyclic GFR-binding peptide
  MOD_RES (36), (38): Xaa is C or S

SEQ ID NO: 72551 - protein, 30 aa, Artificial Sequence
  Cyclic GFR-binding peptide
  MOD_RES (3), (4): Xaa is C or S
KAXXVPTELSSLSMLFFDENEKVVLKVYPD

SEQ ID NO: 72552 - protein, 42 aa, Artificial Sequence; identical to SEQ ID NO: 24517
  Cyclic GFR-binding peptide
  MOD_RES (6), (40), (42): Xaa is C or S

SEQ ID NO: 72553 - protein, 34 aa, Artificial Sequence
  Cyclic GFR-binding peptide
  MOD_RES (5), (6): Xaa is C or S
SASPXXVSQDLSSLSILFFIGKTPKILKVYPMIV

SEQ ID NO: 72554 - protein, 27 aa, Artificial Sequence
  Cyclic GFR-binding peptide
PTKMSSLSMLFFNDKQQIILKVYPGMV

SEQ ID NO: 72555 - protein, 26 aa, Artificial Sequence
  Cyclic GFR-binding peptide
HHSSLSVLFFEYVRKKPKLLKVYPRL

SEQ ID NO: 72556 - protein, 33 aa, Artificial Sequence; identical to SEQ ID NO: 24518
  Cyclic GFR-binding peptide
  MOD_RES (1), (2), (33): Xaa is C or S

SEQ ID NO: 72557 - protein, 36 aa, Artificial Sequence; identical to SEQ ID NO: 24519
  Cyclic GFR-binding peptide
  MOD_RES (36), (36): Xaa is C or S

SEQ ID NO: 72558 - protein, 38 aa, Artificial Sequence; identical to SEQ ID NO: 24520
  Cyclic GFR-binding peptide
  MOD_RES (4), (5), (37): Xaa is C or S

SEQ ID NO: 72559 - protein, 33 aa, Artificial Sequence
  Cyclic GFR-binding peptide
  MOD_RES (6), (7): Xaa is C or S
TVPKPXXAPTQLSSLSVLFFDDSSNVILKVYPN

SEQ ID NO: 72560 - protein, 38 aa, Artificial Sequence; identical to SEQ ID NO: 24521
  Cyclic GFR-binding peptide
  MOD_RES (2), (3), (36), (38): Xaa is C or S

SEQ ID NO: 72561 - protein, 30 aa, Artificial Sequence
  Cyclic GFR-binding peptide
  MOD_RES (4), (5): Xaa is C or S
PASXXVPARLSSLSILFFDAANNVVLKVYP

SEQ ID NO: 72562 - protein, 36 aa, Artificial Sequence; identical to SEQ ID NO: 24524
  Cyclic GFR-binding peptide
  MOD_RES (5), (6): Xaa is C or S

SEQ ID NO: 72563 - protein, 25 aa, Artificial Sequence
  Cyclic GFR-binding peptide
VPTRLSSLSILFFDSANNVVLKVYP

SEQ ID NO: 72564 - protein, 36 aa, Artificial Sequence
  Cyclic GFR-binding peptide
  MOD_RES (7), (7): Xaa is C or S
HVTKPTXAPTKLSSLSVLFFDDSSNVILKVYPNMVV

SEQ ID NO: 72565 - protein, 33 aa, Artificial Sequence
  Cyclic GFR-binding peptide
  MOD_RES (3), (4): Xaa is C or S
KAXXAPTKLSSLSVLFFDSSNNVILKVYPNMVV

SEQ ID NO: 72566 - protein, 36 aa, Artificial Sequence; identical to SEQ ID NO: 24530
  Cyclic GFR-binding peptide
  MOD_RES (5), (6): Xaa is C or S

SEQ ID NO: 72567 - protein, 27 aa, Artificial Sequence
  Cyclic GFR-binding peptide
PVKTSSLSMLFFDNGRVLLLKVYPMIV

SEQ ID NO: 72568 - protein, 25 aa, Artificial Sequence
  Cyclic GFR-binding peptide
SSLSMLFFDEYDKVVLKVYPEMVVE

SEQ ID NO: 72569 - protein, 33 aa, Artificial Sequence; identical to SEQ ID NO: 24527
  Cyclic GFR-binding peptide
  MOD_RES (1), (33): Xaa is C or S

SEQ ID NO: 72570 - protein, 33 aa, Artificial Sequence; identical to SEQ ID NO: 24528
  Cyclic GFR-binding peptide
  MOD_RES (1), (33): Xaa is C or S

SEQ ID NO: 72571 - protein, 34 aa, Artificial Sequence; identical to SEQ ID NO: 24529
  Cyclic GFR-binding peptide
  MOD_RES (3), (4): Xaa is C or S

SEQ ID NO: 72572 - protein, 32 aa, Artificial Sequence
  Cyclic GFR-binding peptide
  MOD_RES (3), (4): Xaa is C or S
STXXAPVKTSSLSMLFFDNGRVLLLKVYPMIV

SEQ ID NO: 72573 - protein, 28 aa, Artificial Sequence
  Cyclic GFR-binding peptide
  MOD_RES (28), (28): Xaa is C or S
ALSSLSILFFVGRKPKVLKVYPMIVRSX

SEQ ID NO: 72574 - protein, 33 aa, Artificial Sequence
  Cyclic GFR-binding peptide
  MOD_RES (5), (5): Xaa is C or S
TKPTXAPTKLSSLSVLFFDDSSNVILKVYPNMV

SEQ ID NO: 72575 - protein, 37 aa, Artificial Sequence; identical to SEQ ID NO: 24531
  Cyclic GFR-binding peptide
  MOD_RES (6), (7): Xaa is C or S

SEQ ID NO: 72576 - protein, 35 aa, Artificial Sequence; identical to SEQ ID NO: 24533
  Cyclic GFR-binding peptide
  MOD_RES (2), (3), (35): Xaa is C or S

SEQ ID NO: 72577 - protein, 29 aa, Artificial Sequence
  Cyclic GFR-binding peptide
VPQALSSLSILFFVGRKPKVLKVYPMIVR

SEQ ID NO: 72578 - protein, 28 aa, Artificial Sequence
  Cyclic GFR-binding peptide
  MOD_RES (1), (1): Xaa is C or S
XAPTQLSSLSVLFFDDSSNVILKVYPNM

SEQ ID NO: 72579 - protein, 32 aa, Artificial Sequence
  Cyclic GFR-binding peptide
  MOD_RES (3), (4): Xaa is C or S
GPXXTPTKMSSLSMLFFNDKQQIILKVYPGMV

SEQ ID NO: 72580 - protein, 30 aa, Artificial Sequence
  Cyclic GFR-binding peptide
  MOD_RES (28), (30): Xaa is C or S
LSSLSMLFFDENEKVVLKVYPDMVVEGXGX

SEQ ID NO: 72581 - protein, 30 aa, Artificial Sequence
  Cyclic GFR-binding peptide
  MOD_RES (27), (29): Xaa is C or S
SSLSILFFDAANNVVLKVYPDMVVEAXGXR

SEQ ID NO: 72582 - protein, 32 aa, Artificial Sequence
  Cyclic GFR-binding peptide
  MOD_RES (31), (31): Xaa is C or S
PTKLSSLSILFFDKGVVTYLKVYPGMAVSEXG

SEQ ID NO: 72583 - protein, 22 aa, Artificial Sequence
  Cyclic GFR-binding peptide
LSSLSILFFIGKTPKILKVYPM

SEQ ID NO: 72584 - protein, 27 aa, Artificial Sequence
  Cyclic GFR-binding peptide
  MOD_RES (1), (1): Xaa is C or S
XVPQDLSSLSILFFVGRTPKVLKVYPM

SEQ ID NO: 72585 - protein, 23 aa, Artificial Sequence
  Cyclic GFR-binding peptide
QALSSLSILFFVGRKPKVLKVYP

SEQ ID NO: 72586 - protein, 32 aa, Artificial Sequence; identical to SEQ ID NO: 24535
  Cyclic GFR-binding peptide
  MOD_RES (1), (1): Xaa is C or S

SEQ ID NO: 72587 - protein, 31 aa, Artificial Sequence
  Cyclic GFR-binding peptide
  MOD_RES (1), (2): Xaa is C or S
XXVPTELSSLSMLFFDEYDKVVLKVYPEMVV

SEQ ID NO: 72588 - protein, 31 aa, Artificial Sequence; identical to SEQ ID NO: 24538
  Cyclic GFR-binding peptide
  MOD_RES (1), (1): Xaa is C or S

SEQ ID NO: 72589 - protein, 28 aa, Artificial Sequence
  Cyclic GFR-binding peptide
PTEESSLSMLFFRIKPHQGQHLKVYPFL

SEQ ID NO: 72590 - protein, 29 aa, Artificial Sequence
  Cyclic GFR-binding peptide
KLSSLSVLFFDDMGVPTLKVYPEGMSVAE

SEQ ID NO: 72591 - protein, 27 aa, Artificial Sequence
  Cyclic GFR-binding peptide
TEESSLSMLFFRIKPHQGQHLKVYPFL

SEQ ID NO: 72592 - protein, 28 aa, Artificial Sequence
  Cyclic GFR-binding peptide
TELSSLSMLFFDENEKVVLKVYPDMVVE

SEQ ID NO: 72593 - protein, 38 aa, Artificial Sequence; identical to SEQ ID NO: 24541
  Cyclic GFR-binding peptide
  MOD_RES (2), (3), (35), (37): Xaa is C or S

SEQ ID NO: 72594 - protein, 30 aa, Artificial Sequence
  Cyclic GFR-binding peptide
  MOD_RES (28), (30): Xaa is C or S
LSSLSVLFFDSSNNVILKVYPNMVVKAXGX

SEQ ID NO: 72595 - protein, 31 aa, Artificial Sequence
  Cyclic GFR-binding peptide
  MOD_RES (4), (5): Xaa is C or S
PPTXXVPTRLSSLSILFFDSANNVVLKVYPD

SEQ ID NO: 72596 - protein, 42 aa, Artificial Sequence; identical to SEQ ID NO: 24542
  Cyclic GFR-binding peptide
  MOD_RES (5), (39), (41): Xaa is C or S

SEQ ID NO: 72597 - protein, 37 aa, Artificial Sequence; identical to SEQ ID NO: 24544
  Cyclic GFR-binding peptide
  MOD_RES (3), (37): Xaa is C or S

SEQ ID NO: 72598 - protein, 29 aa, Artificial Sequence
  Cyclic GFR-binding peptide
  MOD_RES (27), (29): Xaa is C or S
SSLSILFFDSANNVVLKVYPDMVVESXGX

SEQ ID NO: 72599 - protein, 31 aa, Artificial Sequence; identical to SEQ ID NO: 24547
  Cyclic GFR-binding peptide

SEQ ID NO: 72600 - protein, 33 aa, Artificial Sequence
  Cyclic GFR-binding peptide
  MOD_RES (3), (3): Xaa is C or S
VKXQPSRVHHSSLSVLFFEYVRKKPKLLKVYPR

SEQ ID NO: 72601 - protein, 30 aa, Artificial Sequence; identical to SEQ ID NO: 24549
  Cyclic GFR-binding peptide

SEQ ID NO: 72602 - protein, 20 aa, Artificial Sequence
  Cyclic GFR-binding peptide
SSLSMLFFNDKQQIILKVYP

SEQ ID NO: 72603 - protein, 32 aa, Artificial Sequence; identical to SEQ ID NO: 24551
  Cyclic GFR-binding peptide
  MOD_RES (1), (32): Xaa is C or S

SEQ ID NO: 72604 - protein, 37 aa, Artificial Sequence
  Cyclic GFR-binding peptide
  MOD_RES (5), (6): Xaa is C or S
VGKAXXVPTKLSSLSVLFFDDMGVPTLKVYPEGMSVA

SEQ ID NO: 72605 - protein, 25 aa, Artificial Sequence
  Cyclic GFR-binding peptide
ALSSLSILFFVGRKPKVLKVYPMIV

SEQ ID NO: 72606 - protein, 31 aa, Artificial Sequence
  Cyclic GFR-binding peptide
  MOD_RES (4), (5): Xaa is C or S
PKPXXAPTKLSSLSVLFFDDSSNVILKVYPN

SEQ ID NO: 72607 - protein, 40 aa, Artificial Sequence; identical to SEQ ID NO: 24554
  Cyclic GFR-binding peptide
  MOD_RES (5), (6), (38), (40): Xaa is C or S

SEQ ID NO: 72608 - protein, 25 aa, Artificial Sequence
  Cyclic GFR-binding peptide
PTKLSSLSVLFFDDSSNVILKVYPN

SEQ ID NO: 72609 - protein, 36 aa, Artificial Sequence; identical to SEQ ID NO: 24556
  Cyclic GFR-binding peptide
  MOD_RES (1), (2), (34), (36): Xaa is C or S

SEQ ID NO: 72610 - protein, 40 aa, Artificial Sequence; identical to SEQ ID NO: 24557
  Cyclic GFR-binding peptide
  MOD_RES (5), (6), (38), (40): Xaa is C or S

SEQ ID NO: 72611 - protein, 38 aa, Artificial Sequence; identical to SEQ ID NO: 24558
  Cyclic GFR-binding peptide
  MOD_RES (5), (5): Xaa is C or S

SEQ ID NO: 72612 - protein, 33 aa, Artificial Sequence; identical to SEQ ID NO: 24559
  Cyclic GFR-binding peptide
  MOD_RES (1), (2): Xaa is C or S

SEQ ID NO: 72613 - protein, 28 aa, Artificial Sequence
  Cyclic GFR-binding peptide
APTQLSSLSVLFFDDSSNVILKVYPNMV

SEQ ID NO: 72614 - protein, 29 aa, Artificial Sequence
  Cyclic GFR-binding peptide
PTELSSLSMLFFDENEKVVLKVYPDMVVE

SEQ ID NO: 72615 - protein, 27 aa, Artificial Sequence
  Cyclic GFR-binding peptide
PTKLSSLSVLFFDSSNNVILKVYPNMV

SEQ ID NO: 72616 - protein, 32 aa, Artificial Sequence
  Cyclic GFR-binding peptide
  MOD_RES (32), (32): Xaa is C or S
PTKLSSLSVLFFDDMGVPTLKVYPEGMSVAEX

SEQ ID NO: 72617 - protein, 32 aa, Artificial Sequence
  Cyclic GFR-binding peptide
  MOD_RES (6), (7): Xaa is C or S
KVGKAXXVPTKLSSLSVLFFDDMGVPTLKVYP

SEQ ID NO: 72618 - protein, 32 aa, Artificial Sequence
  Cyclic GFR-binding peptide
  MOD_RES (29), (31): Xaa is C or S
QDLSSLSILFFIGKTPKILKVYPMIVKSXKXS

SEQ ID NO: 72619 - protein, 31 aa, Artificial Sequence
  Cyclic GFR-binding peptide
  MOD_RES (1), (2): Xaa is C or S
XXTPTKMSSLSMLFFNDKQQIILKVYPGMVV

SEQ ID NO: 72620 - protein, 28 aa, Artificial Sequence
  Cyclic GFR-binding peptide
  MOD_RES (2), (3): Xaa is C or S
AXXVPTELSSLSMLFFDENEKVVLKVYP

SEQ ID NO: 72621 - protein, 39 aa, Artificial Sequence; identical to SEQ ID NO: 24562
  Cyclic GFR-binding peptide
  MOD_RES (5), (6), (38): Xaa is C or S

SEQ ID NO: 72622 - protein, 34 aa, Artificial Sequence
  Cyclic GFR-binding peptide
  MOD_RES (31), (33): Xaa is C or S
PTKLSSLSVLFFDSSNNVILKVYPNMVVKAXGXH

SEQ ID NO: 72623 - protein, 32 aa, Artificial Sequence
  Cyclic GFR-binding peptide
  MOD_RES (31), (31): Xaa is C or S
HSSLSVLFFEYVRKKPKLLKVYPRLEEHLEXA

SEQ ID NO: 72624 - protein, 35 aa, Artificial Sequence; identical to SEQ ID NO: 24570
  Cyclic GFR-binding peptide
  MOD_RES (4), (5): Xaa is C or S

SEQ ID NO: 72625 - protein, 29 aa, Artificial Sequence
  Cyclic GFR-binding peptide
  MOD_RES (3), (4): Xaa is C or S
KAXXAPTKLSSLSVLFFDSSNNVILKVYP

SEQ ID NO: 72626 - protein, 25 aa, Artificial Sequence
  Cyclic GFR-binding peptide
LSSLSILFFVGRTPKVLKVYPMVVK

SEQ ID NO: 72627 - protein, 29 aa, Artificial Sequence
  Cyclic GFR-binding peptide
VHHSSLSVLFFEYVRKKPKLLKVYPRLEE

SEQ ID NO: 72628 - protein, 27 aa, Artificial Sequence
  Cyclic GFR-binding peptide
KMSSLSMLFFNDKQQIILKVYPGMVVD

SEQ ID NO: 72629 - protein, 32 aa, Artificial Sequence
  Cyclic GFR-binding peptide
  MOD_RES (30), (32): Xaa is C or S
ESSLSMLFFRIKPHQGQHLKVYPFLQHNKXEX

SEQ ID NO: 72630 - protein, 35 aa, Artificial Sequence; identical to SEQ ID NO: 24573
  Cyclic GFR-binding peptide
  MOD_RES (2), (3), (34): Xaa is C or S

SEQ ID NO: 72631 - protein, 20 aa, Artificial Sequence
  Cyclic GFR-binding peptide
SSLSVLFFDSSNNVILKVYP

SEQ ID NO: 72632 - protein, 31 aa, Artificial Sequence
  Cyclic GFR-binding peptide
  MOD_RES (5), (6): Xaa is C or S
VPKPXXAPTQLSSLSVLFFDDSSNVILKVYP

SEQ ID NO: 72633 - protein, 38 aa, Artificial Sequence; identical to SEQ ID NO: 24574
  Cyclic GFR-binding peptide
  MOD_RES (4), (5), (37): Xaa is C or S

SEQ ID NO: 72634 - protein, 41 aa, Artificial Sequence; identical to SEQ ID NO: 24576
  Cyclic GFR-binding peptide
  MOD_RES (6), (40): Xaa is C or S

SEQ ID NO: 72635 - protein, 31 aa, Artificial Sequence
  Cyclic GFR-binding peptide
  MOD_RES (3), (4): Xaa is C or S
PTXXVPTRLSSLSILFFDSANNVVLKVYPDM

SEQ ID NO: 72636 - protein, 36 aa, Artificial Sequence
  Cyclic GFR-binding peptide
  MOD_RES (5), (6): Xaa is C or S
VGKAXXVPTKLSSLSVLFFDDMGVPTLKVYPEGMSV

SEQ ID NO: 72637 - protein, 37 aa, Artificial Sequence; identical to SEQ ID NO: 24578
  Cyclic GFR-binding peptide
  MOD_RES (3), (4), (36): Xaa is C or S

SEQ ID NO: 72638 - protein, 27 aa, Artificial Sequence
  Cyclic GFR-binding peptide
VKTSSLSMLFFDNGRVLLLKVYPMIVE

SEQ ID NO: 72639 - protein, 25 aa, Artificial Sequence
  Cyclic GFR-binding peptide
TKLSSLSVLFFDDSSNVILKVYPNM

SEQ ID NO: 72640 - protein, 39 aa, Artificial Sequence; identical to SEQ ID NO: 24579
  Cyclic GFR-binding peptide
  MOD_RES (5), (6), (37), (39): Xaa is C or S

SEQ ID NO: 72641 - protein, 31 aa, Artificial Sequence
  Cyclic GFR-binding peptide
VPTELSSLSMLFFDENEKVVLKVYPDMVVEG

SEQ ID NO: 72642 - protein, 36 aa, Artificial Sequence; identical to SEQ ID NO: 24580
  Cyclic GFR-binding peptide
  MOD_RES (4), (5), (36): Xaa is C or S

SEQ ID NO: 72643 - protein, 33 aa, Artificial Sequence
  Cyclic GFR-binding peptide
  MOD_RES (6), (7): Xaa is C or S
ASASPXXVSQDLSSLSILFFIGKTPKILKVYPM

SEQ ID NO: 72644 - protein, 36 aa, Artificial Sequence; identical to SEQ ID NO: 24583
  Cyclic GFR-binding peptide
  MOD_RES (3), (4), (35): Xaa is C or S

SEQ ID NO: 72645 - protein, 39 aa, Artificial Sequence; identical to SEQ ID NO: 24584
  Cyclic GFR-binding peptide
  MOD_RES (2), (3), (36), (38): Xaa is C or S

SEQ ID NO: 72646 - protein, 32 aa, Artificial Sequence
  Cyclic GFR-binding peptide
  MOD_RES (2), (2): Xaa is C or S
EXVPTEESSLSMLFFRIKPHQGQHLKVYPFLQ

SEQ ID NO: 72647 - protein, 35 aa, Artificial Sequence; identical to SEQ ID NO: 24585
  Cyclic GFR-binding peptide
  MOD_RES (4), (5): Xaa is C or S

SEQ ID NO: 72648 - protein, 32 aa, Artificial Sequence
  Cyclic GFR-binding peptide
  MOD_RES (2), (3): Xaa is C or S
TXXAPVKTSSLSMLFFDNGRVLLLKVYPMIVE

SEQ ID NO: 72649 - protein, 38 aa, Artificial Sequence; identical to SEQ ID NO: 24586
  Cyclic GFR-binding peptide
  MOD_RES (5), (6), (37): Xaa is C or S

SEQ ID NO: 72650 - protein, 34 aa, Artificial Sequence; identical to SEQ ID NO: 24587
  Cyclic GFR-binding peptide
  MOD_RES (3), (4): Xaa is C or S

SEQ ID NO: 72651 - protein, 29 aa, Artificial Sequence
  Cyclic GFR-binding peptide
  MOD_RES (27), (29): Xaa is C or S
LSSLSILFFIGKTPKILKVYPMIVKSXKX

SEQ ID NO: 72652 - protein, 26 aa, Artificial Sequence
  Cyclic GFR-binding peptide
  MOD_RES (1), (1): Xaa is C or S
XVPTELSSLSMLFFDEYDKVVLKVYP

SEQ ID NO: 72653 - protein, 36 aa, Artificial Sequence; identical to SEQ ID NO: 24588
  Cyclic GFR-binding peptide
  MOD_RES (1), (2), (35): Xaa is C or S

SEQ ID NO: 72654 - protein, 29 aa, Artificial Sequence
  Cyclic GFR-binding peptide
  MOD_RES (26), (28): Xaa is C or S
SSLSILFFVGRTPKVLKVYPMVVKSXKXS

SEQ ID NO: 72655 - protein, 36 aa, Artificial Sequence; identical to SEQ ID NO: 24589
  Cyclic GFR-binding peptide
  MOD_RES (4), (5), (36): Xaa is C or S

SEQ ID NO: 72656 - protein, 35 aa, Artificial Sequence; identical to SEQ ID NO: 24593
  Cyclic GFR-binding peptide
  MOD_RES (1), (34): Xaa is C or S

SEQ ID NO: 72657 - protein, 38 aa, Artificial Sequence; identical to SEQ ID NO: 24594
  Cyclic GFR-binding peptide
  MOD_RES (2), (3), (35), (37): Xaa is C or S

SEQ ID NO: 72658 - protein, 30 aa, Artificial Sequence
  Cyclic GFR-binding peptide
  MOD_RES (2), (3): Xaa is C or S
AXXVPTKLSSLSVLFFDDMGVPTLKVYPEG

SEQ ID NO: 72659 - protein, 33 aa, Artificial Sequence; identical to SEQ ID NO: 24596
  Cyclic GFR-binding peptide

SEQ ID NO: 72660 - protein, 41 aa, Artificial Sequence; identical to SEQ ID NO: 24597
  Cyclic GFR-binding peptide
  MOD_RES (7), (41): Xaa is C or S

SEQ ID NO: 72661 - protein, 31 aa, Artificial Sequence
  Cyclic GFR-binding peptide
  MOD_RES (3), (4): Xaa is C or S
SPXXVSQDLSSLSILFFIGKTPKILKVYPMI

SEQ ID NO: 72662 - protein, 41 aa, Artificial Sequence
  Cyclic GFR-binding peptide
  MOD_RES (5), (6), (38), (40): Xaa is C or S
IPKAXXVPTELSSLSMLFFDENEKVVLKVYPDMVVEGXGXR

SEQ ID NO: 72663 - protein, 31 aa, Artificial Sequence
  Cyclic GFR-binding peptide
  MOD_RES (3), (4): Xaa is C or S
KAXXVPTKLSSLSILFFDKGVVTYLKVYPGM

SEQ ID NO: 72664 - protein, 37 aa, Artificial Sequence
  Cyclic GFR-binding peptide
  MOD_RES (4), (5), (37): Xaa is C or S
PKAXXVPTELSSLSMLFFDENEKVVLKVYPDMVVEGX

SEQ ID NO: 72665 - protein, 26 aa, Artificial Sequence
  Cyclic GFR-binding peptide
VPTKLSSLSILFFDKGVVTYLKVYPG

SEQ ID NO: 72666 - protein, 39 aa, Artificial Sequence; identical to SEQ ID NO: 24599
  Cyclic GFR-binding peptide
  MOD_RES (6), (7), (38): Xaa is C or S

SEQ ID NO: 72667 - protein, 24 aa, Artificial Sequence
  Cyclic GFR-binding peptide
SSLSMLFFDENEKVVLKVYPDMVV

SEQ ID NO: 72668 - protein, 22 aa, Artificial Sequence
  Cyclic GFR-binding peptide
SSLSVLFFDDMGVPTLKVYPEG

SEQ ID NO: 72669 - protein, 36 aa, Artificial Sequence; identical to SEQ ID NO: 24601
  Cyclic GFR-binding peptide
  MOD_RES (4), (5): Xaa is C or S

SEQ ID NO: 72670 - protein, 37 aa, Artificial Sequence; identical to SEQ ID NO: 24602
  Cyclic GFR-binding peptide
  MOD_RES (6), (7): Xaa is C or S

SEQ ID NO: 72671 - protein, 30 aa, Artificial Sequence
  Cyclic GFR-binding peptide
PTKLSSLSVLFFDSSNNVILKVYPNMVVKA

SEQ ID NO: 72672 - protein, 23 aa, Artificial Sequence
  Cyclic GFR-binding peptide
ARLSSLSILFFDAANNVVLKVYP

SEQ ID NO: 72673 - protein, 26 aa, Artificial Sequence
  Cyclic GFR-binding peptide
VPTRLSSLSILFFDSANNVVLKVYPD

SEQ ID NO: 72674 - protein, 30 aa, Artificial Sequence; identical to SEQ ID NO: 24603
  Cyclic GFR-binding peptide

SEQ ID NO: 72675 - protein, 25 aa, Artificial Sequence
  Cyclic GFR-binding peptide
VSQDLSSLSILFFIGKTPKILKVYP

SEQ ID NO: 72676 - protein, 32 aa, Artificial Sequence; identical to SEQ ID NO: 24604
  Cyclic GFR-binding peptide
  MOD_RES (1), (2): Xaa is C or S

SEQ ID NO: 72677 - protein, 36 aa, Artificial Sequence; identical to SEQ ID NO: 24605
  Cyclic GFR-binding peptide
  MOD_RES (6), (6): Xaa is C or S

SEQ ID NO: 72678 - protein, 33 aa, Artificial Sequence; identical to SEQ ID NO: 24606
  Cyclic GFR-binding peptide
  MOD_RES (32), (32): Xaa is C or S

SEQ ID NO: 72679 - protein, 39 aa, Artificial Sequence; identical to SEQ ID NO: 24610
  Cyclic GFR-binding peptide
  MOD_RES (6), (7), (39): Xaa is C or S

SEQ ID NO: 72680 - protein, 35 aa, Artificial Sequence; identical to SEQ ID NO: 24612
  Cyclic GFR-binding peptide
  MOD_RES (2), (3), (35): Xaa is C or S

SEQ ID NO: 72681 - protein, 37 aa, Artificial Sequence
  Cyclic GFR-binding peptide
  MOD_RES (4), (4): Xaa is C or S
SVKXQPSRVHHSSLSVLFFEYVRKKPKLLKVYPRLEE

SEQ ID NO: 72682 - protein, 32 aa, Artificial Sequence
  Cyclic GFR-binding peptide
  MOD_RES (30), (32): Xaa is C or S
SQDLSSLSILFFIGKTPKILKVYPMIVKSXKX

SEQ ID NO: 72683 - protein, 38 aa, Artificial Sequence; identical to SEQ ID NO: 24611
  Cyclic GFR-binding peptide
  MOD_RES (4), (5), (37): Xaa is C or S

SEQ ID NO: 72684 - protein, 30 aa, Artificial Sequence
  Cyclic GFR-binding peptide
  MOD_RES (4), (5): Xaa is C or S
AGPXXTPTKMSSLSMLFFNDKQQIILKVYP

SEQ ID NO: 72685 - protein, 22 aa, Artificial Sequence
  Cyclic GFR-binding peptide
KMSSLSMLFFNDKQQIILKVYP

SEQ ID NO: 72686 - protein, 38 aa, Artificial Sequence; identical to SEQ ID NO: 24614
  Cyclic GFR-binding peptide
  MOD_RES (6), (7): Xaa is C or S

SEQ ID NO: 72687 - protein, 24 aa, Artificial Sequence
  Cyclic GFR-binding peptide
PTELSSLSMLFFDENEKVVLKVYP

SEQ ID NO: 72688 - protein, 33 aa, Artificial Sequence
  Cyclic GFR-binding peptide
  MOD_RES (31), (33): Xaa is C or S
PTKLSSLSILFFDKGVVTYLKVYPGMAVSEXGX

SEQ ID NO: 72689 - protein, 32 aa, Artificial Sequence; identical to SEQ ID NO: 24615
  Cyclic GFR-binding peptide
  MOD_RES (1), (1): Xaa is C or S

SEQ ID NO: 72690 - protein, 37 aa, Artificial Sequence; identical to SEQ ID NO: 24616
  Cyclic GFR-binding peptide
  MOD_RES (2), (3), (34), (36): Xaa is C or S

SEQ ID NO: 72691 - protein, 43 aa, Artificial Sequence; identical to SEQ ID NO: 24617
  Cyclic GFR-binding peptide
  MOD_RES (3), (40), (42): Xaa is C or S

SEQ ID NO: 72692 - protein, 32 aa, Artificial Sequence
  Cyclic GFR-binding peptide
  MOD_RES (3), (3): Xaa is C or S
PTXAPTKLSSLSVLFFDDSSNVILKVYPNMVV

SEQ ID NO: 72693 - protein, 29 aa, Artificial Sequence
  Cyclic GFR-binding peptide
SSLSVLFFDDSSNVILKVYPAAAAAAAAA

SEQ ID NO: 72694 - protein, 35 aa, Artificial Sequence
  Cyclic GFR-binding peptide
  MOD_RES (6), (7): Xaa is C or S
AVPKAXXAPTKLSSLSVLFFDSSNNVILKVYPNMV

SEQ ID NO: 72695 - protein, 28 aa, Artificial Sequence
  Cyclic GFR-binding peptide
  MOD_RES (28), (28): Xaa is C or S
LSSLSVLFFDSSNNVILKVYPNMVVKAX

SEQ ID NO: 72696 - protein, 30 aa, Artificial Sequence
  Cyclic GFR-binding peptide
  MOD_RES (1), (2): Xaa is C or S
XXVSQDLSSLSILFFIGKTPKILKVYPMIV

SEQ ID NO: 72697 - protein, 31 aa, Artificial Sequence
  Cyclic GFR-binding peptide
  MOD_RES (5), (6): Xaa is C or S
IPKAXXVPTELSSLSMLFFDEYDKVVLKVYP

SEQ ID NO: 72698 - protein, 39 aa, Artificial Sequence
  Cyclic GFR-binding peptide
  MOD_RES (6), (7), (39): Xaa is C or S
KIPKAXXVPTELSSLSMLFFDENEKVVLKVYPDMVVEGX

SEQ ID NO: 72699 - protein, 33 aa, Artificial Sequence
  Cyclic GFR-binding peptide
  MOD_RES (4), (5): Xaa is C or S
PKAXXVPTELSSLSMLFFDEYDKVVLKVYPEMV

SEQ ID NO: 72700 - protein, 25 aa, Artificial Sequence
  Cyclic GFR-binding peptide
VPTELSSLSMLFFDENEKVVLKVYP

SEQ ID NO: 72701 - protein, 28 aa, Artificial Sequence
  Cyclic GFR-binding peptide
  MOD_RES (27), (27): Xaa is C or S
TSSLSMLFFDNGRVLLLKVYPMIVEEXG

SEQ ID NO: 72702 - protein, 25 aa, Artificial Sequence
  Cyclic GFR-binding peptide
SSLSMLFFNDKQQIILKVYPGMVVD

SEQ ID NO: 72703 - protein, 34 aa, Artificial Sequence
  Cyclic GFR-binding peptide
  MOD_RES (5), (6): Xaa is C or S
VPKPXXAPTKLSSLSVLFFDDSSNVILKVYPNMV

SEQ ID NO: 72704 - protein, 32 aa, Artificial Sequence
  Cyclic GFR-binding peptide
  MOD_RES (29), (31): Xaa is C or S
QALSSLSILFFVGRKPKVLKVYPMIVRSXKXS

SEQ ID NO: 72705 - protein, 26 aa, Artificial Sequence
  Cyclic GFR-binding peptide
LSSLSILFFIGKTPKILKVYPMIVKS

SEQ ID NO: 72706 - protein, 30 aa, Artificial Sequence
  Cyclic GFR-binding peptide
PTEESSLSMLFFRIKPHQGQHLKVYPFLQH

SEQ ID NO: 72707 - protein, 34 aa, Artificial Sequence
  Cyclic GFR-binding peptide
  MOD_RES (1), (1): Xaa is C or S
XQPSRVHHSSLSVLFFEYVRKKPKLLKVYPRLEE

SEQ ID NO: 72708 - protein, 21 aa, Artificial Sequence
  Cyclic GFR-binding peptide
SSLSMLFFDNGRVLLLKVYPM

SEQ ID NO: 72709 - protein, 33 aa, Artificial Sequence; identical to SEQ ID NO: 24623
  Cyclic GFR-binding peptide
  MOD_RES (1), (32): Xaa is C or S

SEQ ID NO: 72710 - protein, 36 aa, Artificial Sequence
  Cyclic GFR-binding peptide
  MOD_RES (4), (5): Xaa is C or S
PKAXXVPTELSSLSMLFFDENEKVVLKVYPDMVVEG

SEQ ID NO: 72711 - protein, 25 aa, Artificial Sequence
  Cyclic GFR-binding peptide
TSSLSMLFFDNGRVLLLKVYPMIVE

SEQ ID NO: 72712 - protein, 34 aa, Artificial Sequence
  Cyclic GFR-binding peptide
  MOD_RES (5), (5): Xaa is C or S
SSVKXQPSRVHHSSLSVLFFEYVRKKPKLLKVYP

SEQ ID NO: 72713 - protein, 30 aa, Artificial Sequence
  Cyclic GFR-binding peptide
  MOD_RES (1), (1): Xaa is C or S
XVSQDLSSLSILFFIGKTPKILKVYPMIVK

SEQ ID NO: 72714 - protein, 25 aa, Artificial Sequence
  Cyclic GFR-binding peptide
QDLSSLSILFFIGKTPKILKVYPMI

SEQ ID NO: 72715 - protein, 32 aa, Artificial Sequence
  Cyclic GFR-binding peptide
  MOD_RES (6), (7): Xaa is C or S
STPPTXXVPTRLSSLSILFFDSANNVVLKVYP

SEQ ID NO: 72716 - protein, 31 aa, Artificial Sequence
  Cyclic GFR-binding peptide
PTEESSLSMLFFRIKPHQGQHLKVYPFLQHN

SEQ ID NO: 72717 - protein, 26 aa, Artificial Sequence
  Cyclic GFR-binding peptide
LSSLSILFFDKGVVTYLKVYPGMAVS

SEQ ID NO: 72718 - protein, 25 aa, Artificial Sequence
  Cyclic GFR-binding peptide
DLSSLSILFFIGKTPKILKVYPMIV

SEQ ID NO: 72719 - protein, 27 aa, Artificial Sequence
  Cyclic GFR-binding peptide
  MOD_RES (1), (2): Xaa is C or S
XXVPARLSSLSILFFDAANNVVLKVYP

SEQ ID NO: 72720 - protein, 31 aa, Artificial Sequence; identical to SEQ ID NO: 24629
  Cyclic GFR-binding peptide
  MOD_RES (1), (1): Xaa is C or S

SEQ ID NO: 72721 - protein, 41 aa, Artificial Sequence; identical to SEQ ID NO: 24631
  Cyclic GFR-binding peptide
  MOD_RES (6), (7), (39), (41): Xaa is C or S

SEQ ID NO: 72722 - protein, 25 aa, Artificial Sequence
  Cyclic GFR-binding peptide
KTSSLSMLFFDNGRVLLLKVYPMIV

SEQ ID NO: 72723 - protein, 39 aa, Artificial Sequence; identical to SEQ ID NO: 24632
  Cyclic GFR-binding peptide
  MOD_RES (3), (4), (36), (38): Xaa is C or S

SEQ ID NO: 72724 - protein, 30 aa, Artificial Sequence
  Cyclic GFR-binding peptide
  MOD_RES (1), (2): Xaa is C or S
XXVPTKLSSLSVLFFDDMGVPTLKVYPEGM

SEQ ID NO: 72725 - protein, 40 aa, Artificial Sequence; identical to SEQ ID NO: 24633
  Cyclic GFR-binding peptide
  MOD_RES (5), (39): Xaa is C or S

SEQ ID NO: 72726 - protein, 30 aa, Artificial Sequence
  Cyclic GFR-binding peptide
  MOD_RES (27), (29): Xaa is C or S
SSLSILFFDSANNVVLKVYPDMVVESXGXR

SEQ ID NO: 72727 - protein, 34 aa, Artificial Sequence
  Cyclic GFR-binding peptide
  MOD_RES (31), (33): Xaa is C or S
HSSLSVLFFEYVRKKPKLLKVYPRLEEHLEXAXA

SEQ ID NO: 72728 - protein, 37 aa, Artificial Sequence; identical to SEQ ID NO: 24636
  Cyclic GFR-binding peptide
  MOD_RES (5), (6): Xaa is C or S

SEQ ID NO: 72729 - protein, 34 aa, Artificial Sequence
  Cyclic GFR-binding peptide
  MOD_RES (31), (33): Xaa is C or S
PARLSSLSILFFDAANNVVLKVYPDMVVEAXGXR

SEQ ID NO: 72730 - protein, 35 aa, Artificial Sequence
  Cyclic GFR-binding peptide
  MOD_RES (4), (5): Xaa is C or S
PKAXXVPTELSSLSMLFFDENEKVVLKVYPDMVVE

SEQ ID NO: 72731 - protein, 40 aa, Artificial Sequence; identical to SEQ ID NO: 24639
  Cyclic GFR-binding peptide
  MOD_RES (1), (38), (40): Xaa is C or S

SEQ ID NO: 72732 - protein, 36 aa, Artificial Sequence; identical to SEQ ID NO: 24638
  Cyclic GFR-binding peptide
  MOD_RES (3), (4), (36): Xaa is C or S

SEQ ID NO: 72733 - protein, 31 aa, Artificial Sequence
  Cyclic GFR-binding peptide
  MOD_RES (3), (4): Xaa is C or S
KPXXAPTQLSSLSVLFFDDSSNVILKVYPNM

SEQ ID NO: 72734 - protein, 31 aa, Artificial Sequence
  Cyclic GFR-binding peptide
  MOD_RES (1), (2): Xaa is C or S
XXAPTKLSSLSVLFFDSSNNVILKVYPNMVV

SEQ ID NO: 72735 - protein, 40 aa, Artificial Sequence
  Cyclic GFR-binding peptide
  MOD_RES (4), (5), (37), (39): Xaa is C or S
PKAXXVPTELSSLSMLFFDENEKVVLKVYPDMVVEGXGXR

SEQ ID NO: 72736 - protein, 39 aa, Artificial Sequence; identical to SEQ ID NO: 24644
  Cyclic GFR-binding peptide
  MOD_RES (4), (5), (37), (39): Xaa is C or S

SEQ ID NO: 72737 - protein, 41 aa, Artificial Sequence; identical to SEQ ID NO: 24645
  Cyclic GFR-binding peptide
  MOD_RES (5), (6), (38), (40): Xaa is C or S

SEQ ID NO: 72738 - protein, 43 aa, Artificial Sequence; identical to SEQ ID NO: 24646
  Cyclic GFR-binding peptide
  MOD_RES (6), (40), (42): Xaa is C or S

SEQ ID NO: 72739 - protein, 35 aa, Artificial Sequence; identical to SEQ ID NO: 24647
  Cyclic GFR-binding peptide
  MOD_RES (2), (34): Xaa is C or S

SEQ ID NO: 72740 - protein, 23 aa, Artificial Sequence
  Cyclic GFR-binding peptide
QDLSSLSILFFVGRTPKVLKVYP

SEQ ID NO: 72741 - protein, 25 aa, Artificial Sequence
  Cyclic GFR-binding peptide
TELSSLSMLFFDENEKVVLKVYPDM

SEQ ID NO: 72742 - protein, 32 aa, Artificial Sequence
  Cyclic GFR-binding peptide
  MOD_RES (2), (3): Xaa is C or S
PXXAPTKLSSLSVLFFDDSSNVILKVYPNMVV

SEQ ID NO: 72743 - protein, 30 aa, Artificial Sequence
  Cyclic GFR-binding peptide
  MOD_RES (1), (2): Xaa is C or S
XXAPTQLSSLSVLFFDDSSNVILKVYPNMV

SEQ ID NO: 72744 - protein, 21 aa, Artificial Sequence
  Cyclic GFR-binding peptide
LSSLSVLFFDSSNNVILKVYP

SEQ ID NO: 72745 - protein, 24 aa, Artificial Sequence
  Cyclic GFR-binding peptide
SSLSILFFDAANNVVLKVYPDMVV

SEQ ID NO: 72746 - protein, 36 aa, Artificial Sequence; identical to SEQ ID NO: 24650
  Cyclic GFR-binding peptide
  MOD_RES (1), (33), (35): Xaa is C or S

SEQ ID NO: 72747 - protein, 31 aa, Artificial Sequence
  Cyclic GFR-binding peptide
  MOD_RES (3), (4): Xaa is C or S
KAXXVPTELSSLSMLFFDEYDKVVLKVYPEM

SEQ ID NO: 72748 - protein, 34 aa, Artificial Sequence
  Cyclic GFR-binding peptide
  MOD_RES (4), (5): Xaa is C or S
PASXXVPARLSSLSILFFDAANNVVLKVYPDMVV

SEQ ID NO: 72749 - protein, 38 aa, Artificial Sequence; identical to SEQ ID NO: 24651
  Cyclic GFR-binding peptide
  MOD_RES (2), (3), (35), (37): Xaa is C or S

SEQ ID NO: 72750 - protein, 30 aa, Artificial Sequence
  Cyclic GFR-binding peptide
  MOD_RES (30), (30): Xaa is C or S
PQALSSLSILFFVGRKPKVLKVYPMIVRSX

SEQ ID NO: 72751 - protein, 34 aa, Artificial Sequence; identical to SEQ ID NO: 24653
  Cyclic GFR-binding peptide
  MOD_RES (32), (34): Xaa is C or S

SEQ ID NO: 72752 - protein, 37 aa, Artificial Sequence; identical to SEQ ID NO: 24654
  Cyclic GFR-binding peptide
  MOD_RES (1), (2), (34), (36): Xaa is C or S

SEQ ID NO: 72753 - protein, 37 aa, Artificial Sequence; identical to SEQ ID NO: 24655
  Cyclic GFR-binding peptide
  MOD_RES (3), (4), (36): Xaa is C or S

SEQ ID NO: 72754 - protein, 37 aa, Artificial Sequence
  Cyclic GFR-binding peptide
  MOD_RES (7), (7): Xaa is C or S
NDEGLEXVPTEESSLSMLFFRIKPHQGQHLKVYPFLQ

SEQ ID NO: 72755 - protein, 33 aa, Artificial Sequence
  Cyclic GFR-binding peptide
  MOD_RES (30), (32): Xaa is C or S
TKLSSLSVLFFDSSNNVILKVYPNMVVKAXGXH

SEQ ID NO: 72756 - protein, 28 aa, Artificial Sequence
  Cyclic GFR-binding peptide
  MOD_RES (2), (3): Xaa is C or S
PXXVPQDLSSLSILFFVGRTPKVLKVYP

SEQ ID NO: 72757 - protein, 29 aa, Artificial Sequence
  Cyclic GFR-binding peptide
  MOD_RES (3), (4): Xaa is C or S
KAXXVPTKLSSLSILFFDKGVVTYLKVYP

SEQ ID NO: 72758 - protein, 39 aa, Artificial Sequence; identical to SEQ ID NO: 24659
  Cyclic GFR-binding peptide
  MOD_RES (6), (7), (38): Xaa is C or S

SEQ ID NO: 72759 - protein, 38 aa, Artificial Sequence; identical to SEQ ID NO: 24660
  Cyclic GFR-binding peptide
  MOD_RES (5), (6), (38): Xaa is C or S

SEQ ID NO: 72760 - protein, 27 aa, Artificial Sequence
  Cyclic GFR-binding peptide
LSSLSMLFFDENEKVVLKVYPDMVVEG

SEQ ID NO: 72761 - protein, 28 aa, Artificial Sequence
  Cyclic GFR-binding peptide
PTKLSSLSVLFFDSSNNVILKVYPNMVV

SEQ ID NO: 72762 - protein, 33 aa, Artificial Sequence
  Cyclic GFR-binding peptide
  MOD_RES (30), (32): Xaa is C or S
PQDLSSLSILFFVGRTPKVLKVYPMVVKSXKXS

SEQ ID NO: 72763 - protein, 33 aa, Artificial Sequence
  Cyclic GFR-binding peptide
  MOD_RES (3), (4): Xaa is C or S
KAXXVPTELSSLSMLFFDEYDKVVLKVYPEMVV

SEQ ID NO: 72764 - protein, 33 aa, Artificial Sequence
  Cyclic GFR-binding peptide
  MOD_RES (1), (2): Xaa is C or S
XXVPTKLSSLSVLFFDDMGVPTLKVYPEGMSVA

SEQ ID NO: 72765 - protein, 34 aa, Artificial Sequence
  Cyclic GFR-binding peptide
  MOD_RES (5), (6): Xaa is C or S
VGKAXXVPTKLSSLSVLFFDDMGVPTLKVYPEGM

SEQ ID NO: 72766 - protein, 41 aa, Artificial Sequence; identical to SEQ ID NO: 24663
  Cyclic GFR-binding peptide
  MOD_RES (6), (7), (40): Xaa is C or S

SEQ ID NO: 72767 - protein, 31 aa, Artificial Sequence
  Cyclic GFR-binding peptide
  MOD_RES (30), (30): Xaa is C or S
KLSSLSVLFFDDMGVPTLKVYPEGMSVAEXG

SEQ ID NO: 72768 - protein, 27 aa, Artificial Sequence
  Cyclic GFR-binding peptide
LSSLSMLFFDEYDKVVLKVYPEMVVEG

SEQ ID NO: 72769 - protein, 30 aa, Artificial Sequence
  Cyclic GFR-binding peptide
  MOD_RES (5), (5): Xaa is C or S
TKPTXAPTKLSSLSVLFFDDSSNVILKVYP

SEQ ID NO: 72770 - protein, 34 aa, Artificial Sequence; identical to SEQ ID NO: 24665
  Cyclic GFR-binding peptide
  MOD_RES (31), (33): Xaa is C or S

SEQ ID NO: 72771 - protein, 33 aa, Artificial Sequence
  Cyclic GFR-binding peptide
  MOD_RES (6), (7): Xaa is C or S
GSAGPXXTPTKMSSLSMLFFNDKQQIILKVYPG

SEQ ID NO: 72772 - protein, 30 aa, Artificial Sequence
  Cyclic GFR-binding peptide
  MOD_RES (3), (4): Xaa is C or S
SPXXVPQDLSSLSILFFVGRTPKVLKVYPM

SEQ ID NO: 72773 - protein, 30 aa, Artificial Sequence
  Cyclic GFR-binding peptide
PARLSSLSILFFDAANNVVLKVYPDMVVEA

SEQ ID NO: 72774 - protein, 41 aa, Artificial Sequence; identical to SEQ ID NO: 24669
  Cyclic GFR-binding peptide
  MOD_RES (3), (40): Xaa is C or S

SEQ ID NO: 72775 - protein, 30 aa, Artificial Sequence
  Cyclic GFR-binding peptide
  MOD_RES (27), (29): Xaa is C or S
SSLSMLFFNDKQQIILKVYPGMVVDRXGXS

SEQ ID NO: 72776 - protein, 28 aa, Artificial Sequence
  Cyclic GFR-binding peptide
  MOD_RES (27), (27): Xaa is C or S
LSSLSILFFIGKTPKILKVYPMIVKSXK

SEQ ID NO: 72777 - protein, 34 aa, Artificial Sequence
  Cyclic GFR-binding peptide
  MOD_RES (4), (5): Xaa is C or S
SKAXXVPTKLSSLSILFFDKGVVTYLKVYPGMAV

SEQ ID NO: 72778 - protein, 32 aa, Artificial Sequence
  Cyclic GFR-binding peptide
  MOD_RES (3), (4): Xaa is C or S
APXXVPQALSSLSILFFVGRKPKVLKVYPMIV

SEQ ID NO: 72779 - protein, 29 aa, Artificial Sequence
  Cyclic GFR-binding peptide
  MOD_RES (1), (2): Xaa is C or S
XXAPTQLSSLSVLFFDDSSNVILKVYPNM

SEQ ID NO: 72780 - protein, 29 aa, Artificial Sequence
  Cyclic GFR-binding peptide
APVKTSSLSMLFFDNGRVLLLKVYPMIVE

SEQ ID NO: 72781 - protein, 32 aa, Artificial Sequence; identical to SEQ ID NO: 24670
  Cyclic GFR-binding peptide
  MOD_RES (1), (1): Xaa is C or S

SEQ ID NO: 72782 - protein, 33 aa, Artificial Sequence
  Cyclic GFR-binding peptide
  MOD_RES (31), (33): Xaa is C or S
HSSLSVLFFEYVRKKPKLLKVYPRLEEHLEXAX

SEQ ID NO: 72783 - protein, 34 aa, Artificial Sequence; identical to SEQ ID NO: 24671
  Cyclic GFR-binding peptide
  MOD_RES (32), (34): Xaa is C or S

SEQ ID NO: 72784 - protein, 31 aa, Artificial Sequence
  Cyclic GFR-binding peptide
  MOD_RES (1), (1): Xaa is C or S
XVPTEESSLSMLFFRIKPHQGQHLKVYPFLQ

SEQ ID NO: 72785 - protein, 34 aa, Artificial Sequence
  Cyclic GFR-binding peptide
  MOD_RES (6), (7): Xaa is C or S
KIPKAXXVPTELSSLSMLFFDENEKVVLKVYPDM

SEQ ID NO: 72786 - protein, 30 aa, Artificial Sequence; identical to SEQ ID NO: 772
  Cyclic GFR-binding peptide

SEQ ID NO: 72787 - protein, 26 aa, Artificial Sequence
  Cyclic GFR-binding peptide
LSSLSILFFVGRKPKVLKVYPMIVRS

SEQ ID NO: 72788 - protein, 23 aa, Artificial Sequence
  Cyclic GFR-binding peptide
SSLSILFFDKGVVTYLKVYPGMA

SEQ ID NO: 72789 - protein, 37 aa, Artificial Sequence; identical to SEQ ID NO: 24675
  Cyclic GFR-binding peptide
  MOD_RES (4), (5), (36): Xaa is C or S

SEQ ID NO: 72790 - protein, 27 aa, Artificial Sequence
  Cyclic GFR-binding peptide
  MOD_RES (1), (2): Xaa is C or S
XXVPQDLSSLSILFFVGRTPKVLKVYP

SEQ ID NO: 72791 - protein, 25 aa, Artificial Sequence
  Cyclic GFR-binding peptide
KLSSLSVLFFDSSNNVILKVYPNMV

SEQ ID NO: 72792 - protein, 30 aa, Artificial Sequence
  Cyclic GFR-binding peptide
  MOD_RES (30), (30): Xaa is C or S
PVKTSSLSMLFFDNGRVLLLKVYPMIVEEX

SEQ ID NO: 72793 - protein, 29 aa, Artificial Sequence
  Cyclic GFR-binding peptide
  MOD_RES (28), (28): Xaa is C or S
DLSSLSILFFVGRTPKVLKVYPMVVKSXK

SEQ ID NO: 72794 - protein, 32 aa, Artificial Sequence
  Cyclic GFR-binding peptide
  MOD_RES (29), (31): Xaa is C or S
QDLSSLSILFFVGRTPKVLKVYPMVVKSXKXS

SEQ ID NO: 72795 - protein, 22 aa, Artificial Sequence
  Cyclic GFR-binding peptide
SSLSMLFFDEYDKVVLKVYPEM

SEQ ID NO: 72796 - protein, 24 aa, Artificial Sequence
  Cyclic GFR-binding peptide
EESSLSMLFFRIKPHQGQHLKVYP

SEQ ID NO: 72797 - protein, 27 aa, Artificial Sequence
  Cyclic GFR-binding peptide
  MOD_RES (27), (27): Xaa is C or S
LSSLSILFFVGRTPKVLKVYPMVVKSX

SEQ ID NO: 72798 - protein, 35 aa, Artificial Sequence
  Cyclic GFR-binding peptide
  MOD_RES (6), (7): Xaa is C or S
STPPTXXVPTRLSSLSILFFDSANNVVLKVYPDMV

SEQ ID NO: 72799 - protein, 34 aa, Artificial Sequence; identical to SEQ ID NO: 24678
  Cyclic GFR-binding peptide
  MOD_RES (2), (3), (34): Xaa is C or S

SEQ ID NO: 72800 - protein, 27 aa, Artificial Sequence
  Cyclic GFR-binding peptide
VPTELSSLSMLFFDENEKVVLKVYPDM

SEQ ID NO: 72801 - protein, 25 aa, Artificial Sequence
  Cyclic GFR-binding peptide
TKMSSLSMLFFNDKQQIILKVYPGM

SEQ ID NO: 72802 - protein, 36 aa, Artificial Sequence; identical to SEQ ID NO: 24679
  Cyclic GFR-binding peptide
  MOD_RES (4), (5): Xaa is C or S

SEQ ID NO: 72803 - protein, 33 aa, Artificial Sequence
  Cyclic GFR-binding peptide
  MOD_RES (4), (5): Xaa is C or S
PASXXVPARLSSLSILFFDAANNVVLKVYPDMV

SEQ ID NO: 72804 - protein, 32 aa, Artificial Sequence; identical to SEQ ID NO: 24681
  Cyclic GFR-binding peptide
  MOD_RES (31), (31): Xaa is C or S

SEQ ID NO: 72805 - protein, 38 aa, Artificial Sequence; identical to SEQ ID NO: 24684
  Cyclic GFR-binding peptide
  MOD_RES (2), (36), (38): Xaa is C or S

SEQ ID NO: 72806 - protein, 29 aa, Artificial Sequence
  Cyclic GFR-binding peptide
  MOD_RES (1), (1): Xaa is C or S
XTPTKMSSLSMLFFNDKQQIILKVYPGMV

SEQ ID NO: 72807 - protein, 38 aa, Artificial Sequence; identical to SEQ ID NO: 24683
  Cyclic GFR-binding peptide
  MOD_RES (3), (4), (36), (38): Xaa is C or S

SEQ ID NO: 72808 - protein, 36 aa, Artificial Sequence
  Cyclic GFR-binding peptide
  MOD_RES (6), (6): Xaa is C or S
DEGLEXVPTEESSLSMLFFRIKPHQGQHLKVYPFLQ

SEQ ID NO: 72809 - protein, 31 aa, Artificial Sequence
  Cyclic GFR-binding peptide
  MOD_RES (5), (6): Xaa is C or S
IPKAXXVPTELSSLSMLFFDENEKVVLKVYP

SEQ ID NO: 72810 - protein, 40 aa, Artificial Sequence; identical to SEQ ID NO: 24688
  Cyclic GFR-binding peptide
  MOD_RES (4), (5), (37), (39): Xaa is C or S

SEQ ID NO: 72811 - protein, 30 aa, Artificial Sequence
  Cyclic GFR-binding peptide
PTKMSSLSMLFFNDKQQIILKVYPGMVVDR

SEQ ID NO: 72812 - protein, 31 aa, Artificial Sequence
  Cyclic GFR-binding peptide
  MOD_RES (3), (4): Xaa is C or S
APXXVPQALSSLSILFFVGRKPKVLKVYPMI

SEQ ID NO: 72813 - protein, 24 aa, Artificial Sequence
  Cyclic GFR-binding peptide
LSSLSMLFFDEYDKVVLKVYPEMV

SEQ ID NO: 72814 - protein, 34 aa, Artificial Sequence
  Cyclic GFR-binding peptide
  MOD_RES (4), (5): Xaa is C or S
ASPXXVPQDLSSLSILFFVGRTPKVLKVYPMVVK

SEQ ID NO: 72815 - protein, 32 aa, Artificial Sequence
  Cyclic GFR-binding peptide
  MOD_RES (2), (3): Xaa is C or S
PXXVPQDLSSLSILFFVGRTPKVLKVYPMVVK

SEQ ID NO: 72816 - protein, 38 aa, Artificial Sequence; identical to SEQ ID NO: 24693
  Cyclic GFR-binding peptide
  MOD_RES (4), (5), (36), (38): Xaa is C or S

SEQ ID NO: 72817 - protein, 29 aa, Artificial Sequence
  Cyclic GFR-binding peptide
SSLSILFFVGRKPKVLKVYPAAAAAAAAA

SEQ ID NO: 72818 - protein, 33 aa, Artificial Sequence
  Cyclic GFR-binding peptide
RVHHSSLSVLFFEYVRKKPKLLKVYPRLEEHLE

SEQ ID NO: 72819 - protein, 37 aa, Artificial Sequence; identical to SEQ ID NO: 24695
  Cyclic GFR-binding peptide
  MOD_RES (5), (6): Xaa is C or S

SEQ ID NO: 72820 - protein, 34 aa, Artificial Sequence; identical to SEQ ID NO: 24696
  Cyclic GFR-binding peptide
  MOD_RES (31), (33): Xaa is C or S

SEQ ID NO: 72821 - protein, 29 aa, Artificial Sequence
  Cyclic GFR-binding peptide
  MOD_RES (1), (2): Xaa is C or S
XXVPARLSSLSILFFDAANNVVLKVYPDM

SEQ ID NO: 72822 - protein, 28 aa, Artificial Sequence
  Cyclic GFR-binding peptide
PTKMSSLSMLFFNDKQQIILKVYPGMVV

SEQ ID NO: 72823 - protein, 31 aa, Artificial Sequence
  Cyclic GFR-binding peptide
  MOD_RES (1), (2): Xaa is C or S
XXVPTELSSLSMLFFDENEKVVLKVYPDMVV

SEQ ID NO: 72824 - protein, 29 aa, Artificial Sequence
  Cyclic GFR-binding peptide
SSLSILFFVGRTPKVLKVYPAAAAAAAAA

SEQ ID NO: 72825 - protein, 38 aa, Artificial Sequence; identical to SEQ ID NO: 24697
  Cyclic GFR-binding peptide
  MOD_RES (1), (35), (37): Xaa is C or S

SEQ ID NO: 72826 - protein, 25 aa, Artificial Sequence
  Cyclic GFR-binding peptide
VHHSSLSVLFFEYVRKKPKLLKVYP

SEQ ID NO: 72827 - protein, 29 aa, Artificial Sequence
  Cyclic GFR-binding peptide
  MOD_RES (2), (3): Xaa is C or S
PXXVSQDLSSLSILFFIGKTPKILKVYPM

SEQ ID NO: 72828 - protein, 36 aa, Artificial Sequence; identical to SEQ ID NO: 24700
  Cyclic GFR-binding peptide
  MOD_RES (4), (36): Xaa is C or S

SEQ ID NO: 72829 - protein, 37 aa, Artificial Sequence; identical to SEQ ID NO: 24702
  Cyclic GFR-binding peptide
  MOD_RES (3), (3): Xaa is C or S

SEQ ID NO: 72830 - protein, 28 aa, Artificial Sequence
  Cyclic GFR-binding peptide
  MOD_RES (2), (3): Xaa is C or S
AXXVPTELSSLSMLFFDEYDKVVLKVYP

SEQ ID NO: 72831 - protein, 28 aa, Artificial Sequence
  Cyclic GFR-binding peptide
TQLSSLSVLFFDDSSNVILKVYPNMVVR

SEQ ID NO: 72832 - protein, 33 aa, Artificial Sequence
  Cyclic GFR-binding peptide
  MOD_RES (6), (6): Xaa is C or S
DEGLEXVPTEESSLSMLFFRIKPHQGQHLKVYP

SEQ ID NO: 72833 - protein, 29 aa, Artificial Sequence
  Cyclic GFR-binding peptide
SSLSVLFFDDMGVPTLKVYPAAAAAAAAA

SEQ ID NO: 72834 - protein, 31 aa, Artificial Sequence; identical to SEQ ID NO: 24704
  Cyclic GFR-binding peptide
  MOD_RES (1), (1): Xaa is C or S

SEQ ID NO: 72835 - protein, 37 aa, Artificial Sequence; identical to SEQ ID NO: 24705
  Cyclic GFR-binding peptide
  MOD_RES (3), (4), (36): Xaa is C or S

SEQ ID NO: 72836 - protein, 29 aa, Artificial Sequence
  Cyclic GFR-binding peptide
  MOD_RES (3), (4): Xaa is C or S
PTXXVPTRLSSLSILFFDSANNVVLKVYP

SEQ ID NO: 72837 - protein, 32 aa, Artificial Sequence
  Cyclic GFR-binding peptide
  MOD_RES (31), (31): Xaa is C or S
TKLSSLSVLFFDDMGVPTLKVYPEGMSVAEXG

SEQ ID NO: 72838 - protein, 28 aa, Artificial Sequence
  Cyclic GFR-binding peptide
  MOD_RES (28), (28): Xaa is C or S
MSSLSMLFFNDKQQIILKVYPGMVVDRX

SEQ ID NO: 72839 - protein, 31 aa, Artificial Sequence
  Cyclic GFR-binding peptide
SSLSMLFFRIKPHQGQHLKVYPAAAAAAAAA

SEQ ID NO: 72840 - protein, 21 aa, Artificial Sequence
  Cyclic GFR-binding peptide
TSSLSMLFFDNGRVLLLKVYP

SEQ ID NO: 72841 - protein, 38 aa, Artificial Sequence; identical to SEQ ID NO: 24709
  Cyclic GFR-binding peptide
  MOD_RES (1), (2), (35), (37): Xaa is C or S

SEQ ID NO: 72842 - protein, 29 aa, Artificial Sequence
  Cyclic GFR-binding peptide
SSLSILFFDENKNVVLKVYPAAAAAAAAA

SEQ ID NO: 72843 - protein, 25 aa, Artificial Sequence
  Cyclic GFR-binding peptide
SSLSVLFFDSSNNVILKVYPNMVVK

SEQ ID NO: 72844 - protein, 33 aa, Artificial Sequence
  Cyclic GFR-binding peptide
  MOD_RES (30), (32): Xaa is C or S
TKMSSLSMLFFNDKQQIILKVYPGMVVDRXGXS

SEQ ID NO: 72845 - protein, 33 aa, Artificial Sequence; identical to SEQ ID NO: 24711
  Cyclic GFR-binding peptide
  MOD_RES (2), (3): Xaa is C or S

SEQ ID NO: 72846 - protein, 26 aa, Artificial Sequence
  Cyclic GFR-binding peptide
VPQALSSLSILFFVGRKPKVLKVYPM

SEQ ID NO: 72847 - protein, 42 aa, Artificial Sequence; identical to SEQ ID NO: 24715
  Cyclic GFR-binding peptide
  MOD_RES (6), (7), (39), (41): Xaa is C or S

SEQ ID NO: 72848 - protein, 30 aa, Artificial Sequence
  Cyclic GFR-binding peptide
EESSLSMLFFRIKPHQGQHLKVYPFLQHNK

SEQ ID NO: 72849 - protein, 29 aa, Artificial Sequence
  Cyclic GFR-binding peptide
PQDLSSLSILFFVGRTPKVLKVYPMVVKS

SEQ ID NO: 72850 - protein, 33 aa, Artificial Sequence
  Cyclic GFR-binding peptide
  MOD_RES (31), (33): Xaa is C or S
PTELSSLSMLFFDENEKVVLKVYPDMVVEGXGX

SEQ ID NO: 72851 - protein, 30 aa, Artificial Sequence
  Cyclic GFR-binding peptide
VPTKLSSLSVLFFDDMGVPTLKVYPEGMSV

SEQ ID NO: 72852 - protein, 37 aa, Artificial Sequence; identical to SEQ ID NO: 24718
  Cyclic GFR-binding peptide
  MOD_RES (2), (3), (35), (37): Xaa is C or S

SEQ ID NO: 72853 - protein, 28 aa, Artificial Sequence
  Cyclic GFR-binding peptide
PTQLSSLSVLFFDDSSNVILKVYPNMVV

SEQ ID NO: 72854 - protein, 37 aa, Artificial Sequence; identical to SEQ ID NO: 24720
  Cyclic GFR-binding peptide
  MOD_RES (6), (7): Xaa is C or S

SEQ ID NO: 72855 - protein, 31 aa, Artificial Sequence
  Cyclic GFR-binding peptide
  MOD_RES (2), (3): Xaa is C or S
PXXVPQDLSSLSILFFVGRTPKVLKVYPMVV

SEQ ID NO: 72856 - protein, 31 aa, Artificial Sequence
  Cyclic GFR-binding peptide
  MOD_RES (2), (3): Xaa is C or S
AXXVPTKLSSLSVLFFDDMGVPTLKVYPEGM

SEQ ID NO: 72857 - protein, 38 aa, Artificial Sequence; identical to SEQ ID NO: 24722
  Cyclic GFR-binding peptide
  MOD_RES (2), (3), (35), (37): Xaa is C or S

SEQ ID NO: 72858 - protein, 31 aa, Artificial Sequence
  Cyclic GFR-binding peptide
  MOD_RES (5), (6): Xaa is C or S
SAAPXXVPQALSSLSILFFVGRKPKVLKVYP

SEQ ID NO: 72859 - protein, 22 aa, Artificial Sequence
  Cyclic GFR-binding peptide
SSLSILFFIGKTPKILKVYPMI

SEQ ID NO: 72860 - protein, 28 aa, Artificial Sequence
  Cyclic GFR-binding peptide
  MOD_RES (28), (28): Xaa is C or S
KTSSLSMLFFDNGRVLLLKVYPMIVEEX

SEQ ID NO: 72861 - protein, 29 aa, Artificial Sequence
  Cyclic GFR-binding peptide
  MOD_RES (3), (4): Xaa is C or S
KAXXVPTELSSLSMLFFDENEKVVLKVYP

SEQ ID NO: 72862 - protein, 31 aa, Artificial Sequence
  Cyclic GFR-binding peptide
  MOD_RES (3), (4): Xaa is C or S
STXXAPVKTSSLSMLFFDNGRVLLLKVYPMI

SEQ ID NO: 72863 - protein, 33 aa, Artificial Sequence
  Cyclic GFR-binding peptide
  MOD_RES (31), (33): Xaa is C or S
PTKLSSLSVLFFDSSNNVILKVYPNMVVKAXGX

SEQ ID NO: 72864 - protein, 25 aa, Artificial Sequence
  Cyclic GFR-binding peptide
RLSSLSILFFDAANNVVLKVYPDMV

SEQ ID NO: 72865 - protein, 32 aa, Artificial Sequence
  Cyclic GFR-binding peptide
  MOD_RES (30), (32): Xaa is C or S
TKLSSLSVLFFDSSNNVILKVYPNMVVKAXGX

SEQ ID NO: 72866 - protein, 24 aa, Artificial Sequence
  Cyclic GFR-binding peptide
PQDLSSLSILFFVGRTPKVLKVYP

SEQ ID NO: 72867 - protein, 29 aa, Artificial Sequence
  Cyclic GFR-binding peptide
  MOD_RES (26), (28): Xaa is C or S
SSLSILFFIGKTPKILKVYPMIVKSXKXS

SEQ ID NO: 72868 - protein, 29 aa, Artificial Sequence
  Cyclic GFR-binding peptide
APTQLSSLSVLFFDDSSNVILKVYPNMVV

SEQ ID NO: 72869 - protein, 27 aa, Artificial Sequence
  Cyclic GFR-binding peptide
  MOD_RES (1), (2): Xaa is C or S
XXVSQDLSSLSILFFIGKTPKILKVYP

SEQ ID NO: 72870 - protein, 32 aa, Artificial Sequence; identical to SEQ ID NO: 24729
  Cyclic GFR-binding peptide
  MOD_RES (1), (32): Xaa is C or S

SEQ ID NO: 72871 - protein, 28 aa, Artificial Sequence
  Cyclic GFR-binding peptide
SRVHHSSLSVLFFEYVRKKPKLLKVYPR

SEQ ID NO: 72872 - protein, 27 aa, Artificial Sequence
  Cyclic GFR-binding peptide
  MOD_RES (27), (27): Xaa is C or S
SSLSMLFFDENEKVVLKVYPDMVVEGX

SEQ ID NO: 72873 - protein, 28 aa, Artificial Sequence
  Cyclic GFR-binding peptide
VPTKLSSLSVLFFDDMGVPTLKVYPEGM

SEQ ID NO: 72874 - protein, 32 aa, Artificial Sequence
  Cyclic GFR-binding peptide
  MOD_RES (6), (7): Xaa is C or S
SIPKAXXVPTELSSLSMLFFDEYDKVVLKVYP

SEQ ID NO: 72875 - protein, 24 aa, Artificial Sequence
  Cyclic GFR-binding peptide
LSSLSVLFFDDSSNVILKVYPNMV

SEQ ID NO: 72876 - protein, 23 aa, Artificial Sequence
  Cyclic GFR-binding peptide
ELSSLSMLFFDEYDKVVLKVYPE

SEQ ID NO: 72877 - protein, 32 aa, Artificial Sequence; identical to SEQ ID NO: 24734
  Cyclic GFR-binding peptide
  MOD_RES (1), (2): Xaa is C or S

SEQ ID NO: 72878 - protein, 37 aa, Artificial Sequence; identical to SEQ ID NO: 24735
  Cyclic GFR-binding peptide
  MOD_RES (4), (5), (36): Xaa is C or S

SEQ ID NO: 72879 - protein, 35 aa, Artificial Sequence; identical to SEQ ID NO: 24737
  Cyclic GFR-binding peptide
  MOD_RES (32), (34): Xaa is C or S

SEQ ID NO: 72880 - protein, 29 aa, Artificial Sequence
  Cyclic GFR-binding peptide
APTKLSSLSVLFFDDSSNVILKVYPNMVV

SEQ ID NO: 72881 - protein, 26 aa, Artificial Sequence
  Cyclic GFR-binding peptide
LSSLSILFFDSANNVVLKVYPDMVVE

SEQ ID NO: 72882 - protein, 25 aa, Artificial Sequence
  Cyclic GFR-binding peptide
ELSSLSMLFFDENEKVVLKVYPDMV

SEQ ID NO: 72883 - protein, 32 aa, Artificial Sequence; identical to SEQ ID NO: 24738
  Cyclic GFR-binding peptide
  MOD_RES (32), (32): Xaa is C or S

SEQ ID NO: 72884 - protein, 31 aa, Artificial Sequence; identical to SEQ ID NO: 24740
  Cyclic GFR-binding peptide

SEQ ID NO: 72885 - protein, 33 aa, Artificial Sequence; identical to SEQ ID NO: 24741
  Cyclic GFR-binding peptide
  MOD_RES (2), (3): Xaa is C or S

SEQ ID NO: 72886 - protein, 26 aa, Artificial Sequence
  Cyclic GFR-binding peptide
KLSSLSILFFDKGVVTYLKVYPGMAV

SEQ ID NO: 72887 - protein, 24 aa, Artificial Sequence
  Cyclic GFR-binding peptide
LSSLSILFFDKGVVTYLKVYPGMA

SEQ ID NO: 72888 - protein, 26 aa, Artificial Sequence
  Cyclic GFR-binding peptide
VPQDLSSLSILFFVGRTPKVLKVYPM

SEQ ID NO: 72889 - protein, 32 aa, Artificial Sequence
  Cyclic GFR-binding peptide
  MOD_RES (2), (3): Xaa is C or S
AXXVPTELSSLSMLFFDEYDKVVLKVYPEMVV

SEQ ID NO: 72890 - protein, 31 aa, Artificial Sequence
  Cyclic GFR-binding peptide
  MOD_RES (2), (3): Xaa is C or S
AXXVPTELSSLSMLFFDEYDKVVLKVYPEMV

SEQ ID NO: 72891 - protein, 27 aa, Artificial Sequence
  Cyclic GFR-binding peptide
HHSSLSVLFFEYVRKKPKLLKVYPRLE

SEQ ID NO: 72892 - protein, 30 aa, Artificial Sequence
  Cyclic GFR-binding peptide
  MOD_RES (2), (3): Xaa is C or S
PXXVPQDLSSLSILFFVGRTPKVLKVYPMV

SEQ ID NO: 72893 - protein, 29 aa, Artificial Sequence
  Cyclic GFR-binding peptide
  MOD_RES (28), (28): Xaa is C or S
LSSLSILFFDAANNVVLKVYPDMVVEAXG

SEQ ID NO: 72894 - protein, 27 aa, Artificial Sequence
  Cyclic GFR-binding peptide
DLSSLSILFFIGKTPKILKVYPMIVKS

SEQ ID NO: 72895 - protein, 36 aa, Artificial Sequence
  Cyclic GFR-binding peptide
  MOD_RES (4), (5): Xaa is C or S
GKAXXVPTKLSSLSVLFFDDMGVPTLKVYPEGMSVA

SEQ ID NO: 72896 - protein, 26 aa, Artificial Sequence
  Cyclic GFR-binding peptide
VPTKLSSLSVLFFDDMGVPTLKVYPE

SEQ ID NO: 72897 - protein, 27 aa, Artificial Sequence
  Cyclic GFR-binding peptide
  MOD_RES (27), (27): Xaa is C or S
SSLSILFFDSANNVVLKVYPDMVVESX

SEQ ID NO: 72898 - protein, 36 aa, Artificial Sequence; identical to SEQ ID NO: 24747
  Cyclic GFR-binding peptide
  MOD_RES (3), (4), (35): Xaa is C or S

SEQ ID NO: 72899 - protein, 24 aa, Artificial Sequence
  Cyclic GFR-binding peptide
KLSSLSVLFFDDMGVPTLKVYPEG

SEQ ID NO: 72900 - protein, 29 aa, Artificial Sequence
  Cyclic GFR-binding peptide
QPSRVHHSSLSVLFFEYVRKKPKLLKVYP

SEQ ID NO: 72901 - protein, 24 aa, Artificial Sequence
  Cyclic GFR-binding peptide
LSSLSILFFDSANNVVLKVYPDMV

SEQ ID NO: 72902 - protein, 24 aa, Artificial Sequence
  Cyclic GFR-binding peptide
TELSSLSMLFFDEYDKVVLKVYPE

SEQ ID NO: 72903 - protein, 29 aa, Artificial Sequence
  Cyclic GFR-binding peptide
HHSSLSVLFFEYVRKKPKLLKVYPRLEEH

SEQ ID NO: 72904 - protein, 28 aa, Artificial Sequence
  Cyclic GFR-binding peptide
PTRLSSLSILFFDSANNVVLKVYPDMVV

SEQ ID NO: 72905 - protein, 28 aa, Artificial Sequence
  Cyclic GFR-binding peptide
  MOD_RES (27), (27): Xaa is C or S
SSLSILFFDSANNVVLKVYPDMVVESXG

SEQ ID NO: 72906 - protein, 32 aa, Artificial Sequence
  Cyclic GFR-binding peptide
  MOD_RES (2), (3): Xaa is C or S
SXXVPARLSSLSILFFDAANNVVLKVYPDMVV

SEQ ID NO: 72907 - protein, 30 aa, Artificial Sequence
  Cyclic GFR-binding peptide
PTELSSLSMLFFDEYDKVVLKVYPEMVVEG

SEQ ID NO: 72908 - protein, 20 aa, Artificial Sequence
  Cyclic GFR-binding peptide
SSLSVLFFDDMGVPTLKVYP

SEQ ID NO: 72909 - protein, 33 aa, Artificial Sequence; identical to SEQ ID NO: 24750
  Cyclic GFR-binding peptide
  MOD_RES (1), (32): Xaa is C or S

SEQ ID NO: 72910 - protein, 33 aa, Artificial Sequence
  Cyclic GFR-binding peptide
  MOD_RES (31), (33): Xaa is C or S
PARLSSLSILFFDAANNVVLKVYPDMVVEAXGX

SEQ ID NO: 72911 - protein, 36 aa, Artificial Sequence; identical to SEQ ID NO: 24751
  Cyclic GFR-binding peptide
  MOD_RES (2), (3), (34), (36): Xaa is C or S

SEQ ID NO: 72912 - protein, 28 aa, Artificial Sequence
  Cyclic GFR-binding peptide
ELSSLSMLFFDEYDKVVLKVYPEMVVEG

SEQ ID NO: 72913 - protein, 39 aa, Artificial Sequence; identical to SEQ ID NO: 24752
  Cyclic GFR-binding peptide
  MOD_RES (6), (7), (39): Xaa is C or S

SEQ ID NO: 72914 - protein, 33 aa, Artificial Sequence; identical to SEQ ID NO: 24753
  Cyclic GFR-binding peptide
  MOD_RES (1), (33): Xaa is C or S

SEQ ID NO: 72915 - protein, 23 aa, Artificial Sequence
  Cyclic GFR-binding peptide
SSLSVLFFEYVRKKPKLLKVYPR

SEQ ID NO: 72916 - protein, 35 aa, Artificial Sequence; identical to SEQ ID NO: 24754
  Cyclic GFR-binding peptide
  MOD_RES (32), (34): Xaa is C or S

SEQ ID NO: 72917 - protein, 28 aa, Artificial Sequence
  Cyclic GFR-binding peptide
  MOD_RES (1), (1): Xaa is C or S
XVPTRLSSLSILFFDSANNVVLKVYPDM

SEQ ID NO: 72918 - protein, 31 aa, Artificial Sequence
  Cyclic GFR-binding peptide
  MOD_RES (2), (3): Xaa is C or S
PXXVPQALSSLSILFFVGRKPKVLKVYPMIV

SEQ ID NO: 72919 - protein, 26 aa, Artificial Sequence
  Cyclic GFR-binding peptide
PARLSSLSILFFDAANNVVLKVYPDM

SEQ ID NO: 72920 - protein, 32 aa, Artificial Sequence
  Cyclic GFR-binding peptide
  MOD_RES (6), (7): Xaa is C or S
YVPKPXXAPTKLSSLSVLFFDDSSNVILKVYP

SEQ ID NO: 72921 - protein, 32 aa, Artificial Sequence
  Cyclic GFR-binding peptide
  MOD_RES (30), (32): Xaa is C or S
TKLSSLSILFFDKGVVTYLKVYPGMAVSEXGX

SEQ ID NO: 72922 - protein, 39 aa, Artificial Sequence; identical to SEQ ID NO: 24757
  Cyclic GFR-binding peptide
  MOD_RES (4), (5), (36), (38): Xaa is C or S

SEQ ID NO: 72923 - protein, 31 aa, Artificial Sequence
  Cyclic GFR-binding peptide
  MOD_RES (30), (30): Xaa is C or S
PVKTSSLSMLFFDNGRVLLLKVYPMIVEEXG

SEQ ID NO: 72924 - protein, 22 aa, Artificial Sequence
  Cyclic GFR-binding peptide
QLSSLSVLFFDDSSNVILKVYP

SEQ ID NO: 72925 - protein, 35 aa, Artificial Sequence; identical to SEQ ID NO: 24758
  Cyclic GFR-binding peptide
  MOD_RES (3), (4): Xaa is C or S

SEQ ID NO: 72926 - protein, 32 aa, Artificial Sequence
  Cyclic GFR-binding peptide
  MOD_RES (31), (31): Xaa is C or S
PTKLSSLSVLFFDDSSNVILKVYPNMVVRSXG

SEQ ID NO: 72927 - protein, 36 aa, Artificial Sequence; identical to SEQ ID NO: 24759
  Cyclic GFR-binding peptide
  MOD_RES (2), (3), (34), (36): Xaa is C or S

SEQ ID NO: 72928 - protein, 26 aa, Artificial Sequence
  Cyclic GFR-binding peptide
SSLSMLFFRIKPHQGQHLKVYPFLQH

SEQ ID NO: 72929 - protein, 38 aa, Artificial Sequence; identical to SEQ ID NO: 24760
  Cyclic GFR-binding peptide
  MOD_RES (4), (5), (37): Xaa is C or S

SEQ ID NO: 72930 - protein, 33 aa, Artificial Sequence
  Cyclic GFR-binding peptide
  MOD_RES (30), (32): Xaa is C or S
TKLSSLSVLFFDDSSNVILKVYPNMVVRSXGXH

SEQ ID NO: 72931 - protein, 21 aa, Artificial Sequence
  Cyclic GFR-binding peptide
SSLSILFFDSANNVVLKVYPD

SEQ ID NO: 72932 - protein, 27 aa, Artificial Sequence
  Cyclic GFR-binding peptide
VPARLSSLSILFFDAANNVVLKVYPDM

SEQ ID NO: 72933 - protein, 32 aa, Artificial Sequence
  Cyclic GFR-binding peptide
  MOD_RES (30), (32): Xaa is C or S
TELSSLSMLFFDEYDKVVLKVYPEMVVEGXGX

SEQ ID NO: 72934 - protein, 37 aa, Artificial Sequence; identical to SEQ ID NO: 24764
  Cyclic GFR-binding peptide
  MOD_RES (5), (6), (37): Xaa is C or S

SEQ ID NO: 72935 - protein, 37 aa, Artificial Sequence; identical to SEQ ID NO: 24763
  Cyclic GFR-binding peptide
  MOD_RES (3), (4), (36): Xaa is C or S

SEQ ID NO: 72936 - protein, 34 aa, Artificial Sequence; identical to SEQ ID NO: 24765
  Cyclic GFR-binding peptide
  MOD_RES (2), (3): Xaa is C or S

SEQ ID NO: 72937 - protein, 36 aa, Artificial Sequence; identical to SEQ ID NO: 24766
  Cyclic GFR-binding peptide
  MOD_RES (3), (35): Xaa is C or S

SEQ ID NO: 72938 - protein, 32 aa, Artificial Sequence
  Cyclic GFR-binding peptide
  MOD_RES (30), (32): Xaa is C or S
ARLSSLSILFFDAANNVVLKVYPDMVVEAXGX

SEQ ID NO: 72939 - protein, 30 aa, Artificial Sequence
  Cyclic GFR-binding peptide
  MOD_RES (27), (29): Xaa is C or S
LSSLSILFFIGKTPKILKVYPMIVKSXKXS

SEQ ID NO: 72940 - protein, 39 aa, Artificial Sequence; identical to SEQ ID NO: 24768
  Cyclic GFR-binding peptide
  MOD_RES (4), (5), (37), (39): Xaa is C or S

SEQ ID NO: 72941 - protein, 40 aa, Artificial Sequence; identical to SEQ ID NO: 24769
  Cyclic GFR-binding peptide
  MOD_RES (2), (39): Xaa is C or S

SEQ ID NO: 72942 - protein, 31 aa, Artificial Sequence
  Cyclic GFR-binding peptide
  MOD_RES (1), (2): Xaa is C or S
XXVPTRLSSLSILFFDSANNVVLKVYPDMVV

SEQ ID NO: 72943 - protein, 33 aa, Artificial Sequence
  Cyclic GFR-binding peptide
  MOD_RES (31), (33): Xaa is C or S
PTELSSLSMLFFDEYDKVVLKVYPEMVVEGXGX

SEQ ID NO: 72944 - protein, 28 aa, Artificial Sequence
  Cyclic GFR-binding peptide
  MOD_RES (1), (1): Xaa is C or S
XVPTELSSLSMLFFDENEKVVLKVYPDM

SEQ ID NO: 72945 - protein, 31 aa, Artificial Sequence
  Cyclic GFR-binding peptide
  MOD_RES (4), (5): Xaa is C or S
PSTXXAPVKTSSLSMLFFDNGRVLLLKVYPM

SEQ ID NO: 72946 - protein, 31 aa, Artificial Sequence
  Cyclic GFR-binding peptide
  MOD_RES (29), (31): Xaa is C or S
SSLSMLFFRIKPHQGQHLKVYPFLQHNKXEX

SEQ ID NO: 72947 - protein, 28 aa, Artificial Sequence
  Cyclic GFR-binding peptide
TPTKMSSLSMLFFNDKQQIILKVYPGMV

SEQ ID NO: 72948 - protein, 27 aa, Artificial Sequence
  Cyclic GFR-binding peptide
  MOD_RES (1), (2): Xaa is C or S
XXVPQALSSLSILFFVGRKPKVLKVYP

SEQ ID NO: 72949 - protein, 31 aa, Artificial Sequence; identical to SEQ ID NO: 24774
  Cyclic GFR-binding peptide

SEQ ID NO: 72950 - protein, 45 aa, Artificial Sequence; identical to SEQ ID NO: 24775
  Cyclic GFR-binding peptide
  MOD_RES (5), (42), (44): Xaa is C or S

SEQ ID NO: 72951 - protein, 20 aa, Artificial Sequence
  Cyclic GFR-binding peptide
SSLSILFFDKGVVTYLKVYP

SEQ ID NO: 72952 - protein, 33 aa, Artificial Sequence
  Cyclic GFR-binding peptide
  MOD_RES (32), (32): Xaa is C or S
PTKLSSLSVLFFDDMGVPTLKVYPEGMSVAEXG

SEQ ID NO: 72953 - protein, 26 aa, Artificial Sequence
  Cyclic GFR-binding peptide
  MOD_RES (1), (1): Xaa is C or S
XVPTKLSSLSVLFFDDMGVPTLKVYP

SEQ ID NO: 72954 - protein, 30 aa, Artificial Sequence
  Cyclic GFR-binding peptide
  MOD_RES (1), (1): Xaa is C or S
XVPQDLSSLSILFFVGRTPKVLKVYPMVVK

SEQ ID NO: 72955 - protein, 27 aa, Artificial Sequence
  Cyclic GFR-binding peptide
  MOD_RES (1), (1): Xaa is C or S
XVPTKLSSLSILFFDKGVVTYLKVYPG

SEQ ID NO: 72956 - protein, 35 aa, Artificial Sequence
  Cyclic GFR-binding peptide
  MOD_RES (32), (34): Xaa is C or S
HHSSLSVLFFEYVRKKPKLLKVYPRLEEHLEXAXA

SEQ ID NO: 72957 - protein, 32 aa, Artificial Sequence
  Cyclic GFR-binding peptide
  MOD_RES (5), (6): Xaa is C or S
SAAPXXVPQALSSLSILFFVGRKPKVLKVYPM

SEQ ID NO: 72958 - protein, 31 aa, Artificial Sequence
  Cyclic GFR-binding peptide
  MOD_RES (2), (3): Xaa is C or S
SXXVPARLSSLSILFFDAANNVVLKVYPDMV

SEQ ID NO: 72959 - protein, 32 aa, Artificial Sequence
  Cyclic GFR-binding peptide
  MOD_RES (31), (31): Xaa is C or S
PTELSSLSMLFFDEYDKVVLKVYPEMVVEGXG

SEQ ID NO: 72960 - protein, 29 aa, Artificial Sequence
  Cyclic GFR-binding peptide
  MOD_RES (1), (2): Xaa is C or S
XXVSQDLSSLSILFFIGKTPKILKVYPMI

SEQ ID NO: 72961 - protein, 32 aa, Artificial Sequence
  Cyclic GFR-binding peptide
  MOD_RES (30), (32): Xaa is C or S
SSLSVLFFEYVRKKPKLLKVYPRLEEHLEXAX

SEQ ID NO: 72962 - protein, 32 aa, Artificial Sequence
  Cyclic GFR-binding peptide
  MOD_RES (29), (31): Xaa is C or S
RLSSLSILFFDAANNVVLKVYPDMVVEAXGXR

SEQ ID NO: 72963 - protein, 28 aa, Artificial Sequence
  Cyclic GFR-binding peptide
  MOD_RES (1), (1): Xaa is C or S
XVPTEESSLSMLFFRIKPHQGQHLKVYP

SEQ ID NO: 72964 - protein, 26 aa, Artificial Sequence
  Cyclic GFR-binding peptide
PTRLSSLSILFFDSANNVVLKVYPDM

SEQ ID NO: 72965 - protein, 29 aa, Artificial Sequence
  Cyclic GFR-binding peptide
  MOD_RES (3), (4): Xaa is C or S
KPXXAPTQLSSLSVLFFDDSSNVILKVYP

SEQ ID NO: 72966 - protein, 29 aa, Artificial Sequence
  Cyclic GFR-binding peptide
  MOD_RES (1), (2): Xaa is C or S
XXVPTELSSLSMLFFDENEKVVLKVYPDM

SEQ ID NO: 72967 - protein, 26 aa, Artificial Sequence
  Cyclic GFR-binding peptide
HSSLSVLFFEYVRKKPKLLKVYPRLE

SEQ ID NO: 72968 - protein, 39 aa, Artificial Sequence; identical to SEQ ID NO: 24781
  Cyclic GFR-binding peptide
  MOD_RES (6), (7), (38): Xaa is C or S

SEQ ID NO: 72969 - protein, 31 aa, Artificial Sequence
  Cyclic GFR-binding peptide
  MOD_RES (28), (30): Xaa is C or S
KTSSLSMLFFDNGRVLLLKVYPMIVEEXGXL

SEQ ID NO: 72970 - protein, 34 aa, Artificial Sequence
  Cyclic GFR-binding peptide
  MOD_RES (4), (4): Xaa is C or S
SVKXQPSRVHHSSLSVLFFEYVRKKPKLLKVYPR

SEQ ID NO: 72971 - protein, 24 aa, Artificial Sequence
  Cyclic GFR-binding peptide
LSSLSVLFFDDMGVPTLKVYPEGM

SEQ ID NO: 72972 - protein, 28 aa, Artificial Sequence
  Cyclic GFR-binding peptide
  MOD_RES (27), (27): Xaa is C or S
SSLSVLFFDSSNNVILKVYPNMVVKAXG

SEQ ID NO: 72973 - protein, 30 aa, Artificial Sequence
  Cyclic GFR-binding peptide
  MOD_RES (1), (2): Xaa is C or S
XXVPTELSSLSMLFFDEYDKVVLKVYPEMV

SEQ ID NO: 72974 - protein, 36 aa, Artificial Sequence; identical to SEQ ID NO: 24782
  Cyclic GFR-binding peptide
  MOD_RES (3), (3): Xaa is C or S

SEQ ID NO: 72975 - protein, 26 aa, Artificial Sequence
  Cyclic GFR-binding peptide
PTKLSSLSVLFFDDSSNVILKVYPNM

SEQ ID NO: 72976 - protein, 32 aa, Artificial Sequence
  Cyclic GFR-binding peptide
  MOD_RES (1), (1): Xaa is C or S
XVPTKLSSLSVLFFDDMGVPTLKVYPEGMSVA

SEQ ID NO: 72977 - protein, 34 aa, Artificial Sequence; identical to SEQ ID NO: 24783
  Cyclic GFR-binding peptide
  MOD_RES (34), (34): Xaa is C or S

SEQ ID NO: 72978 - protein, 27 aa, Artificial Sequence
  Cyclic GFR-binding peptide
  MOD_RES (27), (27): Xaa is C or S
TSSLSMLFFDNGRVLLLKVYPMIVEEX

SEQ ID NO: 72979 - protein, 39 aa, Artificial Sequence; identical to SEQ ID NO: 24784
  Cyclic GFR-binding peptide
  MOD_RES (5), (6), (38): Xaa is C or S

SEQ ID NO: 72980 - protein, 31 aa, Artificial Sequence
  Cyclic GFR-binding peptide
  MOD_RES (5), (6): Xaa is C or S
VPSTXXAPVKTSSLSMLFFDNGRVLLLKVYP

SEQ ID NO: 72981 - protein, 42 aa, Artificial Sequence; identical to SEQ ID NO: 24786
  Cyclic GFR-binding peptide
  MOD_RES (6), (7), (39), (41): Xaa is C or S

SEQ ID NO: 72982 - protein, 33 aa, Artificial Sequence; identical to SEQ ID NO: 24787
  Cyclic GFR-binding peptide
  MOD_RES (1), (33): Xaa is C or S

SEQ ID NO: 72983 - protein, 26 aa, Artificial Sequence
  Cyclic GFR-binding peptide
TKLSSLSVLFFDDMGVPTLKVYPEGM

SEQ ID NO: 72984 - protein, 26 aa, Artificial Sequence
  Cyclic GFR-binding peptide
SSLSVLFFDDSSNVILKVYPNMVVRA

SEQ ID NO: 72985 - protein, 32 aa, Artificial Sequence; identical to SEQ ID NO: 24788
  Cyclic GFR-binding peptide
  MOD_RES (1), (2): Xaa is C or S

SEQ ID NO: 72986 - protein, 35 aa, Artificial Sequence
  Cyclic GFR-binding peptide
  MOD_RES (5), (6): Xaa is C or S
SAGPXXTPTKMSSLSMLFFNDKQQIILKVYPGMVV

SEQ ID NO: 72987 - protein, 31 aa, Artificial Sequence
  Cyclic GFR-binding peptide
  MOD_RES (5), (6): Xaa is C or S
VPKPXXAPTKLSSLSVLFFDDSSNVILKVYP

SEQ ID NO: 72988 - protein, 37 aa, Artificial Sequence; identical to SEQ ID NO: 24789
  Cyclic GFR-binding peptide
  MOD_RES (6), (7): Xaa is C or S

SEQ ID NO: 72989 - protein, 33 aa, Artificial Sequence
  Cyclic GFR-binding peptide
  MOD_RES (5), (6): Xaa is C or S
APASXXVPARLSSLSILFFDAANNVVLKVYPDM

SEQ ID NO: 72990 - protein, 38 aa, Artificial Sequence; identical to SEQ ID NO: 24790
  Cyclic GFR-binding peptide
  MOD_RES (5), (37): Xaa is C or S

SEQ ID NO: 72991 - protein, 31 aa, Artificial Sequence
  Cyclic GFR-binding peptide
  MOD_RES (28), (30): Xaa is C or S
SSLSVLFFDDMGVPTLKVYPEGMSVAEXGXR

SEQ ID NO: 72992 - protein, 30 aa, Artificial Sequence
  Cyclic GFR-binding peptide
  MOD_RES (1), (2): Xaa is C or S
XXVPARLSSLSILFFDAANNVVLKVYPDMV

SEQ ID NO: 72993 - protein, 40 aa, Artificial Sequence; identical to SEQ ID NO: 24791
  Cyclic GFR-binding peptide
  MOD_RES (4), (5), (37), (39): Xaa is C or S

SEQ ID NO: 72994 - protein, 29 aa, Artificial Sequence
  Cyclic GFR-binding peptide
VPTKLSSLSILFFDKGVVTYLKVYPGMAV

SEQ ID NO: 72995 - protein, 36 aa, Artificial Sequence; identical to SEQ ID NO: 24792
  Cyclic GFR-binding peptide
  MOD_RES (1), (2), (34), (36): Xaa is C or S

SEQ ID NO: 72996 - protein, 34 aa, Artificial Sequence
  Cyclic GFR-binding peptide
  MOD_RES (5), (5): Xaa is C or S
EGLEXVPTEESSLSMLFFRIKPHQGQHLKVYPFL

SEQ ID NO: 72997 - protein, 31 aa, Artificial Sequence
  Cyclic GFR-binding peptide
VHHSSLSVLFFEYVRKKPKLLKVYPRLEEHL

SEQ ID NO: 72998 - protein, 26 aa, Artificial Sequence
  Cyclic GFR-binding peptide
SSLSVLFFDDSSNVILKVYPNMVVRS

SEQ ID NO: 72999 - protein, 26 aa, Artificial Sequence
  Cyclic GFR-binding peptide
APTKLSSLSVLFFDSSNNVILKVYPN

SEQ ID NO: 73000 - protein, 31 aa, Artificial Sequence
  Cyclic GFR-binding peptide
  MOD_RES (3), (4): Xaa is C or S
SPXXVPQDLSSLSILFFVGRTPKVLKVYPMV

SEQ ID NO: 73001 - protein, 31 aa, Artificial Sequence
  Cyclic GFR-binding peptide
  MOD_RES (5), (6): Xaa is C or S
SASPXXVPQDLSSLSILFFVGRTPKVLKVYP

SEQ ID NO: 73002 - protein, 39 aa, Artificial Sequence; identical to SEQ ID NO: 24798
  Cyclic GFR-binding peptide
  MOD_RES (5), (6), (38): Xaa is C or S

SEQ ID NO: 73003 - protein, 38 aa, Artificial Sequence; identical to SEQ ID NO: 24799
  Cyclic GFR-binding peptide
  MOD_RES (4), (4): Xaa is C or S

SEQ ID NO: 73004 - protein, 31 aa, Artificial Sequence; identical to SEQ ID NO: 24802
  Cyclic GFR-binding peptide

SEQ ID NO: 73005 - protein, 30 aa, Artificial Sequence
  Cyclic GFR-binding peptide
  MOD_RES (4), (5): Xaa is C or S
PSTXXAPVKTSSLSMLFFDNGRVLLLKVYP

SEQ ID NO: 73006 - protein, 32 aa, Artificial Sequence
  Cyclic GFR-binding peptide
  MOD_RES (32), (32): Xaa is C or S
TEESSLSMLFFRIKPHQGQHLKVYPFLQHNKX

SEQ ID NO: 73007 - protein, 35 aa, Artificial Sequence; identical to SEQ ID NO: 24803
  Cyclic GFR-binding peptide
  MOD_RES (33), (35): Xaa is C or S

SEQ ID NO: 73008 - protein, 35 aa, Artificial Sequence; identical to SEQ ID NO: 24805
  Cyclic GFR-binding peptide
  MOD_RES (1), (33), (35): Xaa is C or S

SEQ ID NO: 73009 - protein, 35 aa, Artificial Sequence
  Cyclic GFR-binding peptide
  MOD_RES (5), (6): Xaa is C or S
TPPTXXVPTRLSSLSILFFDSANNVVLKVYPDMVV

SEQ ID NO: 73010 - protein, 29 aa, Artificial Sequence
  Cyclic GFR-binding peptide
  MOD_RES (28), (28): Xaa is C or S
LSSLSILFFDKGVVTYLKVYPGMAVSEXG

SEQ ID NO: 73011 - protein, 41 aa, Artificial Sequence; identical to SEQ ID NO: 24806
  Cyclic GFR-binding peptide
  MOD_RES (6), (7), (38), (40): Xaa is C or S

SEQ ID NO: 73012 - protein, 32 aa, Artificial Sequence
  Cyclic GFR-binding peptide
  MOD_RES (30), (32): Xaa is C or S
TELSSLSMLFFDENEKVVLKVYPDMVVEGXGX

SEQ ID NO: 73013 - protein, 31 aa, Artificial Sequence; identical to SEQ ID NO: 24809
  Cyclic GFR-binding peptide
  MOD_RES (31), (31): Xaa is C or S

SEQ ID NO: 73014 - protein, 30 aa, Artificial Sequence
  Cyclic GFR-binding peptide
  MOD_RES (1), (1): Xaa is C or S
XAPTKLSSLSVLFFDDSSNVILKVYPNMVV

SEQ ID NO: 73015 - protein, 29 aa, Artificial Sequence
  Cyclic GFR-binding peptide
  MOD_RES (1), (1): Xaa is C or S
XVPTKLSSLSVLFFDDMGVPTLKVYPEGM

SEQ ID NO: 73016 - protein, 24 aa, Artificial Sequence
  Cyclic GFR-binding peptide
SSLSILFFIGKTPKILKVYPMIVK

SEQ ID NO: 73017 - protein, 38 aa, Artificial Sequence; identical to SEQ ID NO: 24810
  Cyclic GFR-binding peptide
  MOD_RES (6), (7): Xaa is C or S

SEQ ID NO: 73018 - protein, 32 aa, Artificial Sequence
  Cyclic GFR-binding peptide
  MOD_RES (4), (5): Xaa is C or S
PPTXXVPTRLSSLSILFFDSANNVVLKVYPDM

SEQ ID NO: 73019 - protein, 31 aa, Artificial Sequence
  Cyclic GFR-binding peptide
  MOD_RES (29), (31): Xaa is C or S
RLSSLSILFFDSANNVVLKVYPDMVVESXGX

SEQ ID NO: 73020 - protein, 30 aa, Artificial Sequence
  Cyclic GFR-binding peptide
  MOD_RES (4), (5): Xaa is C or S
PKAXXVPTELSSLSMLFFDEYDKVVLKVYP

SEQ ID NO: 73021 - protein, 31 aa, Artificial Sequence
  Cyclic GFR-binding peptide
  MOD_RES (4), (5): Xaa is C or S
PASXXVPARLSSLSILFFDAANNVVLKVYPD

SEQ ID NO: 73022 - protein, 31 aa, Artificial Sequence
  Cyclic GFR-binding peptide
  MOD_RES (30), (30): Xaa is C or S
TKLSSLSILFFDKGVVTYLKVYPGMAVSEXG

SEQ ID NO: 73023 - protein, 29 aa, Artificial Sequence
  Cyclic GFR-binding peptide
  MOD_RES (1), (1): Xaa is C or S
XVPTKLSSLSILFFDKGVVTYLKVYPGMA

SEQ ID NO: 73024 - protein, 33 aa, Artificial Sequence; identical to SEQ ID NO: 24813
  Cyclic GFR-binding peptide
  MOD_RES (1), (33): Xaa is C or S

SEQ ID NO: 73025 - protein, 33 aa, Artificial Sequence
  Cyclic GFR-binding peptide
  MOD_RES (4), (5): Xaa is C or S
PKAXXVPTELSSLSMLFFDENEKVVLKVYPDMV

SEQ ID NO: 73026 - protein, 31 aa, Artificial Sequence
  Cyclic GFR-binding peptide
  MOD_RES (29), (31): Xaa is C or S
LSSLSVLFFDDMGVPTLKVYPEGMSVAEXGX

SEQ ID NO: 73027 - protein, 33 aa, Artificial Sequence; identical to SEQ ID NO: 24816
  Cyclic GFR-binding peptide
  MOD_RES (2), (3): Xaa is C or S

SEQ ID NO: 73028 - protein, 37 aa, Artificial Sequence; identical to SEQ ID NO: 24817
  Cyclic GFR-binding peptide
  MOD_RES (3), (4), (37): Xaa is C or S

SEQ ID NO: 73029 - protein, 32 aa, Artificial Sequence; identical to SEQ ID NO: 24819
  Cyclic GFR-binding peptide
  MOD_RES (1), (32): Xaa is C or S

SEQ ID NO: 73030 - protein, 28 aa, Artificial Sequence
  Cyclic GFR-binding peptide
  MOD_RES (1), (2): Xaa is C or S
XXVPARLSSLSILFFDAANNVVLKVYPD

SEQ ID NO: 73031 - protein, 31 aa, Artificial Sequence
  Cyclic GFR-binding peptide
TEESSLSMLFFRIKPHQGQHLKVYPFLQHNK

SEQ ID NO: 73032 - protein, 33 aa, Artificial Sequence
  Cyclic GFR-binding peptide
  MOD_RES (3), (4): Xaa is C or S
KPXXAPTKLSSLSVLFFDDSSNVILKVYPNMVV

SEQ ID NO: 73033 - protein, 34 aa, Artificial Sequence; identical to SEQ ID NO: 24821
  Cyclic GFR-binding peptide
  MOD_RES (1), (2): Xaa is C or S

SEQ ID NO: 73034 - protein, 28 aa, Artificial Sequence
  Cyclic GFR-binding peptide
  MOD_RES (26), (28): Xaa is C or S
SSLSILFFIGKTPKILKVYPMIVKSXKX

SEQ ID NO: 73035 - protein, 25 aa, Artificial Sequence
  Cyclic GFR-binding peptide
PTKLSSLSVLFFDSSNNVILKVYPN

SEQ ID NO: 73036 - protein, 29 aa, Artificial Sequence
  Cyclic GFR-binding peptide
PTELSSLSMLFFDEYDKVVLKVYPEMVVE

SEQ ID NO: 73037 - protein, 32 aa, Artificial Sequence
  Cyclic GFR-binding peptide
  MOD_RES (3), (4): Xaa is C or S
SPXXVSQDLSSLSILFFIGKTPKILKVYPMIV

SEQ ID NO: 73038 - protein, 32 aa, Artificial Sequence; identical to SEQ ID NO: 24825
  Cyclic GFR-binding peptide

SEQ ID NO: 73039 - protein, 31 aa, Artificial Sequence
  Cyclic GFR-binding peptide
  MOD_RES (5), (6): Xaa is C or S
SAGPXXTPTKMSSLSMLFFNDKQQIILKVYP

SEQ ID NO: 73040 - protein, 26 aa, Artificial Sequence
  Cyclic GFR-binding peptide
PTEESSLSMLFFRIKPHQGQHLKVYP

SEQ ID NO: 73041 - protein, 33 aa, Artificial Sequence
  Cyclic GFR-binding peptide
  MOD_RES (4), (5): Xaa is C or S
ASPXXVPQDLSSLSILFFVGRTPKVLKVYPMVV

SEQ ID NO: 73042 - protein, 20 aa, Artificial Sequence
  Cyclic GFR-binding peptide
SSLSVLFFDDSSNVILKVYP

SEQ ID NO: 73043 - protein, 34 aa, Artificial Sequence; identical to SEQ ID NO: 24827
  Cyclic GFR-binding peptide
  MOD_RES (2), (3): Xaa is C or S

SEQ ID NO: 73044 - protein, 37 aa, Artificial Sequence; identical to SEQ ID NO: 24828
  Cyclic GFR-binding peptide
  MOD_RES (6), (6): Xaa is C or S

SEQ ID NO: 73045 - protein, 25 aa, Artificial Sequence
  Cyclic GFR-binding peptide
SSLSILFFDAANNVVLKVYPDMVVE

SEQ ID NO: 73046 - protein, 35 aa, Artificial Sequence; identical to SEQ ID NO: 24829
  Cyclic GFR-binding peptide
  MOD_RES (3), (4), (35): Xaa is C or S

SEQ ID NO: 73047 - protein, 30 aa, Artificial Sequence
  Cyclic GFR-binding peptide
  MOD_RES (4), (5): Xaa is C or S
PPTXXVPTRLSSLSILFFDSANNVVLKVYP

SEQ ID NO: 73048 - protein, 29 aa, Artificial Sequence
  Cyclic GFR-binding peptide
PTQLSSLSVLFFDDSSNVILKVYPNMVVR

SEQ ID NO: 73049 - protein, 23 aa, Artificial Sequence
  Cyclic GFR-binding peptide
LSSLSVLFFDDMGVPTLKVYPEG

SEQ ID NO: 73050 - protein, 25 aa, Artificial Sequence
  Cyclic GFR-binding peptide
HSSLSVLFFEYVRKKPKLLKVYPRL

SEQ ID NO: 73051 - protein, 23 aa, Artificial Sequence
  Cyclic GFR-binding peptide
ESSLSMLFFRIKPHQGQHLKVYP

SEQ ID NO: 73052 - protein, 30 aa, Artificial Sequence
  Cyclic GFR-binding peptide
  MOD_RES (4), (5): Xaa is C or S
AAPXXVPQALSSLSILFFVGRKPKVLKVYP

SEQ ID NO: 73053 - protein, 27 aa, Artificial Sequence
  Cyclic GFR-binding peptide
SSLSVLFFDDMGVPTLKVYPEGMSVAE

SEQ ID NO: 73054 - protein, 26 aa, Artificial Sequence
  Cyclic GFR-binding peptide
  MOD_RES (1), (1): Xaa is C or S
XAPTQLSSLSVLFFDDSSNVILKVYP

SEQ ID NO: 73055 - protein, 27 aa, Artificial Sequence
  Cyclic GFR-binding peptide
  MOD_RES (1), (2): Xaa is C or S
XXVPTELSSLSMLFFDEYDKVVLKVYP

SEQ ID NO: 73056 - protein, 29 aa, Artificial Sequence
  Cyclic GFR-binding peptide
  MOD_RES (3), (4): Xaa is C or S
STXXAPVKTSSLSMLFFDNGRVLLLKVYP

SEQ ID NO: 73057 - protein, 41 aa, Artificial Sequence; identical to SEQ ID NO: 24835
  Cyclic GFR-binding peptide
  MOD_RES (6), (38), (40): Xaa is C or S

SEQ ID NO: 73058 - protein, 24 aa, Artificial Sequence
  Cyclic GFR-binding peptide
LSSLSMLFFDENEKVVLKVYPDMV

SEQ ID NO: 73059 - protein, 30 aa, Artificial Sequence
  Cyclic GFR-binding peptide
  MOD_RES (1), (1): Xaa is C or S
XVPTRLSSLSILFFDSANNVVLKVYPDMVV

SEQ ID NO: 73060 - protein, 32 aa, Artificial Sequence; identical to SEQ ID NO: 24836
  Cyclic GFR-binding peptide
  MOD_RES (1), (2): Xaa is C or S

SEQ ID NO: 73061 - protein, 27 aa, Artificial Sequence
  Cyclic GFR-binding peptide
KLSSLSVLFFDSSNNVILKVYPNMVVK

SEQ ID NO: 73062 - protein, 29 aa, Artificial Sequence
  Cyclic GFR-binding peptide
PTKMSSLSMLFFNDKQQIILKVYPGMVVD

SEQ ID NO: 73063 - protein, 26 aa, Artificial Sequence
  Cyclic GFR-binding peptide
SSLSMLFFDENEKVVLKVYPDMVVEG

SEQ ID NO: 73064 - protein, 31 aa, Artificial Sequence
  Cyclic GFR-binding peptide
QPSRVHHSSLSVLFFEYVRKKPKLLKVYPRL

SEQ ID NO: 73065 - protein, 26 aa, Artificial Sequence
  Cyclic GFR-binding peptide
PTELSSLSMLFFDEYDKVVLKVYPEM

SEQ ID NO: 73066 - protein, 30 aa, Artificial Sequence
  Cyclic GFR-binding peptide
  MOD_RES (3), (4): Xaa is C or S
KAXXAPTKLSSLSVLFFDSSNNVILKVYPN

SEQ ID NO: 73067 - protein, 39 aa, Artificial Sequence; identical to SEQ ID NO: 24845
  Cyclic GFR-binding peptide
  MOD_RES (2), (39): Xaa is C or S

SEQ ID NO: 73068 - protein, 22 aa, Artificial Sequence
  Cyclic GFR-binding peptide
LSSLSVLFFDDMGVPTLKVYPE

SEQ ID NO: 73069 - protein, 39 aa, Artificial Sequence; identical to SEQ ID NO: 24846
  Cyclic GFR-binding peptide
  MOD_RES (6), (7), (39): Xaa is C or S

SEQ ID NO: 73070 - protein, 34 aa, Artificial Sequence; identical to SEQ ID NO: 24847
  Cyclic GFR-binding peptide
  MOD_RES (1), (2), (33): Xaa is C or S

SEQ ID NO: 73071 - protein, 29 aa, Artificial Sequence
  Cyclic GFR-binding peptide
PSRVHHSSLSVLFFEYVRKKPKLLKVYPR

SEQ ID NO: 73072 - protein, 36 aa, Artificial Sequence
  Cyclic GFR-binding peptide
  MOD_RES (3), (3): Xaa is C or S
VKXQPSRVHHSSLSVLFFEYVRKKPKLLKVYPRLEE

SEQ ID NO: 73073 - protein, 32 aa, Artificial Sequence
  Cyclic GFR-binding peptide
  MOD_RES (29), (31): Xaa is C or S
RLSSLSILFFDSANNVVLKVYPDMVVESXGXR

SEQ ID NO: 73074 - protein, 28 aa, Artificial Sequence
  Cyclic GFR-binding peptide
PQDLSSLSILFFVGRTPKVLKVYPMVVK

SEQ ID NO: 73075 - protein, 30 aa, Artificial Sequence
  Cyclic GFR-binding peptide
  MOD_RES (30), (30): Xaa is C or S
KLSSLSVLFFDDMGVPTLKVYPEGMSVAEX

SEQ ID NO: 73076 - protein, 32 aa, Artificial Sequence
  Cyclic GFR-binding peptide
  MOD_RES (6), (7): Xaa is C or S
ASASPXXVPQDLSSLSILFFVGRTPKVLKVYP

SEQ ID NO: 73077 - protein, 36 aa, Artificial Sequence
  Cyclic GFR-binding peptide
  MOD_RES (33), (35): Xaa is C or S
PTEESSLSMLFFRIKPHQGQHLKVYPFLQHNKXEXR

SEQ ID NO: 73078 - protein, 32 aa, Artificial Sequence
  Cyclic GFR-binding peptide
  MOD_RES (4), (5): Xaa is C or S
PKPXXAPTKLSSLSVLFFDDSSNVILKVYPNM

SEQ ID NO: 73079 - protein, 32 aa, Artificial Sequence
  Cyclic GFR-binding peptide
  MOD_RES (32), (32): Xaa is C or S
VPTELSSLSMLFFDENEKVVLKVYPDMVVEGX

SEQ ID NO: 73080 - protein, 33 aa, Artificial Sequence
  Cyclic GFR-binding peptide
  MOD_RES (6), (7): Xaa is C or S
AVPKAXXAPTKLSSLSVLFFDSSNNVILKVYPN

SEQ ID NO: 73081 - protein, 32 aa, Artificial Sequence
  Cyclic GFR-binding peptide
  MOD_RES (3), (3): Xaa is C or S
LEXVPTEESSLSMLFFRIKPHQGQHLKVYPFL

SEQ ID NO: 73082 - protein, 27 aa, Artificial Sequence
  Cyclic GFR-binding peptide
QALSSLSILFFVGRKPKVLKVYPMIVR

SEQ ID NO: 73083 - protein, 31 aa, Artificial Sequence; identical to SEQ ID NO: 24851
  Cyclic GFR-binding peptide
  MOD_RES (1), (1): Xaa is C or S

SEQ ID NO: 73084 - protein, 35 aa, Artificial Sequence; identical to SEQ ID NO: 24854
  Cyclic GFR-binding peptide
  MOD_RES (1), (2), (33), (35): Xaa is C or S

SEQ ID NO: 73085 - protein, 29 aa, Artificial Sequence
  Cyclic GFR-binding peptide
  MOD_RES (1), (2): Xaa is C or S
XXVPTRLSSLSILFFDSANNVVLKVYPDM

SEQ ID NO: 73086 - protein, 24 aa, Artificial Sequence
  Cyclic GFR-binding peptide
QDLSSLSILFFVGRTPKVLKVYPM

SEQ ID NO: 73087 - protein, 36 aa, Artificial Sequence; identical to SEQ ID NO: 24856
  Cyclic GFR-binding peptide
  MOD_RES (1), (33), (35): Xaa is C or S

SEQ ID NO: 73088 - protein, 33 aa, Artificial Sequence; identical to SEQ ID NO: 24857
  Cyclic GFR-binding peptide
  MOD_RES (1), (2): Xaa is C or S

SEQ ID NO: 73089 - protein, 34 aa, Artificial Sequence
  Cyclic GFR-binding peptide
  MOD_RES (6), (7): Xaa is C or S
HVPKPXXAPTKLSSLSVLFFDDSSNVILKVYPNM

SEQ ID NO: 73090 - protein, 31 aa, Artificial Sequence
  Cyclic GFR-binding peptide
  MOD_RES (3), (4): Xaa is C or S
ASXXVPARLSSLSILFFDAANNVVLKVYPDM

SEQ ID NO: 73091 - protein, 30 aa, Artificial Sequence
  Cyclic GFR-binding peptide
  MOD_RES (1), (1): Xaa is C or S
XQPSRVHHSSLSVLFFEYVRKKPKLLKVYP

SEQ ID NO: 73092 - protein, 21 aa, Artificial Sequence
  Cyclic GFR-binding peptide
LSSLSMLFFDENEKVVLKVYP

SEQ ID NO: 73093 - protein, 23 aa, Artificial Sequence
  Cyclic GFR-binding peptide
LSSLSMLFFDEYDKVVLKVYPEM

SEQ ID NO: 73094 - protein, 28 aa, Artificial Sequence
  Cyclic GFR-binding peptide
  MOD_RES (1), (2): Xaa is C or S
XXVPTKLSSLSILFFDKGVVTYLKVYPG

SEQ ID NO: 73095 - protein, 29 aa, Artificial Sequence
  Cyclic GFR-binding peptide
SSLSILFFDSANNVVLKVYPAAAAAAAAA

SEQ ID NO: 73096 - protein, 21 aa, Artificial Sequence
  Cyclic GFR-binding peptide
SSLSILFFDAANNVVLKVYPD

SEQ ID NO: 73097 - protein, 23 aa, Artificial Sequence
  Cyclic GFR-binding peptide
LSSLSILFFVGRKPKVLKVYPMI

SEQ ID NO: 73098 - protein, 38 aa, Artificial Sequence; identical to SEQ ID NO: 24863
  Cyclic GFR-binding peptide
  MOD_RES (3), (4), (35), (37): Xaa is C or S

SEQ ID NO: 73099 - protein, 23 aa, Artificial Sequence
  Cyclic GFR-binding peptide
SSLSILFFDSANNVVLKVYPDMV

SEQ ID NO: 73100 - protein, 35 aa, Artificial Sequence; identical to SEQ ID NO: 24864
  Cyclic GFR-binding peptide
  MOD_RES (1), (33), (35): Xaa is C or S

SEQ ID NO: 73101 - protein, 34 aa, Artificial Sequence
  Cyclic GFR-binding peptide
  MOD_RES (6), (7): Xaa is C or S
GSAGPXXTPTKMSSLSMLFFNDKQQIILKVYPGM

SEQ ID NO: 73102 - protein, 24 aa, Artificial Sequence
  Cyclic GFR-binding peptide
PTKLSSLSVLFFDSSNNVILKVYP

SEQ ID NO: 73103 - protein, 38 aa, Artificial Sequence; identical to SEQ ID NO: 24869
  Cyclic GFR-binding peptide
  MOD_RES (4), (5), (37): Xaa is C or S

SEQ ID NO: 73104 - protein, 24 aa, Artificial Sequence
  Cyclic GFR-binding peptide
PTKLSSLSVLFFDDMGVPTLKVYP

SEQ ID NO: 73105 - protein, 29 aa, Artificial Sequence
  Cyclic GFR-binding peptide
  MOD_RES (27), (29): Xaa is C or S
SSLSVLFFDSSNNVILKVYPNMVVKAXGX

SEQ ID NO: 73106 - protein, 33 aa, Artificial Sequence
  Cyclic GFR-binding peptide
  MOD_RES (3), (4): Xaa is C or S
STXXAPVKTSSLSMLFFDNGRVLLLKVYPMIVE

SEQ ID NO: 73107 - protein, 26 aa, Artificial Sequence
  Cyclic GFR-binding peptide
VHHSSLSVLFFEYVRKKPKLLKVYPR

SEQ ID NO: 73108 - protein, 33 aa, Artificial Sequence
  Cyclic GFR-binding peptide
  MOD_RES (5), (6): Xaa is C or S
ASKAXXVPTKLSSLSILFFDKGVVTYLKVYPGM

SEQ ID NO: 73109 - protein, 33 aa, Artificial Sequence
  Cyclic GFR-binding peptide
  MOD_RES (31), (33): Xaa is C or S
PTQLSSLSVLFFDDSSNVILKVYPNMVVRAXGX

SEQ ID NO: 73110 - protein, 38 aa, Artificial Sequence; identical to SEQ ID NO: 24875
  Cyclic GFR-binding peptide
  MOD_RES (2), (3), (35), (37): Xaa is C or S

SEQ ID NO: 73111 - protein, 33 aa, Artificial Sequence
  Cyclic GFR-binding peptide
  MOD_RES (5), (5): Xaa is C or S
EGLEXVPTEESSLSMLFFRIKPHQGQHLKVYPF

SEQ ID NO: 73112 - protein, 29 aa, Artificial Sequence
  Cyclic GFR-binding peptide
VPTRLSSLSILFFDSANNVVLKVYPDMVV

SEQ ID NO: 73113 - protein, 33 aa, Artificial Sequence
  Cyclic GFR-binding peptide
  MOD_RES (4), (4): Xaa is C or S
SVKXQPSRVHHSSLSVLFFEYVRKKPKLLKVYP

SEQ ID NO: 73114 - protein, 36 aa, Artificial Sequence; identical to SEQ ID NO: 24876
  Cyclic GFR-binding peptide
  MOD_RES (5), (6): Xaa is C or S

SEQ ID NO: 73115 - protein, 26 aa, Artificial Sequence
  Cyclic GFR-binding peptide
  MOD_RES (1), (1): Xaa is C or S
XVPTKLSSLSILFFDKGVVTYLKVYP

SEQ ID NO: 73116 - protein, 31 aa, Artificial Sequence
  Cyclic GFR-binding peptide
  MOD_RES (4), (5): Xaa is C or S
ASPXXVSQDLSSLSILFFIGKTPKILKVYPM

SEQ ID NO: 73117 - protein, 28 aa, Artificial Sequence
  Cyclic GFR-binding peptide
  MOD_RES (27), (27): Xaa is C or S
LSSLSILFFVGRKPKVLKVYPMIVRSXK

SEQ ID NO: 73118 - protein, 25 aa, Artificial Sequence
  Cyclic GFR-binding peptide
SSLSVLFFDDMGVPTLKVYPEGMSV

SEQ ID NO: 73119 - protein, 34 aa, Artificial Sequence; identical to SEQ ID NO: 24883
  Cyclic GFR-binding peptide
  MOD_RES (1), (33): Xaa is C or S

SEQ ID NO: 73120 - protein, 24 aa, Artificial Sequence
  Cyclic GFR-binding peptide
PTKLSSLSVLFFDDSSNVILKVYP

SEQ ID NO: 73121 - protein, 31 aa, Artificial Sequence
  Cyclic GFR-binding peptide
  MOD_RES (28), (30): Xaa is C or S
ALSSLSILFFVGRKPKVLKVYPMIVRSXKXS

SEQ ID NO: 73122 - protein, 38 aa, Artificial Sequence
  Cyclic GFR-binding peptide
  MOD_RES (3), (4), (36), (38): Xaa is C or S
KAXXVPTELSSLSMLFFDENEKVVLKVYPDMVVEGXGX

SEQ ID NO: 73123 - protein, 29 aa, Artificial Sequence
  Cyclic GFR-binding peptide
  MOD_RES (2), (3): Xaa is C or S
AXXVPTELSSLSMLFFDENEKVVLKVYPD

SEQ ID NO: 73124 - protein, 38 aa, Artificial Sequence; identical to SEQ ID NO: 24885
  Cyclic GFR-binding peptide
  MOD_RES (1), (38): Xaa is C or S

SEQ ID NO: 73125 - protein, 22 aa, Artificial Sequence
  Cyclic GFR-binding peptide
SSLSMLFFNDKQQIILKVYPGM

SEQ ID NO: 73126 - protein, 35 aa, Artificial Sequence
  Cyclic GFR-binding peptide
  MOD_RES (5), (6): Xaa is C or S
SASPXXVPQDLSSLSILFFVGRTPKVLKVYPMVVK

SEQ ID NO: 73127 - protein, 26 aa, Artificial Sequence
  Cyclic GFR-binding peptide
SSLSMLFFDEYDKVVLKVYPEMVVEG

SEQ ID NO: 73128 - protein, 31 aa, Artificial Sequence
  Cyclic GFR-binding peptide
  MOD_RES (30), (30): Xaa is C or S
ARLSSLSILFFDAANNVVLKVYPDMVVEAXG

SEQ ID NO: 73129 - protein, 43 aa, Artificial Sequence; identical to SEQ ID NO: 24886
  Cyclic GFR-binding peptide
  MOD_RES (7), (41), (43): Xaa is C or S

SEQ ID NO: 73130 - protein, 29 aa, Artificial Sequence
  Cyclic GFR-binding peptide
RVHHSSLSVLFFEYVRKKPKLLKVYPRLE

SEQ ID NO: 73131 - protein, 32 aa, Artificial Sequence
  Cyclic GFR-binding peptide
  MOD_RES (4), (5): Xaa is C or S
PASXXVPARLSSLSILFFDAANNVVLKVYPDM

SEQ ID NO: 73132 - protein, 25 aa, Artificial Sequence
  Cyclic GFR-binding peptide
PTELSSLSMLFFDENEKVVLKVYPD

SEQ ID NO: 73133 - protein, 28 aa, Artificial Sequence
  Cyclic GFR-binding peptide
  MOD_RES (1), (2): Xaa is C or S
XXAPTKLSSLSVLFFDSSNNVILKVYPN

SEQ ID NO: 73134 - protein, 40 aa, Artificial Sequence; identical to SEQ ID NO: 24887
  Cyclic GFR-binding peptide
  MOD_RES (5), (6), (39): Xaa is C or S

SEQ ID NO: 73135 - protein, 30 aa, Artificial Sequence
  Cyclic GFR-binding peptide
  MOD_RES (30), (30): Xaa is C or S
TKMSSLSMLFFNDKQQIILKVYPGMVVDRX

SEQ ID NO: 73136 - protein, 23 aa, Artificial Sequence
  Cyclic GFR-binding peptide
SSLSVLFFDSSNNVILKVYPNMV

SEQ ID NO: 73137 - protein, 30 aa, Artificial Sequence
  Cyclic GFR-binding peptide
  MOD_RES (2), (3): Xaa is C or S
PXXVSQDLSSLSILFFIGKTPKILKVYPMI

SEQ ID NO: 73138 - protein, 41 aa, Artificial Sequence; identical to SEQ ID NO: 24892
  Cyclic GFR-binding peptide
  MOD_RES (5), (6), (38), (40): Xaa is C or S

SEQ ID NO: 73139 - protein, 36 aa, Artificial Sequence
  Cyclic GFR-binding peptide
  MOD_RES (5), (5): Xaa is C or S
SSVKXQPSRVHHSSLSVLFFEYVRKKPKLLKVYPRL

SEQ ID NO: 73140 - protein, 40 aa, Artificial Sequence; identical to SEQ ID NO: 24893
  Cyclic GFR-binding peptide
  MOD_RES (5), (5): Xaa is C or S

SEQ ID NO: 73141 - protein, 37 aa, Artificial Sequence; identical to SEQ ID NO: 24895
  Cyclic GFR-binding peptide
  MOD_RES (1), (1): Xaa is C or S

SEQ ID NO: 73142 - protein, 37 aa, Artificial Sequence; identical to SEQ ID NO: 24896
  Cyclic GFR-binding peptide
  MOD_RES (3), (4), (35), (37): Xaa is C or S

SEQ ID NO: 73143 - protein, 34 aa, Artificial Sequence
  Cyclic GFR-binding peptide
  MOD_RES (1), (33): Xaa is C or S
XVPTELSSLSMLFFDENEKVVLKVYPDMVVEGXG

SEQ ID NO: 73144 - protein, 39 aa, Artificial Sequence; identical to SEQ ID NO: 24897
  Cyclic GFR-binding peptide
  MOD_RES (4), (36), (38): Xaa is C or S

SEQ ID NO: 73145 - protein, 39 aa, Artificial Sequence
  Cyclic GFR-binding peptide
  MOD_RES (4), (5), (37), (39): Xaa is C or S
PKAXXVPTELSSLSMLFFDENEKVVLKVYPDMVVEGXGX

SEQ ID NO: 73146 - protein, 34 aa, Artificial Sequence
  Cyclic GFR-binding peptide
  MOD_RES (31), (33): Xaa is C or S
PTELSSLSMLFFDEYDKVVLKVYPEMVVEGXGXR

SEQ ID NO: 73147 - protein, 25 aa, Artificial Sequence
  Cyclic GFR-binding peptide
LSSLSILFFVGRKPKVLKVYPMIVR

SEQ ID NO: 73148 - protein, 35 aa, Artificial Sequence; identical to SEQ ID NO: 24899
  Cyclic GFR-binding peptide
  MOD_RES (32), (34): Xaa is C or S

SEQ ID NO: 73149 - protein, 32 aa, Artificial Sequence; identical to SEQ ID NO: 24900
  Cyclic GFR-binding peptide
  MOD_RES (1), (2): Xaa is C or S

SEQ ID NO: 73150 - protein, 39 aa, Artificial Sequence; identical to SEQ ID NO: 24901
  Cyclic GFR-binding peptide
  MOD_RES (3), (4), (37), (39): Xaa is C or S

SEQ ID NO: 73151 - protein, 34 aa, Artificial Sequence
  Cyclic GFR-binding peptide
  MOD_RES (4), (5): Xaa is C or S
AGPXXTPTKMSSLSMLFFNDKQQIILKVYPGMVV

SEQ ID NO: 73152 - protein, 29 aa, Artificial Sequence
  Cyclic GFR-binding peptide
  MOD_RES (28), (28): Xaa is C or S
KTSSLSMLFFDNGRVLLLKVYPMIVEEXG

SEQ ID NO: 73153 - protein, 23 aa, Artificial Sequence
  Cyclic GFR-binding peptide
LSSLSILFFDSANNVVLKVYPDM

SEQ ID NO: 73154 - protein, 25 aa, Artificial Sequence
  Cyclic GFR-binding peptide
ELSSLSMLFFDEYDKVVLKVYPEMV

SEQ ID NO: 73155 - protein, 41 aa, Artificial Sequence; identical to SEQ ID NO: 24903
  Cyclic GFR-binding peptide
  MOD_RES (6), (7), (39), (41): Xaa is C or S

SEQ ID NO: 73156 - protein, 25 aa, Artificial Sequence
  Cyclic GFR-binding peptide
VPARLSSLSILFFDAANNVVLKVYP

SEQ ID NO: 73157 - protein, 32 aa, Artificial Sequence; identical to SEQ ID NO: 24905
  Cyclic GFR-binding peptide
  MOD_RES (32), (32): Xaa is C or S

SEQ ID NO: 73158 - protein, 33 aa, Artificial Sequence; identical to SEQ ID NO: 24906
  Cyclic GFR-binding peptide
  MOD_RES (1), (2), (33): Xaa is C or S

SEQ ID NO: 73159 - protein, 28 aa, Artificial Sequence
  Cyclic GFR-binding peptide
ELSSLSMLFFDENEKVVLKVYPDMVVEG

SEQ ID NO: 73160 - protein, 37 aa, Artificial Sequence; identical to SEQ ID NO: 24908
  Cyclic GFR-binding peptide
  MOD_RES (6), (7): Xaa is C or S

SEQ ID NO: 73161 - protein, 39 aa, Artificial Sequence; identical to SEQ ID NO: 24913
  Cyclic GFR-binding peptide
  MOD_RES (4), (5), (36), (38): Xaa is C or S

SEQ ID NO: 73162 - protein, 32 aa, Artificial Sequence
  Cyclic GFR-binding peptide
  MOD_RES (3), (4): Xaa is C or S
KAXXVPTELSSLSMLFFDENEKVVLKVYPDMV

SEQ ID NO: 73163 - protein, 22 aa, Artificial Sequence
  Cyclic GFR-binding peptide
LSSLSVLFFDDSSNVILKVYPN

SEQ ID NO: 73164 - protein, 29 aa, Artificial Sequence
  Cyclic GFR-binding peptide
SSLSMLFFDENEKVVLKVYPAAAAAAAAA

SEQ ID NO: 73165 - protein, 24 aa, Artificial Sequence
  Cyclic GFR-binding peptide
TRLSSLSILFFDSANNVVLKVYPD

SEQ ID NO: 73166 - protein, 26 aa, Artificial Sequence
  Cyclic GFR-binding peptide
  MOD_RES (26), (26): Xaa is C or S
SSLSMLFFDNGRVLLLKVYPMIVEEX

SEQ ID NO: 73167 - protein, 22 aa, Artificial Sequence
  Cyclic GFR-binding peptide
RLSSLSILFFDSANNVVLKVYP

SEQ ID NO: 73168 - protein, 30 aa, Artificial Sequence
  Cyclic GFR-binding peptide
  MOD_RES (27), (29): Xaa is C or S
LSSLSILFFVGRTPKVLKVYPMVVKSXKXS

SEQ ID NO: 73169 - protein, 30 aa, Artificial Sequence; identical to SEQ ID NO: 24915
  Cyclic GFR-binding peptide

SEQ ID NO: 73170 - protein, 34 aa, Artificial Sequence
  Cyclic GFR-binding peptide
  MOD_RES (4), (4): Xaa is C or S
GLEXVPTEESSLSMLFFRIKPHQGQHLKVYPFLQ

SEQ ID NO: 73171 - protein, 25 aa, Artificial Sequence
  Cyclic GFR-binding peptide
ARLSSLSILFFDAANNVVLKVYPDM

SEQ ID NO: 73172 - protein, 28 aa, Artificial Sequence
  Cyclic GFR-binding peptide
  MOD_RES (2), (3): Xaa is C or S
PXXAPTKLSSLSVLFFDDSSNVILKVYP

SEQ ID NO: 73173 - protein, 40 aa, Artificial Sequence; identical to SEQ ID NO: 24917
  Cyclic GFR-binding peptide
  MOD_RES (4), (5), (37), (39): Xaa is C or S

SEQ ID NO: 73174 - protein, 33 aa, Artificial Sequence; identical to SEQ ID NO: 24918
  Cyclic GFR-binding peptide
  MOD_RES (2), (3): Xaa is C or S

SEQ ID NO: 73175 - protein, 34 aa, Artificial Sequence
  Cyclic GFR-binding peptide
  MOD_RES (32), (34): Xaa is C or S
VPTELSSLSMLFFDENEKVVLKVYPDMVVEGXGX

SEQ ID NO: 73176 - protein, 30 aa, Artificial Sequence
  Cyclic GFR-binding peptide
  MOD_RES (3), (4): Xaa is C or S
SPXXVSQDLSSLSILFFIGKTPKILKVYPM

SEQ ID NO: 73177 - protein, 34 aa, Artificial Sequence; identical to SEQ ID NO: 24921
  Cyclic GFR-binding peptide
  MOD_RES (3), (4): Xaa is C or S

SEQ ID NO: 73178 - protein, 30 aa, Artificial Sequence
  Cyclic GFR-binding peptide
PTKLSSLSILFFDKGVVTYLKVYPGMAVSE

SEQ ID NO: 73179 - protein, 32 aa, Artificial Sequence
  Cyclic GFR-binding peptide
  MOD_RES (3), (4): Xaa is C or S
KPXXAPTKLSSLSVLFFDDSSNVILKVYPNMV

SEQ ID NO: 73180 - protein, 25 aa, Artificial Sequence
  Cyclic GFR-binding peptide
PTELSSLSMLFFDEYDKVVLKVYPE

SEQ ID NO: 73181 - protein, 27 aa, Artificial Sequence
  Cyclic GFR-binding peptide
  MOD_RES (1), (1): Xaa is C or S
XVPARLSSLSILFFDAANNVVLKVYPD

SEQ ID NO: 73182 - protein, 29 aa, Artificial Sequence
  Cyclic GFR-binding peptide
  MOD_RES (2), (3): Xaa is C or S
AXXVPTELSSLSMLFFDEYDKVVLKVYPE

SEQ ID NO: 73183 - protein, 21 aa, Artificial Sequence
  Cyclic GFR-binding peptide
SSLSILFFVGRTPKVLKVYPM

SEQ ID NO: 73184 - protein, 36 aa, Artificial Sequence; identical to SEQ ID NO: 24923
  Cyclic GFR-binding peptide
  MOD_RES (2), (3), (35): Xaa is C or S

SEQ ID NO: 73185 - protein, 31 aa, Artificial Sequence
  Cyclic GFR-binding peptide
  MOD_RES (2), (3): Xaa is C or S
AXXVPTELSSLSMLFFDENEKVVLKVYPDMV

SEQ ID NO: 73186 - protein, 21 aa, Artificial Sequence
  Cyclic GFR-binding peptide
LSSLSILFFDSANNVVLKVYP

SEQ ID NO: 73187 - protein, 37 aa, Artificial Sequence; identical to SEQ ID NO: 24925
  Cyclic GFR-binding peptide
  MOD_RES (1), (2), (34), (36): Xaa is C or S

SEQ ID NO: 73188 - protein, 28 aa, Artificial Sequence
  Cyclic GFR-binding peptide
  MOD_RES (2), (3): Xaa is C or S
AXXVPTKLSSLSVLFFDDMGVPTLKVYP

SEQ ID NO: 73189 - protein, 28 aa, Artificial Sequence
  Cyclic GFR-binding peptide
  MOD_RES (28), (28): Xaa is C or S
DLSSLSILFFIGKTPKILKVYPMIVKSX

SEQ ID NO: 73190 - protein, 21 aa, Artificial Sequence
  Cyclic GFR-binding peptide
LSSLSILFFIGKTPKILKVYP

SEQ ID NO: 73191 - protein, 40 aa, Artificial Sequence; identical to SEQ ID NO: 24926
  Cyclic GFR-binding peptide
  MOD_RES (6), (7), (39): Xaa is C or S

SEQ ID NO: 73192 - protein, 30 aa, Artificial Sequence
  Cyclic GFR-binding peptide
  MOD_RES (3), (4): Xaa is C or S
PTXXVPTRLSSLSILFFDSANNVVLKVYPD

SEQ ID NO: 73193 - protein, 28 aa, Artificial Sequence
  Cyclic GFR-binding peptide
  MOD_RES (2), (2): Xaa is C or S
TXAPTKLSSLSVLFFDDSSNVILKVYPN

SEQ ID NO: 73194 - protein, 33 aa, Artificial Sequence
  Cyclic GFR-binding peptide
  MOD_RES (4), (5): Xaa is C or S
PKPXXAPTKLSSLSVLFFDDSSNVILKVYPNMV

SEQ ID NO: 73195 - protein, 27 aa, Artificial Sequence
  Cyclic GFR-binding peptide
QDLSSLSILFFIGKTPKILKVYPMIVK

SEQ ID NO: 73196 - protein, 31 aa, Artificial Sequence
  Cyclic GFR-binding peptide
  MOD_RES (31), (31): Xaa is C or S
PARLSSLSILFFDAANNVVLKVYPDMVVEAX

SEQ ID NO: 73197 - protein, 28 aa, Artificial Sequence
  Cyclic GFR-binding peptide
KLSSLSILFFDKGVVTYLKVYPGMAVSE

SEQ ID NO: 73198 - protein, 26 aa, Artificial Sequence
  Cyclic GFR-binding peptide
  MOD_RES (1), (1): Xaa is C or S
XAPVKTSSLSMLFFDNGRVLLLKVYP

SEQ ID NO: 73199 - protein, 25 aa, Artificial Sequence
  Cyclic GFR-binding peptide
SSLSMLFFDNGRVLLLKVYPMIVEE

SEQ ID NO: 73200 - protein, 27 aa, Artificial Sequence
  Cyclic GFR-binding peptide
APTKLSSLSVLFFDDSSNVILKVYPNM

SEQ ID NO: 73201 - protein, 32 aa, Artificial Sequence
  Cyclic GFR-binding peptide
  MOD_RES (6), (7): Xaa is C or S
KIPKAXXVPTELSSLSMLFFDENEKVVLKVYP

SEQ ID NO: 73202 - protein, 32 aa, Artificial Sequence
  Cyclic GFR-binding peptide
  MOD_RES (30), (32): Xaa is C or S
TQLSSLSVLFFDDSSNVILKVYPNMVVRAXGX

SEQ ID NO: 73203 - protein, 33 aa, Artificial Sequence
  Cyclic GFR-binding peptide
  MOD_RES (4), (5): Xaa is C or S
AAPXXVPQALSSLSILFFVGRKPKVLKVYPMIV

SEQ ID NO: 73204 - protein, 30 aa, Artificial Sequence
  Cyclic GFR-binding peptide
PTELSSLSMLFFDENEKVVLKVYPDMVVEG

SEQ ID NO: 73205 - protein, 31 aa, Artificial Sequence
  Cyclic GFR-binding peptide
  MOD_RES (4), (5): Xaa is C or S
PKAXXVPTELSSLSMLFFDEYDKVVLKVYPE

SEQ ID NO: 73206 - protein, 38 aa, Artificial Sequence; identical to SEQ ID NO: 24932
  Cyclic GFR-binding peptide
  MOD_RES (5), (6), (38): Xaa is C or S

SEQ ID NO: 73207 - protein, 35 aa, Artificial Sequence
  Cyclic GFR-binding peptide
  MOD_RES (3), (4): Xaa is C or S
KAXXVPTKLSSLSVLFFDDMGVPTLKVYPEGMSVA

SEQ ID NO: 73208 - protein, 31 aa, Artificial Sequence
  Cyclic GFR-binding peptide
  MOD_RES (31), (31): Xaa is C or S
PTELSSLSMLFFDENEKVVLKVYPDMVVEGX

SEQ ID NO: 73209 - protein, 27 aa, Artificial Sequence
  Cyclic GFR-binding peptide
  MOD_RES (1), (1): Xaa is C or S
XAPTKLSSLSVLFFDSSNNVILKVYPN

SEQ ID NO: 73210 - protein, 35 aa, Artificial Sequence
  Cyclic GFR-binding peptide
  MOD_RES (6), (7): Xaa is C or S
HVPKPXXAPTKLSSLSVLFFDDSSNVILKVYPNMV

SEQ ID NO: 73211 - protein, 27 aa, Artificial Sequence
  Cyclic GFR-binding peptide
  MOD_RES (1), (2): Xaa is C or S
XXAPTQLSSLSVLFFDDSSNVILKVYP

SEQ ID NO: 73212 - protein, 34 aa, Artificial Sequence
  Cyclic GFR-binding peptide
  MOD_RES (6), (7): Xaa is C or S
SIPKAXXVPTELSSLSMLFFDEYDKVVLKVYPEM

SEQ ID NO: 73213 - protein, 31 aa, Artificial Sequence; identical to SEQ ID NO: 24936
  Cyclic GFR-binding peptide
  MOD_RES (1), (1): Xaa is C or S

SEQ ID NO: 73214 - protein, 24 aa, Artificial Sequence
  Cyclic GFR-binding peptide
TKLSSLSVLFFDSSNNVILKVYPN

SEQ ID NO: 73215 - protein, 41 aa, Artificial Sequence; identical to SEQ ID NO: 24938
  Cyclic GFR-binding peptide
  MOD_RES (6), (7), (39), (41): Xaa is C or S

SEQ ID NO: 73216 - protein, 32 aa, Artificial Sequence
  Cyclic GFR-binding peptide
  MOD_RES (31), (31): Xaa is C or S
EESSLSMLFFRIKPHQGQHLKVYPFLQHNKXE

SEQ ID NO: 73217 - protein, 35 aa, Artificial Sequence
  Cyclic GFR-binding peptide
  MOD_RES (34), (34): Xaa is C or S
RVHHSSLSVLFFEYVRKKPKLLKVYPRLEEHLEXA

SEQ ID NO: 73218 - protein, 30 aa, Artificial Sequence
  Cyclic GFR-binding peptide
  MOD_RES (3), (4): Xaa is C or S
ASXXVPARLSSLSILFFDAANNVVLKVYPD

SEQ ID NO: 73219 - protein, 22 aa, Artificial Sequence
  Cyclic GFR-binding peptide
DLSSLSILFFIGKTPKILKVYP

SEQ ID NO: 73220 - protein, 29 aa, Artificial Sequence
  Cyclic GFR-binding peptide
  MOD_RES (29), (29): Xaa is C or S
VKTSSLSMLFFDNGRVLLLKVYPMIVEEX

SEQ ID NO: 73221 - protein, 21 aa, Artificial Sequence
  Cyclic GFR-binding peptide
SSLSILFFVGRKPKVLKVYPM

SEQ ID NO: 73222 - protein, 31 aa, Artificial Sequence; identical to SEQ ID NO: 24940
  Cyclic GFR-binding peptide
  MOD_RES (1), (1): Xaa is C or S

SEQ ID NO: 73223 - protein, 29 aa, Artificial Sequence
  Cyclic GFR-binding peptide
  MOD_RES (29), (29): Xaa is C or S
SSLSMLFFRIKPHQGQHLKVYPFLQHNKX

SEQ ID NO: 73224 - protein, 32 aa, Artificial Sequence
  Cyclic GFR-binding peptide
  MOD_RES (2), (3): Xaa is C or S
AXXVPTELSSLSMLFFDENEKVVLKVYPDMVV

SEQ ID NO: 73225 - protein, 30 aa, Artificial Sequence
  Cyclic GFR-binding peptide
  MOD_RES (1), (1): Xaa is C or S
XVPTKLSSLSILFFDKGVVTYLKVYPGMAV

SEQ ID NO: 73226 - protein, 31 aa, Artificial Sequence
  Cyclic GFR-binding peptide
  MOD_RES (2), (3): Xaa is C or S
PXXAPTKLSSLSVLFFDDSSNVILKVYPNMV

SEQ ID NO: 73227 - protein, 39 aa, Artificial Sequence; identical to SEQ ID NO: 24943
  Cyclic GFR-binding peptide
  MOD_RES (5), (6), (38): Xaa is C or S

SEQ ID NO: 73228 - protein, 22 aa, Artificial Sequence
  Cyclic GFR-binding peptide
SSLSILFFVGRTPKVLKVYPMV

SEQ ID NO: 73229 - protein, 23 aa, Artificial Sequence
  Cyclic GFR-binding peptide
RLSSLSILFFDSANNVVLKVYPD

SEQ ID NO: 73230 - protein, 23 aa, Artificial Sequence
  Cyclic GFR-binding peptide
DLSSLSILFFVGRTPKVLKVYPM

SEQ ID NO: 73231 - protein, 22 aa, Artificial Sequence
  Cyclic GFR-binding peptide
SSLSILFFDKGVVTYLKVYPGM

SEQ ID NO: 73232 - protein, 39 aa, Artificial Sequence; identical to SEQ ID NO: 24944
  Cyclic GFR-binding peptide
  MOD_RES (4), (5), (37), (39): Xaa is C or S

SEQ ID NO: 73233 - protein, 26 aa, Artificial Sequence
  Cyclic GFR-binding peptide
KTSSLSMLFFDNGRVLLLKVYPMIVE

SEQ ID NO: 73234 - protein, 38 aa, Artificial Sequence; identical to SEQ ID NO: 24946
  Cyclic GFR-binding peptide
  MOD_RES (6), (7), (38): Xaa is C or S

SEQ ID NO: 73235 - protein, 30 aa, Artificial Sequence
  Cyclic GFR-binding peptide
HSSLSVLFFEYVRKKPKLLKVYPRLEEHLE

SEQ ID NO: 73236 - protein, 31 aa, Artificial Sequence
  Cyclic GFR-binding peptide
  MOD_RES (28), (30): Xaa is C or S
LSSLSILFFDKGVVTYLKVYPGMAVSEXGXR

SEQ ID NO: 73237 - protein, 30 aa, Artificial Sequence
  Cyclic GFR-binding peptide
  MOD_RES (28), (30): Xaa is C or S
DLSSLSILFFIGKTPKILKVYPMIVKSXKX

SEQ ID NO: 73238 - protein, 39 aa, Artificial Sequence; identical to SEQ ID NO: 24949
  Cyclic GFR-binding peptide
  MOD_RES (3), (3): Xaa is C or S

SEQ ID NO: 73239 - protein, 33 aa, Artificial Sequence
  Cyclic GFR-binding peptide
  MOD_RES (6), (7): Xaa is C or S
STPPTXXVPTRLSSLSILFFDSANNVVLKVYPD

SEQ ID NO: 73240 - protein, 38 aa, Artificial Sequence; identical to SEQ ID NO: 24951
  Cyclic GFR-binding peptide
  MOD_RES (7), (7): Xaa is C or S

SEQ ID NO: 73241 - protein, 35 aa, Artificial Sequence; identical to SEQ ID NO: 24952
  Cyclic GFR-binding peptide
  MOD_RES (2), (3), (35): Xaa is C or S

SEQ ID NO: 73242 - protein, 32 aa, Artificial Sequence
  Cyclic GFR-binding peptide
  MOD_RES (5), (6): Xaa is C or S
VPKAXXAPTKLSSLSVLFFDSSNNVILKVYPN

SEQ ID NO: 73243 - protein, 36 aa, Artificial Sequence
  Cyclic GFR-binding peptide
  MOD_RES (6), (7): Xaa is C or S
ASASPXXVSQDLSSLSILFFIGKTPKILKVYPMIVK

SEQ ID NO: 73244 - protein, 33 aa, Artificial Sequence
  Cyclic GFR-binding peptide
  MOD_RES (30), (32): Xaa is C or S
SSLSVLFFEYVRKKPKLLKVYPRLEEHLEXAXA

SEQ ID NO: 73245 - protein, 31 aa, Artificial Sequence
  Cyclic GFR-binding peptide
  MOD_RES (31), (31): Xaa is C or S
PTQLSSLSVLFFDDSSNVILKVYPNMVVRAX

SEQ ID NO: 73246 - protein, 31 aa, Artificial Sequence
  Cyclic GFR-binding peptide
  MOD_RES (28), (30): Xaa is C or S
DLSSLSILFFVGRTPKVLKVYPMVVKSXKXS

SEQ ID NO: 73247 - protein, 29 aa, Artificial Sequence
  Cyclic GFR-binding peptide
  MOD_RES (3), (4): Xaa is C or S
GPXXTPTKMSSLSMLFFNDKQQIILKVYP

SEQ ID NO: 73248 - protein, 37 aa, Artificial Sequence; identical to SEQ ID NO: 24954
  Cyclic GFR-binding peptide
  MOD_RES (4), (5), (37): Xaa is C or S

SEQ ID NO: 73249 - protein, 36 aa, Artificial Sequence; identical to SEQ ID NO: 24955
  Cyclic GFR-binding peptide
  MOD_RES (35), (35): Xaa is C or S

SEQ ID NO: 73250 - protein, 31 aa, Artificial Sequence
  Cyclic GFR-binding peptide
  MOD_RES (31), (31): Xaa is C or S
PTELSSLSMLFFDEYDKVVLKVYPEMVVEGX

SEQ ID NO: 73251 - protein, 27 aa, Artificial Sequence
  Cyclic GFR-binding peptide
SRVHHSSLSVLFFEYVRKKPKLLKVYP

SEQ ID NO: 73252 - protein, 32 aa, Artificial Sequence; identical to SEQ ID NO: 24956
  Cyclic GFR-binding peptide
  MOD_RES (32), (32): Xaa is C or S

SEQ ID NO: 73253 - protein, 30 aa, Artificial Sequence
  Cyclic GFR-binding peptide
  MOD_RES (30), (30): Xaa is C or S
TKLSSLSILFFDKGVVTYLKVYPGMAVSEX

SEQ ID NO: 73254 - protein, 37 aa, Artificial Sequence; identical to SEQ ID NO: 24957
  Cyclic GFR-binding peptide
  MOD_RES (1), (2), (34), (36): Xaa is C or S

SEQ ID NO: 73255 - protein, 29 aa, Artificial Sequence
  Cyclic GFR-binding peptide
  MOD_RES (27), (29): Xaa is C or S
LSSLSILFFVGRTPKVLKVYPMVVKSXKX

SEQ ID NO: 73256 - protein, 23 aa, Artificial Sequence
  Cyclic GFR-binding peptide
LSSLSVLFFDDSSNVILKVYPNM

SEQ ID NO: 73257 - protein, 21 aa, Artificial Sequence
  Cyclic GFR-binding peptide
SSLSILFFDKGVVTYLKVYPG

SEQ ID NO: 73258 - protein, 34 aa, Artificial Sequence
  Cyclic GFR-binding peptide
  MOD_RES (3), (3): Xaa is C or S
LEXVPTEESSLSMLFFRIKPHQGQHLKVYPFLQH

SEQ ID NO: 73259 - protein, 35 aa, Artificial Sequence; identical to SEQ ID NO: 24959
  Cyclic GFR-binding peptide
  MOD_RES (1), (2), (34): Xaa is C or S

SEQ ID NO: 73260 - protein, 33 aa, Artificial Sequence; identical to SEQ ID NO: 24961
  Cyclic GFR-binding peptide
  MOD_RES (2), (3): Xaa is C or S

SEQ ID NO: 73261 - protein, 31 aa, Artificial Sequence; identical to SEQ ID NO: 24962
  Cyclic GFR-binding peptide

SEQ ID NO: 73262 - protein, 31 aa, Artificial Sequence
  Cyclic GFR-binding peptide
  MOD_RES (29), (31): Xaa is C or S
RLSSLSILFFDAANNVVLKVYPDMVVEAXGX

SEQ ID NO: 73263 - protein, 41 aa, Artificial Sequence; identical to SEQ ID NO: 24963
  Cyclic GFR-binding peptide
  MOD_RES (6), (7), (39), (41): Xaa is C or S

SEQ ID NO: 73264 - protein, 41 aa, Artificial Sequence; identical to SEQ ID NO: 24964
  Cyclic GFR-binding peptide
  MOD_RES (4), (41): Xaa is C or S

SEQ ID NO: 73265 - protein, 30 aa, Artificial Sequence
  Cyclic GFR-binding peptide
  MOD_RES (3), (4): Xaa is C or S
GPXXTPTKMSSLSMLFFNDKQQIILKVYPG

SEQ ID NO: 73266 - protein, 30 aa, Artificial Sequence
  Cyclic GFR-binding peptide
  MOD_RES (1), (2): Xaa is C or S
XXVPTELSSLSMLFFDENEKVVLKVYPDMV

SEQ ID NO: 73267 - protein, 30 aa, Artificial Sequence
  Cyclic GFR-binding peptide
  MOD_RES (4), (5): Xaa is C or S
PKPXXAPTKLSSLSVLFFDDSSNVILKVYP

SEQ ID NO: 73268 - protein, 27 aa, Artificial Sequence
  Cyclic GFR-binding peptide
  MOD_RES (1), (1): Xaa is C or S
XVPQALSSLSILFFVGRKPKVLKVYPM

SEQ ID NO: 73269 - protein, 31 aa, Artificial Sequence
  Cyclic GFR-binding peptide
  MOD_RES (29), (31): Xaa is C or S
KMSSLSMLFFNDKQQIILKVYPGMVVDRXGX

SEQ ID NO: 73270 - protein, 27 aa, Artificial Sequence
  Cyclic GFR-binding peptide
  MOD_RES (1), (2): Xaa is C or S
XXVPTKLSSLSVLFFDDMGVPTLKVYP

SEQ ID NO: 73271 - protein, 38 aa, Artificial Sequence; identical to SEQ ID NO: 24966
  Cyclic GFR-binding peptide
  MOD_RES (3), (4), (36), (38): Xaa is C or S

SEQ ID NO: 73272 - protein, 24 aa, Artificial Sequence
  Cyclic GFR-binding peptide
TELSSLSMLFFDENEKVVLKVYPD

SEQ ID NO: 73273 - protein, 41 aa, Artificial Sequence; identical to SEQ ID NO: 24968
  Cyclic GFR-binding peptide
  MOD_RES (1), (38), (40): Xaa is C or S

SEQ ID NO: 73274 - protein, 33 aa, Artificial Sequence
  Cyclic GFR-binding peptide
  MOD_RES (6), (7): Xaa is C or S
AAPASXXVPARLSSLSILFFDAANNVVLKVYPD

SEQ ID NO: 73275 - protein, 38 aa, Artificial Sequence; identical to SEQ ID NO: 24970
  Cyclic GFR-binding peptide
  MOD_RES (3), (4), (36), (38): Xaa is C or S

SEQ ID NO: 73276 - protein, 26 aa, Artificial Sequence
  Cyclic GFR-binding peptide
KMSSLSMLFFNDKQQIILKVYPGMVV

SEQ ID NO: 73277 - protein, 32 aa, Artificial Sequence
  Cyclic GFR-binding peptide
  MOD_RES (29), (31): Xaa is C or S
SSLSMLFFRIKPHQGQHLKVYPFLQHNKXEXR

SEQ ID NO: 73278 - protein, 35 aa, Artificial Sequence; identical to SEQ ID NO: 24971
  Cyclic GFR-binding peptide
  MOD_RES (2), (3), (35): Xaa is C or S

SEQ ID NO: 73279 - protein, 30 aa, Artificial Sequence; identical to SEQ ID NO: 24972
  Cyclic GFR-binding peptide

SEQ ID NO: 73280 - protein, 40 aa, Artificial Sequence; identical to SEQ ID NO: 24973
  Cyclic GFR-binding peptide
  MOD_RES (6), (7), (40): Xaa is C or S

SEQ ID NO: 73281 - protein, 36 aa, Artificial Sequence; identical to SEQ ID NO: 24974
  Cyclic GFR-binding peptide
  MOD_RES (33), (35): Xaa is C or S

SEQ ID NO: 73282 - protein, 32 aa, Artificial Sequence
  Cyclic GFR-binding peptide
  MOD_RES (4), (5): Xaa is C or S
PKPXXAPTQLSSLSVLFFDDSSNVILKVYPNM

SEQ ID NO: 73283 - protein, 39 aa, Artificial Sequence; identical to SEQ ID NO: 24975
  Cyclic GFR-binding peptide
  MOD_RES (3), (4), (36), (38): Xaa is C or S

SEQ ID NO: 73284 - protein, 33 aa, Artificial Sequence
  Cyclic GFR-binding peptide
  MOD_RES (7), (7): Xaa is C or S
HVTKPTXAPTKLSSLSVLFFDDSSNVILKVYPN

SEQ ID NO: 73285 - protein, 36 aa, Artificial Sequence
  Cyclic GFR-binding peptide
  MOD_RES (6), (7): Xaa is C or S
KIPKAXXVPTELSSLSMLFFDENEKVVLKVYPDMVV

SEQ ID NO: 73286 - protein, 33 aa, Artificial Sequence
  Cyclic GFR-binding peptide
  MOD_RES (3), (4): Xaa is C or S
KPXXAPTQLSSLSVLFFDDSSNVILKVYPNMVV

SEQ ID NO: 73287 - protein, 27 aa, Artificial Sequence
  Cyclic GFR-binding peptide
KLSSLSVLFFDDSSNVILKVYPNMVVR

SEQ ID NO: 73288 - protein, 24 aa, Artificial Sequence
  Cyclic GFR-binding peptide
PTKLSSLSILFFDKGVVTYLKVYP

SEQ ID NO: 73289 - protein, 22 aa, Artificial Sequence
  Cyclic GFR-binding peptide
LSSLSMLFFDENEKVVLKVYPD

SEQ ID NO: 73290 - protein, 31 aa, Artificial Sequence
  Cyclic GFR-binding peptide
  MOD_RES (1), (1): Xaa is C or S
XVPTELSSLSMLFFDENEKVVLKVYPDMVVE

SEQ ID NO: 73291 - protein, 29 aa, Artificial Sequence
  Cyclic GFR-binding peptide
  MOD_RES (27), (29): Xaa is C or S
SSLSVLFFDDSSNVILKVYPNMVVRSXGX

SEQ ID NO: 73292 - protein, 29 aa, Artificial Sequence
  Cyclic GFR-binding peptide
  MOD_RES (1), (1): Xaa is C or S
XVPTEESSLSMLFFRIKPHQGQHLKVYPF

SEQ ID NO: 73293 - protein, 26 aa, Artificial Sequence
  Cyclic GFR-binding peptide
DLSSLSILFFVGRTPKVLKVYPMVVK

SEQ ID NO: 73294 - protein, 38 aa, Artificial Sequence; identical to SEQ ID NO: 24977
  Cyclic GFR-binding peptide
  MOD_RES (3), (37): Xaa is C or S

SEQ ID NO: 73295 - protein, 29 aa, Artificial Sequence
  Cyclic GFR-binding peptide
  MOD_RES (29), (29): Xaa is C or S
QALSSLSILFFVGRKPKVLKVYPMIVRSX

SEQ ID NO: 73296 - protein, 32 aa, Artificial Sequence; identical to SEQ ID NO: 24979
  Cyclic GFR-binding peptide
  MOD_RES (31), (31): Xaa is C or S

SEQ ID NO: 73297 - protein, 30 aa, Artificial Sequence
  Cyclic GFR-binding peptide
  MOD_RES (30), (30): Xaa is C or S
TKLSSLSVLFFDSSNNVILKVYPNMVVKAX

SEQ ID NO: 73298 - protein, 22 aa, Artificial Sequence
  Cyclic GFR-binding peptide
LSSLSMLFFDEYDKVVLKVYPE

SEQ ID NO: 73299 - protein, 36 aa, Artificial Sequence; identical to SEQ ID NO: 24980
  Cyclic GFR-binding peptide
  MOD_RES (3), (4), (36): Xaa is C or S

SEQ ID NO: 73300 - protein, 30 aa, Artificial Sequence
  Cyclic GFR-binding peptide
TEESSLSMLFFRIKPHQGQHLKVYPFLQHN

SEQ ID NO: 73301 - protein, 28 aa, Artificial Sequence
  Cyclic GFR-binding peptide
LSSLSVLFFDDMGVPTLKVYPEGMSVAE

SEQ ID NO: 73302 - protein, 25 aa, Artificial Sequence
  Cyclic GFR-binding peptide
TEESSLSMLFFRIKPHQGQHLKVYP

SEQ ID NO: 73303 - protein, 30 aa, Artificial Sequence
  Cyclic GFR-binding peptide
  MOD_RES (29), (29): Xaa is C or S
RLSSLSILFFDSANNVVLKVYPDMVVESXG

SEQ ID NO: 73304 - protein, 35 aa, Artificial Sequence; identical to SEQ ID NO: 24983
  Cyclic GFR-binding peptide
  MOD_RES (3), (4), (35): Xaa is C or S

SEQ ID NO: 73305 - protein, 28 aa, Artificial Sequence
  Cyclic GFR-binding peptide
VPTKLSSLSILFFDKGVVTYLKVYPGMA

SEQ ID NO: 73306 - protein, 34 aa, Artificial Sequence
  Cyclic GFR-binding peptide
  MOD_RES (4), (5): Xaa is C or S
PKAXXVPTELSSLSMLFFDENEKVVLKVYPDMVV

SEQ ID NO: 73307 - protein, 33 aa, Artificial Sequence; identical to SEQ ID NO: 24988
  Cyclic GFR-binding peptide
  MOD_RES (32), (32): Xaa is C or S

SEQ ID NO: 73308 - protein, 32 aa, Artificial Sequence
  Cyclic GFR-binding peptide
  MOD_RES (5), (5): Xaa is C or S
TKPTXAPTKLSSLSVLFFDDSSNVILKVYPNM

SEQ ID NO: 73309 - protein, 32 aa, Artificial Sequence
  Cyclic GFR-binding peptide
  MOD_RES (31), (31): Xaa is C or S
PTQLSSLSVLFFDDSSNVILKVYPNMVVRAXG

SEQ ID NO: 73310 - protein, 30 aa, Artificial Sequence
  Cyclic GFR-binding peptide
  MOD_RES (1), (1): Xaa is C or S
XVPTELSSLSMLFFDENEKVVLKVYPDMVV

SEQ ID NO: 73311 - protein, 40 aa, Artificial Sequence; identical to SEQ ID NO: 24991
  Cyclic GFR-binding peptide
  MOD_RES (3), (37), (39): Xaa is C or S

SEQ ID NO: 73312 - protein, 42 aa, Artificial Sequence; identical to SEQ ID NO: 24992
  Cyclic GFR-binding peptide
  MOD_RES (6), (7), (39), (41): Xaa is C or S

SEQ ID NO: 73313 - protein, 32 aa, Artificial Sequence
  Cyclic GFR-binding peptide
  MOD_RES (29), (31): Xaa is C or S
LSSLSVLFFDDMGVPTLKVYPEGMSVAEXGXR

SEQ ID NO: 73314 - protein, 26 aa, Artificial Sequence
  Cyclic GFR-binding peptide
QLSSLSVLFFDDSSNVILKVYPNMVV

SEQ ID NO: 73315 - protein, 28 aa, Artificial Sequence
  Cyclic GFR-binding peptide
QDLSSLSILFFVGRTPKVLKVYPMVVKS

SEQ ID NO: 73316 - protein, 39 aa, Artificial Sequence; identical to SEQ ID NO: 24994
  Cyclic GFR-binding peptide
  MOD_RES (3), (4), (36), (38): Xaa is C or S

SEQ ID NO: 73317 - protein, 31 aa, Artificial Sequence
  Cyclic GFR-binding peptide
SRVHHSSLSVLFFEYVRKKPKLLKVYPRLEE

SEQ ID NO: 73318 - protein, 28 aa, Artificial Sequence
  Cyclic GFR-binding peptide
VPQDLSSLSILFFVGRTPKVLKVYPMVV

SEQ ID NO: 73319 - protein, 24 aa, Artificial Sequence
  Cyclic GFR-binding peptide
ELSSLSMLFFDEYDKVVLKVYPEM

SEQ ID NO: 73320 - protein, 26 aa, Artificial Sequence
  Cyclic GFR-binding peptide
TSSLSMLFFDNGRVLLLKVYPMIVEE

SEQ ID NO: 73321 - protein, 29 aa, Artificial Sequence
  Cyclic GFR-binding peptide
  MOD_RES (1), (1): Xaa is C or S
XVPQDLSSLSILFFVGRTPKVLKVYPMVV

SEQ ID NO: 73322 - protein, 35 aa, Artificial Sequence
  Cyclic GFR-binding peptide
  MOD_RES (5), (6): Xaa is C or S
VGKAXXVPTKLSSLSVLFFDDMGVPTLKVYPEGMS

SEQ ID NO: 73323 - protein, 32 aa, Artificial Sequence
  Cyclic GFR-binding peptide
  MOD_RES (30), (32): Xaa is C or S
TKLSSLSVLFFDDSSNVILKVYPNMVVRSXGX

SEQ ID NO: 73324 - protein, 33 aa, Artificial Sequence
  Cyclic GFR-binding peptide
  MOD_RES (4), (5): Xaa is C or S
AGPXXTPTKMSSLSMLFFNDKQQIILKVYPGMV

SEQ ID NO: 73325 - protein, 25 aa, Artificial Sequence
  Cyclic GFR-binding peptide
APTKLSSLSVLFFDSSNNVILKVYP

SEQ ID NO: 73326 - protein, 29 aa, Artificial Sequence
  Cyclic GFR-binding peptide
SSLSVLFFDSSNNVILKVYPAAAAAAAAA

SEQ ID NO: 73327 - protein, 40 aa, Artificial Sequence; identical to SEQ ID NO: 25000
  Cyclic GFR-binding peptide
  MOD_RES (6), (7), (38), (40): Xaa is C or S

SEQ ID NO: 73328 - protein, 29 aa, Artificial Sequence
  Cyclic GFR-binding peptide
  MOD_RES (3), (4): Xaa is C or S
ASXXVPARLSSLSILFFDAANNVVLKVYP

SEQ ID NO: 73329 - protein, 33 aa, Artificial Sequence
  Cyclic GFR-binding peptide
  MOD_RES (30), (32): Xaa is C or S
KLSSLSVLFFDDMGVPTLKVYPEGMSVAEXGXR

SEQ ID NO: 73330 - protein, 36 aa, Artificial Sequence
  Cyclic GFR-binding peptide
  MOD_RES (6), (7): Xaa is C or S
RVPSTXXAPVKTSSLSMLFFDNGRVLLLKVYPMIVE

SEQ ID NO: 73331 - protein, 33 aa, Artificial Sequence; identical to SEQ ID NO: 25001
  Cyclic GFR-binding peptide
  MOD_RES (31), (33): Xaa is C or S

SEQ ID NO: 73332 - protein, 33 aa, Artificial Sequence
  Cyclic GFR-binding peptide
  MOD_RES (31), (33): Xaa is C or S
PTKLSSLSVLFFDDSSNVILKVYPNMVVRSXGX

SEQ ID NO: 73333 - protein, 28 aa, Artificial Sequence
  Cyclic GFR-binding peptide
PTKLSSLSVLFFDDSSNVILKVYPNMVV

SEQ ID NO: 73334 - protein, 25 aa, Artificial Sequence
  Cyclic GFR-binding peptide
ESSLSMLFFRIKPHQGQHLKVYPFL

SEQ ID NO: 73335 - protein, 28 aa, Artificial Sequence
  Cyclic GFR-binding peptide
  MOD_RES (28), (28): Xaa is C or S
SSLSVLFFDDMGVPTLKVYPEGMSVAEX

SEQ ID NO: 73336 - protein, 25 aa, Artificial Sequence
  Cyclic GFR-binding peptide
TRLSSLSILFFDSANNVVLKVYPDM

SEQ ID NO: 73337 - protein, 35 aa, Artificial Sequence
  Cyclic GFR-binding peptide
  MOD_RES (6), (7): Xaa is C or S
KIPKAXXVPTELSSLSMLFFDENEKVVLKVYPDMV

SEQ ID NO: 73338 - protein, 35 aa, Artificial Sequence; identical to SEQ ID NO: 25002
  Cyclic GFR-binding peptide
  MOD_RES (32), (34): Xaa is C or S

SEQ ID NO: 73339 - protein, 34 aa, Artificial Sequence; identical to SEQ ID NO: 25003
  Cyclic GFR-binding peptide
  MOD_RES (2), (3): Xaa is C or S

SEQ ID NO: 73340 - protein, 31 aa, Artificial Sequence
  Cyclic GFR-binding peptide
  MOD_RES (4), (5): Xaa is C or S
AGPXXTPTKMSSLSMLFFNDKQQIILKVYPG

SEQ ID NO: 73341 - protein, 39 aa, Artificial Sequence; identical to SEQ ID NO: 25004
  Cyclic GFR-binding peptide
  MOD_RES (5), (6), (38): Xaa is C or S

SEQ ID NO: 73342 - protein, 33 aa, Artificial Sequence; identical to SEQ ID NO: 25005
  Cyclic GFR-binding peptide
  MOD_RES (32), (32): Xaa is C or S

SEQ ID NO: 73343 - protein, 29 aa, Artificial Sequence
  Cyclic GFR-binding peptide
  MOD_RES (1), (1): Xaa is C or S
XAPVKTSSLSMLFFDNGRVLLLKVYPMIV

SEQ ID NO: 73344 - protein, 34 aa, Artificial Sequence; identical to SEQ ID NO: 25006
  Cyclic GFR-binding peptide
  MOD_RES (3), (4): Xaa is C or S

SEQ ID NO: 73345 - protein, 27 aa, Artificial Sequence
  Cyclic GFR-binding peptide
  MOD_RES (1), (2): Xaa is C or S
XXAPVKTSSLSMLFFDNGRVLLLKVYP

SEQ ID NO: 73346 - protein, 34 aa, Artificial Sequence; identical to SEQ ID NO: 25007
  Cyclic GFR-binding peptide
  MOD_RES (32), (34): Xaa is C or S

SEQ ID NO: 73347 - protein, 37 aa, Artificial Sequence; identical to SEQ ID NO: 25008
  Cyclic GFR-binding peptide
  MOD_RES (7), (7): Xaa is C or S

SEQ ID NO: 73348 - protein, 27 aa, Artificial Sequence
  Cyclic GFR-binding peptide
PQDLSSLSILFFVGRTPKVLKVYPMVV

SEQ ID NO: 73349 - protein, 37 aa, Artificial Sequence; identical to SEQ ID NO: 25013
  Cyclic GFR-binding peptide
  MOD_RES (2), (36): Xaa is C or S

SEQ ID NO: 73350 - protein, 35 aa, Artificial Sequence; identical to SEQ ID NO: 25012
  Cyclic GFR-binding peptide
  MOD_RES (2), (3), (34): Xaa is C or S

SEQ ID NO: 73351 - protein, 28 aa, Artificial Sequence
  Cyclic GFR-binding peptide
TKLSSLSVLFFDDSSNVILKVYPNMVVR

SEQ ID NO: 73352 - protein, 39 aa, Artificial Sequence; identical to SEQ ID NO: 25014
  Cyclic GFR-binding peptide
  MOD_RES (5), (6), (37), (39): Xaa is C or S

SEQ ID NO: 73353 - protein, 31 aa, Artificial Sequence
  Cyclic GFR-binding peptide
  MOD_RES (1), (2): Xaa is C or S
XXVPQDLSSLSILFFVGRTPKVLKVYPMVVK

SEQ ID NO: 73354 - protein, 33 aa, Artificial Sequence
  Cyclic GFR-binding peptide
  MOD_RES (3), (4): Xaa is C or S
SPXXVSQDLSSLSILFFIGKTPKILKVYPMIVK

SEQ ID NO: 73355 - protein, 37 aa, Artificial Sequence; identical to SEQ ID NO: 25015
  Cyclic GFR-binding peptide
  MOD_RES (3), (4), (36): Xaa is C or S

SEQ ID NO: 73356 - protein, 36 aa, Artificial Sequence; identical to SEQ ID NO: 25016
  Cyclic GFR-binding peptide
  MOD_RES (1), (34), (36): Xaa is C or S

SEQ ID NO: 73357 - protein, 32 aa, Artificial Sequence
  Cyclic GFR-binding peptide
  MOD_RES (1), (2): Xaa is C or S
XXVPTELSSLSMLFFDENEKVVLKVYPDMVVE

SEQ ID NO: 73358 - protein, 32 aa, Artificial Sequence
  Cyclic GFR-binding peptide
  MOD_RES (6), (7): Xaa is C or S
ASAAPXXVPQALSSLSILFFVGRKPKVLKVYP

SEQ ID NO: 73359 - protein, 35 aa, Artificial Sequence; identical to SEQ ID NO: 25020
  Cyclic GFR-binding peptide
  MOD_RES (3), (4): Xaa is C or S

SEQ ID NO: 73360 - protein, 28 aa, Artificial Sequence
  Cyclic GFR-binding peptide
VPTEESSLSMLFFRIKPHQGQHLKVYPF

SEQ ID NO: 73361 - protein, 23 aa, Artificial Sequence
  Cyclic GFR-binding peptide
TQLSSLSVLFFDDSSNVILKVYP

SEQ ID NO: 73362 - protein, 26 aa, Artificial Sequence
  Cyclic GFR-binding peptide
RLSSLSILFFDSANNVVLKVYPDMVV

SEQ ID NO: 73363 - protein, 28 aa, Artificial Sequence
  Cyclic GFR-binding peptide
  MOD_RES (2), (3): Xaa is C or S
TXXVPTRLSSLSILFFDSANNVVLKVYP

SEQ ID NO: 73364 - protein, 38 aa, Artificial Sequence; identical to SEQ ID NO: 25023
  Cyclic GFR-binding peptide
  MOD_RES (6), (7): Xaa is C or S

SEQ ID NO: 73365 - protein, 31 aa, Artificial Sequence
  Cyclic GFR-binding peptide
  MOD_RES (1), (2): Xaa is C or S
XXAPTKLSSLSVLFFDDSSNVILKVYPNMVV

SEQ ID NO: 73366 - protein, 32 aa, Artificial Sequence
  Cyclic GFR-binding peptide
  MOD_RES (1), (1): Xaa is C or S
XQPSRVHHSSLSVLFFEYVRKKPKLLKVYPRL

SEQ ID NO: 73367 - protein, 33 aa, Artificial Sequence
  Cyclic GFR-binding peptide
  MOD_RES (30), (32): Xaa is C or S
TELSSLSMLFFDEYDKVVLKVYPEMVVEGXGXR

SEQ ID NO: 73368 - protein, 27 aa, Artificial Sequence
  Cyclic GFR-binding peptide
VPTRLSSLSILFFDSANNVVLKVYPDM

SEQ ID NO: 73369 - protein, 33 aa, Artificial Sequence; identical to SEQ ID NO: 25024
  Cyclic GFR-binding peptide
  MOD_RES (1), (33): Xaa is C or S

SEQ ID NO: 73370 - protein, 29 aa, Artificial Sequence
  Cyclic GFR-binding peptide
VPTELSSLSMLFFDENEKVVLKVYPDMVV

SEQ ID NO: 73371 - protein, 34 aa, Artificial Sequence; identical to SEQ ID NO: 25025
  Cyclic GFR-binding peptide
  MOD_RES (1), (34): Xaa is C or S

SEQ ID NO: 73372 - protein, 34 aa, Artificial Sequence
  Cyclic GFR-binding peptide
  MOD_RES (1), (2), (34): Xaa is C or S
XXVPTELSSLSMLFFDENEKVVLKVYPDMVVEGX

SEQ ID NO: 73373 - protein, 34 aa, Artificial Sequence
  Cyclic GFR-binding peptide
  MOD_RES (31), (33): Xaa is C or S
PTKLSSLSVLFFDDSSNVILKVYPNMVVRSXGXH

SEQ ID NO: 73374 - protein, 38 aa, Artificial Sequence; identical to SEQ ID NO: 25026
  Cyclic GFR-binding peptide
  MOD_RES (3), (4), (37): Xaa is C or S

SEQ ID NO: 73375 - protein, 26 aa, Artificial Sequence
  Cyclic GFR-binding peptide
TELSSLSMLFFDEYDKVVLKVYPEMV

SEQ ID NO: 73376 - protein, 30 aa, Artificial Sequence
  Cyclic GFR-binding peptide
  MOD_RES (27), (29): Xaa is C or S
SSLSVLFFDSSNNVILKVYPNMVVKAXGXH

SEQ ID NO: 73377 - protein, 28 aa, Artificial Sequence
  Cyclic GFR-binding peptide
  MOD_RES (1), (1): Xaa is C or S
XVPARLSSLSILFFDAANNVVLKVYPDM

SEQ ID NO: 73378 - protein, 34 aa, Artificial Sequence
  Cyclic GFR-binding peptide
  MOD_RES (2), (3): Xaa is C or S
AXXVPTELSSLSMLFFDENEKVVLKVYPDMVVEG

SEQ ID NO: 73379 - protein, 36 aa, Artificial Sequence; identical to SEQ ID NO: 25027
  Cyclic GFR-binding peptide
  MOD_RES (5), (6): Xaa is C or S

SEQ ID NO: 73380 - protein, 26 aa, Artificial Sequence
  Cyclic GFR-binding peptide
APVKTSSLSMLFFDNGRVLLLKVYPM

SEQ ID NO: 73381 - protein, 30 aa, Artificial Sequence
  Cyclic GFR-binding peptide
  MOD_RES (1), (1): Xaa is C or S
XAPTQLSSLSVLFFDDSSNVILKVYPNMVV

SEQ ID NO: 73382 - protein, 40 aa, Artificial Sequence; identical to SEQ ID NO: 25028
  Cyclic GFR-binding peptide
  MOD_RES (7), (7): Xaa is C or S

SEQ ID NO: 73383 - protein, 22 aa, Artificial Sequence
  Cyclic GFR-binding peptide
SSLSMLFFRIKPHQGQHLKVYP

SEQ ID NO: 73384 - protein, 23 aa, Artificial Sequence
  Cyclic GFR-binding peptide
SSLSMLFFDNGRVLLLKVYPMIV

SEQ ID NO: 73385 - protein, 34 aa, Artificial Sequence
  Cyclic GFR-binding peptide
  MOD_RES (3), (4): Xaa is C or S
KAXXVPTELSSLSMLFFDENEKVVLKVYPDMVVE

SEQ ID NO: 73386 - protein, 35 aa, Artificial Sequence; identical to SEQ ID NO: 25030
  Cyclic GFR-binding peptide
  MOD_RES (1), (2), (34): Xaa is C or S

SEQ ID NO: 73387 - protein, 33 aa, Artificial Sequence; identical to SEQ ID NO: 25031
  Cyclic GFR-binding peptide
  MOD_RES (32), (32): Xaa is C or S

SEQ ID NO: 73388 - protein, 42 aa, Artificial Sequence; identical to SEQ ID NO: 25032
  Cyclic GFR-binding peptide
  MOD_RES (3), (40), (42): Xaa is C or S

SEQ ID NO: 73389 - protein, 26 aa, Artificial Sequence
  Cyclic GFR-binding peptide
TRLSSLSILFFDSANNVVLKVYPDMV

SEQ ID NO: 73390 - protein, 31 aa, Artificial Sequence
  Cyclic GFR-binding peptide
  MOD_RES (3), (3): Xaa is C or S
LEXVPTEESSLSMLFFRIKPHQGQHLKVYPF

SEQ ID NO: 73391 - protein, 34 aa, Artificial Sequence; identical to SEQ ID NO: 25035
  Cyclic GFR-binding peptide
  MOD_RES (1), (32), (34): Xaa is C or S

SEQ ID NO: 73392 - protein, 32 aa, Artificial Sequence
  Cyclic GFR-binding peptide
  MOD_RES (4), (5): Xaa is C or S
PKAXXVPTELSSLSMLFFDENEKVVLKVYPDM

SEQ ID NO: 73393 - protein, 36 aa, Artificial Sequence
  Cyclic GFR-binding peptide
  MOD_RES (6), (7): Xaa is C or S
GSAGPXXTPTKMSSLSMLFFNDKQQIILKVYPGMVV

SEQ ID NO: 73394 - protein, 35 aa, Artificial Sequence
  Cyclic GFR-binding peptide
  MOD_RES (4), (4): Xaa is C or S
GLEXVPTEESSLSMLFFRIKPHQGQHLKVYPFLQH

SEQ ID NO: 73395 - protein, 37 aa, Artificial Sequence; identical to SEQ ID NO: 25037
  Cyclic GFR-binding peptide
  MOD_RES (5), (6): Xaa is C or S

SEQ ID NO: 73396 - protein, 30 aa, Artificial Sequence
  Cyclic GFR-binding peptide
  MOD_RES (2), (3): Xaa is C or S
TXXAPVKTSSLSMLFFDNGRVLLLKVYPMI

SEQ ID NO: 73397 - protein, 31 aa, Artificial Sequence
  Cyclic GFR-binding peptide
  MOD_RES (28), (30): Xaa is C or S
LSSLSMLFFDEYDKVVLKVYPEMVVEGXGXR

SEQ ID NO: 73398 - protein, 35 aa, Artificial Sequence
  Cyclic GFR-binding peptide
  MOD_RES (32), (34): Xaa is C or S
PTKLSSLSVLFFDDMGVPTLKVYPEGMSVAEXGXR

SEQ ID NO: 73399 - protein, 29 aa, Artificial Sequence
  Cyclic GFR-binding peptide
  MOD_RES (3), (4): Xaa is C or S
SPXXVPQDLSSLSILFFVGRTPKVLKVYP

SEQ ID NO: 73400 - protein, 35 aa, Artificial Sequence
  Cyclic GFR-binding peptide
  MOD_RES (6), (6): Xaa is C or S
VTKPTXAPTKLSSLSVLFFDDSSNVILKVYPNMVV

SEQ ID NO: 73401 - protein, 29 aa, Artificial Sequence
  Cyclic GFR-binding peptide
  MOD_RES (27), (29): Xaa is C or S
SSLSMLFFNDKQQIILKVYPGMVVDRXGX

SEQ ID NO: 73402 - protein, 27 aa, Artificial Sequence
  Cyclic GFR-binding peptide
PTEESSLSMLFFRIKPHQGQHLKVYPF

SEQ ID NO: 73403 - protein, 37 aa, Artificial Sequence; identical to SEQ ID NO: 25045
  Cyclic GFR-binding peptide
  MOD_RES (6), (7): Xaa is C or S

SEQ ID NO: 73404 - protein, 26 aa, Artificial Sequence
  Cyclic GFR-binding peptide
QALSSLSILFFVGRKPKVLKVYPMIV

SEQ ID NO: 73405 - protein, 34 aa, Artificial Sequence
  Cyclic GFR-binding peptide
  MOD_RES (6), (7): Xaa is C or S
STPPTXXVPTRLSSLSILFFDSANNVVLKVYPDM

SEQ ID NO: 73406 - protein, 33 aa, Artificial Sequence
  Cyclic GFR-binding peptide
  MOD_RES (1), (33): Xaa is C or S
XVPTELSSLSMLFFDENEKVVLKVYPDMVVEGX

SEQ ID NO: 73407 - protein, 22 aa, Artificial Sequence
  Cyclic GFR-binding peptide
SSLSILFFDAANNVVLKVYPDM

SEQ ID NO: 73408 - protein, 25 aa, Artificial Sequence
  Cyclic GFR-binding peptide
PTRLSSLSILFFDSANNVVLKVYPD

SEQ ID NO: 73409 - protein, 40 aa, Artificial Sequence; identical to SEQ ID NO: 25047
  Cyclic GFR-binding peptide
  MOD_RES (6), (7), (38), (40): Xaa is C or S

SEQ ID NO: 73410 - protein, 38 aa, Artificial Sequence; identical to SEQ ID NO: 25048
  Cyclic GFR-binding peptide
  MOD_RES (5), (6), (38): Xaa is C or S

SEQ ID NO: 73411 - protein, 34 aa, Artificial Sequence; identical to SEQ ID NO: 25050
  Cyclic GFR-binding peptide
  MOD_RES (1), (2), (34): Xaa is C or S

SEQ ID NO: 73412 - protein, 22 aa, Artificial Sequence
  Cyclic GFR-binding peptide
SSLSVLFFDSSNNVILKVYPNM

SEQ ID NO: 73413 - protein, 34 aa, Artificial Sequence; identical to SEQ ID NO: 25051
  Cyclic GFR-binding peptide
  MOD_RES (1), (2), (33): Xaa is C or S

SEQ ID NO: 73414 - protein, 24 aa, Artificial Sequence
  Cyclic GFR-binding peptide
LSSLSILFFVGRKPKVLKVYPMIV

SEQ ID NO: 73415 - protein, 31 aa, Artificial Sequence
  Cyclic GFR-binding peptide
  MOD_RES (1), (1): Xaa is C or S
XQPSRVHHSSLSVLFFEYVRKKPKLLKVYPR

SEQ ID NO: 73416 - protein, 35 aa, Artificial Sequence; identical to SEQ ID NO: 25053
  Cyclic GFR-binding peptide
  MOD_RES (35), (35): Xaa is C or S

SEQ ID NO: 73417 - protein, 36 aa, Artificial Sequence; identical to SEQ ID NO: 25052
  Cyclic GFR-binding peptide
  MOD_RES (3), (4), (36): Xaa is C or S

SEQ ID NO: 73418 - protein, 27 aa, Artificial Sequence
  Cyclic GFR-binding peptide
PTKLSSLSVLFFDDSSNVILKVYPNMV

SEQ ID NO: 73419 - protein, 31 aa, Artificial Sequence
  Cyclic GFR-binding peptide
  MOD_RES (4), (5): Xaa is C or S
PKAXXVPTELSSLSMLFFDENEKVVLKVYPD

SEQ ID NO: 73420 - protein, 28 aa, Artificial Sequence
  Cyclic GFR-binding peptide
  MOD_RES (27), (27): Xaa is C or S
LSSLSILFFVGRTPKVLKVYPMVVKSXK

SEQ ID NO: 73421 - protein, 23 aa, Artificial Sequence
  Cyclic GFR-binding peptide
TRLSSLSILFFDSANNVVLKVYP

SEQ ID NO: 73422 - protein, 36 aa, Artificial Sequence; identical to SEQ ID NO: 25055
  Cyclic GFR-binding peptide
  MOD_RES (5), (6): Xaa is C or S

SEQ ID NO: 73423 - protein, 25 aa, Artificial Sequence
  Cyclic GFR-binding peptide
QLSSLSVLFFDDSSNVILKVYPNMV

SEQ ID NO: 73424 - protein, 36 aa, Artificial Sequence; identical to SEQ ID NO: 25056
  Cyclic GFR-binding peptide
  MOD_RES (2), (36): Xaa is C or S

SEQ ID NO: 73425 - protein, 27 aa, Artificial Sequence
  Cyclic GFR-binding peptide
VPTEESSLSMLFFRIKPHQGQHLKVYP

SEQ ID NO: 73426 - protein, 29 aa, Artificial Sequence
  Cyclic GFR-binding peptide
  MOD_RES (29), (29): Xaa is C or S
KLSSLSVLFFDSSNNVILKVYPNMVVKAX

SEQ ID NO: 73427 - protein, 32 aa, Artificial Sequence
  Cyclic GFR-binding peptide
  MOD_RES (4), (5): Xaa is C or S
ASPXXVSQDLSSLSILFFIGKTPKILKVYPMI

SEQ ID NO: 73428 - protein, 35 aa, Artificial Sequence; identical to SEQ ID NO: 25059
  Cyclic GFR-binding peptide
  MOD_RES (1), (2), (33), (35): Xaa is C or S

SEQ ID NO: 73429 - protein, 34 aa, Artificial Sequence; identical to SEQ ID NO: 25060
  Cyclic GFR-binding peptide

SEQ ID NO: 73430 - protein, 27 aa, Artificial Sequence
  Cyclic GFR-binding peptide
  MOD_RES (27), (27): Xaa is C or S
SSLSVLFFDDSSNVILKVYPNMVVRSX

SEQ ID NO: 73431 - protein, 38 aa, Artificial Sequence; identical to SEQ ID NO: 25061
  Cyclic GFR-binding peptide
  MOD_RES (4), (36), (38): Xaa is C or S

SEQ ID NO: 73432 - protein, 30 aa, Artificial Sequence; identical to SEQ ID NO: 25062
  Cyclic GFR-binding peptide

SEQ ID NO: 73433 - protein, 29 aa, Artificial Sequence
  Cyclic GFR-binding peptide
SRVHHSSLSVLFFEYVRKKPKLLKVYPRL

SEQ ID NO: 73434 - protein, 29 aa, Artificial Sequence
  Cyclic GFR-binding peptide
PQALSSLSILFFVGRKPKVLKVYPMIVRS

SEQ ID NO: 73435 - protein, 37 aa, Artificial Sequence; identical to SEQ ID NO: 25065
  Cyclic GFR-binding peptide
  MOD_RES (1), (2), (34), (36): Xaa is C or S

SEQ ID NO: 73436 - protein, 37 aa, Artificial Sequence; identical to SEQ ID NO: 25066
  Cyclic GFR-binding peptide
  MOD_RES (1), (2), (34), (36): Xaa is C or S

SEQ ID NO: 73437 - protein, 40 aa, Artificial Sequence; identical to SEQ ID NO: 25067
  Cyclic GFR-binding peptide
  MOD_RES (5), (37), (39): Xaa is C or S

SEQ ID NO: 73438 - protein, 24 aa, Artificial Sequence
  Cyclic GFR-binding peptide
SSLSVLFFDSSNNVILKVYPNMVV

SEQ ID NO: 73439 - protein, 29 aa, Artificial Sequence
  Cyclic GFR-binding peptide
TPTKMSSLSMLFFNDKQQIILKVYPGMVV

SEQ ID NO: 73440 - protein, 31 aa, Artificial Sequence
  Cyclic GFR-binding peptide
  MOD_RES (28), (30): Xaa is C or S
LSSLSVLFFDDSSNVILKVYPNMVVRAXGXH

SEQ ID NO: 73441 - protein, 28 aa, Artificial Sequence
  Cyclic GFR-binding peptide
TEESSLSMLFFRIKPHQGQHLKVYPFLQ

SEQ ID NO: 73442 - protein, 25 aa, Artificial Sequence
  Cyclic GFR-binding peptide
LSSLSVLFFDDSSNVILKVYPNMVV

SEQ ID NO: 73443 - protein, 28 aa, Artificial Sequence
  Cyclic GFR-binding peptide
KMSSLSMLFFNDKQQIILKVYPGMVVDR

SEQ ID NO: 73444 - protein, 25 aa, Artificial Sequence
  Cyclic GFR-binding peptide
VPTKLSSLSVLFFDDMGVPTLKVYP

SEQ ID NO: 73445 - protein, 31 aa, Artificial Sequence
  Cyclic GFR-binding peptide
  MOD_RES (4), (5): Xaa is C or S
PKPXXAPTQLSSLSVLFFDDSSNVILKVYPN

SEQ ID NO: 73446 - protein, 31 aa, Artificial Sequence; identical to SEQ ID NO: 25072
  Cyclic GFR-binding peptide

SEQ ID NO: 73447 - protein, 31 aa, Artificial Sequence
  Cyclic GFR-binding peptide
  MOD_RES (5), (6): Xaa is C or S
TPPTXXVPTRLSSLSILFFDSANNVVLKVYP

SEQ ID NO: 73448 - protein, 30 aa, Artificial Sequence
  Cyclic GFR-binding peptide
PTRLSSLSILFFDSANNVVLKVYPDMVVES

SEQ ID NO: 73449 - protein, 36 aa, Artificial Sequence; identical to SEQ ID NO: 25076
  Cyclic GFR-binding peptide
  MOD_RES (1), (2), (34), (36): Xaa is C or S

SEQ ID NO: 73450 - protein, 37 aa, Artificial Sequence; identical to SEQ ID NO: 25077
  Cyclic GFR-binding peptide
  MOD_RES (2), (3), (35), (37): Xaa is C or S

SEQ ID NO: 73451 - protein, 36 aa, Artificial Sequence; identical to SEQ ID NO: 25079
  Cyclic GFR-binding peptide
  MOD_RES (3), (4), (36): Xaa is C or S

SEQ ID NO: 73452 - protein, 42 aa, Artificial Sequence; identical to SEQ ID NO: 25080
  Cyclic GFR-binding peptide
  MOD_RES (6), (7), (39), (41): Xaa is C or S

SEQ ID NO: 73453 - protein, 38 aa, Artificial Sequence; identical to SEQ ID NO: 25082
  Cyclic GFR-binding peptide
  MOD_RES (4), (5), (38): Xaa is C or S

SEQ ID NO: 73454 - protein, 24 aa, Artificial Sequence
  Cyclic GFR-binding peptide
LSSLSILFFIGKTPKILKVYPMIV

SEQ ID NO: 73455 - protein, 35 aa, Artificial Sequence
  Cyclic GFR-binding peptide
  MOD_RES (33), (35): Xaa is C or S
VHHSSLSVLFFEYVRKKPKLLKVYPRLEEHLEXAX

SEQ ID NO: 73456 - protein, 23 aa, Artificial Sequence
  Cyclic GFR-binding peptide
SSLSILFFVGRTPKVLKVYPMVV

SEQ ID NO: 73457 - protein, 23 aa, Artificial Sequence
  Cyclic GFR-binding peptide
TELSSLSMLFFDENEKVVLKVYP

SEQ ID NO: 73458 - protein, 34 aa, Artificial Sequence; identical to SEQ ID NO: 25083
  Cyclic GFR-binding peptide
  MOD_RES (1), (33): Xaa is C or S

SEQ ID NO: 73459 - protein, 30 aa, Artificial Sequence
  Cyclic GFR-binding peptide
  MOD_RES (29), (29): Xaa is C or S
KLSSLSVLFFDSSNNVILKVYPNMVVKAXG

SEQ ID NO: 73460 - protein, 33 aa, Artificial Sequence; identical to SEQ ID NO: 25084
  Cyclic GFR-binding peptide

SEQ ID NO: 73461 - protein, 24 aa, Artificial Sequence
  Cyclic GFR-binding peptide
SSLSILFFVGRKPKVLKVYPMIVR

SEQ ID NO: 73462 - protein, 30 aa, Artificial Sequence
  Cyclic GFR-binding peptide
  MOD_RES (1), (1): Xaa is C or S
XVPARLSSLSILFFDAANNVVLKVYPDMVV

SEQ ID NO: 73463 - protein, 29 aa, Artificial Sequence
  Cyclic GFR-binding peptide
  MOD_RES (29), (29): Xaa is C or S
RLSSLSILFFDSANNVVLKVYPDMVVESX

SEQ ID NO: 73464 - protein, 30 aa, Artificial Sequence
  Cyclic GFR-binding peptide
  MOD_RES (3), (4): Xaa is C or S
APXXVPQALSSLSILFFVGRKPKVLKVYPM

SEQ ID NO: 73465 - protein, 30 aa, Artificial Sequence
  Cyclic GFR-binding peptide
  MOD_RES (1), (2): Xaa is C or S
XXAPTKLSSLSVLFFDDSSNVILKVYPNMV

SEQ ID NO: 73466 - protein, 36 aa, Artificial Sequence
  Cyclic GFR-binding peptide
  MOD_RES (6), (7): Xaa is C or S
YVPKPXXAPTKLSSLSVLFFDDSSNVILKVYPNMVV

SEQ ID NO: 73467 - protein, 28 aa, Artificial Sequence
  Cyclic GFR-binding peptide
APVKTSSLSMLFFDNGRVLLLKVYPMIV

SEQ ID NO: 73468 - protein, 29 aa, Artificial Sequence
  Cyclic GFR-binding peptide
  MOD_RES (28), (28): Xaa is C or S
LSSLSVLFFDDSSNVILKVYPNMVVRAXG

SEQ ID NO: 73469 - protein, 30 aa, Artificial Sequence
  Cyclic GFR-binding peptide
  MOD_RES (1), (2): Xaa is C or S
XXAPTKLSSLSVLFFDSSNNVILKVYPNMV

SEQ ID NO: 73470 - protein, 29 aa, Artificial Sequence
  Cyclic GFR-binding peptide
VPTELSSLSMLFFDEYDKVVLKVYPEMVV

SEQ ID NO: 73471 - protein, 23 aa, Artificial Sequence
  Cyclic GFR-binding peptide
SSLSMLFFDEYDKVVLKVYPEMV

SEQ ID NO: 73472 - protein, 27 aa, Artificial Sequence
  Cyclic GFR-binding peptide
LSSLSVLFFDDSSNVILKVYPNMVVRS

SEQ ID NO: 73473 - protein, 29 aa, Artificial Sequence
  Cyclic GFR-binding peptide
ARLSSLSILFFDAANNVVLKVYPDMVVEA

SEQ ID NO: 73474 - protein, 33 aa, Artificial Sequence
  Cyclic GFR-binding peptide
  MOD_RES (6), (7): Xaa is C or S
RVPSTXXAPVKTSSLSMLFFDNGRVLLLKVYPM

SEQ ID NO: 73475 - protein, 35 aa, Artificial Sequence; identical to SEQ ID NO: 25089
  Cyclic GFR-binding peptide
  MOD_RES (1), (33), (35): Xaa is C or S

SEQ ID NO: 73476 - protein, 35 aa, Artificial Sequence
  Cyclic GFR-binding peptide
  MOD_RES (6), (7): Xaa is C or S
ASASPXXVPQDLSSLSILFFVGRTPKVLKVYPMVV

SEQ ID NO: 73477 - protein, 40 aa, Artificial Sequence; identical to SEQ ID NO: 25090
  Cyclic GFR-binding peptide
  MOD_RES (6), (7), (39): Xaa is C or S

SEQ ID NO: 73478 - protein, 28 aa, Artificial Sequence
  Cyclic GFR-binding peptide
  MOD_RES (1), (2): Xaa is C or S
XXVSQDLSSLSILFFIGKTPKILKVYPM

SEQ ID NO: 73479 - protein, 34 aa, Artificial Sequence; identical to SEQ ID NO: 25091
  Cyclic GFR-binding peptide
  MOD_RES (1), (2), (33): Xaa is C or S

SEQ ID NO: 73480 - protein, 27 aa, Artificial Sequence
  Cyclic GFR-binding peptide
APTQLSSLSVLFFDDSSNVILKVYPNM

SEQ ID NO: 73481 - protein, 33 aa, Artificial Sequence; identical to SEQ ID NO: 25092
  Cyclic GFR-binding peptide
  MOD_RES (2), (2): Xaa is C or S

SEQ ID NO: 73482 - protein, 32 aa, Artificial Sequence
  Cyclic GFR-binding peptide
  MOD_RES (2), (2): Xaa is C or S
KXQPSRVHHSSLSVLFFEYVRKKPKLLKVYPR

SEQ ID NO: 73483 - protein, 32 aa, Artificial Sequence
  Cyclic GFR-binding peptide
  MOD_RES (5), (5): Xaa is C or S
EGLEXVPTEESSLSMLFFRIKPHQGQHLKVYP

SEQ ID NO: 73484 - protein, 31 aa, Artificial Sequence
  Cyclic GFR-binding peptide
  MOD_RES (1), (2): Xaa is C or S
XXVPTKLSSLSILFFDKGVVTYLKVYPGMAV

SEQ ID NO: 73485 - protein, 27 aa, Artificial Sequence
  Cyclic GFR-binding peptide
LSSLSVLFFDDSSNVILKVYPNMVVRA

SEQ ID NO: 73486 - protein, 27 aa, Artificial Sequence
  Cyclic GFR-binding peptide
TELSSLSMLFFDENEKVVLKVYPDMVV

SEQ ID NO: 73487 - protein, 33 aa, Artificial Sequence; identical to SEQ ID NO: 25095
  Cyclic GFR-binding peptide
  MOD_RES (2), (3): Xaa is C or S

SEQ ID NO: 73488 - protein, 24 aa, Artificial Sequence
  Cyclic GFR-binding peptide
SSLSILFFDSANNVVLKVYPDMVV

SEQ ID NO: 73489 - protein, 28 aa, Artificial Sequence
  Cyclic GFR-binding peptide
  MOD_RES (2), (3): Xaa is C or S
AXXAPTKLSSLSVLFFDSSNNVILKVYP

SEQ ID NO: 73490 - protein, 24 aa, Artificial Sequence
  Cyclic GFR-binding peptide
SSLSVLFFEYVRKKPKLLKVYPRL

SEQ ID NO: 73491 - protein, 39 aa, Artificial Sequence; identical to SEQ ID NO: 25096
  Cyclic GFR-binding peptide
  MOD_RES (6), (7), (39): Xaa is C or S

SEQ ID NO: 73492 - protein, 31 aa, Artificial Sequence
  Cyclic GFR-binding peptide
  MOD_RES (31), (31): Xaa is C or S
PTKLSSLSVLFFDSSNNVILKVYPNMVVKAX

SEQ ID NO: 73493 - protein, 31 aa, Artificial Sequence
  Cyclic GFR-binding peptide
  MOD_RES (29), (31): Xaa is C or S
QDLSSLSILFFIGKTPKILKVYPMIVKSXKX

SEQ ID NO: 73494 - protein, 27 aa, Artificial Sequence
  Cyclic GFR-binding peptide
TKLSSLSVLFFDDSSNVILKVYPNMVV

SEQ ID NO: 73495 - protein, 37 aa, Artificial Sequence; identical to SEQ ID NO: 25099
  Cyclic GFR-binding peptide
  MOD_RES (4), (5), (36): Xaa is C or S

SEQ ID NO: 73496 - protein, 36 aa, Artificial Sequence; identical to SEQ ID NO: 25101
  Cyclic GFR-binding peptide
  MOD_RES (3), (4): Xaa is C or S

SEQ ID NO: 73497 - protein, 33 aa, Artificial Sequence
  Cyclic GFR-binding peptide
  MOD_RES (4), (5): Xaa is C or S
ASPXXVSQDLSSLSILFFIGKTPKILKVYPMIV

SEQ ID NO: 73498 - protein, 31 aa, Artificial Sequence
  Cyclic GFR-binding peptide
  MOD_RES (30), (30): Xaa is C or S
SQDLSSLSILFFIGKTPKILKVYPMIVKSXK

SEQ ID NO: 73499 - protein, 28 aa, Artificial Sequence
  Cyclic GFR-binding peptide
ESSLSMLFFRIKPHQGQHLKVYPFLQHN

SEQ ID NO: 73500 - protein, 26 aa, Artificial Sequence
  Cyclic GFR-binding peptide
KLSSLSVLFFDDSSNVILKVYPNMVV

SEQ ID NO: 73501 - protein, 36 aa, Artificial Sequence; identical to SEQ ID NO: 25102
  Cyclic GFR-binding peptide
  MOD_RES (2), (3), (35): Xaa is C or S

SEQ ID NO: 73502 - protein, 31 aa, Artificial Sequence
  Cyclic GFR-binding peptide
  MOD_RES (4), (5): Xaa is C or S
GKAXXVPTKLSSLSVLFFDDMGVPTLKVYPE

SEQ ID NO: 73503 - protein, 39 aa, Artificial Sequence; identical to SEQ ID NO: 25103
  Cyclic GFR-binding peptide
  MOD_RES (4), (5), (37), (39): Xaa is C or S

SEQ ID NO: 73504 - protein, 39 aa, Artificial Sequence; identical to SEQ ID NO: 25105
  Cyclic GFR-binding peptide
  MOD_RES (36), (38): Xaa is C or S

SEQ ID NO: 73505 - protein, 29 aa, Artificial Sequence
  Cyclic GFR-binding peptide
  MOD_RES (27), (29): Xaa is C or S
SSLSMLFFDEYDKVVLKVYPEMVVEGXGX

SEQ ID NO: 73506 - protein, 22 aa, Artificial Sequence
  Cyclic GFR-binding peptide
TSSLSMLFFDNGRVLLLKVYPM

SEQ ID NO: 73507 - protein, 32 aa, Artificial Sequence; identical to SEQ ID NO: 25107
  Cyclic GFR-binding peptide
  MOD_RES (1), (2): Xaa is C or S

SEQ ID NO: 73508 - protein, 33 aa, Artificial Sequence
  Cyclic GFR-binding peptide
  MOD_RES (2), (3): Xaa is C or S
AXXVPTELSSLSMLFFDENEKVVLKVYPDMVVE

SEQ ID NO: 73509 - protein, 29 aa, Artificial Sequence
  Cyclic GFR-binding peptide
  MOD_RES (1), (2): Xaa is C or S
XXAPVKTSSLSMLFFDNGRVLLLKVYPMI

SEQ ID NO: 73510 - protein, 22 aa, Artificial Sequence
  Cyclic GFR-binding peptide
SSLSMLFFDNGRVLLLKVYPMI

SEQ ID NO: 73511 - protein, 28 aa, Artificial Sequence
  Cyclic GFR-binding peptide
APTKLSSLSVLFFDSSNNVILKVYPNMV

SEQ ID NO: 73512 - protein, 30 aa, Artificial Sequence
  Cyclic GFR-binding peptide
  MOD_RES (4), (5): Xaa is C or S
ASPXXVSQDLSSLSILFFIGKTPKILKVYP

SEQ ID NO: 73513 - protein, 29 aa, Artificial Sequence
  Cyclic GFR-binding peptide
  MOD_RES (2), (2): Xaa is C or S
EXVPTEESSLSMLFFRIKPHQGQHLKVYP

SEQ ID NO: 73514 - protein, 32 aa, Artificial Sequence
  Cyclic GFR-binding peptide
  MOD_RES (3), (4): Xaa is C or S
SPXXVPQDLSSLSILFFVGRTPKVLKVYPMVV

SEQ ID NO: 73515 - protein, 29 aa, Artificial Sequence
  Cyclic GFR-binding peptide
ESSLSMLFFRIKPHQGQHLKVYPFLQHNK

SEQ ID NO: 73516 - protein, 31 aa, Artificial Sequence; identical to SEQ ID NO: 25108
  Cyclic GFR-binding peptide
  MOD_RES (1), (1): Xaa is C or S

SEQ ID NO: 73517 - protein, 36 aa, Artificial Sequence; identical to SEQ ID NO: 25109
  Cyclic GFR-binding peptide

SEQ ID NO: 73518 - protein, 25 aa, Artificial Sequence
  Cyclic GFR-binding peptide
SSLSMLFFRIKPHQGQHLKVYPFLQ

SEQ ID NO: 73519 - protein, 25 aa, Artificial Sequence
  Cyclic GFR-binding peptide
PVKTSSLSMLFFDNGRVLLLKVYPM

SEQ ID NO: 73520 - protein, 29 aa, Artificial Sequence
  Cyclic GFR-binding peptide
  MOD_RES (1), (1): Xaa is C or S
XVPTRLSSLSILFFDSANNVVLKVYPDMV

SEQ ID NO: 73521 - protein, 40 aa, Artificial Sequence; identical to SEQ ID NO: 25114
  Cyclic GFR-binding peptide
  MOD_RES (6), (7), (39): Xaa is C or S

SEQ ID NO: 73522 - protein, 24 aa, Artificial Sequence
  Cyclic GFR-binding peptide
VKTSSLSMLFFDNGRVLLLKVYPM

SEQ ID NO: 73523 - protein, 28 aa, Artificial Sequence
  Cyclic GFR-binding peptide
  MOD_RES (2), (3): Xaa is C or S
AXXVPTKLSSLSILFFDKGVVTYLKVYP

SEQ ID NO: 73524 - protein, 32 aa, Artificial Sequence; identical to SEQ ID NO: 25116
  Cyclic GFR-binding peptide
  MOD_RES (32), (32): Xaa is C or S

SEQ ID NO: 73525 - protein, 31 aa, Artificial Sequence
  Cyclic GFR-binding peptide
  MOD_RES (29), (31): Xaa is C or S
KLSSLSILFFDKGVVTYLKVYPGMAVSEXGX

SEQ ID NO: 73526 - protein, 29 aa, Artificial Sequence
  Cyclic GFR-binding peptide
TQLSSLSVLFFDDSSNVILKVYPNMVVRA

SEQ ID NO: 73527 - protein, 33 aa, Artificial Sequence
  Cyclic GFR-binding peptide
  MOD_RES (5), (6): Xaa is C or S
SAAPXXVPQALSSLSILFFVGRKPKVLKVYPMI

SEQ ID NO: 73528 - protein, 33 aa, Artificial Sequence
  Cyclic GFR-binding peptide
  MOD_RES (6), (7): Xaa is C or S
KASKAXXVPTKLSSLSILFFDKGVVTYLKVYPG

SEQ ID NO: 73529 - protein, 26 aa, Artificial Sequence
  Cyclic GFR-binding peptide
SSLSVLFFDSSNNVILKVYPNMVVKA

SEQ ID NO: 73530 - protein, 33 aa, Artificial Sequence; identical to SEQ ID NO: 25117
  Cyclic GFR-binding peptide
  MOD_RES (1), (2): Xaa is C or S

SEQ ID NO: 73531 - protein, 23 aa, Artificial Sequence
  Cyclic GFR-binding peptide
TSSLSMLFFDNGRVLLLKVYPMI

SEQ ID NO: 73532 - protein, 29 aa, Artificial Sequence
  Cyclic GFR-binding peptide
  MOD_RES (1), (1): Xaa is C or S
XVPQALSSLSILFFVGRKPKVLKVYPMIV

SEQ ID NO: 73533 - protein, 36 aa, Artificial Sequence; identical to SEQ ID NO: 25120
  Cyclic GFR-binding peptide
  MOD_RES (5), (5): Xaa is C or S

SEQ ID NO: 73534 - protein, 34 aa, Artificial Sequence; identical to SEQ ID NO: 25121
  Cyclic GFR-binding peptide
  MOD_RES (2), (2): Xaa is C or S

SEQ ID NO: 73535 - protein, 23 aa, Artificial Sequence
  Cyclic GFR-binding peptide
SSLSILFFDAANNVVLKVYPDMV

SEQ ID NO: 73536 - protein, 32 aa, Artificial Sequence; identical to SEQ ID NO: 25123
  Cyclic GFR-binding peptide
  MOD_RES (1), (2): Xaa is C or S

SEQ ID NO: 73537 - protein, 27 aa, Artificial Sequence
  Cyclic GFR-binding peptide
  MOD_RES (1), (1): Xaa is C or S
XVPTKLSSLSVLFFDDMGVPTLKVYPE

SEQ ID NO: 73538 - protein, 24 aa, Artificial Sequence
  Cyclic GFR-binding peptide
KLSSLSVLFFDDSSNVILKVYPNM

SEQ ID NO: 73539 - protein, 35 aa, Artificial Sequence
  Cyclic GFR-binding peptide
  MOD_RES (6), (7): Xaa is C or S
KVGKAXXVPTKLSSLSVLFFDDMGVPTLKVYPEGM

SEQ ID NO: 73540 - protein, 24 aa, Artificial Sequence
  Cyclic GFR-binding peptide
SSLSMLFFNDKQQIILKVYPGMVV

SEQ ID NO: 73541 - protein, 31 aa, Artificial Sequence
  Cyclic GFR-binding peptide
SSLSVLFFEYVRKKPKLLKVYPAAAAAAAAA

SEQ ID NO: 73542 - protein, 20 aa, Artificial Sequence
  Cyclic GFR-binding peptide
SSLSMLFFDNGRVLLLKVYP

SEQ ID NO: 73543 - protein, 24 aa, Artificial Sequence
  Cyclic GFR-binding peptide
ALSSLSILFFVGRKPKVLKVYPMI

SEQ ID NO: 73544 - protein, 27 aa, Artificial Sequence
  Cyclic GFR-binding peptide
  MOD_RES (1), (1): Xaa is C or S
XAPTQLSSLSVLFFDDSSNVILKVYPN

SEQ ID NO: 73545 - protein, 37 aa, Artificial Sequence; identical to SEQ ID NO: 25127
  Cyclic GFR-binding peptide
  MOD_RES (4), (5), (37): Xaa is C or S

SEQ ID NO: 73546 - protein, 35 aa, Artificial Sequence
  Cyclic GFR-binding peptide
  MOD_RES (7), (7): Xaa is C or S
HVTKPTXAPTKLSSLSVLFFDDSSNVILKVYPNMV

SEQ ID NO: 73547 - protein, 31 aa, Artificial Sequence
  Cyclic GFR-binding peptide
  MOD_RES (31), (31): Xaa is C or S
EESSLSMLFFRIKPHQGQHLKVYPFLQHNKX

SEQ ID NO: 73548 - protein, 42 aa, Artificial Sequence; identical to SEQ ID NO: 25129
  Cyclic GFR-binding peptide
  MOD_RES (6), (7), (39), (41): Xaa is C or S

SEQ ID NO: 73549 - protein, 30 aa, Artificial Sequence
  Cyclic GFR-binding peptide
  MOD_RES (28), (30): Xaa is C or S
SSLSVLFFDDMGVPTLKVYPEGMSVAEXGX

SEQ ID NO: 73550 - protein, 21 aa, Artificial Sequence
  Cyclic GFR-binding peptide
LSSLSVLFFDDMGVPTLKVYP

SEQ ID NO: 73551 - protein, 35 aa, Artificial Sequence
  Cyclic GFR-binding peptide
  MOD_RES (5), (6): Xaa is C or S
ASKAXXVPTKLSSLSILFFDKGVVTYLKVYPGMAV

SEQ ID NO: 73552 - protein, 36 aa, Artificial Sequence
  Cyclic GFR-binding peptide
  MOD_RES (6), (7): Xaa is C or S
KASKAXXVPTKLSSLSILFFDKGVVTYLKVYPGMAV

SEQ ID NO: 73553 - protein, 34 aa, Artificial Sequence; identical to SEQ ID NO: 25134
  Cyclic GFR-binding peptide
  MOD_RES (2), (3), (34): Xaa is C or S

SEQ ID NO: 73554 - protein, 23 aa, Artificial Sequence
  Cyclic GFR-binding peptide
KLSSLSVLFFDSSNNVILKVYPN

SEQ ID NO: 73555 - protein, 34 aa, Artificial Sequence; identical to SEQ ID NO: 25135
  Cyclic GFR-binding peptide
  MOD_RES (1), (32), (34): Xaa is C or S

SEQ ID NO: 73556 - protein, 26 aa, Artificial Sequence
  Cyclic GFR-binding peptide
DLSSLSILFFIGKTPKILKVYPMIVK

SEQ ID NO: 73557 - protein, 35 aa, Artificial Sequence; identical to SEQ ID NO: 25137
  Cyclic GFR-binding peptide
  MOD_RES (4), (5): Xaa is C or S

SEQ ID NO: 73558 - protein, 31 aa, Artificial Sequence
  Cyclic GFR-binding peptide
  MOD_RES (5), (6): Xaa is C or S
ASKAXXVPTKLSSLSILFFDKGVVTYLKVYP

SEQ ID NO: 73559 - protein, 28 aa, Artificial Sequence
  Cyclic GFR-binding peptide
VHHSSLSVLFFEYVRKKPKLLKVYPRLE

SEQ ID NO: 73560 - protein, 34 aa, Artificial Sequence; identical to SEQ ID NO: 25139
  Cyclic GFR-binding peptide
  MOD_RES (2), (3): Xaa is C or S

SEQ ID NO: 73561 - protein, 29 aa, Artificial Sequence
  Cyclic GFR-binding peptide
  MOD_RES (2), (2): Xaa is C or S
TXAPTKLSSLSVLFFDDSSNVILKVYPNM

SEQ ID NO: 73562 - protein, 36 aa, Artificial Sequence
  Cyclic GFR-binding peptide
  MOD_RES (6), (7): Xaa is C or S
ASAAPXXVPQALSSLSILFFVGRKPKVLKVYPMIVR

SEQ ID NO: 73563 - protein, 31 aa, Artificial Sequence
  Cyclic GFR-binding peptide
  MOD_RES (29), (31): Xaa is C or S
KLSSLSVLFFDSSNNVILKVYPNMVVKAXGX

SEQ ID NO: 73564 - protein, 33 aa, Artificial Sequence
  Cyclic GFR-binding peptide
  MOD_RES (31), (33): Xaa is C or S
PTRLSSLSILFFDSANNVVLKVYPDMVVESXGX

SEQ ID NO: 73565 - protein, 30 aa, Artificial Sequence
  Cyclic GFR-binding peptide
  MOD_RES (1), (1): Xaa is C or S
XAPTKLSSLSVLFFDSSNNVILKVYPNMVV

SEQ ID NO: 73566 - protein, 34 aa, Artificial Sequence
  Cyclic GFR-binding peptide
  MOD_RES (5), (6): Xaa is C or S
VPKAXXAPTKLSSLSVLFFDSSNNVILKVYPNMV

SEQ ID NO: 73567 - protein, 29 aa, Artificial Sequence
  Cyclic GFR-binding peptide
HSSLSVLFFEYVRKKPKLLKVYPRLEEHL

SEQ ID NO: 73568 - protein, 28 aa, Artificial Sequence
  Cyclic GFR-binding peptide
  MOD_RES (2), (3): Xaa is C or S
TXXAPVKTSSLSMLFFDNGRVLLLKVYP

SEQ ID NO: 73569 - protein, 39 aa, Artificial Sequence; identical to SEQ ID NO: 25145
  Cyclic GFR-binding peptide
  MOD_RES (2), (36), (38): Xaa is C or S

SEQ ID NO: 73570 - protein, 37 aa, Artificial Sequence; identical to SEQ ID NO: 25146
  Cyclic GFR-binding peptide
  MOD_RES (5), (6), (37): Xaa is C or S

SEQ ID NO: 73571 - protein, 30 aa, Artificial Sequence
  Cyclic GFR-binding peptide
  MOD_RES (2), (3): Xaa is C or S
PXXAPTQLSSLSVLFFDDSSNVILKVYPNM

SEQ ID NO: 73572 - protein, 29 aa, Artificial Sequence
  Cyclic GFR-binding peptide
  MOD_RES (3), (4): Xaa is C or S
APXXVPQALSSLSILFFVGRKPKVLKVYP

SEQ ID NO: 73573 - protein, 39 aa, Artificial Sequence; identical to SEQ ID NO: 25147
  Cyclic GFR-binding peptide
  MOD_RES (5), (37), (39): Xaa is C or S

SEQ ID NO: 73574 - protein, 38 aa, Artificial Sequence; identical to SEQ ID NO: 25148
  Cyclic GFR-binding peptide
  MOD_RES (6), (7): Xaa is C or S

SEQ ID NO: 73575 - protein, 32 aa, Artificial Sequence; identical to SEQ ID NO: 25149
  Cyclic GFR-binding peptide
  MOD_RES (32), (32): Xaa is C or S

SEQ ID NO: 73576 - protein, 34 aa, Artificial Sequence; identical to SEQ ID NO: 25150
  Cyclic GFR-binding peptide
  MOD_RES (1), (2), (34): Xaa is C or S

SEQ ID NO: 73577 - protein, 27 aa, Artificial Sequence
  Cyclic GFR-binding peptide
APTKLSSLSVLFFDSSNNVILKVYPNM

SEQ ID NO: 73578 - protein, 36 aa, Artificial Sequence; identical to SEQ ID NO: 25152
  Cyclic GFR-binding peptide
  MOD_RES (4), (5): Xaa is C or S

SEQ ID NO: 73579 - protein, 31 aa, Artificial Sequence
  Cyclic GFR-binding peptide
  MOD_RES (1), (2): Xaa is C or S
XXAPTQLSSLSVLFFDDSSNVILKVYPNMVV

SEQ ID NO: 73580 - protein, 34 aa, Artificial Sequence
  Cyclic GFR-binding peptide
  MOD_RES (6), (7): Xaa is C or S
AAPASXXVPARLSSLSILFFDAANNVVLKVYPDM

SEQ ID NO: 73581 - protein, 34 aa, Artificial Sequence
  Cyclic GFR-binding peptide
  MOD_RES (5), (6): Xaa is C or S
TPPTXXVPTRLSSLSILFFDSANNVVLKVYPDMV

SEQ ID NO: 73582 - protein, 33 aa, Artificial Sequence
  Cyclic GFR-binding peptide
  MOD_RES (5), (6): Xaa is C or S
VPKAXXAPTKLSSLSVLFFDSSNNVILKVYPNM

SEQ ID NO: 73583 - protein, 35 aa, Artificial Sequence; identical to SEQ ID NO: 25154
  Cyclic GFR-binding peptide
  MOD_RES (2), (3): Xaa is C or S

SEQ ID NO: 73584 - protein, 32 aa, Artificial Sequence
  Cyclic GFR-binding peptide
  MOD_RES (4), (5): Xaa is C or S
SKAXXVPTKLSSLSILFFDKGVVTYLKVYPGM

SEQ ID NO: 73585 - protein, 28 aa, Artificial Sequence
  Cyclic GFR-binding peptide
TKLSSLSVLFFDDMGVPTLKVYPEGMSV

SEQ ID NO: 73586 - protein, 31 aa, Artificial Sequence; identical to SEQ ID NO: 25155
  Cyclic GFR-binding peptide

SEQ ID NO: 73587 - protein, 32 aa, Artificial Sequence
  Cyclic GFR-binding peptide
  MOD_RES (31), (31): Xaa is C or S
PTELSSLSMLFFDENEKVVLKVYPDMVVEGXG

SEQ ID NO: 73588 - protein, 35 aa, Artificial Sequence; identical to SEQ ID NO: 25156
  Cyclic GFR-binding peptide
  MOD_RES (1), (32), (34): Xaa is C or S

SEQ ID NO: 73589 - protein, 24 aa, Artificial Sequence
  Cyclic GFR-binding peptide
SQDLSSLSILFFIGKTPKILKVYP

SEQ ID NO: 73590 - protein, 29 aa, Artificial Sequence
  Cyclic GFR-binding peptide
SSLSVLFFEYVRKKPKLLKVYPRLEEHLE

SEQ ID NO: 73591 - protein, 32 aa, Artificial Sequence; identical to SEQ ID NO: 25157
  Cyclic GFR-binding peptide
  MOD_RES (32), (32): Xaa is C or S

SEQ ID NO: 73592 - protein, 28 aa, Artificial Sequence
  Cyclic GFR-binding peptide
RVHHSSLSVLFFEYVRKKPKLLKVYPRL

SEQ ID NO: 73593 - protein, 29 aa, Artificial Sequence
  Cyclic GFR-binding peptide
  MOD_RES (27), (29): Xaa is C or S
TSSLSMLFFDNGRVLLLKVYPMIVEEXGX

SEQ ID NO: 73594 - protein, 25 aa, Artificial Sequence
  Cyclic GFR-binding peptide
PQDLSSLSILFFVGRTPKVLKVYPM

SEQ ID NO: 73595 - protein, 32 aa, Artificial Sequence
  Cyclic GFR-binding peptide
  MOD_RES (3), (4): Xaa is C or S
KPXXAPTQLSSLSVLFFDDSSNVILKVYPNMV

SEQ ID NO: 73596 - protein, 38 aa, Artificial Sequence; identical to SEQ ID NO: 25162
  Cyclic GFR-binding peptide
  MOD_RES (4), (5), (37): Xaa is C or S

SEQ ID NO: 73597 - protein, 30 aa, Artificial Sequence
  Cyclic GFR-binding peptide
  MOD_RES (1), (2): Xaa is C or S
XXVPQDLSSLSILFFVGRTPKVLKVYPMVV

SEQ ID NO: 73598 - protein, 35 aa, Artificial Sequence; identical to SEQ ID NO: 25163
  Cyclic GFR-binding peptide
  MOD_RES (3), (4): Xaa is C or S

SEQ ID NO: 73599 - protein, 36 aa, Artificial Sequence; identical to SEQ ID NO: 25164
  Cyclic GFR-binding peptide
  MOD_RES (1), (2), (33), (35): Xaa is C or S

SEQ ID NO: 73600 - protein, 30 aa, Artificial Sequence
  Cyclic GFR-binding peptide
  MOD_RES (1), (1): Xaa is C or S
XVPTELSSLSMLFFDEYDKVVLKVYPEMVV

SEQ ID NO: 73601 - protein, 29 aa, Artificial Sequence
  Cyclic GFR-binding peptide
TKLSSLSVLFFDDMGVPTLKVYPEGMSVA

SEQ ID NO: 73602 - protein, 39 aa, Artificial Sequence; identical to SEQ ID NO: 25165
  Cyclic GFR-binding peptide
  MOD_RES (3), (4), (36), (38): Xaa is C or S

SEQ ID NO: 73603 - protein, 30 aa, Artificial Sequence
  Cyclic GFR-binding peptide
  MOD_RES (1), (1): Xaa is C or S
XTPTKMSSLSMLFFNDKQQIILKVYPGMVV

SEQ ID NO: 73604 - protein, 24 aa, Artificial Sequence
  Cyclic GFR-binding peptide
PQALSSLSILFFVGRKPKVLKVYP

SEQ ID NO: 73605 - protein, 24 aa, Artificial Sequence
  Cyclic GFR-binding peptide
SSLSMLFFRIKPHQGQHLKVYPFL

SEQ ID NO: 73606 - protein, 36 aa, Artificial Sequence; identical to SEQ ID NO: 25166
  Cyclic GFR-binding peptide
  MOD_RES (1), (2), (34), (36): Xaa is C or S

SEQ ID NO: 73607 - protein, 27 aa, Artificial Sequence
  Cyclic GFR-binding peptide
  MOD_RES (27), (27): Xaa is C or S
LSSLSILFFVGRKPKVLKVYPMIVRSX

SEQ ID NO: 73608 - protein, 32 aa, Artificial Sequence
  Cyclic GFR-binding peptide
  MOD_RES (2), (3): Xaa is C or S
PXXAPTQLSSLSVLFFDDSSNVILKVYPNMVV

SEQ ID NO: 73609 - protein, 37 aa, Artificial Sequence; identical to SEQ ID NO: 25167
  Cyclic GFR-binding peptide
  MOD_RES (5), (37): Xaa is C or S

SEQ ID NO: 73610 - protein, 20 aa, Artificial Sequence
  Cyclic GFR-binding peptide
SSLSMLFFDENEKVVLKVYP

SEQ ID NO: 73611 - protein, 28 aa, Artificial Sequence
  Cyclic GFR-binding peptide
  MOD_RES (1), (2): Xaa is C or S
XXVPQALSSLSILFFVGRKPKVLKVYPM

SEQ ID NO: 73612 - protein, 28 aa, Artificial Sequence
  Cyclic GFR-binding peptide
  MOD_RES (1), (1): Xaa is C or S
XAPVKTSSLSMLFFDNGRVLLLKVYPMI

SEQ ID NO: 73613 - protein, 22 aa, Artificial Sequence
  Cyclic GFR-binding peptide
KTSSLSMLFFDNGRVLLLKVYP

SEQ ID NO: 73614 - protein, 26 aa, Artificial Sequence
  Cyclic GFR-binding peptide
RLSSLSILFFDAANNVVLKVYPDMVV

SEQ ID NO: 73615 - protein, 36 aa, Artificial Sequence; identical to SEQ ID NO: 25171
  Cyclic GFR-binding peptide
  MOD_RES (1), (33), (35): Xaa is C or S

SEQ ID NO: 73616 - protein, 27 aa, Artificial Sequence
  Cyclic GFR-binding peptide
VPQALSSLSILFFVGRKPKVLKVYPMI

SEQ ID NO: 73617 - protein, 33 aa, Artificial Sequence; identical to SEQ ID NO: 25172
  Cyclic GFR-binding peptide
  MOD_RES (1), (33): Xaa is C or S

SEQ ID NO: 73618 - protein, 35 aa, Artificial Sequence; identical to SEQ ID NO: 25174
  Cyclic GFR-binding peptide
  MOD_RES (32), (34): Xaa is C or S

SEQ ID NO: 73619 - protein, 38 aa, Artificial Sequence; identical to SEQ ID NO: 25175
  Cyclic GFR-binding peptide
  MOD_RES (37), (37): Xaa is C or S

SEQ ID NO: 73620 - protein, 35 aa, Artificial Sequence
  Cyclic GFR-binding peptide
  MOD_RES (5), (6): Xaa is C or S
SAAPXXVPQALSSLSILFFVGRKPKVLKVYPMIVR

SEQ ID NO: 73621 - protein, 36 aa, Artificial Sequence; identical to SEQ ID NO: 25178
  Cyclic GFR-binding peptide
  MOD_RES (2), (3), (35): Xaa is C or S

SEQ ID NO: 73622 - protein, 38 aa, Artificial Sequence; identical to SEQ ID NO: 25179
  Cyclic GFR-binding peptide
  MOD_RES (5), (6), (37): Xaa is C or S

SEQ ID NO: 73623 - protein, 39 aa, Artificial Sequence; identical to SEQ ID NO: 25181
  Cyclic GFR-binding peptide
  MOD_RES (6), (38): Xaa is C or S

SEQ ID NO: 73624 - protein, 37 aa, Artificial Sequence
  Cyclic GFR-binding peptide
  MOD_RES (3), (4), (36): Xaa is C or S
KAXXVPTELSSLSMLFFDENEKVVLKVYPDMVVEGXG

SEQ ID NO: 73625 - protein, 34 aa, Artificial Sequence; identical to SEQ ID NO: 25182
  Cyclic GFR-binding peptide
  MOD_RES (2), (34): Xaa is C or S

SEQ ID NO: 73626 - protein, 36 aa, Artificial Sequence
  Cyclic GFR-binding peptide
  MOD_RES (5), (6): Xaa is C or S
IPKAXXVPTELSSLSMLFFDENEKVVLKVYPDMVVE

SEQ ID NO: 73627 - protein, 26 aa, Artificial Sequence
  Cyclic GFR-binding peptide
ELSSLSMLFFDENEKVVLKVYPDMVV

SEQ ID NO: 73628 - protein, 40 aa, Artificial Sequence; identical to SEQ ID NO: 25183
  Cyclic GFR-binding peptide
  MOD_RES (3), (40): Xaa is C or S

SEQ ID NO: 73629 - protein, 31 aa, Artificial Sequence
  Cyclic GFR-binding peptide
  MOD_RES (1), (2): Xaa is C or S
XXAPVKTSSLSMLFFDNGRVLLLKVYPMIVE

SEQ ID NO: 73630 - protein, 37 aa, Artificial Sequence; identical to SEQ ID NO: 25184
  Cyclic GFR-binding peptide
  MOD_RES (2), (34), (36): Xaa is C or S

SEQ ID NO: 73631 - protein, 29 aa, Artificial Sequence
  Cyclic GFR-binding peptide
  MOD_RES (2), (3): Xaa is C or S
TXXAPVKTSSLSMLFFDNGRVLLLKVYPM

SEQ ID NO: 73632 - protein, 33 aa, Artificial Sequence
  Cyclic GFR-binding peptide
  MOD_RES (6), (7): Xaa is C or S
SIPKAXXVPTELSSLSMLFFDEYDKVVLKVYPE

SEQ ID NO: 73633 - protein, 40 aa, Artificial Sequence; identical to SEQ ID NO: 25185
  Cyclic GFR-binding peptide
  MOD_RES (4), (5), (37), (39): Xaa is C or S

SEQ ID NO: 73634 - protein, 32 aa, Artificial Sequence
  Cyclic GFR-binding peptide
  MOD_RES (31), (31): Xaa is C or S
PARLSSLSILFFDAANNVVLKVYPDMVVEAXG

SEQ ID NO: 73635 - protein, 20 aa, Artificial Sequence
  Cyclic GFR-binding peptide
SSLSMLFFDEYDKVVLKVYP

SEQ ID NO: 73636 - protein, 30 aa, Artificial Sequence
  Cyclic GFR-binding peptide
  MOD_RES (4), (5): Xaa is C or S
PKAXXAPTKLSSLSVLFFDSSNNVILKVYP

SEQ ID NO: 73637 - protein, 31 aa, Artificial Sequence
  Cyclic GFR-binding peptide
  MOD_RES (28), (30): Xaa is C or S
DLSSLSILFFIGKTPKILKVYPMIVKSXKXS

SEQ ID NO: 73638 - protein, 33 aa, Artificial Sequence
  Cyclic GFR-binding peptide
  MOD_RES (5), (6): Xaa is C or S
VGKAXXVPTKLSSLSVLFFDDMGVPTLKVYPEG

SEQ ID NO: 73639 - protein, 32 aa, Artificial Sequence
  Cyclic GFR-binding peptide
  MOD_RES (29), (31): Xaa is C or S
KLSSLSVLFFDSSNNVILKVYPNMVVKAXGXH

SEQ ID NO: 73640 - protein, 31 aa, Artificial Sequence
  Cyclic GFR-binding peptide
  MOD_RES (3), (4): Xaa is C or S
KAXXVPTKLSSLSVLFFDDMGVPTLKVYPEG

SEQ ID NO: 73641 - protein, 23 aa, Artificial Sequence
  Cyclic GFR-binding peptide
QDLSSLSILFFIGKTPKILKVYP

SEQ ID NO: 73642 - protein, 24 aa, Artificial Sequence
  Cyclic GFR-binding peptide
TQLSSLSVLFFDDSSNVILKVYPN

SEQ ID NO: 73643 - protein, 32 aa, Artificial Sequence
  Cyclic GFR-binding peptide
  MOD_RES (6), (6): Xaa is C or S
VTKPTXAPTKLSSLSVLFFDDSSNVILKVYPN

SEQ ID NO: 73644 - protein, 33 aa, Artificial Sequence
  Cyclic GFR-binding peptide
  MOD_RES (4), (4): Xaa is C or S
GLEXVPTEESSLSMLFFRIKPHQGQHLKVYPFL

SEQ ID NO: 73645 - protein, 27 aa, Artificial Sequence
  Cyclic GFR-binding peptide
TELSSLSMLFFDEYDKVVLKVYPEMVV

SEQ ID NO: 73646 - protein, 39 aa, Artificial Sequence; identical to SEQ ID NO: 25191
  Cyclic GFR-binding peptide
  MOD_RES (6), (7): Xaa is C or S

SEQ ID NO: 73647 - protein, 32 aa, Artificial Sequence
  Cyclic GFR-binding peptide
  MOD_RES (5), (6): Xaa is C or S
VPKPXXAPTKLSSLSVLFFDDSSNVILKVYPN

SEQ ID NO: 73648 - protein, 32 aa, Artificial Sequence; identical to SEQ ID NO: 25194
  Cyclic GFR-binding peptide
  MOD_RES (1), (2): Xaa is C or S

SEQ ID NO: 73649 - protein, 34 aa, Artificial Sequence; identical to SEQ ID NO: 25195
  Cyclic GFR-binding peptide
  MOD_RES (3), (4): Xaa is C or S

SEQ ID NO: 73650 - protein, 40 aa, Artificial Sequence
  Cyclic GFR-binding peptide
  MOD_RES (6), (7), (39): Xaa is C or S
KIPKAXXVPTELSSLSMLFFDENEKVVLKVYPDMVVEGXG

SEQ ID NO: 73651 - protein, 26 aa, Artificial Sequence
  Cyclic GFR-binding peptide
  MOD_RES (1), (1): Xaa is C or S
XTPTKMSSLSMLFFNDKQQIILKVYP

SEQ ID NO: 73652 - protein, 32 aa, Artificial Sequence
  Cyclic GFR-binding peptide
  MOD_RES (3), (4): Xaa is C or S
KAXXVPTKLSSLSVLFFDDMGVPTLKVYPEGM

SEQ ID NO: 73653 - protein, 28 aa, Artificial Sequence
  Cyclic GFR-binding peptide
  MOD_RES (26), (28): Xaa is C or S
SSLSILFFVGRKPKVLKVYPMIVRSXKX

SEQ ID NO: 73654 - protein, 30 aa, Artificial Sequence
  Cyclic GFR-binding peptide
  MOD_RES (1), (2): Xaa is C or S
XXAPVKTSSLSMLFFDNGRVLLLKVYPMIV

SEQ ID NO: 73655 - protein, 26 aa, Artificial Sequence
  Cyclic GFR-binding peptide
ALSSLSILFFVGRKPKVLKVYPMIVR

SEQ ID NO: 73656 - protein, 33 aa, Artificial Sequence
  Cyclic GFR-binding peptide
  MOD_RES (3), (4): Xaa is C or S
ASXXVPARLSSLSILFFDAANNVVLKVYPDMVV

SEQ ID NO: 73657 - protein, 34 aa, Artificial Sequence
  Cyclic GFR-binding peptide
  MOD_RES (5), (6): Xaa is C or S
ASKAXXVPTKLSSLSILFFDKGVVTYLKVYPGMA

SEQ ID NO: 73658 - protein, 35 aa, Artificial Sequence; identical to SEQ ID NO: 25200
  Cyclic GFR-binding peptide
  MOD_RES (1), (33), (35): Xaa is C or S

SEQ ID NO: 73659 - protein, 27 aa, Artificial Sequence
  Cyclic GFR-binding peptide
  MOD_RES (27), (27): Xaa is C or S
SSLSMLFFDEYDKVVLKVYPEMVVEGX

SEQ ID NO: 73660 - protein, 23 aa, Artificial Sequence
  Cyclic GFR-binding peptide
HSSLSVLFFEYVRKKPKLLKVYP

SEQ ID NO: 73661 - protein, 29 aa, Artificial Sequence
  Cyclic GFR-binding peptide
  MOD_RES (28), (28): Xaa is C or S
ALSSLSILFFVGRKPKVLKVYPMIVRSXK

SEQ ID NO: 73662 - protein, 28 aa, Artificial Sequence
  Cyclic GFR-binding peptide
QALSSLSILFFVGRKPKVLKVYPMIVRS

SEQ ID NO: 73663 - protein, 31 aa, Artificial Sequence; identical to SEQ ID NO: 25201
  Cyclic GFR-binding peptide
  MOD_RES (31), (31): Xaa is C or S

SEQ ID NO: 73664 - protein, 32 aa, Artificial Sequence; identical to SEQ ID NO: 25202
  Cyclic GFR-binding peptide
  MOD_RES (31), (31): Xaa is C or S

SEQ ID NO: 73665 - protein, 26 aa, Artificial Sequence
  Cyclic GFR-binding peptide
PTKMSSLSMLFFNDKQQIILKVYPGM

SEQ ID NO: 73666 - protein, 20 aa, Artificial Sequence
  Cyclic GFR-binding peptide
SSLSILFFIGKTPKILKVYP

SEQ ID NO: 73667 - protein, 30 aa, Artificial Sequence; identical to SEQ ID NO: 773
  Cyclic GFR-binding peptide

SEQ ID NO: 73668 - protein, 35 aa, Artificial Sequence
  Cyclic GFR-binding peptide
  MOD_RES (32), (34): Xaa is C or S
VPTELSSLSMLFFDENEKVVLKVYPDMVVEGXGXR

SEQ ID NO: 73669 - protein, 32 aa, Artificial Sequence; identical to SEQ ID NO: 25203
  Cyclic GFR-binding peptide
  MOD_RES (1), (1): Xaa is C or S

SEQ ID NO: 73670 - protein, 25 aa, Artificial Sequence
  Cyclic GFR-binding peptide
APVKTSSLSMLFFDNGRVLLLKVYP

SEQ ID NO: 73671 - protein, 25 aa, Artificial Sequence
  Cyclic GFR-binding peptide
PQALSSLSILFFVGRKPKVLKVYPM

SEQ ID NO: 73672 - protein, 29 aa, Artificial Sequence
  Cyclic GFR-binding peptide
  MOD_RES (27), (29): Xaa is C or S
SSLSMLFFDENEKVVLKVYPDMVVEGXGX

SEQ ID NO: 73673 - protein, 37 aa, Artificial Sequence
  Cyclic GFR-binding peptide
  MOD_RES (6), (6): Xaa is C or S
DEGLEXVPTEESSLSMLFFRIKPHQGQHLKVYPFLQH

SEQ ID NO: 73674 - protein, 30 aa, Artificial Sequence
  Cyclic GFR-binding peptide
  MOD_RES (30), (30): Xaa is C or S
TQLSSLSVLFFDDSSNVILKVYPNMVVRAX

SEQ ID NO: 73675 - protein, 29 aa, Artificial Sequence
  Cyclic GFR-binding peptide
  MOD_RES (26), (28): Xaa is C or S
SSLSILFFVGRKPKVLKVYPMIVRSXKXS

SEQ ID NO: 73676 - protein, 32 aa, Artificial Sequence
  Cyclic GFR-binding peptide
  MOD_RES (30), (32): Xaa is C or S
PVKTSSLSMLFFDNGRVLLLKVYPMIVEEXGX

SEQ ID NO: 73677 - protein, 36 aa, Artificial Sequence; identical to SEQ ID NO: 25206
  Cyclic GFR-binding peptide
  MOD_RES (4), (5), (36): Xaa is C or S

SEQ ID NO: 73678 - protein, 28 aa, Artificial Sequence
  Cyclic GFR-binding peptide
  MOD_RES (1), (2): Xaa is C or S
XXVPQDLSSLSILFFVGRTPKVLKVYPM

SEQ ID NO: 73679 - protein, 35 aa, Artificial Sequence; identical to SEQ ID NO: 25207
  Cyclic GFR-binding peptide
  MOD_RES (1), (2), (33), (35): Xaa is C or S

SEQ ID NO: 73680 - protein, 36 aa, Artificial Sequence; identical to SEQ ID NO: 25208
  Cyclic GFR-binding peptide
  MOD_RES (2), (2): Xaa is C or S

SEQ ID NO: 73681 - protein, 30 aa, Artificial Sequence
  Cyclic GFR-binding peptide
  MOD_RES (30), (30): Xaa is C or S
TELSSLSMLFFDEYDKVVLKVYPEMVVEGX

SEQ ID NO: 73682 - protein, 33 aa, Artificial Sequence; identical to SEQ ID NO: 25212
  Cyclic GFR-binding peptide
  MOD_RES (1), (32): Xaa is C or S

SEQ ID NO: 73683 - protein, 27 aa, Artificial Sequence
  Cyclic GFR-binding peptide
  MOD_RES (1), (1): Xaa is C or S
XAPVKTSSLSMLFFDNGRVLLLKVYPM

SEQ ID NO: 73684 - protein, 38 aa, Artificial Sequence; identical to SEQ ID NO: 25211
  Cyclic GFR-binding peptide
  MOD_RES (4), (5), (37): Xaa is C or S

SEQ ID NO: 73685 - protein, 30 aa, Artificial Sequence
  Cyclic GFR-binding peptide
  MOD_RES (2), (3): Xaa is C or S
PXXTPTKMSSLSMLFFNDKQQIILKVYPGM

SEQ ID NO: 73686 - protein, 26 aa, Artificial Sequence
  Cyclic GFR-binding peptide
QDLSSLSILFFIGKTPKILKVYPMIV

SEQ ID NO: 73687 - protein, 30 aa, Artificial Sequence
  Cyclic GFR-binding peptide
  MOD_RES (29), (29): Xaa is C or S
RLSSLSILFFDAANNVVLKVYPDMVVEAXG

SEQ ID NO: 73688 - protein, 32 aa, Artificial Sequence
  Cyclic GFR-binding peptide
  MOD_RES (6), (7): Xaa is C or S
TVPKPXXAPTQLSSLSVLFFDDSSNVILKVYP

SEQ ID NO: 73689 - protein, 36 aa, Artificial Sequence
  Cyclic GFR-binding peptide
  MOD_RES (7), (7): Xaa is C or S
NDEGLEXVPTEESSLSMLFFRIKPHQGQHLKVYPFL

SEQ ID NO: 73690 - protein, 37 aa, Artificial Sequence; identical to SEQ ID NO: 25215
  Cyclic GFR-binding peptide
  MOD_RES (5), (6): Xaa is C or S

SEQ ID NO: 73691 - protein, 42 aa, Artificial Sequence; identical to SEQ ID NO: 25216
  Cyclic GFR-binding peptide
  MOD_RES (2), (39), (41): Xaa is C or S

SEQ ID NO: 73692 - protein, 24 aa, Artificial Sequence
  Cyclic GFR-binding peptide
TSSLSMLFFDNGRVLLLKVYPMIV

SEQ ID NO: 73693 - protein, 32 aa, Artificial Sequence
  Cyclic GFR-binding peptide
  MOD_RES (4), (5): Xaa is C or S
GKAXXVPTKLSSLSVLFFDDMGVPTLKVYPEG

SEQ ID NO: 73694 - protein, 21 aa, Artificial Sequence
  Cyclic GFR-binding peptide
LSSLSVLFFDDSSNVILKVYP

SEQ ID NO: 73695 - protein, 33 aa, Artificial Sequence
  Cyclic GFR-binding peptide
QPSRVHHSSLSVLFFEYVRKKPKLLKVYPRLEE

SEQ ID NO: 73696 - protein, 22 aa, Artificial Sequence
  Cyclic GFR-binding peptide
LSSLSILFFDKGVVTYLKVYPG

SEQ ID NO: 73697 - protein, 32 aa, Artificial Sequence; identical to SEQ ID NO: 25217
  Cyclic GFR-binding peptide
  MOD_RES (31), (31): Xaa is C or S

SEQ ID NO: 73698 - protein, 28 aa, Artificial Sequence
  Cyclic GFR-binding peptide
  MOD_RES (27), (27): Xaa is C or S
SSLSVLFFDDSSNVILKVYPNMVVRAXG

SEQ ID NO: 73699 - protein, 29 aa, Artificial Sequence
  Cyclic GFR-binding peptide
  MOD_RES (4), (4): Xaa is C or S
KPTXAPTKLSSLSVLFFDDSSNVILKVYP

SEQ ID NO: 73700 - protein, 36 aa, Artificial Sequence
  Cyclic GFR-binding peptide
  MOD_RES (5), (5): Xaa is C or S
EGLEXVPTEESSLSMLFFRIKPHQGQHLKVYPFLQH

SEQ ID NO: 73701 - protein, 40 aa, Artificial Sequence; identical to SEQ ID NO: 25220
  Cyclic GFR-binding peptide
  MOD_RES (4), (5), (37), (39): Xaa is C or S

SEQ ID NO: 73702 - protein, 35 aa, Artificial Sequence; identical to SEQ ID NO: 25222
  Cyclic GFR-binding peptide
  MOD_RES (1), (35): Xaa is C or S

SEQ ID NO: 73703 - protein, 25 aa, Artificial Sequence
  Cyclic GFR-binding peptide
PTQLSSLSVLFFDDSSNVILKVYPN

SEQ ID NO: 73704 - protein, 21 aa, Artificial Sequence
  Cyclic GFR-binding peptide
SSLSMLFFDENEKVVLKVYPD

SEQ ID NO: 73705 - protein, 34 aa, Artificial Sequence; identical to SEQ ID NO: 25223
  Cyclic GFR-binding peptide
  MOD_RES (1), (33): Xaa is C or S

SEQ ID NO: 73706 - protein, 24 aa, Artificial Sequence
  Cyclic GFR-binding peptide
RLSSLSILFFDAANNVVLKVYPDM

SEQ ID NO: 73707 - protein, 30 aa, Artificial Sequence
  Cyclic GFR-binding peptide
  MOD_RES (29), (29): Xaa is C or S
QDLSSLSILFFIGKTPKILKVYPMIVKSXK

SEQ ID NO: 73708 - protein, 33 aa, Artificial Sequence
  Cyclic GFR-binding peptide
  MOD_RES (5), (6): Xaa is C or S
IPKAXXVPTELSSLSMLFFDEYDKVVLKVYPEM

SEQ ID NO: 73709 - protein, 32 aa, Artificial Sequence
  Cyclic GFR-binding peptide
  MOD_RES (3), (4): Xaa is C or S
KAXXVPTKLSSLSILFFDKGVVTYLKVYPGMA

SEQ ID NO: 73710 - protein, 31 aa, Artificial Sequence
  Cyclic GFR-binding peptide
  MOD_RES (2), (3): Xaa is C or S
TXXVPTRLSSLSILFFDSANNVVLKVYPDMV

SEQ ID NO: 73711 - protein, 26 aa, Artificial Sequence
  Cyclic GFR-binding peptide
  MOD_RES (1), (1): Xaa is C or S
XVPQALSSLSILFFVGRKPKVLKVYP

SEQ ID NO: 73712 - protein, 31 aa, Artificial Sequence
  Cyclic GFR-binding peptide
  MOD_RES (29), (31): Xaa is C or S
VKTSSLSMLFFDNGRVLLLKVYPMIVEEXGX

SEQ ID NO: 73713 - protein, 27 aa, Artificial Sequence
  Cyclic GFR-binding peptide
  MOD_RES (27), (27): Xaa is C or S
SSLSILFFDAANNVVLKVYPDMVVEAX

SEQ ID NO: 73714 - protein, 30 aa, Artificial Sequence
  Cyclic GFR-binding peptide
  MOD_RES (29), (29): Xaa is C or S
ELSSLSMLFFDENEKVVLKVYPDMVVEGXG

SEQ ID NO: 73715 - protein, 37 aa, Artificial Sequence; identical to SEQ ID NO: 25226
  Cyclic GFR-binding peptide
  MOD_RES (5), (6): Xaa is C or S

SEQ ID NO: 73716 - protein, 30 aa, Artificial Sequence
  Cyclic GFR-binding peptide
  MOD_RES (2), (3): Xaa is C or S
AXXVPTELSSLSMLFFDEYDKVVLKVYPEM

SEQ ID NO: 73717 - protein, 40 aa, Artificial Sequence; identical to SEQ ID NO: 25227
  Cyclic GFR-binding peptide
  MOD_RES (5), (6), (38), (40): Xaa is C or S

SEQ ID NO: 73718 - protein, 33 aa, Artificial Sequence
  Cyclic GFR-binding peptide
  MOD_RES (30), (32): Xaa is C or S
ARLSSLSILFFDAANNVVLKVYPDMVVEAXGXR

SEQ ID NO: 73719 - protein, 38 aa, Artificial Sequence
  Cyclic GFR-binding peptide
  MOD_RES (5), (6), (38): Xaa is C or S
IPKAXXVPTELSSLSMLFFDENEKVVLKVYPDMVVEGX

SEQ ID NO: 73720 - protein, 31 aa, Artificial Sequence
  Cyclic GFR-binding peptide
  MOD_RES (4), (4): Xaa is C or S
GLEXVPTEESSLSMLFFRIKPHQGQHLKVYP

SEQ ID NO: 73721 - protein, 23 aa, Artificial Sequence
  Cyclic GFR-binding peptide
VKTSSLSMLFFDNGRVLLLKVYP

SEQ ID NO: 73722 - protein, 33 aa, Artificial Sequence; identical to SEQ ID NO: 25230
  Cyclic GFR-binding peptide
  MOD_RES (33), (33): Xaa is C or S

SEQ ID NO: 73723 - protein, 29 aa, Artificial Sequence
  Cyclic GFR-binding peptide
  MOD_RES (29), (29): Xaa is C or S
KMSSLSMLFFNDKQQIILKVYPGMVVDRX

SEQ ID NO: 73724 - protein, 28 aa, Artificial Sequence
  Cyclic GFR-binding peptide
PSRVHHSSLSVLFFEYVRKKPKLLKVYP

SEQ ID NO: 73725 - protein, 31 aa, Artificial Sequence
  Cyclic GFR-binding peptide
  MOD_RES (4), (5): Xaa is C or S
PKAXXAPTKLSSLSVLFFDSSNNVILKVYPN

SEQ ID NO: 73726 - protein, 39 aa, Artificial Sequence; identical to SEQ ID NO: 25231
  Cyclic GFR-binding peptide
  MOD_RES (4), (4): Xaa is C or S

SEQ ID NO: 73727 - protein, 32 aa, Artificial Sequence
  Cyclic GFR-binding peptide
  MOD_RES (31), (31): Xaa is C or S
PTKLSSLSVLFFDSSNNVILKVYPNMVVKAXG

SEQ ID NO: 73728 - protein, 36 aa, Artificial Sequence; identical to SEQ ID NO: 25233
  Cyclic GFR-binding peptide
  MOD_RES (5), (6): Xaa is C or S

SEQ ID NO: 73729 - protein, 34 aa, Artificial Sequence
  Cyclic GFR-binding peptide
  MOD_RES (5), (5): Xaa is C or S
TKPTXAPTKLSSLSVLFFDDSSNVILKVYPNMVV

SEQ ID NO: 73730 - protein, 25 aa, Artificial Sequence
  Cyclic GFR-binding peptide
SQDLSSLSILFFIGKTPKILKVYPM

SEQ ID NO: 73731 - protein, 32 aa, Artificial Sequence; identical to SEQ ID NO: 25236
  Cyclic GFR-binding peptide
  MOD_RES (1), (2): Xaa is C or S

SEQ ID NO: 73732 - protein, 34 aa, Artificial Sequence; identical to SEQ ID NO: 25235
  Cyclic GFR-binding peptide
  MOD_RES (32), (34): Xaa is C or S

SEQ ID NO: 73733 - protein, 28 aa, Artificial Sequence
  Cyclic GFR-binding peptide
ARLSSLSILFFDAANNVVLKVYPDMVVE

SEQ ID NO: 73734 - protein, 24 aa, Artificial Sequence
  Cyclic GFR-binding peptide
QLSSLSVLFFDDSSNVILKVYPNM

SEQ ID NO: 73735 - protein, 27 aa, Artificial Sequence
  Cyclic GFR-binding peptide
  MOD_RES (1), (2): Xaa is C or S
XXVPTELSSLSMLFFDENEKVVLKVYP

SEQ ID NO: 73736 - protein, 39 aa, Artificial Sequence; identical to SEQ ID NO: 25238
  Cyclic GFR-binding peptide
  MOD_RES (6), (7), (39): Xaa is C or S

SEQ ID NO: 73737 - protein, 31 aa, Artificial Sequence
  Cyclic GFR-binding peptide
  MOD_RES (30), (30): Xaa is C or S
SSLSVLFFEYVRKKPKLLKVYPRLEEHLEXA

SEQ ID NO: 73738 - protein, 33 aa, Artificial Sequence
  Cyclic GFR-binding peptide
  MOD_RES (4), (5): Xaa is C or S
PKAXXAPTKLSSLSVLFFDSSNNVILKVYPNMV

SEQ ID NO: 73739 - protein, 35 aa, Artificial Sequence; identical to SEQ ID NO: 25242
  Cyclic GFR-binding peptide
  MOD_RES (5), (5): Xaa is C or S

SEQ ID NO: 73740 - protein, 25 aa, Artificial Sequence
  Cyclic GFR-binding peptide
LSSLSVLFFDSSNNVILKVYPNMVV

SEQ ID NO: 73741 - protein, 32 aa, Artificial Sequence
  Cyclic GFR-binding peptide
  MOD_RES (3), (4): Xaa is C or S
PTXXVPTRLSSLSILFFDSANNVVLKVYPDMV

SEQ ID NO: 73742 - protein, 35 aa, Artificial Sequence
  Cyclic GFR-binding peptide
  MOD_RES (5), (6): Xaa is C or S
VPKPXXAPTKLSSLSVLFFDDSSNVILKVYPNMVV

SEQ ID NO: 73743 - protein, 33 aa, Artificial Sequence
  Cyclic GFR-binding peptide
  MOD_RES (2), (2): Xaa is C or S
EXVPTEESSLSMLFFRIKPHQGQHLKVYPFLQH

SEQ ID NO: 73744 - protein, 32 aa, Artificial Sequence
  Cyclic GFR-binding peptide
  MOD_RES (4), (4): Xaa is C or S
KPTXAPTKLSSLSVLFFDDSSNVILKVYPNMV

SEQ ID NO: 73745 - protein, 32 aa, Artificial Sequence
  Cyclic GFR-binding peptide
  MOD_RES (5), (6): Xaa is C or S
TPPTXXVPTRLSSLSILFFDSANNVVLKVYPD

SEQ ID NO: 73746 - protein, 40 aa, Artificial Sequence; identical to SEQ ID NO: 25247
  Cyclic GFR-binding peptide
  MOD_RES (6), (38), (40): Xaa is C or S

SEQ ID NO: 73747 - protein, 24 aa, Artificial Sequence
  Cyclic GFR-binding peptide
HSSLSVLFFEYVRKKPKLLKVYPR

SEQ ID NO: 73748 - protein, 40 aa, Artificial Sequence; identical to SEQ ID NO: 25249
  Cyclic GFR-binding peptide
  MOD_RES (6), (7), (38), (40): Xaa is C or S

SEQ ID NO: 73749 - protein, 28 aa, Artificial Sequence
  Cyclic GFR-binding peptide
PVKTSSLSMLFFDNGRVLLLKVYPMIVE

SEQ ID NO: 73750 - protein, 29 aa, Artificial Sequence
  Cyclic GFR-binding peptide
  MOD_RES (2), (3): Xaa is C or S
AXXVPTKLSSLSVLFFDDMGVPTLKVYPE

SEQ ID NO: 73751 - protein, 24 aa, Artificial Sequence
  Cyclic GFR-binding peptide
SSLSILFFDKGVVTYLKVYPGMAV

SEQ ID NO: 73752 - protein, 28 aa, Artificial Sequence
  Cyclic GFR-binding peptide
  MOD_RES (1), (1): Xaa is C or S
XVPQDLSSLSILFFVGRTPKVLKVYPMV

SEQ ID NO: 73753 - protein, 22 aa, Artificial Sequence
  Cyclic GFR-binding peptide
SSLSMLFFDENEKVVLKVYPDM

SEQ ID NO: 73754 - protein, 38 aa, Artificial Sequence; identical to SEQ ID NO: 25254
  Cyclic GFR-binding peptide
  MOD_RES (3), (4), (35), (37): Xaa is C or S

SEQ ID NO: 73755 - protein, 35 aa, Artificial Sequence; identical to SEQ ID NO: 25255
  Cyclic GFR-binding peptide
  MOD_RES (1), (2), (34): Xaa is C or S

SEQ ID NO: 73756 - protein, 28 aa, Artificial Sequence
  Cyclic GFR-binding peptide
  MOD_RES (28), (28): Xaa is C or S
LSSLSILFFDSANNVVLKVYPDMVVESX

SEQ ID NO: 73757 - protein, 24 aa, Artificial Sequence
  Cyclic GFR-binding peptide
SSLSVLFFDDSSNVILKVYPNMVV

SEQ ID NO: 73758 - protein, 28 aa, Artificial Sequence
  Cyclic GFR-binding peptide
  MOD_RES (1), (1): Xaa is C or S
XVPTKLSSLSILFFDKGVVTYLKVYPGM

SEQ ID NO: 73759 - protein, 38 aa, Artificial Sequence; identical to SEQ ID NO: 25257
  Cyclic GFR-binding peptide
  MOD_RES (3), (4), (36), (38): Xaa is C or S

SEQ ID NO: 73760 - protein, 30 aa, Artificial Sequence
  Cyclic GFR-binding peptide
  MOD_RES (3), (4): Xaa is C or S
KAXXVPTKLSSLSVLFFDDMGVPTLKVYPE

SEQ ID NO: 73761 - protein, 29 aa, Artificial Sequence
  Cyclic GFR-binding peptide
PVKTSSLSMLFFDNGRVLLLKVYPMIVEE

SEQ ID NO: 73762 - protein, 33 aa, Artificial Sequence
  Cyclic GFR-binding peptide
  MOD_RES (3), (4): Xaa is C or S
APXXVPQALSSLSILFFVGRKPKVLKVYPMIVR

SEQ ID NO: 73763 - protein, 22 aa, Artificial Sequence
  Cyclic GFR-binding peptide
KLSSLSVLFFDSSNNVILKVYP

SEQ ID NO: 73764 - protein, 22 aa, Artificial Sequence
  Cyclic GFR-binding peptide
LSSLSILFFVGRKPKVLKVYPM

SEQ ID NO: 73765 - protein, 33 aa, Artificial Sequence
  Cyclic GFR-binding peptide
  MOD_RES (31), (33): Xaa is C or S
TKLSSLSVLFFDDMGVPTLKVYPEGMSVAEXGX

SEQ ID NO: 73766 - protein, 34 aa, Artificial Sequence
  Cyclic GFR-binding peptide
  MOD_RES (31), (33): Xaa is C or S
PTKMSSLSMLFFNDKQQIILKVYPGMVVDRXGXS

SEQ ID NO: 73767 - protein, 33 aa, Artificial Sequence; identical to SEQ ID NO: 25260
  Cyclic GFR-binding peptide
  MOD_RES (1), (2): Xaa is C or S

SEQ ID NO: 73768 - protein, 30 aa, Artificial Sequence
  Cyclic GFR-binding peptide
QPSRVHHSSLSVLFFEYVRKKPKLLKVYPR

SEQ ID NO: 73769 - protein, 31 aa, Artificial Sequence
  Cyclic GFR-binding peptide
  MOD_RES (5), (6): Xaa is C or S
APASXXVPARLSSLSILFFDAANNVVLKVYP

SEQ ID NO: 73770 - protein, 39 aa, Artificial Sequence; identical to SEQ ID NO: 25262
  Cyclic GFR-binding peptide
  MOD_RES (6), (6): Xaa is C or S

SEQ ID NO: 73771 - protein, 38 aa, Artificial Sequence; identical to SEQ ID NO: 25263
  Cyclic GFR-binding peptide
  MOD_RES (35), (37): Xaa is C or S

SEQ ID NO: 73772 - protein, 27 aa, Artificial Sequence
  Cyclic GFR-binding peptide
SSLSVLFFEYVRKKPKLLKVYPRLEEH

SEQ ID NO: 73773 - protein, 30 aa, Artificial Sequence
  Cyclic GFR-binding peptide
  MOD_RES (27), (29): Xaa is C or S
SSLSVLFFDDSSNVILKVYPNMVVRSXGXH

SEQ ID NO: 73774 - protein, 36 aa, Artificial Sequence; identical to SEQ ID NO: 25264
  Cyclic GFR-binding peptide
  MOD_RES (4), (5): Xaa is C or S

SEQ ID NO: 73775 - protein, 37 aa, Artificial Sequence
  Cyclic GFR-binding peptide
  MOD_RES (1), (2), (34), (36): Xaa is C or S
XXVPTELSSLSMLFFDENEKVVLKVYPDMVVEGXGXR

SEQ ID NO: 73776 - protein, 33 aa, Artificial Sequence
  Cyclic GFR-binding peptide
  MOD_RES (4), (5): Xaa is C or S
PSTXXAPVKTSSLSMLFFDNGRVLLLKVYPMIV

SEQ ID NO: 73777 - protein, 28 aa, Artificial Sequence
  Cyclic GFR-binding peptide
TELSSLSMLFFDEYDKVVLKVYPEMVVE

SEQ ID NO: 73778 - protein, 26 aa, Artificial Sequence
  Cyclic GFR-binding peptide
  MOD_RES (1), (1): Xaa is C or S
XVSQDLSSLSILFFIGKTPKILKVYP

SEQ ID NO: 73779 - protein, 32 aa, Artificial Sequence
  Cyclic GFR-binding peptide
  MOD_RES (2), (3): Xaa is C or S
AXXAPTKLSSLSVLFFDSSNNVILKVYPNMVV

SEQ ID NO: 73780 - protein, 33 aa, Artificial Sequence
  Cyclic GFR-binding peptide
  MOD_RES (3), (4): Xaa is C or S
GPXXTPTKMSSLSMLFFNDKQQIILKVYPGMVV

SEQ ID NO: 73781 - protein, 41 aa, Artificial Sequence; identical to SEQ ID NO: 25267
  Cyclic GFR-binding peptide
  MOD_RES (6), (7), (39), (41): Xaa is C or S

SEQ ID NO: 73782 - protein, 30 aa, Artificial Sequence
  Cyclic GFR-binding peptide
  MOD_RES (29), (29): Xaa is C or S
KMSSLSMLFFNDKQQIILKVYPGMVVDRXG

SEQ ID NO: 73783 - protein, 36 aa, Artificial Sequence; identical to SEQ ID NO: 25268
  Cyclic GFR-binding peptide
  MOD_RES (3), (4), (36): Xaa is C or S

SEQ ID NO: 73784 - protein, 32 aa, Artificial Sequence
  Cyclic GFR-binding peptide
  MOD_RES (29), (31): Xaa is C or S
KLSSLSILFFDKGVVTYLKVYPGMAVSEXGXR

SEQ ID NO: 73785 - protein, 38 aa, Artificial Sequence
  Cyclic GFR-binding peptide
  MOD_RES (6), (7): Xaa is C or S
KVGKAXXVPTKLSSLSVLFFDDMGVPTLKVYPEGMSVA

SEQ ID NO: 73786 - protein, 41 aa, Artificial Sequence; identical to SEQ ID NO: 25270
  Cyclic GFR-binding peptide
  MOD_RES (6), (7), (38), (40): Xaa is C or S

SEQ ID NO: 73787 - protein, 38 aa, Artificial Sequence; identical to SEQ ID NO: 25271
  Cyclic GFR-binding peptide
  MOD_RES (5), (6), (37): Xaa is C or S

SEQ ID NO: 73788 - protein, 30 aa, Artificial Sequence
  Cyclic GFR-binding peptide
TKLSSLSVLFFDDMGVPTLKVYPEGMSVAE

SEQ ID NO: 73789 - protein, 35 aa, Artificial Sequence; identical to SEQ ID NO: 25274
  Cyclic GFR-binding peptide
  MOD_RES (4), (5): Xaa is C or S

SEQ ID NO: 73790 - protein, 30 aa, Artificial Sequence
  Cyclic GFR-binding peptide
  MOD_RES (29), (29): Xaa is C or S
VKTSSLSMLFFDNGRVLLLKVYPMIVEEXG

SEQ ID NO: 73791 - protein, 28 aa, Artificial Sequence
  Cyclic GFR-binding peptide
  MOD_RES (27), (27): Xaa is C or S
SSLSMLFFDEYDKVVLKVYPEMVVEGXG

SEQ ID NO: 73792 - protein, 33 aa, Artificial Sequence
  Cyclic GFR-binding peptide
  MOD_RES (5), (6): Xaa is C or S
VPKPXXAPTKLSSLSVLFFDDSSNVILKVYPNM

SEQ ID NO: 73793 - protein, 30 aa, Artificial Sequence
  Cyclic GFR-binding peptide
  MOD_RES (2), (2): Xaa is C or S
EXVPTEESSLSMLFFRIKPHQGQHLKVYPF

SEQ ID NO: 73794 - protein, 23 aa, Artificial Sequence
  Cyclic GFR-binding peptide
SSLSMLFFDENEKVVLKVYPDMV

SEQ ID NO: 73795 - protein, 33 aa, Artificial Sequence
  Cyclic GFR-binding peptide
  MOD_RES (33), (33): Xaa is C or S
VHHSSLSVLFFEYVRKKPKLLKVYPRLEEHLEX

SEQ ID NO: 73796 - protein, 36 aa, Artificial Sequence; identical to SEQ ID NO: 25276
  Cyclic GFR-binding peptide
  MOD_RES (4), (4): Xaa is C or S

SEQ ID NO: 73797 - protein, 34 aa, Artificial Sequence; identical to SEQ ID NO: 25278
  Cyclic GFR-binding peptide
  MOD_RES (1), (2), (34): Xaa is C or S

SEQ ID NO: 73798 - protein, 25 aa, Artificial Sequence
  Cyclic GFR-binding peptide
VKTSSLSMLFFDNGRVLLLKVYPMI

SEQ ID NO: 73799 - protein, 35 aa, Artificial Sequence; identical to SEQ ID NO: 25279
  Cyclic GFR-binding peptide
  MOD_RES (2), (3), (35): Xaa is C or S

SEQ ID NO: 73800 - protein, 37 aa, Artificial Sequence; identical to SEQ ID NO: 25281
  Cyclic GFR-binding peptide
  MOD_RES (35), (37): Xaa is C or S

SEQ ID NO: 73801 - protein, 25 aa, Artificial Sequence
  Cyclic GFR-binding peptide
VPTELSSLSMLFFDEYDKVVLKVYP

SEQ ID NO: 73802 - protein, 27 aa, Artificial Sequence
  Cyclic GFR-binding peptide
QLSSLSVLFFDDSSNVILKVYPNMVVR

SEQ ID NO: 73803 - protein, 35 aa, Artificial Sequence
  Cyclic GFR-binding peptide
  MOD_RES (5), (5): Xaa is C or S
EGLEXVPTEESSLSMLFFRIKPHQGQHLKVYPFLQ

SEQ ID NO: 73804 - protein, 34 aa, Artificial Sequence
  Cyclic GFR-binding peptide
  MOD_RES (4), (5): Xaa is C or S
PKAXXVPTELSSLSMLFFDEYDKVVLKVYPEMVV

SEQ ID NO: 73805 - protein, 26 aa, Artificial Sequence
  Cyclic GFR-binding peptide
ARLSSLSILFFDAANNVVLKVYPDMV

SEQ ID NO: 73806 - protein, 40 aa, Artificial Sequence; identical to SEQ ID NO: 25285
  Cyclic GFR-binding peptide
  MOD_RES (5), (6), (38), (40): Xaa is C or S

SEQ ID NO: 73807 - protein, 25 aa, Artificial Sequence
  Cyclic GFR-binding peptide
TELSSLSMLFFDEYDKVVLKVYPEM

SEQ ID NO: 73808 - protein, 28 aa, Artificial Sequence
  Cyclic GFR-binding peptide
  MOD_RES (27), (27): Xaa is C or S
SSLSVLFFDDSSNVILKVYPNMVVRSXG

SEQ ID NO: 73809 - protein, 25 aa, Artificial Sequence
  Cyclic GFR-binding peptide
SSLSVLFFDDSSNVILKVYPNMVVR

SEQ ID NO: 73810 - protein, 27 aa, Artificial Sequence
  Cyclic GFR-binding peptide
VSQDLSSLSILFFIGKTPKILKVYPMI

SEQ ID NO: 73811 - protein, 29 aa, Artificial Sequence
  Cyclic GFR-binding peptide
  MOD_RES (28), (28): Xaa is C or S
LSSLSVLFFDDSSNVILKVYPNMVVRSXG

SEQ ID NO: 73812 - protein, 30 aa, Artificial Sequence
  Cyclic GFR-binding peptide
  MOD_RES (27), (29): Xaa is C or S
SSLSILFFDKGVVTYLKVYPGMAVSEXGXR

SEQ ID NO: 73813 - protein, 36 aa, Artificial Sequence; identical to SEQ ID NO: 25288
  Cyclic GFR-binding peptide
  MOD_RES (2), (34), (36): Xaa is C or S

SEQ ID NO: 73814 - protein, 21 aa, Artificial Sequence
  Cyclic GFR-binding peptide
SSLSVLFFDDSSNVILKVYPN

SEQ ID NO: 73815 - protein, 34 aa, Artificial Sequence; identical to SEQ ID NO: 25289
  Cyclic GFR-binding peptide
  MOD_RES (31), (33): Xaa is C or S

SEQ ID NO: 73816 - protein, 36 aa, Artificial Sequence; identical to SEQ ID NO: 25290
  Cyclic GFR-binding peptide
  MOD_RES (3), (4), (36): Xaa is C or S

SEQ ID NO: 73817 - protein, 33 aa, Artificial Sequence
  Cyclic GFR-binding peptide
  MOD_RES (30), (32): Xaa is C or S
PQALSSLSILFFVGRKPKVLKVYPMIVRSXKXS

SEQ ID NO: 73818 - protein, 35 aa, Artificial Sequence; identical to SEQ ID NO: 25292
  Cyclic GFR-binding peptide
  MOD_RES (3), (4): Xaa is C or S

SEQ ID NO: 73819 - protein, 29 aa, Artificial Sequence
  Cyclic GFR-binding peptide
  MOD_RES (29), (29): Xaa is C or S
KLSSLSILFFDKGVVTYLKVYPGMAVSEX

SEQ ID NO: 73820 - protein, 36 aa, Artificial Sequence; identical to SEQ ID NO: 25294
  Cyclic GFR-binding peptide
  MOD_RES (2), (3), (34), (36): Xaa is C or S

SEQ ID NO: 73821 - protein, 27 aa, Artificial Sequence
  Cyclic GFR-binding peptide
ALSSLSILFFVGRKPKVLKVYPMIVRS

SEQ ID NO: 73822 - protein, 42 aa, Artificial Sequence; identical to SEQ ID NO: 25295
  Cyclic GFR-binding peptide
  MOD_RES (7), (39), (41): Xaa is C or S

SEQ ID NO: 73823 - protein, 27 aa, Artificial Sequence
  Cyclic GFR-binding peptide
VPTKLSSLSVLFFDDMGVPTLKVYPEG

SEQ ID NO: 73824 - protein, 34 aa, Artificial Sequence
  Cyclic GFR-binding peptide
  MOD_RES (6), (7): Xaa is C or S
TVPKPXXAPTQLSSLSVLFFDDSSNVILKVYPNM

SEQ ID NO: 73825 - protein, 38 aa, Artificial Sequence; identical to SEQ ID NO: 25297
  Cyclic GFR-binding peptide
  MOD_RES (5), (6), (38): Xaa is C or S

SEQ ID NO: 73826 - protein, 35 aa, Artificial Sequence; identical to SEQ ID NO: 25298
  Cyclic GFR-binding peptide

SEQ ID NO: 73827 - protein, 35 aa, Artificial Sequence; identical to SEQ ID NO: 25299
  Cyclic GFR-binding peptide
  MOD_RES (4), (5): Xaa is C or S

SEQ ID NO: 73828 - protein, 31 aa, Artificial Sequence
  Cyclic GFR-binding peptide
  MOD_RES (30), (30): Xaa is C or S
TELSSLSMLFFDEYDKVVLKVYPEMVVEGXG

SEQ ID NO: 73829 - protein, 21 aa, Artificial Sequence
  Cyclic GFR-binding peptide
LSSLSILFFDKGVVTYLKVYP

SEQ ID NO: 73830 - protein, 26 aa, Artificial Sequence
  Cyclic GFR-binding peptide
LSSLSMLFFDENEKVVLKVYPDMVVE

SEQ ID NO: 73831 - protein, 32 aa, Artificial Sequence
  Cyclic GFR-binding peptide
  MOD_RES (5), (6): Xaa is C or S
IPKAXXVPTELSSLSMLFFDENEKVVLKVYPD

SEQ ID NO: 73832 - protein, 29 aa, Artificial Sequence
  Cyclic GFR-binding peptide
  MOD_RES (27), (29): Xaa is C or S
LSSLSILFFVGRKPKVLKVYPMIVRSXKX

SEQ ID NO: 73833 - protein, 36 aa, Artificial Sequence; identical to SEQ ID NO: 25302
  Cyclic GFR-binding peptide
  MOD_RES (1), (1): Xaa is C or S

SEQ ID NO: 73834 - protein, 26 aa, Artificial Sequence
  Cyclic GFR-binding peptide
  MOD_RES (1), (1): Xaa is C or S
XVPQDLSSLSILFFVGRTPKVLKVYP

SEQ ID NO: 73835 - protein, 27 aa, Artificial Sequence
  Cyclic GFR-binding peptide
TKLSSLSVLFFDSSNNVILKVYPNMVV

SEQ ID NO: 73836 - protein, 25 aa, Artificial Sequence
  Cyclic GFR-binding peptide
QDLSSLSILFFVGRTPKVLKVYPMV

SEQ ID NO: 73837 - protein, 38 aa, Artificial Sequence; identical to SEQ ID NO: 25304
  Cyclic GFR-binding peptide
  MOD_RES (2), (3), (35), (37): Xaa is C or S

SEQ ID NO: 73838 - protein, 26 aa, Artificial Sequence
  Cyclic GFR-binding peptide
PTKLSSLSVLFFDDMGVPTLKVYPEG

SEQ ID NO: 73839 - protein, 22 aa, Artificial Sequence
  Cyclic GFR-binding peptide
DLSSLSILFFVGRTPKVLKVYP

SEQ ID NO: 73840 - protein, 32 aa, Artificial Sequence
  Cyclic GFR-binding peptide
  MOD_RES (30), (32): Xaa is C or S
KLSSLSVLFFDDMGVPTLKVYPEGMSVAEXGX

SEQ ID NO: 73841 - protein, 42 aa, Artificial Sequence; identical to SEQ ID NO: 25307
  Cyclic GFR-binding peptide
  MOD_RES (5), (6), (39), (41): Xaa is C or S

SEQ ID NO: 73842 - protein, 39 aa, Artificial Sequence
  Cyclic GFR-binding peptide
  MOD_RES (3), (4), (36), (38): Xaa is C or S
KAXXVPTELSSLSMLFFDENEKVVLKVYPDMVVEGXGXR

SEQ ID NO: 73843 - protein, 25 aa, Artificial Sequence
  Cyclic GFR-binding peptide
TKLSSLSILFFDKGVVTYLKVYPGM

SEQ ID NO: 73844 - protein, 21 aa, Artificial Sequence
  Cyclic GFR-binding peptide
SSLSMLFFNDKQQIILKVYPG

SEQ ID NO: 73845 - protein, 22 aa, Artificial Sequence
  Cyclic GFR-binding peptide
ELSSLSMLFFDENEKVVLKVYP

SEQ ID NO: 73846 - protein, 27 aa, Artificial Sequence
  Cyclic GFR-binding peptide
LSSLSILFFDAANNVVLKVYPDMVVEA

SEQ ID NO: 73847 - protein, 30 aa, Artificial Sequence
  Cyclic GFR-binding peptide
  MOD_RES (2), (2): Xaa is C or S
TXAPTKLSSLSVLFFDDSSNVILKVYPNMV

SEQ ID NO: 73848 - protein, 34 aa, Artificial Sequence; identical to SEQ ID NO: 25309
  Cyclic GFR-binding peptide
  MOD_RES (3), (4): Xaa is C or S

SEQ ID NO: 73849 - protein, 34 aa, Artificial Sequence
  Cyclic GFR-binding peptide
  MOD_RES (7), (7): Xaa is C or S
NDEGLEXVPTEESSLSMLFFRIKPHQGQHLKVYP

SEQ ID NO: 73850 - protein, 36 aa, Artificial Sequence
  Cyclic GFR-binding peptide
  MOD_RES (1), (2), (34), (36): Xaa is C or S
XXVPTELSSLSMLFFDENEKVVLKVYPDMVVEGXGX

SEQ ID NO: 73851 - protein, 33 aa, Artificial Sequence
  Cyclic GFR-binding peptide
  MOD_RES (2), (2): Xaa is C or S
KXQPSRVHHSSLSVLFFEYVRKKPKLLKVYPRL

SEQ ID NO: 73852 - protein, 32 aa, Artificial Sequence
  Cyclic GFR-binding peptide
  MOD_RES (4), (5): Xaa is C or S
AAPXXVPQALSSLSILFFVGRKPKVLKVYPMI

SEQ ID NO: 73853 - protein, 29 aa, Artificial Sequence
  Cyclic GFR-binding peptide
  MOD_RES (2), (3): Xaa is C or S
SXXVPARLSSLSILFFDAANNVVLKVYPD

SEQ ID NO: 73854 - protein, 35 aa, Artificial Sequence; identical to SEQ ID NO: 25310
  Cyclic GFR-binding peptide
  MOD_RES (1), (32), (34): Xaa is C or S

SEQ ID NO: 73855 - protein, 22 aa, Artificial Sequence
  Cyclic GFR-binding peptide
ELSSLSMLFFDEYDKVVLKVYP

SEQ ID NO: 73856 - protein, 31 aa, Artificial Sequence
  Cyclic GFR-binding peptide
  MOD_RES (30), (30): Xaa is C or S
PQDLSSLSILFFVGRTPKVLKVYPMVVKSXK

SEQ ID NO: 73857 - protein, 28 aa, Artificial Sequence
  Cyclic GFR-binding peptide
EESSLSMLFFRIKPHQGQHLKVYPFLQH

SEQ ID NO: 73858 - protein, 35 aa, Artificial Sequence
  Cyclic GFR-binding peptide
  MOD_RES (5), (6): Xaa is C or S
APASXXVPARLSSLSILFFDAANNVVLKVYPDMVV

SEQ ID NO: 73859 - protein, 39 aa, Artificial Sequence; identical to SEQ ID NO: 25313
  Cyclic GFR-binding peptide
  MOD_RES (3), (4), (36), (38): Xaa is C or S

SEQ ID NO: 73860 - protein, 30 aa, Artificial Sequence
  Cyclic GFR-binding peptide
  MOD_RES (30), (30): Xaa is C or S
ESSLSMLFFRIKPHQGQHLKVYPFLQHNKX

SEQ ID NO: 73861 - protein, 36 aa, Artificial Sequence
  Cyclic GFR-binding peptide
  MOD_RES (6), (7): Xaa is C or S
SIPKAXXVPTELSSLSMLFFDEYDKVVLKVYPEMVV

SEQ ID NO: 73862 - protein, 26 aa, Artificial Sequence
  Cyclic GFR-binding peptide
APTQLSSLSVLFFDDSSNVILKVYPN

SEQ ID NO: 73863 - protein, 30 aa, Artificial Sequence
  Cyclic GFR-binding peptide
  MOD_RES (28), (30): Xaa is C or S
DLSSLSILFFVGRTPKVLKVYPMVVKSXKX

SEQ ID NO: 73864 - protein, 35 aa, Artificial Sequence; identical to SEQ ID NO: 25314
  Cyclic GFR-binding peptide
  MOD_RES (4), (5): Xaa is C or S

SEQ ID NO: 73865 - protein, 39 aa, Artificial Sequence; identical to SEQ ID NO: 25315
  Cyclic GFR-binding peptide
  MOD_RES (4), (38): Xaa is C or S

SEQ ID NO: 73866 - protein, 24 aa, Artificial Sequence
  Cyclic GFR-binding peptide
HHSSLSVLFFEYVRKKPKLLKVYP

SEQ ID NO: 73867 - protein, 30 aa, Artificial Sequence
  Cyclic GFR-binding peptide
  MOD_RES (3), (4): Xaa is C or S
KAXXVPTELSSLSMLFFDEYDKVVLKVYPE

SEQ ID NO: 73868 - protein, 25 aa, Artificial Sequence
  Cyclic GFR-binding peptide
SSLSMLFFDENEKVVLKVYPDMVVE

SEQ ID NO: 73869 - protein, 28 aa, Artificial Sequence
  Cyclic GFR-binding peptide
TKMSSLSMLFFNDKQQIILKVYPGMVVD

SEQ ID NO: 73870 - protein, 22 aa, Artificial Sequence
  Cyclic GFR-binding peptide
SSLSVLFFDDSSNVILKVYPNM

SEQ ID NO: 73871 - protein, 33 aa, Artificial Sequence; identical to SEQ ID NO: 25318
  Cyclic GFR-binding peptide
  MOD_RES (1), (2): Xaa is C or S

SEQ ID NO: 73872 - protein, 36 aa, Artificial Sequence
  Cyclic GFR-binding peptide
  MOD_RES (1), (33), (35): Xaa is C or S
XVPTELSSLSMLFFDENEKVVLKVYPDMVVEGXGXR

SEQ ID NO: 73873 - protein, 23 aa, Artificial Sequence
  Cyclic GFR-binding peptide
TKLSSLSVLFFDSSNNVILKVYP

SEQ ID NO: 73874 - protein, 35 aa, Artificial Sequence; identical to SEQ ID NO: 25319
  Cyclic GFR-binding peptide
  MOD_RES (1), (2), (34): Xaa is C or S

SEQ ID NO: 73875 - protein, 39 aa, Artificial Sequence; identical to SEQ ID NO: 25320
  Cyclic GFR-binding peptide
  MOD_RES (3), (37), (39): Xaa is C or S

SEQ ID NO: 73876 - protein, 39 aa, Artificial Sequence; identical to SEQ ID NO: 25322
  Cyclic GFR-binding peptide
  MOD_RES (7), (39): Xaa is C or S

SEQ ID NO: 73877 - protein, 32 aa, Artificial Sequence
  Cyclic GFR-binding peptide
  MOD_RES (3), (4): Xaa is C or S
ASXXVPARLSSLSILFFDAANNVVLKVYPDMV

SEQ ID NO: 73878 - protein, 31 aa, Artificial Sequence
  Cyclic GFR-binding peptide
  MOD_RES (1), (2): Xaa is C or S
XXVPQALSSLSILFFVGRKPKVLKVYPMIVR

SEQ ID NO: 73879 - protein, 34 aa, Artificial Sequence
  Cyclic GFR-binding peptide
  MOD_RES (6), (7): Xaa is C or S
ASASPXXVPQDLSSLSILFFVGRTPKVLKVYPMV

SEQ ID NO: 73880 - protein, 28 aa, Artificial Sequence
  Cyclic GFR-binding peptide
PARLSSLSILFFDAANNVVLKVYPDMVV

SEQ ID NO: 73881 - protein, 29 aa, Artificial Sequence
  Cyclic GFR-binding peptide
  MOD_RES (1), (1): Xaa is C or S
XVPTELSSLSMLFFDEYDKVVLKVYPEMV

SEQ ID NO: 73882 - protein, 35 aa, Artificial Sequence; identical to SEQ ID NO: 25326
  Cyclic GFR-binding peptide
  MOD_RES (32), (34): Xaa is C or S

SEQ ID NO: 73883 - protein, 34 aa, Artificial Sequence
  Cyclic GFR-binding peptide
  MOD_RES (31), (33): Xaa is C or S
PTQLSSLSVLFFDDSSNVILKVYPNMVVRAXGXH

SEQ ID NO: 73884 - protein, 30 aa, Artificial Sequence
  Cyclic GFR-binding peptide
  MOD_RES (28), (30): Xaa is C or S
LSSLSVLFFDDSSNVILKVYPNMVVRSXGX

SEQ ID NO: 73885 - protein, 40 aa, Artificial Sequence; identical to SEQ ID NO: 25330
  Cyclic GFR-binding peptide
  MOD_RES (6), (7), (39): Xaa is C or S

SEQ ID NO: 73886 - protein, 26 aa, Artificial Sequence
  Cyclic GFR-binding peptide
LSSLSVLFFDDSSNVILKVYPNMVVR

SEQ ID NO: 73887 - protein, 27 aa, Artificial Sequence
  Cyclic GFR-binding peptide
LSSLSILFFDSANNVVLKVYPDMVVES

SEQ ID NO: 73888 - protein, 37 aa, Artificial Sequence; identical to SEQ ID NO: 25333
  Cyclic GFR-binding peptide
  MOD_RES (3), (4), (36): Xaa is C or S

SEQ ID NO: 73889 - protein, 27 aa, Artificial Sequence
  Cyclic GFR-binding peptide
KTSSLSMLFFDNGRVLLLKVYPMIVEE

SEQ ID NO: 73890 - protein, 25 aa, Artificial Sequence
  Cyclic GFR-binding peptide
SSLSILFFDSANNVVLKVYPDMVVE

SEQ ID NO: 73891 - protein, 29 aa, Artificial Sequence
  Cyclic GFR-binding peptide
  MOD_RES (1), (2): Xaa is C or S
XXVPTKLSSLSILFFDKGVVTYLKVYPGM

SEQ ID NO: 73892 - protein, 26 aa, Artificial Sequence
  Cyclic GFR-binding peptide
  MOD_RES (1), (1): Xaa is C or S
XVPARLSSLSILFFDAANNVVLKVYP

SEQ ID NO: 73893 - protein, 31 aa, Artificial Sequence
  Cyclic GFR-binding peptide
  MOD_RES (4), (5): Xaa is C or S
ASPXXVPQDLSSLSILFFVGRTPKVLKVYPM

SEQ ID NO: 73894 - protein, 36 aa, Artificial Sequence; identical to SEQ ID NO: 25335
  Cyclic GFR-binding peptide
  MOD_RES (1), (33), (35): Xaa is C or S

SEQ ID NO: 73895 - protein, 32 aa, Artificial Sequence
  Cyclic GFR-binding peptide
  MOD_RES (2), (3): Xaa is C or S
PXXVSQDLSSLSILFFIGKTPKILKVYPMIVK

SEQ ID NO: 73896 - protein, 38 aa, Artificial Sequence
  Cyclic GFR-binding peptide
  MOD_RES (4), (5), (37): Xaa is C or S
PKAXXVPTELSSLSMLFFDENEKVVLKVYPDMVVEGXG

SEQ ID NO: 73897 - protein, 30 aa, Artificial Sequence
  Cyclic GFR-binding peptide
  MOD_RES (28), (30): Xaa is C or S
MSSLSMLFFNDKQQIILKVYPGMVVDRXGX

SEQ ID NO: 73898 - protein, 29 aa, Artificial Sequence
  Cyclic GFR-binding peptide
  MOD_RES (1), (2): Xaa is C or S
XXVPQDLSSLSILFFVGRTPKVLKVYPMV

SEQ ID NO: 73899 - protein, 24 aa, Artificial Sequence
  Cyclic GFR-binding peptide
MSSLSMLFFNDKQQIILKVYPGMV

SEQ ID NO: 73900 - protein, 27 aa, Artificial Sequence
  Cyclic GFR-binding peptide
VPTELSSLSMLFFDEYDKVVLKVYPEM

SEQ ID NO: 73901 - protein, 30 aa, Artificial Sequence
  Cyclic GFR-binding peptide
  MOD_RES (28), (30): Xaa is C or S
KTSSLSMLFFDNGRVLLLKVYPMIVEEXGX

SEQ ID NO: 73902 - protein, 39 aa, Artificial Sequence; identical to SEQ ID NO: 25339
  Cyclic GFR-binding peptide
  MOD_RES (6), (7), (39): Xaa is C or S

SEQ ID NO: 73903 - protein, 37 aa, Artificial Sequence; identical to SEQ ID NO: 25340
  Cyclic GFR-binding peptide
  MOD_RES (4), (5), (37): Xaa is C or S

SEQ ID NO: 73904 - protein, 27 aa, Artificial Sequence
  Cyclic GFR-binding peptide
  MOD_RES (26), (26): Xaa is C or S
SSLSMLFFDNGRVLLLKVYPMIVEEXG

SEQ ID NO: 73905 - protein, 30 aa, Artificial Sequence
  Cyclic GFR-binding peptide
  MOD_RES (29), (29): Xaa is C or S
SSLSMLFFRIKPHQGQHLKVYPFLQHNKXE

SEQ ID NO: 73906 - protein, 31 aa, Artificial Sequence
  Cyclic GFR-binding peptide
  MOD_RES (31), (31): Xaa is C or S
PTKLSSLSILFFDKGVVTYLKVYPGMAVSEX

SEQ ID NO: 73907 - protein, 31 aa, Artificial Sequence
  Cyclic GFR-binding peptide
  MOD_RES (29), (31): Xaa is C or S
QALSSLSILFFVGRKPKVLKVYPMIVRSXKX

SEQ ID NO: 73908 - protein, 26 aa, Artificial Sequence
  Cyclic GFR-binding peptide
PQALSSLSILFFVGRKPKVLKVYPMI

SEQ ID NO: 73909 - protein, 36 aa, Artificial Sequence
  Cyclic GFR-binding peptide
  MOD_RES (6), (7): Xaa is C or S
TVPKPXXAPTQLSSLSVLFFDDSSNVILKVYPNMVV

SEQ ID NO: 73910 - protein, 32 aa, Artificial Sequence
  Cyclic GFR-binding peptide
  MOD_RES (1), (1): Xaa is C or S
XVPTEESSLSMLFFRIKPHQGQHLKVYPFLQH

SEQ ID NO: 73911 - protein, 30 aa, Artificial Sequence
  Cyclic GFR-binding peptide
  MOD_RES (3), (4): Xaa is C or S
KPXXAPTQLSSLSVLFFDDSSNVILKVYPN

SEQ ID NO: 73912 - protein, 24 aa, Artificial Sequence
  Cyclic GFR-binding peptide
RLSSLSILFFDSANNVVLKVYPDM

SEQ ID NO: 73913 - protein, 37 aa, Artificial Sequence; identical to SEQ ID NO: 25345
  Cyclic GFR-binding peptide
  MOD_RES (2), (3), (35), (37): Xaa is C or S

SEQ ID NO: 73914 - protein, 29 aa, Artificial Sequence
  Cyclic GFR-binding peptide
TEESSLSMLFFRIKPHQGQHLKVYPFLQH

SEQ ID NO: 73915 - protein, 26 aa, Artificial Sequence
  Cyclic GFR-binding peptide
ELSSLSMLFFDEYDKVVLKVYPEMVV

SEQ ID NO: 73916 - protein, 29 aa, Artificial Sequence
  Cyclic GFR-binding peptide
TKLSSLSVLFFDSSNNVILKVYPNMVVKA

SEQ ID NO: 73917 - protein, 32 aa, Artificial Sequence
  Cyclic GFR-binding peptide
  MOD_RES (29), (31): Xaa is C or S
KLSSLSVLFFDDSSNVILKVYPNMVVRSXGXH

SEQ ID NO: 73918 - protein, 37 aa, Artificial Sequence; identical to SEQ ID NO: 25347
  Cyclic GFR-binding peptide
  MOD_RES (4), (4): Xaa is C or S

SEQ ID NO: 73919 - protein, 39 aa, Artificial Sequence; identical to SEQ ID NO: 25348
  Cyclic GFR-binding peptide
  MOD_RES (5), (6), (38): Xaa is C or S

SEQ ID NO: 73920 - protein, 32 aa, Artificial Sequence
  Cyclic GFR-binding peptide
PSRVHHSSLSVLFFEYVRKKPKLLKVYPRLEE

SEQ ID NO: 73921 - protein, 38 aa, Artificial Sequence; identical to SEQ ID NO: 25351
  Cyclic GFR-binding peptide
  MOD_RES (4), (5), (36), (38): Xaa is C or S

SEQ ID NO: 73922 - protein, 34 aa, Artificial Sequence
  Cyclic GFR-binding peptide
  MOD_RES (31), (33): Xaa is C or S
TKLSSLSVLFFDDMGVPTLKVYPEGMSVAEXGXR

SEQ ID NO: 73923 - protein, 30 aa, Artificial Sequence
  Cyclic GFR-binding peptide
  MOD_RES (3), (4): Xaa is C or S
STXXAPVKTSSLSMLFFDNGRVLLLKVYPM

SEQ ID NO: 73924 - protein, 37 aa, Artificial Sequence; identical to SEQ ID NO: 25355
  Cyclic GFR-binding peptide
  MOD_RES (6), (7): Xaa is C or S

SEQ ID NO: 73925 - protein, 33 aa, Artificial Sequence
  Cyclic GFR-binding peptide
  MOD_RES (30), (32): Xaa is C or S
TQLSSLSVLFFDDSSNVILKVYPNMVVRAXGXH

SEQ ID NO: 73926 - protein, 35 aa, Artificial Sequence
  Cyclic GFR-binding peptide
  MOD_RES (4), (5): Xaa is C or S
GKAXXVPTKLSSLSVLFFDDMGVPTLKVYPEGMSV

SEQ ID NO: 73927 - protein, 33 aa, Artificial Sequence
  Cyclic GFR-binding peptide
  MOD_RES (32), (32): Xaa is C or S
HHSSLSVLFFEYVRKKPKLLKVYPRLEEHLEXA

SEQ ID NO: 73928 - protein, 30 aa, Artificial Sequence; identical to SEQ ID NO: 771
  Cyclic GFR-binding peptide

SEQ ID NO: 73929 - protein, 28 aa, Artificial Sequence
  Cyclic GFR-binding peptide
  MOD_RES (27), (27): Xaa is C or S
SSLSMLFFNDKQQIILKVYPGMVVDRXG

SEQ ID NO: 73930 - protein, 37 aa, Artificial Sequence; identical to SEQ ID NO: 25357
  Cyclic GFR-binding peptide
  MOD_RES (2), (3), (35), (37): Xaa is C or S

SEQ ID NO: 73931 - protein, 37 aa, Artificial Sequence; identical to SEQ ID NO: 25358
  Cyclic GFR-binding peptide
  MOD_RES (4), (5), (37): Xaa is C or S

SEQ ID NO: 73932 - protein, 33 aa, Artificial Sequence; identical to SEQ ID NO: 25359
  Cyclic GFR-binding peptide
  MOD_RES (31), (33): Xaa is C or S

SEQ ID NO: 73933 - protein, 35 aa, Artificial Sequence; identical to SEQ ID NO: 25360
  Cyclic GFR-binding peptide
  MOD_RES (34), (34): Xaa is C or S

SEQ ID NO: 73934 - protein, 35 aa, Artificial Sequence; identical to SEQ ID NO: 25361
  Cyclic GFR-binding peptide
  MOD_RES (2), (3), (34): Xaa is C or S

SEQ ID NO: 73935 - protein, 28 aa, Artificial Sequence
  Cyclic GFR-binding peptide
  MOD_RES (28), (28): Xaa is C or S
LSSLSVLFFDDSSNVILKVYPNMVVRAX

SEQ ID NO: 73936 - protein, 33 aa, Artificial Sequence; identical to SEQ ID NO: 25363
  Cyclic GFR-binding peptide
  MOD_RES (32), (32): Xaa is C or S

SEQ ID NO: 73937 - protein, 36 aa, Artificial Sequence; identical to SEQ ID NO: 25364
  Cyclic GFR-binding peptide
  MOD_RES (5), (6): Xaa is C or S

SEQ ID NO: 73938 - protein, 33 aa, Artificial Sequence
  Cyclic GFR-binding peptide
  MOD_RES (3), (4): Xaa is C or S
KAXXVPTKLSSLSILFFDKGVVTYLKVYPGMAV

SEQ ID NO: 73939 - protein, 41 aa, Artificial Sequence; identical to SEQ ID NO: 25365
  Cyclic GFR-binding peptide
  MOD_RES (5), (6), (38), (40): Xaa is C or S

SEQ ID NO: 73940 - protein, 31 aa, Artificial Sequence
  Cyclic GFR-binding peptide
  MOD_RES (31), (31): Xaa is C or S
PTKMSSLSMLFFNDKQQIILKVYPGMVVDRX

SEQ ID NO: 73941 - protein, 37 aa, Artificial Sequence; identical to SEQ ID NO: 25366
  Cyclic GFR-binding peptide
  MOD_RES (36), (36): Xaa is C or S

SEQ ID NO: 73942 - protein, 30 aa, Artificial Sequence
  Cyclic GFR-binding peptide
  MOD_RES (27), (29): Xaa is C or S
SSLSMLFFDEYDKVVLKVYPEMVVEGXGXR

SEQ ID NO: 73943 - protein, 23 aa, Artificial Sequence
  Cyclic GFR-binding peptide
RLSSLSILFFDAANNVVLKVYPD

SEQ ID NO: 73944 - protein, 30 aa, Artificial Sequence
  Cyclic GFR-binding peptide
  MOD_RES (4), (5): Xaa is C or S
ASPXXVPQDLSSLSILFFVGRTPKVLKVYP

SEQ ID NO: 73945 - protein, 22 aa, Artificial Sequence
  Cyclic GFR-binding peptide
SSLSILFFVGRKPKVLKVYPMI

SEQ ID NO: 73946 - protein, 28 aa, Artificial Sequence
  Cyclic GFR-binding peptide
  MOD_RES (1), (1): Xaa is C or S
XVSQDLSSLSILFFIGKTPKILKVYPMI

SEQ ID NO: 73947 - protein, 34 aa, Artificial Sequence
  Cyclic GFR-binding peptide
  MOD_RES (4), (5): Xaa is C or S
ASPXXVSQDLSSLSILFFIGKTPKILKVYPMIVK

SEQ ID NO: 73948 - protein, 35 aa, Artificial Sequence; identical to SEQ ID NO: 25368
  Cyclic GFR-binding peptide
  MOD_RES (1), (2), (34): Xaa is C or S

SEQ ID NO: 73949 - protein, 31 aa, Artificial Sequence
  Cyclic GFR-binding peptide
  MOD_RES (3), (4): Xaa is C or S
KAXXVPTELSSLSMLFFDENEKVVLKVYPDM

SEQ ID NO: 73950 - protein, 38 aa, Artificial Sequence; identical to SEQ ID NO: 25371
  Cyclic GFR-binding peptide
  MOD_RES (3), (4), (36), (38): Xaa is C or S

SEQ ID NO: 73951 - protein, 36 aa, Artificial Sequence; identical to SEQ ID NO: 25372
  Cyclic GFR-binding peptide
  MOD_RES (5), (6): Xaa is C or S

SEQ ID NO: 73952 - protein, 29 aa, Artificial Sequence
  Cyclic GFR-binding peptide
  MOD_RES (29), (29): Xaa is C or S
RLSSLSILFFDAANNVVLKVYPDMVVEAX

SEQ ID NO: 73953 - protein, 31 aa, Artificial Sequence
  Cyclic GFR-binding peptide
  MOD_RES (30), (30): Xaa is C or S
TKLSSLSVLFFDDSSNVILKVYPNMVVRSXG

SEQ ID NO: 73954 - protein, 29 aa, Artificial Sequence
  Cyclic GFR-binding peptide
  MOD_RES (2), (3): Xaa is C or S
PXXTPTKMSSLSMLFFNDKQQIILKVYPG

SEQ ID NO: 73955 - protein, 33 aa, Artificial Sequence; identical to SEQ ID NO: 25373
  Cyclic GFR-binding peptide
  MOD_RES (1), (2): Xaa is C or S

SEQ ID NO: 73956 - protein, 34 aa, Artificial Sequence
  Cyclic GFR-binding peptide
  MOD_RES (33), (33): Xaa is C or S
VHHSSLSVLFFEYVRKKPKLLKVYPRLEEHLEXA

SEQ ID NO: 73957 - protein, 31 aa, Artificial Sequence
  Cyclic GFR-binding peptide
  MOD_RES (28), (30): Xaa is C or S
LSSLSVLFFDSSNNVILKVYPNMVVKAXGXH

SEQ ID NO: 73958 - protein, 39 aa, Artificial Sequence; identical to SEQ ID NO: 25374
  Cyclic GFR-binding peptide
  MOD_RES (5), (6), (39): Xaa is C or S

SEQ ID NO: 73959 - protein, 43 aa, Artificial Sequence; identical to SEQ ID NO: 25375
  Cyclic GFR-binding peptide
  MOD_RES (4), (41), (43): Xaa is C or S

SEQ ID NO: 73960 - protein, 37 aa, Artificial Sequence; identical to SEQ ID NO: 25376
  Cyclic GFR-binding peptide
  MOD_RES (5), (6), (37): Xaa is C or S

SEQ ID NO: 73961 - protein, 30 aa, Artificial Sequence
  Cyclic GFR-binding peptide
SRVHHSSLSVLFFEYVRKKPKLLKVYPRLE

SEQ ID NO: 73962 - protein, 33 aa, Artificial Sequence
  Cyclic GFR-binding peptide
  MOD_RES (1), (2): Xaa is C or S
XXVPTELSSLSMLFFDENEKVVLKVYPDMVVEG

SEQ ID NO: 73963 - protein, 21 aa, Artificial Sequence
  Cyclic GFR-binding peptide
SSLSVLFFDSSNNVILKVYPN

SEQ ID NO: 73964 - protein, 29 aa, Artificial Sequence
  Cyclic GFR-binding peptide
SSLSMLFFDNGRVLLLKVYPAAAAAAAAA

SEQ ID NO: 73965 - protein, 27 aa, Artificial Sequence
  Cyclic GFR-binding peptide
ELSSLSMLFFDENEKVVLKVYPDMVVE

SEQ ID NO: 73966 - protein, 36 aa, Artificial Sequence; identical to SEQ ID NO: 25380
  Cyclic GFR-binding peptide
  MOD_RES (4), (5): Xaa is C or S

SEQ ID NO: 73967 - protein, 35 aa, Artificial Sequence
  Cyclic GFR-binding peptide
  MOD_RES (6), (7): Xaa is C or S
TVPKPXXAPTQLSSLSVLFFDDSSNVILKVYPNMV

SEQ ID NO: 73968 - protein, 23 aa, Artificial Sequence
  Cyclic GFR-binding peptide
KLSSLSVLFFDDSSNVILKVYPN

SEQ ID NO: 73969 - protein, 34 aa, Artificial Sequence; identical to SEQ ID NO: 25381
  Cyclic GFR-binding peptide
  MOD_RES (32), (34): Xaa is C or S

SEQ ID NO: 73970 - protein, 28 aa, Artificial Sequence
  Cyclic GFR-binding peptide
APTKLSSLSVLFFDDSSNVILKVYPNMV

SEQ ID NO: 73971 - protein, 34 aa, Artificial Sequence; identical to SEQ ID NO: 25383
  Cyclic GFR-binding peptide
  MOD_RES (1), (32), (34): Xaa is C or S

SEQ ID NO: 73972 - protein, 39 aa, Artificial Sequence; identical to SEQ ID NO: 25385
  Cyclic GFR-binding peptide
  MOD_RES (4), (5), (36), (38): Xaa is C or S

SEQ ID NO: 73973 - protein, 40 aa, Artificial Sequence; identical to SEQ ID NO: 25386
  Cyclic GFR-binding peptide
  MOD_RES (6), (40): Xaa is C or S

SEQ ID NO: 73974 - protein, 32 aa, Artificial Sequence
  Cyclic GFR-binding peptide
  MOD_RES (4), (5): Xaa is C or S
ASPXXVPQDLSSLSILFFVGRTPKVLKVYPMV

SEQ ID NO: 73975 - protein, 36 aa, Artificial Sequence; identical to SEQ ID NO: 25387
  Cyclic GFR-binding peptide
  MOD_RES (2), (3), (35): Xaa is C or S

SEQ ID NO: 73976 - protein, 27 aa, Artificial Sequence
  Cyclic GFR-binding peptide
ARLSSLSILFFDAANNVVLKVYPDMVV

SEQ ID NO: 73977 - protein, 41 aa, Artificial Sequence; identical to SEQ ID NO: 25388
  Cyclic GFR-binding peptide
  MOD_RES (5), (6), (39), (41): Xaa is C or S

SEQ ID NO: 73978 - protein, 34 aa, Artificial Sequence; identical to SEQ ID NO: 25389
  Cyclic GFR-binding peptide
  MOD_RES (1), (32), (34): Xaa is C or S

SEQ ID NO: 73979 - protein, 29 aa, Artificial Sequence
  Cyclic GFR-binding peptide
  MOD_RES (27), (29): Xaa is C or S
SSLSILFFDKGVVTYLKVYPGMAVSEXGX

SEQ ID NO: 73980 - protein, 42 aa, Artificial Sequence; identical to SEQ ID NO: 25390
  Cyclic GFR-binding peptide
  MOD_RES (7), (41): Xaa is C or S

SEQ ID NO: 73981 - protein, 29 aa, Artificial Sequence
  Cyclic GFR-binding peptide
  MOD_RES (2), (3): Xaa is C or S
PXXVPQALSSLSILFFVGRKPKVLKVYPM

SEQ ID NO: 73982 - protein, 35 aa, Artificial Sequence
  Cyclic GFR-binding peptide
  MOD_RES (6), (6): Xaa is C or S
DEGLEXVPTEESSLSMLFFRIKPHQGQHLKVYPFL

SEQ ID NO: 73983 - protein, 32 aa, Artificial Sequence
  Cyclic GFR-binding peptide
  MOD_RES (3), (4): Xaa is C or S
KAXXVPTELSSLSMLFFDEYDKVVLKVYPEMV

SEQ ID NO: 73984 - protein, 25 aa, Artificial Sequence
  Cyclic GFR-binding peptide
HHSSLSVLFFEYVRKKPKLLKVYPR

SEQ ID NO: 73985 - protein, 31 aa, Artificial Sequence
  Cyclic GFR-binding peptide
  MOD_RES (31), (31): Xaa is C or S
PTRLSSLSILFFDSANNVVLKVYPDMVVESX

SEQ ID NO: 73986 - protein, 34 aa, Artificial Sequence; identical to SEQ ID NO: 25395
  Cyclic GFR-binding peptide
  MOD_RES (32), (34): Xaa is C or S

SEQ ID NO: 73987 - protein, 39 aa, Artificial Sequence; identical to SEQ ID NO: 25397
  Cyclic GFR-binding peptide
  MOD_RES (6), (7), (39): Xaa is C or S

SEQ ID NO: 73988 - protein, 26 aa, Artificial Sequence
  Cyclic GFR-binding peptide
PTQLSSLSVLFFDDSSNVILKVYPNM

SEQ ID NO: 73989 - protein, 35 aa, Artificial Sequence; identical to SEQ ID NO: 25398
  Cyclic GFR-binding peptide
  MOD_RES (1), (2), (34): Xaa is C or S

SEQ ID NO: 73990 - protein, 30 aa, Artificial Sequence
  Cyclic GFR-binding peptide
  MOD_RES (27), (29): Xaa is C or S
SSLSMLFFDENEKVVLKVYPDMVVEGXGXR

SEQ ID NO: 73991 - protein, 40 aa, Artificial Sequence; identical to SEQ ID NO: 25405
  Cyclic GFR-binding peptide
  MOD_RES (5), (6), (37), (39): Xaa is C or S

SEQ ID NO: 73992 - protein, 28 aa, Artificial Sequence
  Cyclic GFR-binding peptide
KLSSLSVLFFDSSNNVILKVYPNMVVKA

SEQ ID NO: 73993 - protein, 24 aa, Artificial Sequence
  Cyclic GFR-binding peptide
PTKMSSLSMLFFNDKQQIILKVYP

SEQ ID NO: 73994 - protein, 29 aa, Artificial Sequence
  Cyclic GFR-binding peptide
PTKLSSLSVLFFDDMGVPTLKVYPEGMSV

SEQ ID NO: 73995 - protein, 22 aa, Artificial Sequence
  Cyclic GFR-binding peptide
LSSLSILFFDSANNVVLKVYPD

SEQ ID NO: 73996 - protein, 30 aa, Artificial Sequence
  Cyclic GFR-binding peptide
  MOD_RES (2), (3): Xaa is C or S
AXXAPTKLSSLSVLFFDSSNNVILKVYPNM

SEQ ID NO: 73997 - protein, 40 aa, Artificial Sequence; identical to SEQ ID NO: 25411
  Cyclic GFR-binding peptide
  MOD_RES (5), (6), (37), (39): Xaa is C or S

SEQ ID NO: 73998 - protein, 26 aa, Artificial Sequence
  Cyclic GFR-binding peptide
SSLSILFFDKGVVTYLKVYPGMAVSE

SEQ ID NO: 73999 - protein, 33 aa, Artificial Sequence
  Cyclic GFR-binding peptide
  MOD_RES (6), (7): Xaa is C or S
ASAAPXXVPQALSSLSILFFVGRKPKVLKVYPM

SEQ ID NO: 74000 - protein, 33 aa, Artificial Sequence; identical to SEQ ID NO: 25413
  Cyclic GFR-binding peptide
  MOD_RES (32), (32): Xaa is C or S

SEQ ID NO: 74001 - protein, 36 aa, Artificial Sequence; identical to SEQ ID NO: 25414
  Cyclic GFR-binding peptide
  MOD_RES (2), (3), (34), (36): Xaa is C or S

SEQ ID NO: 74002 - protein, 28 aa, Artificial Sequence
  Cyclic GFR-binding peptide
  MOD_RES (28), (28): Xaa is C or S
LSSLSILFFDAANNVVLKVYPDMVVEAX

SEQ ID NO: 74003 - protein, 31 aa, Artificial Sequence; identical to SEQ ID NO: 25415
  Cyclic GFR-binding peptide

SEQ ID NO: 74004 - protein, 34 aa, Artificial Sequence
  Cyclic GFR-binding peptide
  MOD_RES (4), (5): Xaa is C or S
PKPXXAPTKLSSLSVLFFDDSSNVILKVYPNMVV

SEQ ID NO: 74005 - protein, 34 aa, Artificial Sequence; identical to SEQ ID NO: 25416
  Cyclic GFR-binding peptide
  MOD_RES (1), (2), (33): Xaa is C or S

SEQ ID NO: 74006 - protein, 29 aa, Artificial Sequence
  Cyclic GFR-binding peptide
  MOD_RES (27), (29): Xaa is C or S
SSLSILFFDAANNVVLKVYPDMVVEAXGX

SEQ ID NO: 74007 - protein, 32 aa, Artificial Sequence; identical to SEQ ID NO: 25417
  Cyclic GFR-binding peptide
  MOD_RES (1), (2): Xaa is C or S

SEQ ID NO: 74008 - protein, 37 aa, Artificial Sequence; identical to SEQ ID NO: 25418
  Cyclic GFR-binding peptide
  MOD_RES (2), (3), (36): Xaa is C or S

SEQ ID NO: 74009 - protein, 25 aa, Artificial Sequence
  Cyclic GFR-binding peptide
APTQLSSLSVLFFDDSSNVILKVYP

SEQ ID NO: 74010 - protein, 24 aa, Artificial Sequence
  Cyclic GFR-binding peptide
DLSSLSILFFIGKTPKILKVYPMI

SEQ ID NO: 74011 - protein, 30 aa, Artificial Sequence
  Cyclic GFR-binding peptide
  MOD_RES (2), (3): Xaa is C or S
PXXVPQALSSLSILFFVGRKPKVLKVYPMI

SEQ ID NO: 74012 - protein, 35 aa, Artificial Sequence
  Cyclic GFR-binding peptide
  MOD_RES (4), (4): Xaa is C or S
SVKXQPSRVHHSSLSVLFFEYVRKKPKLLKVYPRL

SEQ ID NO: 74013 - protein, 34 aa, Artificial Sequence
  Cyclic GFR-binding peptide
  MOD_RES (6), (7): Xaa is C or S
ASASPXXVSQDLSSLSILFFIGKTPKILKVYPMI

SEQ ID NO: 74014 - protein, 29 aa, Artificial Sequence
  Cyclic GFR-binding peptide
  MOD_RES (28), (28): Xaa is C or S
LSSLSMLFFDEYDKVVLKVYPEMVVEGXG

SEQ ID NO: 74015 - protein, 26 aa, Artificial Sequence
  Cyclic GFR-binding peptide
SSLSVLFFEYVRKKPKLLKVYPRLEE

SEQ ID NO: 74016 - protein, 27 aa, Artificial Sequence
  Cyclic GFR-binding peptide
  MOD_RES (27), (27): Xaa is C or S
SSLSMLFFNDKQQIILKVYPGMVVDRX

SEQ ID NO: 74017 - protein, 30 aa, Artificial Sequence
  Cyclic GFR-binding peptide
  MOD_RES (30), (30): Xaa is C or S
TKLSSLSVLFFDDSSNVILKVYPNMVVRSX

SEQ ID NO: 74018 - protein, 31 aa, Artificial Sequence; identical to SEQ ID NO: 25423
  Cyclic GFR-binding peptide
  MOD_RES (1), (1): Xaa is C or S

SEQ ID NO: 74019 - protein, 28 aa, Artificial Sequence
  Cyclic GFR-binding peptide
VKTSSLSMLFFDNGRVLLLKVYPMIVEE

SEQ ID NO: 74020 - protein, 35 aa, Artificial Sequence; identical to SEQ ID NO: 25425
  Cyclic GFR-binding peptide
  MOD_RES (4), (5): Xaa is C or S

SEQ ID NO: 74021 - protein, 41 aa, Artificial Sequence; identical to SEQ ID NO: 25426
  Cyclic GFR-binding peptide
  MOD_RES (6), (7), (38), (40): Xaa is C or S

SEQ ID NO: 74022 - protein, 26 aa, Artificial Sequence
  Cyclic GFR-binding peptide
SSLSVLFFDDMGVPTLKVYPEGMSVA

SEQ ID NO: 74023 - protein, 34 aa, Artificial Sequence; identical to SEQ ID NO: 25427
  Cyclic GFR-binding peptide
  MOD_RES (1), (1): Xaa is C or S

SEQ ID NO: 74024 - protein, 36 aa, Artificial Sequence; identical to SEQ ID NO: 25428
  Cyclic GFR-binding peptide
  MOD_RES (2), (3), (35): Xaa is C or S

SEQ ID NO: 74025 - protein, 31 aa, Artificial Sequence
  Cyclic GFR-binding peptide
  MOD_RES (30), (30): Xaa is C or S
TQLSSLSVLFFDDSSNVILKVYPNMVVRAXG

SEQ ID NO: 74026 - protein, 21 aa, Artificial Sequence
  Cyclic GFR-binding peptide
LSSLSILFFVGRTPKVLKVYP

SEQ ID NO: 74027 - protein, 29 aa, Artificial Sequence
  Cyclic GFR-binding peptide
VSQDLSSLSILFFIGKTPKILKVYPMIVK

SEQ ID NO: 74028 - protein, 39 aa, Artificial Sequence; identical to SEQ ID NO: 25429
  Cyclic GFR-binding peptide
  MOD_RES (4), (5), (37), (39): Xaa is C or S

SEQ ID NO: 74029 - protein, 28 aa, Artificial Sequence
  Cyclic GFR-binding peptide
TRLSSLSILFFDSANNVVLKVYPDMVVE

SEQ ID NO: 74030 - protein, 35 aa, Artificial Sequence
  Cyclic GFR-binding peptide
  MOD_RES (6), (7): Xaa is C or S
ASASPXXVSQDLSSLSILFFIGKTPKILKVYPMIV

SEQ ID NO: 74031 - protein, 37 aa, Artificial Sequence; identical to SEQ ID NO: 25431
  Cyclic GFR-binding peptide
  MOD_RES (4), (5), (37): Xaa is C or S

SEQ ID NO: 74032 - protein, 30 aa, Artificial Sequence
  Cyclic GFR-binding peptide
  MOD_RES (30), (30): Xaa is C or S
PQDLSSLSILFFVGRTPKVLKVYPMVVKSX

SEQ ID NO: 74033 - protein, 35 aa, Artificial Sequence
  Cyclic GFR-binding peptide
  MOD_RES (5), (6): Xaa is C or S
SASPXXVSQDLSSLSILFFIGKTPKILKVYPMIVK

SEQ ID NO: 74034 - protein, 30 aa, Artificial Sequence
  Cyclic GFR-binding peptide
  MOD_RES (30), (30): Xaa is C or S
ARLSSLSILFFDAANNVVLKVYPDMVVEAX

SEQ ID NO: 74035 - protein, 27 aa, Artificial Sequence
  Cyclic GFR-binding peptide
VPQDLSSLSILFFVGRTPKVLKVYPMV

SEQ ID NO: 74036 - protein, 28 aa, Artificial Sequence
  Cyclic GFR-binding peptide
KLSSLSVLFFDDSSNVILKVYPNMVVRS

SEQ ID NO: 74037 - protein, 25 aa, Artificial Sequence
  Cyclic GFR-binding peptide
LSSLSILFFDKGVVTYLKVYPGMAV

SEQ ID NO: 74038 - protein, 39 aa, Artificial Sequence; identical to SEQ ID NO: 25436
  Cyclic GFR-binding peptide
  MOD_RES (5), (6), (38): Xaa is C or S

SEQ ID NO: 74039 - protein, 32 aa, Artificial Sequence; identical to SEQ ID NO: 25438
  Cyclic GFR-binding peptide
  MOD_RES (2), (2): Xaa is C or S

SEQ ID NO: 74040 - protein, 34 aa, Artificial Sequence
  Cyclic GFR-binding peptide
  MOD_RES (3), (3): Xaa is C or S
VKXQPSRVHHSSLSVLFFEYVRKKPKLLKVYPRL

SEQ ID NO: 74041 - protein, 32 aa, Artificial Sequence; identical to SEQ ID NO: 25439
  Cyclic GFR-binding peptide
  MOD_RES (1), (1): Xaa is C or S

SEQ ID NO: 74042 - protein, 39 aa, Artificial Sequence; identical to SEQ ID NO: 25440
  Cyclic GFR-binding peptide
  MOD_RES (7), (7): Xaa is C or S

SEQ ID NO: 74043 - protein, 42 aa, Artificial Sequence; identical to SEQ ID NO: 25441
  Cyclic GFR-binding peptide
  MOD_RES (4), (41): Xaa is C or S

SEQ ID NO: 74044 - protein, 38 aa, Artificial Sequence; identical to SEQ ID NO: 25442
  Cyclic GFR-binding peptide
  MOD_RES (2), (3), (35), (37): Xaa is C or S

SEQ ID NO: 74045 - protein, 38 aa, Artificial Sequence; identical to SEQ ID NO: 25443
  Cyclic GFR-binding peptide
  MOD_RES (3), (4), (36), (38): Xaa is C or S

SEQ ID NO: 74046 - protein, 42 aa, Artificial Sequence; identical to SEQ ID NO: 25444
  Cyclic GFR-binding peptide
  MOD_RES (5), (42): Xaa is C or S

SEQ ID NO: 74047 - protein, 24 aa, Artificial Sequence
  Cyclic GFR-binding peptide
PTRLSSLSILFFDSANNVVLKVYP

SEQ ID NO: 74048 - protein, 23 aa, Artificial Sequence
  Cyclic GFR-binding peptide
SSLSMLFFRIKPHQGQHLKVYPF

SEQ ID NO: 74049 - protein, 30 aa, Artificial Sequence
  Cyclic GFR-binding peptide
  MOD_RES (27), (29): Xaa is C or S
SSLSVLFFDDSSNVILKVYPNMVVRAXGXH

SEQ ID NO: 74050 - protein, 40 aa, Artificial Sequence; identical to SEQ ID NO: 25446
  Cyclic GFR-binding peptide
  MOD_RES (6), (7), (39): Xaa is C or S

SEQ ID NO: 74051 - protein, 30 aa, Artificial Sequence
  Cyclic GFR-binding peptide
PTKLSSLSVLFFDDSSNVILKVYPNMVVRS

SEQ ID NO: 74052 - protein, 37 aa, Artificial Sequence; identical to SEQ ID NO: 25447
  Cyclic GFR-binding peptide
  MOD_RES (4), (5), (37): Xaa is C or S

SEQ ID NO: 74053 - protein, 35 aa, Artificial Sequence; identical to SEQ ID NO: 25448
  Cyclic GFR-binding peptide
  MOD_RES (1), (32), (34): Xaa is C or S

SEQ ID NO: 74054 - protein, 31 aa, Artificial Sequence
  Cyclic GFR-binding peptide
  MOD_RES (30), (30): Xaa is C or S
TRLSSLSILFFDSANNVVLKVYPDMVVESXG

SEQ ID NO: 74055 - protein, 29 aa, Artificial Sequence
  Cyclic GFR-binding peptide
  MOD_RES (29), (29): Xaa is C or S
QDLSSLSILFFIGKTPKILKVYPMIVKSX

SEQ ID NO: 74056 - protein, 35 aa, Artificial Sequence; identical to SEQ ID NO: 25451
  Cyclic GFR-binding peptide
  MOD_RES (1), (1): Xaa is C or S

SEQ ID NO: 74057 - protein, 31 aa, Artificial Sequence
  Cyclic GFR-binding peptide
  MOD_RES (3), (4): Xaa is C or S
KPXXAPTKLSSLSVLFFDDSSNVILKVYPNM

SEQ ID NO: 74058 - protein, 34 aa, Artificial Sequence
  Cyclic GFR-binding peptide
  MOD_RES (34), (34): Xaa is C or S
RVHHSSLSVLFFEYVRKKPKLLKVYPRLEEHLEX

SEQ ID NO: 74059 - protein, 32 aa, Artificial Sequence; identical to SEQ ID NO: 25453
  Cyclic GFR-binding peptide
  MOD_RES (1), (2): Xaa is C or S

SEQ ID NO: 74060 - protein, 30 aa, Artificial Sequence
  Cyclic GFR-binding peptide
  MOD_RES (1), (2): Xaa is C or S
XXTPTKMSSLSMLFFNDKQQIILKVYPGMV

SEQ ID NO: 74061 - protein, 24 aa, Artificial Sequence
  Cyclic GFR-binding peptide
SSLSVLFFDDMGVPTLKVYPEGMS

SEQ ID NO: 74062 - protein, 36 aa, Artificial Sequence
  Cyclic GFR-binding peptide
  MOD_RES (4), (4): Xaa is C or S
SVKXQPSRVHHSSLSVLFFEYVRKKPKLLKVYPRLE

SEQ ID NO: 74063 - protein, 37 aa, Artificial Sequence; identical to SEQ ID NO: 25454
  Cyclic GFR-binding peptide
  MOD_RES (6), (7): Xaa is C or S

SEQ ID NO: 74064 - protein, 38 aa, Artificial Sequence; identical to SEQ ID NO: 25456
  Cyclic GFR-binding peptide
  MOD_RES (6), (7): Xaa is C or S

SEQ ID NO: 74065 - protein, 22 aa, Artificial Sequence
  Cyclic GFR-binding peptide
RLSSLSILFFDAANNVVLKVYP

SEQ ID NO: 74066 - protein, 32 aa, Artificial Sequence
  Cyclic GFR-binding peptide
  MOD_RES (1), (1): Xaa is C or S
XVPTELSSLSMLFFDENEKVVLKVYPDMVVEG

SEQ ID NO: 74067 - protein, 34 aa, Artificial Sequence; identical to SEQ ID NO: 25458
  Cyclic GFR-binding peptide
  MOD_RES (3), (4): Xaa is C or S

SEQ ID NO: 74068 - protein, 30 aa, Artificial Sequence
  Cyclic GFR-binding peptide
  MOD_RES (2), (3): Xaa is C or S
AXXVPTKLSSLSILFFDKGVVTYLKVYPGM

SEQ ID NO: 74069 - protein, 23 aa, Artificial Sequence
  Cyclic GFR-binding peptide
KLSSLSVLFFDDMGVPTLKVYPE

SEQ ID NO: 74070 - protein, 28 aa, Artificial Sequence
  Cyclic GFR-binding peptide
  MOD_RES (2), (3): Xaa is C or S
PXXTPTKMSSLSMLFFNDKQQIILKVYP

SEQ ID NO: 74071 - protein, 29 aa, Artificial Sequence
  Cyclic GFR-binding peptide
EESSLSMLFFRIKPHQGQHLKVYPFLQHN

SEQ ID NO: 74072 - protein, 39 aa, Artificial Sequence; identical to SEQ ID NO: 25461
  Cyclic GFR-binding peptide
  MOD_RES (4), (5), (37), (39): Xaa is C or S

SEQ ID NO: 74073 - protein, 34 aa, Artificial Sequence; identical to SEQ ID NO: 25462
  Cyclic GFR-binding peptide
  MOD_RES (2), (3): Xaa is C or S

SEQ ID NO: 74074 - protein, 31 aa, Artificial Sequence
  Cyclic GFR-binding peptide
  MOD_RES (3), (4): Xaa is C or S
GPXXTPTKMSSLSMLFFNDKQQIILKVYPGM

SEQ ID NO: 74075 - protein, 37 aa, Artificial Sequence; identical to SEQ ID NO: 25464
  Cyclic GFR-binding peptide
  MOD_RES (1), (35), (37): Xaa is C or S

SEQ ID NO: 74076 - protein, 39 aa, Artificial Sequence; identical to SEQ ID NO: 25465
  Cyclic GFR-binding peptide
  MOD_RES (3), (4), (36), (38): Xaa is C or S

SEQ ID NO: 74077 - protein, 29 aa, Artificial Sequence
  Cyclic GFR-binding peptide
TKMSSLSMLFFNDKQQIILKVYPGMVVDR

SEQ ID NO: 74078 - protein, 34 aa, Artificial Sequence
  Cyclic GFR-binding peptide
  MOD_RES (6), (7): Xaa is C or S
RVPSTXXAPVKTSSLSMLFFDNGRVLLLKVYPMI

SEQ ID NO: 74079 - protein, 37 aa, Artificial Sequence; identical to SEQ ID NO: 25467
  Cyclic GFR-binding peptide
  MOD_RES (6), (7): Xaa is C or S

SEQ ID NO: 74080 - protein, 27 aa, Artificial Sequence
  Cyclic GFR-binding peptide
  MOD_RES (27), (27): Xaa is C or S
SSLSVLFFDDSSNVILKVYPNMVVRAX

SEQ ID NO: 74081 - protein, 35 aa, Artificial Sequence; identical to SEQ ID NO: 25469
  Cyclic GFR-binding peptide
  MOD_RES (2), (3), (34): Xaa is C or S

SEQ ID NO: 74082 - protein, 33 aa, Artificial Sequence; identical to SEQ ID NO: 25470
  Cyclic GFR-binding peptide
  MOD_RES (3), (3): Xaa is C or S

SEQ ID NO: 74083 - protein, 30 aa, Artificial Sequence
  Cyclic GFR-binding peptide
  MOD_RES (4), (5): Xaa is C or S
PKPXXAPTQLSSLSVLFFDDSSNVILKVYP

SEQ ID NO: 74084 - protein, 31 aa, Artificial Sequence
  Cyclic GFR-binding peptide
  MOD_RES (31), (31): Xaa is C or S
HSSLSVLFFEYVRKKPKLLKVYPRLEEHLEX

SEQ ID NO: 74085 - protein, 28 aa, Artificial Sequence
  Cyclic GFR-binding peptide
TKLSSLSILFFDKGVVTYLKVYPGMAVS

SEQ ID NO: 74086 - protein, 30 aa, Artificial Sequence
  Cyclic GFR-binding peptide
  MOD_RES (28), (30): Xaa is C or S
LSSLSILFFDAANNVVLKVYPDMVVEAXGX

SEQ ID NO: 74087 - protein, 40 aa, Artificial Sequence; identical to SEQ ID NO: 25472
  Cyclic GFR-binding peptide
  MOD_RES (5), (6), (38), (40): Xaa is C or S

SEQ ID NO: 74088 - protein, 31 aa, Artificial Sequence
  Cyclic GFR-binding peptide
  MOD_RES (4), (4): Xaa is C or S
KPTXAPTKLSSLSVLFFDDSSNVILKVYPNM

SEQ ID NO: 74089 - protein, 28 aa, Artificial Sequence
  Cyclic GFR-binding peptide
PTELSSLSMLFFDENEKVVLKVYPDMVV

SEQ ID NO: 74090 - protein, 37 aa, Artificial Sequence; identical to SEQ ID NO: 25474
  Cyclic GFR-binding peptide
  MOD_RES (1), (34), (36): Xaa is C or S

SEQ ID NO: 74091 - protein, 36 aa, Artificial Sequence
  Cyclic GFR-binding peptide
  MOD_RES (6), (7): Xaa is C or S
ASASPXXVPQDLSSLSILFFVGRTPKVLKVYPMVVK

SEQ ID NO: 74092 - protein, 39 aa, Artificial Sequence; identical to SEQ ID NO: 25475
  Cyclic GFR-binding peptide
  MOD_RES (3), (4), (36), (38): Xaa is C or S

SEQ ID NO: 74093 - protein, 33 aa, Artificial Sequence; identical to SEQ ID NO: 25476
  Cyclic GFR-binding peptide
  MOD_RES (2), (3): Xaa is C or S

SEQ ID NO: 74094 - protein, 26 aa, Artificial Sequence
  Cyclic GFR-binding peptide
PQDLSSLSILFFVGRTPKVLKVYPMV

SEQ ID NO: 74095 - protein, 29 aa, Artificial Sequence
  Cyclic GFR-binding peptide
  MOD_RES (28), (28): Xaa is C or S
LSSLSILFFDSANNVVLKVYPDMVVESXG

SEQ ID NO: 74096 - protein, 26 aa, Artificial Sequence
  Cyclic GFR-binding peptide
TKLSSLSVLFFDSSNNVILKVYPNMV

SEQ ID NO: 74097 - protein, 33 aa, Artificial Sequence
  Cyclic GFR-binding peptide
  MOD_RES (30), (32): Xaa is C or S
ESSLSMLFFRIKPHQGQHLKVYPFLQHNKXEXR

SEQ ID NO: 74098 - protein, 35 aa, Artificial Sequence; identical to SEQ ID NO: 25478
  Cyclic GFR-binding peptide
  MOD_RES (3), (35): Xaa is C or S

SEQ ID NO: 74099 - protein, 34 aa, Artificial Sequence; identical to SEQ ID NO: 25479
  Cyclic GFR-binding peptide

SEQ ID NO: 74100 - protein, 37 aa, Artificial Sequence
  Cyclic GFR-binding peptide
  MOD_RES (2), (3), (35), (37): Xaa is C or S
AXXVPTELSSLSMLFFDENEKVVLKVYPDMVVEGXGX

SEQ ID NO: 74101 - protein, 35 aa, Artificial Sequence
  Cyclic GFR-binding peptide
  MOD_RES (33), (35): Xaa is C or S
PTEESSLSMLFFRIKPHQGQHLKVYPFLQHNKXEX

SEQ ID NO: 74102 - protein, 28 aa, Artificial Sequence
  Cyclic GFR-binding peptide
  MOD_RES (26), (28): Xaa is C or S
SSLSILFFVGRTPKVLKVYPMVVKSXKX

SEQ ID NO: 74103 - protein, 34 aa, Artificial Sequence; identical to SEQ ID NO: 25483
  Cyclic GFR-binding peptide
  MOD_RES (1), (2), (34): Xaa is C or S

SEQ ID NO: 74104 - protein, 27 aa, Artificial Sequence
  Cyclic GFR-binding peptide
PTQLSSLSVLFFDDSSNVILKVYPNMV

SEQ ID NO: 74105 - protein, 29 aa, Artificial Sequence
  Cyclic GFR-binding peptide
TRLSSLSILFFDSANNVVLKVYPDMVVES

SEQ ID NO: 74106 - protein, 35 aa, Artificial Sequence; identical to SEQ ID NO: 25485
  Cyclic GFR-binding peptide
  MOD_RES (32), (34): Xaa is C or S

SEQ ID NO: 74107 - protein, 29 aa, Artificial Sequence
  Cyclic GFR-binding peptide
  MOD_RES (3), (4): Xaa is C or S
KPXXAPTKLSSLSVLFFDDSSNVILKVYP

SEQ ID NO: 74108 - protein, 23 aa, Artificial Sequence
  Cyclic GFR-binding peptide
SSLSILFFVGRKPKVLKVYPMIV

SEQ ID NO: 74109 - protein, 32 aa, Artificial Sequence
  Cyclic GFR-binding peptide
  MOD_RES (31), (31): Xaa is C or S
PTKMSSLSMLFFNDKQQIILKVYPGMVVDRXG

SEQ ID NO: 74110 - protein, 31 aa, Artificial Sequence
  Cyclic GFR-binding peptide
  MOD_RES (2), (3): Xaa is C or S
AXXVPTKLSSLSILFFDKGVVTYLKVYPGMA

SEQ ID NO: 74111 - protein, 34 aa, Artificial Sequence; identical to SEQ ID NO: 25488
  Cyclic GFR-binding peptide
  MOD_RES (1), (2), (34): Xaa is C or S

SEQ ID NO: 74112 - protein, 27 aa, Artificial Sequence
  Cyclic GFR-binding peptide
  MOD_RES (27), (27): Xaa is C or S
LSSLSILFFIGKTPKILKVYPMIVKSX

SEQ ID NO: 74113 - protein, 33 aa, Artificial Sequence; identical to SEQ ID NO: 25490
  Cyclic GFR-binding peptide
  MOD_RES (2), (3): Xaa is C or S

SEQ ID NO: 74114 - protein, 33 aa, Artificial Sequence; identical to SEQ ID NO: 25489
  Cyclic GFR-binding peptide
  MOD_RES (31), (33): Xaa is C or S

SEQ ID NO: 74115 - protein, 35 aa, Artificial Sequence
  Cyclic GFR-binding peptide
  MOD_RES (3), (4): Xaa is C or S
KAXXVPTELSSLSMLFFDENEKVVLKVYPDMVVEG

SEQ ID NO: 74116 - protein, 39 aa, Artificial Sequence; identical to SEQ ID NO: 25492
  Cyclic GFR-binding peptide
  MOD_RES (5), (5): Xaa is C or S

SEQ ID NO: 74117 - protein, 33 aa, Artificial Sequence; identical to SEQ ID NO: 25493
  Cyclic GFR-binding peptide
  MOD_RES (2), (3): Xaa is C or S

SEQ ID NO: 74118 - protein, 21 aa, Artificial Sequence
  Cyclic GFR-binding peptide
SSLSVLFFDDMGVPTLKVYPE

SEQ ID NO: 74119 - protein, 26 aa, Artificial Sequence
  Cyclic GFR-binding peptide
RVHHSSLSVLFFEYVRKKPKLLKVYP

SEQ ID NO: 74120 - protein, 28 aa, Artificial Sequence
  Cyclic GFR-binding peptide
  MOD_RES (27), (27): Xaa is C or S
SSLSILFFDKGVVTYLKVYPGMAVSEXG

SEQ ID NO: 74121 - protein, 37 aa, Artificial Sequence; identical to SEQ ID NO: 25494
  Cyclic GFR-binding peptide
  MOD_RES (4), (5): Xaa is C or S

SEQ ID NO: 74122 - protein, 22 aa, Artificial Sequence
  Cyclic GFR-binding peptide
KLSSLSVLFFDDMGVPTLKVYP

SEQ ID NO: 74123 - protein, 33 aa, Artificial Sequence; identical to SEQ ID NO: 25495
  Cyclic GFR-binding peptide
  MOD_RES (1), (2): Xaa is C or S

SEQ ID NO: 74124 - protein, 27 aa, Artificial Sequence
  Cyclic GFR-binding peptide
TKLSSLSILFFDKGVVTYLKVYPGMAV

SEQ ID NO: 74125 - protein, 37 aa, Artificial Sequence; identical to SEQ ID NO: 25498
  Cyclic GFR-binding peptide
  MOD_RES (3), (4), (35), (37): Xaa is C or S

SEQ ID NO: 74126 - protein, 31 aa, Artificial Sequence
  Cyclic GFR-binding peptide
  MOD_RES (30), (30): Xaa is C or S
TELSSLSMLFFDENEKVVLKVYPDMVVEGXG

SEQ ID NO: 74127 - protein, 34 aa, Artificial Sequence
  Cyclic GFR-binding peptide
  MOD_RES (6), (7): Xaa is C or S
ASAAPXXVPQALSSLSILFFVGRKPKVLKVYPMI

SEQ ID NO: 74128 - protein, 37 aa, Artificial Sequence; identical to SEQ ID NO: 25500
  Cyclic GFR-binding peptide
  MOD_RES (6), (7): Xaa is C or S

SEQ ID NO: 74129 - protein, 27 aa, Artificial Sequence
  Cyclic GFR-binding peptide
  MOD_RES (1), (1): Xaa is C or S
XVPTELSSLSMLFFDENEKVVLKVYPD

SEQ ID NO: 74130 - protein, 31 aa, Artificial Sequence
  Cyclic GFR-binding peptide
VPTKLSSLSVLFFDDMGVPTLKVYPEGMSVA

SEQ ID NO: 74131 - protein, 22 aa, Artificial Sequence
  Cyclic GFR-binding peptide
MSSLSMLFFNDKQQIILKVYPG

SEQ ID NO: 74132 - protein, 30 aa, Artificial Sequence
  Cyclic GFR-binding peptide
PTKLSSLSVLFFDDMGVPTLKVYPEGMSVA

SEQ ID NO: 74133 - protein, 38 aa, Artificial Sequence; identical to SEQ ID NO: 25503
  Cyclic GFR-binding peptide
  MOD_RES (3), (35), (37): Xaa is C or S

SEQ ID NO: 74134 - protein, 33 aa, Artificial Sequence
  Cyclic GFR-binding peptide
  MOD_RES (2), (3): Xaa is C or S
AXXVPTKLSSLSVLFFDDMGVPTLKVYPEGMSV

SEQ ID NO: 74135 - protein, 26 aa, Artificial Sequence
  Cyclic GFR-binding peptide
  MOD_RES (1), (1): Xaa is C or S
XAPTKLSSLSVLFFDDSSNVILKVYP

SEQ ID NO: 74136 - protein, 37 aa, Artificial Sequence; identical to SEQ ID NO: 25504
  Cyclic GFR-binding peptide
  MOD_RES (2), (3), (34), (36): Xaa is C or S

SEQ ID NO: 74137 - protein, 30 aa, Artificial Sequence; identical to SEQ ID NO: 25505
  Cyclic GFR-binding peptide

SEQ ID NO: 74138 - protein, 37 aa, Artificial Sequence; identical to SEQ ID NO: 25506
  Cyclic GFR-binding peptide
  MOD_RES (6), (7): Xaa is C or S

SEQ ID NO: 74139 - protein, 36 aa, Artificial Sequence; identical to SEQ ID NO: 25507
  Cyclic GFR-binding peptide
  MOD_RES (1), (33), (35): Xaa is C or S

SEQ ID NO: 74140 - protein, 36 aa, Artificial Sequence; identical to SEQ ID NO: 25508
  Cyclic GFR-binding peptide
  MOD_RES (4), (5): Xaa is C or S

SEQ ID NO: 74141 - protein, 26 aa, Artificial Sequence
  Cyclic GFR-binding peptide
  MOD_RES (26), (26): Xaa is C or S
SSLSILFFVGRKPKVLKVYPMIVRSX

SEQ ID NO: 74142 - protein, 35 aa, Artificial Sequence
  Cyclic GFR-binding peptide
  MOD_RES (6), (7): Xaa is C or S
KASKAXXVPTKLSSLSILFFDKGVVTYLKVYPGMA

SEQ ID NO: 74143 - protein, 27 aa, Artificial Sequence
  Cyclic GFR-binding peptide
RVHHSSLSVLFFEYVRKKPKLLKVYPR

SEQ ID NO: 74144 - protein, 31 aa, Artificial Sequence
  Cyclic GFR-binding peptide
  MOD_RES (6), (6): Xaa is C or S
VTKPTXAPTKLSSLSVLFFDDSSNVILKVYP

SEQ ID NO: 74145 - protein, 30 aa, Artificial Sequence
  Cyclic GFR-binding peptide
  MOD_RES (27), (29): Xaa is C or S
TSSLSMLFFDNGRVLLLKVYPMIVEEXGXL

SEQ ID NO: 74146 - protein, 32 aa, Artificial Sequence
  Cyclic GFR-binding peptide
  MOD_RES (4), (5): Xaa is C or S
PSTXXAPVKTSSLSMLFFDNGRVLLLKVYPMI

SEQ ID NO: 74147 - protein, 29 aa, Artificial Sequence
  Cyclic GFR-binding peptide
  MOD_RES (2), (3): Xaa is C or S
PXXAPTQLSSLSVLFFDDSSNVILKVYPN

SEQ ID NO: 74148 - protein, 22 aa, Artificial Sequence
  Cyclic GFR-binding peptide
LSSLSILFFDAANNVVLKVYPD

SEQ ID NO: 74149 - protein, 26 aa, Artificial Sequence
  Cyclic GFR-binding peptide
LSSLSVLFFDSSNNVILKVYPNMVVK

SEQ ID NO: 74150 - protein, 32 aa, Artificial Sequence; identical to SEQ ID NO: 25511
  Cyclic GFR-binding peptide
  MOD_RES (1), (1): Xaa is C or S

SEQ ID NO: 74151 - protein, 24 aa, Artificial Sequence
  Cyclic GFR-binding peptide
PARLSSLSILFFDAANNVVLKVYP

SEQ ID NO: 74152 - protein, 38 aa, Artificial Sequence; identical to SEQ ID NO: 25512
  Cyclic GFR-binding peptide
  MOD_RES (3), (4), (35), (37): Xaa is C or S

SEQ ID NO: 74153 - protein, 31 aa, Artificial Sequence
  Cyclic GFR-binding peptide
  MOD_RES (2), (3): Xaa is C or S
TXXAPVKTSSLSMLFFDNGRVLLLKVYPMIV

SEQ ID NO: 74154 - protein, 21 aa, Artificial Sequence
  Cyclic GFR-binding peptide
LSSLSILFFDAANNVVLKVYP

SEQ ID NO: 74155 - protein, 35 aa, Artificial Sequence
  Cyclic GFR-binding peptide
  MOD_RES (2), (3), (35): Xaa is C or S
AXXVPTELSSLSMLFFDENEKVVLKVYPDMVVEGX

SEQ ID NO: 74156 - protein, 34 aa, Artificial Sequence
  Cyclic GFR-binding peptide
  MOD_RES (5), (6): Xaa is C or S
SAGPXXTPTKMSSLSMLFFNDKQQIILKVYPGMV

SEQ ID NO: 74157 - protein, 28 aa, Artificial Sequence
  Cyclic GFR-binding peptide
  MOD_RES (1), (1): Xaa is C or S
XVPTELSSLSMLFFDEYDKVVLKVYPEM

SEQ ID NO: 74158 - protein, 34 aa, Artificial Sequence
  Cyclic GFR-binding peptide
  MOD_RES (5), (6): Xaa is C or S
VPSTXXAPVKTSSLSMLFFDNGRVLLLKVYPMIV

SEQ ID NO: 74159 - protein, 33 aa, Artificial Sequence
  Cyclic GFR-binding peptide
  MOD_RES (33), (33): Xaa is C or S
PTEESSLSMLFFRIKPHQGQHLKVYPFLQHNKX

SEQ ID NO: 74160 - protein, 24 aa, Artificial Sequence
  Cyclic GFR-binding peptide
SSLSMLFFDEYDKVVLKVYPEMVV

SEQ ID NO: 74161 - protein, 27 aa, Artificial Sequence
  Cyclic GFR-binding peptide
HSSLSVLFFEYVRKKPKLLKVYPRLEE

SEQ ID NO: 74162 - protein, 36 aa, Artificial Sequence; identical to SEQ ID NO: 25519
  Cyclic GFR-binding peptide
  MOD_RES (1), (2), (34), (36): Xaa is C or S

SEQ ID NO: 74163 - protein, 44 aa, Artificial Sequence; identical to SEQ ID NO: 25520
  Cyclic GFR-binding peptide
  MOD_RES (5), (42), (44): Xaa is C or S

SEQ ID NO: 74164 - protein, 38 aa, Artificial Sequence; identical to SEQ ID NO: 25521
  Cyclic GFR-binding peptide
  MOD_RES (5), (6), (37): Xaa is C or S

SEQ ID NO: 74165 - protein, 34 aa, Artificial Sequence; identical to SEQ ID NO: 25522
  Cyclic GFR-binding peptide
  MOD_RES (1), (2), (34): Xaa is C or S

SEQ ID NO: 74166 - protein, 32 aa, Artificial Sequence
  Cyclic GFR-binding peptide
  MOD_RES (4), (5): Xaa is C or S
AGPXXTPTKMSSLSMLFFNDKQQIILKVYPGM

SEQ ID NO: 74167 - protein, 39 aa, Artificial Sequence; identical to SEQ ID NO: 25524
  Cyclic GFR-binding peptide
  MOD_RES (5), (39): Xaa is C or S

SEQ ID NO: 74168 - protein, 30 aa, Artificial Sequence
  Cyclic GFR-binding peptide
PTQLSSLSVLFFDDSSNVILKVYPNMVVRA

SEQ ID NO: 74169 - protein, 25 aa, Artificial Sequence
  Cyclic GFR-binding peptide
PARLSSLSILFFDAANNVVLKVYPD

SEQ ID NO: 74170 - protein, 28 aa, Artificial Sequence
  Cyclic GFR-binding peptide
HHSSLSVLFFEYVRKKPKLLKVYPRLEE

SEQ ID NO: 74171 - protein, 30 aa, Artificial Sequence
  Cyclic GFR-binding peptide
  MOD_RES (4), (5): Xaa is C or S
PKAXXVPTELSSLSMLFFDENEKVVLKVYP

SEQ ID NO: 74172 - protein, 29 aa, Artificial Sequence
  Cyclic GFR-binding peptide
  MOD_RES (1), (1): Xaa is C or S
XVSQDLSSLSILFFIGKTPKILKVYPMIV

SEQ ID NO: 74173 - protein, 31 aa, Artificial Sequence; identical to SEQ ID NO: 25525
  Cyclic GFR-binding peptide
  MOD_RES (1), (1): Xaa is C or S

SEQ ID NO: 74174 - protein, 24 aa, Artificial Sequence
  Cyclic GFR-binding peptide
TKLSSLSVLFFDDMGVPTLKVYPE

SEQ ID NO: 74175 - protein, 23 aa, Artificial Sequence
  Cyclic GFR-binding peptide
ALSSLSILFFVGRKPKVLKVYPM

SEQ ID NO: 74176 - protein, 38 aa, Artificial Sequence; identical to SEQ ID NO: 25526
  Cyclic GFR-binding peptide
  MOD_RES (4), (38): Xaa is C or S

SEQ ID NO: 74177 - protein, 34 aa, Artificial Sequence; identical to SEQ ID NO: 25527
  Cyclic GFR-binding peptide
  MOD_RES (1), (33): Xaa is C or S

SEQ ID NO: 74178 - protein, 31 aa, Artificial Sequence
  Cyclic GFR-binding peptide
  MOD_RES (29), (31): Xaa is C or S
KLSSLSVLFFDDSSNVILKVYPNMVVRSXGX

SEQ ID NO: 74179 - protein, 33 aa, Artificial Sequence
  Cyclic GFR-binding peptide
  MOD_RES (5), (6): Xaa is C or S
VPKPXXAPTQLSSLSVLFFDDSSNVILKVYPNM

SEQ ID NO: 74180 - protein, 27 aa, Artificial Sequence
  Cyclic GFR-binding peptide
KLSSLSILFFDKGVVTYLKVYPGMAVS

SEQ ID NO: 74181 - protein, 34 aa, Artificial Sequence
  Cyclic GFR-binding peptide
  MOD_RES (6), (7): Xaa is C or S
AVPKAXXAPTKLSSLSVLFFDSSNNVILKVYPNM

SEQ ID NO: 74182 - protein, 32 aa, Artificial Sequence
  Cyclic GFR-binding peptide
  MOD_RES (6), (7): Xaa is C or S
AAPASXXVPARLSSLSILFFDAANNVVLKVYP

SEQ ID NO: 74183 - protein, 33 aa, Artificial Sequence
  Cyclic GFR-binding peptide
  MOD_RES (6), (6): Xaa is C or S
VTKPTXAPTKLSSLSVLFFDDSSNVILKVYPNM

SEQ ID NO: 74184 - protein, 29 aa, Artificial Sequence
  Cyclic GFR-binding peptide
  MOD_RES (3), (4): Xaa is C or S
SPXXVSQDLSSLSILFFIGKTPKILKVYP

SEQ ID NO: 74185 - protein, 35 aa, Artificial Sequence; identical to SEQ ID NO: 25532
  Cyclic GFR-binding peptide
  MOD_RES (32), (34): Xaa is C or S

SEQ ID NO: 74186 - protein, 29 aa, Artificial Sequence
  Cyclic GFR-binding peptide
  MOD_RES (1), (1): Xaa is C or S
XVPTELSSLSMLFFDENEKVVLKVYPDMV

SEQ ID NO: 74187 - protein, 36 aa, Artificial Sequence; identical to SEQ ID NO: 25534
  Cyclic GFR-binding peptide
  MOD_RES (1), (2), (33), (35): Xaa is C or S

SEQ ID NO: 74188 - protein, 33 aa, Artificial Sequence
  Cyclic GFR-binding peptide
  MOD_RES (31), (33): Xaa is C or S
EESSLSMLFFRIKPHQGQHLKVYPFLQHNKXEX

SEQ ID NO: 74189 - protein, 38 aa, Artificial Sequence; identical to SEQ ID NO: 25535
  Cyclic GFR-binding peptide
  MOD_RES (5), (6), (38): Xaa is C or S

SEQ ID NO: 74190 - protein, 29 aa, Artificial Sequence
  Cyclic GFR-binding peptide
  MOD_RES (2), (3): Xaa is C or S
PXXVPQDLSSLSILFFVGRTPKVLKVYPM

SEQ ID NO: 74191 - protein, 29 aa, Artificial Sequence
  Cyclic GFR-binding peptide
SSLSMLFFDEYDKVVLKVYPAAAAAAAAA

SEQ ID NO: 74192 - protein, 28 aa, Artificial Sequence
  Cyclic GFR-binding peptide
  MOD_RES (1), (2): Xaa is C or S
XXAPTKLSSLSVLFFDDSSNVILKVYPN

SEQ ID NO: 74193 - protein, 32 aa, Artificial Sequence
  Cyclic GFR-binding peptide
  MOD_RES (2), (3): Xaa is C or S
PXXTPTKMSSLSMLFFNDKQQIILKVYPGMVV

SEQ ID NO: 74194 - protein, 27 aa, Artificial Sequence
  Cyclic GFR-binding peptide
LSSLSILFFDKGVVTYLKVYPGMAVSE

SEQ ID NO: 74195 - protein, 32 aa, Artificial Sequence
  Cyclic GFR-binding peptide
  MOD_RES (6), (7): Xaa is C or S
GSAGPXXTPTKMSSLSMLFFNDKQQIILKVYP

SEQ ID NO: 74196 - protein, 26 aa, Artificial Sequence
  Cyclic GFR-binding peptide
PVKTSSLSMLFFDNGRVLLLKVYPMI

SEQ ID NO: 74197 - protein, 23 aa, Artificial Sequence
  Cyclic GFR-binding peptide
TKLSSLSVLFFDDSSNVILKVYP

SEQ ID NO: 74198 - protein, 28 aa, Artificial Sequence
  Cyclic GFR-binding peptide
QLSSLSVLFFDDSSNVILKVYPNMVVRA

SEQ ID NO: 74199 - protein, 30 aa, Artificial Sequence
  Cyclic GFR-binding peptide
  MOD_RES (30), (30): Xaa is C or S
TELSSLSMLFFDENEKVVLKVYPDMVVEGX

SEQ ID NO: 74200 - protein, 27 aa, Artificial Sequence
  Cyclic GFR-binding peptide
PTRLSSLSILFFDSANNVVLKVYPDMV

SEQ ID NO: 74201 - protein, 29 aa, Artificial Sequence
  Cyclic GFR-binding peptide
  MOD_RES (3), (3): Xaa is C or S
PTXAPTKLSSLSVLFFDDSSNVILKVYPN

SEQ ID NO: 74202 - protein, 29 aa, Artificial Sequence
  Cyclic GFR-binding peptide
  MOD_RES (1), (1): Xaa is C or S
XAPTQLSSLSVLFFDDSSNVILKVYPNMV

SEQ ID NO: 74203 - protein, 29 aa, Artificial Sequence
  Cyclic GFR-binding peptide
  MOD_RES (2), (3): Xaa is C or S
AXXVPTKLSSLSILFFDKGVVTYLKVYPG

SEQ ID NO: 74204 - protein, 30 aa, Artificial Sequence
  Cyclic GFR-binding peptide
  MOD_RES (4), (5): Xaa is C or S
GKAXXVPTKLSSLSVLFFDDMGVPTLKVYP

SEQ ID NO: 74205 - protein, 31 aa, Artificial Sequence
  Cyclic GFR-binding peptide
  MOD_RES (5), (6): Xaa is C or S
VGKAXXVPTKLSSLSVLFFDDMGVPTLKVYP

SEQ ID NO: 74206 - protein, 35 aa, Artificial Sequence
  Cyclic GFR-binding peptide
  MOD_RES (32), (34): Xaa is C or S
TEESSLSMLFFRIKPHQGQHLKVYPFLQHNKXEXR

SEQ ID NO: 74207 - protein, 24 aa, Artificial Sequence
  Cyclic GFR-binding peptide
DLSSLSILFFVGRTPKVLKVYPMV

SEQ ID NO: 74208 - protein, 31 aa, Artificial Sequence
  Cyclic GFR-binding peptide
  MOD_RES (2), (2): Xaa is C or S
KXQPSRVHHSSLSVLFFEYVRKKPKLLKVYP

SEQ ID NO: 74209 - protein, 22 aa, Artificial Sequence
  Cyclic GFR-binding peptide
SSLSVLFFEYVRKKPKLLKVYP

SEQ ID NO: 74210 - protein, 31 aa, Artificial Sequence
  Cyclic GFR-binding peptide
  MOD_RES (3), (4): Xaa is C or S
KAXXAPTKLSSLSVLFFDSSNNVILKVYPNM

SEQ ID NO: 74211 - protein, 37 aa, Artificial Sequence; identical to SEQ ID NO: 25539
  Cyclic GFR-binding peptide
  MOD_RES (6), (7): Xaa is C or S

SEQ ID NO: 74212 - protein, 22 aa, Artificial Sequence
  Cyclic GFR-binding peptide
SSLSILFFDSANNVVLKVYPDM

SEQ ID NO: 74213 - protein, 32 aa, Artificial Sequence
  Cyclic GFR-binding peptide
  MOD_RES (5), (6): Xaa is C or S
IPKAXXVPTELSSLSMLFFDEYDKVVLKVYPE

SEQ ID NO: 74214 - protein, 31 aa, Artificial Sequence
  Cyclic GFR-binding peptide
RVHHSSLSVLFFEYVRKKPKLLKVYPRLEEH

SEQ ID NO: 74215 - protein, 28 aa, Artificial Sequence
  Cyclic GFR-binding peptide
VPTELSSLSMLFFDEYDKVVLKVYPEMV

SEQ ID NO: 74216 - protein, 35 aa, Artificial Sequence; identical to SEQ ID NO: 25541
  Cyclic GFR-binding peptide
  MOD_RES (2), (3), (35): Xaa is C or S

SEQ ID NO: 74217 - protein, 32 aa, Artificial Sequence
  Cyclic GFR-binding peptide
  MOD_RES (6), (7): Xaa is C or S
KASKAXXVPTKLSSLSILFFDKGVVTYLKVYP

SEQ ID NO: 74218 - protein, 30 aa, Artificial Sequence
  Cyclic GFR-binding peptide
  MOD_RES (28), (30): Xaa is C or S
LSSLSVLFFDDSSNVILKVYPNMVVRAXGX

SEQ ID NO: 74219 - protein, 35 aa, Artificial Sequence; identical to SEQ ID NO: 25543
  Cyclic GFR-binding peptide
  MOD_RES (3), (4), (35): Xaa is C or S

SEQ ID NO: 74220 - protein, 35 aa, Artificial Sequence
  Cyclic GFR-binding peptide
  MOD_RES (1), (2), (34): Xaa is C or S
XXVPTELSSLSMLFFDENEKVVLKVYPDMVVEGXG

SEQ ID NO: 74221 - protein, 35 aa, Artificial Sequence
  Cyclic GFR-binding peptide
  MOD_RES (6), (7): Xaa is C or S
ASAAPXXVPQALSSLSILFFVGRKPKVLKVYPMIV

SEQ ID NO: 74222 - protein, 26 aa, Artificial Sequence
  Cyclic GFR-binding peptide
TEESSLSMLFFRIKPHQGQHLKVYPF

SEQ ID NO: 74223 - protein, 30 aa, Artificial Sequence
  Cyclic GFR-binding peptide
VPTEESSLSMLFFRIKPHQGQHLKVYPFLQ

SEQ ID NO: 74224 - protein, 37 aa, Artificial Sequence; identical to SEQ ID NO: 25545
  Cyclic GFR-binding peptide
  MOD_RES (5), (6): Xaa is C or S

SEQ ID NO: 74225 - protein, 24 aa, Artificial Sequence
  Cyclic GFR-binding peptide
PTQLSSLSVLFFDDSSNVILKVYP

SEQ ID NO: 74226 - protein, 27 aa, Artificial Sequence
  Cyclic GFR-binding peptide
MSSLSMLFFNDKQQIILKVYPGMVVDR

SEQ ID NO: 74227 - protein, 29 aa, Artificial Sequence
  Cyclic GFR-binding peptide
  MOD_RES (2), (3): Xaa is C or S
AXXAPTKLSSLSVLFFDSSNNVILKVYPN

SEQ ID NO: 74228 - protein, 30 aa, Artificial Sequence
  Cyclic GFR-binding peptide
  MOD_RES (3), (4): Xaa is C or S
KAXXVPTKLSSLSILFFDKGVVTYLKVYPG

SEQ ID NO: 74229 - protein, 35 aa, Artificial Sequence; identical to SEQ ID NO: 25549
  Cyclic GFR-binding peptide
  MOD_RES (4), (4): Xaa is C or S

SEQ ID NO: 74230 - protein, 36 aa, Artificial Sequence; identical to SEQ ID NO: 25550
  Cyclic GFR-binding peptide
  MOD_RES (1), (2), (34), (36): Xaa is C or S

SEQ ID NO: 74231 - protein, 21 aa, Artificial Sequence
  Cyclic GFR-binding peptide
MSSLSMLFFNDKQQIILKVYP

SEQ ID NO: 74232 - protein, 32 aa, Artificial Sequence
  Cyclic GFR-binding peptide
  MOD_RES (5), (6): Xaa is C or S
VPSTXXAPVKTSSLSMLFFDNGRVLLLKVYPM

SEQ ID NO: 74233 - protein, 32 aa, Artificial Sequence
  Cyclic GFR-binding peptide
  MOD_RES (3), (4): Xaa is C or S
KAXXAPTKLSSLSVLFFDSSNNVILKVYPNMV

SEQ ID NO: 74234 - protein, 37 aa, Artificial Sequence; identical to SEQ ID NO: 25553
  Cyclic GFR-binding peptide
  MOD_RES (2), (3), (35), (37): Xaa is C or S

SEQ ID NO: 74235 - protein, 38 aa, Artificial Sequence; identical to SEQ ID NO: 25554
  Cyclic GFR-binding peptide
  MOD_RES (5), (6), (38): Xaa is C or S

SEQ ID NO: 74236 - protein, 27 aa, Artificial Sequence
  Cyclic GFR-binding peptide
LSSLSVLFFDSSNNVILKVYPNMVVKA

SEQ ID NO: 74237 - protein, 34 aa, Artificial Sequence; identical to SEQ ID NO: 25555
  Cyclic GFR-binding peptide
  MOD_RES (1), (33): Xaa is C or S

SEQ ID NO: 74238 - protein, 34 aa, Artificial Sequence
  Cyclic GFR-binding peptide
  MOD_RES (31), (33): Xaa is C or S
PTELSSLSMLFFDENEKVVLKVYPDMVVEGXGXR

SEQ ID NO: 74239 - protein, 24 aa, Artificial Sequence
  Cyclic GFR-binding peptide
LSSLSVLFFDSSNNVILKVYPNMV

SEQ ID NO: 74240 - protein, 26 aa, Artificial Sequence
  Cyclic GFR-binding peptide
TKLSSLSILFFDKGVVTYLKVYPGMA

SEQ ID NO: 74241 - protein, 36 aa, Artificial Sequence; identical to SEQ ID NO: 25556
  Cyclic GFR-binding peptide
  MOD_RES (1), (2), (33), (35): Xaa is C or S

SEQ ID NO: 74242 - protein, 35 aa, Artificial Sequence; identical to SEQ ID NO: 25557
  Cyclic GFR-binding peptide
  MOD_RES (1), (33), (35): Xaa is C or S

SEQ ID NO: 74243 - protein, 37 aa, Artificial Sequence; identical to SEQ ID NO: 25558
  Cyclic GFR-binding peptide
  MOD_RES (2), (3), (35), (37): Xaa is C or S

SEQ ID NO: 74244 - protein, 24 aa, Artificial Sequence
  Cyclic GFR-binding peptide
KLSSLSVLFFDSSNNVILKVYPNM

SEQ ID NO: 74245 - protein, 26 aa, Artificial Sequence
  Cyclic GFR-binding peptide
TKLSSLSVLFFDDSSNVILKVYPNMV

SEQ ID NO: 74246 - protein, 28 aa, Artificial Sequence
  Cyclic GFR-binding peptide
HSSLSVLFFEYVRKKPKLLKVYPRLEEH

SEQ ID NO: 74247 - protein, 36 aa, Artificial Sequence; identical to SEQ ID NO: 25560
  Cyclic GFR-binding peptide
  MOD_RES (3), (4), (35): Xaa is C or S

SEQ ID NO: 74248 - protein, 36 aa, Artificial Sequence
  Cyclic GFR-binding peptide
  MOD_RES (2), (3), (35): Xaa is C or S
AXXVPTELSSLSMLFFDENEKVVLKVYPDMVVEGXG

SEQ ID NO: 74249 - protein, 34 aa, Artificial Sequence
  Cyclic GFR-binding peptide
  MOD_RES (31), (33): Xaa is C or S
PTRLSSLSILFFDSANNVVLKVYPDMVVESXGXR

SEQ ID NO: 74250 - protein, 35 aa, Artificial Sequence; identical to SEQ ID NO: 25561
  Cyclic GFR-binding peptide
  MOD_RES (1), (33), (35): Xaa is C or S

SEQ ID NO: 74251 - protein, 27 aa, Artificial Sequence
  Cyclic GFR-binding peptide
PQALSSLSILFFVGRKPKVLKVYPMIV

SEQ ID NO: 74252 - protein, 35 aa, Artificial Sequence; identical to SEQ ID NO: 25563
  Cyclic GFR-binding peptide
  MOD_RES (4), (5): Xaa is C or S

SEQ ID NO: 74253 - protein, 35 aa, Artificial Sequence; identical to SEQ ID NO: 25564
  Cyclic GFR-binding peptide
  MOD_RES (4), (5): Xaa is C or S

SEQ ID NO: 74254 - protein, 23 aa, Artificial Sequence
  Cyclic GFR-binding peptide
LSSLSMLFFDENEKVVLKVYPDM

SEQ ID NO: 74255 - protein, 36 aa, Artificial Sequence; identical to SEQ ID NO: 25566
  Cyclic GFR-binding peptide
  MOD_RES (4), (5): Xaa is C or S

SEQ ID NO: 74256 - protein, 37 aa, Artificial Sequence; identical to SEQ ID NO: 25568
  Cyclic GFR-binding peptide
  MOD_RES (1), (2), (34), (36): Xaa is C or S

SEQ ID NO: 74257 - protein, 30 aa, Artificial Sequence
  Cyclic GFR-binding peptide
HHSSLSVLFFEYVRKKPKLLKVYPRLEEHL

SEQ ID NO: 74258 - protein, 27 aa, Artificial Sequence
  Cyclic GFR-binding peptide
VHHSSLSVLFFEYVRKKPKLLKVYPRL

SEQ ID NO: 74259 - protein, 32 aa, Artificial Sequence
  Cyclic GFR-binding peptide
QPSRVHHSSLSVLFFEYVRKKPKLLKVYPRLE

SEQ ID NO: 74260 - protein, 32 aa, Artificial Sequence
  Cyclic GFR-binding peptide
PTEESSLSMLFFRIKPHQGQHLKVYPFLQHNK

SEQ ID NO: 74261 - protein, 27 aa, Artificial Sequence
  Cyclic GFR-binding peptide
  MOD_RES (1), (1): Xaa is C or S
XAPTKLSSLSVLFFDDSSNVILKVYPN

SEQ ID NO: 74262 - protein, 30 aa, Artificial Sequence
  Cyclic GFR-binding peptide
  MOD_RES (3), (3): Xaa is C or S
LEXVPTEESSLSMLFFRIKPHQGQHLKVYP

SEQ ID NO: 74263 - protein, 24 aa, Artificial Sequence
  Cyclic GFR-binding peptide
TKLSSLSVLFFDDSSNVILKVYPN

SEQ ID NO: 74264 - protein, 33 aa, Artificial Sequence
  Cyclic GFR-binding peptide
  MOD_RES (6), (7): Xaa is C or S
KIPKAXXVPTELSSLSMLFFDENEKVVLKVYPD

SEQ ID NO: 74265 - protein, 37 aa, Artificial Sequence; identical to SEQ ID NO: 25580
  Cyclic GFR-binding peptide
  MOD_RES (5), (6), (37): Xaa is C or S

SEQ ID NO: 74266 - protein, 34 aa, Artificial Sequence
  Cyclic GFR-binding peptide
  MOD_RES (4), (5): Xaa is C or S
PKAXXAPTKLSSLSVLFFDSSNNVILKVYPNMVV

SEQ ID NO: 74267 - protein, 29 aa, Artificial Sequence
  Cyclic GFR-binding peptide
  MOD_RES (27), (29): Xaa is C or S
SSLSVLFFDDSSNVILKVYPNMVVRAXGX

SEQ ID NO: 74268 - protein, 37 aa, Artificial Sequence; identical to SEQ ID NO: 25583
  Cyclic GFR-binding peptide
  MOD_RES (1), (2), (34), (36): Xaa is C or S

SEQ ID NO: 74269 - protein, 29 aa, Artificial Sequence
  Cyclic GFR-binding peptide
  MOD_RES (1), (2): Xaa is C or S
XXVPTELSSLSMLFFDEYDKVVLKVYPEM

SEQ ID NO: 74270 - protein, 28 aa, Artificial Sequence
  Cyclic GFR-binding peptide
VSQDLSSLSILFFIGKTPKILKVYPMIV

SEQ ID NO: 74271 - protein, 35 aa, Artificial Sequence
  Cyclic GFR-binding peptide
  MOD_RES (2), (2): Xaa is C or S
KXQPSRVHHSSLSVLFFEYVRKKPKLLKVYPRLEE

SEQ ID NO: 74272 - protein, 36 aa, Artificial Sequence; identical to SEQ ID NO: 25585
  Cyclic GFR-binding peptide
  MOD_RES (3), (4), (35): Xaa is C or S

SEQ ID NO: 74273 - protein, 35 aa, Artificial Sequence; identical to SEQ ID NO: 25586
  Cyclic GFR-binding peptide
  MOD_RES (4), (5): Xaa is C or S

SEQ ID NO: 74274 - protein, 26 aa, Artificial Sequence
  Cyclic GFR-binding peptide
PTELSSLSMLFFDENEKVVLKVYPDM

SEQ ID NO: 74275 - protein, 41 aa, Artificial Sequence; identical to SEQ ID NO: 25587
  Cyclic GFR-binding peptide
  MOD_RES (5), (6), (38), (40): Xaa is C or S

SEQ ID NO: 74276 - protein, 31 aa, Artificial Sequence
  Cyclic GFR-binding peptide
  MOD_RES (28), (30): Xaa is C or S
MSSLSMLFFNDKQQIILKVYPGMVVDRXGXS

SEQ ID NO: 74277 - protein, 27 aa, Artificial Sequence
  Cyclic GFR-binding peptide
ESSLSMLFFRIKPHQGQHLKVYPFLQH

SEQ ID NO: 74278 - protein, 27 aa, Artificial Sequence
  Cyclic GFR-binding peptide
  MOD_RES (26), (26): Xaa is C or S
SSLSILFFVGRTPKVLKVYPMVVKSXK

SEQ ID NO: 74279 - protein, 33 aa, Artificial Sequence
  Cyclic GFR-binding peptide
  MOD_RES (32), (32): Xaa is C or S
VPTELSSLSMLFFDENEKVVLKVYPDMVVEGXG

SEQ ID NO: 74280 - protein, 29 aa, Artificial Sequence
  Cyclic GFR-binding peptide
  MOD_RES (2), (3): Xaa is C or S
TXXVPTRLSSLSILFFDSANNVVLKVYPD

SEQ ID NO: 74281 - protein, 25 aa, Artificial Sequence
  Cyclic GFR-binding peptide
SSLSILFFIGKTPKILKVYPMIVKS

SEQ ID NO: 74282 - protein, 33 aa, Artificial Sequence
  Cyclic GFR-binding peptide
  MOD_RES (4), (5): Xaa is C or S
SKAXXVPTKLSSLSILFFDKGVVTYLKVYPGMA

SEQ ID NO: 74283 - protein, 34 aa, Artificial Sequence
  Cyclic GFR-binding peptide
  MOD_RES (7), (7): Xaa is C or S
HVTKPTXAPTKLSSLSVLFFDDSSNVILKVYPNM

SEQ ID NO: 74284 - protein, 37 aa, Artificial Sequence
  Cyclic GFR-binding peptide
  MOD_RES (5), (5): Xaa is C or S
SSVKXQPSRVHHSSLSVLFFEYVRKKPKLLKVYPRLE

SEQ ID NO: 74285 - protein, 38 aa, Artificial Sequence; identical to SEQ ID NO: 25592
  Cyclic GFR-binding peptide
  MOD_RES (5), (6): Xaa is C or S

SEQ ID NO: 74286 - protein, 33 aa, Artificial Sequence; identical to SEQ ID NO: 25591
  Cyclic GFR-binding peptide

SEQ ID NO: 74287 - protein, 38 aa, Artificial Sequence; identical to SEQ ID NO: 25593
  Cyclic GFR-binding peptide
  MOD_RES (6), (7), (38): Xaa is C or S

SEQ ID NO: 74288 - protein, 28 aa, Artificial Sequence
  Cyclic GFR-binding peptide
SSLSMLFFRIKPHQGQHLKVYPFLQHNK

SEQ ID NO: 74289 - protein, 26 aa, Artificial Sequence
  Cyclic GFR-binding peptide
VPTELSSLSMLFFDEYDKVVLKVYPE

SEQ ID NO: 74290 - protein, 26 aa, Artificial Sequence
  Cyclic GFR-binding peptide
TPTKMSSLSMLFFNDKQQIILKVYPG

SEQ ID NO: 74291 - protein, 35 aa, Artificial Sequence
  Cyclic GFR-binding peptide
  MOD_RES (5), (6): Xaa is C or S
IPKAXXVPTELSSLSMLFFDENEKVVLKVYPDMVV

SEQ ID NO: 74292 - protein, 37 aa, Artificial Sequence; identical to SEQ ID NO: 25597
  Cyclic GFR-binding peptide
  MOD_RES (3), (4), (35), (37): Xaa is C or S

SEQ ID NO: 74293 - protein, 32 aa, Artificial Sequence
  Cyclic GFR-binding peptide
  MOD_RES (4), (5): Xaa is C or S
PKAXXAPTKLSSLSVLFFDSSNNVILKVYPNM

SEQ ID NO: 74294 - protein, 21 aa, Artificial Sequence
  Cyclic GFR-binding peptide
LSSLSILFFVGRKPKVLKVYP

SEQ ID NO: 74295 - protein, 23 aa, Artificial Sequence
  Cyclic GFR-binding peptide
LSSLSVLFFDSSNNVILKVYPNM

SEQ ID NO: 74296 - protein, 39 aa, Artificial Sequence; identical to SEQ ID NO: 25600
  Cyclic GFR-binding peptide
  MOD_RES (3), (4), (36), (38): Xaa is C or S

SEQ ID NO: 74297 - protein, 26 aa, Artificial Sequence
  Cyclic GFR-binding peptide
  MOD_RES (1), (1): Xaa is C or S
XAPTKLSSLSVLFFDSSNNVILKVYP

SEQ ID NO: 74298 - protein, 23 aa, Artificial Sequence
  Cyclic GFR-binding peptide
QLSSLSVLFFDDSSNVILKVYPN

SEQ ID NO: 74299 - protein, 39 aa, Artificial Sequence; identical to SEQ ID NO: 25602
  Cyclic GFR-binding peptide
  MOD_RES (6), (7), (38): Xaa is C or S

SEQ ID NO: 74300 - protein, 31 aa, Artificial Sequence
  Cyclic GFR-binding peptide
  MOD_RES (28), (30): Xaa is C or S
LSSLSILFFDAANNVVLKVYPDMVVEAXGXR

SEQ ID NO: 74301 - protein, 40 aa, Artificial Sequence; identical to SEQ ID NO: 25603
  Cyclic GFR-binding peptide
  MOD_RES (6), (7), (39): Xaa is C or S

SEQ ID NO: 74302 - protein, 30 aa, Artificial Sequence
  Cyclic GFR-binding peptide
  MOD_RES (28), (30): Xaa is C or S
LSSLSILFFDSANNVVLKVYPDMVVESXGX

SEQ ID NO: 74303 - protein, 25 aa, Artificial Sequence
  Cyclic GFR-binding peptide
LSSLSILFFDSANNVVLKVYPDMVV

SEQ ID NO: 74304 - protein, 31 aa, Artificial Sequence
  Cyclic GFR-binding peptide
PSRVHHSSLSVLFFEYVRKKPKLLKVYPRLE

SEQ ID NO: 74305 - protein, 33 aa, Artificial Sequence
  Cyclic GFR-binding peptide
  MOD_RES (1), (1): Xaa is C or S
XQPSRVHHSSLSVLFFEYVRKKPKLLKVYPRLE

SEQ ID NO: 74306 - protein, 23 aa, Artificial Sequence
  Cyclic GFR-binding peptide
SSLSILFFIGKTPKILKVYPMIV

SEQ ID NO: 74307 - protein, 25 aa, Artificial Sequence
  Cyclic GFR-binding peptide
VPQDLSSLSILFFVGRTPKVLKVYP

SEQ ID NO: 74308 - protein, 29 aa, Artificial Sequence
  Cyclic GFR-binding peptide
APTKLSSLSVLFFDSSNNVILKVYPNMVV

SEQ ID NO: 74309 - protein, 35 aa, Artificial Sequence; identical to SEQ ID NO: 25607
  Cyclic GFR-binding peptide
  MOD_RES (1), (33), (35): Xaa is C or S

SEQ ID NO: 74310 - protein, 32 aa, Artificial Sequence; identical to SEQ ID NO: 25608
  Cyclic GFR-binding peptide

SEQ ID NO: 74311 - protein, 29 aa, Artificial Sequence
  Cyclic GFR-binding peptide
TELSSLSMLFFDENEKVVLKVYPDMVVEG

SEQ ID NO: 74312 - protein, 23 aa, Artificial Sequence
  Cyclic GFR-binding peptide
LSSLSILFFDAANNVVLKVYPDM

SEQ ID NO: 74313 - protein, 27 aa, Artificial Sequence
  Cyclic GFR-binding peptide
  MOD_RES (27), (27): Xaa is C or S
SSLSILFFDKGVVTYLKVYPGMAVSEX

SEQ ID NO: 74314 - protein, 24 aa, Artificial Sequence
  Cyclic GFR-binding peptide
LSSLSILFFVGRTPKVLKVYPMVV

SEQ ID NO: 74315 - protein, 37 aa, Artificial Sequence; identical to SEQ ID NO: 25609
  Cyclic GFR-binding peptide
  MOD_RES (5), (5): Xaa is C or S

SEQ ID NO: 74316 - protein, 30 aa, Artificial Sequence
  Cyclic GFR-binding peptide
  MOD_RES (28), (30): Xaa is C or S
ALSSLSILFFVGRKPKVLKVYPMIVRSXKX

SEQ ID NO: 74317 - protein, 41 aa, Artificial Sequence; identical to SEQ ID NO: 25610
  Cyclic GFR-binding peptide
  MOD_RES (7), (39), (41): Xaa is C or S

SEQ ID NO: 74318 - protein, 34 aa, Artificial Sequence
  Cyclic GFR-binding peptide
  MOD_RES (4), (5): Xaa is C or S
GKAXXVPTKLSSLSVLFFDDMGVPTLKVYPEGMS

SEQ ID NO: 74319 - protein, 28 aa, Artificial Sequence
  Cyclic GFR-binding peptide
PTELSSLSMLFFDEYDKVVLKVYPEMVV

SEQ ID NO: 74320 - protein, 41 aa, Artificial Sequence; identical to SEQ ID NO: 25611
  Cyclic GFR-binding peptide
  MOD_RES (6), (7), (39), (41): Xaa is C or S

SEQ ID NO: 74321 - protein, 28 aa, Artificial Sequence
  Cyclic GFR-binding peptide
  MOD_RES (1), (2): Xaa is C or S
XXVPTRLSSLSILFFDSANNVVLKVYPD

SEQ ID NO: 74322 - protein, 36 aa, Artificial Sequence; identical to SEQ ID NO: 25613
  Cyclic GFR-binding peptide
  MOD_RES (2), (3), (35): Xaa is C or S

SEQ ID NO: 74323 - protein, 34 aa, Artificial Sequence; identical to SEQ ID NO: 25617
  Cyclic GFR-binding peptide
  MOD_RES (3), (4): Xaa is C or S

SEQ ID NO: 74324 - protein, 31 aa, Artificial Sequence
  Cyclic GFR-binding peptide
  MOD_RES (2), (3): Xaa is C or S
PXXAPTQLSSLSVLFFDDSSNVILKVYPNMV

SEQ ID NO: 74325 - protein, 30 aa, Artificial Sequence
  Cyclic GFR-binding peptide
  MOD_RES (30), (30): Xaa is C or S
SQDLSSLSILFFIGKTPKILKVYPMIVKSX

SEQ ID NO: 74326 - protein, 37 aa, Artificial Sequence
  Cyclic GFR-binding peptide
  MOD_RES (6), (7): Xaa is C or S
KIPKAXXVPTELSSLSMLFFDENEKVVLKVYPDMVVE

SEQ ID NO: 74327 - protein, 30 aa, Artificial Sequence
  Cyclic GFR-binding peptide
  MOD_RES (2), (3): Xaa is C or S
PXXAPTKLSSLSVLFFDDSSNVILKVYPNM

SEQ ID NO: 74328 - protein, 36 aa, Artificial Sequence; identical to SEQ ID NO: 25621
  Cyclic GFR-binding peptide
  MOD_RES (2), (3), (35): Xaa is C or S

SEQ ID NO: 74329 - protein, 32 aa, Artificial Sequence
  Cyclic GFR-binding peptide
  MOD_RES (5), (6): Xaa is C or S
SAGPXXTPTKMSSLSMLFFNDKQQIILKVYPG

SEQ ID NO: 74330 - protein, 41 aa, Artificial Sequence; identical to SEQ ID NO: 25622
  Cyclic GFR-binding peptide
  MOD_RES (5), (39), (41): Xaa is C or S

SEQ ID NO: 74331 - protein, 35 aa, Artificial Sequence
  Cyclic GFR-binding peptide
  MOD_RES (5), (6): Xaa is C or S
VPKPXXAPTQLSSLSVLFFDDSSNVILKVYPNMVV

SEQ ID NO: 74332 - protein, 22 aa, Artificial Sequence
  Cyclic GFR-binding peptide
LSSLSILFFVGRTPKVLKVYPM

SEQ ID NO: 74333 - protein, 27 aa, Artificial Sequence
  Cyclic GFR-binding peptide
TKLSSLSVLFFDDMGVPTLKVYPEGMS

SEQ ID NO: 74334 - protein, 23 aa, Artificial Sequence
  Cyclic GFR-binding peptide
TELSSLSMLFFDEYDKVVLKVYP

SEQ ID NO: 74335 - protein, 27 aa, Artificial Sequence
  Cyclic GFR-binding peptide
  MOD_RES (1), (1): Xaa is C or S
XVPTRLSSLSILFFDSANNVVLKVYPD

SEQ ID NO: 74336 - protein, 24 aa, Artificial Sequence
  Cyclic GFR-binding peptide
ARLSSLSILFFDAANNVVLKVYPD

SEQ ID NO: 74337 - protein, 27 aa, Artificial Sequence
  Cyclic GFR-binding peptide
PTELSSLSMLFFDENEKVVLKVYPDMV

SEQ ID NO: 74338 - protein, 28 aa, Artificial Sequence
  Cyclic GFR-binding peptide
  MOD_RES (28), (28): Xaa is C or S
DLSSLSILFFVGRTPKVLKVYPMVVKSX

SEQ ID NO: 74339 - protein, 33 aa, Artificial Sequence; identical to SEQ ID NO: 25627
  Cyclic GFR-binding peptide
  MOD_RES (1), (2), (33): Xaa is C or S

SEQ ID NO: 74340 - protein, 33 aa, Artificial Sequence
  Cyclic GFR-binding peptide
  MOD_RES (32), (32): Xaa is C or S
TEESSLSMLFFRIKPHQGQHLKVYPFLQHNKXE

SEQ ID NO: 74341 - protein, 42 aa, Artificial Sequence; identical to SEQ ID NO: 25628
  Cyclic GFR-binding peptide
  MOD_RES (6), (7), (39), (41): Xaa is C or S

SEQ ID NO: 74342 - protein, 40 aa, Artificial Sequence; identical to SEQ ID NO: 25629
  Cyclic GFR-binding peptide
  MOD_RES (7), (39): Xaa is C or S

SEQ ID NO: 74343 - protein, 34 aa, Artificial Sequence
  Cyclic GFR-binding peptide
  MOD_RES (2), (3): Xaa is C or S
AXXVPTKLSSLSVLFFDDMGVPTLKVYPEGMSVA

SEQ ID NO: 74344 - protein, 34 aa, Artificial Sequence
  Cyclic GFR-binding peptide
  MOD_RES (4), (5): Xaa is C or S
AAPXXVPQALSSLSILFFVGRKPKVLKVYPMIVR

SEQ ID NO: 74345 - protein, 36 aa, Artificial Sequence; identical to SEQ ID NO: 25631
  Cyclic GFR-binding peptide
  MOD_RES (1), (2), (34), (36): Xaa is C or S

SEQ ID NO: 74346 - protein, 38 aa, Artificial Sequence; identical to SEQ ID NO: 25632
  Cyclic GFR-binding peptide
  MOD_RES (5), (6), (38): Xaa is C or S

SEQ ID NO: 74347 - protein, 29 aa, Artificial Sequence
  Cyclic GFR-binding peptide
  MOD_RES (29), (29): Xaa is C or S
QLSSLSVLFFDDSSNVILKVYPNMVVRAX

SEQ ID NO: 74348 - protein, 26 aa, Artificial Sequence
  Cyclic GFR-binding peptide
PTKLSSLSVLFFDSSNNVILKVYPNM

SEQ ID NO: 74349 - protein, 28 aa, Artificial Sequence
  Cyclic GFR-binding peptide
  MOD_RES (2), (3): Xaa is C or S
PXXAPTQLSSLSVLFFDDSSNVILKVYP

SEQ ID NO: 74350 - protein, 26 aa, Artificial Sequence
  Cyclic GFR-binding peptide
LSSLSILFFDAANNVVLKVYPDMVVE

SEQ ID NO: 74351 - protein, 40 aa, Artificial Sequence; identical to SEQ ID NO: 25634
  Cyclic GFR-binding peptide
  MOD_RES (6), (7), (39): Xaa is C or S

SEQ ID NO: 74352 - protein, 38 aa, Artificial Sequence
  Cyclic GFR-binding peptide
  MOD_RES (5), (5): Xaa is C or S
SSVKXQPSRVHHSSLSVLFFEYVRKKPKLLKVYPRLEE

SEQ ID NO: 74353 - protein, 41 aa, Artificial Sequence; identical to SEQ ID NO: 25636
  Cyclic GFR-binding peptide
  MOD_RES (2), (39), (41): Xaa is C or S

SEQ ID NO: 74354 - protein, 23 aa, Artificial Sequence
  Cyclic GFR-binding peptide
KMSSLSMLFFNDKQQIILKVYPG

SEQ ID NO: 74355 - protein, 40 aa, Artificial Sequence; identical to SEQ ID NO: 25637
  Cyclic GFR-binding peptide
  MOD_RES (6), (7), (39): Xaa is C or S

SEQ ID NO: 74356 - protein, 33 aa, Artificial Sequence
  Cyclic GFR-binding peptide
  MOD_RES (4), (4): Xaa is C or S
KPTXAPTKLSSLSVLFFDDSSNVILKVYPNMVV

SEQ ID NO: 74357 - protein, 35 aa, Artificial Sequence
  Cyclic GFR-binding peptide
  MOD_RES (6), (7): Xaa is C or S
AAPASXXVPARLSSLSILFFDAANNVVLKVYPDMV

SEQ ID NO: 74358 - protein, 29 aa, Artificial Sequence
  Cyclic GFR-binding peptide
  MOD_RES (29), (29): Xaa is C or S
ELSSLSMLFFDEYDKVVLKVYPEMVVEGX

SEQ ID NO: 74359 - protein, 26 aa, Artificial Sequence
  Cyclic GFR-binding peptide
KLSSLSVLFFDSSNNVILKVYPNMVV

SEQ ID NO: 74360 - protein, 29 aa, Artificial Sequence
  Cyclic GFR-binding peptide
VPARLSSLSILFFDAANNVVLKVYPDMVV

SEQ ID NO: 74361 - protein, 33 aa, Artificial Sequence
  Cyclic GFR-binding peptide
  MOD_RES (30), (32): Xaa is C or S
TELSSLSMLFFDENEKVVLKVYPDMVVEGXGXR

SEQ ID NO: 74362 - protein, 31 aa, Artificial Sequence
  Cyclic GFR-binding peptide
  MOD_RES (28), (30): Xaa is C or S
LSSLSVLFFDDSSNVILKVYPNMVVRSXGXH

SEQ ID NO: 74363 - protein, 41 aa, Artificial Sequence; identical to SEQ ID NO: 25640
  Cyclic GFR-binding peptide
  MOD_RES (5), (5): Xaa is C or S

SEQ ID NO: 74364 - protein, 31 aa, Artificial Sequence
  Cyclic GFR-binding peptide
  MOD_RES (5), (5): Xaa is C or S
TKPTXAPTKLSSLSVLFFDDSSNVILKVYPN

SEQ ID NO: 74365 - protein, 44 aa, Artificial Sequence; identical to SEQ ID NO: 25643
  Cyclic GFR-binding peptide
  MOD_RES (4), (41), (43): Xaa is C or S

SEQ ID NO: 74366 - protein, 42 aa, Artificial Sequence; identical to SEQ ID NO: 25645
  Cyclic GFR-binding peptide
  MOD_RES (6), (7), (39), (41): Xaa is C or S

SEQ ID NO: 74367 - protein, 34 aa, Artificial Sequence
  Cyclic GFR-binding peptide
  MOD_RES (4), (5): Xaa is C or S
PPTXXVPTRLSSLSILFFDSANNVVLKVYPDMVV

SEQ ID NO: 74368 - protein, 26 aa, Artificial Sequence
  Cyclic GFR-binding peptide
KLSSLSVLFFDDMGVPTLKVYPEGMS

SEQ ID NO: 74369 - protein, 40 aa, Artificial Sequence; identical to SEQ ID NO: 25647
  Cyclic GFR-binding peptide
  MOD_RES (6), (7), (39): Xaa is C or S

SEQ ID NO: 74370 - protein, 28 aa, Artificial Sequence
  Cyclic GFR-binding peptide
  MOD_RES (1), (1): Xaa is C or S
XTPTKMSSLSMLFFNDKQQIILKVYPGM

SEQ ID NO: 74371 - protein, 40 aa, Artificial Sequence; identical to SEQ ID NO: 25648
  Cyclic GFR-binding peptide
  MOD_RES (5), (6), (37), (39): Xaa is C or S

SEQ ID NO: 74372 - protein, 37 aa, Artificial Sequence; identical to SEQ ID NO: 25649
  Cyclic GFR-binding peptide
  MOD_RES (1), (2), (34), (36): Xaa is C or S

SEQ ID NO: 74373 - protein, 34 aa, Artificial Sequence
  Cyclic GFR-binding peptide
  MOD_RES (3), (4): Xaa is C or S
KAXXVPTKLSSLSVLFFDDMGVPTLKVYPEGMSV

SEQ ID NO: 74374 - protein, 31 aa, Artificial Sequence
  Cyclic GFR-binding peptide
  MOD_RES (1), (2): Xaa is C or S
XXVSQDLSSLSILFFIGKTPKILKVYPMIVK

SEQ ID NO: 74375 - protein, 29 aa, Artificial Sequence
  Cyclic GFR-binding peptide
PARLSSLSILFFDAANNVVLKVYPDMVVE

SEQ ID NO: 74376 - protein, 27 aa, Artificial Sequence
  Cyclic GFR-binding peptide
  MOD_RES (2), (2): Xaa is C or S
TXAPTKLSSLSVLFFDDSSNVILKVYP

SEQ ID NO: 74377 - protein, 37 aa, Artificial Sequence; identical to SEQ ID NO: 25650
  Cyclic GFR-binding peptide
  MOD_RES (2), (2): Xaa is C or S

SEQ ID NO: 74378 - protein, 24 aa, Artificial Sequence
  Cyclic GFR-binding peptide
QDLSSLSILFFIGKTPKILKVYPM

SEQ ID NO: 74379 - protein, 34 aa, Artificial Sequence; identical to SEQ ID NO: 25655
  Cyclic GFR-binding peptide
  MOD_RES (2), (3): Xaa is C or S

SEQ ID NO: 74380 - protein, 30 aa, Artificial Sequence
  Cyclic GFR-binding peptide
  MOD_RES (29), (29): Xaa is C or S
QLSSLSVLFFDDSSNVILKVYPNMVVRAXG

SEQ ID NO: 74381 - protein, 27 aa, Artificial Sequence
  Cyclic GFR-binding peptide
RLSSLSILFFDSANNVVLKVYPDMVVE

SEQ ID NO: 74382 - protein, 33 aa, Artificial Sequence
  Cyclic GFR-binding peptide
  MOD_RES (5), (6): Xaa is C or S
TPPTXXVPTRLSSLSILFFDSANNVVLKVYPDM

SEQ ID NO: 74383 - protein, 37 aa, Artificial Sequence; identical to SEQ ID NO: 25657
  Cyclic GFR-binding peptide
  MOD_RES (2), (3), (35), (37): Xaa is C or S

SEQ ID NO: 74384 - protein, 35 aa, Artificial Sequence; identical to SEQ ID NO: 25658
  Cyclic GFR-binding peptide

SEQ ID NO: 74385 - protein, 42 aa, Artificial Sequence; identical to SEQ ID NO: 25659
  Cyclic GFR-binding peptide
  MOD_RES (6), (7), (39), (41): Xaa is C or S

SEQ ID NO: 74386 - protein, 27 aa, Artificial Sequence
  Cyclic GFR-binding peptide
APVKTSSLSMLFFDNGRVLLLKVYPMI

SEQ ID NO: 74387 - protein, 32 aa, Artificial Sequence
  Cyclic GFR-binding peptide
  MOD_RES (6), (7): Xaa is C or S
AVPKAXXAPTKLSSLSVLFFDSSNNVILKVYP

SEQ ID NO: 74388 - protein, 21 aa, Artificial Sequence
  Cyclic GFR-binding peptide
SSLSILFFIGKTPKILKVYPM

SEQ ID NO: 74389 - protein, 24 aa, Artificial Sequence
  Cyclic GFR-binding peptide
ESSLSMLFFRIKPHQGQHLKVYPF

SEQ ID NO: 74390 - protein, 37 aa, Artificial Sequence; identical to SEQ ID NO: 25664
  Cyclic GFR-binding peptide
  MOD_RES (5), (6): Xaa is C or S

SEQ ID NO: 74391 - protein, 34 aa, Artificial Sequence
  Cyclic GFR-binding peptide
  MOD_RES (32), (34): Xaa is C or S
HHSSLSVLFFEYVRKKPKLLKVYPRLEEHLEXAX

SEQ ID NO: 74392 - protein, 25 aa, Artificial Sequence
  Cyclic GFR-binding peptide
VPTKLSSLSILFFDKGVVTYLKVYP

SEQ ID NO: 74393 - protein, 32 aa, Artificial Sequence
  Cyclic GFR-binding peptide
  MOD_RES (6), (7): Xaa is C or S
ASASPXXVSQDLSSLSILFFIGKTPKILKVYP

SEQ ID NO: 74394 - protein, 29 aa, Artificial Sequence
  Cyclic GFR-binding peptide
  MOD_RES (29), (29): Xaa is C or S
ELSSLSMLFFDENEKVVLKVYPDMVVEGX

SEQ ID NO: 74395 - protein, 34 aa, Artificial Sequence
  Cyclic GFR-binding peptide
  MOD_RES (5), (6): Xaa is C or S
SASPXXVPQDLSSLSILFFVGRTPKVLKVYPMVV

SEQ ID NO: 74396 - protein, 24 aa, Artificial Sequence
  Cyclic GFR-binding peptide
KLSSLSILFFDKGVVTYLKVYPGM

SEQ ID NO: 74397 - protein, 32 aa, Artificial Sequence
  Cyclic GFR-binding peptide
  MOD_RES (2), (3): Xaa is C or S
AXXVPTKLSSLSVLFFDDMGVPTLKVYPEGMS

SEQ ID NO: 74398 - protein, 32 aa, Artificial Sequence
  Cyclic GFR-binding peptide
  MOD_RES (3), (3): Xaa is C or S
VKXQPSRVHHSSLSVLFFEYVRKKPKLLKVYP

SEQ ID NO: 74399 - protein, 23 aa, Artificial Sequence
  Cyclic GFR-binding peptide
SSLSMLFFNDKQQIILKVYPGMV

SEQ ID NO: 74400 - protein, 39 aa, Artificial Sequence; identical to SEQ ID NO: 25667
  Cyclic GFR-binding peptide
  MOD_RES (4), (5), (38): Xaa is C or S

SEQ ID NO: 74401 - protein, 26 aa, Artificial Sequence
  Cyclic GFR-binding peptide
VKTSSLSMLFFDNGRVLLLKVYPMIV

SEQ ID NO: 74402 - protein, 32 aa, Artificial Sequence
  Cyclic GFR-binding peptide
  MOD_RES (2), (3): Xaa is C or S
PXXVPQALSSLSILFFVGRKPKVLKVYPMIVR

SEQ ID NO: 74403 - protein, 26 aa, Artificial Sequence
  Cyclic GFR-binding peptide
SQDLSSLSILFFIGKTPKILKVYPMI

SEQ ID NO: 74404 - protein, 24 aa, Artificial Sequence
  Cyclic GFR-binding peptide
QALSSLSILFFVGRKPKVLKVYPM

SEQ ID NO: 74405 - protein, 37 aa, Artificial Sequence; identical to SEQ ID NO: 25670
  Cyclic GFR-binding peptide
  MOD_RES (1), (2), (35), (37): Xaa is C or S

SEQ ID NO: 74406 - protein, 28 aa, Artificial Sequence
  Cyclic GFR-binding peptide
  MOD_RES (2), (3): Xaa is C or S
SXXVPARLSSLSILFFDAANNVVLKVYP

SEQ ID NO: 74407 - protein, 32 aa, Artificial Sequence; identical to SEQ ID NO: 25673
  Cyclic GFR-binding peptide
  MOD_RES (1), (2): Xaa is C or S

SEQ ID NO: 74408 - protein, 33 aa, Artificial Sequence
  Cyclic GFR-binding peptide
  MOD_RES (30), (32): Xaa is C or S
TKLSSLSILFFDKGVVTYLKVYPGMAVSEXGXR

SEQ ID NO: 74409 - protein, 36 aa, Artificial Sequence; identical to SEQ ID NO: 25675
  Cyclic GFR-binding peptide
  MOD_RES (5), (6): Xaa is C or S

SEQ ID NO: 74410 - protein, 38 aa, Artificial Sequence; identical to SEQ ID NO: 25678
  Cyclic GFR-binding peptide
  MOD_RES (6), (7): Xaa is C or S

SEQ ID NO: 74411 - protein, 23 aa, Artificial Sequence
  Cyclic GFR-binding peptide
LSSLSILFFVGRTPKVLKVYPMV

SEQ ID NO: 74412 - protein, 27 aa, Artificial Sequence
  Cyclic GFR-binding peptide
EESSLSMLFFRIKPHQGQHLKVYPFLQ

SEQ ID NO: 74413 - protein, 26 aa, Artificial Sequence
  Cyclic GFR-binding peptide
  MOD_RES (26), (26): Xaa is C or S
SSLSILFFIGKTPKILKVYPMIVKSX

SEQ ID NO: 74414 - protein, 40 aa, Artificial Sequence; identical to SEQ ID NO: 25682
  Cyclic GFR-binding peptide
  MOD_RES (4), (5), (37), (39): Xaa is C or S

SEQ ID NO: 74415 - protein, 32 aa, Artificial Sequence
  Cyclic GFR-binding peptide
  MOD_RES (29), (31): Xaa is C or S
QLSSLSVLFFDDSSNVILKVYPNMVVRAXGXH

SEQ ID NO: 74416 - protein, 35 aa, Artificial Sequence; identical to SEQ ID NO: 25684
  Cyclic GFR-binding peptide
  MOD_RES (2), (3), (35): Xaa is C or S

SEQ ID NO: 74417 - protein, 25 aa, Artificial Sequence
  Cyclic GFR-binding peptide
EESSLSMLFFRIKPHQGQHLKVYPF

SEQ ID NO: 74418 - protein, 38 aa, Artificial Sequence; identical to SEQ ID NO: 25686
  Cyclic GFR-binding peptide
  MOD_RES (6), (6): Xaa is C or S

SEQ ID NO: 74419 - protein, 40 aa, Artificial Sequence; identical to SEQ ID NO: 25688
  Cyclic GFR-binding peptide
  MOD_RES (5), (6), (38), (40): Xaa is C or S

SEQ ID NO: 74420 - protein, 36 aa, Artificial Sequence; identical to SEQ ID NO: 25689
  Cyclic GFR-binding peptide
  MOD_RES (5), (6): Xaa is C or S

SEQ ID NO: 74421 - protein, 36 aa, Artificial Sequence
  Cyclic GFR-binding peptide
  MOD_RES (6), (7): Xaa is C or S
AAPASXXVPARLSSLSILFFDAANNVVLKVYPDMVV

SEQ ID NO: 74422 - protein, 25 aa, Artificial Sequence
  Cyclic GFR-binding peptide
VPQALSSLSILFFVGRKPKVLKVYP

SEQ ID NO: 74423 - protein, 32 aa, Artificial Sequence
  Cyclic GFR-binding peptide
  MOD_RES (2), (3): Xaa is C or S
TXXVPTRLSSLSILFFDSANNVVLKVYPDMVV

SEQ ID NO: 74424 - protein, 32 aa, Artificial Sequence
  Cyclic GFR-binding peptide
  MOD_RES (30), (32): Xaa is C or S
PQALSSLSILFFVGRKPKVLKVYPMIVRSXKX

SEQ ID NO: 74425 - protein, 31 aa, Artificial Sequence; identical to SEQ ID NO: 25690
  Cyclic GFR-binding peptide
  MOD_RES (1), (1): Xaa is C or S

SEQ ID NO: 74426 - protein, 37 aa, Artificial Sequence; identical to SEQ ID NO: 25691
  Cyclic GFR-binding peptide
  MOD_RES (3), (4), (36): Xaa is C or S

SEQ ID NO: 74427 - protein, 29 aa, Artificial Sequence
  Cyclic GFR-binding peptide
  MOD_RES (28), (28): Xaa is C or S
DLSSLSILFFIGKTPKILKVYPMIVKSXK

SEQ ID NO: 74428 - protein, 29 aa, Artificial Sequence
  Cyclic GFR-binding peptide
  MOD_RES (1), (2): Xaa is C or S
XXVPTKLSSLSVLFFDDMGVPTLKVYPEG

SEQ ID NO: 74429 - protein, 30 aa, Artificial Sequence
  Cyclic GFR-binding peptide
  MOD_RES (30), (30): Xaa is C or S
SSLSVLFFEYVRKKPKLLKVYPRLEEHLEX

SEQ ID NO: 74430 - protein, 35 aa, Artificial Sequence; identical to SEQ ID NO: 25693
  Cyclic GFR-binding peptide
  MOD_RES (3), (4): Xaa is C or S

SEQ ID NO: 74431 - protein, 39 aa, Artificial Sequence; identical to SEQ ID NO: 25692
  Cyclic GFR-binding peptide
  MOD_RES (4), (5), (37), (39): Xaa is C or S

SEQ ID NO: 74432 - protein, 32 aa, Artificial Sequence
  Cyclic GFR-binding peptide
  MOD_RES (4), (5): Xaa is C or S
PKAXXVPTELSSLSMLFFDEYDKVVLKVYPEM

SEQ ID NO: 74433 - protein, 35 aa, Artificial Sequence
  Cyclic GFR-binding peptide
  MOD_RES (5), (6): Xaa is C or S
VPSTXXAPVKTSSLSMLFFDNGRVLLLKVYPMIVE

SEQ ID NO: 74434 - protein, 20 aa, Artificial Sequence
  Cyclic GFR-binding peptide
SSLSILFFDAANNVVLKVYP

SEQ ID NO: 74435 - protein, 42 aa, Artificial Sequence; identical to SEQ ID NO: 25694
  Cyclic GFR-binding peptide
  MOD_RES (6), (7), (40), (42): Xaa is C or S

SEQ ID NO: 74436 - protein, 31 aa, Artificial Sequence
  Cyclic GFR-binding peptide
  MOD_RES (4), (5): Xaa is C or S
SKAXXVPTKLSSLSILFFDKGVVTYLKVYPG

SEQ ID NO: 74437 - protein, 28 aa, Artificial Sequence
  Cyclic GFR-binding peptide
  MOD_RES (1), (1): Xaa is C or S
XAPTKLSSLSVLFFDSSNNVILKVYPNM

SEQ ID NO: 74438 - protein, 31 aa, Artificial Sequence
  Cyclic GFR-binding peptide
  MOD_RES (5), (6): Xaa is C or S
VPKAXXAPTKLSSLSVLFFDSSNNVILKVYP

SEQ ID NO: 74439 - protein, 33 aa, Artificial Sequence
  Cyclic GFR-binding peptide
  MOD_RES (6), (7): Xaa is C or S
HVPKPXXAPTKLSSLSVLFFDDSSNVILKVYPN

SEQ ID NO: 74440 - protein, 35 aa, Artificial Sequence; identical to SEQ ID NO: 25696
  Cyclic GFR-binding peptide
  MOD_RES (1), (2), (34): Xaa is C or S

SEQ ID NO: 74441 - protein, 32 aa, Artificial Sequence
  Cyclic GFR-binding peptide
RVHHSSLSVLFFEYVRKKPKLLKVYPRLEEHL

SEQ ID NO: 74442 - protein, 38 aa, Artificial Sequence; identical to SEQ ID NO: 25698
  Cyclic GFR-binding peptide
  MOD_RES (6), (7): Xaa is C or S

SEQ ID NO: 74443 - protein, 33 aa, Artificial Sequence; identical to SEQ ID NO: 25700
  Cyclic GFR-binding peptide
  MOD_RES (2), (3): Xaa is C or S

SEQ ID NO: 74444 - protein, 36 aa, Artificial Sequence; identical to SEQ ID NO: 25702
  Cyclic GFR-binding peptide
  MOD_RES (1), (33), (35): Xaa is C or S

SEQ ID NO: 74445 - protein, 30 aa, Artificial Sequence
  Cyclic GFR-binding peptide
  MOD_RES (29), (29): Xaa is C or S
ELSSLSMLFFDEYDKVVLKVYPEMVVEGXG

SEQ ID NO: 74446 - protein, 39 aa, Artificial Sequence; identical to SEQ ID NO: 25704
  Cyclic GFR-binding peptide
  MOD_RES (6), (7), (39): Xaa is C or S

SEQ ID NO: 74447 - protein, 37 aa, Artificial Sequence; identical to SEQ ID NO: 25705
  Cyclic GFR-binding peptide
  MOD_RES (3), (4), (36): Xaa is C or S

SEQ ID NO: 74448 - protein, 29 aa, Artificial Sequence
  Cyclic GFR-binding peptide
  MOD_RES (28), (28): Xaa is C or S
LSSLSVLFFDSSNNVILKVYPNMVVKAXG

SEQ ID NO: 74449 - protein, 29 aa, Artificial Sequence
  Cyclic GFR-binding peptide
PTKLSSLSILFFDKGVVTYLKVYPGMAVS

SEQ ID NO: 74450 - protein, 20 aa, Artificial Sequence
  Cyclic GFR-binding peptide
SSLSILFFVGRTPKVLKVYP

SEQ ID NO: 74451 - protein, 30 aa, Artificial Sequence; identical to SEQ ID NO: 768
  Cyclic GFR-binding peptide

SEQ ID NO: 74452 - protein, 31 aa, Artificial Sequence
  Cyclic GFR-binding peptide
  MOD_RES (31), (31): Xaa is C or S
PTKLSSLSVLFFDDSSNVILKVYPNMVVRSX

SEQ ID NO: 74453 - protein, 21 aa, Artificial Sequence
  Cyclic GFR-binding peptide
SSLSMLFFDEYDKVVLKVYPE

SEQ ID NO: 74454 - protein, 36 aa, Artificial Sequence; identical to SEQ ID NO: 25707
  Cyclic GFR-binding peptide
  MOD_RES (1), (33), (35): Xaa is C or S

SEQ ID NO: 74455 - protein, 34 aa, Artificial Sequence
  Cyclic GFR-binding peptide
  MOD_RES (33), (33): Xaa is C or S
PTEESSLSMLFFRIKPHQGQHLKVYPFLQHNKXE

SEQ ID NO: 74456 - protein, 29 aa, Artificial Sequence
  Cyclic GFR-binding peptide
  MOD_RES (3), (4): Xaa is C or S
KAXXVPTELSSLSMLFFDEYDKVVLKVYP

SEQ ID NO: 74457 - protein, 34 aa, Artificial Sequence
  Cyclic GFR-binding peptide
  MOD_RES (6), (7): Xaa is C or S
YVPKPXXAPTKLSSLSVLFFDDSSNVILKVYPNM

SEQ ID NO: 74458 - protein, 35 aa, Artificial Sequence
  Cyclic GFR-binding peptide
  MOD_RES (5), (5): Xaa is C or S
SSVKXQPSRVHHSSLSVLFFEYVRKKPKLLKVYPR

SEQ ID NO: 74459 - protein, 31 aa, Artificial Sequence
  Cyclic GFR-binding peptide
  MOD_RES (2), (3): Xaa is C or S
AXXAPTKLSSLSVLFFDSSNNVILKVYPNMV

SEQ ID NO: 74460 - protein, 32 aa, Artificial Sequence
  Cyclic GFR-binding peptide
  MOD_RES (5), (6): Xaa is C or S
VGKAXXVPTKLSSLSVLFFDDMGVPTLKVYPE

SEQ ID NO: 74461 - protein, 27 aa, Artificial Sequence
  Cyclic GFR-binding peptide
SSLSMLFFRIKPHQGQHLKVYPFLQHN

SEQ ID NO: 74462 - protein, 33 aa, Artificial Sequence
  Cyclic GFR-binding peptide
  MOD_RES (30), (32): Xaa is C or S
PVKTSSLSMLFFDNGRVLLLKVYPMIVEEXGXL

SEQ ID NO: 74463 - protein, 31 aa, Artificial Sequence
  Cyclic GFR-binding peptide
  MOD_RES (30), (30): Xaa is C or S
ESSLSMLFFRIKPHQGQHLKVYPFLQHNKXE

SEQ ID NO: 74464 - protein, 35 aa, Artificial Sequence
  Cyclic GFR-binding peptide
  MOD_RES (6), (7): Xaa is C or S
SIPKAXXVPTELSSLSMLFFDEYDKVVLKVYPEMV

SEQ ID NO: 74465 - protein, 26 aa, Artificial Sequence
  Cyclic GFR-binding peptide
TKMSSLSMLFFNDKQQIILKVYPGMV

SEQ ID NO: 74466 - protein, 28 aa, Artificial Sequence
  Cyclic GFR-binding peptide
KLSSLSVLFFDDMGVPTLKVYPEGMSVA

SEQ ID NO: 74467 - protein, 30 aa, Artificial Sequence
  Cyclic GFR-binding peptide
  MOD_RES (1), (2): Xaa is C or S
XXVPTKLSSLSILFFDKGVVTYLKVYPGMA

SEQ ID NO: 74468 - protein, 41 aa, Artificial Sequence; identical to SEQ ID NO: 25711
  Cyclic GFR-binding peptide
  MOD_RES (4), (38), (40): Xaa is C or S

SEQ ID NO: 74469 - protein, 32 aa, Artificial Sequence
  Cyclic GFR-binding peptide
  MOD_RES (29), (31): Xaa is C or S
VKTSSLSMLFFDNGRVLLLKVYPMIVEEXGXL

SEQ ID NO: 74470 - protein, 25 aa, Artificial Sequence
  Cyclic GFR-binding peptide
LSSLSMLFFDENEKVVLKVYPDMVV

SEQ ID NO: 74471 - protein, 27 aa, Artificial Sequence
  Cyclic GFR-binding peptide
TPTKMSSLSMLFFNDKQQIILKVYPGM

SEQ ID NO: 74472 - protein, 38 aa, Artificial Sequence; identical to SEQ ID NO: 25712
  Cyclic GFR-binding peptide
  MOD_RES (3), (4), (36), (38): Xaa is C or S

SEQ ID NO: 74473 - protein, 37 aa, Artificial Sequence; identical to SEQ ID NO: 25713
  Cyclic GFR-binding peptide
  MOD_RES (5), (6): Xaa is C or S

SEQ ID NO: 74474 - protein, 22 aa, Artificial Sequence
  Cyclic GFR-binding peptide
KLSSLSILFFDKGVVTYLKVYP

SEQ ID NO: 74475 - protein, 31 aa, Artificial Sequence
  Cyclic GFR-binding peptide
  MOD_RES (30), (30): Xaa is C or S
TKLSSLSVLFFDSSNNVILKVYPNMVVKAXG

SEQ ID NO: 74476 - protein, 29 aa, Artificial Sequence
  Cyclic GFR-binding peptide
VPTEESSLSMLFFRIKPHQGQHLKVYPFL

SEQ ID NO: 74477 - protein, 41 aa, Artificial Sequence; identical to SEQ ID NO: 25714
  Cyclic GFR-binding peptide
  MOD_RES (6), (7), (39), (41): Xaa is C or S

SEQ ID NO: 74478 - protein, 37 aa, Artificial Sequence
  Cyclic GFR-binding peptide
  MOD_RES (5), (6): Xaa is C or S
IPKAXXVPTELSSLSMLFFDENEKVVLKVYPDMVVEG

SEQ ID NO: 74479 - protein, 26 aa, Artificial Sequence
  Cyclic GFR-binding peptide
EESSLSMLFFRIKPHQGQHLKVYPFL

SEQ ID NO: 74480 - protein, 33 aa, Artificial Sequence
  Cyclic GFR-binding peptide
  MOD_RES (5), (6): Xaa is C or S
SASPXXVPQDLSSLSILFFVGRTPKVLKVYPMV

SEQ ID NO: 74481 - protein, 44 aa, Artificial Sequence; identical to SEQ ID NO: 25716
  Cyclic GFR-binding peptide
  MOD_RES (7), (41), (43): Xaa is C or S

SEQ ID NO: 74482 - protein, 32 aa, Artificial Sequence
  Cyclic GFR-binding peptide
  MOD_RES (6), (7): Xaa is C or S
RVPSTXXAPVKTSSLSMLFFDNGRVLLLKVYP

SEQ ID NO: 74483 - protein, 23 aa, Artificial Sequence
  Cyclic GFR-binding peptide
TKLSSLSVLFFDDMGVPTLKVYP

SEQ ID NO: 74484 - protein, 33 aa, Artificial Sequence
  Cyclic GFR-binding peptide
  MOD_RES (6), (7): Xaa is C or S
KVGKAXXVPTKLSSLSVLFFDDMGVPTLKVYPE

SEQ ID NO: 74485 - protein, 29 aa, Artificial Sequence
  Cyclic GFR-binding peptide
  MOD_RES (1), (1): Xaa is C or S
XVPARLSSLSILFFDAANNVVLKVYPDMV

SEQ ID NO: 74486 - protein, 27 aa, Artificial Sequence
  Cyclic GFR-binding peptide
  MOD_RES (1), (2): Xaa is C or S
XXVPTRLSSLSILFFDSANNVVLKVYP

SEQ ID NO: 74487 - protein, 28 aa, Artificial Sequence
  Cyclic GFR-binding peptide
VPARLSSLSILFFDAANNVVLKVYPDMV

SEQ ID NO: 74488 - protein, 23 aa, Artificial Sequence
  Cyclic GFR-binding peptide
MSSLSMLFFNDKQQIILKVYPGM

SEQ ID NO: 74489 - protein, 27 aa, Artificial Sequence
  Cyclic GFR-binding peptide
PARLSSLSILFFDAANNVVLKVYPDMV

SEQ ID NO: 74490 - protein, 28 aa, Artificial Sequence
  Cyclic GFR-binding peptide
  MOD_RES (28), (28): Xaa is C or S
LSSLSVLFFDDSSNVILKVYPNMVVRSX

SEQ ID NO: 74491 - protein, 30 aa, Artificial Sequence
  Cyclic GFR-binding peptide
  MOD_RES (28), (30): Xaa is C or S
LSSLSILFFDKGVVTYLKVYPGMAVSEXGX

SEQ ID NO: 74492 - protein, 29 aa, Artificial Sequence
  Cyclic GFR-binding peptide
SSLSILFFDAANNVVLKVYPAAAAAAAAA

SEQ ID NO: 74493 - protein, 31 aa, Artificial Sequence
  Cyclic GFR-binding peptide
  MOD_RES (28), (30): Xaa is C or S
LSSLSMLFFDENEKVVLKVYPDMVVEGXGXR

SEQ ID NO: 74494 - protein, 28 aa, Artificial Sequence
  Cyclic GFR-binding peptide
  MOD_RES (1), (2): Xaa is C or S
XXVPTELSSLSMLFFDENEKVVLKVYPD

SEQ ID NO: 74495 - protein, 28 aa, Artificial Sequence
  Cyclic GFR-binding peptide
  MOD_RES (28), (28): Xaa is C or S
LSSLSMLFFDENEKVVLKVYPDMVVEGX

SEQ ID NO: 74496 - protein, 35 aa, Artificial Sequence; identical to SEQ ID NO: 25721
  Cyclic GFR-binding peptide
  MOD_RES (1), (2), (34): Xaa is C or S

SEQ ID NO: 74497 - protein, 29 aa, Artificial Sequence
  Cyclic GFR-binding peptide
TKLSSLSILFFDKGVVTYLKVYPGMAVSE

SEQ ID NO: 74498 - protein, 26 aa, Artificial Sequence
  Cyclic GFR-binding peptide
VSQDLSSLSILFFIGKTPKILKVYPM

SEQ ID NO: 74499 - protein, 36 aa, Artificial Sequence
  Cyclic GFR-binding peptide
  MOD_RES (6), (7): Xaa is C or S
STPPTXXVPTRLSSLSILFFDSANNVVLKVYPDMVV

SEQ ID NO: 74500 - protein, 37 aa, Artificial Sequence; identical to SEQ ID NO: 25722
  Cyclic GFR-binding peptide
  MOD_RES (4), (5), (36): Xaa is C or S

SEQ ID NO: 74501 - protein, 34 aa, Artificial Sequence
  Cyclic GFR-binding peptide
  MOD_RES (31), (33): Xaa is C or S
PTKLSSLSILFFDKGVVTYLKVYPGMAVSEXGXR

SEQ ID NO: 74502 - protein, 28 aa, Artificial Sequence
  Cyclic GFR-binding peptide
  MOD_RES (27), (27): Xaa is C or S
SSLSILFFDAANNVVLKVYPDMVVEAXG

SEQ ID NO: 74503 - protein, 36 aa, Artificial Sequence
  Cyclic GFR-binding peptide
  MOD_RES (6), (7): Xaa is C or S
HVPKPXXAPTKLSSLSVLFFDDSSNVILKVYPNMVV

SEQ ID NO: 74504 - protein, 27 aa, Artificial Sequence
  Cyclic GFR-binding peptide
  MOD_RES (1), (1): Xaa is C or S
XVPTELSSLSMLFFDEYDKVVLKVYPE

SEQ ID NO: 74505 - protein, 36 aa, Artificial Sequence
  Cyclic GFR-binding peptide
  MOD_RES (6), (7): Xaa is C or S
AVPKAXXAPTKLSSLSVLFFDSSNNVILKVYPNMVV

SEQ ID NO: 74506 - protein, 25 aa, Artificial Sequence
  Cyclic GFR-binding peptide
SSLSVLFFEYVRKKPKLLKVYPRLE

SEQ ID NO: 74507 - protein, 38 aa, Artificial Sequence
  Cyclic GFR-binding peptide
  MOD_RES (2), (3), (35), (37): Xaa is C or S
AXXVPTELSSLSMLFFDENEKVVLKVYPDMVVEGXGXR

SEQ ID NO: 74508 - protein, 24 aa, Artificial Sequence
  Cyclic GFR-binding peptide
PVKTSSLSMLFFDNGRVLLLKVYP

SEQ ID NO: 74509 - protein, 30 aa, Artificial Sequence
  Cyclic GFR-binding peptide
  MOD_RES (29), (29): Xaa is C or S
QALSSLSILFFVGRKPKVLKVYPMIVRSXK

SEQ ID NO: 74510 - protein, 33 aa, Artificial Sequence
  Cyclic GFR-binding peptide
  MOD_RES (3), (4): Xaa is C or S
SPXXVPQDLSSLSILFFVGRTPKVLKVYPMVVK

SEQ ID NO: 74511 - protein, 23 aa, Artificial Sequence
  Cyclic GFR-binding peptide
LSSLSILFFIGKTPKILKVYPMI

SEQ ID NO: 74512 - protein, 33 aa, Artificial Sequence
  Cyclic GFR-binding peptide
  MOD_RES (3), (4): Xaa is C or S
PTXXVPTRLSSLSILFFDSANNVVLKVYPDMVV

SEQ ID NO: 74513 - protein, 24 aa, Artificial Sequence
  Cyclic GFR-binding peptide
ELSSLSMLFFDENEKVVLKVYPDM

SEQ ID NO: 74514 - protein, 35 aa, Artificial Sequence
  Cyclic GFR-binding peptide
  MOD_RES (5), (6): Xaa is C or S
IPKAXXVPTELSSLSMLFFDEYDKVVLKVYPEMVV

SEQ ID NO: 74515 - protein, 29 aa, Artificial Sequence
  Cyclic GFR-binding peptide
PTRLSSLSILFFDSANNVVLKVYPDMVVE

SEQ ID NO: 74516 - protein, 28 aa, Artificial Sequence
  Cyclic GFR-binding peptide
VPTELSSLSMLFFDENEKVVLKVYPDMV

SEQ ID NO: 74517 - protein, 25 aa, Artificial Sequence
  Cyclic GFR-binding peptide
KLSSLSILFFDKGVVTYLKVYPGMA

SEQ ID NO: 74518 - protein, 33 aa, Artificial Sequence; identical to SEQ ID NO: 25724
  Cyclic GFR-binding peptide
  MOD_RES (1), (1): Xaa is C or S

SEQ ID NO: 74519 - protein, 39 aa, Artificial Sequence; identical to SEQ ID NO: 25726
  Cyclic GFR-binding peptide
  MOD_RES (1), (38): Xaa is C or S

SEQ ID NO: 74520 - protein, 35 aa, Artificial Sequence; identical to SEQ ID NO: 25727
  Cyclic GFR-binding peptide
  MOD_RES (3), (4): Xaa is C or S

SEQ ID NO: 74521 - protein, 26 aa, Artificial Sequence
  Cyclic GFR-binding peptide
LSSLSVLFFDDMGVPTLKVYPEGMSV

SEQ ID NO: 74522 - protein, 35 aa, Artificial Sequence; identical to SEQ ID NO: 25729
  Cyclic GFR-binding peptide
  MOD_RES (2), (3), (35): Xaa is C or S

SEQ ID NO: 74523 - protein, 28 aa, Artificial Sequence
  Cyclic GFR-binding peptide
QDLSSLSILFFIGKTPKILKVYPMIVKS

SEQ ID NO: 74524 - protein, 25 aa, Artificial Sequence
  Cyclic GFR-binding peptide
DLSSLSILFFVGRTPKVLKVYPMVV

SEQ ID NO: 74525 - protein, 32 aa, Artificial Sequence; identical to SEQ ID NO: 25731
  Cyclic GFR-binding peptide
  MOD_RES (1), (32): Xaa is C or S

SEQ ID NO: 74526 - protein, 32 aa, Artificial Sequence
  Cyclic GFR-binding peptide
  MOD_RES (30), (32): Xaa is C or S
TKMSSLSMLFFNDKQQIILKVYPGMVVDRXGX

SEQ ID NO: 74527 - protein, 32 aa, Artificial Sequence
  Cyclic GFR-binding peptide
  MOD_RES (5), (6): Xaa is C or S
ASKAXXVPTKLSSLSILFFDKGVVTYLKVYPG

SEQ ID NO: 74528 - protein, 37 aa, Artificial Sequence; identical to SEQ ID NO: 25732
  Cyclic GFR-binding peptide
  MOD_RES (34), (36): Xaa is C or S

SEQ ID NO: 74529 - protein, 31 aa, Artificial Sequence
  Cyclic GFR-binding peptide
  MOD_RES (28), (30): Xaa is C or S
LSSLSILFFDSANNVVLKVYPDMVVESXGXR

SEQ ID NO: 74530 - protein, 31 aa, Artificial Sequence; identical to SEQ ID NO: 25733
  Cyclic GFR-binding peptide
  MOD_RES (31), (31): Xaa is C or S

SEQ ID NO: 74531 - protein, 27 aa, Artificial Sequence
  Cyclic GFR-binding peptide
DLSSLSILFFVGRTPKVLKVYPMVVKS

SEQ ID NO: 74532 - protein, 30 aa, Artificial Sequence
  Cyclic GFR-binding peptide
  MOD_RES (29), (29): Xaa is C or S
LSSLSVLFFDDMGVPTLKVYPEGMSVAEXG

SEQ ID NO: 74533 - protein, 33 aa, Artificial Sequence
  Cyclic GFR-binding peptide
  MOD_RES (30), (32): Xaa is C or S
TRLSSLSILFFDSANNVVLKVYPDMVVESXGXR

SEQ ID NO: 74534 - protein, 33 aa, Artificial Sequence; identical to SEQ ID NO: 25735
  Cyclic GFR-binding peptide
  MOD_RES (1), (2), (33): Xaa is C or S

SEQ ID NO: 74535 - protein, 29 aa, Artificial Sequence
  Cyclic GFR-binding peptide
PTEESSLSMLFFRIKPHQGQHLKVYPFLQ

SEQ ID NO: 74536 - protein, 37 aa, Artificial Sequence; identical to SEQ ID NO: 25736
  Cyclic GFR-binding peptide
  MOD_RES (2), (3), (34), (36): Xaa is C or S

SEQ ID NO: 74537 - protein, 35 aa, Artificial Sequence; identical to SEQ ID NO: 25738
  Cyclic GFR-binding peptide
  MOD_RES (3), (4): Xaa is C or S

SEQ ID NO: 74538 - protein, 24 aa, Artificial Sequence
  Cyclic GFR-binding peptide
SSLSMLFFDNGRVLLLKVYPMIVE

SEQ ID NO: 74539 - protein, 38 aa, Artificial Sequence; identical to SEQ ID NO: 25739
  Cyclic GFR-binding peptide
  MOD_RES (6), (7): Xaa is C or S

SEQ ID NO: 74540 - protein, 33 aa, Artificial Sequence
  Cyclic GFR-binding peptide
  MOD_RES (31), (33): Xaa is C or S
PTKMSSLSMLFFNDKQQIILKVYPGMVVDRXGX

SEQ ID NO: 74541 - protein, 36 aa, Artificial Sequence
  Cyclic GFR-binding peptide
  MOD_RES (34), (36): Xaa is C or S
RVHHSSLSVLFFEYVRKKPKLLKVYPRLEEHLEXAX

SEQ ID NO: 74542 - protein, 23 aa, Artificial Sequence
  Cyclic GFR-binding peptide
SSLSVLFFDDMGVPTLKVYPEGM

SEQ ID NO: 74543 - protein, 33 aa, Artificial Sequence
  Cyclic GFR-binding peptide
  MOD_RES (5), (6): Xaa is C or S
SASPXXVSQDLSSLSILFFIGKTPKILKVYPMI

SEQ ID NO: 74544 - protein, 42 aa, Artificial Sequence; identical to SEQ ID NO: 25741
  Cyclic GFR-binding peptide
  MOD_RES (6), (7), (39), (41): Xaa is C or S

SEQ ID NO: 74545 - protein, 31 aa, Artificial Sequence
  Cyclic GFR-binding peptide
  MOD_RES (1), (1): Xaa is C or S
XVPTKLSSLSVLFFDDMGVPTLKVYPEGMSV

SEQ ID NO: 74546 - protein, 28 aa, Artificial Sequence
  Cyclic GFR-binding peptide
  MOD_RES (3), (3): Xaa is C or S
PTXAPTKLSSLSVLFFDDSSNVILKVYP

SEQ ID NO: 74547 - protein, 35 aa, Artificial Sequence; identical to SEQ ID NO: 25742
  Cyclic GFR-binding peptide
  MOD_RES (3), (3): Xaa is C or S

SEQ ID NO: 74548 - protein, 34 aa, Artificial Sequence
  Cyclic GFR-binding peptide
  MOD_RES (5), (6): Xaa is C or S
APASXXVPARLSSLSILFFDAANNVVLKVYPDMV

SEQ ID NO: 74549 - protein, 40 aa, Artificial Sequence; identical to SEQ ID NO: 25743
  Cyclic GFR-binding peptide
  MOD_RES (4), (5), (37), (39): Xaa is C or S

SEQ ID NO: 74550 - protein, 34 aa, Artificial Sequence
  Cyclic GFR-binding peptide
  MOD_RES (5), (6): Xaa is C or S
SAAPXXVPQALSSLSILFFVGRKPKVLKVYPMIV

SEQ ID NO: 74551 - protein, 27 aa, Artificial Sequence
  Cyclic GFR-binding peptide
  MOD_RES (1), (2): Xaa is C or S
XXAPTKLSSLSVLFFDDSSNVILKVYP

SEQ ID NO: 74552 - protein, 22 aa, Artificial Sequence
  Cyclic GFR-binding peptide
KLSSLSVLFFDDSSNVILKVYP

SEQ ID NO: 74553 - protein, 34 aa, Artificial Sequence
  Cyclic GFR-binding peptide
  MOD_RES (6), (7): Xaa is C or S
KVGKAXXVPTKLSSLSVLFFDDMGVPTLKVYPEG

SEQ ID NO: 74554 - protein, 32 aa, Artificial Sequence
  Cyclic GFR-binding peptide
  MOD_RES (1), (2): Xaa is C or S
XXVPTKLSSLSVLFFDDMGVPTLKVYPEGMSV

SEQ ID NO: 74555 - protein, 28 aa, Artificial Sequence
  Cyclic GFR-binding peptide
  MOD_RES (28), (28): Xaa is C or S
LSSLSMLFFDEYDKVVLKVYPEMVVEGX

SEQ ID NO: 74556 - protein, 23 aa, Artificial Sequence
  Cyclic GFR-binding peptide
DLSSLSILFFIGKTPKILKVYPM

SEQ ID NO: 74557 - protein, 24 aa, Artificial Sequence
  Cyclic GFR-binding peptide
KMSSLSMLFFNDKQQIILKVYPGM

SEQ ID NO: 74558 - protein, 33 aa, Artificial Sequence
  Cyclic GFR-binding peptide
  MOD_RES (6), (7): Xaa is C or S
ASASPXXVPQDLSSLSILFFVGRTPKVLKVYPM

SEQ ID NO: 74559 - protein, 31 aa, Artificial Sequence
  Cyclic GFR-binding peptide
  MOD_RES (29), (31): Xaa is C or S
QLSSLSVLFFDDSSNVILKVYPNMVVRAXGX

SEQ ID NO: 74560 - protein, 30 aa, Artificial Sequence
  Cyclic GFR-binding peptide
  MOD_RES (3), (3): Xaa is C or S
PTXAPTKLSSLSVLFFDDSSNVILKVYPNM

SEQ ID NO: 74561 - protein, 25 aa, Artificial Sequence
  Cyclic GFR-binding peptide
TPTKMSSLSMLFFNDKQQIILKVYP

SEQ ID NO: 74562 - protein, 34 aa, Artificial Sequence; identical to SEQ ID NO: 25747
  Cyclic GFR-binding peptide
  MOD_RES (2), (3), (34): Xaa is C or S

SEQ ID NO: 74563 - protein, 32 aa, Artificial Sequence
  Cyclic GFR-binding peptide
VHHSSLSVLFFEYVRKKPKLLKVYPRLEEHLE

SEQ ID NO: 74564 - protein, 30 aa, Artificial Sequence
  Cyclic GFR-binding peptide
PSRVHHSSLSVLFFEYVRKKPKLLKVYPRL

SEQ ID NO: 74565 - protein, 35 aa, Artificial Sequence; identical to SEQ ID NO: 25749
  Cyclic GFR-binding peptide
  MOD_RES (3), (4): Xaa is C or S

SEQ ID NO: 74566 - protein, 33 aa, Artificial Sequence
  Cyclic GFR-binding peptide
  MOD_RES (3), (4): Xaa is C or S
KAXXVPTKLSSLSVLFFDDMGVPTLKVYPEGMS

SEQ ID NO: 74567 - protein, 32 aa, Artificial Sequence
  Cyclic GFR-binding peptide
  MOD_RES (6), (7): Xaa is C or S
HVPKPXXAPTKLSSLSVLFFDDSSNVILKVYP

SEQ ID NO: 74568 - protein, 31 aa, Artificial Sequence
  Cyclic GFR-binding peptide
  MOD_RES (1), (2): Xaa is C or S
XXVPTKLSSLSVLFFDDMGVPTLKVYPEGMS

SEQ ID NO: 74569 - protein, 27 aa, Artificial Sequence
  Cyclic GFR-binding peptide
  MOD_RES (1), (1): Xaa is C or S
XTPTKMSSLSMLFFNDKQQIILKVYPG

SEQ ID NO: 74570 - protein, 29 aa, Artificial Sequence
  Cyclic GFR-binding peptide
  MOD_RES (1), (2): Xaa is C or S
XXAPTKLSSLSVLFFDSSNNVILKVYPNM

SEQ ID NO: 74571 - protein, 40 aa, Artificial Sequence; identical to SEQ ID NO: 25752
  Cyclic GFR-binding peptide
  MOD_RES (4), (38), (40): Xaa is C or S

SEQ ID NO: 74572 - protein, 41 aa, Artificial Sequence; identical to SEQ ID NO: 25753
  Cyclic GFR-binding peptide
  MOD_RES (2), (39): Xaa is C or S

SEQ ID NO: 74573 - protein, 32 aa, Artificial Sequence
  Cyclic GFR-binding peptide
ELHEELRNSLQELKPKKRVYEYYVVPLPEHHV

SEQ ID NO: 74574 - protein, 34 aa, Artificial Sequence
  Cyclic GFR-binding peptide
  MOD_RES (1), (3): Xaa is C or S
XAXELHEELRNSLQELKPKKRVYEYYLVTLPEHH

SEQ ID NO: 74575 - protein, 27 aa, Artificial Sequence
  Cyclic GFR-binding peptide
  MOD_RES (26), (27): Xaa is C or S
VTAKKVKPKRGVIKRIQVPRLAQPVXX

SEQ ID NO: 74576 - protein, 23 aa, Artificial Sequence
  Cyclic GFR-binding peptide
TNSLQEFIPKKRVIEYYLVTLPE

SEQ ID NO: 74577 - protein, 35 aa, Artificial Sequence
  Cyclic GFR-binding peptide
  MOD_RES (2), (4): Xaa is C or S
AXAXELHEELRNSLQELKPKKRVYEYYLVTLPEHH

SEQ ID NO: 74578 - protein, 31 aa, Artificial Sequence
  Cyclic GFR-binding peptide
  MOD_RES (2), (4): Xaa is C or S
SXKXSRVIMVTAKKVKPKRGVIKRIQVPRLA

SEQ ID NO: 74579 - protein, 28 aa, Artificial Sequence
  Cyclic GFR-binding peptide
  MOD_RES (1), (1): Xaa is C or S
XGEVVMDSMEGIVVKENEDMIQMTINSL

SEQ ID NO: 74580 - protein, 28 aa, Artificial Sequence
  Cyclic GFR-binding peptide
NSLQELKPKKRVYEYYVVPLPEHHVRSP

SEQ ID NO: 74581 - protein, 40 aa, Artificial Sequence; identical to SEQ ID NO: 25766
  Cyclic GFR-binding peptide
  MOD_RES (2), (34), (35): Xaa is C or S

SEQ ID NO: 74582 - protein, 32 aa, Artificial Sequence
  Cyclic GFR-binding peptide
  MOD_RES (2), (4): Xaa is C or S
HXGXSRVVMNVQVEKIVNSSDDVKAVKVSRLK

SEQ ID NO: 74583 - protein, 28 aa, Artificial Sequence
  Cyclic GFR-binding peptide
VMNSMEGIIVNSSDDMIQVTINSLKTPA

SEQ ID NO: 74584 - protein, 30 aa, Artificial Sequence
  Cyclic GFR-binding peptide
HDELTNSLQEFIPKKRVIEYYLVTLPELQV

SEQ ID NO: 74585 - protein, 27 aa, Artificial Sequence
  Cyclic GFR-binding peptide
  MOD_RES (27), (27): Xaa is C or S
DSMEGIVVKENEDMIQMTINSLETPVX

SEQ ID NO: 74586 - protein, 35 aa, Artificial Sequence; identical to SEQ ID NO: 25773
  Cyclic GFR-binding peptide
  MOD_RES (2), (4): Xaa is C or S

SEQ ID NO: 74587 - protein, 27 aa, Artificial Sequence
  Cyclic GFR-binding peptide
VVMNVQVEKIVNSSDDVKAVKVSRLKT

SEQ ID NO: 74588 - protein, 30 aa, Artificial Sequence; identical to SEQ ID NO: 25774
  Cyclic GFR-binding peptide

SEQ ID NO: 74589 - protein, 40 aa, Artificial Sequence; identical to SEQ ID NO: 25777
  Cyclic GFR-binding peptide
  MOD_RES (1), (3), (35): Xaa is C or S

SEQ ID NO: 74590 - protein, 25 aa, Artificial Sequence
  Cyclic GFR-binding peptide
VMNVQVEKIVNSSDDVKAVKVSRLQ

SEQ ID NO: 74591 - protein, 26 aa, Artificial Sequence
  Cyclic GFR-binding peptide
VIMVQVEKIKPTKGIVKAIKVSRLDQ

SEQ ID NO: 74592 - protein, 22 aa, Artificial Sequence
  Cyclic GFR-binding peptide
ESMEGIVVKDYEDMIQMTINSL

SEQ ID NO: 74593 - protein, 32 aa, Artificial Sequence
  Cyclic GFR-binding peptide
  MOD_RES (29), (30): Xaa is C or S
VVMSMEGIVKPTRGVMIQITINSLDQPVXXPS

SEQ ID NO: 74594 - protein, 30 aa, Artificial Sequence
  Cyclic GFR-binding peptide
  MOD_RES (2), (4): Xaa is C or S
RXGXGEVVMDVQVEKVVKENEDVKAMKVSR

SEQ ID NO: 74595 - protein, 30 aa, Artificial Sequence
  Cyclic GFR-binding peptide
  MOD_RES (30), (30): Xaa is C or S
VVMNVTAKKIVNSSDDIKRVQVPRLKTPAX

SEQ ID NO: 74596 - protein, 36 aa, Artificial Sequence; identical to SEQ ID NO: 25790
  Cyclic GFR-binding peptide
  MOD_RES (2), (34), (35): Xaa is C or S

SEQ ID NO: 74597 - protein, 32 aa, Artificial Sequence; identical to SEQ ID NO: 25791
  Cyclic GFR-binding peptide
  MOD_RES (1), (1): Xaa is C or S

SEQ ID NO: 74598 - protein, 29 aa, Artificial Sequence
  Cyclic GFR-binding peptide
  MOD_RES (26), (27): Xaa is C or S
VQVEKVKPTRGVVKAIKVSRLDQPVXXPS

SEQ ID NO: 74599 - protein, 33 aa, Artificial Sequence; identical to SEQ ID NO: 25796
  Cyclic GFR-binding peptide
  MOD_RES (2), (2): Xaa is C or S

SEQ ID NO: 74600 - protein, 35 aa, Artificial Sequence
  Cyclic GFR-binding peptide
  MOD_RES (1), (3): Xaa is C or S
XKXALHDELTNSLQEFIPKKRVIEYYLVTLPELQV

SEQ ID NO: 74601 - protein, 41 aa, Artificial Sequence; identical to SEQ ID NO: 25801
  Cyclic GFR-binding peptide
  MOD_RES (37), (37): Xaa is C or S

SEQ ID NO: 74602 - protein, 30 aa, Artificial Sequence
  Cyclic GFR-binding peptide
QLFNSLQEHQGQHPKIRYYVMPLPEEETPV

SEQ ID NO: 74603 - protein, 28 aa, Artificial Sequence
  Cyclic GFR-binding peptide
KVIMSMEGIIKPTKGIMIQITINSLDQS

SEQ ID NO: 74604 - protein, 25 aa, Artificial Sequence
  Cyclic GFR-binding peptide
MVQVEKVKPTRGVVKAIKVSRLDQP

SEQ ID NO: 74605 - protein, 38 aa, Artificial Sequence; identical to SEQ ID NO: 25807
  Cyclic GFR-binding peptide
  MOD_RES (1), (3), (34), (35): Xaa is C or S

SEQ ID NO: 74606 - protein, 37 aa, Artificial Sequence; identical to SEQ ID NO: 25809
  Cyclic GFR-binding peptide
  MOD_RES (32), (32): Xaa is C or S

SEQ ID NO: 74607 - protein, 34 aa, Artificial Sequence
  Cyclic GFR-binding peptide
  MOD_RES (30), (30): Xaa is C or S
LFNSLQEHQGQHPKIRYYLMTLPEEETPVXELGE

SEQ ID NO: 74608 - protein, 23 aa, Artificial Sequence
  Cyclic GFR-binding peptide
VQVEKVKPKRGVVKAIKVSRLAQ

SEQ ID NO: 74609 - protein, 35 aa, Artificial Sequence
  Cyclic GFR-binding peptide
  MOD_RES (30), (30): Xaa is C or S
VVMNVQVEKIVNSSDDVKAVKVSRLKTPAXTPKTV

SEQ ID NO: 74610 - protein, 35 aa, Artificial Sequence
  Cyclic GFR-binding peptide
  MOD_RES (30), (31): Xaa is C or S
VVMNVTAKKIVNSSDDIKRVQVPRLKTPAXXPKPV

SEQ ID NO: 74611 - protein, 39 aa, Artificial Sequence; identical to SEQ ID NO: 25816
  Cyclic GFR-binding peptide
  MOD_RES (1), (3), (35), (36): Xaa is C or S

SEQ ID NO: 74612 - protein, 24 aa, Artificial Sequence
  Cyclic GFR-binding peptide
LRNSLQELKPKKRVYEYYVVPLPE

SEQ ID NO: 74613 - protein, 24 aa, Artificial Sequence
  Cyclic GFR-binding peptide
ESMEGIVVKDYEDMIQMTINSLET

SEQ ID NO: 74614 - protein, 29 aa, Artificial Sequence
  Cyclic GFR-binding peptide
RVVMNVQVEKIVNSSDDVKAVKVSRLKTP

SEQ ID NO: 74615 - protein, 24 aa, Artificial Sequence
  Cyclic GFR-binding peptide
KVVMSMEGIVKPTRGVMIQITINS

SEQ ID NO: 74616 - protein, 28 aa, Artificial Sequence
  Cyclic GFR-binding peptide
  MOD_RES (27), (28): Xaa is C or S
MVTAKKVKPKRGVIKRIQVPRLAQPVXX

SEQ ID NO: 74617 - protein, 29 aa, Artificial Sequence
  Cyclic GFR-binding peptide
  MOD_RES (29), (29): Xaa is C or S
FNSLQEHQGQHPKIRYYVMPLPEEETPVX

SEQ ID NO: 74618 - protein, 34 aa, Artificial Sequence; identical to SEQ ID NO: 25821
  Cyclic GFR-binding peptide
  MOD_RES (31), (31): Xaa is C or S

SEQ ID NO: 74619 - protein, 30 aa, Artificial Sequence
  Cyclic GFR-binding peptide
  MOD_RES (26), (27): Xaa is C or S
VQVEKIVNSSDDVKAVKVSRLKTPAXXPKP

SEQ ID NO: 74620 - protein, 40 aa, Artificial Sequence; identical to SEQ ID NO: 25823
  Cyclic GFR-binding peptide
  MOD_RES (1), (3), (34), (35): Xaa is C or S

SEQ ID NO: 74621 - protein, 30 aa, Artificial Sequence
  Cyclic GFR-binding peptide
KNHQLFNSLQEHQGQHPKIRYYLMTLPEEE

SEQ ID NO: 74622 - protein, 39 aa, Artificial Sequence; identical to SEQ ID NO: 25828
  Cyclic GFR-binding peptide
  MOD_RES (2), (4), (35), (36): Xaa is C or S

SEQ ID NO: 74623 - protein, 35 aa, Artificial Sequence; identical to SEQ ID NO: 25830
  Cyclic GFR-binding peptide
  MOD_RES (31), (32): Xaa is C or S

SEQ ID NO: 74624 - protein, 31 aa, Artificial Sequence
  Cyclic GFR-binding peptide
ELRNSLQELKPKKRVYEYYVVPLPEHHVRSP

SEQ ID NO: 74625 - protein, 25 aa, Artificial Sequence
  Cyclic GFR-binding peptide
VVMNVQVEKIVNSSDDVKAVKVSRL

SEQ ID NO: 74626 - protein, 23 aa, Artificial Sequence
  Cyclic GFR-binding peptide
MSMEGIVKPTRGVMIQITINSLD

SEQ ID NO: 74627 - protein, 23 aa, Artificial Sequence
  Cyclic GFR-binding peptide
NVQVEKIVNSSDDVKAVKVSRLQ

SEQ ID NO: 74628 - protein, 33 aa, Artificial Sequence
  Cyclic GFR-binding peptide
  MOD_RES (29), (29): Xaa is C or S
FNSLQEHQGQHPKIRYYVMPLPEEETPVXELGE

SEQ ID NO: 74629 - protein, 36 aa, Artificial Sequence; identical to SEQ ID NO: 25837
  Cyclic GFR-binding peptide
  MOD_RES (2), (2): Xaa is C or S

SEQ ID NO: 74630 - protein, 31 aa, Artificial Sequence
  Cyclic GFR-binding peptide
  MOD_RES (26), (27): Xaa is C or S
VTAKKVKPKRGVIKRIQVPRLAQPVXXPAAS

SEQ ID NO: 74631 - protein, 35 aa, Artificial Sequence; identical to SEQ ID NO: 25839
  Cyclic GFR-binding peptide
  MOD_RES (1), (33), (34): Xaa is C or S

SEQ ID NO: 74632 - protein, 35 aa, Artificial Sequence
  Cyclic GFR-binding peptide
  MOD_RES (32), (32): Xaa is C or S
LTNSLQEFIPKKRVIEYYLVTLPELQVQTPRXQVN

SEQ ID NO: 74633 - protein, 27 aa, Artificial Sequence
  Cyclic GFR-binding peptide
ELTNSLQEFIPKKRVIEYYVVPLPELQ

SEQ ID NO: 74634 - protein, 29 aa, Artificial Sequence
  Cyclic GFR-binding peptide
  MOD_RES (1), (1): Xaa is C or S
XSRVIMSMEGIVKPKRGVMIQITINSLAQ

SEQ ID NO: 74635 - protein, 25 aa, Artificial Sequence
  Cyclic GFR-binding peptide
RVVMNVTAKKIVNSSDDIKRVQVPR

SEQ ID NO: 74636 - protein, 28 aa, Artificial Sequence
  Cyclic GFR-binding peptide
RVVMNVQVEKIVNSSDDVKAVKVSRLKT

SEQ ID NO: 74637 - protein, 34 aa, Artificial Sequence; identical to SEQ ID NO: 25849
  Cyclic GFR-binding peptide
  MOD_RES (1), (3), (34): Xaa is C or S

SEQ ID NO: 74638 - protein, 34 aa, Artificial Sequence
  Cyclic GFR-binding peptide
  MOD_RES (30), (31): Xaa is C or S
VVMNVQVEKIVNSSDDVKAVKVSRLKTPAXXPKP

SEQ ID NO: 74639 - protein, 31 aa, Artificial Sequence
  Cyclic GFR-binding peptide
HDELTNSLQEFIPKKRVIEYYLVTLPELQVQ

SEQ ID NO: 74640 - protein, 34 aa, Artificial Sequence
  Cyclic GFR-binding peptide
  MOD_RES (28), (28): Xaa is C or S
NSLQEHQGQHPKIRYYVMPLPEEETPVXELGEDN

SEQ ID NO: 74641 - protein, 31 aa, Artificial Sequence
  Cyclic GFR-binding peptide
  MOD_RES (26), (27): Xaa is C or S
VTAKKIVNSSDDIKRVQVPRLKTPAXXPKPV

SEQ ID NO: 74642 - protein, 32 aa, Artificial Sequence
  Cyclic GFR-binding peptide
  MOD_RES (29), (30): Xaa is C or S
VMNVQVEKIVNSSDDVKAVKVSRLQTPAXXPK

SEQ ID NO: 74643 - protein, 29 aa, Artificial Sequence
  Cyclic GFR-binding peptide
GEVVMEVQVEKVVKDYEDVKAMKVSRLET

SEQ ID NO: 74644 - protein, 40 aa, Artificial Sequence; identical to SEQ ID NO: 25854
  Cyclic GFR-binding peptide
  MOD_RES (1), (3), (34), (35): Xaa is C or S

SEQ ID NO: 74645 - protein, 31 aa, Artificial Sequence
  Cyclic GFR-binding peptide
  MOD_RES (2), (2): Xaa is C or S
GXARVVMNSMEGIIVNSSDDMIQVTINSLQT

SEQ ID NO: 74646 - protein, 31 aa, Artificial Sequence
  Cyclic GFR-binding peptide
  MOD_RES (2), (4): Xaa is C or S
SXKXSKVVMSMEGIVKPTRGVMIQITINSLD

SEQ ID NO: 74647 - protein, 32 aa, Artificial Sequence
  Cyclic GFR-binding peptide
KNHQLFNSLQEHQGQHPKIRYYLMTLPEEETP

SEQ ID NO: 74648 - protein, 31 aa, Artificial Sequence
  Cyclic GFR-binding peptide
  MOD_RES (1), (1): Xaa is C or S
XALHDELTNSLQEFIPKKRVIEYYVVPLPEL

SEQ ID NO: 74649 - protein, 35 aa, Artificial Sequence; identical to SEQ ID NO: 25867
  Cyclic GFR-binding peptide
  MOD_RES (1), (32), (33): Xaa is C or S

SEQ ID NO: 74650 - protein, 32 aa, Artificial Sequence
  Cyclic GFR-binding peptide
  MOD_RES (27), (27): Xaa is C or S
NVQVEKIVNSSDDVKAVKVSRLKTPAXTPKTV

SEQ ID NO: 74651 - protein, 28 aa, Artificial Sequence
  Cyclic GFR-binding peptide
  MOD_RES (2), (2): Xaa is C or S
GXSRVVMNVQVEKIVNSSDDVKAVKVSR

SEQ ID NO: 74652 - protein, 30 aa, Artificial Sequence
  Cyclic GFR-binding peptide
  MOD_RES (29), (30): Xaa is C or S
VVMVTAKKVKPTRGVIKRIQVPRLDQPVXX

SEQ ID NO: 74653 - protein, 38 aa, Artificial Sequence; identical to SEQ ID NO: 25870
  Cyclic GFR-binding peptide
  MOD_RES (1), (38): Xaa is C or S

SEQ ID NO: 74654 - protein, 28 aa, Artificial Sequence
  Cyclic GFR-binding peptide
  MOD_RES (26), (27): Xaa is C or S
VQVEKVVKENEDVKAMKVSRLETPVXXA

SEQ ID NO: 74655 - protein, 31 aa, Artificial Sequence
  Cyclic GFR-binding peptide
  MOD_RES (29), (30): Xaa is C or S
VMNVQVEKIVNSSDDVKAVKVSRLKTPAXXP

SEQ ID NO: 74656 - protein, 39 aa, Artificial Sequence; identical to SEQ ID NO: 25872
  Cyclic GFR-binding peptide
  MOD_RES (1), (3), (34), (35): Xaa is C or S

SEQ ID NO: 74657 - protein, 33 aa, Artificial Sequence
  Cyclic GFR-binding peptide
  MOD_RES (28), (29): Xaa is C or S
IMVQVEKIKPTKGIVKAIKVSRLDQSVXXPSAS

SEQ ID NO: 74658 - protein, 34 aa, Artificial Sequence; identical to SEQ ID NO: 25874
  Cyclic GFR-binding peptide
  MOD_RES (31), (31): Xaa is C or S

SEQ ID NO: 74659 - protein, 25 aa, Artificial Sequence
  Cyclic GFR-binding peptide
ESMEGIVVKDYEDMIQMTINSLETP

SEQ ID NO: 74660 - protein, 38 aa, Artificial Sequence; identical to SEQ ID NO: 25876
  Cyclic GFR-binding peptide
  MOD_RES (1), (3), (35), (36): Xaa is C or S

SEQ ID NO: 74661 - protein, 34 aa, Artificial Sequence
  Cyclic GFR-binding peptide
  MOD_RES (2), (2): Xaa is C or S
KXALHDELTNSLQEFIPKKRVIEYYLVTLPELQV

SEQ ID NO: 74662 - protein, 26 aa, Artificial Sequence
  Cyclic GFR-binding peptide
NSLQEHQGQHPKIRYYVMPLPEEETP

SEQ ID NO: 74663 - protein, 33 aa, Artificial Sequence; identical to SEQ ID NO: 25882
  Cyclic GFR-binding peptide

SEQ ID NO: 74664 - protein, 28 aa, Artificial Sequence
  Cyclic GFR-binding peptide
SRVIMVTAKKVKPKRGVIKRIQVPRLAQ

SEQ ID NO: 74665 - protein, 27 aa, Artificial Sequence
  Cyclic GFR-binding peptide
VVMEVTAKKVVKDYEDIKRMQVPRLET

SEQ ID NO: 74666 - protein, 22 aa, Artificial Sequence
  Cyclic GFR-binding peptide
MSMEGIVKPTRGVMIQITINSL

SEQ ID NO: 74667 - protein, 28 aa, Artificial Sequence
  Cyclic GFR-binding peptide
RVVMNSMEGIIVNSSDDMIQVTINSLKT

SEQ ID NO: 74668 - protein, 35 aa, Artificial Sequence; identical to SEQ ID NO: 25886
  Cyclic GFR-binding peptide
  MOD_RES (31), (32): Xaa is C or S

SEQ ID NO: 74669 - protein, 26 aa, Artificial Sequence
  Cyclic GFR-binding peptide
VVMEVQVEKVVKDYEDVKAMKVSRLE

SEQ ID NO: 74670 - protein, 27 aa, Artificial Sequence
  Cyclic GFR-binding peptide
MNVTAKKIVNSSDDIKRVQVPRLKTPA

SEQ ID NO: 74671 - protein, 34 aa, Artificial Sequence; identical to SEQ ID NO: 25892
  Cyclic GFR-binding peptide
  MOD_RES (1), (3): Xaa is C or S

SEQ ID NO: 74672 - protein, 28 aa, Artificial Sequence
  Cyclic GFR-binding peptide
DELTNSLQEFIPKKRVIEYYVVPLPELQ

SEQ ID NO: 74673 - protein, 27 aa, Artificial Sequence
  Cyclic GFR-binding peptide
  MOD_RES (26), (26): Xaa is C or S
VTAKKIVNSSDDIKRVQVPRLKTPAXT

SEQ ID NO: 74674 - protein, 32 aa, Artificial Sequence
  Cyclic GFR-binding peptide
  MOD_RES (29), (30): Xaa is C or S
VMDSMEGIVVKENEDMIQMTINSLETPVXXAK

SEQ ID NO: 74675 - protein, 31 aa, Artificial Sequence; identical to SEQ ID NO: 25894
  Cyclic GFR-binding peptide
  MOD_RES (1), (1): Xaa is C or S

SEQ ID NO: 74676 - protein, 37 aa, Artificial Sequence; identical to SEQ ID NO: 25895
  Cyclic GFR-binding peptide
  MOD_RES (2), (4), (36), (37): Xaa is C or S

SEQ ID NO: 74677 - protein, 20 aa, Artificial Sequence
  Cyclic GFR-binding peptide
VTAKKIVNSSDDIKRVQVPR

SEQ ID NO: 74678 - protein, 29 aa, Artificial Sequence
  Cyclic GFR-binding peptide
RNSLQELKPKKRVYEYYVVPLPEHHVRSP

SEQ ID NO: 74679 - protein, 34 aa, Artificial Sequence; identical to SEQ ID NO: 25901
  Cyclic GFR-binding peptide
  MOD_RES (31), (32): Xaa is C or S

SEQ ID NO: 74680 - protein, 25 aa, Artificial Sequence
  Cyclic GFR-binding peptide
MEVTAKKVVKDYEDIKRMQVPRLET

SEQ ID NO: 74681 - protein, 29 aa, Artificial Sequence
  Cyclic GFR-binding peptide
  MOD_RES (26), (27): Xaa is C or S
VTAKKIKPTKGIIKRIQVPRLDQSVXXPS

SEQ ID NO: 74682 - protein, 38 aa, Artificial Sequence; identical to SEQ ID NO: 25911
  Cyclic GFR-binding peptide
  MOD_RES (1), (33), (34): Xaa is C or S

SEQ ID NO: 74683 - protein, 40 aa, Artificial Sequence; identical to SEQ ID NO: 25912
  Cyclic GFR-binding peptide
  MOD_RES (1), (3), (35), (36): Xaa is C or S

SEQ ID NO: 74684 - protein, 32 aa, Artificial Sequence
  Cyclic GFR-binding peptide
  MOD_RES (28), (29): Xaa is C or S
MNVQVEKIVNSSDDVKAVKVSRLQTPAXXPKP

SEQ ID NO: 74685 - protein, 33 aa, Artificial Sequence; identical to SEQ ID NO: 25915
  Cyclic GFR-binding peptide
  MOD_RES (31), (32): Xaa is C or S

SEQ ID NO: 74686 - protein, 35 aa, Artificial Sequence; identical to SEQ ID NO: 25918
  Cyclic GFR-binding peptide
  MOD_RES (32), (33): Xaa is C or S

SEQ ID NO: 74687 - protein, 33 aa, Artificial Sequence
  Cyclic GFR-binding peptide
  MOD_RES (28), (29): Xaa is C or S
IMVTAKKVKPKRGVIKRIQVPRLAQPVXXPAAS

SEQ ID NO: 74688 - protein, 27 aa, Artificial Sequence
  Cyclic GFR-binding peptide
  MOD_RES (26), (27): Xaa is C or S
SMEGIIVNSSDDMIQVTINSLKTPAXX

SEQ ID NO: 74689 - protein, 35 aa, Artificial Sequence; identical to SEQ ID NO: 25920
  Cyclic GFR-binding peptide
  MOD_RES (2), (33), (34): Xaa is C or S

SEQ ID NO: 74690 - protein, 30 aa, Artificial Sequence
  Cyclic GFR-binding peptide
  MOD_RES (29), (30): Xaa is C or S
VMNVTAKKIVNSSDDIKRVQVPRLKTPAXX

SEQ ID NO: 74691 - protein, 24 aa, Artificial Sequence
  Cyclic GFR-binding peptide
MNVTAKKIVNSSDDIKRVQVPRLK

SEQ ID NO: 74692 - protein, 30 aa, Artificial Sequence; identical to SEQ ID NO: 25924
  Cyclic GFR-binding peptide

SEQ ID NO: 74693 - protein, 30 aa, Artificial Sequence
  Cyclic GFR-binding peptide
  MOD_RES (1), (3): Xaa is C or S
XGXGEVVMESMEGIVVKDYEDMIQMTINSL

SEQ ID NO: 74694 - protein, 34 aa, Artificial Sequence
  Cyclic GFR-binding peptide
  MOD_RES (2), (4): Xaa is C or S
RXGXGEVVMEVQVEKVVKDYEDVKAMKVSRLETP

SEQ ID NO: 74695 - protein, 32 aa, Artificial Sequence
  Cyclic GFR-binding peptide
  MOD_RES (27), (28): Xaa is C or S
MSMEGIIKPTKGIMIQITINSLDQSVXXPSAS

SEQ ID NO: 74696 - protein, 27 aa, Artificial Sequence
  Cyclic GFR-binding peptide
HEELRNSLQELKPKKRVYEYYLVTLPE

SEQ ID NO: 74697 - protein, 35 aa, Artificial Sequence
  Cyclic GFR-binding peptide
  MOD_RES (30), (31): Xaa is C or S
VVMNSMEGIIVNSSDDMIQVTINSLQTPAXXPKPV

SEQ ID NO: 74698 - protein, 25 aa, Artificial Sequence
  Cyclic GFR-binding peptide
VVMESMEGIVVKDYEDMIQMTINSL

SEQ ID NO: 74699 - protein, 34 aa, Artificial Sequence; identical to SEQ ID NO: 25929
  Cyclic GFR-binding peptide
  MOD_RES (1), (3), (34): Xaa is C or S

SEQ ID NO: 74700 - protein, 24 aa, Artificial Sequence
  Cyclic GFR-binding peptide
MVQVEKVKPTRGVVKAIKVSRLDQ

SEQ ID NO: 74701 - protein, 32 aa, Artificial Sequence
  Cyclic GFR-binding peptide
  MOD_RES (29), (30): Xaa is C or S
VMNSMEGIIVNSSDDMIQVTINSLQTPAXXPK

SEQ ID NO: 74702 - protein, 27 aa, Artificial Sequence
  Cyclic GFR-binding peptide
  MOD_RES (26), (27): Xaa is C or S
VTAKKIVNSSDDIKRVQVPRLKTPAXX

SEQ ID NO: 74703 - protein, 31 aa, Artificial Sequence
  Cyclic GFR-binding peptide
LHEELRNSLQELKPKKRVYEYYVVPLPEHHV

SEQ ID NO: 74704 - protein, 37 aa, Artificial Sequence; identical to SEQ ID NO: 25937
  Cyclic GFR-binding peptide
  MOD_RES (2), (33), (34): Xaa is C or S

SEQ ID NO: 74705 - protein, 32 aa, Artificial Sequence
  Cyclic GFR-binding peptide
  MOD_RES (29), (29): Xaa is C or S
VMNVTAKKIVNSSDDIKRVQVPRLKTPAXTPK

SEQ ID NO: 74706 - protein, 35 aa, Artificial Sequence; identical to SEQ ID NO: 25943
  Cyclic GFR-binding peptide
  MOD_RES (1), (1): Xaa is C or S

SEQ ID NO: 74707 - protein, 39 aa, Artificial Sequence; identical to SEQ ID NO: 25944
  Cyclic GFR-binding peptide
  MOD_RES (2), (34), (35): Xaa is C or S

SEQ ID NO: 74708 - protein, 24 aa, Artificial Sequence
  Cyclic GFR-binding peptide
VTAKKIVNSSDDIKRVQVPRLKTP

SEQ ID NO: 74709 - protein, 30 aa, Artificial Sequence
  Cyclic GFR-binding peptide
  MOD_RES (26), (27): Xaa is C or S
SMEGIVKPTRGVMIQITINSLDQPVXXPSA

SEQ ID NO: 74710 - protein, 40 aa, Artificial Sequence; identical to SEQ ID NO: 25946
  Cyclic GFR-binding peptide
  MOD_RES (2), (4): Xaa is C or S

SEQ ID NO: 74711 - protein, 33 aa, Artificial Sequence; identical to SEQ ID NO: 25947
  Cyclic GFR-binding peptide
  MOD_RES (32), (33): Xaa is C or S

SEQ ID NO: 74712 - protein, 34 aa, Artificial Sequence; identical to SEQ ID NO: 25949
  Cyclic GFR-binding peptide
  MOD_RES (1), (32), (33): Xaa is C or S

SEQ ID NO: 74713 - protein, 29 aa, Artificial Sequence
  Cyclic GFR-binding peptide
  MOD_RES (1), (3): Xaa is C or S
XGXGEVVMDVQVEKVVKENEDVKAMKVSR

SEQ ID NO: 74714 - protein, 29 aa, Artificial Sequence
  Cyclic GFR-binding peptide
  MOD_RES (1), (3): Xaa is C or S
XKXSKVVMSMEGIVKPTRGVMIQITINSL

SEQ ID NO: 74715 - protein, 26 aa, Artificial Sequence
  Cyclic GFR-binding peptide
  MOD_RES (26), (26): Xaa is C or S
SMEGIIKPTKGIMIQITINSLDQSVX

SEQ ID NO: 74716 - protein, 31 aa, Artificial Sequence
  Cyclic GFR-binding peptide
  MOD_RES (26), (26): Xaa is C or S
VQVEKIVNSSDDVKAVKVSRLKTPAXTPKTV

SEQ ID NO: 74717 - protein, 23 aa, Artificial Sequence
  Cyclic GFR-binding peptide
VMDVTAKKVVKENEDIKRMQVPR

SEQ ID NO: 74718 - protein, 29 aa, Artificial Sequence
  Cyclic GFR-binding peptide
  MOD_RES (28), (29): Xaa is C or S
VMVTAKKVKPTRGVIKRIQVPRLDQPVXX

SEQ ID NO: 74719 - protein, 28 aa, Artificial Sequence
  Cyclic GFR-binding peptide
TNSLQEFIPKKRVIEYYLVTLPELQVQT

SEQ ID NO: 74720 - protein, 30 aa, Artificial Sequence
  Cyclic GFR-binding peptide
  MOD_RES (28), (29): Xaa is C or S
MDVQVEKVVKENEDVKAMKVSRLETPVXXA

SEQ ID NO: 74721 - protein, 28 aa, Artificial Sequence
  Cyclic GFR-binding peptide
  MOD_RES (26), (26): Xaa is C or S
VTAKKIVNSSDDIKRVQVPRLKTPAXTP

SEQ ID NO: 74722 - protein, 30 aa, Artificial Sequence
  Cyclic GFR-binding peptide
  MOD_RES (27), (28): Xaa is C or S
NSMEGIIVNSSDDMIQVTINSLQTPAXXPK

SEQ ID NO: 74723 - protein, 34 aa, Artificial Sequence
  Cyclic GFR-binding peptide
  MOD_RES (30), (31): Xaa is C or S
KVVMSMEGIVKPTRGVMIQITINSLDQPVXXPSA

SEQ ID NO: 74724 - protein, 35 aa, Artificial Sequence
  Cyclic GFR-binding peptide
  MOD_RES (30), (30): Xaa is C or S
LFNSLQEHQGQHPKIRYYVMPLPEEETPVXELGED

SEQ ID NO: 74725 - protein, 42 aa, Artificial Sequence; identical to SEQ ID NO: 25963
  Cyclic GFR-binding peptide
  MOD_RES (2), (4), (36): Xaa is C or S

SEQ ID NO: 74726 - protein, 33 aa, Artificial Sequence
  Cyclic GFR-binding peptide
  MOD_RES (28), (29): Xaa is C or S
MDSMEGIVVKENEDMIQMTINSLETPVXXAKPI

SEQ ID NO: 74727 - protein, 33 aa, Artificial Sequence
  Cyclic GFR-binding peptide
  MOD_RES (28), (29): Xaa is C or S
MDVQVEKVVKENEDVKAMKVSRLETPVXXAKPI

SEQ ID NO: 74728 - protein, 28 aa, Artificial Sequence
  Cyclic GFR-binding peptide
VVMNVTAKKIVNSSDDIKRVQVPRLQTP

SEQ ID NO: 74729 - protein, 34 aa, Artificial Sequence
  Cyclic GFR-binding peptide
  MOD_RES (30), (31): Xaa is C or S
KVIMVTAKKIKPTKGIIKRIQVPRLDQSVXXPSA

SEQ ID NO: 74730 - protein, 40 aa, Artificial Sequence; identical to SEQ ID NO: 25967
  Cyclic GFR-binding peptide
  MOD_RES (37), (37): Xaa is C or S

SEQ ID NO: 74731 - protein, 29 aa, Artificial Sequence
  Cyclic GFR-binding peptide
AAAAAAAAASMEGIIVNSSDDMIQVTINS

SEQ ID NO: 74732 - protein, 33 aa, Artificial Sequence
  Cyclic GFR-binding peptide
  MOD_RES (27), (28): Xaa is C or S
EVQVEKVVKDYEDVKAMKVSRLETPVXXAKPIS

SEQ ID NO: 74733 - protein, 33 aa, Artificial Sequence; identical to SEQ ID NO: 25968
  Cyclic GFR-binding peptide
  MOD_RES (1), (32), (33): Xaa is C or S

SEQ ID NO: 74734 - protein, 27 aa, Artificial Sequence
  Cyclic GFR-binding peptide
SKVIMVQVEKIKPTKGIVKAIKVSRLD

SEQ ID NO: 74735 - protein, 38 aa, Artificial Sequence; identical to SEQ ID NO: 25969
  Cyclic GFR-binding peptide
  MOD_RES (2), (4), (35), (36): Xaa is C or S

SEQ ID NO: 74736 - protein, 29 aa, Artificial Sequence
  Cyclic GFR-binding peptide
SRVIMVTAKKVKPKRGVIKRIQVPRLAQP

SEQ ID NO: 74737 - protein, 28 aa, Artificial Sequence
  Cyclic GFR-binding peptide
  MOD_RES (28), (28): Xaa is C or S
IMVTAKKIKPTKGIIKRIQVPRLDQSVX

SEQ ID NO: 74738 - protein, 39 aa, Artificial Sequence; identical to SEQ ID NO: 25973
  Cyclic GFR-binding peptide
  MOD_RES (1), (3), (37): Xaa is C or S

SEQ ID NO: 74739 - protein, 32 aa, Artificial Sequence
  Cyclic GFR-binding peptide
  MOD_RES (29), (30): Xaa is C or S
VVMVQVEKVKPTRGVVKAIKVSRLDQPVXXPS

SEQ ID NO: 74740 - protein, 33 aa, Artificial Sequence
  Cyclic GFR-binding peptide
  MOD_RES (32), (32): Xaa is C or S
HQLFNSLQEHQGQHPKIRYYLMTLPEEETPVXE

SEQ ID NO: 74741 - protein, 32 aa, Artificial Sequence
  Cyclic GFR-binding peptide
  MOD_RES (2), (2): Xaa is C or S
AXELHEELRNSLQELKPKKRVYEYYVVPLPEH

SEQ ID NO: 74742 - protein, 27 aa, Artificial Sequence
  Cyclic GFR-binding peptide
NSLQELKPKKRVYEYYLVTLPEHHVRS

SEQ ID NO: 74743 - protein, 31 aa, Artificial Sequence
  Cyclic GFR-binding peptide
  MOD_RES (28), (29): Xaa is C or S
MDVTAKKVVKENEDIKRMQVPRLETPVXXAK

SEQ ID NO: 74744 - protein, 29 aa, Artificial Sequence
  Cyclic GFR-binding peptide
TNSLQEFIPKKRVIEYYLVTLPELQVQTP

SEQ ID NO: 74745 - protein, 30 aa, Artificial Sequence
  Cyclic GFR-binding peptide
  MOD_RES (2), (2): Xaa is C or S
KXSKVVMSMEGIVKPTRGVMIQITINSLDQ

SEQ ID NO: 74746 - protein, 37 aa, Artificial Sequence; identical to SEQ ID NO: 25978
  Cyclic GFR-binding peptide
  MOD_RES (34), (34): Xaa is C or S

SEQ ID NO: 74747 - protein, 31 aa, Artificial Sequence
  Cyclic GFR-binding peptide
  MOD_RES (30), (31): Xaa is C or S
VVMDVTAKKVVKENEDIKRMQVPRLETPVXX

SEQ ID NO: 74748 - protein, 26 aa, Artificial Sequence
  Cyclic GFR-binding peptide
DSMEGIVVKENEDMIQMTINSLETPV

SEQ ID NO: 74749 - protein, 32 aa, Artificial Sequence; identical to SEQ ID NO: 25981
  Cyclic GFR-binding peptide
  MOD_RES (1), (1): Xaa is C or S

SEQ ID NO: 74750 - protein, 38 aa, Artificial Sequence; identical to SEQ ID NO: 25982
  Cyclic GFR-binding peptide
  MOD_RES (32), (33): Xaa is C or S

SEQ ID NO: 74751 - protein, 21 aa, Artificial Sequence
  Cyclic GFR-binding peptide
NSMEGIIVNSSDDMIQVTINS

SEQ ID NO: 74752 - protein, 40 aa, Artificial Sequence; identical to SEQ ID NO: 25985
  Cyclic GFR-binding peptide
  MOD_RES (2), (34): Xaa is C or S

SEQ ID NO: 74753 - protein, 36 aa, Artificial Sequence; identical to SEQ ID NO: 25986
  Cyclic GFR-binding peptide
  MOD_RES (1), (3), (35), (36): Xaa is C or S

SEQ ID NO: 74754 - protein, 31 aa, Artificial Sequence
  Cyclic GFR-binding peptide
  MOD_RES (1), (3): Xaa is C or S
XGXGEVVMESMEGIVVKDYEDMIQMTINSLE

SEQ ID NO: 74755 - protein, 34 aa, Artificial Sequence
  Cyclic GFR-binding peptide
  MOD_RES (1), (3): Xaa is C or S
XAXELHEELRNSLQELKPKKRVYEYYVVPLPEHH

SEQ ID NO: 74756 - protein, 38 aa, Artificial Sequence; identical to SEQ ID NO: 25987
  Cyclic GFR-binding peptide
  MOD_RES (32), (33): Xaa is C or S

SEQ ID NO: 74757 - protein, 28 aa, Artificial Sequence
  Cyclic GFR-binding peptide
  MOD_RES (2), (2): Xaa is C or S
KXSRVIMVQVEKVKPKRGVVKAIKVSRL

SEQ ID NO: 74758 - protein, 36 aa, Artificial Sequence; identical to SEQ ID NO: 25990
  Cyclic GFR-binding peptide
  MOD_RES (2), (34), (35): Xaa is C or S

SEQ ID NO: 74759 - protein, 26 aa, Artificial Sequence
  Cyclic GFR-binding peptide
MNVTAKKIVNSSDDIKRVQVPRLQTP

SEQ ID NO: 74760 - protein, 30 aa, Artificial Sequence
  Cyclic GFR-binding peptide
  MOD_RES (28), (29): Xaa is C or S
IMVTAKKIKPTKGIIKRIQVPRLDQSVXXP

SEQ ID NO: 74761 - protein, 24 aa, Artificial Sequence
  Cyclic GFR-binding peptide
LFNSLQEHQGQHPKIRYYVMPLPE

SEQ ID NO: 74762 - protein, 30 aa, Artificial Sequence
  Cyclic GFR-binding peptide
  MOD_RES (2), (4): Xaa is C or S
HXGXSRVVMNVQVEKIVNSSDDVKAVKVSR

SEQ ID NO: 74763 - protein, 34 aa, Artificial Sequence
  Cyclic GFR-binding peptide
  MOD_RES (2), (2): Xaa is C or S
EXKNHQLFNSLQEHQGQHPKIRYYVMPLPEEETP

SEQ ID NO: 74764 - protein, 36 aa, Artificial Sequence; identical to SEQ ID NO: 26000
  Cyclic GFR-binding peptide
  MOD_RES (1), (32), (33): Xaa is C or S

SEQ ID NO: 74765 - protein, 29 aa, Artificial Sequence
  Cyclic GFR-binding peptide
  MOD_RES (29), (29): Xaa is C or S
VMNVTAKKIVNSSDDIKRVQVPRLQTPAX

SEQ ID NO: 74766 - protein, 33 aa, Artificial Sequence; identical to SEQ ID NO: 26003
  Cyclic GFR-binding peptide
  MOD_RES (1), (32), (33): Xaa is C or S

SEQ ID NO: 74767 - protein, 33 aa, Artificial Sequence
  Cyclic GFR-binding peptide
  MOD_RES (29), (30): Xaa is C or S
VIMSMEGIIKPTKGIMIQITINSLDQSVXXPSA

SEQ ID NO: 74768 - protein, 29 aa, Artificial Sequence
  Cyclic GFR-binding peptide
  MOD_RES (2), (2): Xaa is C or S
KXSKVVMSMEGIVKPTRGVMIQITINSLD

SEQ ID NO: 74769 - protein, 33 aa, Artificial Sequence; identical to SEQ ID NO: 26005
  Cyclic GFR-binding peptide
  MOD_RES (31), (32): Xaa is C or S

SEQ ID NO: 74770 - protein, 41 aa, Artificial Sequence; identical to SEQ ID NO: 26007
  Cyclic GFR-binding peptide
  MOD_RES (1), (3), (35), (36): Xaa is C or S

SEQ ID NO: 74771 - protein, 36 aa, Artificial Sequence; identical to SEQ ID NO: 26010
  Cyclic GFR-binding peptide
  MOD_RES (1), (32), (33): Xaa is C or S

SEQ ID NO: 74772 - protein, 32 aa, Artificial Sequence
  Cyclic GFR-binding peptide
  MOD_RES (27), (28): Xaa is C or S
MSMEGIVKPTRGVMIQITINSLDQPVXXPSAS

SEQ ID NO: 74773 - protein, 33 aa, Artificial Sequence; identical to SEQ ID NO: 26012
  Cyclic GFR-binding peptide
  MOD_RES (2), (2): Xaa is C or S

SEQ ID NO: 74774 - protein, 29 aa, Artificial Sequence
  Cyclic GFR-binding peptide
  MOD_RES (2), (2): Xaa is C or S
GXGEVVMDSMEGIVVKENEDMIQMTINSL

SEQ ID NO: 74775 - protein, 27 aa, Artificial Sequence
  Cyclic GFR-binding peptide
  MOD_RES (1), (1): Xaa is C or S
XSKVVMVQVEKVKPTRGVVKAIKVSRL

SEQ ID NO: 74776 - protein, 28 aa, Artificial Sequence
  Cyclic GFR-binding peptide
RNSLQELKPKKRVYEYYVVPLPEHHVRS

SEQ ID NO: 74777 - protein, 26 aa, Artificial Sequence
  Cyclic GFR-binding peptide
EVVMDVTAKKVVKENEDIKRMQVPRL

SEQ ID NO: 74778 - protein, 40 aa, Artificial Sequence; identical to SEQ ID NO: 26017
  Cyclic GFR-binding peptide
  MOD_RES (1), (35): Xaa is C or S

SEQ ID NO: 74779 - protein, 34 aa, Artificial Sequence
  Cyclic GFR-binding peptide
  MOD_RES (28), (29): Xaa is C or S
MEVQVEKVVKDYEDVKAMKVSRLETPVXXAKPIS

SEQ ID NO: 74780 - protein, 21 aa, Artificial Sequence
  Cyclic GFR-binding peptide
VQVEKVKPKRGVVKAIKVSRL

SEQ ID NO: 74781 - protein, 41 aa, Artificial Sequence; identical to SEQ ID NO: 26020
  Cyclic GFR-binding peptide
  MOD_RES (2), (4), (36), (37): Xaa is C or S

SEQ ID NO: 74782 - protein, 27 aa, Artificial Sequence
  Cyclic GFR-binding peptide
GEVVMESMEGIVVKDYEDMIQMTINSL

SEQ ID NO: 74783 - protein, 31 aa, Artificial Sequence; identical to SEQ ID NO: 26021
  Cyclic GFR-binding peptide
  MOD_RES (1), (1): Xaa is C or S

SEQ ID NO: 74784 - protein, 36 aa, Artificial Sequence; identical to SEQ ID NO: 26026
  Cyclic GFR-binding peptide
  MOD_RES (2), (33), (34): Xaa is C or S

SEQ ID NO: 74785 - protein, 30 aa, Artificial Sequence
  Cyclic GFR-binding peptide
  MOD_RES (29), (30): Xaa is C or S
VIMVQVEKIKPTKGIVKAIKVSRLDQSVXX

SEQ ID NO: 74786 - protein, 34 aa, Artificial Sequence
  Cyclic GFR-binding peptide
  MOD_RES (32), (32): Xaa is C or S
LRNSLQELKPKKRVYEYYVVPLPEHHVRSPQXKV

SEQ ID NO: 74787 - protein, 34 aa, Artificial Sequence; identical to SEQ ID NO: 26033
  Cyclic GFR-binding peptide
  MOD_RES (32), (33): Xaa is C or S

SEQ ID NO: 74788 - protein, 21 aa, Artificial Sequence
  Cyclic GFR-binding peptide
MVTAKKVKPTRGVIKRIQVPR

SEQ ID NO: 74789 - protein, 31 aa, Artificial Sequence
  Cyclic GFR-binding peptide
  MOD_RES (2), (4): Xaa is C or S
HXGXARVVMNVQVEKIVNSSDDVKAVKVSRL

SEQ ID NO: 74790 - protein, 31 aa, Artificial Sequence
  Cyclic GFR-binding peptide
  MOD_RES (26), (27): Xaa is C or S
SMEGIIVNSSDDMIQVTINSLKTPAXXPKPV

SEQ ID NO: 74791 - protein, 29 aa, Artificial Sequence
  Cyclic GFR-binding peptide
  MOD_RES (2), (4): Xaa is C or S
SXKXSKVIMVQVEKIKPTKGIVKAIKVSR

SEQ ID NO: 74792 - protein, 32 aa, Artificial Sequence
  Cyclic GFR-binding peptide
  MOD_RES (1), (3): Xaa is C or S
XGXARVVMNSMEGIIVNSSDDMIQVTINSLQT

SEQ ID NO: 74793 - protein, 34 aa, Artificial Sequence
  Cyclic GFR-binding peptide
  MOD_RES (1), (1): Xaa is C or S
XELHEELRNSLQELKPKKRVYEYYVVPLPEHHVR

SEQ ID NO: 74794 - protein, 28 aa, Artificial Sequence
  Cyclic GFR-binding peptide
VMNVQVEKIVNSSDDVKAVKVSRLKTPA

SEQ ID NO: 74795 - protein, 32 aa, Artificial Sequence
  Cyclic GFR-binding peptide
EELRNSLQELKPKKRVYEYYLVTLPEHHVRSP

SEQ ID NO: 74796 - protein, 30 aa, Artificial Sequence
  Cyclic GFR-binding peptide
  MOD_RES (28), (29): Xaa is C or S
IMVQVEKIKPTKGIVKAIKVSRLDQSVXXP

SEQ ID NO: 74797 - protein, 32 aa, Artificial Sequence
  Cyclic GFR-binding peptide
  MOD_RES (30), (31): Xaa is C or S
RVIMVQVEKVKPKRGVVKAIKVSRLAQPVXXP

SEQ ID NO: 74798 - protein, 30 aa, Artificial Sequence
  Cyclic GFR-binding peptide
  MOD_RES (30), (30): Xaa is C or S
VVMEVQVEKVVKDYEDVKAMKVSRLETPVX

SEQ ID NO: 74799 - protein, 30 aa, Artificial Sequence
  Cyclic GFR-binding peptide
  MOD_RES (1), (3): Xaa is C or S
XKXSRVIMSMEGIVKPKRGVMIQITINSLA

SEQ ID NO: 74800 - protein, 34 aa, Artificial Sequence; identical to SEQ ID NO: 26038
  Cyclic GFR-binding peptide
  MOD_RES (2), (34): Xaa is C or S

SEQ ID NO: 74801 - protein, 23 aa, Artificial Sequence
  Cyclic GFR-binding peptide
MEVQVEKVVKDYEDVKAMKVSRL

SEQ ID NO: 74802 - protein, 40 aa, Artificial Sequence; identical to SEQ ID NO: 26040
  Cyclic GFR-binding peptide
  MOD_RES (36), (36): Xaa is C or S

SEQ ID NO: 74803 - protein, 37 aa, Artificial Sequence
  Cyclic GFR-binding peptide
  MOD_RES (34), (34): Xaa is C or S
DELTNSLQEFIPKKRVIEYYLVTLPELQVQTPRXQVN

SEQ ID NO: 74804 - protein, 35 aa, Artificial Sequence; identical to SEQ ID NO: 26043
  Cyclic GFR-binding peptide
  MOD_RES (1), (3), (34), (35): Xaa is C or S

SEQ ID NO: 74805 - protein, 33 aa, Artificial Sequence
  Cyclic GFR-binding peptide
  MOD_RES (1), (3): Xaa is C or S
XEXKNHQLFNSLQEHQGQHPKIRYYVMPLPEEE

SEQ ID NO: 74806 - protein, 32 aa, Artificial Sequence; identical to SEQ ID NO: 26052
  Cyclic GFR-binding peptide
  MOD_RES (1), (1): Xaa is C or S

SEQ ID NO: 74807 - protein, 36 aa, Artificial Sequence; identical to SEQ ID NO: 26051
  Cyclic GFR-binding peptide
  MOD_RES (1), (33), (34): Xaa is C or S

SEQ ID NO: 74808 - protein, 33 aa, Artificial Sequence
  Cyclic GFR-binding peptide
  MOD_RES (29), (30): Xaa is C or S
VIMVQVEKIKPTKGIVKAIKVSRLDQSVXXPSA

SEQ ID NO: 74809 - protein, 35 aa, Artificial Sequence; identical to SEQ ID NO: 26053
  Cyclic GFR-binding peptide
  MOD_RES (1), (3), (34), (35): Xaa is C or S

SEQ ID NO: 74810 - protein, 37 aa, Artificial Sequence; identical to SEQ ID NO: 26055
  Cyclic GFR-binding peptide
  MOD_RES (1), (33), (34): Xaa is C or S

SEQ ID NO: 74811 - protein, 35 aa, Artificial Sequence; identical to SEQ ID NO: 26056
  Cyclic GFR-binding peptide
  MOD_RES (1), (32), (33): Xaa is C or S

SEQ ID NO: 74812 - protein, 36 aa, Artificial Sequence; identical to SEQ ID NO: 26057
  Cyclic GFR-binding peptide
  MOD_RES (2), (4), (36): Xaa is C or S

SEQ ID NO: 74813 - protein, 29 aa, Artificial Sequence
  Cyclic GFR-binding peptide
RVVMNSMEGIIVNSSDDMIQVTINSLKTP

SEQ ID NO: 74814 - protein, 23 aa, Artificial Sequence
  Cyclic GFR-binding peptide
IMSMEGIIKPTKGIMIQITINSL

SEQ ID NO: 74815 - protein, 32 aa, Artificial Sequence
  Cyclic GFR-binding peptide
  MOD_RES (2), (2): Xaa is C or S
GXARVVMNVQVEKIVNSSDDVKAVKVSRLQTP

SEQ ID NO: 74816 - protein, 34 aa, Artificial Sequence
  Cyclic GFR-binding peptide
  MOD_RES (28), (29): Xaa is C or S
MNVTAKKIVNSSDDIKRVQVPRLQTPAXXPKPVT

SEQ ID NO: 74817 - protein, 35 aa, Artificial Sequence; identical to SEQ ID NO: 26066
  Cyclic GFR-binding peptide
  MOD_RES (32), (33): Xaa is C or S

SEQ ID NO: 74818 - protein, 25 aa, Artificial Sequence
  Cyclic GFR-binding peptide
MVQVEKIKPTKGIVKAIKVSRLDQS

SEQ ID NO: 74819 - protein, 33 aa, Artificial Sequence
  Cyclic GFR-binding peptide
  MOD_RES (30), (31): Xaa is C or S
VVMESMEGIVVKDYEDMIQMTINSLETPVXXAK

SEQ ID NO: 74820 - protein, 35 aa, Artificial Sequence; identical to SEQ ID NO: 26069
  Cyclic GFR-binding peptide
  MOD_RES (31), (32): Xaa is C or S

SEQ ID NO: 74821 - protein, 37 aa, Artificial Sequence; identical to SEQ ID NO: 26071
  Cyclic GFR-binding peptide
  MOD_RES (1), (33), (34): Xaa is C or S

SEQ ID NO: 74822 - protein, 33 aa, Artificial Sequence
  Cyclic GFR-binding peptide
  MOD_RES (2), (4): Xaa is C or S
SXKXSRVIMVTAKKVKPKRGVIKRIQVPRLAQP

SEQ ID NO: 74823 - protein, 38 aa, Artificial Sequence; identical to SEQ ID NO: 26073
  Cyclic GFR-binding peptide
  MOD_RES (2), (4), (36), (37): Xaa is C or S

SEQ ID NO: 74824 - protein, 33 aa, Artificial Sequence
  Cyclic GFR-binding peptide
  MOD_RES (1), (3): Xaa is C or S
XKXALHDELTNSLQEFIPKKRVIEYYVVPLPEL

SEQ ID NO: 74825 - protein, 30 aa, Artificial Sequence
  Cyclic GFR-binding peptide
  MOD_RES (28), (28): Xaa is C or S
MNSMEGIIVNSSDDMIQVTINSLKTPAXTP

SEQ ID NO: 74826 - protein, 31 aa, Artificial Sequence
  Cyclic GFR-binding peptide
  MOD_RES (27), (28): Xaa is C or S
MSMEGIVKPTRGVMIQITINSLDQPVXXPSA

SEQ ID NO: 74827 - protein, 30 aa, Artificial Sequence
  Cyclic GFR-binding peptide
  MOD_RES (30), (30): Xaa is C or S
KVIMSMEGIIKPTKGIMIQITINSLDQSVX

SEQ ID NO: 74828 - protein, 22 aa, Artificial Sequence
  Cyclic GFR-binding peptide
MNVTAKKIVNSSDDIKRVQVPR

SEQ ID NO: 74829 - protein, 31 aa, Artificial Sequence
  Cyclic GFR-binding peptide
  MOD_RES (2), (2): Xaa is C or S
KXSRVIMSMEGIVKPKRGVMIQITINSLAQP

SEQ ID NO: 74830 - protein, 27 aa, Artificial Sequence
  Cyclic GFR-binding peptide
  MOD_RES (27), (27): Xaa is C or S
EVTAKKVVKDYEDIKRMQVPRLETPVX

SEQ ID NO: 74831 - protein, 41 aa, Artificial Sequence; identical to SEQ ID NO: 26080
  Cyclic GFR-binding peptide
  MOD_RES (2), (39): Xaa is C or S

SEQ ID NO: 74832 - protein, 35 aa, Artificial Sequence; identical to SEQ ID NO: 26081
  Cyclic GFR-binding peptide
  MOD_RES (31), (31): Xaa is C or S

SEQ ID NO: 74833 - protein, 29 aa, Artificial Sequence
  Cyclic GFR-binding peptide
  MOD_RES (28), (28): Xaa is C or S
MNVTAKKIVNSSDDIKRVQVPRLKTPAXT

SEQ ID NO: 74834 - protein, 32 aa, Artificial Sequence
  Cyclic GFR-binding peptide
  MOD_RES (26), (27): Xaa is C or S
SMEGIIVNSSDDMIQVTINSLQTPAXXPKPVT

SEQ ID NO: 74835 - protein, 38 aa, Artificial Sequence; identical to SEQ ID NO: 26086
  Cyclic GFR-binding peptide
  MOD_RES (32), (32): Xaa is C or S

SEQ ID NO: 74836 - protein, 32 aa, Artificial Sequence
  Cyclic GFR-binding peptide
  MOD_RES (2), (2): Xaa is C or S
GXSRVVMNVQVEKIVNSSDDVKAVKVSRLKTP

SEQ ID NO: 74837 - protein, 29 aa, Artificial Sequence
  Cyclic GFR-binding peptide
LFNSLQEHQGQHPKIRYYLMTLPEEETPV

SEQ ID NO: 74838 - protein, 27 aa, Artificial Sequence
  Cyclic GFR-binding peptide
MEVTAKKVVKDYEDIKRMQVPRLETPV

SEQ ID NO: 74839 - protein, 38 aa, Artificial Sequence; identical to SEQ ID NO: 26095
  Cyclic GFR-binding peptide
  MOD_RES (36), (36): Xaa is C or S

SEQ ID NO: 74840 - protein, 36 aa, Artificial Sequence
  Cyclic GFR-binding peptide
  MOD_RES (31), (31): Xaa is C or S
QLFNSLQEHQGQHPKIRYYLMTLPEEETPVXELGED

SEQ ID NO: 74841 - protein, 33 aa, Artificial Sequence
  Cyclic GFR-binding peptide
  MOD_RES (28), (29): Xaa is C or S
IMVQVEKVKPKRGVVKAIKVSRLAQPVXXPAAS

SEQ ID NO: 74842 - protein, 31 aa, Artificial Sequence
  Cyclic GFR-binding peptide
  MOD_RES (26), (27): Xaa is C or S
SMEGIVKPKRGVMIQITINSLAQPVXXPAAS

SEQ ID NO: 74843 - protein, 40 aa, Artificial Sequence; identical to SEQ ID NO: 26098
  Cyclic GFR-binding peptide
  MOD_RES (1), (3), (34), (35): Xaa is C or S

SEQ ID NO: 74844 - protein, 27 aa, Artificial Sequence
  Cyclic GFR-binding peptide
SKVIMSMEGIIKPTKGIMIQITINSLD

SEQ ID NO: 74845 - protein, 35 aa, Artificial Sequence; identical to SEQ ID NO: 26102
  Cyclic GFR-binding peptide
  MOD_RES (2), (4), (35): Xaa is C or S

SEQ ID NO: 74846 - protein, 30 aa, Artificial Sequence
  Cyclic GFR-binding peptide
  MOD_RES (27), (28): Xaa is C or S
MVQVEKVKPTRGVVKAIKVSRLDQPVXXPS

SEQ ID NO: 74847 - protein, 34 aa, Artificial Sequence
  Cyclic GFR-binding peptide
  MOD_RES (28), (29): Xaa is C or S
IMSMEGIVKPKRGVMIQITINSLAQPVXXPAASA

SEQ ID NO: 74848 - protein, 25 aa, Artificial Sequence
  Cyclic GFR-binding peptide
VMEVQVEKVVKDYEDVKAMKVSRLE

SEQ ID NO: 74849 - protein, 37 aa, Artificial Sequence; identical to SEQ ID NO: 26111
  Cyclic GFR-binding peptide
  MOD_RES (37), (37): Xaa is C or S

SEQ ID NO: 74850 - protein, 32 aa, Artificial Sequence
  Cyclic GFR-binding peptide
ELTNSLQEFIPKKRVIEYYLVTLPELQVQTPR

SEQ ID NO: 74851 - protein, 35 aa, Artificial Sequence; identical to SEQ ID NO: 26113
  Cyclic GFR-binding peptide
  MOD_RES (31), (32): Xaa is C or S

SEQ ID NO: 74852 - protein, 27 aa, Artificial Sequence
  Cyclic GFR-binding peptide
  MOD_RES (27), (27): Xaa is C or S
MSMEGIIKPTKGIMIQITINSLDQSVX

SEQ ID NO: 74853 - protein, 28 aa, Artificial Sequence
  Cyclic GFR-binding peptide
  MOD_RES (1), (1): Xaa is C or S
XSRVIMVTAKKVKPKRGVIKRIQVPRLA

SEQ ID NO: 74854 - protein, 20 aa, Artificial Sequence
  Cyclic GFR-binding peptide
SMEGIIVNSSDDMIQVTINS

SEQ ID NO: 74855 - protein, 24 aa, Artificial Sequence
  Cyclic GFR-binding peptide
MNVQVEKIVNSSDDVKAVKVSRLK

SEQ ID NO: 74856 - protein, 29 aa, Artificial Sequence
  Cyclic GFR-binding peptide
  MOD_RES (27), (27): Xaa is C or S
NVTAKKIVNSSDDIKRVQVPRLKTPAXTP

SEQ ID NO: 74857 - protein, 28 aa, Artificial Sequence
  Cyclic GFR-binding peptide
  MOD_RES (1), (3): Xaa is C or S
XKXSKVVMSMEGIVKPTRGVMIQITINS

SEQ ID NO: 74858 - protein, 28 aa, Artificial Sequence
  Cyclic GFR-binding peptide
  MOD_RES (27), (28): Xaa is C or S
NVTAKKIVNSSDDIKRVQVPRLKTPAXX

SEQ ID NO: 74859 - protein, 37 aa, Artificial Sequence
  Cyclic GFR-binding peptide
  MOD_RES (2), (4): Xaa is C or S
AXAXELHEELRNSLQELKPKKRVYEYYLVTLPEHHVR

SEQ ID NO: 74860 - protein, 21 aa, Artificial Sequence
  Cyclic GFR-binding peptide
VQVEKVVKDYEDVKAMKVSRL

SEQ ID NO: 74861 - protein, 25 aa, Artificial Sequence
  Cyclic GFR-binding peptide
KVVMVTAKKVKPTRGVIKRIQVPRL

SEQ ID NO: 74862 - protein, 27 aa, Artificial Sequence
  Cyclic GFR-binding peptide
  MOD_RES (2), (2): Xaa is C or S
KXSRVIMVTAKKVKPKRGVIKRIQVPR

SEQ ID NO: 74863 - protein, 25 aa, Artificial Sequence
  Cyclic GFR-binding peptide
NVTAKKIVNSSDDIKRVQVPRLKTP

SEQ ID NO: 74864 - protein, 29 aa, Artificial Sequence
  Cyclic GFR-binding peptide
VVMNVQVEKIVNSSDDVKAVKVSRLQTPA

SEQ ID NO: 74865 - protein, 38 aa, Artificial Sequence; identical to SEQ ID NO: 26134
  Cyclic GFR-binding peptide
  MOD_RES (1), (3): Xaa is C or S

SEQ ID NO: 74866 - protein, 30 aa, Artificial Sequence
  Cyclic GFR-binding peptide
  MOD_RES (2), (2): Xaa is C or S
GXGEVVMEVTAKKVVKDYEDIKRMQVPRLE

SEQ ID NO: 74867 - protein, 31 aa, Artificial Sequence
  Cyclic GFR-binding peptide
  MOD_RES (27), (28): Xaa is C or S
MVQVEKIKPTKGIVKAIKVSRLDQSVXXPSA

SEQ ID NO: 74868 - protein, 36 aa, Artificial Sequence
  Cyclic GFR-binding peptide
  MOD_RES (2), (4): Xaa is C or S
EXKXALHDELTNSLQEFIPKKRVIEYYVVPLPELQV

SEQ ID NO: 74869 - protein, 39 aa, Artificial Sequence; identical to SEQ ID NO: 26142
  Cyclic GFR-binding peptide
  MOD_RES (37), (37): Xaa is C or S

SEQ ID NO: 74870 - protein, 31 aa, Artificial Sequence
  Cyclic GFR-binding peptide
  MOD_RES (29), (30): Xaa is C or S
VMNSMEGIIVNSSDDMIQVTINSLKTPAXXP

SEQ ID NO: 74871 - protein, 27 aa, Artificial Sequence
  Cyclic GFR-binding peptide
  MOD_RES (1), (1): Xaa is C or S
XSRVIMVTAKKVKPKRGVIKRIQVPRL

SEQ ID NO: 74872 - protein, 35 aa, Artificial Sequence; identical to SEQ ID NO: 26147
  Cyclic GFR-binding peptide
  MOD_RES (32), (33): Xaa is C or S

SEQ ID NO: 74873 - protein, 32 aa, Artificial Sequence
  Cyclic GFR-binding peptide
  MOD_RES (29), (30): Xaa is C or S
VMDVQVEKVVKENEDVKAMKVSRLETPVXXAK

SEQ ID NO: 74874 - protein, 36 aa, Artificial Sequence; identical to SEQ ID NO: 26148
  Cyclic GFR-binding peptide

SEQ ID NO: 74875 - protein, 29 aa, Artificial Sequence
  Cyclic GFR-binding peptide
  MOD_RES (2), (2): Xaa is C or S
KXSKVIMSMEGIIKPTKGIMIQITINSLD

SEQ ID NO: 74876 - protein, 33 aa, Artificial Sequence
  Cyclic GFR-binding peptide
DELTNSLQEFIPKKRVIEYYLVTLPELQVQTPR

SEQ ID NO: 74877 - protein, 30 aa, Artificial Sequence
  Cyclic GFR-binding peptide
  MOD_RES (2), (2): Xaa is C or S
GXSRVVMNVTAKKIVNSSDDIKRVQVPRLK

SEQ ID NO: 74878 - protein, 38 aa, Artificial Sequence; identical to SEQ ID NO: 26156
  Cyclic GFR-binding peptide
  MOD_RES (1), (3), (34), (35): Xaa is C or S

SEQ ID NO: 74879 - protein, 39 aa, Artificial Sequence; identical to SEQ ID NO: 26157
  Cyclic GFR-binding peptide
  MOD_RES (2), (4), (36), (37): Xaa is C or S

SEQ ID NO: 74880 - protein, 27 aa, Artificial Sequence
  Cyclic GFR-binding peptide
  MOD_RES (26), (27): Xaa is C or S
SMEGIVKPKRGVMIQITINSLAQPVXX

SEQ ID NO: 74881 - protein, 31 aa, Artificial Sequence
  Cyclic GFR-binding peptide
  MOD_RES (1), (1): Xaa is C or S
XSRVVMNVQVEKIVNSSDDVKAVKVSRLKTP

SEQ ID NO: 74882 - protein, 42 aa, Artificial Sequence; identical to SEQ ID NO: 26158
  Cyclic GFR-binding peptide
  MOD_RES (2), (4), (41): Xaa is C or S

SEQ ID NO: 74883 - protein, 34 aa, Artificial Sequence
  Cyclic GFR-binding peptide
  MOD_RES (28), (29): Xaa is C or S
MDVTAKKVVKENEDIKRMQVPRLETPVXXAKPIK

SEQ ID NO: 74884 - protein, 37 aa, Artificial Sequence; identical to SEQ ID NO: 26162
  Cyclic GFR-binding peptide
  MOD_RES (32), (32): Xaa is C or S

SEQ ID NO: 74885 - protein, 30 aa, Artificial Sequence
  Cyclic GFR-binding peptide
TNSLQEFIPKKRVIEYYLVTLPELQVQTPR

SEQ ID NO: 74886 - protein, 27 aa, Artificial Sequence
  Cyclic GFR-binding peptide
  MOD_RES (27), (27): Xaa is C or S
MSMEGIVKPTRGVMIQITINSLDQPVX

SEQ ID NO: 74887 - protein, 33 aa, Artificial Sequence
  Cyclic GFR-binding peptide
  MOD_RES (30), (31): Xaa is C or S
VVMNSMEGIIVNSSDDMIQVTINSLQTPAXXPK

SEQ ID NO: 74888 - protein, 39 aa, Artificial Sequence; identical to SEQ ID NO: 26164
  Cyclic GFR-binding peptide
  MOD_RES (1), (33), (34): Xaa is C or S

SEQ ID NO: 74889 - protein, 26 aa, Artificial Sequence
  Cyclic GFR-binding peptide
MDVTAKKVVKENEDIKRMQVPRLETP

SEQ ID NO: 74890 - protein, 32 aa, Artificial Sequence; identical to SEQ ID NO: 26166
  Cyclic GFR-binding peptide
  MOD_RES (1), (1): Xaa is C or S

SEQ ID NO: 74891 - protein, 30 aa, Artificial Sequence
  Cyclic GFR-binding peptide
  MOD_RES (27), (28): Xaa is C or S
ESMEGIVVKDYEDMIQMTINSLETPVXXAK

SEQ ID NO: 74892 - protein, 39 aa, Artificial Sequence; identical to SEQ ID NO: 26168
  Cyclic GFR-binding peptide
  MOD_RES (1), (33), (34): Xaa is C or S

SEQ ID NO: 74893 - protein, 39 aa, Artificial Sequence; identical to SEQ ID NO: 26169
  Cyclic GFR-binding peptide
  MOD_RES (33), (33): Xaa is C or S

SEQ ID NO: 74894 - protein, 33 aa, Artificial Sequence
  Cyclic GFR-binding peptide
  MOD_RES (28), (29): Xaa is C or S
IMVTAKKIKPTKGIIKRIQVPRLDQSVXXPSAS

SEQ ID NO: 74895 - protein, 34 aa, Artificial Sequence
  Cyclic GFR-binding peptide
  MOD_RES (28), (29): Xaa is C or S
MESMEGIVVKDYEDMIQMTINSLETPVXXAKPIS

SEQ ID NO: 74896 - protein, 36 aa, Artificial Sequence; identical to SEQ ID NO: 26174
  Cyclic GFR-binding peptide
  MOD_RES (2), (34), (35): Xaa is C or S

SEQ ID NO: 74897 - protein, 35 aa, Artificial Sequence
  Cyclic GFR-binding peptide
  MOD_RES (29), (30): Xaa is C or S
VIMVTAKKIKPTKGIIKRIQVPRLDQSVXXPSASA

SEQ ID NO: 74898 - protein, 33 aa, Artificial Sequence
  Cyclic GFR-binding peptide
  MOD_RES (2), (4): Xaa is C or S
RXGXGEVVMDVQVEKVVKENEDVKAMKVSRLET

SEQ ID NO: 74899 - protein, 40 aa, Artificial Sequence; identical to SEQ ID NO: 26182
  Cyclic GFR-binding peptide
  MOD_RES (2), (4), (35), (36): Xaa is C or S

SEQ ID NO: 74900 - protein, 34 aa, Artificial Sequence
  Cyclic GFR-binding peptide
  MOD_RES (2), (2): Xaa is C or S
KXALHDELTNSLQEFIPKKRVIEYYVVPLPELQV

SEQ ID NO: 74901 - protein, 36 aa, Artificial Sequence; identical to SEQ ID NO: 26184
  Cyclic GFR-binding peptide
  MOD_RES (31), (32): Xaa is C or S

SEQ ID NO: 74902 - protein, 32 aa, Artificial Sequence; identical to SEQ ID NO: 26185
  Cyclic GFR-binding peptide
  MOD_RES (31), (32): Xaa is C or S

SEQ ID NO: 74903 - protein, 28 aa, Artificial Sequence
  Cyclic GFR-binding peptide
  MOD_RES (1), (1): Xaa is C or S
XGEVVMESMEGIVVKDYEDMIQMTINSL

SEQ ID NO: 74904 - protein, 25 aa, Artificial Sequence
  Cyclic GFR-binding peptide
EVVMDVQVEKVVKENEDVKAMKVSR

SEQ ID NO: 74905 - protein, 36 aa, Artificial Sequence; identical to SEQ ID NO: 26190
  Cyclic GFR-binding peptide
  MOD_RES (32), (33): Xaa is C or S

SEQ ID NO: 74906 - protein, 29 aa, Artificial Sequence
  Cyclic GFR-binding peptide
VVMNSMEGIIVNSSDDMIQVTINSLKTPA

SEQ ID NO: 74907 - protein, 32 aa, Artificial Sequence
  Cyclic GFR-binding peptide
  MOD_RES (26), (27): Xaa is C or S
SMEGIVKPKRGVMIQITINSLAQPVXXPAASA

SEQ ID NO: 74908 - protein, 42 aa, Artificial Sequence; identical to SEQ ID NO: 26195
  Cyclic GFR-binding peptide
  MOD_RES (1), (38): Xaa is C or S

SEQ ID NO: 74909 - protein, 31 aa, Artificial Sequence
  Cyclic GFR-binding peptide
  MOD_RES (26), (27): Xaa is C or S
SMEGIVVKENEDMIQMTINSLETPVXXAKPI

SEQ ID NO: 74910 - protein, 27 aa, Artificial Sequence
  Cyclic GFR-binding peptide
HQLFNSLQEHQGQHPKIRYYVMPLPEE

SEQ ID NO: 74911 - protein, 37 aa, Artificial Sequence
  Cyclic GFR-binding peptide
  MOD_RES (32), (32): Xaa is C or S
HQLFNSLQEHQGQHPKIRYYLMTLPEEETPVXELGED

SEQ ID NO: 74912 - protein, 30 aa, Artificial Sequence
  Cyclic GFR-binding peptide
  MOD_RES (27), (28): Xaa is C or S
MVQVEKIKPTKGIVKAIKVSRLDQSVXXPS

SEQ ID NO: 74913 - protein, 36 aa, Artificial Sequence
  Cyclic GFR-binding peptide
  MOD_RES (30), (30): Xaa is C or S
VVMNVTAKKIVNSSDDIKRVQVPRLKTPAXTPKTVH

SEQ ID NO: 74914 - protein, 32 aa, Artificial Sequence
  Cyclic GFR-binding peptide
  MOD_RES (30), (31): Xaa is C or S
KVVMVQVEKVKPTRGVVKAIKVSRLDQPVXXP

SEQ ID NO: 74915 - protein, 35 aa, Artificial Sequence; identical to SEQ ID NO: 26200
  Cyclic GFR-binding peptide
  MOD_RES (32), (33): Xaa is C or S

SEQ ID NO: 74916 - protein, 35 aa, Artificial Sequence; identical to SEQ ID NO: 26202
  Cyclic GFR-binding peptide
  MOD_RES (1), (1): Xaa is C or S

SEQ ID NO: 74917 - protein, 31 aa, Artificial Sequence; identical to SEQ ID NO: 26210
  Cyclic GFR-binding peptide
  MOD_RES (31), (31): Xaa is C or S

SEQ ID NO: 74918 - protein, 22 aa, Artificial Sequence
  Cyclic GFR-binding peptide
MNVQVEKIVNSSDDVKAVKVSR

SEQ ID NO: 74919 - protein, 39 aa, Artificial Sequence; identical to SEQ ID NO: 26214
  Cyclic GFR-binding peptide
  MOD_RES (2), (4), (36), (37): Xaa is C or S

SEQ ID NO: 74920 - protein, 28 aa, Artificial Sequence
  Cyclic GFR-binding peptide
VMEVTAKKVVKDYEDIKRMQVPRLETPV

SEQ ID NO: 74921 - protein, 31 aa, Artificial Sequence
  Cyclic GFR-binding peptide
  MOD_RES (27), (28): Xaa is C or S
NVTAKKIVNSSDDIKRVQVPRLKTPAXXPKP

SEQ ID NO: 74922 - protein, 36 aa, Artificial Sequence
  Cyclic GFR-binding peptide
  MOD_RES (32), (32): Xaa is C or S
HQLFNSLQEHQGQHPKIRYYLMTLPEEETPVXELGE

SEQ ID NO: 74923 - protein, 38 aa, Artificial Sequence; identical to SEQ ID NO: 26218
  Cyclic GFR-binding peptide
  MOD_RES (1), (33): Xaa is C or S

SEQ ID NO: 74924 - protein, 41 aa, Artificial Sequence; identical to SEQ ID NO: 26219
  Cyclic GFR-binding peptide
  MOD_RES (2), (4), (35), (36): Xaa is C or S

SEQ ID NO: 74925 - protein, 37 aa, Artificial Sequence; identical to SEQ ID NO: 26220
  Cyclic GFR-binding peptide
  MOD_RES (1), (3), (35), (36): Xaa is C or S

SEQ ID NO: 74926 - protein, 33 aa, Artificial Sequence; identical to SEQ ID NO: 26221
  Cyclic GFR-binding peptide
  MOD_RES (1), (3): Xaa is C or S

SEQ ID NO: 74927 - protein, 35 aa, Artificial Sequence; identical to SEQ ID NO: 26222
  Cyclic GFR-binding peptide
  MOD_RES (35), (35): Xaa is C or S

SEQ ID NO: 74928 - protein, 34 aa, Artificial Sequence
  Cyclic GFR-binding peptide
  MOD_RES (2), (4): Xaa is C or S
RXGXGEVVMDVTAKKVVKENEDIKRMQVPRLETP

SEQ ID NO: 74929 - protein, 33 aa, Artificial Sequence
  Cyclic GFR-binding peptide
  MOD_RES (1), (1): Xaa is C or S
XKNHQLFNSLQEHQGQHPKIRYYLMTLPEEETP

SEQ ID NO: 74930 - protein, 27 aa, Artificial Sequence
  Cyclic GFR-binding peptide
  MOD_RES (1), (1): Xaa is C or S
XSKVVMSMEGIVKPTRGVMIQITINSL

SEQ ID NO: 74931 - protein, 31 aa, Artificial Sequence; identical to SEQ ID NO: 26229
  Cyclic GFR-binding peptide
  MOD_RES (31), (31): Xaa is C or S

SEQ ID NO: 74932 - protein, 25 aa, Artificial Sequence
  Cyclic GFR-binding peptide
RVIMVTAKKVKPKRGVIKRIQVPRL

SEQ ID NO: 74933 - protein, 30 aa, Artificial Sequence
  Cyclic GFR-binding peptide
  MOD_RES (2), (4): Xaa is C or S
RXGXGEVVMDSMEGIVVKENEDMIQMTINS

SEQ ID NO: 74934 - protein, 40 aa, Artificial Sequence; identical to SEQ ID NO: 26237
  Cyclic GFR-binding peptide
  MOD_RES (2), (34), (35): Xaa is C or S

SEQ ID NO: 74935 - protein, 22 aa, Artificial Sequence
  Cyclic GFR-binding peptide
NVQVEKIVNSSDDVKAVKVSRL

SEQ ID NO: 74936 - protein, 37 aa, Artificial Sequence; identical to SEQ ID NO: 26239
  Cyclic GFR-binding peptide
  MOD_RES (1), (33): Xaa is C or S

SEQ ID NO: 74937 - protein, 22 aa, Artificial Sequence
  Cyclic GFR-binding peptide
VQVEKVKPKRGVVKAIKVSRLA

SEQ ID NO: 74938 - protein, 29 aa, Artificial Sequence
  Cyclic GFR-binding peptide
  MOD_RES (28), (28): Xaa is C or S
MNVQVEKIVNSSDDVKAVKVSRLKTPAXT

SEQ ID NO: 74939 - protein, 27 aa, Artificial Sequence
  Cyclic GFR-binding peptide
RNSLQELKPKKRVYEYYLVTLPEHHVR

SEQ ID NO: 74940 - protein, 32 aa, Artificial Sequence
  Cyclic GFR-binding peptide
  MOD_RES (27), (27): Xaa is C or S
NSMEGIIVNSSDDMIQVTINSLKTPAXTPKTV

SEQ ID NO: 74941 - protein, 20 aa, Artificial Sequence
  Cyclic GFR-binding peptide
VTAKKVKPKRGVIKRIQVPR

SEQ ID NO: 74942 - protein, 40 aa, Artificial Sequence; identical to SEQ ID NO: 26247
  Cyclic GFR-binding peptide
  MOD_RES (1), (3), (40): Xaa is C or S

SEQ ID NO: 74943 - protein, 23 aa, Artificial Sequence
  Cyclic GFR-binding peptide
MESMEGIVVKDYEDMIQMTINSL

SEQ ID NO: 74944 - protein, 37 aa, Artificial Sequence; identical to SEQ ID NO: 26248
  Cyclic GFR-binding peptide
  MOD_RES (31), (32): Xaa is C or S

SEQ ID NO: 74945 - protein, 33 aa, Artificial Sequence
  Cyclic GFR-binding peptide
  MOD_RES (30), (31): Xaa is C or S
VVMNVTAKKIVNSSDDIKRVQVPRLKTPAXXPK

SEQ ID NO: 74946 - protein, 26 aa, Artificial Sequence
  Cyclic GFR-binding peptide
SKVIMVQVEKIKPTKGIVKAIKVSRL

SEQ ID NO: 74947 - protein, 26 aa, Artificial Sequence
  Cyclic GFR-binding peptide
VVMDVTAKKVVKENEDIKRMQVPRLE

SEQ ID NO: 74948 - protein, 29 aa, Artificial Sequence
  Cyclic GFR-binding peptide
NSLQELKPKKRVYEYYVVPLPEHHVRSPQ

SEQ ID NO: 74949 - protein, 34 aa, Artificial Sequence
  Cyclic GFR-binding peptide
  MOD_RES (31), (31): Xaa is C or S
TNSLQEFIPKKRVIEYYVVPLPELQVQTPRXQVN

SEQ ID NO: 74950 - protein, 27 aa, Artificial Sequence
  Cyclic GFR-binding peptide
  MOD_RES (26), (27): Xaa is C or S
VTAKKIVNSSDDIKRVQVPRLQTPAXX

SEQ ID NO: 74951 - protein, 32 aa, Artificial Sequence
  Cyclic GFR-binding peptide
  MOD_RES (28), (28): Xaa is C or S
MNVQVEKIVNSSDDVKAVKVSRLKTPAXTPKT

SEQ ID NO: 74952 - protein, 31 aa, Artificial Sequence
  Cyclic GFR-binding peptide
  MOD_RES (29), (30): Xaa is C or S
VVMVQVEKVKPTRGVVKAIKVSRLDQPVXXP

SEQ ID NO: 74953 - protein, 27 aa, Artificial Sequence
  Cyclic GFR-binding peptide
KVVMVTAKKVKPTRGVIKRIQVPRLDQ

SEQ ID NO: 74954 - protein, 38 aa, Artificial Sequence; identical to SEQ ID NO: 26256
  Cyclic GFR-binding peptide
  MOD_RES (2), (36): Xaa is C or S

SEQ ID NO: 74955 - protein, 26 aa, Artificial Sequence
  Cyclic GFR-binding peptide
MVQVEKVKPKRGVVKAIKVSRLAQPV

SEQ ID NO: 74956 - protein, 35 aa, Artificial Sequence
  Cyclic GFR-binding peptide
  MOD_RES (1), (3): Xaa is C or S
XKXALHDELTNSLQEFIPKKRVIEYYVVPLPELQV

SEQ ID NO: 74957 - protein, 39 aa, Artificial Sequence; identical to SEQ ID NO: 26260
  Cyclic GFR-binding peptide
  MOD_RES (1), (3), (34), (35): Xaa is C or S

SEQ ID NO: 74958 - protein, 24 aa, Artificial Sequence
  Cyclic GFR-binding peptide
SMEGIIVNSSDDMIQVTINSLKTP

SEQ ID NO: 74959 - protein, 41 aa, Artificial Sequence; identical to SEQ ID NO: 26261
  Cyclic GFR-binding peptide
  MOD_RES (1), (3), (37): Xaa is C or S

SEQ ID NO: 74960 - protein, 35 aa, Artificial Sequence; identical to SEQ ID NO: 26262
  Cyclic GFR-binding peptide
  MOD_RES (32), (33): Xaa is C or S

SEQ ID NO: 74961 - protein, 36 aa, Artificial Sequence; identical to SEQ ID NO: 26265
  Cyclic GFR-binding peptide
  MOD_RES (2), (36): Xaa is C or S

SEQ ID NO: 74962 - protein, 25 aa, Artificial Sequence
  Cyclic GFR-binding peptide
VIMVQVEKVKPKRGVVKAIKVSRLA

SEQ ID NO: 74963 - protein, 36 aa, Artificial Sequence
  Cyclic GFR-binding peptide
  MOD_RES (2), (4): Xaa is C or S
AXAXELHEELRNSLQELKPKKRVYEYYVVPLPEHHV

SEQ ID NO: 74964 - protein, 21 aa, Artificial Sequence
  Cyclic GFR-binding peptide
DSMEGIVVKENEDMIQMTINS

SEQ ID NO: 74965 - protein, 37 aa, Artificial Sequence; identical to SEQ ID NO: 26271
  Cyclic GFR-binding peptide
  MOD_RES (2), (2): Xaa is C or S

SEQ ID NO: 74966 - protein, 24 aa, Artificial Sequence
  Cyclic GFR-binding peptide
NVTAKKIVNSSDDIKRVQVPRLKT

SEQ ID NO: 74967 - protein, 29 aa, Artificial Sequence
  Cyclic GFR-binding peptide
  MOD_RES (28), (29): Xaa is C or S
MESMEGIVVKDYEDMIQMTINSLETPVXX

SEQ ID NO: 74968 - protein, 28 aa, Artificial Sequence
  Cyclic GFR-binding peptide
SKVIMVTAKKIKPTKGIIKRIQVPRLDQ

SEQ ID NO: 74969 - protein, 38 aa, Artificial Sequence; identical to SEQ ID NO: 26274
  Cyclic GFR-binding peptide
  MOD_RES (1), (3), (35): Xaa is C or S

SEQ ID NO: 74970 - protein, 27 aa, Artificial Sequence
  Cyclic GFR-binding peptide
  MOD_RES (1), (1): Xaa is C or S
XARVVMNSMEGIIVNSSDDMIQVTINS

SEQ ID NO: 74971 - protein, 24 aa, Artificial Sequence
  Cyclic GFR-binding peptide
EVQVEKVVKDYEDVKAMKVSRLET

SEQ ID NO: 74972 - protein, 26 aa, Artificial Sequence
  Cyclic GFR-binding peptide
KVIMSMEGIIKPTKGIMIQITINSLD

SEQ ID NO: 74973 - protein, 32 aa, Artificial Sequence; identical to SEQ ID NO: 26279
  Cyclic GFR-binding peptide

SEQ ID NO: 74974 - protein, 31 aa, Artificial Sequence
  Cyclic GFR-binding peptide
  MOD_RES (28), (29): Xaa is C or S
VMSMEGIVKPTRGVMIQITINSLDQPVXXPS

SEQ ID NO: 74975 - protein, 32 aa, Artificial Sequence; identical to SEQ ID NO: 26282
  Cyclic GFR-binding peptide
  MOD_RES (31), (32): Xaa is C or S

SEQ ID NO: 74976 - protein, 41 aa, Artificial Sequence; identical to SEQ ID NO: 26283
  Cyclic GFR-binding peptide
  MOD_RES (1), (38): Xaa is C or S

SEQ ID NO: 74977 - protein, 33 aa, Artificial Sequence; identical to SEQ ID NO: 26285
  Cyclic GFR-binding peptide
  MOD_RES (32), (33): Xaa is C or S

SEQ ID NO: 74978 - protein, 24 aa, Artificial Sequence
  Cyclic GFR-binding peptide
VVMVTAKKVKPTRGVIKRIQVPRL

SEQ ID NO: 74979 - protein, 31 aa, Artificial Sequence
  Cyclic GFR-binding peptide
ELRNSLQELKPKKRVYEYYLVTLPEHHVRSP

SEQ ID NO: 74980 - protein, 26 aa, Artificial Sequence
  Cyclic GFR-binding peptide
FNSLQEHQGQHPKIRYYVMPLPEEET

SEQ ID NO: 74981 - protein, 38 aa, Artificial Sequence; identical to SEQ ID NO: 26289
  Cyclic GFR-binding peptide
  MOD_RES (1), (32), (33): Xaa is C or S

SEQ ID NO: 74982 - protein, 23 aa, Artificial Sequence
  Cyclic GFR-binding peptide
VMEVQVEKVVKDYEDVKAMKVSR

SEQ ID NO: 74983 - protein, 35 aa, Artificial Sequence; identical to SEQ ID NO: 26291
  Cyclic GFR-binding peptide
  MOD_RES (2), (34), (35): Xaa is C or S

SEQ ID NO: 74984 - protein, 27 aa, Artificial Sequence
  Cyclic GFR-binding peptide
MESMEGIVVKDYEDMIQMTINSLETPV

SEQ ID NO: 74985 - protein, 26 aa, Artificial Sequence
  Cyclic GFR-binding peptide
SRVIMSMEGIVKPKRGVMIQITINSL

SEQ ID NO: 74986 - protein, 32 aa, Artificial Sequence
  Cyclic GFR-binding peptide
  MOD_RES (2), (4): Xaa is C or S
HXGXARVVMNSMEGIIVNSSDDMIQVTINSLQ

SEQ ID NO: 74987 - protein, 33 aa, Artificial Sequence; identical to SEQ ID NO: 26300
  Cyclic GFR-binding peptide
  MOD_RES (32), (33): Xaa is C or S

SEQ ID NO: 74988 - protein, 33 aa, Artificial Sequence; identical to SEQ ID NO: 26302
  Cyclic GFR-binding peptide
  MOD_RES (1), (3): Xaa is C or S

SEQ ID NO: 74989 - protein, 40 aa, Artificial Sequence; identical to SEQ ID NO: 26304
  Cyclic GFR-binding peptide
  MOD_RES (1), (3), (34), (35): Xaa is C or S

SEQ ID NO: 74990 - protein, 26 aa, Artificial Sequence
  Cyclic GFR-binding peptide
MNSMEGIIVNSSDDMIQVTINSLKTP

SEQ ID NO: 74991 - protein, 41 aa, Artificial Sequence; identical to SEQ ID NO: 26305
  Cyclic GFR-binding peptide
  MOD_RES (2), (4), (36), (37): Xaa is C or S

SEQ ID NO: 74992 - protein, 39 aa, Artificial Sequence; identical to SEQ ID NO: 26306
  Cyclic GFR-binding peptide
  MOD_RES (1), (3): Xaa is C or S

SEQ ID NO: 74993 - protein, 35 aa, Artificial Sequence; identical to SEQ ID NO: 26311
  Cyclic GFR-binding peptide
  MOD_RES (35), (35): Xaa is C or S

SEQ ID NO: 74994 - protein, 38 aa, Artificial Sequence; identical to SEQ ID NO: 26312
  Cyclic GFR-binding peptide
  MOD_RES (2), (4), (36), (37): Xaa is C or S

SEQ ID NO: 74995 - protein, 28 aa, Artificial Sequence
  Cyclic GFR-binding peptide
  MOD_RES (1), (3): Xaa is C or S
XKXSRVIMVTAKKVKPKRGVIKRIQVPR

SEQ ID NO: 74996 - protein, 30 aa, Artificial Sequence
  Cyclic GFR-binding peptide
HDELTNSLQEFIPKKRVIEYYVVPLPELQV

SEQ ID NO: 74997 - protein, 22 aa, Artificial Sequence
  Cyclic GFR-binding peptide
EVQVEKVVKDYEDVKAMKVSRL

SEQ ID NO: 74998 - protein, 30 aa, Artificial Sequence
  Cyclic GFR-binding peptide
  MOD_RES (26), (27): Xaa is C or S
VTAKKVKPTRGVIKRIQVPRLDQPVXXPSA

SEQ ID NO: 74999 - protein, 30 aa, Artificial Sequence
  Cyclic GFR-binding peptide
  MOD_RES (1), (3): Xaa is C or S
XGXARVVMNVQVEKIVNSSDDVKAVKVSRL

SEQ ID NO: 75000 - protein, 23 aa, Artificial Sequence
  Cyclic GFR-binding peptide
VIMVTAKKIKPTKGIIKRIQVPR

SEQ ID NO: 75001 - protein, 24 aa, Artificial Sequence
  Cyclic GFR-binding peptide
DVQVEKVVKENEDVKAMKVSRLET

SEQ ID NO: 75002 - protein, 27 aa, Artificial Sequence
  Cyclic GFR-binding peptide
VMNSMEGIIVNSSDDMIQVTINSLKTP

SEQ ID NO: 75003 - protein, 22 aa, Artificial Sequence
  Cyclic GFR-binding peptide
MEVQVEKVVKDYEDVKAMKVSR

SEQ ID NO: 75004 - protein, 38 aa, Artificial Sequence; identical to SEQ ID NO: 26329
  Cyclic GFR-binding peptide
  MOD_RES (2), (33), (34): Xaa is C or S

SEQ ID NO: 75005 - protein, 22 aa, Artificial Sequence
  Cyclic GFR-binding peptide
DVQVEKVVKENEDVKAMKVSRL

SEQ ID NO: 75006 - protein, 31 aa, Artificial Sequence; identical to SEQ ID NO: 26330
  Cyclic GFR-binding peptide
  MOD_RES (31), (31): Xaa is C or S

SEQ ID NO: 75007 - protein, 42 aa, Artificial Sequence; identical to SEQ ID NO: 26336
  Cyclic GFR-binding peptide
  MOD_RES (2), (36): Xaa is C or S

SEQ ID NO: 75008 - protein, 29 aa, Artificial Sequence
  Cyclic GFR-binding peptide
  MOD_RES (28), (29): Xaa is C or S
MNSMEGIIVNSSDDMIQVTINSLKTPAXX

SEQ ID NO: 75009 - protein, 29 aa, Artificial Sequence
  Cyclic GFR-binding peptide
  MOD_RES (1), (3): Xaa is C or S
XGXGEVVMESMEGIVVKDYEDMIQMTINS

SEQ ID NO: 75010 - protein, 30 aa, Artificial Sequence
  Cyclic GFR-binding peptide
  MOD_RES (2), (4): Xaa is C or S
HXGXSRVVMNSMEGIIVNSSDDMIQVTINS

SEQ ID NO: 75011 - protein, 41 aa, Artificial Sequence; identical to SEQ ID NO: 26337
  Cyclic GFR-binding peptide
  MOD_RES (2), (4), (35), (36): Xaa is C or S

SEQ ID NO: 75012 - protein, 38 aa, Artificial Sequence; identical to SEQ ID NO: 26339
  Cyclic GFR-binding peptide
  MOD_RES (2), (4), (36), (37): Xaa is C or S

SEQ ID NO: 75013 - protein, 30 aa, Artificial Sequence
  Cyclic GFR-binding peptide
LHEELRNSLQELKPKKRVYEYYVVPLPEHH

SEQ ID NO: 75014 - protein, 27 aa, Artificial Sequence
  Cyclic GFR-binding peptide
RVIMVQVEKVKPKRGVVKAIKVSRLAQ

SEQ ID NO: 75015 - protein, 40 aa, Artificial Sequence; identical to SEQ ID NO: 26341
  Cyclic GFR-binding peptide
  MOD_RES (2), (36): Xaa is C or S

SEQ ID NO: 75016 - protein, 30 aa, Artificial Sequence
  Cyclic GFR-binding peptide
  MOD_RES (30), (30): Xaa is C or S
VVMNSMEGIIVNSSDDMIQVTINSLQTPAX

SEQ ID NO: 75017 - protein, 27 aa, Artificial Sequence
  Cyclic GFR-binding peptide
  MOD_RES (2), (2): Xaa is C or S
KXSKVIMSMEGIIKPTKGIMIQITINS

SEQ ID NO: 75018 - protein, 32 aa, Artificial Sequence
  Cyclic GFR-binding peptide
  MOD_RES (26), (27): Xaa is C or S
VTAKKIVNSSDDIKRVQVPRLQTPAXXPKPVT

SEQ ID NO: 75019 - protein, 38 aa, Artificial Sequence; identical to SEQ ID NO: 26347
  Cyclic GFR-binding peptide
  MOD_RES (32), (33): Xaa is C or S

SEQ ID NO: 75020 - protein, 34 aa, Artificial Sequence
  Cyclic GFR-binding peptide
  MOD_RES (32), (32): Xaa is C or S
LTNSLQEFIPKKRVIEYYLVTLPELQVQTPRXQV

SEQ ID NO: 75021 - protein, 39 aa, Artificial Sequence; identical to SEQ ID NO: 26352
  Cyclic GFR-binding peptide
  MOD_RES (33), (33): Xaa is C or S

SEQ ID NO: 75022 - protein, 37 aa, Artificial Sequence; identical to SEQ ID NO: 26353
  Cyclic GFR-binding peptide
  MOD_RES (1), (3), (37): Xaa is C or S

SEQ ID NO: 75023 - protein, 31 aa, Artificial Sequence
  Cyclic GFR-binding peptide
  MOD_RES (30), (31): Xaa is C or S
VVMNVTAKKIVNSSDDIKRVQVPRLKTPAXX

SEQ ID NO: 75024 - protein, 28 aa, Artificial Sequence
  Cyclic GFR-binding peptide
GEVVMDSMEGIVVKENEDMIQMTINSLE

SEQ ID NO: 75025 - protein, 33 aa, Artificial Sequence
  Cyclic GFR-binding peptide
  MOD_RES (2), (4): Xaa is C or S
RXGXGEVVMDSMEGIVVKENEDMIQMTINSLET

SEQ ID NO: 75026 - protein, 29 aa, Artificial Sequence
  Cyclic GFR-binding peptide
  MOD_RES (1), (1): Xaa is C or S
XARVVMNVQVEKIVNSSDDVKAVKVSRLQ

SEQ ID NO: 75027 - protein, 40 aa, Artificial Sequence; identical to SEQ ID NO: 26354
  Cyclic GFR-binding peptide
  MOD_RES (2), (4), (35), (36): Xaa is C or S

SEQ ID NO: 75028 - protein, 33 aa, Artificial Sequence; identical to SEQ ID NO: 26355
  Cyclic GFR-binding peptide
  MOD_RES (31), (32): Xaa is C or S

SEQ ID NO: 75029 - protein, 26 aa, Artificial Sequence
  Cyclic GFR-binding peptide
IMSMEGIVKPKRGVMIQITINSLAQP

SEQ ID NO: 75030 - protein, 28 aa, Artificial Sequence
  Cyclic GFR-binding peptide
LTNSLQEFIPKKRVIEYYVVPLPELQVQ

SEQ ID NO: 75031 - protein, 26 aa, Artificial Sequence
  Cyclic GFR-binding peptide
  MOD_RES (26), (26): Xaa is C or S
VTAKKIKPTKGIIKRIQVPRLDQSVX

SEQ ID NO: 75032 - protein, 23 aa, Artificial Sequence
  Cyclic GFR-binding peptide
NSMEGIIVNSSDDMIQVTINSLQ

SEQ ID NO: 75033 - protein, 43 aa, Artificial Sequence; identical to SEQ ID NO: 26361
  Cyclic GFR-binding peptide
  MOD_RES (2), (4), (38): Xaa is C or S

SEQ ID NO: 75034 - protein, 28 aa, Artificial Sequence
  Cyclic GFR-binding peptide
VVMVQVEKVKPTRGVVKAIKVSRLDQPV

SEQ ID NO: 75035 - protein, 36 aa, Artificial Sequence; identical to SEQ ID NO: 26367
  Cyclic GFR-binding peptide
  MOD_RES (2), (34), (35): Xaa is C or S

SEQ ID NO: 75036 - protein, 38 aa, Artificial Sequence; identical to SEQ ID NO: 26372
  Cyclic GFR-binding peptide
  MOD_RES (2), (4), (36), (37): Xaa is C or S

SEQ ID NO: 75037 - protein, 36 aa, Artificial Sequence; identical to SEQ ID NO: 26376
  Cyclic GFR-binding peptide
  MOD_RES (2), (34), (35): Xaa is C or S

SEQ ID NO: 75038 - protein, 33 aa, Artificial Sequence; identical to SEQ ID NO: 26377
  Cyclic GFR-binding peptide
  MOD_RES (31), (32): Xaa is C or S

SEQ ID NO: 75039 - protein, 32 aa, Artificial Sequence; identical to SEQ ID NO: 26378
  Cyclic GFR-binding peptide
  MOD_RES (31), (32): Xaa is C or S

SEQ ID NO: 75040 - protein, 25 aa, Artificial Sequence
  Cyclic GFR-binding peptide
VTAKKIVNSSDDIKRVQVPRLKTPA

SEQ ID NO: 75041 - protein, 39 aa, Artificial Sequence; identical to SEQ ID NO: 26380
  Cyclic GFR-binding peptide
  MOD_RES (2), (36): Xaa is C or S

SEQ ID NO: 75042 - protein, 33 aa, Artificial Sequence
  Cyclic GFR-binding peptide
  MOD_RES (1), (1): Xaa is C or S
XELHEELRNSLQELKPKKRVYEYYVVPLPEHHV

SEQ ID NO: 75043 - protein, 23 aa, Artificial Sequence
  Cyclic GFR-binding peptide
VMESMEGIVVKDYEDMIQMTINS

SEQ ID NO: 75044 - protein, 38 aa, Artificial Sequence; identical to SEQ ID NO: 26384
  Cyclic GFR-binding peptide
  MOD_RES (1), (33), (34): Xaa is C or S

SEQ ID NO: 75045 - protein, 32 aa, Artificial Sequence; identical to SEQ ID NO: 26385
  Cyclic GFR-binding peptide
  MOD_RES (1), (1): Xaa is C or S

SEQ ID NO: 75046 - protein, 31 aa, Artificial Sequence
  Cyclic GFR-binding peptide
  MOD_RES (1), (3): Xaa is C or S
XGXGEVVMDVQVEKVVKENEDVKAMKVSRLE

SEQ ID NO: 75047 - protein, 32 aa, Artificial Sequence
  Cyclic GFR-binding peptide
ALHDELTNSLQEFIPKKRVIEYYVVPLPELQV

SEQ ID NO: 75048 - protein, 31 aa, Artificial Sequence
  Cyclic GFR-binding peptide
  MOD_RES (27), (28): Xaa is C or S
MSMEGIVKPKRGVMIQITINSLAQPVXXPAA

SEQ ID NO: 75049 - protein, 30 aa, Artificial Sequence
  Cyclic GFR-binding peptide
  MOD_RES (30), (30): Xaa is C or S
VVMDVTAKKVVKENEDIKRMQVPRLETPVX

SEQ ID NO: 75050 - protein, 30 aa, Artificial Sequence
  Cyclic GFR-binding peptide
  MOD_RES (27), (28): Xaa is C or S
MSMEGIVKPKRGVMIQITINSLAQPVXXPA

SEQ ID NO: 75051 - protein, 39 aa, Artificial Sequence; identical to SEQ ID NO: 26391
  Cyclic GFR-binding peptide
  MOD_RES (1), (33), (34): Xaa is C or S

SEQ ID NO: 75052 - protein, 33 aa, Artificial Sequence
  Cyclic GFR-binding peptide
  MOD_RES (2), (2): Xaa is C or S
AXELHEELRNSLQELKPKKRVYEYYLVTLPEHH

SEQ ID NO: 75053 - protein, 29 aa, Artificial Sequence
  Cyclic GFR-binding peptide
  MOD_RES (1), (1): Xaa is C or S
XSRVIMVQVEKVKPKRGVVKAIKVSRLAQ

SEQ ID NO: 75054 - protein, 27 aa, Artificial Sequence
  Cyclic GFR-binding peptide
GEVVMEVQVEKVVKDYEDVKAMKVSRL

SEQ ID NO: 75055 - protein, 29 aa, Artificial Sequence
  Cyclic GFR-binding peptide
AAAAAAAAAVTAKKVVKENEDIKRMQVPR

SEQ ID NO: 75056 - protein, 39 aa, Artificial Sequence; identical to SEQ ID NO: 26396
  Cyclic GFR-binding peptide
  MOD_RES (1), (3), (34), (35): Xaa is C or S

SEQ ID NO: 75057 - protein, 41 aa, Artificial Sequence; identical to SEQ ID NO: 26398
  Cyclic GFR-binding peptide
  MOD_RES (1), (3), (35), (36): Xaa is C or S

SEQ ID NO: 75058 - protein, 24 aa, Artificial Sequence
  Cyclic GFR-binding peptide
VIMVQVEKVKPKRGVVKAIKVSRL

SEQ ID NO: 75059 - protein, 26 aa, Artificial Sequence
  Cyclic GFR-binding peptide
RVVMNSMEGIIVNSSDDMIQVTINSL

SEQ ID NO: 75060 - protein, 35 aa, Artificial Sequence
  Cyclic GFR-binding peptide
  MOD_RES (32), (32): Xaa is C or S
HQLFNSLQEHQGQHPKIRYYLMTLPEEETPVXELG

SEQ ID NO: 75061 - protein, 27 aa, Artificial Sequence
  Cyclic GFR-binding peptide
ELRNSLQELKPKKRVYEYYVVPLPEHH

SEQ ID NO: 75062 - protein, 28 aa, Artificial Sequence
  Cyclic GFR-binding peptide
  MOD_RES (26), (27): Xaa is C or S
VQVEKIKPTKGIVKAIKVSRLDQSVXXP

SEQ ID NO: 75063 - protein, 24 aa, Artificial Sequence
  Cyclic GFR-binding peptide
VIMSMEGIVKPKRGVMIQITINSL

SEQ ID NO: 75064 - protein, 35 aa, Artificial Sequence; identical to SEQ ID NO: 26402
  Cyclic GFR-binding peptide
  MOD_RES (1), (3), (35): Xaa is C or S

SEQ ID NO: 75065 - protein, 25 aa, Artificial Sequence
  Cyclic GFR-binding peptide
VMNSMEGIIVNSSDDMIQVTINSLQ

SEQ ID NO: 75066 - protein, 29 aa, Artificial Sequence
  Cyclic GFR-binding peptide
  MOD_RES (28), (29): Xaa is C or S
IMVTAKKVKPKRGVIKRIQVPRLAQPVXX

SEQ ID NO: 75067 - protein, 24 aa, Artificial Sequence
  Cyclic GFR-binding peptide
VTAKKVVKDYEDIKRMQVPRLETP

SEQ ID NO: 75068 - protein, 26 aa, Artificial Sequence
  Cyclic GFR-binding peptide
  MOD_RES (26), (26): Xaa is C or S
VQVEKIVNSSDDVKAVKVSRLKTPAX

SEQ ID NO: 75069 - protein, 26 aa, Artificial Sequence
  Cyclic GFR-binding peptide
MSMEGIIKPTKGIMIQITINSLDQSV

SEQ ID NO: 75070 - protein, 26 aa, Artificial Sequence
  Cyclic GFR-binding peptide
VVMNVTAKKIVNSSDDIKRVQVPRLQ

SEQ ID NO: 75071 - protein, 30 aa, Artificial Sequence
  Cyclic GFR-binding peptide
QLFNSLQEHQGQHPKIRYYLMTLPEEETPV

SEQ ID NO: 75072 - protein, 36 aa, Artificial Sequence; identical to SEQ ID NO: 26407
  Cyclic GFR-binding peptide
  MOD_RES (1), (3), (35), (36): Xaa is C or S

SEQ ID NO: 75073 - protein, 39 aa, Artificial Sequence; identical to SEQ ID NO: 26410
  Cyclic GFR-binding peptide
  MOD_RES (1), (38): Xaa is C or S

SEQ ID NO: 75074 - protein, 44 aa, Artificial Sequence; identical to SEQ ID NO: 26413
  Cyclic GFR-binding peptide
  MOD_RES (2), (4), (41): Xaa is C or S

SEQ ID NO: 75075 - protein, 25 aa, Artificial Sequence
  Cyclic GFR-binding peptide
DVQVEKVVKENEDVKAMKVSRLETP

SEQ ID NO: 75076 - protein, 32 aa, Artificial Sequence; identical to SEQ ID NO: 26415
  Cyclic GFR-binding peptide
  MOD_RES (31), (31): Xaa is C or S

SEQ ID NO: 75077 - protein, 39 aa, Artificial Sequence; identical to SEQ ID NO: 26416
  Cyclic GFR-binding peptide
  MOD_RES (1), (3), (34), (35): Xaa is C or S

SEQ ID NO: 75078 - protein, 27 aa, Artificial Sequence
  Cyclic GFR-binding peptide
VMDVTAKKVVKENEDIKRMQVPRLETP

SEQ ID NO: 75079 - protein, 31 aa, Artificial Sequence
  Cyclic GFR-binding peptide
  MOD_RES (2), (2): Xaa is C or S
KXSKVVMVTAKKVKPTRGVIKRIQVPRLDQP

SEQ ID NO: 75080 - protein, 27 aa, Artificial Sequence
  Cyclic GFR-binding peptide
  MOD_RES (27), (27): Xaa is C or S
MVQVEKVKPKRGVVKAIKVSRLAQPVX

SEQ ID NO: 75081 - protein, 28 aa, Artificial Sequence
  Cyclic GFR-binding peptide
  MOD_RES (28), (28): Xaa is C or S
MDVQVEKVVKENEDVKAMKVSRLETPVX

SEQ ID NO: 75082 - protein, 30 aa, Artificial Sequence
  Cyclic GFR-binding peptide
  MOD_RES (26), (27): Xaa is C or S
VQVEKIVNSSDDVKAVKVSRLQTPAXXPKP

SEQ ID NO: 75083 - protein, 37 aa, Artificial Sequence
  Cyclic GFR-binding peptide
  MOD_RES (33), (33): Xaa is C or S
ELRNSLQELKPKKRVYEYYLVTLPEHHVRSPQXKVSS

SEQ ID NO: 75084 - protein, 33 aa, Artificial Sequence
  Cyclic GFR-binding peptide
  MOD_RES (1), (3): Xaa is C or S
XGXSRVVMNVTAKKIVNSSDDIKRVQVPRLKTP

SEQ ID NO: 75085 - protein, 37 aa, Artificial Sequence; identical to SEQ ID NO: 26425
  Cyclic GFR-binding peptide
  MOD_RES (1), (33), (34): Xaa is C or S

SEQ ID NO: 75086 - protein, 35 aa, Artificial Sequence; identical to SEQ ID NO: 26426
  Cyclic GFR-binding peptide
  MOD_RES (2), (34), (35): Xaa is C or S

SEQ ID NO: 75087 - protein, 32 aa, Artificial Sequence
  Cyclic GFR-binding peptide
  MOD_RES (1), (3): Xaa is C or S
XGXSRVVMNVTAKKIVNSSDDIKRVQVPRLKT

SEQ ID NO: 75088 - protein, 36 aa, Artificial Sequence; identical to SEQ ID NO: 26431
  Cyclic GFR-binding peptide
  MOD_RES (32), (33): Xaa is C or S

SEQ ID NO: 75089 - protein, 38 aa, Artificial Sequence; identical to SEQ ID NO: 26432
  Cyclic GFR-binding peptide
  MOD_RES (1), (3): Xaa is C or S

SEQ ID NO: 75090 - protein, 24 aa, Artificial Sequence
  Cyclic GFR-binding peptide
SMEGIVKPKRGVMIQITINSLAQP

SEQ ID NO: 75091 - protein, 30 aa, Artificial Sequence
  Cyclic GFR-binding peptide
  MOD_RES (26), (27): Xaa is C or S
VQVEKIKPTKGIVKAIKVSRLDQSVXXPSA

SEQ ID NO: 75092 - protein, 30 aa, Artificial Sequence
  Cyclic GFR-binding peptide
  MOD_RES (30), (30): Xaa is C or S
KVVMVQVEKVKPTRGVVKAIKVSRLDQPVX

SEQ ID NO: 75093 - protein, 30 aa, Artificial Sequence
  Cyclic GFR-binding peptide
  MOD_RES (2), (4): Xaa is C or S
HXGXARVVMNVTAKKIVNSSDDIKRVQVPR

SEQ ID NO: 75094 - protein, 36 aa, Artificial Sequence
  Cyclic GFR-binding peptide
  MOD_RES (30), (31): Xaa is C or S
KVIMVTAKKIKPTKGIIKRIQVPRLDQSVXXPSASA

SEQ ID NO: 75095 - protein, 36 aa, Artificial Sequence; identical to SEQ ID NO: 26436
  Cyclic GFR-binding peptide
  MOD_RES (1), (33), (34): Xaa is C or S

SEQ ID NO: 75096 - protein, 34 aa, Artificial Sequence; identical to SEQ ID NO: 26442
  Cyclic GFR-binding peptide
  MOD_RES (34), (34): Xaa is C or S

SEQ ID NO: 75097 - protein, 32 aa, Artificial Sequence; identical to SEQ ID NO: 26443
  Cyclic GFR-binding peptide

SEQ ID NO: 75098 - protein, 30 aa, Artificial Sequence; identical to SEQ ID NO: 26445
  Cyclic GFR-binding peptide

SEQ ID NO: 75099 - protein, 28 aa, Artificial Sequence
  Cyclic GFR-binding peptide
VVMSMEGIVKPTRGVMIQITINSLDQPV

SEQ ID NO: 75100 - protein, 33 aa, Artificial Sequence
  Cyclic GFR-binding peptide
  MOD_RES (31), (31): Xaa is C or S
TNSLQEFIPKKRVIEYYLVTLPELQVQTPRXQV

SEQ ID NO: 75101 - protein, 38 aa, Artificial Sequence; identical to SEQ ID NO: 26450
  Cyclic GFR-binding peptide
  MOD_RES (1), (3), (34), (35): Xaa is C or S

SEQ ID NO: 75102 - protein, 29 aa, Artificial Sequence
  Cyclic GFR-binding peptide
  MOD_RES (2), (2): Xaa is C or S
GXSRVVMNVQVEKIVNSSDDVKAVKVSRL

SEQ ID NO: 75103 - protein, 26 aa, Artificial Sequence
  Cyclic GFR-binding peptide
EVVMEVQVEKVVKDYEDVKAMKVSRL

SEQ ID NO: 75104 - protein, 27 aa, Artificial Sequence
  Cyclic GFR-binding peptide
DELTNSLQEFIPKKRVIEYYLVTLPEL

SEQ ID NO: 75105 - protein, 31 aa, Artificial Sequence
  Cyclic GFR-binding peptide
  MOD_RES (30), (31): Xaa is C or S
VVMNSMEGIIVNSSDDMIQVTINSLQTPAXX

SEQ ID NO: 75106 - protein, 32 aa, Artificial Sequence
  Cyclic GFR-binding peptide
  MOD_RES (27), (28): Xaa is C or S
MSMEGIVKPKRGVMIQITINSLAQPVXXPAAS

SEQ ID NO: 75107 - protein, 31 aa, Artificial Sequence
  Cyclic GFR-binding peptide
  MOD_RES (1), (3): Xaa is C or S
XGXGEVVMEVQVEKVVKDYEDVKAMKVSRLE

SEQ ID NO: 75108 - protein, 24 aa, Artificial Sequence
  Cyclic GFR-binding peptide
MNSMEGIIVNSSDDMIQVTINSLK

SEQ ID NO: 75109 - protein, 24 aa, Artificial Sequence
  Cyclic GFR-binding peptide
KVIMVTAKKIKPTKGIIKRIQVPR

SEQ ID NO: 75110 - protein, 30 aa, Artificial Sequence
  Cyclic GFR-binding peptide
  MOD_RES (30), (30): Xaa is C or S
LFNSLQEHQGQHPKIRYYVMPLPEEETPVX

SEQ ID NO: 75111 - protein, 37 aa, Artificial Sequence; identical to SEQ ID NO: 26453
  Cyclic GFR-binding peptide
  MOD_RES (2), (2): Xaa is C or S

SEQ ID NO: 75112 - protein, 34 aa, Artificial Sequence; identical to SEQ ID NO: 26455
  Cyclic GFR-binding peptide
  MOD_RES (1), (33), (34): Xaa is C or S

SEQ ID NO: 75113 - protein, 31 aa, Artificial Sequence
  Cyclic GFR-binding peptide
  MOD_RES (30), (30): Xaa is C or S
VVMNVQVEKIVNSSDDVKAVKVSRLKTPAXT

SEQ ID NO: 75114 - protein, 31 aa, Artificial Sequence
  Cyclic GFR-binding peptide
LHDELTNSLQEFIPKKRVIEYYVVPLPELQV

SEQ ID NO: 75115 - protein, 36 aa, Artificial Sequence
  Cyclic GFR-binding peptide
  MOD_RES (30), (31): Xaa is C or S
VVMESMEGIVVKDYEDMIQMTINSLETPVXXAKPIS

SEQ ID NO: 75116 - protein, 30 aa, Artificial Sequence
  Cyclic GFR-binding peptide
SRVVMNVTAKKIVNSSDDIKRVQVPRLKTP

SEQ ID NO: 75117 - protein, 38 aa, Artificial Sequence; identical to SEQ ID NO: 26465
  Cyclic GFR-binding peptide
  MOD_RES (2), (2): Xaa is C or S

SEQ ID NO: 75118 - protein, 27 aa, Artificial Sequence
  Cyclic GFR-binding peptide
TNSLQEFIPKKRVIEYYVVPLPELQVQ

SEQ ID NO: 75119 - protein, 35 aa, Artificial Sequence
  Cyclic GFR-binding peptide
  MOD_RES (30), (31): Xaa is C or S
RVIMSMEGIVKPKRGVMIQITINSLAQPVXXPAAS

SEQ ID NO: 75120 - protein, 40 aa, Artificial Sequence; identical to SEQ ID NO: 26473
  Cyclic GFR-binding peptide
  MOD_RES (2), (34): Xaa is C or S

SEQ ID NO: 75121 - protein, 32 aa, Artificial Sequence; identical to SEQ ID NO: 26474
  Cyclic GFR-binding peptide
  MOD_RES (31), (32): Xaa is C or S

SEQ ID NO: 75122 - protein, 39 aa, Artificial Sequence; identical to SEQ ID NO: 26475
  Cyclic GFR-binding peptide
  MOD_RES (2), (39): Xaa is C or S

SEQ ID NO: 75123 - protein, 31 aa, Artificial Sequence
  Cyclic GFR-binding peptide
  MOD_RES (29), (29): Xaa is C or S
VMNVTAKKIVNSSDDIKRVQVPRLKTPAXTP

SEQ ID NO: 75124 - protein, 38 aa, Artificial Sequence; identical to SEQ ID NO: 26481
  Cyclic GFR-binding peptide
  MOD_RES (2), (4), (35), (36): Xaa is C or S

SEQ ID NO: 75125 - protein, 33 aa, Artificial Sequence
  Cyclic GFR-binding peptide
  MOD_RES (28), (29): Xaa is C or S
IMSMEGIVKPKRGVMIQITINSLAQPVXXPAAS

SEQ ID NO: 75126 - protein, 28 aa, Artificial Sequence
  Cyclic GFR-binding peptide
EVVMEVQVEKVVKDYEDVKAMKVSRLET

SEQ ID NO: 75127 - protein, 30 aa, Artificial Sequence
  Cyclic GFR-binding peptide
  MOD_RES (30), (30): Xaa is C or S
RVIMVQVEKVKPKRGVVKAIKVSRLAQPVX

SEQ ID NO: 75128 - protein, 28 aa, Artificial Sequence
  Cyclic GFR-binding peptide
  MOD_RES (27), (28): Xaa is C or S
NSMEGIIVNSSDDMIQVTINSLKTPAXX

SEQ ID NO: 75129 - protein, 30 aa, Artificial Sequence
  Cyclic GFR-binding peptide
DELTNSLQEFIPKKRVIEYYVVPLPELQVQ

SEQ ID NO: 75130 - protein, 33 aa, Artificial Sequence
  Cyclic GFR-binding peptide
  MOD_RES (2), (4): Xaa is C or S
RXGXGEVVMESMEGIVVKDYEDMIQMTINSLET

SEQ ID NO: 75131 - protein, 38 aa, Artificial Sequence; identical to SEQ ID NO: 26484
  Cyclic GFR-binding peptide
  MOD_RES (2), (34), (35): Xaa is C or S

SEQ ID NO: 75132 - protein, 28 aa, Artificial Sequence
  Cyclic GFR-binding peptide
KNHQLFNSLQEHQGQHPKIRYYLMTLPE

SEQ ID NO: 75133 - protein, 29 aa, Artificial Sequence
  Cyclic GFR-binding peptide
  MOD_RES (27), (27): Xaa is C or S
NSMEGIIVNSSDDMIQVTINSLKTPAXTP

SEQ ID NO: 75134 - protein, 29 aa, Artificial Sequence
  Cyclic GFR-binding peptide
  MOD_RES (1), (3): Xaa is C or S
XGXGEVVMDSMEGIVVKENEDMIQMTINS

SEQ ID NO: 75135 - protein, 26 aa, Artificial Sequence
  Cyclic GFR-binding peptide
VVMVTAKKVKPTRGVIKRIQVPRLDQ

SEQ ID NO: 75136 - protein, 35 aa, Artificial Sequence
  Cyclic GFR-binding peptide
  MOD_RES (31), (31): Xaa is C or S
RNSLQELKPKKRVYEYYVVPLPEHHVRSPQXKVSS

SEQ ID NO: 75137 - protein, 29 aa, Artificial Sequence
  Cyclic GFR-binding peptide
  MOD_RES (27), (28): Xaa is C or S
NVTAKKIVNSSDDIKRVQVPRLKTPAXXP

SEQ ID NO: 75138 - protein, 42 aa, Artificial Sequence; identical to SEQ ID NO: 26487
  Cyclic GFR-binding peptide
  MOD_RES (2), (4), (36), (37): Xaa is C or S

SEQ ID NO: 75139 - protein, 43 aa, Artificial Sequence; identical to SEQ ID NO: 26489
  Cyclic GFR-binding peptide
  MOD_RES (2), (4), (41): Xaa is C or S

SEQ ID NO: 75140 - protein, 34 aa, Artificial Sequence; identical to SEQ ID NO: 26490
  Cyclic GFR-binding peptide
  MOD_RES (31), (32): Xaa is C or S

SEQ ID NO: 75141 - protein, 33 aa, Artificial Sequence
  Cyclic GFR-binding peptide
  MOD_RES (27), (28): Xaa is C or S
NVQVEKIVNSSDDVKAVKVSRLQTPAXXPKPVT

SEQ ID NO: 75142 - protein, 33 aa, Artificial Sequence
  Cyclic GFR-binding peptide
  MOD_RES (27), (27): Xaa is C or S
NVQVEKIVNSSDDVKAVKVSRLKTPAXTPKTVH

SEQ ID NO: 75143 - protein, 32 aa, Artificial Sequence
  Cyclic GFR-binding peptide
  MOD_RES (2), (4): Xaa is C or S
HXGXARVVMNVQVEKIVNSSDDVKAVKVSRLQ

SEQ ID NO: 75144 - protein, 28 aa, Artificial Sequence
  Cyclic GFR-binding peptide
  MOD_RES (1), (1): Xaa is C or S
XSRVVMNVTAKKIVNSSDDIKRVQVPRL

SEQ ID NO: 75145 - protein, 33 aa, Artificial Sequence
  Cyclic GFR-binding peptide
  MOD_RES (28), (29): Xaa is C or S
MDVTAKKVVKENEDIKRMQVPRLETPVXXAKPI

SEQ ID NO: 75146 - protein, 37 aa, Artificial Sequence; identical to SEQ ID NO: 26494
  Cyclic GFR-binding peptide
  MOD_RES (1), (33), (34): Xaa is C or S

SEQ ID NO: 75147 - protein, 34 aa, Artificial Sequence; identical to SEQ ID NO: 26495
  Cyclic GFR-binding peptide
  MOD_RES (32), (33): Xaa is C or S

SEQ ID NO: 75148 - protein, 31 aa, Artificial Sequence
  Cyclic GFR-binding peptide
  MOD_RES (1), (3): Xaa is C or S
XGXARVVMNSMEGIIVNSSDDMIQVTINSLQ

SEQ ID NO: 75149 - protein, 32 aa, Artificial Sequence
  Cyclic GFR-binding peptide
ELHEELRNSLQELKPKKRVYEYYLVTLPEHHV

SEQ ID NO: 75150 - protein, 29 aa, Artificial Sequence
  Cyclic GFR-binding peptide
  MOD_RES (1), (1): Xaa is C or S
XKNHQLFNSLQEHQGQHPKIRYYVMPLPE

SEQ ID NO: 75151 - protein, 33 aa, Artificial Sequence; identical to SEQ ID NO: 26500
  Cyclic GFR-binding peptide
  MOD_RES (33), (33): Xaa is C or S

SEQ ID NO: 75152 - protein, 32 aa, Artificial Sequence
  Cyclic GFR-binding peptide
  MOD_RES (31), (31): Xaa is C or S
QLFNSLQEHQGQHPKIRYYVMPLPEEETPVXE

SEQ ID NO: 75153 - protein, 26 aa, Artificial Sequence
  Cyclic GFR-binding peptide
MSMEGIVKPTRGVMIQITINSLDQPV

SEQ ID NO: 75154 - protein, 33 aa, Artificial Sequence; identical to SEQ ID NO: 26502
  Cyclic GFR-binding peptide

SEQ ID NO: 75155 - protein, 26 aa, Artificial Sequence
  Cyclic GFR-binding peptide
  MOD_RES (26), (26): Xaa is C or S
VQVEKVKPKRGVVKAIKVSRLAQPVX

SEQ ID NO: 75156 - protein, 29 aa, Artificial Sequence
  Cyclic GFR-binding peptide
  MOD_RES (1), (1): Xaa is C or S
XSKVIMVQVEKIKPTKGIVKAIKVSRLDQ

SEQ ID NO: 75157 - protein, 27 aa, Artificial Sequence
  Cyclic GFR-binding peptide
  MOD_RES (2), (2): Xaa is C or S
KXSKVVMSMEGIVKPTRGVMIQITINS

SEQ ID NO: 75158 - protein, 39 aa, Artificial Sequence; identical to SEQ ID NO: 26506
  Cyclic GFR-binding peptide
  MOD_RES (1), (3), (35), (36): Xaa is C or S

SEQ ID NO: 75159 - protein, 34 aa, Artificial Sequence; identical to SEQ ID NO: 26508
  Cyclic GFR-binding peptide
  MOD_RES (2), (33), (34): Xaa is C or S

SEQ ID NO: 75160 - protein, 30 aa, Artificial Sequence
  Cyclic GFR-binding peptide
  MOD_RES (1), (1): Xaa is C or S
XSKVIMVTAKKIKPTKGIIKRIQVPRLDQS

SEQ ID NO: 75161 - protein, 31 aa, Artificial Sequence
  Cyclic GFR-binding peptide
  MOD_RES (30), (31): Xaa is C or S
KVIMSMEGIIKPTKGIMIQITINSLDQSVXX

SEQ ID NO: 75162 - protein, 35 aa, Artificial Sequence; identical to SEQ ID NO: 26509
  Cyclic GFR-binding peptide
  MOD_RES (1), (32), (33): Xaa is C or S

SEQ ID NO: 75163 - protein, 37 aa, Artificial Sequence; identical to SEQ ID NO: 26512
  Cyclic GFR-binding peptide
  MOD_RES (1), (33), (34): Xaa is C or S

SEQ ID NO: 75164 - protein, 21 aa, Artificial Sequence
  Cyclic GFR-binding peptide
ESMEGIVVKDYEDMIQMTINS

SEQ ID NO: 75165 - protein, 36 aa, Artificial Sequence; identical to SEQ ID NO: 26516
  Cyclic GFR-binding peptide
  MOD_RES (32), (33): Xaa is C or S

SEQ ID NO: 75166 - protein, 32 aa, Artificial Sequence
  Cyclic GFR-binding peptide
  MOD_RES (30), (31): Xaa is C or S
KVVMVTAKKVKPTRGVIKRIQVPRLDQPVXXP

SEQ ID NO: 75167 - protein, 44 aa, Artificial Sequence; identical to SEQ ID NO: 26518
  Cyclic GFR-binding peptide
  MOD_RES (2), (4), (41): Xaa is C or S

SEQ ID NO: 75168 - protein, 26 aa, Artificial Sequence
  Cyclic GFR-binding peptide
  MOD_RES (26), (26): Xaa is C or S
SMEGIVVKENEDMIQMTINSLETPVX

SEQ ID NO: 75169 - protein, 30 aa, Artificial Sequence
  Cyclic GFR-binding peptide
  MOD_RES (29), (30): Xaa is C or S
VMNVQVEKIVNSSDDVKAVKVSRLQTPAXX

SEQ ID NO: 75170 - protein, 27 aa, Artificial Sequence
  Cyclic GFR-binding peptide
  MOD_RES (27), (27): Xaa is C or S
MVTAKKVKPTRGVIKRIQVPRLDQPVX

SEQ ID NO: 75171 - protein, 32 aa, Artificial Sequence
  Cyclic GFR-binding peptide
ELTNSLQEFIPKKRVIEYYVVPLPELQVQTPR

SEQ ID NO: 75172 - protein, 33 aa, Artificial Sequence
  Cyclic GFR-binding peptide
  MOD_RES (30), (31): Xaa is C or S
RVIMSMEGIVKPKRGVMIQITINSLAQPVXXPA

SEQ ID NO: 75173 - protein, 39 aa, Artificial Sequence; identical to SEQ ID NO: 26527
  Cyclic GFR-binding peptide
  MOD_RES (36), (36): Xaa is C or S

SEQ ID NO: 75174 - protein, 36 aa, Artificial Sequence; identical to SEQ ID NO: 26528
  Cyclic GFR-binding peptide
  MOD_RES (2), (34), (35): Xaa is C or S

SEQ ID NO: 75175 - protein, 34 aa, Artificial Sequence; identical to SEQ ID NO: 26532
  Cyclic GFR-binding peptide
  MOD_RES (31), (32): Xaa is C or S

SEQ ID NO: 75176 - protein, 27 aa, Artificial Sequence
  Cyclic GFR-binding peptide
  MOD_RES (1), (1): Xaa is C or S
XSKVIMSMEGIIKPTKGIMIQITINSL

SEQ ID NO: 75177 - protein, 27 aa, Artificial Sequence
  Cyclic GFR-binding peptide
VMDSMEGIVVKENEDMIQMTINSLETP

SEQ ID NO: 75178 - protein, 32 aa, Artificial Sequence
  Cyclic GFR-binding peptide
  MOD_RES (30), (31): Xaa is C or S
KVIMSMEGIIKPTKGIMIQITINSLDQSVXXP

SEQ ID NO: 75179 - protein, 28 aa, Artificial Sequence
  Cyclic GFR-binding peptide
  MOD_RES (26), (27): Xaa is C or S
VTAKKVKPTRGVIKRIQVPRLDQPVXXP

SEQ ID NO: 75180 - protein, 42 aa, Artificial Sequence; identical to SEQ ID NO: 26537
  Cyclic GFR-binding peptide
  MOD_RES (2), (39): Xaa is C or S

SEQ ID NO: 75181 - protein, 28 aa, Artificial Sequence
  Cyclic GFR-binding peptide
EVVMDVTAKKVVKENEDIKRMQVPRLET

SEQ ID NO: 75182 - protein, 34 aa, Artificial Sequence; identical to SEQ ID NO: 26541
  Cyclic GFR-binding peptide
  MOD_RES (2), (34): Xaa is C or S

SEQ ID NO: 75183 - protein, 26 aa, Artificial Sequence
  Cyclic GFR-binding peptide
RVIMSMEGIVKPKRGVMIQITINSLA

SEQ ID NO: 75184 - protein, 36 aa, Artificial Sequence
  Cyclic GFR-binding peptide
  MOD_RES (31), (31): Xaa is C or S
QLFNSLQEHQGQHPKIRYYVMPLPEEETPVXELGED

SEQ ID NO: 75185 - protein, 34 aa, Artificial Sequence; identical to SEQ ID NO: 26549
  Cyclic GFR-binding peptide
  MOD_RES (1), (3), (34): Xaa is C or S

SEQ ID NO: 75186 - protein, 29 aa, Artificial Sequence
  Cyclic GFR-binding peptide
SKVIMVTAKKIKPTKGIIKRIQVPRLDQS

SEQ ID NO: 75187 - protein, 30 aa, Artificial Sequence
  Cyclic GFR-binding peptide
  MOD_RES (28), (28): Xaa is C or S
MNVQVEKIVNSSDDVKAVKVSRLKTPAXTP

SEQ ID NO: 75188 - protein, 40 aa, Artificial Sequence; identical to SEQ ID NO: 26556
  Cyclic GFR-binding peptide
  MOD_RES (1), (3), (35), (36): Xaa is C or S

SEQ ID NO: 75189 - protein, 30 aa, Artificial Sequence
  Cyclic GFR-binding peptide
  MOD_RES (28), (29): Xaa is C or S
IMSMEGIIKPTKGIMIQITINSLDQSVXXP

SEQ ID NO: 75190 - protein, 22 aa, Artificial Sequence
  Cyclic GFR-binding peptide
VQVEKVVKDYEDVKAMKVSRLE

SEQ ID NO: 75191 - protein, 26 aa, Artificial Sequence
  Cyclic GFR-binding peptide
MSMEGIVKPKRGVMIQITINSLAQPV

SEQ ID NO: 75192 - protein, 34 aa, Artificial Sequence
  Cyclic GFR-binding peptide
  MOD_RES (34), (34): Xaa is C or S
DELTNSLQEFIPKKRVIEYYVVPLPELQVQTPRX

SEQ ID NO: 75193 - protein, 24 aa, Artificial Sequence
  Cyclic GFR-binding peptide
NSLQEFIPKKRVIEYYLVTLPELQ

SEQ ID NO: 75194 - protein, 35 aa, Artificial Sequence; identical to SEQ ID NO: 26567
  Cyclic GFR-binding peptide
  MOD_RES (1), (3), (35): Xaa is C or S

SEQ ID NO: 75195 - protein, 26 aa, Artificial Sequence
  Cyclic GFR-binding peptide
VMDVQVEKVVKENEDVKAMKVSRLET

SEQ ID NO: 75196 - protein, 24 aa, Artificial Sequence
  Cyclic GFR-binding peptide
FNSLQEHQGQHPKIRYYVMPLPEE

SEQ ID NO: 75197 - protein, 35 aa, Artificial Sequence; identical to SEQ ID NO: 26574
  Cyclic GFR-binding peptide
  MOD_RES (2), (34), (35): Xaa is C or S

SEQ ID NO: 75198 - protein, 31 aa, Artificial Sequence
  Cyclic GFR-binding peptide
  MOD_RES (2), (4): Xaa is C or S
RXGXGEVVMDSMEGIVVKENEDMIQMTINSL

SEQ ID NO: 75199 - protein, 32 aa, Artificial Sequence
  Cyclic GFR-binding peptide
  MOD_RES (26), (27): Xaa is C or S
VQVEKVVKENEDVKAMKVSRLETPVXXAKPIK

SEQ ID NO: 75200 - protein, 35 aa, Artificial Sequence; identical to SEQ ID NO: 26578
  Cyclic GFR-binding peptide
  MOD_RES (1), (33): Xaa is C or S

SEQ ID NO: 75201 - protein, 25 aa, Artificial Sequence
  Cyclic GFR-binding peptide
VMNVTAKKIVNSSDDIKRVQVPRLK

SEQ ID NO: 75202 - protein, 24 aa, Artificial Sequence
  Cyclic GFR-binding peptide
VVMSMEGIVKPTRGVMIQITINSL

SEQ ID NO: 75203 - protein, 25 aa, Artificial Sequence
  Cyclic GFR-binding peptide
SKVIMVTAKKIKPTKGIIKRIQVPR

SEQ ID NO: 75204 - protein, 30 aa, Artificial Sequence
  Cyclic GFR-binding peptide
  MOD_RES (2), (2): Xaa is C or S
GXARVVMNVTAKKIVNSSDDIKRVQVPRLQ

SEQ ID NO: 75205 - protein, 22 aa, Artificial Sequence
  Cyclic GFR-binding peptide
MVQVEKVKPTRGVVKAIKVSRL

SEQ ID NO: 75206 - protein, 36 aa, Artificial Sequence
  Cyclic GFR-binding peptide
  MOD_RES (30), (31): Xaa is C or S
RVIMSMEGIVKPKRGVMIQITINSLAQPVXXPAASA

SEQ ID NO: 75207 - protein, 33 aa, Artificial Sequence
  Cyclic GFR-binding peptide
  MOD_RES (29), (30): Xaa is C or S
VMNVTAKKIVNSSDDIKRVQVPRLQTPAXXPKP

SEQ ID NO: 75208 - protein, 33 aa, Artificial Sequence; identical to SEQ ID NO: 26586
  Cyclic GFR-binding peptide
  MOD_RES (1), (33): Xaa is C or S

SEQ ID NO: 75209 - protein, 36 aa, Artificial Sequence; identical to SEQ ID NO: 26591
  Cyclic GFR-binding peptide
  MOD_RES (2), (34), (35): Xaa is C or S

SEQ ID NO: 75210 - protein, 22 aa, Artificial Sequence
  Cyclic GFR-binding peptide
VQVEKVKPTRGVVKAIKVSRLD

SEQ ID NO: 75211 - protein, 33 aa, Artificial Sequence
  Cyclic GFR-binding peptide
  MOD_RES (29), (30): Xaa is C or S
VMNVQVEKIVNSSDDVKAVKVSRLQTPAXXPKP

SEQ ID NO: 75212 - protein, 29 aa, Artificial Sequence
  Cyclic GFR-binding peptide
  MOD_RES (26), (27): Xaa is C or S
VTAKKIVNSSDDIKRVQVPRLKTPAXXPK

SEQ ID NO: 75213 - protein, 33 aa, Artificial Sequence
  Cyclic GFR-binding peptide
  MOD_RES (32), (32): Xaa is C or S
LRNSLQELKPKKRVYEYYLVTLPEHHVRSPQXK

SEQ ID NO: 75214 - protein, 34 aa, Artificial Sequence
  Cyclic GFR-binding peptide
  MOD_RES (28), (29): Xaa is C or S
MEVTAKKVVKDYEDIKRMQVPRLETPVXXAKPIS

SEQ ID NO: 75215 - protein, 37 aa, Artificial Sequence; identical to SEQ ID NO: 26597
  Cyclic GFR-binding peptide
  MOD_RES (2), (34), (35): Xaa is C or S

SEQ ID NO: 75216 - protein, 31 aa, Artificial Sequence
  Cyclic GFR-binding peptide
  MOD_RES (1), (3): Xaa is C or S
XKXSKVVMSMEGIVKPTRGVMIQITINSLDQ

SEQ ID NO: 75217 - protein, 27 aa, Artificial Sequence
  Cyclic GFR-binding peptide
  MOD_RES (26), (27): Xaa is C or S
VTAKKVVKDYEDIKRMQVPRLETPVXX

SEQ ID NO: 75218 - protein, 31 aa, Artificial Sequence
  Cyclic GFR-binding peptide
  MOD_RES (26), (27): Xaa is C or S
SMEGIVVKDYEDMIQMTINSLETPVXXAKPI

SEQ ID NO: 75219 - protein, 41 aa, Artificial Sequence; identical to SEQ ID NO: 26601
  Cyclic GFR-binding peptide
  MOD_RES (2), (4), (36), (37): Xaa is C or S

SEQ ID NO: 75220 - protein, 29 aa, Artificial Sequence
  Cyclic GFR-binding peptide
  MOD_RES (2), (2): Xaa is C or S
KXSKVIMVQVEKIKPTKGIVKAIKVSRLD

SEQ ID NO: 75221 - protein, 27 aa, Artificial Sequence
  Cyclic GFR-binding peptide
  MOD_RES (27), (27): Xaa is C or S
MVTAKKIKPTKGIIKRIQVPRLDQSVX

SEQ ID NO: 75222 - protein, 34 aa, Artificial Sequence
  Cyclic GFR-binding peptide
  MOD_RES (30), (31): Xaa is C or S
VVMESMEGIVVKDYEDMIQMTINSLETPVXXAKP

SEQ ID NO: 75223 - protein, 34 aa, Artificial Sequence
  Cyclic GFR-binding peptide
  MOD_RES (33), (33): Xaa is C or S
ELTNSLQEFIPKKRVIEYYVVPLPELQVQTPRXQ

SEQ ID NO: 75224 - protein, 25 aa, Artificial Sequence
  Cyclic GFR-binding peptide
ELRNSLQELKPKKRVYEYYLVTLPE

SEQ ID NO: 75225 - protein, 32 aa, Artificial Sequence
  Cyclic GFR-binding peptide
  MOD_RES (30), (31): Xaa is C or S
VVMDVTAKKVVKENEDIKRMQVPRLETPVXXA

SEQ ID NO: 75226 - protein, 31 aa, Artificial Sequence
  Cyclic GFR-binding peptide
  MOD_RES (26), (27): Xaa is C or S
SMEGIIKPTKGIMIQITINSLDQSVXXPSAS

SEQ ID NO: 75227 - protein, 32 aa, Artificial Sequence; identical to SEQ ID NO: 26612
  Cyclic GFR-binding peptide
  MOD_RES (1), (1): Xaa is C or S

SEQ ID NO: 75228 - protein, 27 aa, Artificial Sequence
  Cyclic GFR-binding peptide
VMEVQVEKVVKDYEDVKAMKVSRLETP

SEQ ID NO: 75229 - protein, 31 aa, Artificial Sequence
  Cyclic GFR-binding peptide
  MOD_RES (2), (2): Xaa is C or S
GXSRVVMNSMEGIIVNSSDDMIQVTINSLKT

SEQ ID NO: 75230 - protein, 31 aa, Artificial Sequence
  Cyclic GFR-binding peptide
  MOD_RES (2), (2): Xaa is C or S
KXSKVIMSMEGIIKPTKGIMIQITINSLDQS

SEQ ID NO: 75231 - protein, 34 aa, Artificial Sequence; identical to SEQ ID NO: 26616
  Cyclic GFR-binding peptide

SEQ ID NO: 75232 - protein, 24 aa, Artificial Sequence
  Cyclic GFR-binding peptide
VVMEVTAKKVVKDYEDIKRMQVPR

SEQ ID NO: 75233 - protein, 30 aa, Artificial Sequence
  Cyclic GFR-binding peptide
  MOD_RES (1), (3): Xaa is C or S
XGXGEVVMEVQVEKVVKDYEDVKAMKVSRL

SEQ ID NO: 75234 - protein, 32 aa, Artificial Sequence
  Cyclic GFR-binding peptide
  MOD_RES (2), (4): Xaa is C or S
RXGXGEVVMEVTAKKVVKDYEDIKRMQVPRLE

SEQ ID NO: 75235 - protein, 32 aa, Artificial Sequence
  Cyclic GFR-binding peptide
  MOD_RES (29), (30): Xaa is C or S
VMNSMEGIIVNSSDDMIQVTINSLKTPAXXPK

SEQ ID NO: 75236 - protein, 29 aa, Artificial Sequence
  Cyclic GFR-binding peptide
  MOD_RES (2), (2): Xaa is C or S
GXSRVVMNVTAKKIVNSSDDIKRVQVPRL

SEQ ID NO: 75237 - protein, 29 aa, Artificial Sequence
  Cyclic GFR-binding peptide
VVMESMEGIVVKDYEDMIQMTINSLETPV

SEQ ID NO: 75238 - protein, 30 aa, Artificial Sequence
  Cyclic GFR-binding peptide
  MOD_RES (2), (2): Xaa is C or S
GXSRVVMNVQVEKIVNSSDDVKAVKVSRLK

SEQ ID NO: 75239 - protein, 32 aa, Artificial Sequence
  Cyclic GFR-binding peptide
  MOD_RES (1), (3): Xaa is C or S
XKXSKVIMVTAKKIKPTKGIIKRIQVPRLDQS

SEQ ID NO: 75240 - protein, 33 aa, Artificial Sequence; identical to SEQ ID NO: 26620
  Cyclic GFR-binding peptide
  MOD_RES (32), (33): Xaa is C or S

SEQ ID NO: 75241 - protein, 33 aa, Artificial Sequence; identical to SEQ ID NO: 26624
  Cyclic GFR-binding peptide
  MOD_RES (33), (33): Xaa is C or S

SEQ ID NO: 75242 - protein, 31 aa, Artificial Sequence
  Cyclic GFR-binding peptide
  MOD_RES (30), (30): Xaa is C or S
LFNSLQEHQGQHPKIRYYVMPLPEEETPVXE

SEQ ID NO: 75243 - protein, 21 aa, Artificial Sequence
  Cyclic GFR-binding peptide
VQVEKIVNSSDDVKAVKVSRL

SEQ ID NO: 75244 - protein, 34 aa, Artificial Sequence; identical to SEQ ID NO: 26626
  Cyclic GFR-binding peptide
  MOD_RES (31), (32): Xaa is C or S

SEQ ID NO: 75245 - protein, 36 aa, Artificial Sequence; identical to SEQ ID NO: 26625
  Cyclic GFR-binding peptide
  MOD_RES (1), (32), (33): Xaa is C or S

SEQ ID NO: 75246 - protein, 40 aa, Artificial Sequence; identical to SEQ ID NO: 26627
  Cyclic GFR-binding peptide
  MOD_RES (36), (36): Xaa is C or S

SEQ ID NO: 75247 - protein, 30 aa, Artificial Sequence
  Cyclic GFR-binding peptide
  MOD_RES (1), (1): Xaa is C or S
XSRVVMNSMEGIIVNSSDDMIQVTINSLKT

SEQ ID NO: 75248 - protein, 38 aa, Artificial Sequence; identical to SEQ ID NO: 26634
  Cyclic GFR-binding peptide
  MOD_RES (32), (33): Xaa is C or S

SEQ ID NO: 75249 - protein, 27 aa, Artificial Sequence
  Cyclic GFR-binding peptide
  MOD_RES (27), (27): Xaa is C or S
MVQVEKIKPTKGIVKAIKVSRLDQSVX

SEQ ID NO: 75250 - protein, 30 aa, Artificial Sequence
  Cyclic GFR-binding peptide
  MOD_RES (29), (30): Xaa is C or S
VIMSMEGIIKPTKGIMIQITINSLDQSVXX

SEQ ID NO: 75251 - protein, 33 aa, Artificial Sequence
  Cyclic GFR-binding peptide
  MOD_RES (27), (28): Xaa is C or S
MVTAKKVKPTRGVIKRIQVPRLDQPVXXPSASA

SEQ ID NO: 75252 - protein, 34 aa, Artificial Sequence
  Cyclic GFR-binding peptide
  MOD_RES (29), (29): Xaa is C or S
VMNVQVEKIVNSSDDVKAVKVSRLKTPAXTPKTV

SEQ ID NO: 75253 - protein, 34 aa, Artificial Sequence; identical to SEQ ID NO: 26642
  Cyclic GFR-binding peptide
  MOD_RES (1), (33), (34): Xaa is C or S

SEQ ID NO: 75254 - protein, 35 aa, Artificial Sequence
  Cyclic GFR-binding peptide
  MOD_RES (2), (4): Xaa is C or S
EXKXALHDELTNSLQEFIPKKRVIEYYLVTLPELQ

SEQ ID NO: 75255 - protein, 27 aa, Artificial Sequence
  Cyclic GFR-binding peptide
MNVQVEKIVNSSDDVKAVKVSRLKTPA

SEQ ID NO: 75256 - protein, 36 aa, Artificial Sequence
  Cyclic GFR-binding peptide
  MOD_RES (30), (31): Xaa is C or S
VVMNSMEGIIVNSSDDMIQVTINSLQTPAXXPKPVT

SEQ ID NO: 75257 - protein, 33 aa, Artificial Sequence; identical to SEQ ID NO: 26647
  Cyclic GFR-binding peptide
  MOD_RES (1), (3): Xaa is C or S

SEQ ID NO: 75258 - protein, 31 aa, Artificial Sequence
  Cyclic GFR-binding peptide
  MOD_RES (28), (29): Xaa is C or S
VMVQVEKVKPTRGVVKAIKVSRLDQPVXXPS

SEQ ID NO: 75259 - protein, 38 aa, Artificial Sequence; identical to SEQ ID NO: 26650
  Cyclic GFR-binding peptide
  MOD_RES (32), (32): Xaa is C or S

SEQ ID NO: 75260 - protein, 32 aa, Artificial Sequence
  Cyclic GFR-binding peptide
  MOD_RES (2), (4): Xaa is C or S
SXKXSKVVMVTAKKVKPTRGVIKRIQVPRLDQ

SEQ ID NO: 75261 - protein, 36 aa, Artificial Sequence; identical to SEQ ID NO: 26655
  Cyclic GFR-binding peptide
  MOD_RES (1), (3): Xaa is C or S

SEQ ID NO: 75262 - protein, 33 aa, Artificial Sequence
  Cyclic GFR-binding peptide
ALHDELTNSLQEFIPKKRVIEYYLVTLPELQVQ

SEQ ID NO: 75263 - protein, 31 aa, Artificial Sequence
  Cyclic GFR-binding peptide
  MOD_RES (26), (27): Xaa is C or S
SMEGIIVNSSDDMIQVTINSLQTPAXXPKPV

SEQ ID NO: 75264 - protein, 34 aa, Artificial Sequence
  Cyclic GFR-binding peptide
  MOD_RES (33), (33): Xaa is C or S
ELRNSLQELKPKKRVYEYYLVTLPEHHVRSPQXK

SEQ ID NO: 75265 - protein, 32 aa, Artificial Sequence; identical to SEQ ID NO: 26661
  Cyclic GFR-binding peptide
  MOD_RES (1), (32): Xaa is C or S

SEQ ID NO: 75266 - protein, 34 aa, Artificial Sequence; identical to SEQ ID NO: 26662
  Cyclic GFR-binding peptide
  MOD_RES (1), (33): Xaa is C or S

SEQ ID NO: 75267 - protein, 34 aa, Artificial Sequence
  Cyclic GFR-binding peptide
  MOD_RES (29), (30): Xaa is C or S
VIMVTAKKIKPTKGIIKRIQVPRLDQSVXXPSAS

SEQ ID NO: 75268 - protein, 28 aa, Artificial Sequence
  Cyclic GFR-binding peptide
LRNSLQELKPKKRVYEYYLVTLPEHHVR

SEQ ID NO: 75269 - protein, 23 aa, Artificial Sequence
  Cyclic GFR-binding peptide
VQVEKIVNSSDDVKAVKVSRLKT

SEQ ID NO: 75270 - protein, 24 aa, Artificial Sequence
  Cyclic GFR-binding peptide
VMEVTAKKVVKDYEDIKRMQVPRL

SEQ ID NO: 75271 - protein, 26 aa, Artificial Sequence
  Cyclic GFR-binding peptide
VVMNSMEGIIVNSSDDMIQVTINSLK

SEQ ID NO: 75272 - protein, 29 aa, Artificial Sequence
  Cyclic GFR-binding peptide
  MOD_RES (28), (29): Xaa is C or S
MNVTAKKIVNSSDDIKRVQVPRLQTPAXX

SEQ ID NO: 75273 - protein, 40 aa, Artificial Sequence; identical to SEQ ID NO: 26665
  Cyclic GFR-binding peptide
  MOD_RES (2), (34), (35): Xaa is C or S

SEQ ID NO: 75274 - protein, 31 aa, Artificial Sequence; identical to SEQ ID NO: 26666
  Cyclic GFR-binding peptide
  MOD_RES (31), (31): Xaa is C or S

SEQ ID NO: 75275 - protein, 28 aa, Artificial Sequence
  Cyclic GFR-binding peptide
VMESMEGIVVKDYEDMIQMTINSLETPV

SEQ ID NO: 75276 - protein, 28 aa, Artificial Sequence
  Cyclic GFR-binding peptide
  MOD_RES (2), (2): Xaa is C or S
KXSKVVMVTAKKVKPTRGVIKRIQVPRL

SEQ ID NO: 75277 - protein, 33 aa, Artificial Sequence
  Cyclic GFR-binding peptide
  MOD_RES (1), (3): Xaa is C or S
XGXGEVVMDVTAKKVVKENEDIKRMQVPRLETP

SEQ ID NO: 75278 - protein, 33 aa, Artificial Sequence
  Cyclic GFR-binding peptide
  MOD_RES (29), (30): Xaa is C or S
VMNSMEGIIVNSSDDMIQVTINSLQTPAXXPKP

SEQ ID NO: 75279 - protein, 36 aa, Artificial Sequence
  Cyclic GFR-binding peptide
  MOD_RES (30), (31): Xaa is C or S
VVMNSMEGIIVNSSDDMIQVTINSLKTPAXXPKPVY

SEQ ID NO: 75280 - protein, 27 aa, Artificial Sequence
  Cyclic GFR-binding peptide
  MOD_RES (1), (1): Xaa is C or S
XGEVVMEVTAKKVVKDYEDIKRMQVPR

SEQ ID NO: 75281 - protein, 28 aa, Artificial Sequence
  Cyclic GFR-binding peptide
VVMDVTAKKVVKENEDIKRMQVPRLETP

SEQ ID NO: 75282 - protein, 37 aa, Artificial Sequence; identical to SEQ ID NO: 26674
  Cyclic GFR-binding peptide
  MOD_RES (2), (4), (36), (37): Xaa is C or S

SEQ ID NO: 75283 - protein, 30 aa, Artificial Sequence
  Cyclic GFR-binding peptide
  MOD_RES (1), (1): Xaa is C or S
XELHEELRNSLQELKPKKRVYEYYVVPLPE

SEQ ID NO: 75284 - protein, 27 aa, Artificial Sequence
  Cyclic GFR-binding peptide
  MOD_RES (26), (27): Xaa is C or S
SMEGIIVNSSDDMIQVTINSLQTPAXX

SEQ ID NO: 75285 - protein, 28 aa, Artificial Sequence
  Cyclic GFR-binding peptide
  MOD_RES (2), (2): Xaa is C or S
GXARVVMNVTAKKIVNSSDDIKRVQVPR

SEQ ID NO: 75286 - protein, 41 aa, Artificial Sequence; identical to SEQ ID NO: 26682
  Cyclic GFR-binding peptide
  MOD_RES (2), (4), (36), (37): Xaa is C or S

SEQ ID NO: 75287 - protein, 24 aa, Artificial Sequence
  Cyclic GFR-binding peptide
SMEGIVVKENEDMIQMTINSLETP

SEQ ID NO: 75288 - protein, 34 aa, Artificial Sequence; identical to SEQ ID NO: 26684
  Cyclic GFR-binding peptide
  MOD_RES (1), (33): Xaa is C or S

SEQ ID NO: 75289 - protein, 25 aa, Artificial Sequence
  Cyclic GFR-binding peptide
VQVEKIKPTKGIVKAIKVSRLDQSV

SEQ ID NO: 75290 - protein, 33 aa, Artificial Sequence
  Cyclic GFR-binding peptide
  MOD_RES (32), (32): Xaa is C or S
LTNSLQEFIPKKRVIEYYVVPLPELQVQTPRXQ

SEQ ID NO: 75291 - protein, 25 aa, Artificial Sequence
  Cyclic GFR-binding peptide
VIMSMEGIIKPTKGIMIQITINSLD

SEQ ID NO: 75292 - protein, 21 aa, Artificial Sequence
  Cyclic GFR-binding peptide
VTAKKIKPTKGIIKRIQVPRL

SEQ ID NO: 75293 - protein, 39 aa, Artificial Sequence; identical to SEQ ID NO: 26689
  Cyclic GFR-binding peptide
  MOD_RES (35), (35): Xaa is C or S

SEQ ID NO: 75294 - protein, 31 aa, Artificial Sequence
  Cyclic GFR-binding peptide
  MOD_RES (29), (30): Xaa is C or S
VVMSMEGIVKPTRGVMIQITINSLDQPVXXP

SEQ ID NO: 75295 - protein, 27 aa, Artificial Sequence
  Cyclic GFR-binding peptide
VMESMEGIVVKDYEDMIQMTINSLETP

SEQ ID NO: 75296 - protein, 27 aa, Artificial Sequence
  Cyclic GFR-binding peptide
  MOD_RES (27), (27): Xaa is C or S
NSMEGIIVNSSDDMIQVTINSLQTPAX

SEQ ID NO: 75297 - protein, 29 aa, Artificial Sequence
  Cyclic GFR-binding peptide
  MOD_RES (1), (1): Xaa is C or S
XARVVMNVTAKKIVNSSDDIKRVQVPRLQ

SEQ ID NO: 75298 - protein, 33 aa, Artificial Sequence
  Cyclic GFR-binding peptide
  MOD_RES (2), (2): Xaa is C or S
EXKNHQLFNSLQEHQGQHPKIRYYVMPLPEEET

SEQ ID NO: 75299 - protein, 26 aa, Artificial Sequence
  Cyclic GFR-binding peptide
SKVVMVTAKKVKPTRGVIKRIQVPRL

SEQ ID NO: 75300 - protein, 31 aa, Artificial Sequence
  Cyclic GFR-binding peptide
  MOD_RES (30), (31): Xaa is C or S
VVMNVQVEKIVNSSDDVKAVKVSRLKTPAXX

SEQ ID NO: 75301 - protein, 34 aa, Artificial Sequence; identical to SEQ ID NO: 26696
  Cyclic GFR-binding peptide
  MOD_RES (2), (33), (34): Xaa is C or S

SEQ ID NO: 75302 - protein, 27 aa, Artificial Sequence
  Cyclic GFR-binding peptide
MNSMEGIIVNSSDDMIQVTINSLKTPA

SEQ ID NO: 75303 - protein, 29 aa, Artificial Sequence
  Cyclic GFR-binding peptide
  MOD_RES (2), (2): Xaa is C or S
GXARVVMNSMEGIIVNSSDDMIQVTINSL

SEQ ID NO: 75304 - protein, 32 aa, Artificial Sequence
  Cyclic GFR-binding peptide
  MOD_RES (1), (3): Xaa is C or S
XEXKNHQLFNSLQEHQGQHPKIRYYVMPLPEE

SEQ ID NO: 75305 - protein, 25 aa, Artificial Sequence
  Cyclic GFR-binding peptide
VIMSMEGIVKPKRGVMIQITINSLA

SEQ ID NO: 75306 - protein, 27 aa, Artificial Sequence
  Cyclic GFR-binding peptide
  MOD_RES (1), (1): Xaa is C or S
XSRVVMNSMEGIIVNSSDDMIQVTINS

SEQ ID NO: 75307 - protein, 29 aa, Artificial Sequence
  Cyclic GFR-binding peptide
  MOD_RES (1), (3): Xaa is C or S
XKXSRVIMVQVEKVKPKRGVVKAIKVSRL

SEQ ID NO: 75308 - protein, 37 aa, Artificial Sequence; identical to SEQ ID NO: 26697
  Cyclic GFR-binding peptide
  MOD_RES (31), (32): Xaa is C or S

SEQ ID NO: 75309 - protein, 34 aa, Artificial Sequence
  Cyclic GFR-binding peptide
  MOD_RES (30), (30): Xaa is C or S
VVMNSMEGIIVNSSDDMIQVTINSLKTPAXTPKT

SEQ ID NO: 75310 - protein, 40 aa, Artificial Sequence; identical to SEQ ID NO: 26699
  Cyclic GFR-binding peptide
  MOD_RES (2), (4), (36), (37): Xaa is C or S

SEQ ID NO: 75311 - protein, 34 aa, Artificial Sequence
  Cyclic GFR-binding peptide
  MOD_RES (29), (29): Xaa is C or S
VMNSMEGIIVNSSDDMIQVTINSLKTPAXTPKTV

SEQ ID NO: 75312 - protein, 37 aa, Artificial Sequence; identical to SEQ ID NO: 26702
  Cyclic GFR-binding peptide
  MOD_RES (1), (3), (35), (36): Xaa is C or S

SEQ ID NO: 75313 - protein, 25 aa, Artificial Sequence
  Cyclic GFR-binding peptide
VVMDVQVEKVVKENEDVKAMKVSRL

SEQ ID NO: 75314 - protein, 34 aa, Artificial Sequence
  Cyclic GFR-binding peptide
  MOD_RES (30), (30): Xaa is C or S
NSLQEFIPKKRVIEYYVVPLPELQVQTPRXQVNR

SEQ ID NO: 75315 - protein, 38 aa, Artificial Sequence; identical to SEQ ID NO: 26709
  Cyclic GFR-binding peptide
  MOD_RES (32), (33): Xaa is C or S

SEQ ID NO: 75316 - protein, 33 aa, Artificial Sequence; identical to SEQ ID NO: 26710
  Cyclic GFR-binding peptide
  MOD_RES (31), (31): Xaa is C or S

SEQ ID NO: 75317 - protein, 24 aa, Artificial Sequence
  Cyclic GFR-binding peptide
VVMNSMEGIIVNSSDDMIQVTINS

SEQ ID NO: 75318 - protein, 31 aa, Artificial Sequence
  Cyclic GFR-binding peptide
  MOD_RES (27), (28): Xaa is C or S
MVTAKKVKPKRGVIKRIQVPRLAQPVXXPAA

SEQ ID NO: 75319 - protein, 33 aa, Artificial Sequence; identical to SEQ ID NO: 26714
  Cyclic GFR-binding peptide
  MOD_RES (2), (33): Xaa is C or S

SEQ ID NO: 75320 - protein, 40 aa, Artificial Sequence; identical to SEQ ID NO: 26715
  Cyclic GFR-binding peptide
  MOD_RES (2), (4), (36), (37): Xaa is C or S

SEQ ID NO: 75321 - protein, 25 aa, Artificial Sequence
  Cyclic GFR-binding peptide
VIMVTAKKIKPTKGIIKRIQVPRLD

SEQ ID NO: 75322 - protein, 39 aa, Artificial Sequence; identical to SEQ ID NO: 26716
  Cyclic GFR-binding peptide
  MOD_RES (2), (4), (35), (36): Xaa is C or S

SEQ ID NO: 75323 - protein, 39 aa, Artificial Sequence; identical to SEQ ID NO: 26717
  Cyclic GFR-binding peptide
  MOD_RES (1), (3): Xaa is C or S

SEQ ID NO: 75324 - protein, 27 aa, Artificial Sequence
  Cyclic GFR-binding peptide
  MOD_RES (1), (1): Xaa is C or S
XGEVVMEVQVEKVVKDYEDVKAMKVSR

SEQ ID NO: 75325 - protein, 43 aa, Artificial Sequence; identical to SEQ ID NO: 26719
  Cyclic GFR-binding peptide
  MOD_RES (2), (4), (38): Xaa is C or S

SEQ ID NO: 75326 - protein, 25 aa, Artificial Sequence
  Cyclic GFR-binding peptide
SMEGIIVNSSDDMIQVTINSLKTPA

SEQ ID NO: 75327 - protein, 34 aa, Artificial Sequence
  Cyclic GFR-binding peptide
  MOD_RES (2), (4): Xaa is C or S
AXAXELHEELRNSLQELKPKKRVYEYYLVTLPEH

SEQ ID NO: 75328 - protein, 27 aa, Artificial Sequence
  Cyclic GFR-binding peptide
SRVIMVQVEKVKPKRGVVKAIKVSRLA

SEQ ID NO: 75329 - protein, 38 aa, Artificial Sequence; identical to SEQ ID NO: 26727
  Cyclic GFR-binding peptide
  MOD_RES (37), (37): Xaa is C or S

SEQ ID NO: 75330 - protein, 33 aa, Artificial Sequence; identical to SEQ ID NO: 26729
  Cyclic GFR-binding peptide
  MOD_RES (1), (33): Xaa is C or S

SEQ ID NO: 75331 - protein, 30 aa, Artificial Sequence
  Cyclic GFR-binding peptide
  MOD_RES (27), (28): Xaa is C or S
NVQVEKIVNSSDDVKAVKVSRLQTPAXXPK

SEQ ID NO: 75332 - protein, 29 aa, Artificial Sequence
  Cyclic GFR-binding peptide
RVIMVTAKKVKPKRGVIKRIQVPRLAQPV

SEQ ID NO: 75333 - protein, 32 aa, Artificial Sequence
  Cyclic GFR-binding peptide
  MOD_RES (28), (28): Xaa is C or S
MNSMEGIIVNSSDDMIQVTINSLKTPAXTPKT

SEQ ID NO: 75334 - protein, 26 aa, Artificial Sequence
  Cyclic GFR-binding peptide
  MOD_RES (26), (26): Xaa is C or S
VQVEKVKPTRGVVKAIKVSRLDQPVX

SEQ ID NO: 75335 - protein, 33 aa, Artificial Sequence
  Cyclic GFR-binding peptide
  MOD_RES (28), (29): Xaa is C or S
IMSMEGIIKPTKGIMIQITINSLDQSVXXPSAS

SEQ ID NO: 75336 - protein, 31 aa, Artificial Sequence
  Cyclic GFR-binding peptide
  MOD_RES (29), (30): Xaa is C or S
VIMVTAKKVKPKRGVIKRIQVPRLAQPVXXP

SEQ ID NO: 75337 - protein, 35 aa, Artificial Sequence; identical to SEQ ID NO: 26745
  Cyclic GFR-binding peptide
  MOD_RES (32), (33): Xaa is C or S

SEQ ID NO: 75338 - protein, 41 aa, Artificial Sequence; identical to SEQ ID NO: 26747
  Cyclic GFR-binding peptide
  MOD_RES (1), (38): Xaa is C or S

SEQ ID NO: 75339 - protein, 38 aa, Artificial Sequence; identical to SEQ ID NO: 26748
  Cyclic GFR-binding peptide
  MOD_RES (1), (33), (34): Xaa is C or S

SEQ ID NO: 75340 - protein, 36 aa, Artificial Sequence; identical to SEQ ID NO: 26751
  Cyclic GFR-binding peptide
  MOD_RES (1), (3): Xaa is C or S

SEQ ID NO: 75341 - protein, 32 aa, Artificial Sequence
  Cyclic GFR-binding peptide
  MOD_RES (32), (32): Xaa is C or S
HQLFNSLQEHQGQHPKIRYYVMPLPEEETPVX

SEQ ID NO: 75342 - protein, 26 aa, Artificial Sequence
  Cyclic GFR-binding peptide
MVTAKKIKPTKGIIKRIQVPRLDQSV

SEQ ID NO: 75343 - protein, 28 aa, Artificial Sequence
  Cyclic GFR-binding peptide
VMNVQVEKIVNSSDDVKAVKVSRLQTPA

SEQ ID NO: 75344 - protein, 29 aa, Artificial Sequence
  Cyclic GFR-binding peptide
  MOD_RES (29), (29): Xaa is C or S
VMNVTAKKIVNSSDDIKRVQVPRLKTPAX

SEQ ID NO: 75345 - protein, 40 aa, Artificial Sequence; identical to SEQ ID NO: 26759
  Cyclic GFR-binding peptide
  MOD_RES (2), (34), (35): Xaa is C or S

SEQ ID NO: 75346 - protein, 24 aa, Artificial Sequence
  Cyclic GFR-binding peptide
VVMDVTAKKVVKENEDIKRMQVPR

SEQ ID NO: 75347 - protein, 29 aa, Artificial Sequence
  Cyclic GFR-binding peptide
  MOD_RES (28), (29): Xaa is C or S
MNVTAKKIVNSSDDIKRVQVPRLKTPAXX

SEQ ID NO: 75348 - protein, 28 aa, Artificial Sequence
  Cyclic GFR-binding peptide
  MOD_RES (1), (3): Xaa is C or S
XKXSRVIMVQVEKVKPKRGVVKAIKVSR

SEQ ID NO: 75349 - protein, 29 aa, Artificial Sequence
  Cyclic GFR-binding peptide
ELHEELRNSLQELKPKKRVYEYYVVPLPE

SEQ ID NO: 75350 - protein, 25 aa, Artificial Sequence
  Cyclic GFR-binding peptide
EVVMEVTAKKVVKDYEDIKRMQVPR

SEQ ID NO: 75351 - protein, 32 aa, Artificial Sequence
  Cyclic GFR-binding peptide
  MOD_RES (30), (31): Xaa is C or S
VVMDVQVEKVVKENEDVKAMKVSRLETPVXXA

SEQ ID NO: 75352 - protein, 27 aa, Artificial Sequence
  Cyclic GFR-binding peptide
VMVTAKKVKPTRGVIKRIQVPRLDQPV

SEQ ID NO: 75353 - protein, 36 aa, Artificial Sequence
  Cyclic GFR-binding peptide
  MOD_RES (34), (34): Xaa is C or S
DELTNSLQEFIPKKRVIEYYVVPLPELQVQTPRXQV

SEQ ID NO: 75354 - protein, 31 aa, Artificial Sequence
  Cyclic GFR-binding peptide
  MOD_RES (2), (2): Xaa is C or S
GXGEVVMEVTAKKVVKDYEDIKRMQVPRLET

SEQ ID NO: 75355 - protein, 30 aa, Artificial Sequence
  Cyclic GFR-binding peptide
  MOD_RES (29), (30): Xaa is C or S
VMNSMEGIIVNSSDDMIQVTINSLQTPAXX

SEQ ID NO: 75356 - protein, 32 aa, Artificial Sequence; identical to SEQ ID NO: 26772
  Cyclic GFR-binding peptide
  MOD_RES (31), (32): Xaa is C or S

SEQ ID NO: 75357 - protein, 27 aa, Artificial Sequence
  Cyclic GFR-binding peptide
LFNSLQEHQGQHPKIRYYVMPLPEEET

SEQ ID NO: 75358 - protein, 31 aa, Artificial Sequence; identical to SEQ ID NO: 26774
  Cyclic GFR-binding peptide
  MOD_RES (31), (31): Xaa is C or S

SEQ ID NO: 75359 - protein, 36 aa, Artificial Sequence; identical to SEQ ID NO: 26775
  Cyclic GFR-binding peptide
  MOD_RES (1), (33), (34): Xaa is C or S

SEQ ID NO: 75360 - protein, 25 aa, Artificial Sequence
  Cyclic GFR-binding peptide
VIMVQVEKIKPTKGIVKAIKVSRLD

SEQ ID NO: 75361 - protein, 28 aa, Artificial Sequence
  Cyclic GFR-binding peptide
FNSLQEHQGQHPKIRYYLMTLPEEETPV

SEQ ID NO: 75362 - protein, 24 aa, Artificial Sequence
  Cyclic GFR-binding peptide
DSMEGIVVKENEDMIQMTINSLET

SEQ ID NO: 75363 - protein, 26 aa, Artificial Sequence
  Cyclic GFR-binding peptide
  MOD_RES (26), (26): Xaa is C or S
VTAKKVVKENEDIKRMQVPRLETPVX

SEQ ID NO: 75364 - protein, 37 aa, Artificial Sequence; identical to SEQ ID NO: 26778
  Cyclic GFR-binding peptide
  MOD_RES (2), (34), (35): Xaa is C or S

SEQ ID NO: 75365 - protein, 32 aa, Artificial Sequence
  Cyclic GFR-binding peptide
  MOD_RES (27), (28): Xaa is C or S
MVTAKKVKPKRGVIKRIQVPRLAQPVXXPAAS

SEQ ID NO: 75366 - protein, 31 aa, Artificial Sequence
  Cyclic GFR-binding peptide
  MOD_RES (26), (27): Xaa is C or S
VTAKKIKPTKGIIKRIQVPRLDQSVXXPSAS

SEQ ID NO: 75367 - protein, 41 aa, Artificial Sequence; identical to SEQ ID NO: 26781
  Cyclic GFR-binding peptide
  MOD_RES (1), (3), (35): Xaa is C or S

SEQ ID NO: 75368 - protein, 33 aa, Artificial Sequence
  Cyclic GFR-binding peptide
  MOD_RES (2), (4): Xaa is C or S
SXKXSKVVMVQVEKVKPTRGVVKAIKVSRLDQP

SEQ ID NO: 75369 - protein, 37 aa, Artificial Sequence; identical to SEQ ID NO: 26782
  Cyclic GFR-binding peptide
  MOD_RES (1), (3), (35), (36): Xaa is C or S

SEQ ID NO: 75370 - protein, 36 aa, Artificial Sequence; identical to SEQ ID NO: 26784
  Cyclic GFR-binding peptide
  MOD_RES (2), (33), (34): Xaa is C or S

SEQ ID NO: 75371 - protein, 31 aa, Artificial Sequence
  Cyclic GFR-binding peptide
  MOD_RES (28), (29): Xaa is C or S
VMVTAKKVKPTRGVIKRIQVPRLDQPVXXPS

SEQ ID NO: 75372 - protein, 27 aa, Artificial Sequence
  Cyclic GFR-binding peptide
  MOD_RES (27), (27): Xaa is C or S
MSMEGIVKPKRGVMIQITINSLAQPVX

SEQ ID NO: 75373 - protein, 27 aa, Artificial Sequence
  Cyclic GFR-binding peptide
RVVMNVTAKKIVNSSDDIKRVQVPRLQ

SEQ ID NO: 75374 - protein, 28 aa, Artificial Sequence
  Cyclic GFR-binding peptide
  MOD_RES (27), (28): Xaa is C or S
MSMEGIVKPKRGVMIQITINSLAQPVXX

SEQ ID NO: 75375 - protein, 29 aa, Artificial Sequence
  Cyclic GFR-binding peptide
  MOD_RES (1), (3): Xaa is C or S
XKXSRVIMVTAKKVKPKRGVIKRIQVPRL

SEQ ID NO: 75376 - protein, 35 aa, Artificial Sequence; identical to SEQ ID NO: 26793
  Cyclic GFR-binding peptide
  MOD_RES (32), (33): Xaa is C or S

SEQ ID NO: 75377 - protein, 26 aa, Artificial Sequence
  Cyclic GFR-binding peptide
EELRNSLQELKPKKRVYEYYVVPLPE

SEQ ID NO: 75378 - protein, 37 aa, Artificial Sequence; identical to SEQ ID NO: 26800
  Cyclic GFR-binding peptide
  MOD_RES (31), (32): Xaa is C or S

SEQ ID NO: 75379 - protein, 26 aa, Artificial Sequence
  Cyclic GFR-binding peptide
VMSMEGIVKPTRGVMIQITINSLDQP

SEQ ID NO: 75380 - protein, 31 aa, Artificial Sequence
  Cyclic GFR-binding peptide
  MOD_RES (28), (29): Xaa is C or S
MNSMEGIIVNSSDDMIQVTINSLQTPAXXPK

SEQ ID NO: 75381 - protein, 37 aa, Artificial Sequence
  Cyclic GFR-binding peptide
  MOD_RES (33), (33): Xaa is C or S
ELTNSLQEFIPKKRVIEYYVVPLPELQVQTPRXQVNR

SEQ ID NO: 75382 - protein, 40 aa, Artificial Sequence; identical to SEQ ID NO: 26804
  Cyclic GFR-binding peptide
  MOD_RES (2), (4): Xaa is C or S

SEQ ID NO: 75383 - protein, 33 aa, Artificial Sequence
  Cyclic GFR-binding peptide
  MOD_RES (31), (31): Xaa is C or S
QLFNSLQEHQGQHPKIRYYVMPLPEEETPVXEL

SEQ ID NO: 75384 - protein, 40 aa, Artificial Sequence; identical to SEQ ID NO: 26810
  Cyclic GFR-binding peptide
  MOD_RES (2), (4), (38): Xaa is C or S

SEQ ID NO: 75385 - protein, 24 aa, Artificial Sequence
  Cyclic GFR-binding peptide
VVMVQVEKVKPTRGVVKAIKVSRL

SEQ ID NO: 75386 - protein, 29 aa, Artificial Sequence
  Cyclic GFR-binding peptide
  MOD_RES (28), (29): Xaa is C or S
VMSMEGIVKPTRGVMIQITINSLDQPVXX

SEQ ID NO: 75387 - protein, 31 aa, Artificial Sequence; identical to SEQ ID NO: 26813
  Cyclic GFR-binding peptide
  MOD_RES (1), (1): Xaa is C or S

SEQ ID NO: 75388 - protein, 30 aa, Artificial Sequence; identical to SEQ ID NO: 2184
  Cyclic GFR-binding peptide

SEQ ID NO: 75389 - protein, 26 aa, Artificial Sequence
  Cyclic GFR-binding peptide
MVTAKKVKPTRGVIKRIQVPRLDQPV

SEQ ID NO: 75390 - protein, 30 aa, Artificial Sequence
  Cyclic GFR-binding peptide
  MOD_RES (2), (2): Xaa is C or S
KXSKVIMSMEGIIKPTKGIMIQITINSLDQ

SEQ ID NO: 75391 - protein, 28 aa, Artificial Sequence
  Cyclic GFR-binding peptide
  MOD_RES (28), (28): Xaa is C or S
MDSMEGIVVKENEDMIQMTINSLETPVX

SEQ ID NO: 75392 - protein, 39 aa, Artificial Sequence; identical to SEQ ID NO: 26820
  Cyclic GFR-binding peptide
  MOD_RES (1), (33), (34): Xaa is C or S

SEQ ID NO: 75393 - protein, 36 aa, Artificial Sequence
  Cyclic GFR-binding peptide
  MOD_RES (30), (31): Xaa is C or S
KVVMSMEGIVKPTRGVMIQITINSLDQPVXXPSASA

SEQ ID NO: 75394 - protein, 37 aa, Artificial Sequence; identical to SEQ ID NO: 26822
  Cyclic GFR-binding peptide
  MOD_RES (31), (32): Xaa is C or S

SEQ ID NO: 75395 - protein, 28 aa, Artificial Sequence
  Cyclic GFR-binding peptide
KVVMVQVEKVKPTRGVVKAIKVSRLDQP

SEQ ID NO: 75396 - protein, 29 aa, Artificial Sequence
  Cyclic GFR-binding peptide
  MOD_RES (27), (28): Xaa is C or S
NVQVEKIVNSSDDVKAVKVSRLQTPAXXP

SEQ ID NO: 75397 - protein, 34 aa, Artificial Sequence
  Cyclic GFR-binding peptide
  MOD_RES (28), (29): Xaa is C or S
MNSMEGIIVNSSDDMIQVTINSLQTPAXXPKPVT

SEQ ID NO: 75398 - protein, 30 aa, Artificial Sequence
  Cyclic GFR-binding peptide
  MOD_RES (2), (2): Xaa is C or S
KXSKVVMVQVEKVKPTRGVVKAIKVSRLDQ

SEQ ID NO: 75399 - protein, 28 aa, Artificial Sequence
  Cyclic GFR-binding peptide
HQLFNSLQEHQGQHPKIRYYLMTLPEEE

SEQ ID NO: 75400 - protein, 36 aa, Artificial Sequence; identical to SEQ ID NO: 26832
  Cyclic GFR-binding peptide
  MOD_RES (31), (31): Xaa is C or S

SEQ ID NO: 75401 - protein, 25 aa, Artificial Sequence
  Cyclic GFR-binding peptide
LFNSLQEHQGQHPKIRYYLMTLPEE

SEQ ID NO: 75402 - protein, 33 aa, Artificial Sequence
  Cyclic GFR-binding peptide
  MOD_RES (29), (30): Xaa is C or S
VVMVTAKKVKPTRGVIKRIQVPRLDQPVXXPSA

SEQ ID NO: 75403 - protein, 30 aa, Artificial Sequence
  Cyclic GFR-binding peptide
  MOD_RES (1), (1): Xaa is C or S
XGEVVMEVTAKKVVKDYEDIKRMQVPRLET

SEQ ID NO: 75404 - protein, 36 aa, Artificial Sequence; identical to SEQ ID NO: 26842
  Cyclic GFR-binding peptide
  MOD_RES (1), (32), (33): Xaa is C or S

SEQ ID NO: 75405 - protein, 34 aa, Artificial Sequence
  Cyclic GFR-binding peptide
  MOD_RES (1), (3): Xaa is C or S
XKXALHDELTNSLQEFIPKKRVIEYYLVTLPELQ

SEQ ID NO: 75406 - protein, 36 aa, Artificial Sequence; identical to SEQ ID NO: 26844
  Cyclic GFR-binding peptide
  MOD_RES (2), (4), (35), (36): Xaa is C or S

SEQ ID NO: 75407 - protein, 27 aa, Artificial Sequence
  Cyclic GFR-binding peptide
GEVVMEVTAKKVVKDYEDIKRMQVPRL

SEQ ID NO: 75408 - protein, 29 aa, Artificial Sequence
  Cyclic GFR-binding peptide
LRNSLQELKPKKRVYEYYLVTLPEHHVRS

SEQ ID NO: 75409 - protein, 25 aa, Artificial Sequence
  Cyclic GFR-binding peptide
VMDVTAKKVVKENEDIKRMQVPRLE

SEQ ID NO: 75410 - protein, 35 aa, Artificial Sequence; identical to SEQ ID NO: 26845
  Cyclic GFR-binding peptide
  MOD_RES (2), (4), (35): Xaa is C or S

SEQ ID NO: 75411 - protein, 21 aa, Artificial Sequence
  Cyclic GFR-binding peptide
EVTAKKVVKDYEDIKRMQVPR

SEQ ID NO: 75412 - protein, 28 aa, Artificial Sequence
  Cyclic GFR-binding peptide
VMNSMEGIIVNSSDDMIQVTINSLQTPA

SEQ ID NO: 75413 - protein, 33 aa, Artificial Sequence; identical to SEQ ID NO: 26849
  Cyclic GFR-binding peptide

SEQ ID NO: 75414 - protein, 31 aa, Artificial Sequence
  Cyclic GFR-binding peptide
LRNSLQELKPKKRVYEYYVVPLPEHHVRSPQ

SEQ ID NO: 75415 - protein, 29 aa, Artificial Sequence
  Cyclic GFR-binding peptide
  MOD_RES (28), (29): Xaa is C or S
MNVQVEKIVNSSDDVKAVKVSRLQTPAXX

SEQ ID NO: 75416 - protein, 22 aa, Artificial Sequence
  Cyclic GFR-binding peptide
MEVTAKKVVKDYEDIKRMQVPR

SEQ ID NO: 75417 - protein, 30 aa, Artificial Sequence
  Cyclic GFR-binding peptide
  MOD_RES (27), (28): Xaa is C or S
EVQVEKVVKDYEDVKAMKVSRLETPVXXAK

SEQ ID NO: 75418 - protein, 42 aa, Artificial Sequence; identical to SEQ ID NO: 26854
  Cyclic GFR-binding peptide
  MOD_RES (2), (4), (36), (37): Xaa is C or S

SEQ ID NO: 75419 - protein, 22 aa, Artificial Sequence
  Cyclic GFR-binding peptide
DSMEGIVVKENEDMIQMTINSL

SEQ ID NO: 75420 - protein, 23 aa, Artificial Sequence
  Cyclic GFR-binding peptide
MEVTAKKVVKDYEDIKRMQVPRL

SEQ ID NO: 75421 - protein, 32 aa, Artificial Sequence; identical to SEQ ID NO: 26856
  Cyclic GFR-binding peptide
  MOD_RES (1), (1): Xaa is C or S

SEQ ID NO: 75422 - protein, 29 aa, Artificial Sequence
  Cyclic GFR-binding peptide
  MOD_RES (26), (27): Xaa is C or S
SMEGIIVNSSDDMIQVTINSLKTPAXXPK

SEQ ID NO: 75423 - protein, 27 aa, Artificial Sequence
  Cyclic GFR-binding peptide
ELRNSLQELKPKKRVYEYYLVTLPEHH

SEQ ID NO: 75424 - protein, 32 aa, Artificial Sequence
  Cyclic GFR-binding peptide
  MOD_RES (28), (29): Xaa is C or S
MNSMEGIIVNSSDDMIQVTINSLQTPAXXPKP

SEQ ID NO: 75425 - protein, 28 aa, Artificial Sequence
  Cyclic GFR-binding peptide
  MOD_RES (2), (2): Xaa is C or S
GXGEVVMDSMEGIVVKENEDMIQMTINS

SEQ ID NO: 75426 - protein, 38 aa, Artificial Sequence; identical to SEQ ID NO: 26865
  Cyclic GFR-binding peptide
  MOD_RES (32), (33): Xaa is C or S

SEQ ID NO: 75427 - protein, 31 aa, Artificial Sequence
  Cyclic GFR-binding peptide
  MOD_RES (2), (2): Xaa is C or S
KXSKVVMVQVEKVKPTRGVVKAIKVSRLDQP

SEQ ID NO: 75428 - protein, 36 aa, Artificial Sequence; identical to SEQ ID NO: 26866
  Cyclic GFR-binding peptide

SEQ ID NO: 75429 - protein, 30 aa, Artificial Sequence
  Cyclic GFR-binding peptide
GEVVMDVQVEKVVKENEDVKAMKVSRLETP

SEQ ID NO: 75430 - protein, 29 aa, Artificial Sequence
  Cyclic GFR-binding peptide
  MOD_RES (29), (29): Xaa is C or S
VIMVQVEKIKPTKGIVKAIKVSRLDQSVX

SEQ ID NO: 75431 - protein, 39 aa, Artificial Sequence; identical to SEQ ID NO: 26868
  Cyclic GFR-binding peptide
  MOD_RES (1), (3), (35), (36): Xaa is C or S

SEQ ID NO: 75432 - protein, 38 aa, Artificial Sequence; identical to SEQ ID NO: 26870
  Cyclic GFR-binding peptide
  MOD_RES (36), (36): Xaa is C or S

SEQ ID NO: 75433 - protein, 38 aa, Artificial Sequence; identical to SEQ ID NO: 26872
  Cyclic GFR-binding peptide
  MOD_RES (1), (3), (35), (36): Xaa is C or S

SEQ ID NO: 75434 - protein, 30 aa, Artificial Sequence
  Cyclic GFR-binding peptide
  MOD_RES (1), (3): Xaa is C or S
XGXSRVVMNVTAKKIVNSSDDIKRVQVPRL

SEQ ID NO: 75435 - protein, 23 aa, Artificial Sequence
  Cyclic GFR-binding peptide
VQVEKIVNSSDDVKAVKVSRLQT

SEQ ID NO: 75436 - protein, 35 aa, Artificial Sequence
  Cyclic GFR-binding peptide
  MOD_RES (29), (30): Xaa is C or S
VIMVQVEKVKPKRGVVKAIKVSRLAQPVXXPAASA

SEQ ID NO: 75437 - protein, 31 aa, Artificial Sequence
  Cyclic GFR-binding peptide
  MOD_RES (27), (28): Xaa is C or S
MSMEGIIKPTKGIMIQITINSLDQSVXXPSA

SEQ ID NO: 75438 - protein, 32 aa, Artificial Sequence
  Cyclic GFR-binding peptide
  MOD_RES (28), (29): Xaa is C or S
MNSMEGIIVNSSDDMIQVTINSLKTPAXXPKP

SEQ ID NO: 75439 - protein, 27 aa, Artificial Sequence
  Cyclic GFR-binding peptide
  MOD_RES (27), (27): Xaa is C or S
MVQVEKVKPTRGVVKAIKVSRLDQPVX

SEQ ID NO: 75440 - protein, 30 aa, Artificial Sequence
  Cyclic GFR-binding peptide
  MOD_RES (26), (27): Xaa is C or S
VQVEKVVKDYEDVKAMKVSRLETPVXXAKP

SEQ ID NO: 75441 - protein, 38 aa, Artificial Sequence; identical to SEQ ID NO: 26878
  Cyclic GFR-binding peptide
  MOD_RES (2), (34), (35): Xaa is C or S

SEQ ID NO: 75442 - protein, 32 aa, Artificial Sequence
  Cyclic GFR-binding peptide
  MOD_RES (31), (31): Xaa is C or S
RNSLQELKPKKRVYEYYVVPLPEHHVRSPQXK

SEQ ID NO: 75443 - protein, 33 aa, Artificial Sequence; identical to SEQ ID NO: 26880
  Cyclic GFR-binding peptide
  MOD_RES (31), (32): Xaa is C or S

SEQ ID NO: 75444 - protein, 22 aa, Artificial Sequence
  Cyclic GFR-binding peptide
NSMEGIIVNSSDDMIQVTINSL

SEQ ID NO: 75445 - protein, 28 aa, Artificial Sequence
  Cyclic GFR-binding peptide
  MOD_RES (26), (27): Xaa is C or S
SMEGIVKPTRGVMIQITINSLDQPVXXP

SEQ ID NO: 75446 - protein, 37 aa, Artificial Sequence; identical to SEQ ID NO: 26885
  Cyclic GFR-binding peptide
  MOD_RES (2), (4), (36): Xaa is C or S

SEQ ID NO: 75447 - protein, 28 aa, Artificial Sequence
  Cyclic GFR-binding peptide
GEVVMDVQVEKVVKENEDVKAMKVSRLE

SEQ ID NO: 75448 - protein, 38 aa, Artificial Sequence; identical to SEQ ID NO: 26886
  Cyclic GFR-binding peptide
  MOD_RES (1), (33), (34): Xaa is C or S

SEQ ID NO: 75449 - protein, 39 aa, Artificial Sequence; identical to SEQ ID NO: 26887
  Cyclic GFR-binding peptide
  MOD_RES (2), (4), (35), (36): Xaa is C or S

SEQ ID NO: 75450 - protein, 39 aa, Artificial Sequence; identical to SEQ ID NO: 26889
  Cyclic GFR-binding peptide
  MOD_RES (1), (3), (37): Xaa is C or S

SEQ ID NO: 75451 - protein, 31 aa, Artificial Sequence
  Cyclic GFR-binding peptide
  MOD_RES (28), (28): Xaa is C or S
NSLQEHQGQHPKIRYYVMPLPEEETPVXELG

SEQ ID NO: 75452 - protein, 35 aa, Artificial Sequence; identical to SEQ ID NO: 26892
  Cyclic GFR-binding peptide
  MOD_RES (2), (34), (35): Xaa is C or S

SEQ ID NO: 75453 - protein, 32 aa, Artificial Sequence
  Cyclic GFR-binding peptide
  MOD_RES (1), (3): Xaa is C or S
XKXSRVIMVQVEKVKPKRGVVKAIKVSRLAQP

SEQ ID NO: 75454 - protein, 37 aa, Artificial Sequence; identical to SEQ ID NO: 26895
  Cyclic GFR-binding peptide
  MOD_RES (2), (4), (35), (36): Xaa is C or S

SEQ ID NO: 75455 - protein, 32 aa, Artificial Sequence
  Cyclic GFR-binding peptide
  MOD_RES (1), (3): Xaa is C or S
XKXSKVIMVQVEKIKPTKGIVKAIKVSRLDQS

SEQ ID NO: 75456 - protein, 27 aa, Artificial Sequence
  Cyclic GFR-binding peptide
VMNSMEGIIVNSSDDMIQVTINSLQTP

SEQ ID NO: 75457 - protein, 31 aa, Artificial Sequence
  Cyclic GFR-binding peptide
  MOD_RES (26), (27): Xaa is C or S
VQVEKVKPTRGVVKAIKVSRLDQPVXXPSAS

SEQ ID NO: 75458 - protein, 29 aa, Artificial Sequence
  Cyclic GFR-binding peptide
  MOD_RES (28), (29): Xaa is C or S
MNVQVEKIVNSSDDVKAVKVSRLKTPAXX

SEQ ID NO: 75459 - protein, 23 aa, Artificial Sequence
  Cyclic GFR-binding peptide
EVTAKKVVKDYEDIKRMQVPRLE

SEQ ID NO: 75460 - protein, 31 aa, Artificial Sequence
  Cyclic GFR-binding peptide
LHDELTNSLQEFIPKKRVIEYYLVTLPELQV

SEQ ID NO: 75461 - protein, 37 aa, Artificial Sequence; identical to SEQ ID NO: 26903
  Cyclic GFR-binding peptide
  MOD_RES (35), (35): Xaa is C or S

SEQ ID NO: 75462 - protein, 27 aa, Artificial Sequence
  Cyclic GFR-binding peptide
ELTNSLQEFIPKKRVIEYYLVTLPELQ

SEQ ID NO: 75463 - protein, 30 aa, Artificial Sequence
  Cyclic GFR-binding peptide
SRVVMNVQVEKIVNSSDDVKAVKVSRLKTP

SEQ ID NO: 75464 - protein, 29 aa, Artificial Sequence
  Cyclic GFR-binding peptide
  MOD_RES (2), (2): Xaa is C or S
KXSKVVMVQVEKVKPTRGVVKAIKVSRLD

SEQ ID NO: 75465 - protein, 31 aa, Artificial Sequence
  Cyclic GFR-binding peptide
  MOD_RES (31), (31): Xaa is C or S
QLFNSLQEHQGQHPKIRYYLMTLPEEETPVX

SEQ ID NO: 75466 - protein, 33 aa, Artificial Sequence
  Cyclic GFR-binding peptide
  MOD_RES (1), (1): Xaa is C or S
XALHDELTNSLQEFIPKKRVIEYYLVTLPELQV

SEQ ID NO: 75467 - protein, 38 aa, Artificial Sequence; identical to SEQ ID NO: 26916
  Cyclic GFR-binding peptide
  MOD_RES (1), (33), (34): Xaa is C or S

SEQ ID NO: 75468 - protein, 26 aa, Artificial Sequence
  Cyclic GFR-binding peptide
VIMSMEGIIKPTKGIMIQITINSLDQ

SEQ ID NO: 75469 - protein, 21 aa, Artificial Sequence
  Cyclic GFR-binding peptide
SMEGIVKPTRGVMIQITINSL

SEQ ID NO: 75470 - protein, 32 aa, Artificial Sequence
  Cyclic GFR-binding peptide
  MOD_RES (2), (2): Xaa is C or S
GXARVVMNVTAKKIVNSSDDIKRVQVPRLQTP

SEQ ID NO: 75471 - protein, 26 aa, Artificial Sequence
  Cyclic GFR-binding peptide
SKVIMSMEGIIKPTKGIMIQITINSL

SEQ ID NO: 75472 - protein, 37 aa, Artificial Sequence; identical to SEQ ID NO: 26922
  Cyclic GFR-binding peptide
  MOD_RES (1), (1): Xaa is C or S

SEQ ID NO: 75473 - protein, 38 aa, Artificial Sequence; identical to SEQ ID NO: 26924
  Cyclic GFR-binding peptide
  MOD_RES (2), (4): Xaa is C or S

SEQ ID NO: 75474 - protein, 34 aa, Artificial Sequence
  Cyclic GFR-binding peptide
  MOD_RES (31), (31): Xaa is C or S
RNSLQELKPKKRVYEYYLVTLPEHHVRSPQXKVS

SEQ ID NO: 75475 - protein, 29 aa, Artificial Sequence
  Cyclic GFR-binding peptide
  MOD_RES (29), (29): Xaa is C or S
VMNSMEGIIVNSSDDMIQVTINSLQTPAX

SEQ ID NO: 75476 - protein, 28 aa, Artificial Sequence
  Cyclic GFR-binding peptide
SRVVMNVQVEKIVNSSDDVKAVKVSRLK

SEQ ID NO: 75477 - protein, 37 aa, Artificial Sequence; identical to SEQ ID NO: 26935
  Cyclic GFR-binding peptide
  MOD_RES (1), (3): Xaa is C or S

SEQ ID NO: 75478 - protein, 36 aa, Artificial Sequence; identical to SEQ ID NO: 26936
  Cyclic GFR-binding peptide
  MOD_RES (1), (33), (34): Xaa is C or S

SEQ ID NO: 75479 - protein, 29 aa, Artificial Sequence
  Cyclic GFR-binding peptide
HEELRNSLQELKPKKRVYEYYLVTLPEHH

SEQ ID NO: 75480 - protein, 23 aa, Artificial Sequence
  Cyclic GFR-binding peptide
VQVEKVKPTRGVVKAIKVSRLDQ

SEQ ID NO: 75481 - protein, 29 aa, Artificial Sequence
  Cyclic GFR-binding peptide
  MOD_RES (29), (29): Xaa is C or S
VMDSMEGIVVKENEDMIQMTINSLETPVX

SEQ ID NO: 75482 - protein, 40 aa, Artificial Sequence; identical to SEQ ID NO: 26940
  Cyclic GFR-binding peptide
  MOD_RES (2), (4), (36), (37): Xaa is C or S

SEQ ID NO: 75483 - protein, 29 aa, Artificial Sequence
  Cyclic GFR-binding peptide
GEVVMESMEGIVVKDYEDMIQMTINSLET

SEQ ID NO: 75484 - protein, 32 aa, Artificial Sequence
  Cyclic GFR-binding peptide
  MOD_RES (30), (31): Xaa is C or S
VVMEVQVEKVVKDYEDVKAMKVSRLETPVXXA

SEQ ID NO: 75485 - protein, 36 aa, Artificial Sequence
  Cyclic GFR-binding peptide
  MOD_RES (33), (33): Xaa is C or S
ELTNSLQEFIPKKRVIEYYLVTLPELQVQTPRXQVN

SEQ ID NO: 75486 - protein, 32 aa, Artificial Sequence
  Cyclic GFR-binding peptide
  MOD_RES (1), (3): Xaa is C or S
XGXGEVVMEVQVEKVVKDYEDVKAMKVSRLET

SEQ ID NO: 75487 - protein, 28 aa, Artificial Sequence
  Cyclic GFR-binding peptide
  MOD_RES (28), (28): Xaa is C or S
MDVTAKKVVKENEDIKRMQVPRLETPVX

SEQ ID NO: 75488 - protein, 26 aa, Artificial Sequence
  Cyclic GFR-binding peptide
EVTAKKVVKDYEDIKRMQVPRLETPV

SEQ ID NO: 75489 - protein, 41 aa, Artificial Sequence; identical to SEQ ID NO: 26946
  Cyclic GFR-binding peptide
  MOD_RES (2), (4), (36): Xaa is C or S

SEQ ID NO: 75490 - protein, 36 aa, Artificial Sequence
  Cyclic GFR-binding peptide
  MOD_RES (1), (3): Xaa is C or S
XKXALHDELTNSLQEFIPKKRVIEYYLVTLPELQVQ

SEQ ID NO: 75491 - protein, 20 aa, Artificial Sequence
  Cyclic GFR-binding peptide
VTAKKVVKDYEDIKRMQVPR

SEQ ID NO: 75492 - protein, 37 aa, Artificial Sequence; identical to SEQ ID NO: 26951
  Cyclic GFR-binding peptide
  MOD_RES (31), (31): Xaa is C or S

SEQ ID NO: 75493 - protein, 37 aa, Artificial Sequence; identical to SEQ ID NO: 26952
  Cyclic GFR-binding peptide
  MOD_RES (1), (1): Xaa is C or S

SEQ ID NO: 75494 - protein, 32 aa, Artificial Sequence
  Cyclic GFR-binding peptide
  MOD_RES (2), (2): Xaa is C or S
GXSRVVMNVTAKKIVNSSDDIKRVQVPRLKTP

SEQ ID NO: 75495 - protein, 28 aa, Artificial Sequence
  Cyclic GFR-binding peptide
VMEVQVEKVVKDYEDVKAMKVSRLETPV

SEQ ID NO: 75496 - protein, 26 aa, Artificial Sequence
  Cyclic GFR-binding peptide
EVVMESMEGIVVKDYEDMIQMTINSL

SEQ ID NO: 75497 - protein, 32 aa, Artificial Sequence
  Cyclic GFR-binding peptide
  MOD_RES (1), (3): Xaa is C or S
XKXSRVIMVTAKKVKPKRGVIKRIQVPRLAQP

SEQ ID NO: 75498 - protein, 27 aa, Artificial Sequence
  Cyclic GFR-binding peptide
  MOD_RES (26), (27): Xaa is C or S
VTAKKVVKENEDIKRMQVPRLETPVXX

SEQ ID NO: 75499 - protein, 34 aa, Artificial Sequence; identical to SEQ ID NO: 26957
  Cyclic GFR-binding peptide
  MOD_RES (1), (32), (33): Xaa is C or S

SEQ ID NO: 75500 - protein, 35 aa, Artificial Sequence
  Cyclic GFR-binding peptide
  MOD_RES (29), (30): Xaa is C or S
VIMSMEGIVKPKRGVMIQITINSLAQPVXXPAASA

SEQ ID NO: 75501 - protein, 29 aa, Artificial Sequence
  Cyclic GFR-binding peptide
  MOD_RES (26), (27): Xaa is C or S
VQVEKVVKENEDVKAMKVSRLETPVXXAK

SEQ ID NO: 75502 - protein, 28 aa, Artificial Sequence
  Cyclic GFR-binding peptide
  MOD_RES (26), (26): Xaa is C or S
SMEGIIVNSSDDMIQVTINSLKTPAXTP

SEQ ID NO: 75503 - protein, 29 aa, Artificial Sequence
  Cyclic GFR-binding peptide
  MOD_RES (29), (29): Xaa is C or S
VIMSMEGIIKPTKGIMIQITINSLDQSVX

SEQ ID NO: 75504 - protein, 29 aa, Artificial Sequence
  Cyclic GFR-binding peptide
HEELRNSLQELKPKKRVYEYYVVPLPEHH

SEQ ID NO: 75505 - protein, 32 aa, Artificial Sequence
  Cyclic GFR-binding peptide
  MOD_RES (28), (29): Xaa is C or S
MNVTAKKIVNSSDDIKRVQVPRLQTPAXXPKP

SEQ ID NO: 75506 - protein, 33 aa, Artificial Sequence; identical to SEQ ID NO: 26968
  Cyclic GFR-binding peptide
  MOD_RES (32), (33): Xaa is C or S

SEQ ID NO: 75507 - protein, 35 aa, Artificial Sequence; identical to SEQ ID NO: 26970
  Cyclic GFR-binding peptide
  MOD_RES (1), (33), (34): Xaa is C or S

SEQ ID NO: 75508 - protein, 33 aa, Artificial Sequence
  Cyclic GFR-binding peptide
  MOD_RES (27), (27): Xaa is C or S
NSMEGIIVNSSDDMIQVTINSLKTPAXTPKTVH

SEQ ID NO: 75509 - protein, 22 aa, Artificial Sequence
  Cyclic GFR-binding peptide
MESMEGIVVKDYEDMIQMTINS

SEQ ID NO: 75510 - protein, 35 aa, Artificial Sequence; identical to SEQ ID NO: 26974
  Cyclic GFR-binding peptide
  MOD_RES (1), (33), (34): Xaa is C or S

SEQ ID NO: 75511 - protein, 30 aa, Artificial Sequence
  Cyclic GFR-binding peptide
  MOD_RES (1), (3): Xaa is C or S
XGXGEVVMDVQVEKVVKENEDVKAMKVSRL

SEQ ID NO: 75512 - protein, 33 aa, Artificial Sequence
  Cyclic GFR-binding peptide
  MOD_RES (2), (4): Xaa is C or S
SXKXSKVVMSMEGIVKPTRGVMIQITINSLDQP

SEQ ID NO: 75513 - protein, 26 aa, Artificial Sequence
  Cyclic GFR-binding peptide
GEVVMEVTAKKVVKDYEDIKRMQVPR

SEQ ID NO: 75514 - protein, 37 aa, Artificial Sequence; identical to SEQ ID NO: 26983
  Cyclic GFR-binding peptide
  MOD_RES (35), (35): Xaa is C or S

SEQ ID NO: 75515 - protein, 40 aa, Artificial Sequence; identical to SEQ ID NO: 26988
  Cyclic GFR-binding peptide
  MOD_RES (37), (37): Xaa is C or S

SEQ ID NO: 75516 - protein, 33 aa, Artificial Sequence
  Cyclic GFR-binding peptide
  MOD_RES (30), (31): Xaa is C or S
KVVMSMEGIVKPTRGVMIQITINSLDQPVXXPS

SEQ ID NO: 75517 - protein, 28 aa, Artificial Sequence
  Cyclic GFR-binding peptide
VVMEVQVEKVVKDYEDVKAMKVSRLETP

SEQ ID NO: 75518 - protein, 33 aa, Artificial Sequence; identical to SEQ ID NO: 26991
  Cyclic GFR-binding peptide
  MOD_RES (1), (32), (33): Xaa is C or S

SEQ ID NO: 75519 - protein, 38 aa, Artificial Sequence; identical to SEQ ID NO: 26992
  Cyclic GFR-binding peptide
  MOD_RES (2), (34), (35): Xaa is C or S

SEQ ID NO: 75520 - protein, 32 aa, Artificial Sequence; identical to SEQ ID NO: 26994
  Cyclic GFR-binding peptide
  MOD_RES (2), (2): Xaa is C or S

SEQ ID NO: 75521 - protein, 33 aa, Artificial Sequence
  Cyclic GFR-binding peptide
  MOD_RES (31), (31): Xaa is C or S
RNSLQELKPKKRVYEYYLVTLPEHHVRSPQXKV

SEQ ID NO: 75522 - protein, 33 aa, Artificial Sequence; identical to SEQ ID NO: 26997
  Cyclic GFR-binding peptide
  MOD_RES (31), (32): Xaa is C or S

SEQ ID NO: 75523 - protein, 24 aa, Artificial Sequence
  Cyclic GFR-binding peptide
RNSLQELKPKKRVYEYYLVTLPEH

SEQ ID NO: 75524 - protein, 27 aa, Artificial Sequence
  Cyclic GFR-binding peptide
VMNVTAKKIVNSSDDIKRVQVPRLKTP

SEQ ID NO: 75525 - protein, 30 aa, Artificial Sequence; identical to SEQ ID NO: 2142
  Cyclic GFR-binding peptide

SEQ ID NO: 75526 - protein, 33 aa, Artificial Sequence
  Cyclic GFR-binding peptide
EELRNSLQELKPKKRVYEYYVVPLPEHHVRSPQ

SEQ ID NO: 75527 - protein, 33 aa, Artificial Sequence
  Cyclic GFR-binding peptide
  MOD_RES (29), (30): Xaa is C or S
VMNVTAKKIVNSSDDIKRVQVPRLKTPAXXPKP

SEQ ID NO: 75528 - protein, 26 aa, Artificial Sequence
  Cyclic GFR-binding peptide
NVTAKKIVNSSDDIKRVQVPRLQTPA

SEQ ID NO: 75529 - protein, 42 aa, Artificial Sequence; identical to SEQ ID NO: 27000
  Cyclic GFR-binding peptide
  MOD_RES (1), (3), (40): Xaa is C or S

SEQ ID NO: 75530 - protein, 36 aa, Artificial Sequence; identical to SEQ ID NO: 27002
  Cyclic GFR-binding peptide
  MOD_RES (32), (33): Xaa is C or S

SEQ ID NO: 75531 - protein, 31 aa, Artificial Sequence
  Cyclic GFR-binding peptide
  MOD_RES (30), (30): Xaa is C or S
VVMNVTAKKIVNSSDDIKRVQVPRLKTPAXT

SEQ ID NO: 75532 - protein, 40 aa, Artificial Sequence; identical to SEQ ID NO: 27008
  Cyclic GFR-binding peptide
  MOD_RES (34), (34): Xaa is C or S

SEQ ID NO: 75533 - protein, 33 aa, Artificial Sequence; identical to SEQ ID NO: 27009
  Cyclic GFR-binding peptide
  MOD_RES (2), (2): Xaa is C or S

SEQ ID NO: 75534 - protein, 21 aa, Artificial Sequence
  Cyclic GFR-binding peptide
EVQVEKVVKDYEDVKAMKVSR

SEQ ID NO: 75535 - protein, 33 aa, Artificial Sequence
  Cyclic GFR-binding peptide
  MOD_RES (1), (3): Xaa is C or S
XKXALHDELTNSLQEFIPKKRVIEYYLVTLPEL

SEQ ID NO: 75536 - protein, 32 aa, Artificial Sequence
  Cyclic GFR-binding peptide
  MOD_RES (28), (28): Xaa is C or S
MNVTAKKIVNSSDDIKRVQVPRLKTPAXTPKT

SEQ ID NO: 75537 - protein, 32 aa, Artificial Sequence
  Cyclic GFR-binding peptide
  MOD_RES (26), (26): Xaa is C or S
VQVEKIVNSSDDVKAVKVSRLKTPAXTPKTVH

SEQ ID NO: 75538 - protein, 31 aa, Artificial Sequence
  Cyclic GFR-binding peptide
  MOD_RES (26), (27): Xaa is C or S
VTAKKIVNSSDDIKRVQVPRLQTPAXXPKPV

SEQ ID NO: 75539 - protein, 35 aa, Artificial Sequence; identical to SEQ ID NO: 27017
  Cyclic GFR-binding peptide
  MOD_RES (2), (2): Xaa is C or S

SEQ ID NO: 75540 - protein, 26 aa, Artificial Sequence
  Cyclic GFR-binding peptide
  MOD_RES (1), (1): Xaa is C or S
XSKVIMVQVEKIKPTKGIVKAIKVSR

SEQ ID NO: 75541 - protein, 24 aa, Artificial Sequence
  Cyclic GFR-binding peptide
LTNSLQEFIPKKRVIEYYLVTLPE

SEQ ID NO: 75542 - protein, 21 aa, Artificial Sequence
  Cyclic GFR-binding peptide
VQVEKVVKENEDVKAMKVSRL

SEQ ID NO: 75543 - protein, 28 aa, Artificial Sequence
  Cyclic GFR-binding peptide
ARVVMNSMEGIIVNSSDDMIQVTINSLQ

SEQ ID NO: 75544 - protein, 28 aa, Artificial Sequence
  Cyclic GFR-binding peptide
  MOD_RES (1), (1): Xaa is C or S
XSKVVMSMEGIVKPTRGVMIQITINSLD

SEQ ID NO: 75545 - protein, 31 aa, Artificial Sequence
  Cyclic GFR-binding peptide
  MOD_RES (2), (2): Xaa is C or S
KXALHDELTNSLQEFIPKKRVIEYYLVTLPE

SEQ ID NO: 75546 - protein, 33 aa, Artificial Sequence
  Cyclic GFR-binding peptide
  MOD_RES (29), (30): Xaa is C or S
VMDVTAKKVVKENEDIKRMQVPRLETPVXXAKP

SEQ ID NO: 75547 - protein, 38 aa, Artificial Sequence; identical to SEQ ID NO: 27019
  Cyclic GFR-binding peptide
  MOD_RES (2), (34), (35): Xaa is C or S

SEQ ID NO: 75548 - protein, 34 aa, Artificial Sequence; identical to SEQ ID NO: 27020
  Cyclic GFR-binding peptide

SEQ ID NO: 75549 - protein, 37 aa, Artificial Sequence
  Cyclic GFR-binding peptide
  MOD_RES (2), (4): Xaa is C or S
AXAXELHEELRNSLQELKPKKRVYEYYVVPLPEHHVR

SEQ ID NO: 75550 - protein, 38 aa, Artificial Sequence
  Cyclic GFR-binding peptide
  MOD_RES (34), (34): Xaa is C or S
EELRNSLQELKPKKRVYEYYLVTLPEHHVRSPQXKVSS

SEQ ID NO: 75551 - protein, 28 aa, Artificial Sequence
  Cyclic GFR-binding peptide
EELRNSLQELKPKKRVYEYYLVTLPEHH

SEQ ID NO: 75552 - protein, 27 aa, Artificial Sequence
  Cyclic GFR-binding peptide
  MOD_RES (27), (27): Xaa is C or S
NVTAKKIVNSSDDIKRVQVPRLQTPAX

SEQ ID NO: 75553 - protein, 27 aa, Artificial Sequence
  Cyclic GFR-binding peptide
IMSMEGIIKPTKGIMIQITINSLDQSV

SEQ ID NO: 75554 - protein, 27 aa, Artificial Sequence
  Cyclic GFR-binding peptide
MEVQVEKVVKDYEDVKAMKVSRLETPV

SEQ ID NO: 75555 - protein, 25 aa, Artificial Sequence
  Cyclic GFR-binding peptide
VTAKKVVKDYEDIKRMQVPRLETPV

SEQ ID NO: 75556 - protein, 26 aa, Artificial Sequence
  Cyclic GFR-binding peptide
  MOD_RES (26), (26): Xaa is C or S
VQVEKIVNSSDDVKAVKVSRLQTPAX

SEQ ID NO: 75557 - protein, 26 aa, Artificial Sequence
  Cyclic GFR-binding peptide
LRNSLQELKPKKRVYEYYLVTLPEHH

SEQ ID NO: 75558 - protein, 38 aa, Artificial Sequence; identical to SEQ ID NO: 27027
  Cyclic GFR-binding peptide
  MOD_RES (1), (3), (35), (36): Xaa is C or S

SEQ ID NO: 75559 - protein, 31 aa, Artificial Sequence
  Cyclic GFR-binding peptide
  MOD_RES (29), (29): Xaa is C or S
FNSLQEHQGQHPKIRYYLMTLPEEETPVXEL

SEQ ID NO: 75560 - protein, 29 aa, Artificial Sequence
  Cyclic GFR-binding peptide
RVVMNVQVEKIVNSSDDVKAVKVSRLQTP

SEQ ID NO: 75561 - protein, 37 aa, Artificial Sequence; identical to SEQ ID NO: 27032
  Cyclic GFR-binding peptide
  MOD_RES (34), (34): Xaa is C or S

SEQ ID NO: 75562 - protein, 24 aa, Artificial Sequence
  Cyclic GFR-binding peptide
VTAKKVVKENEDIKRMQVPRLETP

SEQ ID NO: 75563 - protein, 33 aa, Artificial Sequence
  Cyclic GFR-binding peptide
  MOD_RES (2), (4): Xaa is C or S
RXGXGEVVMEVQVEKVVKDYEDVKAMKVSRLET

SEQ ID NO: 75564 - protein, 30 aa, Artificial Sequence; identical to SEQ ID NO: 27036
  Cyclic GFR-binding peptide

SEQ ID NO: 75565 - protein, 37 aa, Artificial Sequence; identical to SEQ ID NO: 27039
  Cyclic GFR-binding peptide
  MOD_RES (32), (33): Xaa is C or S

SEQ ID NO: 75566 - protein, 30 aa, Artificial Sequence
  Cyclic GFR-binding peptide
KNHQLFNSLQEHQGQHPKIRYYVMPLPEEE

SEQ ID NO: 75567 - protein, 29 aa, Artificial Sequence
  Cyclic GFR-binding peptide
  MOD_RES (29), (29): Xaa is C or S
VMDVQVEKVVKENEDVKAMKVSRLETPVX

SEQ ID NO: 75568 - protein, 29 aa, Artificial Sequence
  Cyclic GFR-binding peptide
  MOD_RES (28), (29): Xaa is C or S
MEVQVEKVVKDYEDVKAMKVSRLETPVXX

SEQ ID NO: 75569 - protein, 38 aa, Artificial Sequence; identical to SEQ ID NO: 27045
  Cyclic GFR-binding peptide
  MOD_RES (1), (35): Xaa is C or S

SEQ ID NO: 75570 - protein, 32 aa, Artificial Sequence; identical to SEQ ID NO: 27046
  Cyclic GFR-binding peptide
  MOD_RES (31), (32): Xaa is C or S

SEQ ID NO: 75571 - protein, 38 aa, Artificial Sequence; identical to SEQ ID NO: 27050
  Cyclic GFR-binding peptide
  MOD_RES (1), (3): Xaa is C or S

SEQ ID NO: 75572 - protein, 33 aa, Artificial Sequence; identical to SEQ ID NO: 27052
  Cyclic GFR-binding peptide
  MOD_RES (1), (33): Xaa is C or S

SEQ ID NO: 75573 - protein, 22 aa, Artificial Sequence
  Cyclic GFR-binding peptide
NSLQEFIPKKRVIEYYVVPLPE

SEQ ID NO: 75574 - protein, 29 aa, Artificial Sequence
  Cyclic GFR-binding peptide
ELTNSLQEFIPKKRVIEYYLVTLPELQVQ

SEQ ID NO: 75575 - protein, 35 aa, Artificial Sequence; identical to SEQ ID NO: 27055
  Cyclic GFR-binding peptide

SEQ ID NO: 75576 - protein, 28 aa, Artificial Sequence
  Cyclic GFR-binding peptide
VVMEVTAKKVVKDYEDIKRMQVPRLETP

SEQ ID NO: 75577 - protein, 29 aa, Artificial Sequence
  Cyclic GFR-binding peptide
  MOD_RES (29), (29): Xaa is C or S
VVMVTAKKVKPTRGVIKRIQVPRLDQPVX

SEQ ID NO: 75578 - protein, 38 aa, Artificial Sequence; identical to SEQ ID NO: 27060
  Cyclic GFR-binding peptide
  MOD_RES (2), (34), (35): Xaa is C or S

SEQ ID NO: 75579 - protein, 38 aa, Artificial Sequence; identical to SEQ ID NO: 27061
  Cyclic GFR-binding peptide
  MOD_RES (2), (33), (34): Xaa is C or S

SEQ ID NO: 75580 - protein, 26 aa, Artificial Sequence
  Cyclic GFR-binding peptide
MVQVEKIKPTKGIVKAIKVSRLDQSV

SEQ ID NO: 75581 - protein, 36 aa, Artificial Sequence; identical to SEQ ID NO: 27064
  Cyclic GFR-binding peptide
  MOD_RES (35), (35): Xaa is C or S

SEQ ID NO: 75582 - protein, 31 aa, Artificial Sequence
  Cyclic GFR-binding peptide
  MOD_RES (31), (31): Xaa is C or S
TNSLQEFIPKKRVIEYYLVTLPELQVQTPRX

SEQ ID NO: 75583 - protein, 21 aa, Artificial Sequence
  Cyclic GFR-binding peptide
MSMEGIVKPTRGVMIQITINS

SEQ ID NO: 75584 - protein, 36 aa, Artificial Sequence; identical to SEQ ID NO: 27069
  Cyclic GFR-binding peptide
  MOD_RES (1), (3), (35), (36): Xaa is C or S

SEQ ID NO: 75585 - protein, 20 aa, Artificial Sequence
  Cyclic GFR-binding peptide
SMEGIVKPKRGVMIQITINS

SEQ ID NO: 75586 - protein, 37 aa, Artificial Sequence; identical to SEQ ID NO: 27070
  Cyclic GFR-binding peptide
  MOD_RES (2), (4), (36), (37): Xaa is C or S

SEQ ID NO: 75587 - protein, 25 aa, Artificial Sequence
  Cyclic GFR-binding peptide
ELTNSLQEFIPKKRVIEYYVVPLPE

SEQ ID NO: 75588 - protein, 30 aa, Artificial Sequence
  Cyclic GFR-binding peptide
  MOD_RES (29), (30): Xaa is C or S
VMEVTAKKVVKDYEDIKRMQVPRLETPVXX

SEQ ID NO: 75589 - protein, 22 aa, Artificial Sequence
  Cyclic GFR-binding peptide
VQVEKIKPTKGIVKAIKVSRLD

SEQ ID NO: 75590 - protein, 35 aa, Artificial Sequence
  Cyclic GFR-binding peptide
  MOD_RES (1), (3): Xaa is C or S
XAXELHEELRNSLQELKPKKRVYEYYLVTLPEHHV

SEQ ID NO: 75591 - protein, 41 aa, Artificial Sequence; identical to SEQ ID NO: 27078
  Cyclic GFR-binding peptide
  MOD_RES (2), (4), (36), (37): Xaa is C or S

SEQ ID NO: 75592 - protein, 35 aa, Artificial Sequence; identical to SEQ ID NO: 27080
  Cyclic GFR-binding peptide
  MOD_RES (1), (33): Xaa is C or S

SEQ ID NO: 75593 - protein, 37 aa, Artificial Sequence; identical to SEQ ID NO: 27081
  Cyclic GFR-binding peptide
  MOD_RES (36), (36): Xaa is C or S

SEQ ID NO: 75594 - protein, 30 aa, Artificial Sequence
  Cyclic GFR-binding peptide
  MOD_RES (2), (2): Xaa is C or S
KXSKVIMVQVEKIKPTKGIVKAIKVSRLDQ

SEQ ID NO: 75595 - protein, 37 aa, Artificial Sequence; identical to SEQ ID NO: 27083
  Cyclic GFR-binding peptide
  MOD_RES (1), (3), (35), (36): Xaa is C or S

SEQ ID NO: 75596 - protein, 27 aa, Artificial Sequence
  Cyclic GFR-binding peptide
VMNVQVEKIVNSSDDVKAVKVSRLQTP

SEQ ID NO: 75597 - protein, 33 aa, Artificial Sequence
  Cyclic GFR-binding peptide
  MOD_RES (1), (3): Xaa is C or S
XGXARVVMNVQVEKIVNSSDDVKAVKVSRLQTP

SEQ ID NO: 75598 - protein, 39 aa, Artificial Sequence; identical to SEQ ID NO: 27086
  Cyclic GFR-binding peptide
  MOD_RES (2), (4), (36): Xaa is C or S

SEQ ID NO: 75599 - protein, 32 aa, Artificial Sequence; identical to SEQ ID NO: 27090
  Cyclic GFR-binding peptide
  MOD_RES (31), (31): Xaa is C or S

SEQ ID NO: 75600 - protein, 43 aa, Artificial Sequence; identical to SEQ ID NO: 27091
  Cyclic GFR-binding peptide
  MOD_RES (1), (3), (37): Xaa is C or S

SEQ ID NO: 75601 - protein, 24 aa, Artificial Sequence
  Cyclic GFR-binding peptide
NSLQEHQGQHPKIRYYLMTLPEEE

SEQ ID NO: 75602 - protein, 24 aa, Artificial Sequence
  Cyclic GFR-binding peptide
IMSMEGIIKPTKGIMIQITINSLD

SEQ ID NO: 75603 - protein, 39 aa, Artificial Sequence; identical to SEQ ID NO: 27092
  Cyclic GFR-binding peptide
  MOD_RES (2), (4): Xaa is C or S

SEQ ID NO: 75604 - protein, 31 aa, Artificial Sequence
  Cyclic GFR-binding peptide
  MOD_RES (28), (29): Xaa is C or S
MDSMEGIVVKENEDMIQMTINSLETPVXXAK

SEQ ID NO: 75605 - protein, 37 aa, Artificial Sequence; identical to SEQ ID NO: 27096
  Cyclic GFR-binding peptide
  MOD_RES (1), (3), (35), (36): Xaa is C or S

SEQ ID NO: 75606 - protein, 31 aa, Artificial Sequence
  Cyclic GFR-binding peptide
  MOD_RES (27), (28): Xaa is C or S
MVQVEKVKPKRGVVKAIKVSRLAQPVXXPAA

SEQ ID NO: 75607 - protein, 35 aa, Artificial Sequence; identical to SEQ ID NO: 27100
  Cyclic GFR-binding peptide
  MOD_RES (31), (32): Xaa is C or S

SEQ ID NO: 75608 - protein, 27 aa, Artificial Sequence
  Cyclic GFR-binding peptide
RVVMNVTAKKIVNSSDDIKRVQVPRLK

SEQ ID NO: 75609 - protein, 31 aa, Artificial Sequence; identical to SEQ ID NO: 27102
  Cyclic GFR-binding peptide
  MOD_RES (31), (31): Xaa is C or S

SEQ ID NO: 75610 - protein, 25 aa, Artificial Sequence
  Cyclic GFR-binding peptide
DSMEGIVVKENEDMIQMTINSLETP

SEQ ID NO: 75611 - protein, 27 aa, Artificial Sequence
  Cyclic GFR-binding peptide
LTNSLQEFIPKKRVIEYYLVTLPELQV

SEQ ID NO: 75612 - protein, 24 aa, Artificial Sequence
  Cyclic GFR-binding peptide
VVMEVQVEKVVKDYEDVKAMKVSR

SEQ ID NO: 75613 - protein, 29 aa, Artificial Sequence
  Cyclic GFR-binding peptide
  MOD_RES (27), (28): Xaa is C or S
MVTAKKVKPKRGVIKRIQVPRLAQPVXXP

SEQ ID NO: 75614 - protein, 38 aa, Artificial Sequence; identical to SEQ ID NO: 27106
  Cyclic GFR-binding peptide
  MOD_RES (36), (36): Xaa is C or S

SEQ ID NO: 75615 - protein, 31 aa, Artificial Sequence; identical to SEQ ID NO: 27107
  Cyclic GFR-binding peptide

SEQ ID NO: 75616 - protein, 37 aa, Artificial Sequence; identical to SEQ ID NO: 27109
  Cyclic GFR-binding peptide
  MOD_RES (2), (34), (35): Xaa is C or S

SEQ ID NO: 75617 - protein, 41 aa, Artificial Sequence; identical to SEQ ID NO: 27110
  Cyclic GFR-binding peptide
  MOD_RES (2), (4), (36): Xaa is C or S

SEQ ID NO: 75618 - protein, 33 aa, Artificial Sequence
  Cyclic GFR-binding peptide
  MOD_RES (2), (4): Xaa is C or S
SXKXSKVIMVTAKKIKPTKGIIKRIQVPRLDQS

SEQ ID NO: 75619 - protein, 35 aa, Artificial Sequence; identical to SEQ ID NO: 27112
  Cyclic GFR-binding peptide
  MOD_RES (2), (4): Xaa is C or S

SEQ ID NO: 75620 - protein, 26 aa, Artificial Sequence
  Cyclic GFR-binding peptide
RNSLQELKPKKRVYEYYLVTLPEHHV

SEQ ID NO: 75621 - protein, 30 aa, Artificial Sequence; identical to SEQ ID NO: 2202
  Cyclic GFR-binding peptide

SEQ ID NO: 75622 - protein, 36 aa, Artificial Sequence; identical to SEQ ID NO: 27114
  Cyclic GFR-binding peptide
  MOD_RES (1), (33): Xaa is C or S

SEQ ID NO: 75623 - protein, 22 aa, Artificial Sequence
  Cyclic GFR-binding peptide
VQVEKIVNSSDDVKAVKVSRLQ

SEQ ID NO: 75624 - protein, 27 aa, Artificial Sequence
  Cyclic GFR-binding peptide
VMDVQVEKVVKENEDVKAMKVSRLETP

SEQ ID NO: 75625 - protein, 28 aa, Artificial Sequence
  Cyclic GFR-binding peptide
  MOD_RES (28), (28): Xaa is C or S
IMSMEGIIKPTKGIMIQITINSLDQSVX

SEQ ID NO: 75626 - protein, 31 aa, Artificial Sequence
  Cyclic GFR-binding peptide
  MOD_RES (27), (28): Xaa is C or S
EVQVEKVVKDYEDVKAMKVSRLETPVXXAKP

SEQ ID NO: 75627 - protein, 37 aa, Artificial Sequence; identical to SEQ ID NO: 27119
  Cyclic GFR-binding peptide
  MOD_RES (31), (32): Xaa is C or S

SEQ ID NO: 75628 - protein, 28 aa, Artificial Sequence
  Cyclic GFR-binding peptide
SRVVMNVTAKKIVNSSDDIKRVQVPRLK

SEQ ID NO: 75629 - protein, 26 aa, Artificial Sequence
  Cyclic GFR-binding peptide
  MOD_RES (26), (26): Xaa is C or S
VQVEKVVKDYEDVKAMKVSRLETPVX

SEQ ID NO: 75630 - protein, 37 aa, Artificial Sequence; identical to SEQ ID NO: 27124
  Cyclic GFR-binding peptide
  MOD_RES (1), (3), (37): Xaa is C or S

SEQ ID NO: 75631 - protein, 41 aa, Artificial Sequence; identical to SEQ ID NO: 27126
  Cyclic GFR-binding peptide
  MOD_RES (1), (3), (35): Xaa is C or S

SEQ ID NO: 75632 - protein, 36 aa, Artificial Sequence; identical to SEQ ID NO: 27127
  Cyclic GFR-binding peptide
  MOD_RES (31), (32): Xaa is C or S

SEQ ID NO: 75633 - protein, 26 aa, Artificial Sequence
  Cyclic GFR-binding peptide
VMVQVEKVKPTRGVVKAIKVSRLDQP

SEQ ID NO: 75634 - protein, 28 aa, Artificial Sequence
  Cyclic GFR-binding peptide
ELRNSLQELKPKKRVYEYYLVTLPEHHV

SEQ ID NO: 75635 - protein, 40 aa, Artificial Sequence; identical to SEQ ID NO: 27129
  Cyclic GFR-binding peptide
  MOD_RES (36), (36): Xaa is C or S

SEQ ID NO: 75636 - protein, 23 aa, Artificial Sequence
  Cyclic GFR-binding peptide
SMEGIVVKENEDMIQMTINSLET

SEQ ID NO: 75637 - protein, 33 aa, Artificial Sequence
  Cyclic GFR-binding peptide
  MOD_RES (30), (30): Xaa is C or S
NSLQELKPKKRVYEYYVVPLPEHHVRSPQXKVS

SEQ ID NO: 75638 - protein, 37 aa, Artificial Sequence; identical to SEQ ID NO: 27133
  Cyclic GFR-binding peptide
  MOD_RES (1), (3): Xaa is C or S

SEQ ID NO: 75639 - protein, 34 aa, Artificial Sequence; identical to SEQ ID NO: 27135
  Cyclic GFR-binding peptide
  MOD_RES (32), (33): Xaa is C or S

SEQ ID NO: 75640 - protein, 32 aa, Artificial Sequence; identical to SEQ ID NO: 27138
  Cyclic GFR-binding peptide
  MOD_RES (32), (32): Xaa is C or S

SEQ ID NO: 75641 - protein, 34 aa, Artificial Sequence; identical to SEQ ID NO: 27142
  Cyclic GFR-binding peptide
  MOD_RES (32), (33): Xaa is C or S

SEQ ID NO: 75642 - protein, 28 aa, Artificial Sequence
  Cyclic GFR-binding peptide
LRNSLQELKPKKRVYEYYVVPLPEHHVR

SEQ ID NO: 75643 - protein, 27 aa, Artificial Sequence
  Cyclic GFR-binding peptide
IMVTAKKVKPKRGVIKRIQVPRLAQPV

SEQ ID NO: 75644 - protein, 24 aa, Artificial Sequence
  Cyclic GFR-binding peptide
MESMEGIVVKDYEDMIQMTINSLE

SEQ ID NO: 75645 - protein, 35 aa, Artificial Sequence; identical to SEQ ID NO: 27145
  Cyclic GFR-binding peptide
  MOD_RES (2), (4), (35): Xaa is C or S

SEQ ID NO: 75646 - protein, 25 aa, Artificial Sequence
  Cyclic GFR-binding peptide
QLFNSLQEHQGQHPKIRYYLMTLPE

SEQ ID NO: 75647 - protein, 32 aa, Artificial Sequence
  Cyclic GFR-binding peptide
  MOD_RES (26), (27): Xaa is C or S
VTAKKVKPTRGVIKRIQVPRLDQPVXXPSASA

SEQ ID NO: 75648 - protein, 35 aa, Artificial Sequence
  Cyclic GFR-binding peptide
  MOD_RES (29), (30): Xaa is C or S
VVMVTAKKVKPTRGVIKRIQVPRLDQPVXXPSASA

SEQ ID NO: 75649 - protein, 36 aa, Artificial Sequence; identical to SEQ ID NO: 27152
  Cyclic GFR-binding peptide
  MOD_RES (1), (33), (34): Xaa is C or S

SEQ ID NO: 75650 - protein, 39 aa, Artificial Sequence; identical to SEQ ID NO: 27153
  Cyclic GFR-binding peptide
  MOD_RES (2), (4), (35), (36): Xaa is C or S

SEQ ID NO: 75651 - protein, 29 aa, Artificial Sequence
  Cyclic GFR-binding peptide
  MOD_RES (1), (1): Xaa is C or S
XGEVVMESMEGIVVKDYEDMIQMTINSLE

SEQ ID NO: 75652 - protein, 36 aa, Artificial Sequence; identical to SEQ ID NO: 27160
  Cyclic GFR-binding peptide
  MOD_RES (2), (33), (34): Xaa is C or S

SEQ ID NO: 75653 - protein, 35 aa, Artificial Sequence; identical to SEQ ID NO: 27163
  Cyclic GFR-binding peptide
  MOD_RES (1), (3), (35): Xaa is C or S

SEQ ID NO: 75654 - protein, 38 aa, Artificial Sequence; identical to SEQ ID NO: 27165
  Cyclic GFR-binding peptide
  MOD_RES (2), (34), (35): Xaa is C or S

SEQ ID NO: 75655 - protein, 37 aa, Artificial Sequence; identical to SEQ ID NO: 27168
  Cyclic GFR-binding peptide
  MOD_RES (32), (33): Xaa is C or S

SEQ ID NO: 75656 - protein, 39 aa, Artificial Sequence; identical to SEQ ID NO: 27170
  Cyclic GFR-binding peptide
  MOD_RES (1), (3), (35): Xaa is C or S

SEQ ID NO: 75657 - protein, 27 aa, Artificial Sequence
  Cyclic GFR-binding peptide
KVIMSMEGIIKPTKGIMIQITINSLDQ

SEQ ID NO: 75658 - protein, 35 aa, Artificial Sequence; identical to SEQ ID NO: 27172
  Cyclic GFR-binding peptide
  MOD_RES (1), (33), (34): Xaa is C or S

SEQ ID NO: 75659 - protein, 35 aa, Artificial Sequence; identical to SEQ ID NO: 27174
  Cyclic GFR-binding peptide
  MOD_RES (1), (1): Xaa is C or S

SEQ ID NO: 75660 - protein, 29 aa, Artificial Sequence
  Cyclic GFR-binding peptide
  MOD_RES (2), (2): Xaa is C or S
GXARVVMNVQVEKIVNSSDDVKAVKVSRL

SEQ ID NO: 75661 - protein, 28 aa, Artificial Sequence
  Cyclic GFR-binding peptide
VMNVTAKKIVNSSDDIKRVQVPRLKTPA

SEQ ID NO: 75662 - protein, 29 aa, Artificial Sequence
  Cyclic GFR-binding peptide
  MOD_RES (2), (4): Xaa is C or S
SXKXSRVIMVTAKKVKPKRGVIKRIQVPR

SEQ ID NO: 75663 - protein, 34 aa, Artificial Sequence
  Cyclic GFR-binding peptide
  MOD_RES (30), (31): Xaa is C or S
VVMDVQVEKVVKENEDVKAMKVSRLETPVXXAKP

SEQ ID NO: 75664 - protein, 37 aa, Artificial Sequence; identical to SEQ ID NO: 27180
  Cyclic GFR-binding peptide
  MOD_RES (1), (32), (33): Xaa is C or S

SEQ ID NO: 75665 - protein, 25 aa, Artificial Sequence
  Cyclic GFR-binding peptide
NSMEGIIVNSSDDMIQVTINSLKTP

SEQ ID NO: 75666 - protein, 32 aa, Artificial Sequence; identical to SEQ ID NO: 27183
  Cyclic GFR-binding peptide
  MOD_RES (1), (32): Xaa is C or S

SEQ ID NO: 75667 - protein, 37 aa, Artificial Sequence; identical to SEQ ID NO: 27184
  Cyclic GFR-binding peptide
  MOD_RES (2), (4): Xaa is C or S

SEQ ID NO: 75668 - protein, 37 aa, Artificial Sequence; identical to SEQ ID NO: 27186
  Cyclic GFR-binding peptide
  MOD_RES (2), (4), (36), (37): Xaa is C or S

SEQ ID NO: 75669 - protein, 30 aa, Artificial Sequence
  Cyclic GFR-binding peptide
  MOD_RES (2), (2): Xaa is C or S
GXGEVVMDVQVEKVVKENEDVKAMKVSRLE

SEQ ID NO: 75670 - protein, 42 aa, Artificial Sequence; identical to SEQ ID NO: 27190
  Cyclic GFR-binding peptide
  MOD_RES (1), (38): Xaa is C or S

SEQ ID NO: 75671 - protein, 26 aa, Artificial Sequence
  Cyclic GFR-binding peptide
  MOD_RES (1), (1): Xaa is C or S
XSRVIMSMEGIVKPKRGVMIQITINS

SEQ ID NO: 75672 - protein, 29 aa, Artificial Sequence
  Cyclic GFR-binding peptide
  MOD_RES (29), (29): Xaa is C or S
VMNVQVEKIVNSSDDVKAVKVSRLQTPAX

SEQ ID NO: 75673 - protein, 28 aa, Artificial Sequence
  Cyclic GFR-binding peptide
QLFNSLQEHQGQHPKIRYYLMTLPEEET

SEQ ID NO: 75674 - protein, 33 aa, Artificial Sequence
  Cyclic GFR-binding peptide
  MOD_RES (2), (4): Xaa is C or S
RXGXGEVVMDVTAKKVVKENEDIKRMQVPRLET

SEQ ID NO: 75675 - protein, 24 aa, Artificial Sequence
  Cyclic GFR-binding peptide
IMVTAKKIKPTKGIIKRIQVPRLD

SEQ ID NO: 75676 - protein, 33 aa, Artificial Sequence
  Cyclic GFR-binding peptide
  MOD_RES (2), (4): Xaa is C or S
RXEXKNHQLFNSLQEHQGQHPKIRYYVMPLPEE

SEQ ID NO: 75677 - protein, 29 aa, Artificial Sequence
  Cyclic GFR-binding peptide
HDELTNSLQEFIPKKRVIEYYVVPLPELQ

SEQ ID NO: 75678 - protein, 29 aa, Artificial Sequence
  Cyclic GFR-binding peptide
EELRNSLQELKPKKRVYEYYLVTLPEHHV

SEQ ID NO: 75679 - protein, 34 aa, Artificial Sequence
  Cyclic GFR-binding peptide
  MOD_RES (29), (29): Xaa is C or S
FNSLQEHQGQHPKIRYYLMTLPEEETPVXELGED

SEQ ID NO: 75680 - protein, 37 aa, Artificial Sequence; identical to SEQ ID NO: 27201
  Cyclic GFR-binding peptide
  MOD_RES (2), (4), (35), (36): Xaa is C or S

SEQ ID NO: 75681 - protein, 21 aa, Artificial Sequence
  Cyclic GFR-binding peptide
VTAKKVKPTRGVIKRIQVPRL

SEQ ID NO: 75682 - protein, 33 aa, Artificial Sequence
  Cyclic GFR-binding peptide
  MOD_RES (30), (30): Xaa is C or S
LFNSLQEHQGQHPKIRYYVMPLPEEETPVXELG

SEQ ID NO: 75683 - protein, 30 aa, Artificial Sequence
  Cyclic GFR-binding peptide
  MOD_RES (28), (29): Xaa is C or S
MEVTAKKVVKDYEDIKRMQVPRLETPVXXA

SEQ ID NO: 75684 - protein, 32 aa, Artificial Sequence
  Cyclic GFR-binding peptide
  MOD_RES (26), (27): Xaa is C or S
SMEGIIKPTKGIMIQITINSLDQSVXXPSASA

SEQ ID NO: 75685 - protein, 31 aa, Artificial Sequence; identical to SEQ ID NO: 27206
  Cyclic GFR-binding peptide
  MOD_RES (31), (31): Xaa is C or S

SEQ ID NO: 75686 - protein, 28 aa, Artificial Sequence
  Cyclic GFR-binding peptide
  MOD_RES (27), (27): Xaa is C or S
NVTAKKIVNSSDDIKRVQVPRLKTPAXT

SEQ ID NO: 75687 - protein, 37 aa, Artificial Sequence; identical to SEQ ID NO: 27208
  Cyclic GFR-binding peptide
  MOD_RES (1), (32), (33): Xaa is C or S

SEQ ID NO: 75688 - protein, 32 aa, Artificial Sequence
  Cyclic GFR-binding peptide
  MOD_RES (26), (27): Xaa is C or S
VTAKKVVKDYEDIKRMQVPRLETPVXXAKPIS

SEQ ID NO: 75689 - protein, 29 aa, Artificial Sequence
  Cyclic GFR-binding peptide
  MOD_RES (1), (3): Xaa is C or S
XGXGEVVMEVQVEKVVKDYEDVKAMKVSR

SEQ ID NO: 75690 - protein, 32 aa, Artificial Sequence
  Cyclic GFR-binding peptide
  MOD_RES (28), (29): Xaa is C or S
IMVTAKKIKPTKGIIKRIQVPRLDQSVXXPSA

SEQ ID NO: 75691 - protein, 36 aa, Artificial Sequence
  Cyclic GFR-binding peptide
  MOD_RES (33), (33): Xaa is C or S
ELRNSLQELKPKKRVYEYYVVPLPEHHVRSPQXKVS

SEQ ID NO: 75692 - protein, 44 aa, Artificial Sequence; identical to SEQ ID NO: 27217
  Cyclic GFR-binding peptide
  MOD_RES (1), (3), (40): Xaa is C or S

SEQ ID NO: 75693 - protein, 29 aa, Artificial Sequence
  Cyclic GFR-binding peptide
  MOD_RES (26), (27): Xaa is C or S
VTAKKIVNSSDDIKRVQVPRLQTPAXXPK

SEQ ID NO: 75694 - protein, 30 aa, Artificial Sequence
  Cyclic GFR-binding peptide
  MOD_RES (29), (30): Xaa is C or S
VMDVQVEKVVKENEDVKAMKVSRLETPVXX

SEQ ID NO: 75695 - protein, 39 aa, Artificial Sequence; identical to SEQ ID NO: 27222
  Cyclic GFR-binding peptide
  MOD_RES (2), (4), (36), (37): Xaa is C or S

SEQ ID NO: 75696 - protein, 28 aa, Artificial Sequence
  Cyclic GFR-binding peptide
LHDELTNSLQEFIPKKRVIEYYVVPLPE

SEQ ID NO: 75697 - protein, 30 aa, Artificial Sequence
  Cyclic GFR-binding peptide
  MOD_RES (29), (30): Xaa is C or S
VVMVQVEKVKPTRGVVKAIKVSRLDQPVXX

SEQ ID NO: 75698 - protein, 28 aa, Artificial Sequence
  Cyclic GFR-binding peptide
KVVMVTAKKVKPTRGVIKRIQVPRLDQP

SEQ ID NO: 75699 - protein, 32 aa, Artificial Sequence; identical to SEQ ID NO: 27228
  Cyclic GFR-binding peptide
  MOD_RES (1), (32): Xaa is C or S

SEQ ID NO: 75700 - protein, 40 aa, Artificial Sequence; identical to SEQ ID NO: 27227
  Cyclic GFR-binding peptide
  MOD_RES (2), (39): Xaa is C or S

SEQ ID NO: 75701 - protein, 25 aa, Artificial Sequence
  Cyclic GFR-binding peptide
VTAKKVVKENEDIKRMQVPRLETPV

SEQ ID NO: 75702 - protein, 31 aa, Artificial Sequence
  Cyclic GFR-binding peptide
HQLFNSLQEHQGQHPKIRYYVMPLPEEETPV

SEQ ID NO: 75703 - protein, 30 aa, Artificial Sequence
  Cyclic GFR-binding peptide
LHEELRNSLQELKPKKRVYEYYLVTLPEHH

SEQ ID NO: 75704 - protein, 30 aa, Artificial Sequence
  Cyclic GFR-binding peptide
HQLFNSLQEHQGQHPKIRYYVMPLPEEETP

SEQ ID NO: 75705 - protein, 38 aa, Artificial Sequence; identical to SEQ ID NO: 27233
  Cyclic GFR-binding peptide
  MOD_RES (1), (32), (33): Xaa is C or S

SEQ ID NO: 75706 - protein, 31 aa, Artificial Sequence
  Cyclic GFR-binding peptide
  MOD_RES (1), (1): Xaa is C or S
XALHDELTNSLQEFIPKKRVIEYYLVTLPEL

SEQ ID NO: 75707 - protein, 31 aa, Artificial Sequence
  Cyclic GFR-binding peptide
LHEELRNSLQELKPKKRVYEYYLVTLPEHHV

SEQ ID NO: 75708 - protein, 32 aa, Artificial Sequence
  Cyclic GFR-binding peptide
  MOD_RES (29), (30): Xaa is C or S
VMNVTAKKIVNSSDDIKRVQVPRLQTPAXXPK

SEQ ID NO: 75709 - protein, 37 aa, Artificial Sequence
  Cyclic GFR-binding peptide
  MOD_RES (34), (34): Xaa is C or S
EELRNSLQELKPKKRVYEYYVVPLPEHHVRSPQXKVS

SEQ ID NO: 75710 - protein, 36 aa, Artificial Sequence; identical to SEQ ID NO: 27245
  Cyclic GFR-binding peptide
  MOD_RES (2), (33), (34): Xaa is C or S

SEQ ID NO: 75711 - protein, 29 aa, Artificial Sequence
  Cyclic GFR-binding peptide
  MOD_RES (1), (1): Xaa is C or S
XGEVVMDVTAKKVVKENEDIKRMQVPRLE

SEQ ID NO: 75712 - protein, 31 aa, Artificial Sequence
  Cyclic GFR-binding peptide
  MOD_RES (27), (28): Xaa is C or S
NSMEGIIVNSSDDMIQVTINSLKTPAXXPKP

SEQ ID NO: 75713 - protein, 30 aa, Artificial Sequence
  Cyclic GFR-binding peptide
SRVVMNSMEGIIVNSSDDMIQVTINSLKTP

SEQ ID NO: 75714 - protein, 31 aa, Artificial Sequence; identical to SEQ ID NO: 27252
  Cyclic GFR-binding peptide

SEQ ID NO: 75715 - protein, 30 aa, Artificial Sequence
  Cyclic GFR-binding peptide
  MOD_RES (26), (27): Xaa is C or S
VQVEKVVKENEDVKAMKVSRLETPVXXAKP

SEQ ID NO: 75716 - protein, 28 aa, Artificial Sequence
  Cyclic GFR-binding peptide
  MOD_RES (1), (1): Xaa is C or S
XSKVIMSMEGIIKPTKGIMIQITINSLD

SEQ ID NO: 75717 - protein, 32 aa, Artificial Sequence
  Cyclic GFR-binding peptide
  MOD_RES (30), (31): Xaa is C or S
VVMNVQVEKIVNSSDDVKAVKVSRLQTPAXXP

SEQ ID NO: 75718 - protein, 28 aa, Artificial Sequence
  Cyclic GFR-binding peptide
TNSLQEFIPKKRVIEYYVVPLPELQVQT

SEQ ID NO: 75719 - protein, 32 aa, Artificial Sequence
  Cyclic GFR-binding peptide
  MOD_RES (26), (27): Xaa is C or S
VQVEKIVNSSDDVKAVKVSRLKTPAXXPKPVY

SEQ ID NO: 75720 - protein, 37 aa, Artificial Sequence; identical to SEQ ID NO: 27261
  Cyclic GFR-binding peptide
  MOD_RES (2), (4), (36), (37): Xaa is C or S

SEQ ID NO: 75721 - protein, 40 aa, Artificial Sequence; identical to SEQ ID NO: 27265
  Cyclic GFR-binding peptide
  MOD_RES (2), (39): Xaa is C or S

SEQ ID NO: 75722 - protein, 24 aa, Artificial Sequence
  Cyclic GFR-binding peptide
VVMNVTAKKIVNSSDDIKRVQVPR

SEQ ID NO: 75723 - protein, 40 aa, Artificial Sequence; identical to SEQ ID NO: 27267
  Cyclic GFR-binding peptide
  MOD_RES (2), (34), (35): Xaa is C or S

SEQ ID NO: 75724 - protein, 38 aa, Artificial Sequence; identical to SEQ ID NO: 27268
  Cyclic GFR-binding peptide
  MOD_RES (2), (4), (36), (37): Xaa is C or S

SEQ ID NO: 75725 - protein, 28 aa, Artificial Sequence
  Cyclic GFR-binding peptide
  MOD_RES (27), (28): Xaa is C or S
MVTAKKVKPTRGVIKRIQVPRLDQPVXX

SEQ ID NO: 75726 - protein, 26 aa, Artificial Sequence
  Cyclic GFR-binding peptide
SKVVMSMEGIVKPTRGVMIQITINSL

SEQ ID NO: 75727 - protein, 32 aa, Artificial Sequence
  Cyclic GFR-binding peptide
  MOD_RES (28), (28): Xaa is C or S
NSLQEHQGQHPKIRYYVMPLPEEETPVXELGE

SEQ ID NO: 75728 - protein, 35 aa, Artificial Sequence; identical to SEQ ID NO: 27272
  Cyclic GFR-binding peptide
  MOD_RES (2), (4), (35): Xaa is C or S

SEQ ID NO: 75729 - protein, 35 aa, Artificial Sequence
  Cyclic GFR-binding peptide
  MOD_RES (29), (29): Xaa is C or S
VMNVTAKKIVNSSDDIKRVQVPRLKTPAXTPKTVH

SEQ ID NO: 75730 - protein, 25 aa, Artificial Sequence
  Cyclic GFR-binding peptide
KVIMSMEGIIKPTKGIMIQITINSL

SEQ ID NO: 75731 - protein, 31 aa, Artificial Sequence
  Cyclic GFR-binding peptide
  MOD_RES (28), (29): Xaa is C or S
MNVQVEKIVNSSDDVKAVKVSRLQTPAXXPK

SEQ ID NO: 75732 - protein, 32 aa, Artificial Sequence
  Cyclic GFR-binding peptide
  MOD_RES (29), (30): Xaa is C or S
VVMVTAKKVKPTRGVIKRIQVPRLDQPVXXPS

SEQ ID NO: 75733 - protein, 37 aa, Artificial Sequence; identical to SEQ ID NO: 27273
  Cyclic GFR-binding peptide
  MOD_RES (2), (33), (34): Xaa is C or S

SEQ ID NO: 75734 - protein, 33 aa, Artificial Sequence
  Cyclic GFR-binding peptide
  MOD_RES (30), (30): Xaa is C or S
VVMNVQVEKIVNSSDDVKAVKVSRLKTPAXTPK

SEQ ID NO: 75735 - protein, 31 aa, Artificial Sequence
  Cyclic GFR-binding peptide
  MOD_RES (2), (2): Xaa is C or S
GXGEVVMDVTAKKVVKENEDIKRMQVPRLET

SEQ ID NO: 75736 - protein, 43 aa, Artificial Sequence; identical to SEQ ID NO: 27282
  Cyclic GFR-binding peptide
  MOD_RES (1), (3), (40): Xaa is C or S

SEQ ID NO: 75737 - protein, 23 aa, Artificial Sequence
  Cyclic GFR-binding peptide
VMEVTAKKVVKDYEDIKRMQVPR

SEQ ID NO: 75738 - protein, 31 aa, Artificial Sequence
  Cyclic GFR-binding peptide
ELTNSLQEFIPKKRVIEYYVVPLPELQVQTP

SEQ ID NO: 75739 - protein, 38 aa, Artificial Sequence; identical to SEQ ID NO: 27285
  Cyclic GFR-binding peptide
  MOD_RES (1), (33), (34): Xaa is C or S

SEQ ID NO: 75740 - protein, 39 aa, Artificial Sequence; identical to SEQ ID NO: 27287
  Cyclic GFR-binding peptide
  MOD_RES (1), (3), (35), (36): Xaa is C or S

SEQ ID NO: 75741 - protein, 31 aa, Artificial Sequence
  Cyclic GFR-binding peptide
  MOD_RES (1), (1): Xaa is C or S
XARVVMNSMEGIIVNSSDDMIQVTINSLQTP

SEQ ID NO: 75742 - protein, 30 aa, Artificial Sequence
  Cyclic GFR-binding peptide
  MOD_RES (2), (4): Xaa is C or S
HXGXARVVMNSMEGIIVNSSDDMIQVTINS

SEQ ID NO: 75743 - protein, 26 aa, Artificial Sequence
  Cyclic GFR-binding peptide
MDSMEGIVVKENEDMIQMTINSLETP

SEQ ID NO: 75744 - protein, 31 aa, Artificial Sequence
  Cyclic GFR-binding peptide
  MOD_RES (1), (1): Xaa is C or S
XGEVVMESMEGIVVKDYEDMIQMTINSLETP

SEQ ID NO: 75745 - protein, 29 aa, Artificial Sequence
  Cyclic GFR-binding peptide
  MOD_RES (1), (3): Xaa is C or S
XKXSKVIMVTAKKIKPTKGIIKRIQVPRL

SEQ ID NO: 75746 - protein, 32 aa, Artificial Sequence
  Cyclic GFR-binding peptide
  MOD_RES (1), (3): Xaa is C or S
XGXGEVVMESMEGIVVKDYEDMIQMTINSLET

SEQ ID NO: 75747 - protein, 37 aa, Artificial Sequence; identical to SEQ ID NO: 27292
  Cyclic GFR-binding peptide
  MOD_RES (2), (34), (35): Xaa is C or S

SEQ ID NO: 75748 - protein, 39 aa, Artificial Sequence; identical to SEQ ID NO: 27293
  Cyclic GFR-binding peptide
  MOD_RES (1), (3), (34), (35): Xaa is C or S

SEQ ID NO: 75749 - protein, 32 aa, Artificial Sequence
  Cyclic GFR-binding peptide
  MOD_RES (1), (3): Xaa is C or S
XKXSKVVMVQVEKVKPTRGVVKAIKVSRLDQP

SEQ ID NO: 75750 - protein, 21 aa, Artificial Sequence
  Cyclic GFR-binding peptide
DVTAKKVVKENEDIKRMQVPR

SEQ ID NO: 75751 - protein, 32 aa, Artificial Sequence
  Cyclic GFR-binding peptide
  MOD_RES (28), (29): Xaa is C or S
IMVTAKKVKPKRGVIKRIQVPRLAQPVXXPAA

SEQ ID NO: 75752 - protein, 30 aa, Artificial Sequence
  Cyclic GFR-binding peptide
ARVVMNVTAKKIVNSSDDIKRVQVPRLQTP

SEQ ID NO: 75753 - protein, 36 aa, Artificial Sequence
  Cyclic GFR-binding peptide
  MOD_RES (30), (31): Xaa is C or S
VVMNVQVEKIVNSSDDVKAVKVSRLQTPAXXPKPVT

SEQ ID NO: 75754 - protein, 38 aa, Artificial Sequence
  Cyclic GFR-binding peptide
  MOD_RES (32), (32): Xaa is C or S
HQLFNSLQEHQGQHPKIRYYVMPLPEEETPVXELGEDN

SEQ ID NO: 75755 - protein, 24 aa, Artificial Sequence
  Cyclic GFR-binding peptide
RVIMVQVEKVKPKRGVVKAIKVSR

SEQ ID NO: 75756 - protein, 36 aa, Artificial Sequence; identical to SEQ ID NO: 27298
  Cyclic GFR-binding peptide
  MOD_RES (31), (31): Xaa is C or S

SEQ ID NO: 75757 - protein, 24 aa, Artificial Sequence
  Cyclic GFR-binding peptide
VIMSMEGIIKPTKGIMIQITINSL

SEQ ID NO: 75758 - protein, 33 aa, Artificial Sequence
  Cyclic GFR-binding peptide
  MOD_RES (27), (28): Xaa is C or S
DVQVEKVVKENEDVKAMKVSRLETPVXXAKPIK

SEQ ID NO: 75759 - protein, 23 aa, Artificial Sequence
  Cyclic GFR-binding peptide
MSMEGIVKPKRGVMIQITINSLA

SEQ ID NO: 75760 - protein, 31 aa, Artificial Sequence
  Cyclic GFR-binding peptide
  MOD_RES (2), (2): Xaa is C or S
GXGEVVMEVQVEKVVKDYEDVKAMKVSRLET

SEQ ID NO: 75761 - protein, 36 aa, Artificial Sequence; identical to SEQ ID NO: 27302
  Cyclic GFR-binding peptide
  MOD_RES (31), (32): Xaa is C or S

SEQ ID NO: 75762 - protein, 28 aa, Artificial Sequence
  Cyclic GFR-binding peptide
EVVMDSMEGIVVKENEDMIQMTINSLET

SEQ ID NO: 75763 - protein, 25 aa, Artificial Sequence
  Cyclic GFR-binding peptide
NVQVEKIVNSSDDVKAVKVSRLQTP

SEQ ID NO: 75764 - protein, 35 aa, Artificial Sequence; identical to SEQ ID NO: 27303
  Cyclic GFR-binding peptide
  MOD_RES (1), (35): Xaa is C or S

SEQ ID NO: 75765 - protein, 35 aa, Artificial Sequence
  Cyclic GFR-binding peptide
  MOD_RES (29), (30): Xaa is C or S
VIMVQVEKIKPTKGIVKAIKVSRLDQSVXXPSASA

SEQ ID NO: 75766 - protein, 35 aa, Artificial Sequence
  Cyclic GFR-binding peptide
  MOD_RES (29), (29): Xaa is C or S
FNSLQEHQGQHPKIRYYLMTLPEEETPVXELGEDN

SEQ ID NO: 75767 - protein, 40 aa, Artificial Sequence; identical to SEQ ID NO: 27305
  Cyclic GFR-binding peptide
  MOD_RES (2), (4), (35), (36): Xaa is C or S

SEQ ID NO: 75768 - protein, 27 aa, Artificial Sequence
  Cyclic GFR-binding peptide
  MOD_RES (1), (1): Xaa is C or S
XSKVIMVTAKKIKPTKGIIKRIQVPRL

SEQ ID NO: 75769 - protein, 42 aa, Artificial Sequence; identical to SEQ ID NO: 27308
  Cyclic GFR-binding peptide
  MOD_RES (2), (4), (41): Xaa is C or S

SEQ ID NO: 75770 - protein, 29 aa, Artificial Sequence
  Cyclic GFR-binding peptide
AAAAAAAAASMEGIVVKDYEDMIQMTINS

SEQ ID NO: 75771 - protein, 27 aa, Artificial Sequence
  Cyclic GFR-binding peptide
EVVMDVTAKKVVKENEDIKRMQVPRLE

SEQ ID NO: 75772 - protein, 33 aa, Artificial Sequence; identical to SEQ ID NO: 27310
  Cyclic GFR-binding peptide
  MOD_RES (1), (3): Xaa is C or S

SEQ ID NO: 75773 - protein, 26 aa, Artificial Sequence
  Cyclic GFR-binding peptide
MVQVEKVKPTRGVVKAIKVSRLDQPV

SEQ ID NO: 75774 - protein, 35 aa, Artificial Sequence; identical to SEQ ID NO: 27316
  Cyclic GFR-binding peptide
  MOD_RES (1), (33): Xaa is C or S

SEQ ID NO: 75775 - protein, 34 aa, Artificial Sequence; identical to SEQ ID NO: 27318
  Cyclic GFR-binding peptide
  MOD_RES (33), (33): Xaa is C or S

SEQ ID NO: 75776 - protein, 29 aa, Artificial Sequence
  Cyclic GFR-binding peptide
QLFNSLQEHQGQHPKIRYYVMPLPEEETP

SEQ ID NO: 75777 - protein, 34 aa, Artificial Sequence
  Cyclic GFR-binding peptide
  MOD_RES (31), (31): Xaa is C or S
QLFNSLQEHQGQHPKIRYYLMTLPEEETPVXELG

SEQ ID NO: 75778 - protein, 33 aa, Artificial Sequence
  Cyclic GFR-binding peptide
  MOD_RES (2), (4): Xaa is C or S
SXKXSKVVMVTAKKVKPTRGVIKRIQVPRLDQP

SEQ ID NO: 75779 - protein, 26 aa, Artificial Sequence
  Cyclic GFR-binding peptide
IMVQVEKIKPTKGIVKAIKVSRLDQS

SEQ ID NO: 75780 - protein, 29 aa, Artificial Sequence
  Cyclic GFR-binding peptide
LHDELTNSLQEFIPKKRVIEYYLVTLPEL

SEQ ID NO: 75781 - protein, 20 aa, Artificial Sequence
  Cyclic GFR-binding peptide
SMEGIVVKDYEDMIQMTINS

SEQ ID NO: 75782 - protein, 30 aa, Artificial Sequence
  Cyclic GFR-binding peptide
ELRNSLQELKPKKRVYEYYLVTLPEHHVRS

SEQ ID NO: 75783 - protein, 33 aa, Artificial Sequence
  Cyclic GFR-binding peptide
  MOD_RES (2), (4): Xaa is C or S
RXEXKNHQLFNSLQEHQGQHPKIRYYLMTLPEE

SEQ ID NO: 75784 - protein, 32 aa, Artificial Sequence; identical to SEQ ID NO: 27322
  Cyclic GFR-binding peptide
  MOD_RES (32), (32): Xaa is C or S

SEQ ID NO: 75785 - protein, 32 aa, Artificial Sequence
  Cyclic GFR-binding peptide
  MOD_RES (29), (30): Xaa is C or S
VMEVQVEKVVKDYEDVKAMKVSRLETPVXXAK

SEQ ID NO: 75786 - protein, 31 aa, Artificial Sequence
  Cyclic GFR-binding peptide
ALHDELTNSLQEFIPKKRVIEYYVVPLPELQ

SEQ ID NO: 75787 - protein, 32 aa, Artificial Sequence
  Cyclic GFR-binding peptide
  MOD_RES (2), (4): Xaa is C or S
HXGXSRVVMNVTAKKIVNSSDDIKRVQVPRLK

SEQ ID NO: 75788 - protein, 31 aa, Artificial Sequence
  Cyclic GFR-binding peptide
  MOD_RES (2), (4): Xaa is C or S
HXGXARVVMNVTAKKIVNSSDDIKRVQVPRL

SEQ ID NO: 75789 - protein, 37 aa, Artificial Sequence
  Cyclic GFR-binding peptide
  MOD_RES (34), (34): Xaa is C or S
EELRNSLQELKPKKRVYEYYLVTLPEHHVRSPQXKVS

SEQ ID NO: 75790 - protein, 30 aa, Artificial Sequence
  Cyclic GFR-binding peptide
ARVVMNVQVEKIVNSSDDVKAVKVSRLQTP

SEQ ID NO: 75791 - protein, 35 aa, Artificial Sequence
  Cyclic GFR-binding peptide
  MOD_RES (30), (31): Xaa is C or S
KVVMVQVEKVKPTRGVVKAIKVSRLDQPVXXPSAS

SEQ ID NO: 75792 - protein, 31 aa, Artificial Sequence
  Cyclic GFR-binding peptide
  MOD_RES (2), (2): Xaa is C or S
GXARVVMNVTAKKIVNSSDDIKRVQVPRLQT

SEQ ID NO: 75793 - protein, 29 aa, Artificial Sequence
  Cyclic GFR-binding peptide
SKVVMVQVEKVKPTRGVVKAIKVSRLDQP

SEQ ID NO: 75794 - protein, 32 aa, Artificial Sequence; identical to SEQ ID NO: 27333
  Cyclic GFR-binding peptide
  MOD_RES (31), (32): Xaa is C or S

SEQ ID NO: 75795 - protein, 39 aa, Artificial Sequence; identical to SEQ ID NO: 27332
  Cyclic GFR-binding peptide
  MOD_RES (2), (34), (35): Xaa is C or S

SEQ ID NO: 75796 - protein, 23 aa, Artificial Sequence
  Cyclic GFR-binding peptide
SMEGIIKPTKGIMIQITINSLDQ

SEQ ID NO: 75797 - protein, 29 aa, Artificial Sequence
  Cyclic GFR-binding peptide
VVMDVQVEKVVKENEDVKAMKVSRLETPV

SEQ ID NO: 75798 - protein, 24 aa, Artificial Sequence
  Cyclic GFR-binding peptide
MNVQVEKIVNSSDDVKAVKVSRLQ

SEQ ID NO: 75799 - protein, 37 aa, Artificial Sequence; identical to SEQ ID NO: 27339
  Cyclic GFR-binding peptide
  MOD_RES (31), (32): Xaa is C or S

SEQ ID NO: 75800 - protein, 35 aa, Artificial Sequence
  Cyclic GFR-binding peptide
  MOD_RES (31), (31): Xaa is C or S
QLFNSLQEHQGQHPKIRYYLMTLPEEETPVXELGE

SEQ ID NO: 75801 - protein, 32 aa, Artificial Sequence
  Cyclic GFR-binding peptide
  MOD_RES (26), (27): Xaa is C or S
VQVEKVVKDYEDVKAMKVSRLETPVXXAKPIS

SEQ ID NO: 75802 - protein, 34 aa, Artificial Sequence
  Cyclic GFR-binding peptide
  MOD_RES (2), (4): Xaa is C or S
HXGXARVVMNVQVEKIVNSSDDVKAVKVSRLQTP

SEQ ID NO: 75803 - protein, 32 aa, Artificial Sequence
  Cyclic GFR-binding peptide
  MOD_RES (28), (29): Xaa is C or S
VMVTAKKVKPTRGVIKRIQVPRLDQPVXXPSA

SEQ ID NO: 75804 - protein, 37 aa, Artificial Sequence; identical to SEQ ID NO: 27343
  Cyclic GFR-binding peptide
  MOD_RES (31), (32): Xaa is C or S

SEQ ID NO: 75805 - protein, 32 aa, Artificial Sequence; identical to SEQ ID NO: 27344
  Cyclic GFR-binding peptide
  MOD_RES (1), (1): Xaa is C or S

SEQ ID NO: 75806 - protein, 32 aa, Artificial Sequence; identical to SEQ ID NO: 27346
  Cyclic GFR-binding peptide
  MOD_RES (1), (32): Xaa is C or S

SEQ ID NO: 75807 - protein, 29 aa, Artificial Sequence
  Cyclic GFR-binding peptide
  MOD_RES (26), (27): Xaa is C or S
VQVEKIVNSSDDVKAVKVSRLQTPAXXPK

SEQ ID NO: 75808 - protein, 42 aa, Artificial Sequence; identical to SEQ ID NO: 27347
  Cyclic GFR-binding peptide
  MOD_RES (1), (3), (40): Xaa is C or S

SEQ ID NO: 75809 - protein, 24 aa, Artificial Sequence
  Cyclic GFR-binding peptide
VIMVQVEKIKPTKGIVKAIKVSRL

SEQ ID NO: 75810 - protein, 36 aa, Artificial Sequence; identical to SEQ ID NO: 27355
  Cyclic GFR-binding peptide
  MOD_RES (31), (32): Xaa is C or S

SEQ ID NO: 75811 - protein, 35 aa, Artificial Sequence; identical to SEQ ID NO: 27358
  Cyclic GFR-binding peptide
  MOD_RES (1), (33), (34): Xaa is C or S

SEQ ID NO: 75812 - protein, 30 aa, Artificial Sequence
  Cyclic GFR-binding peptide
  MOD_RES (1), (1): Xaa is C or S
XSKVIMSMEGIIKPTKGIMIQITINSLDQS

SEQ ID NO: 75813 - protein, 34 aa, Artificial Sequence; identical to SEQ ID NO: 27364
  Cyclic GFR-binding peptide
  MOD_RES (31), (32): Xaa is C or S

SEQ ID NO: 75814 - protein, 23 aa, Artificial Sequence
  Cyclic GFR-binding peptide
VMDSMEGIVVKENEDMIQMTINS

SEQ ID NO: 75815 - protein, 33 aa, Artificial Sequence
  Cyclic GFR-binding peptide
  MOD_RES (2), (4): Xaa is C or S
HXGXSRVVMNSMEGIIVNSSDDMIQVTINSLKT

SEQ ID NO: 75816 - protein, 36 aa, Artificial Sequence; identical to SEQ ID NO: 27368
  Cyclic GFR-binding peptide
  MOD_RES (31), (32): Xaa is C or S

SEQ ID NO: 75817 - protein, 33 aa, Artificial Sequence; identical to SEQ ID NO: 27373
  Cyclic GFR-binding peptide
  MOD_RES (2), (33): Xaa is C or S

SEQ ID NO: 75818 - protein, 31 aa, Artificial Sequence
  Cyclic GFR-binding peptide
  MOD_RES (31), (31): Xaa is C or S
RNSLQELKPKKRVYEYYVVPLPEHHVRSPQX

SEQ ID NO: 75819 - protein, 35 aa, Artificial Sequence; identical to SEQ ID NO: 27376
  Cyclic GFR-binding peptide
  MOD_RES (1), (32), (33): Xaa is C or S

SEQ ID NO: 75820 - protein, 34 aa, Artificial Sequence; identical to SEQ ID NO: 27378
  Cyclic GFR-binding peptide
  MOD_RES (1), (32), (33): Xaa is C or S

SEQ ID NO: 75821 - protein, 34 aa, Artificial Sequence; identical to SEQ ID NO: 27379
  Cyclic GFR-binding peptide
  MOD_RES (32), (33): Xaa is C or S

SEQ ID NO: 75822 - protein, 36 aa, Artificial Sequence; identical to SEQ ID NO: 27380
  Cyclic GFR-binding peptide
  MOD_RES (1), (3), (35), (36): Xaa is C or S

SEQ ID NO: 75823 - protein, 39 aa, Artificial Sequence; identical to SEQ ID NO: 27382
  Cyclic GFR-binding peptide
  MOD_RES (37), (37): Xaa is C or S

SEQ ID NO: 75824 - protein, 27 aa, Artificial Sequence
  Cyclic GFR-binding peptide
LRNSLQELKPKKRVYEYYLVTLPEHHV

SEQ ID NO: 75825 - protein, 40 aa, Artificial Sequence; identical to SEQ ID NO: 27385
  Cyclic GFR-binding peptide
  MOD_RES (2), (39): Xaa is C or S

SEQ ID NO: 75826 - protein, 23 aa, Artificial Sequence
  Cyclic GFR-binding peptide
MNSMEGIIVNSSDDMIQVTINSL

SEQ ID NO: 75827 - protein, 32 aa, Artificial Sequence
  Cyclic GFR-binding peptide
  MOD_RES (26), (27): Xaa is C or S
VTAKKIKPTKGIIKRIQVPRLDQSVXXPSASA

SEQ ID NO: 75828 - protein, 25 aa, Artificial Sequence
  Cyclic GFR-binding peptide
SKVVMSMEGIVKPTRGVMIQITINS

SEQ ID NO: 75829 - protein, 26 aa, Artificial Sequence
  Cyclic GFR-binding peptide
VVMDVQVEKVVKENEDVKAMKVSRLE

SEQ ID NO: 75830 - protein, 26 aa, Artificial Sequence
  Cyclic GFR-binding peptide
  MOD_RES (1), (1): Xaa is C or S
XSRVIMVQVEKVKPKRGVVKAIKVSR

SEQ ID NO: 75831 - protein, 25 aa, Artificial Sequence
  Cyclic GFR-binding peptide
SKVVMVQVEKVKPTRGVVKAIKVSR

SEQ ID NO: 75832 - protein, 24 aa, Artificial Sequence
  Cyclic GFR-binding peptide
SMEGIIVNSSDDMIQVTINSLQTP

SEQ ID NO: 75833 - protein, 27 aa, Artificial Sequence
  Cyclic GFR-binding peptide
VVMDVTAKKVVKENEDIKRMQVPRLET

SEQ ID NO: 75834 - protein, 37 aa, Artificial Sequence; identical to SEQ ID NO: 27388
  Cyclic GFR-binding peptide
  MOD_RES (32), (33): Xaa is C or S

SEQ ID NO: 75835 - protein, 28 aa, Artificial Sequence
  Cyclic GFR-binding peptide
  MOD_RES (2), (2): Xaa is C or S
GXGEVVMEVTAKKVVKDYEDIKRMQVPR

SEQ ID NO: 75836 - protein, 38 aa, Artificial Sequence; identical to SEQ ID NO: 27392
  Cyclic GFR-binding peptide
  MOD_RES (1), (38): Xaa is C or S

SEQ ID NO: 75837 - protein, 26 aa, Artificial Sequence
  Cyclic GFR-binding peptide
KVVMVQVEKVKPTRGVVKAIKVSRLD

SEQ ID NO: 75838 - protein, 25 aa, Artificial Sequence
  Cyclic GFR-binding peptide
VQVEKVVKDYEDVKAMKVSRLETPV

SEQ ID NO: 75839 - protein, 34 aa, Artificial Sequence
  Cyclic GFR-binding peptide
  MOD_RES (34), (34): Xaa is C or S
EELRNSLQELKPKKRVYEYYVVPLPEHHVRSPQX

SEQ ID NO: 75840 - protein, 37 aa, Artificial Sequence; identical to SEQ ID NO: 27394
  Cyclic GFR-binding peptide
  MOD_RES (31), (32): Xaa is C or S

SEQ ID NO: 75841 - protein, 37 aa, Artificial Sequence; identical to SEQ ID NO: 27397
  Cyclic GFR-binding peptide
  MOD_RES (2), (4), (35), (36): Xaa is C or S

SEQ ID NO: 75842 - protein, 34 aa, Artificial Sequence
  Cyclic GFR-binding peptide
  MOD_RES (1), (1): Xaa is C or S
XELHEELRNSLQELKPKKRVYEYYLVTLPEHHVR

SEQ ID NO: 75843 - protein, 38 aa, Artificial Sequence; identical to SEQ ID NO: 27401
  Cyclic GFR-binding peptide
  MOD_RES (2), (4), (38): Xaa is C or S

SEQ ID NO: 75844 - protein, 33 aa, Artificial Sequence; identical to SEQ ID NO: 27403
  Cyclic GFR-binding peptide

SEQ ID NO: 75845 - protein, 20 aa, Artificial Sequence
  Cyclic GFR-binding peptide
SMEGIVVKENEDMIQMTINS

SEQ ID NO: 75846 - protein, 29 aa, Artificial Sequence
  Cyclic GFR-binding peptide
  MOD_RES (2), (2): Xaa is C or S
GXGEVVMDVTAKKVVKENEDIKRMQVPRL

SEQ ID NO: 75847 - protein, 34 aa, Artificial Sequence; identical to SEQ ID NO: 27408
  Cyclic GFR-binding peptide
  MOD_RES (1), (3): Xaa is C or S

SEQ ID NO: 75848 - protein, 30 aa, Artificial Sequence
  Cyclic GFR-binding peptide
  MOD_RES (2), (2): Xaa is C or S
GXARVVMNVQVEKIVNSSDDVKAVKVSRLQ

SEQ ID NO: 75849 - protein, 31 aa, Artificial Sequence
  Cyclic GFR-binding peptide
  MOD_RES (1), (3): Xaa is C or S
XGXGEVVMDSMEGIVVKENEDMIQMTINSLE

SEQ ID NO: 75850 - protein, 36 aa, Artificial Sequence; identical to SEQ ID NO: 27412
  Cyclic GFR-binding peptide
  MOD_RES (31), (32): Xaa is C or S

SEQ ID NO: 75851 - protein, 29 aa, Artificial Sequence
  Cyclic GFR-binding peptide
  MOD_RES (1), (1): Xaa is C or S
XSKVVMVQVEKVKPTRGVVKAIKVSRLDQ

SEQ ID NO: 75852 - protein, 34 aa, Artificial Sequence; identical to SEQ ID NO: 27418
  Cyclic GFR-binding peptide
  MOD_RES (1), (3): Xaa is C or S

SEQ ID NO: 75853 - protein, 38 aa, Artificial Sequence; identical to SEQ ID NO: 27421
  Cyclic GFR-binding peptide
  MOD_RES (1), (33): Xaa is C or S

SEQ ID NO: 75854 - protein, 36 aa, Artificial Sequence; identical to SEQ ID NO: 27430
  Cyclic GFR-binding peptide
  MOD_RES (31), (31): Xaa is C or S

SEQ ID NO: 75855 - protein, 34 aa, Artificial Sequence; identical to SEQ ID NO: 27435
  Cyclic GFR-binding peptide
  MOD_RES (31), (32): Xaa is C or S

SEQ ID NO: 75856 - protein, 30 aa, Artificial Sequence
  Cyclic GFR-binding peptide
  MOD_RES (27), (28): Xaa is C or S
MVTAKKVKPKRGVIKRIQVPRLAQPVXXPA

SEQ ID NO: 75857 - protein, 28 aa, Artificial Sequence
  Cyclic GFR-binding peptide
GEVVMEVTAKKVVKDYEDIKRMQVPRLE

SEQ ID NO: 75858 - protein, 40 aa, Artificial Sequence; identical to SEQ ID NO: 27437
  Cyclic GFR-binding peptide
  MOD_RES (1), (3), (35), (36): Xaa is C or S

SEQ ID NO: 75859 - protein, 36 aa, Artificial Sequence; identical to SEQ ID NO: 27440
  Cyclic GFR-binding peptide
  MOD_RES (1), (3), (34), (35): Xaa is C or S

SEQ ID NO: 75860 - protein, 32 aa, Artificial Sequence
  Cyclic GFR-binding peptide
  MOD_RES (29), (30): Xaa is C or S
VMESMEGIVVKDYEDMIQMTINSLETPVXXAK

SEQ ID NO: 75861 - protein, 33 aa, Artificial Sequence
  Cyclic GFR-binding peptide
  MOD_RES (2), (4): Xaa is C or S
HXGXARVVMNVTAKKIVNSSDDIKRVQVPRLQT

SEQ ID NO: 75862 - protein, 25 aa, Artificial Sequence
  Cyclic GFR-binding peptide
VMVTAKKVKPTRGVIKRIQVPRLDQ

SEQ ID NO: 75863 - protein, 38 aa, Artificial Sequence; identical to SEQ ID NO: 27449
  Cyclic GFR-binding peptide
  MOD_RES (1), (32), (33): Xaa is C or S

SEQ ID NO: 75864 - protein, 36 aa, Artificial Sequence; identical to SEQ ID NO: 27453
  Cyclic GFR-binding peptide
  MOD_RES (1), (3), (35), (36): Xaa is C or S

SEQ ID NO: 75865 - protein, 28 aa, Artificial Sequence
  Cyclic GFR-binding peptide
VVMDSMEGIVVKENEDMIQMTINSLETP

SEQ ID NO: 75866 - protein, 32 aa, Artificial Sequence
  Cyclic GFR-binding peptide
  MOD_RES (28), (29): Xaa is C or S
MESMEGIVVKDYEDMIQMTINSLETPVXXAKP

SEQ ID NO: 75867 - protein, 33 aa, Artificial Sequence; identical to SEQ ID NO: 27455
  Cyclic GFR-binding peptide
  MOD_RES (31), (32): Xaa is C or S

SEQ ID NO: 75868 - protein, 34 aa, Artificial Sequence; identical to SEQ ID NO: 27457
  Cyclic GFR-binding peptide
  MOD_RES (32), (32): Xaa is C or S

SEQ ID NO: 75869 - protein, 23 aa, Artificial Sequence
  Cyclic GFR-binding peptide
VMDVQVEKVVKENEDVKAMKVSR

SEQ ID NO: 75870 - protein, 33 aa, Artificial Sequence
  Cyclic GFR-binding peptide
  MOD_RES (33), (33): Xaa is C or S
ELRNSLQELKPKKRVYEYYVVPLPEHHVRSPQX

SEQ ID NO: 75871 - protein, 28 aa, Artificial Sequence
  Cyclic GFR-binding peptide
  MOD_RES (26), (27): Xaa is C or S
VQVEKVKPKRGVVKAIKVSRLAQPVXXP

SEQ ID NO: 75872 - protein, 33 aa, Artificial Sequence; identical to SEQ ID NO: 27462
  Cyclic GFR-binding peptide
  MOD_RES (31), (31): Xaa is C or S

SEQ ID NO: 75873 - protein, 32 aa, Artificial Sequence
  Cyclic GFR-binding peptide
  MOD_RES (2), (2): Xaa is C or S
GXGEVVMDSMEGIVVKENEDMIQMTINSLETP

SEQ ID NO: 75874 - protein, 30 aa, Artificial Sequence
  Cyclic GFR-binding peptide
  MOD_RES (2), (2): Xaa is C or S
GXSRVVMNSMEGIIVNSSDDMIQVTINSLK

SEQ ID NO: 75875 - protein, 28 aa, Artificial Sequence
  Cyclic GFR-binding peptide
  MOD_RES (1), (1): Xaa is C or S
XARVVMNVTAKKIVNSSDDIKRVQVPRL

SEQ ID NO: 75876 - protein, 28 aa, Artificial Sequence
  Cyclic GFR-binding peptide
HEELRNSLQELKPKKRVYEYYVVPLPEH

SEQ ID NO: 75877 - protein, 32 aa, Artificial Sequence
  Cyclic GFR-binding peptide
  MOD_RES (26), (27): Xaa is C or S
SMEGIVKPTRGVMIQITINSLDQPVXXPSASA

SEQ ID NO: 75878 - protein, 34 aa, Artificial Sequence
  Cyclic GFR-binding peptide
  MOD_RES (28), (28): Xaa is C or S
NSLQEHQGQHPKIRYYLMTLPEEETPVXELGEDN

SEQ ID NO: 75879 - protein, 30 aa, Artificial Sequence; identical to SEQ ID NO: 27465
  Cyclic GFR-binding peptide

SEQ ID NO: 75880 - protein, 24 aa, Artificial Sequence
  Cyclic GFR-binding peptide
NSLQEFIPKKRVIEYYVVPLPELQ

SEQ ID NO: 75881 - protein, 30 aa, Artificial Sequence
  Cyclic GFR-binding peptide
  MOD_RES (2), (2): Xaa is C or S
GXGEVVMESMEGIVVKDYEDMIQMTINSLE

SEQ ID NO: 75882 - protein, 33 aa, Artificial Sequence; identical to SEQ ID NO: 27476
  Cyclic GFR-binding peptide
  MOD_RES (2), (33): Xaa is C or S

SEQ ID NO: 75883 - protein, 29 aa, Artificial Sequence
  Cyclic GFR-binding peptide
NSLQEFIPKKRVIEYYVVPLPELQVQTPR

SEQ ID NO: 75884 - protein, 34 aa, Artificial Sequence; identical to SEQ ID NO: 27480
  Cyclic GFR-binding peptide
  MOD_RES (32), (33): Xaa is C or S

SEQ ID NO: 75885 - protein, 34 aa, Artificial Sequence
  Cyclic GFR-binding peptide
  MOD_RES (29), (30): Xaa is C or S
VMNVQVEKIVNSSDDVKAVKVSRLQTPAXXPKPV

SEQ ID NO: 75886 - protein, 32 aa, Artificial Sequence
  Cyclic GFR-binding peptide
  MOD_RES (26), (27): Xaa is C or S
SMEGIVVKDYEDMIQMTINSLETPVXXAKPIS

SEQ ID NO: 75887 - protein, 30 aa, Artificial Sequence
  Cyclic GFR-binding peptide
  MOD_RES (29), (30): Xaa is C or S
VMDSMEGIVVKENEDMIQMTINSLETPVXX

SEQ ID NO: 75888 - protein, 29 aa, Artificial Sequence
  Cyclic GFR-binding peptide
AAAAAAAAAVTAKKIKPTKGIIKRIQVPR

SEQ ID NO: 75889 - protein, 31 aa, Artificial Sequence
  Cyclic GFR-binding peptide
  MOD_RES (29), (30): Xaa is C or S
VIMSMEGIVKPKRGVMIQITINSLAQPVXXP

SEQ ID NO: 75890 - protein, 38 aa, Artificial Sequence; identical to SEQ ID NO: 27494
  Cyclic GFR-binding peptide
  MOD_RES (37), (37): Xaa is C or S

SEQ ID NO: 75891 - protein, 39 aa, Artificial Sequence; identical to SEQ ID NO: 27499
  Cyclic GFR-binding peptide
  MOD_RES (2), (34), (35): Xaa is C or S

SEQ ID NO: 75892 - protein, 33 aa, Artificial Sequence
  Cyclic GFR-binding peptide
  MOD_RES (1), (3): Xaa is C or S
XGXARVVMNSMEGIIVNSSDDMIQVTINSLQTP

SEQ ID NO: 75893 - protein, 30 aa, Artificial Sequence
  Cyclic GFR-binding peptide
  MOD_RES (1), (1): Xaa is C or S
XGEVVMEVQVEKVVKDYEDVKAMKVSRLET

SEQ ID NO: 75894 - protein, 31 aa, Artificial Sequence
  Cyclic GFR-binding peptide
  MOD_RES (2), (2): Xaa is C or S
KXSRVIMVQVEKVKPKRGVVKAIKVSRLAQP

SEQ ID NO: 75895 - protein, 30 aa, Artificial Sequence
  Cyclic GFR-binding peptide
  MOD_RES (1), (1): Xaa is C or S
XGEVVMDSMEGIVVKENEDMIQMTINSLET

SEQ ID NO: 75896 - protein, 36 aa, Artificial Sequence; identical to SEQ ID NO: 27508
  Cyclic GFR-binding peptide
  MOD_RES (2), (4), (36): Xaa is C or S

SEQ ID NO: 75897 - protein, 30 aa, Artificial Sequence
  Cyclic GFR-binding peptide
  MOD_RES (30), (30): Xaa is C or S
KVVMSMEGIVKPTRGVMIQITINSLDQPVX

SEQ ID NO: 75898 - protein, 34 aa, Artificial Sequence; identical to SEQ ID NO: 27513
  Cyclic GFR-binding peptide
  MOD_RES (32), (32): Xaa is C or S

SEQ ID NO: 75899 - protein, 29 aa, Artificial Sequence
  Cyclic GFR-binding peptide
  MOD_RES (1), (1): Xaa is C or S
XSRVVMNVTAKKIVNSSDDIKRVQVPRLK

SEQ ID NO: 75900 - protein, 30 aa, Artificial Sequence
  Cyclic GFR-binding peptide
  MOD_RES (1), (3): Xaa is C or S
XGXARVVMNSMEGIIVNSSDDMIQVTINSL

SEQ ID NO: 75901 - protein, 31 aa, Artificial Sequence; identical to SEQ ID NO: 27515
  Cyclic GFR-binding peptide
  MOD_RES (31), (31): Xaa is C or S

SEQ ID NO: 75902 - protein, 32 aa, Artificial Sequence
  Cyclic GFR-binding peptide
  MOD_RES (30), (31): Xaa is C or S
VVMESMEGIVVKDYEDMIQMTINSLETPVXXA

SEQ ID NO: 75903 - protein, 31 aa, Artificial Sequence
  Cyclic GFR-binding peptide
  MOD_RES (27), (27): Xaa is C or S
NVTAKKIVNSSDDIKRVQVPRLKTPAXTPKT

SEQ ID NO: 75904 - protein, 37 aa, Artificial Sequence; identical to SEQ ID NO: 27522
  Cyclic GFR-binding peptide
  MOD_RES (2), (4), (36), (37): Xaa is C or S

SEQ ID NO: 75905 - protein, 29 aa, Artificial Sequence
  Cyclic GFR-binding peptide
SKVVMSMEGIVKPTRGVMIQITINSLDQP

SEQ ID NO: 75906 - protein, 34 aa, Artificial Sequence
  Cyclic GFR-binding peptide
  MOD_RES (30), (31): Xaa is C or S
VVMNVTAKKIVNSSDDIKRVQVPRLKTPAXXPKP

SEQ ID NO: 75907 - protein, 23 aa, Artificial Sequence
  Cyclic GFR-binding peptide
FNSLQEHQGQHPKIRYYLMTLPE

SEQ ID NO: 75908 - protein, 39 aa, Artificial Sequence; identical to SEQ ID NO: 27527
  Cyclic GFR-binding peptide
  MOD_RES (2), (33), (34): Xaa is C or S

SEQ ID NO: 75909 - protein, 28 aa, Artificial Sequence
  Cyclic GFR-binding peptide
EVVMDVQVEKVVKENEDVKAMKVSRLET

SEQ ID NO: 75910 - protein, 25 aa, Artificial Sequence
  Cyclic GFR-binding peptide
IMVQVEKIKPTKGIVKAIKVSRLDQ

SEQ ID NO: 75911 - protein, 38 aa, Artificial Sequence; identical to SEQ ID NO: 27533
  Cyclic GFR-binding peptide
  MOD_RES (2), (4), (36), (37): Xaa is C or S

SEQ ID NO: 75912 - protein, 33 aa, Artificial Sequence
  Cyclic GFR-binding peptide
  MOD_RES (30), (31): Xaa is C or S
KVIMSMEGIIKPTKGIMIQITINSLDQSVXXPS

SEQ ID NO: 75913 - protein, 31 aa, Artificial Sequence; identical to SEQ ID NO: 27537
  Cyclic GFR-binding peptide
  MOD_RES (1), (1): Xaa is C or S

SEQ ID NO: 75914 - protein, 31 aa, Artificial Sequence
  Cyclic GFR-binding peptide
DELTNSLQEFIPKKRVIEYYLVTLPELQVQT

SEQ ID NO: 75915 - protein, 41 aa, Artificial Sequence; identical to SEQ ID NO: 27542
  Cyclic GFR-binding peptide
  MOD_RES (2), (4), (35), (36): Xaa is C or S

SEQ ID NO: 75916 - protein, 29 aa, Artificial Sequence
  Cyclic GFR-binding peptide
  MOD_RES (28), (29): Xaa is C or S
MEVTAKKVVKDYEDIKRMQVPRLETPVXX

SEQ ID NO: 75917 - protein, 36 aa, Artificial Sequence; identical to SEQ ID NO: 27546
  Cyclic GFR-binding peptide
  MOD_RES (1), (32), (33): Xaa is C or S

SEQ ID NO: 75918 - protein, 39 aa, Artificial Sequence; identical to SEQ ID NO: 27547
  Cyclic GFR-binding peptide
  MOD_RES (2), (4), (35), (36): Xaa is C or S

SEQ ID NO: 75919 - protein, 32 aa, Artificial Sequence; identical to SEQ ID NO: 27550
  Cyclic GFR-binding peptide
  MOD_RES (32), (32): Xaa is C or S

SEQ ID NO: 75920 - protein, 33 aa, Artificial Sequence
  Cyclic GFR-binding peptide
  MOD_RES (30), (31): Xaa is C or S
VVMDVTAKKVVKENEDIKRMQVPRLETPVXXAK

SEQ ID NO: 75921 - protein, 30 aa, Artificial Sequence
  Cyclic GFR-binding peptide
  MOD_RES (28), (28): Xaa is C or S
MNVTAKKIVNSSDDIKRVQVPRLKTPAXTP

SEQ ID NO: 75922 - protein, 21 aa, Artificial Sequence
  Cyclic GFR-binding peptide
MVQVEKVKPKRGVVKAIKVSR

SEQ ID NO: 75923 - protein, 20 aa, Artificial Sequence
  Cyclic GFR-binding peptide
VQVEKVKPTRGVVKAIKVSR

SEQ ID NO: 75924 - protein, 28 aa, Artificial Sequence
  Cyclic GFR-binding peptide
ELTNSLQEFIPKKRVIEYYVVPLPELQV

SEQ ID NO: 75925 - protein, 34 aa, Artificial Sequence
  Cyclic GFR-binding peptide
  MOD_RES (30), (31): Xaa is C or S
VVMNVTAKKIVNSSDDIKRVQVPRLQTPAXXPKP

SEQ ID NO: 75926 - protein, 26 aa, Artificial Sequence
  Cyclic GFR-binding peptide
GEVVMDVQVEKVVKENEDVKAMKVSR

SEQ ID NO: 75927 - protein, 29 aa, Artificial Sequence
  Cyclic GFR-binding peptide
  MOD_RES (1), (1): Xaa is C or S
XSKVVMSMEGIVKPTRGVMIQITINSLDQ

SEQ ID NO: 75928 - protein, 22 aa, Artificial Sequence
  Cyclic GFR-binding peptide
IMSMEGIIKPTKGIMIQITINS

SEQ ID NO: 75929 - protein, 34 aa, Artificial Sequence
  Cyclic GFR-binding peptide
  MOD_RES (29), (30): Xaa is C or S
VIMSMEGIIKPTKGIMIQITINSLDQSVXXPSAS

SEQ ID NO: 75930 - protein, 34 aa, Artificial Sequence; identical to SEQ ID NO: 27564
  Cyclic GFR-binding peptide
  MOD_RES (2), (4): Xaa is C or S

SEQ ID NO: 75931 - protein, 27 aa, Artificial Sequence
  Cyclic GFR-binding peptide
EVVMDVQVEKVVKENEDVKAMKVSRLE

SEQ ID NO: 75932 - protein, 35 aa, Artificial Sequence
  Cyclic GFR-binding peptide
  MOD_RES (2), (2): Xaa is C or S
AXELHEELRNSLQELKPKKRVYEYYLVTLPEHHVR

SEQ ID NO: 75933 - protein, 39 aa, Artificial Sequence; identical to SEQ ID NO: 27569
  Cyclic GFR-binding peptide
  MOD_RES (1), (38): Xaa is C or S

SEQ ID NO: 75934 - protein, 35 aa, Artificial Sequence
  Cyclic GFR-binding peptide
  MOD_RES (32), (32): Xaa is C or S
LRNSLQELKPKKRVYEYYVVPLPEHHVRSPQXKVS

SEQ ID NO: 75935 - protein, 38 aa, Artificial Sequence; identical to SEQ ID NO: 27570
  Cyclic GFR-binding peptide
  MOD_RES (2), (4), (36): Xaa is C or S

SEQ ID NO: 75936 - protein, 29 aa, Artificial Sequence
  Cyclic GFR-binding peptide
EVVMDVQVEKVVKENEDVKAMKVSRLETP

SEQ ID NO: 75937 - protein, 28 aa, Artificial Sequence
  Cyclic GFR-binding peptide
  MOD_RES (1), (1): Xaa is C or S
XGEVVMDVQVEKVVKENEDVKAMKVSRL

SEQ ID NO: 75938 - protein, 39 aa, Artificial Sequence; identical to SEQ ID NO: 27574
  Cyclic GFR-binding peptide
  MOD_RES (36), (36): Xaa is C or S

SEQ ID NO: 75939 - protein, 29 aa, Artificial Sequence
  Cyclic GFR-binding peptide
KVVMSMEGIVKPTRGVMIQITINSLDQPV

SEQ ID NO: 75940 - protein, 36 aa, Artificial Sequence
  Cyclic GFR-binding peptide
  MOD_RES (33), (33): Xaa is C or S
ELTNSLQEFIPKKRVIEYYVVPLPELQVQTPRXQVN

SEQ ID NO: 75941 - protein, 32 aa, Artificial Sequence
  Cyclic GFR-binding peptide
  MOD_RES (1), (3): Xaa is C or S
XGXSRVVMNSMEGIIVNSSDDMIQVTINSLKT

SEQ ID NO: 75942 - protein, 33 aa, Artificial Sequence
  Cyclic GFR-binding peptide
  MOD_RES (28), (28): Xaa is C or S
NSLQEHQGQHPKIRYYLMTLPEEETPVXELGED

SEQ ID NO: 75943 - protein, 20 aa, Artificial Sequence
  Cyclic GFR-binding peptide
VTAKKVVKENEDIKRMQVPR

SEQ ID NO: 75944 - protein, 30 aa, Artificial Sequence
  Cyclic GFR-binding peptide
  MOD_RES (30), (30): Xaa is C or S
VVMDVQVEKVVKENEDVKAMKVSRLETPVX

SEQ ID NO: 75945 - protein, 35 aa, Artificial Sequence; identical to SEQ ID NO: 27582
  Cyclic GFR-binding peptide
  MOD_RES (31), (32): Xaa is C or S

SEQ ID NO: 75946 - protein, 24 aa, Artificial Sequence
  Cyclic GFR-binding peptide
VMDSMEGIVVKENEDMIQMTINSL

SEQ ID NO: 75947 - protein, 37 aa, Artificial Sequence; identical to SEQ ID NO: 27584
  Cyclic GFR-binding peptide
  MOD_RES (32), (33): Xaa is C or S

SEQ ID NO: 75948 - protein, 30 aa, Artificial Sequence
  Cyclic GFR-binding peptide
ALHDELTNSLQEFIPKKRVIEYYVVPLPEL

SEQ ID NO: 75949 - protein, 31 aa, Artificial Sequence
  Cyclic GFR-binding peptide
  MOD_RES (30), (31): Xaa is C or S
KVVMVQVEKVKPTRGVVKAIKVSRLDQPVXX

SEQ ID NO: 75950 - protein, 33 aa, Artificial Sequence
  Cyclic GFR-binding peptide
  MOD_RES (29), (30): Xaa is C or S
VVMSMEGIVKPTRGVMIQITINSLDQPVXXPSA

SEQ ID NO: 75951 - protein, 29 aa, Artificial Sequence
  Cyclic GFR-binding peptide
AAAAAAAAASMEGIVKPTRGVMIQITINS

SEQ ID NO: 75952 - protein, 24 aa, Artificial Sequence
  Cyclic GFR-binding peptide
IMVQVEKIKPTKGIVKAIKVSRLD

SEQ ID NO: 75953 - protein, 36 aa, Artificial Sequence; identical to SEQ ID NO: 27595
  Cyclic GFR-binding peptide
  MOD_RES (1), (3), (34), (35): Xaa is C or S

SEQ ID NO: 75954 - protein, 34 aa, Artificial Sequence
  Cyclic GFR-binding peptide
  MOD_RES (2), (4): Xaa is C or S
RXGXGEVVMDVQVEKVVKENEDVKAMKVSRLETP

SEQ ID NO: 75955 - protein, 33 aa, Artificial Sequence; identical to SEQ ID NO: 27597
  Cyclic GFR-binding peptide
  MOD_RES (31), (32): Xaa is C or S

SEQ ID NO: 75956 - protein, 33 aa, Artificial Sequence
  Cyclic GFR-binding peptide
  MOD_RES (29), (30): Xaa is C or S
VVMVQVEKVKPTRGVVKAIKVSRLDQPVXXPSA

SEQ ID NO: 75957 - protein, 26 aa, Artificial Sequence
  Cyclic GFR-binding peptide
VMVTAKKVKPTRGVIKRIQVPRLDQP

SEQ ID NO: 75958 - protein, 29 aa, Artificial Sequence
  Cyclic GFR-binding peptide
  MOD_RES (26), (27): Xaa is C or S
VQVEKVVKDYEDVKAMKVSRLETPVXXAK

SEQ ID NO: 75959 - protein, 32 aa, Artificial Sequence
  Cyclic GFR-binding peptide
  MOD_RES (26), (27): Xaa is C or S
VQVEKIKPTKGIVKAIKVSRLDQSVXXPSASA

SEQ ID NO: 75960 - protein, 32 aa, Artificial Sequence; identical to SEQ ID NO: 27603
  Cyclic GFR-binding peptide
  MOD_RES (31), (32): Xaa is C or S

SEQ ID NO: 75961 - protein, 23 aa, Artificial Sequence
  Cyclic GFR-binding peptide
VIMVTAKKVKPKRGVIKRIQVPR

SEQ ID NO: 75962 - protein, 26 aa, Artificial Sequence
  Cyclic GFR-binding peptide
KVIMVTAKKIKPTKGIIKRIQVPRLD

SEQ ID NO: 75963 - protein, 25 aa, Artificial Sequence
  Cyclic GFR-binding peptide
FNSLQEHQGQHPKIRYYLMTLPEEE

SEQ ID NO: 75964 - protein, 34 aa, Artificial Sequence; identical to SEQ ID NO: 27610
  Cyclic GFR-binding peptide
  MOD_RES (1), (1): Xaa is C or S

SEQ ID NO: 75965 - protein, 33 aa, Artificial Sequence
  Cyclic GFR-binding peptide
  MOD_RES (1), (3): Xaa is C or S
XGXSRVVMNSMEGIIVNSSDDMIQVTINSLKTP

SEQ ID NO: 75966 - protein, 29 aa, Artificial Sequence
  Cyclic GFR-binding peptide
EELRNSLQELKPKKRVYEYYVVPLPEHHV

SEQ ID NO: 75967 - protein, 31 aa, Artificial Sequence
  Cyclic GFR-binding peptide
  MOD_RES (1), (3): Xaa is C or S
XGXSRVVMNVQVEKIVNSSDDVKAVKVSRLK

SEQ ID NO: 75968 - protein, 34 aa, Artificial Sequence
  Cyclic GFR-binding peptide
  MOD_RES (28), (28): Xaa is C or S
MNSMEGIIVNSSDDMIQVTINSLKTPAXTPKTVH

SEQ ID NO: 75969 - protein, 29 aa, Artificial Sequence
  Cyclic GFR-binding peptide
  MOD_RES (27), (28): Xaa is C or S
MVQVEKIKPTKGIVKAIKVSRLDQSVXXP

SEQ ID NO: 75970 - protein, 40 aa, Artificial Sequence; identical to SEQ ID NO: 27614
  Cyclic GFR-binding peptide
  MOD_RES (1), (3), (37): Xaa is C or S

SEQ ID NO: 75971 - protein, 32 aa, Artificial Sequence
  Cyclic GFR-binding peptide
  MOD_RES (30), (30): Xaa is C or S
NSLQEFIPKKRVIEYYVVPLPELQVQTPRXQV

SEQ ID NO: 75972 - protein, 37 aa, Artificial Sequence
  Cyclic GFR-binding peptide
  MOD_RES (31), (31): Xaa is C or S
QLFNSLQEHQGQHPKIRYYLMTLPEEETPVXELGEDN

SEQ ID NO: 75973 - protein, 23 aa, Artificial Sequence
  Cyclic GFR-binding peptide
IMSMEGIVKPKRGVMIQITINSL

SEQ ID NO: 75974 - protein, 32 aa, Artificial Sequence
  Cyclic GFR-binding peptide
  MOD_RES (29), (30): Xaa is C or S
VIMSMEGIIKPTKGIMIQITINSLDQSVXXPS

SEQ ID NO: 75975 - protein, 31 aa, Artificial Sequence
  Cyclic GFR-binding peptide
AAAAAAAAANSLQEFIPKKRVIEYYVVPLPE

SEQ ID NO: 75976 - protein, 37 aa, Artificial Sequence; identical to SEQ ID NO: 27621
  Cyclic GFR-binding peptide
  MOD_RES (36), (36): Xaa is C or S

SEQ ID NO: 75977 - protein, 32 aa, Artificial Sequence
  Cyclic GFR-binding peptide
  MOD_RES (27), (28): Xaa is C or S
MVTAKKIKPTKGIIKRIQVPRLDQSVXXPSAS

SEQ ID NO: 75978 - protein, 40 aa, Artificial Sequence; identical to SEQ ID NO: 27623
  Cyclic GFR-binding peptide
  MOD_RES (2), (34), (35): Xaa is C or S

SEQ ID NO: 75979 - protein, 34 aa, Artificial Sequence
  Cyclic GFR-binding peptide
  MOD_RES (29), (30): Xaa is C or S
VMEVTAKKVVKDYEDIKRMQVPRLETPVXXAKPI

SEQ ID NO: 75980 - protein, 36 aa, Artificial Sequence; identical to SEQ ID NO: 27624
  Cyclic GFR-binding peptide
  MOD_RES (31), (32): Xaa is C or S

SEQ ID NO: 75981 - protein, 26 aa, Artificial Sequence
  Cyclic GFR-binding peptide
IMVTAKKIKPTKGIIKRIQVPRLDQS

SEQ ID NO: 75982 - protein, 29 aa, Artificial Sequence
  Cyclic GFR-binding peptide
  MOD_RES (29), (29): Xaa is C or S
VIMVTAKKIKPTKGIIKRIQVPRLDQSVX

SEQ ID NO: 75983 - protein, 26 aa, Artificial Sequence
  Cyclic GFR-binding peptide
MVTAKKVKPKRGVIKRIQVPRLAQPV

SEQ ID NO: 75984 - protein, 27 aa, Artificial Sequence
  Cyclic GFR-binding peptide
NHQLFNSLQEHQGQHPKIRYYLMTLPE

SEQ ID NO: 75985 - protein, 34 aa, Artificial Sequence; identical to SEQ ID NO: 27626
  Cyclic GFR-binding peptide
  MOD_RES (1), (3), (34): Xaa is C or S

SEQ ID NO: 75986 - protein, 37 aa, Artificial Sequence; identical to SEQ ID NO: 27627
  Cyclic GFR-binding peptide
  MOD_RES (2), (34), (35): Xaa is C or S

SEQ ID NO: 75987 - protein, 30 aa, Artificial Sequence
  Cyclic GFR-binding peptide
  MOD_RES (1), (3): Xaa is C or S
XKXSKVVMVTAKKVKPTRGVIKRIQVPRLD

SEQ ID NO: 75988 - protein, 23 aa, Artificial Sequence
  Cyclic GFR-binding peptide
VTAKKVVKENEDIKRMQVPRLET

SEQ ID NO: 75989 - protein, 30 aa, Artificial Sequence
  Cyclic GFR-binding peptide
  MOD_RES (1), (1): Xaa is C or S
XSRVIMSMEGIVKPKRGVMIQITINSLAQP

SEQ ID NO: 75990 - protein, 24 aa, Artificial Sequence
  Cyclic GFR-binding peptide
MVTAKKVKPTRGVIKRIQVPRLDQ

SEQ ID NO: 75991 - protein, 29 aa, Artificial Sequence
  Cyclic GFR-binding peptide
AAAAAAAAAVQVEKVKPKRGVVKAIKVSR

SEQ ID NO: 75992 - protein, 38 aa, Artificial Sequence; identical to SEQ ID NO: 27634
  Cyclic GFR-binding peptide
  MOD_RES (2), (33), (34): Xaa is C or S

SEQ ID NO: 75993 - protein, 38 aa, Artificial Sequence; identical to SEQ ID NO: 27637
  Cyclic GFR-binding peptide
  MOD_RES (2), (33), (34): Xaa is C or S

SEQ ID NO: 75994 - protein, 33 aa, Artificial Sequence
  Cyclic GFR-binding peptide
ALHDELTNSLQEFIPKKRVIEYYVVPLPELQVQ

SEQ ID NO: 75995 - protein, 39 aa, Artificial Sequence; identical to SEQ ID NO: 27640
  Cyclic GFR-binding peptide
  MOD_RES (1), (3), (34), (35): Xaa is C or S

SEQ ID NO: 75996 - protein, 34 aa, Artificial Sequence; identical to SEQ ID NO: 27643
  Cyclic GFR-binding peptide

SEQ ID NO: 75997 - protein, 28 aa, Artificial Sequence
  Cyclic GFR-binding peptide
  MOD_RES (28), (28): Xaa is C or S
MEVTAKKVVKDYEDIKRMQVPRLETPVX

SEQ ID NO: 75998 - protein, 42 aa, Artificial Sequence; identical to SEQ ID NO: 27644
  Cyclic GFR-binding peptide
  MOD_RES (2), (4), (36), (37): Xaa is C or S

SEQ ID NO: 75999 - protein, 38 aa, Artificial Sequence; identical to SEQ ID NO: 27645
  Cyclic GFR-binding peptide
  MOD_RES (1), (33), (34): Xaa is C or S

SEQ ID NO: 76000 - protein, 36 aa, Artificial Sequence; identical to SEQ ID NO: 27647
  Cyclic GFR-binding peptide
  MOD_RES (31), (32): Xaa is C or S

SEQ ID NO: 76001 - protein, 29 aa, Artificial Sequence
  Cyclic GFR-binding peptide
  MOD_RES (1), (3): Xaa is C or S
XKXSKVIMSMEGIIKPTKGIMIQITINSL

SEQ ID NO: 76002 - protein, 37 aa, Artificial Sequence; identical to SEQ ID NO: 27649
  Cyclic GFR-binding peptide
  MOD_RES (1), (32), (33): Xaa is C or S

SEQ ID NO: 76003 - protein, 36 aa, Artificial Sequence; identical to SEQ ID NO: 27650
  Cyclic GFR-binding peptide
  MOD_RES (2), (34), (35): Xaa is C or S

SEQ ID NO: 76004 - protein, 38 aa, Artificial Sequence
  Cyclic GFR-binding peptide
  MOD_RES (34), (34): Xaa is C or S
DELTNSLQEFIPKKRVIEYYVVPLPELQVQTPRXQVNR

SEQ ID NO: 76005 - protein, 39 aa, Artificial Sequence; identical to SEQ ID NO: 27652
  Cyclic GFR-binding peptide
  MOD_RES (1), (33), (34): Xaa is C or S

SEQ ID NO: 76006 - protein, 26 aa, Artificial Sequence
  Cyclic GFR-binding peptide
  MOD_RES (26), (26): Xaa is C or S
SMEGIVKPKRGVMIQITINSLAQPVX

SEQ ID NO: 76007 - protein, 33 aa, Artificial Sequence
  Cyclic GFR-binding peptide
  MOD_RES (27), (28): Xaa is C or S
MSMEGIVKPTRGVMIQITINSLDQPVXXPSASA

SEQ ID NO: 76008 - protein, 28 aa, Artificial Sequence
  Cyclic GFR-binding peptide
RVIMSMEGIVKPKRGVMIQITINSLAQP

SEQ ID NO: 76009 - protein, 38 aa, Artificial Sequence; identical to SEQ ID NO: 27656
  Cyclic GFR-binding peptide
  MOD_RES (32), (33): Xaa is C or S

SEQ ID NO: 76010 - protein, 38 aa, Artificial Sequence; identical to SEQ ID NO: 27657
  Cyclic GFR-binding peptide
  MOD_RES (1), (3), (35): Xaa is C or S

SEQ ID NO: 76011 - protein, 33 aa, Artificial Sequence; identical to SEQ ID NO: 27658
  Cyclic GFR-binding peptide
  MOD_RES (2), (2): Xaa is C or S

SEQ ID NO: 76012 - protein, 29 aa, Artificial Sequence
  Cyclic GFR-binding peptide
NHQLFNSLQEHQGQHPKIRYYVMPLPEEE

SEQ ID NO: 76013 - protein, 37 aa, Artificial Sequence; identical to SEQ ID NO: 27661
  Cyclic GFR-binding peptide
  MOD_RES (2), (4), (36), (37): Xaa is C or S

SEQ ID NO: 76014 - protein, 32 aa, Artificial Sequence
  Cyclic GFR-binding peptide
  MOD_RES (27), (27): Xaa is C or S
NVTAKKIVNSSDDIKRVQVPRLKTPAXTPKTV

SEQ ID NO: 76015 - protein, 29 aa, Artificial Sequence
  Cyclic GFR-binding peptide
AAAAAAAAAVQVEKVVKENEDVKAMKVSR

SEQ ID NO: 76016 - protein, 25 aa, Artificial Sequence
  Cyclic GFR-binding peptide
SMEGIVVKDYEDMIQMTINSLETPV

SEQ ID NO: 76017 - protein, 24 aa, Artificial Sequence
  Cyclic GFR-binding peptide
VMDVQVEKVVKENEDVKAMKVSRL

SEQ ID NO: 76018 - protein, 28 aa, Artificial Sequence
  Cyclic GFR-binding peptide
  MOD_RES (1), (3): Xaa is C or S
XKXSKVIMVTAKKIKPTKGIIKRIQVPR

SEQ ID NO: 76019 - protein, 26 aa, Artificial Sequence
  Cyclic GFR-binding peptide
VMDSMEGIVVKENEDMIQMTINSLET

SEQ ID NO: 76020 - protein, 30 aa, Artificial Sequence
  Cyclic GFR-binding peptide
  MOD_RES (1), (1): Xaa is C or S
XSKVVMVTAKKVKPTRGVIKRIQVPRLDQP

SEQ ID NO: 76021 - protein, 35 aa, Artificial Sequence; identical to SEQ ID NO: 27671
  Cyclic GFR-binding peptide
  MOD_RES (2), (33), (34): Xaa is C or S

SEQ ID NO: 76022 - protein, 33 aa, Artificial Sequence
  Cyclic GFR-binding peptide
  MOD_RES (30), (31): Xaa is C or S
VVMNVTAKKIVNSSDDIKRVQVPRLQTPAXXPK

SEQ ID NO: 76023 - protein, 45 aa, Artificial Sequence; identical to SEQ ID NO: 27674
  Cyclic GFR-binding peptide
  MOD_RES (2), (4), (41): Xaa is C or S

SEQ ID NO: 76024 - protein, 30 aa, Artificial Sequence
  Cyclic GFR-binding peptide
  MOD_RES (29), (30): Xaa is C or S
VIMVQVEKVKPKRGVVKAIKVSRLAQPVXX

SEQ ID NO: 76025 - protein, 24 aa, Artificial Sequence
  Cyclic GFR-binding peptide
IMSMEGIVKPKRGVMIQITINSLA

SEQ ID NO: 76026 - protein, 31 aa, Artificial Sequence; identical to SEQ ID NO: 27675
  Cyclic GFR-binding peptide
  MOD_RES (31), (31): Xaa is C or S

SEQ ID NO: 76027 - protein, 26 aa, Artificial Sequence
  Cyclic GFR-binding peptide
  MOD_RES (26), (26): Xaa is C or S
VTAKKVVKDYEDIKRMQVPRLETPVX

SEQ ID NO: 76028 - protein, 35 aa, Artificial Sequence; identical to SEQ ID NO: 27681
  Cyclic GFR-binding peptide

SEQ ID NO: 76029 - protein, 32 aa, Artificial Sequence
  Cyclic GFR-binding peptide
  MOD_RES (29), (30): Xaa is C or S
VIMVQVEKIKPTKGIVKAIKVSRLDQSVXXPS

SEQ ID NO: 76030 - protein, 24 aa, Artificial Sequence
  Cyclic GFR-binding peptide
MDVTAKKVVKENEDIKRMQVPRLE

SEQ ID NO: 76031 - protein, 38 aa, Artificial Sequence; identical to SEQ ID NO: 27687
  Cyclic GFR-binding peptide
  MOD_RES (32), (33): Xaa is C or S

SEQ ID NO: 76032 - protein, 27 aa, Artificial Sequence
  Cyclic GFR-binding peptide
MDVQVEKVVKENEDVKAMKVSRLETPV

SEQ ID NO: 76033 - protein, 35 aa, Artificial Sequence; identical to SEQ ID NO: 27689
  Cyclic GFR-binding peptide
  MOD_RES (1), (33), (34): Xaa is C or S

SEQ ID NO: 76034 - protein, 41 aa, Artificial Sequence; identical to SEQ ID NO: 27690
  Cyclic GFR-binding peptide
  MOD_RES (1), (3), (35): Xaa is C or S

SEQ ID NO: 76035 - protein, 39 aa, Artificial Sequence; identical to SEQ ID NO: 27693
  Cyclic GFR-binding peptide
  MOD_RES (2), (33), (34): Xaa is C or S

SEQ ID NO: 76036 - protein, 34 aa, Artificial Sequence; identical to SEQ ID NO: 27696
  Cyclic GFR-binding peptide
  MOD_RES (2), (34): Xaa is C or S

SEQ ID NO: 76037 - protein, 37 aa, Artificial Sequence; identical to SEQ ID NO: 27697
  Cyclic GFR-binding peptide
  MOD_RES (2), (4), (35), (36): Xaa is C or S

SEQ ID NO: 76038 - protein, 29 aa, Artificial Sequence
  Cyclic GFR-binding peptide
  MOD_RES (2), (4): Xaa is C or S
SXKXSKVIMSMEGIIKPTKGIMIQITINS

SEQ ID NO: 76039 - protein, 34 aa, Artificial Sequence
  Cyclic GFR-binding peptide
  MOD_RES (34), (34): Xaa is C or S
DELTNSLQEFIPKKRVIEYYLVTLPELQVQTPRX

SEQ ID NO: 76040 - protein, 29 aa, Artificial Sequence
  Cyclic GFR-binding peptide
LFNSLQEHQGQHPKIRYYVMPLPEEETPV

SEQ ID NO: 76041 - protein, 37 aa, Artificial Sequence; identical to SEQ ID NO: 27700
  Cyclic GFR-binding peptide
  MOD_RES (31), (32): Xaa is C or S

SEQ ID NO: 76042 - protein, 27 aa, Artificial Sequence
  Cyclic GFR-binding peptide
VVMNSMEGIIVNSSDDMIQVTINSLQT

SEQ ID NO: 76043 - protein, 35 aa, Artificial Sequence; identical to SEQ ID NO: 27703
  Cyclic GFR-binding peptide
  MOD_RES (1), (3), (35): Xaa is C or S

SEQ ID NO: 76044 - protein, 33 aa, Artificial Sequence
  Cyclic GFR-binding peptide
ELHEELRNSLQELKPKKRVYEYYLVTLPEHHVR

SEQ ID NO: 76045 - protein, 26 aa, Artificial Sequence
  Cyclic GFR-binding peptide
VIMVTAKKIKPTKGIIKRIQVPRLDQ

SEQ ID NO: 76046 - protein, 35 aa, Artificial Sequence
  Cyclic GFR-binding peptide
  MOD_RES (32), (32): Xaa is C or S
LRNSLQELKPKKRVYEYYLVTLPEHHVRSPQXKVS

SEQ ID NO: 76047 - protein, 37 aa, Artificial Sequence; identical to SEQ ID NO: 27706
  Cyclic GFR-binding peptide
  MOD_RES (1), (3): Xaa is C or S

SEQ ID NO: 76048 - protein, 36 aa, Artificial Sequence; identical to SEQ ID NO: 27710
  Cyclic GFR-binding peptide
  MOD_RES (1), (3), (34), (35): Xaa is C or S

SEQ ID NO: 76049 - protein, 34 aa, Artificial Sequence; identical to SEQ ID NO: 27711
  Cyclic GFR-binding peptide
  MOD_RES (1), (3): Xaa is C or S

SEQ ID NO: 76050 - protein, 28 aa, Artificial Sequence
  Cyclic GFR-binding peptide
  MOD_RES (1), (1): Xaa is C or S
XSKVIMVQVEKIKPTKGIVKAIKVSRLD

SEQ ID NO: 76051 - protein, 36 aa, Artificial Sequence
  Cyclic GFR-binding peptide
  MOD_RES (30), (31): Xaa is C or S
VVMDVTAKKVVKENEDIKRMQVPRLETPVXXAKPIK

SEQ ID NO: 76052 - protein, 31 aa, Artificial Sequence
  Cyclic GFR-binding peptide
  MOD_RES (1), (3): Xaa is C or S
XGXARVVMNVQVEKIVNSSDDVKAVKVSRLQ

SEQ ID NO: 76053 - protein, 35 aa, Artificial Sequence; identical to SEQ ID NO: 27717
  Cyclic GFR-binding peptide
  MOD_RES (1), (32), (33): Xaa is C or S

SEQ ID NO: 76054 - protein, 31 aa, Artificial Sequence
  Cyclic GFR-binding peptide
  MOD_RES (28), (28): Xaa is C or S
MNSMEGIIVNSSDDMIQVTINSLKTPAXTPK

SEQ ID NO: 76055 - protein, 40 aa, Artificial Sequence; identical to SEQ ID NO: 27719
  Cyclic GFR-binding peptide
  MOD_RES (2), (4), (36), (37): Xaa is C or S

SEQ ID NO: 76056 - protein, 33 aa, Artificial Sequence
  Cyclic GFR-binding peptide
  MOD_RES (30), (31): Xaa is C or S
VVMNVQVEKIVNSSDDVKAVKVSRLKTPAXXPK

SEQ ID NO: 76057 - protein, 25 aa, Artificial Sequence
  Cyclic GFR-binding peptide
NSLQEFIPKKRVIEYYLVTLPELQV

SEQ ID NO: 76058 - protein, 32 aa, Artificial Sequence
  Cyclic GFR-binding peptide
  MOD_RES (30), (31): Xaa is C or S
VVMNVQVEKIVNSSDDVKAVKVSRLKTPAXXP

SEQ ID NO: 76059 - protein, 30 aa, Artificial Sequence
  Cyclic GFR-binding peptide
  MOD_RES (29), (29): Xaa is C or S
FNSLQEHQGQHPKIRYYVMPLPEEETPVXE

SEQ ID NO: 76060 - protein, 27 aa, Artificial Sequence
  Cyclic GFR-binding peptide
  MOD_RES (1), (1): Xaa is C or S
XARVVMNVQVEKIVNSSDDVKAVKVSR

SEQ ID NO: 76061 - protein, 36 aa, Artificial Sequence; identical to SEQ ID NO: 27723
  Cyclic GFR-binding peptide
  MOD_RES (31), (32): Xaa is C or S

SEQ ID NO: 76062 - protein, 42 aa, Artificial Sequence; identical to SEQ ID NO: 27724
  Cyclic GFR-binding peptide
  MOD_RES (2), (36): Xaa is C or S

SEQ ID NO: 76063 - protein, 21 aa, Artificial Sequence
  Cyclic GFR-binding peptide
SMEGIIKPTKGIMIQITINSL

SEQ ID NO: 76064 - protein, 29 aa, Artificial Sequence
  Cyclic GFR-binding peptide
  MOD_RES (1), (3): Xaa is C or S
XKXSKVVMVQVEKVKPTRGVVKAIKVSRL

SEQ ID NO: 76065 - protein, 31 aa, Artificial Sequence
  Cyclic GFR-binding peptide
  MOD_RES (30), (31): Xaa is C or S
RVIMVQVEKVKPKRGVVKAIKVSRLAQPVXX

SEQ ID NO: 76066 - protein, 35 aa, Artificial Sequence
  Cyclic GFR-binding peptide
  MOD_RES (2), (2): Xaa is C or S
KXALHDELTNSLQEFIPKKRVIEYYLVTLPELQVQ

SEQ ID NO: 76067 - protein, 29 aa, Artificial Sequence
  Cyclic GFR-binding peptide
  MOD_RES (2), (2): Xaa is C or S
GXGEVVMEVQVEKVVKDYEDVKAMKVSRL

SEQ ID NO: 76068 - protein, 29 aa, Artificial Sequence
  Cyclic GFR-binding peptide
  MOD_RES (26), (26): Xaa is C or S
SMEGIIVNSSDDMIQVTINSLKTPAXTPK

SEQ ID NO: 76069 - protein, 29 aa, Artificial Sequence
  Cyclic GFR-binding peptide
ARVVMNSMEGIIVNSSDDMIQVTINSLQT

SEQ ID NO: 76070 - protein, 31 aa, Artificial Sequence
  Cyclic GFR-binding peptide
  MOD_RES (2), (4): Xaa is C or S
SXKXSKVVMVTAKKVKPTRGVIKRIQVPRLD

SEQ ID NO: 76071 - protein, 29 aa, Artificial Sequence
  Cyclic GFR-binding peptide
  MOD_RES (2), (4): Xaa is C or S
SXKXSRVIMVQVEKVKPKRGVVKAIKVSR

SEQ ID NO: 76072 - protein, 23 aa, Artificial Sequence
  Cyclic GFR-binding peptide
VQVEKIKPTKGIVKAIKVSRLDQ

SEQ ID NO: 76073 - protein, 28 aa, Artificial Sequence
  Cyclic GFR-binding peptide
  MOD_RES (28), (28): Xaa is C or S
MNSMEGIIVNSSDDMIQVTINSLQTPAX

SEQ ID NO: 76074 - protein, 29 aa, Artificial Sequence
  Cyclic GFR-binding peptide
RVVMNSMEGIIVNSSDDMIQVTINSLQTP

SEQ ID NO: 76075 - protein, 31 aa, Artificial Sequence
  Cyclic GFR-binding peptide
  MOD_RES (26), (27): Xaa is C or S
VTAKKVKPTRGVIKRIQVPRLDQPVXXPSAS

SEQ ID NO: 76076 - protein, 20 aa, Artificial Sequence
  Cyclic GFR-binding peptide
VQVEKVVKDYEDVKAMKVSR

SEQ ID NO: 76077 - protein, 36 aa, Artificial Sequence; identical to SEQ ID NO: 27739
  Cyclic GFR-binding peptide
  MOD_RES (1), (32), (33): Xaa is C or S

SEQ ID NO: 76078 - protein, 30 aa, Artificial Sequence
  Cyclic GFR-binding peptide
  MOD_RES (1), (1): Xaa is C or S
XARVVMNVQVEKIVNSSDDVKAVKVSRLQT

SEQ ID NO: 76079 - protein, 31 aa, Artificial Sequence
  Cyclic GFR-binding peptide
  MOD_RES (1), (1): Xaa is C or S
XSRVVMNSMEGIIVNSSDDMIQVTINSLKTP

SEQ ID NO: 76080 - protein, 27 aa, Artificial Sequence
  Cyclic GFR-binding peptide
EELRNSLQELKPKKRVYEYYVVPLPEH

SEQ ID NO: 76081 - protein, 35 aa, Artificial Sequence
  Cyclic GFR-binding peptide
  MOD_RES (29), (30): Xaa is C or S
VMEVTAKKVVKDYEDIKRMQVPRLETPVXXAKPIS

SEQ ID NO: 76082 - protein, 31 aa, Artificial Sequence
  Cyclic GFR-binding peptide
  MOD_RES (30), (30): Xaa is C or S
NSLQEFIPKKRVIEYYVVPLPELQVQTPRXQ

SEQ ID NO: 76083 - protein, 26 aa, Artificial Sequence
  Cyclic GFR-binding peptide
HQLFNSLQEHQGQHPKIRYYLMTLPE

SEQ ID NO: 76084 - protein, 30 aa, Artificial Sequence; identical to SEQ ID NO: 27751
  Cyclic GFR-binding peptide

SEQ ID NO: 76085 - protein, 26 aa, Artificial Sequence
  Cyclic GFR-binding peptide
VIMSMEGIVKPKRGVMIQITINSLAQ

SEQ ID NO: 76086 - protein, 31 aa, Artificial Sequence
  Cyclic GFR-binding peptide
  MOD_RES (29), (30): Xaa is C or S
VMDSMEGIVVKENEDMIQMTINSLETPVXXA

SEQ ID NO: 76087 - protein, 26 aa, Artificial Sequence
  Cyclic GFR-binding peptide
VIMVQVEKVKPKRGVVKAIKVSRLAQ

SEQ ID NO: 76088 - protein, 42 aa, Artificial Sequence; identical to SEQ ID NO: 27753
  Cyclic GFR-binding peptide
  MOD_RES (1), (3), (40): Xaa is C or S

SEQ ID NO: 76089 - protein, 39 aa, Artificial Sequence; identical to SEQ ID NO: 27755
  Cyclic GFR-binding peptide
  MOD_RES (1), (33), (34): Xaa is C or S

SEQ ID NO: 76090 - protein, 32 aa, Artificial Sequence
  Cyclic GFR-binding peptide
  MOD_RES (28), (29): Xaa is C or S
IMVQVEKVKPKRGVVKAIKVSRLAQPVXXPAA

SEQ ID NO: 76091 - protein, 29 aa, Artificial Sequence
  Cyclic GFR-binding peptide
  MOD_RES (26), (27): Xaa is C or S
SMEGIVKPKRGVMIQITINSLAQPVXXPA

SEQ ID NO: 76092 - protein, 35 aa, Artificial Sequence; identical to SEQ ID NO: 27758
  Cyclic GFR-binding peptide
  MOD_RES (2), (4): Xaa is C or S

SEQ ID NO: 76093 - protein, 35 aa, Artificial Sequence; identical to SEQ ID NO: 27760
  Cyclic GFR-binding peptide
  MOD_RES (1), (3), (34), (35): Xaa is C or S

SEQ ID NO: 76094 - protein, 28 aa, Artificial Sequence
  Cyclic GFR-binding peptide
  MOD_RES (2), (2): Xaa is C or S
KXSKVIMVTAKKIKPTKGIIKRIQVPRL

SEQ ID NO: 76095 - protein, 28 aa, Artificial Sequence
  Cyclic GFR-binding peptide
VVMNSMEGIIVNSSDDMIQVTINSLKTP

SEQ ID NO: 76096 - protein, 24 aa, Artificial Sequence
  Cyclic GFR-binding peptide
KVIMVQVEKIKPTKGIVKAIKVSR

SEQ ID NO: 76097 - protein, 39 aa, Artificial Sequence; identical to SEQ ID NO: 27764
  Cyclic GFR-binding peptide
  MOD_RES (2), (36): Xaa is C or S

SEQ ID NO: 76098 - protein, 22 aa, Artificial Sequence
  Cyclic GFR-binding peptide
NSLQEHQGQHPKIRYYVMPLPE

SEQ ID NO: 76099 - protein, 29 aa, Artificial Sequence
  Cyclic GFR-binding peptide
  MOD_RES (28), (29): Xaa is C or S
MNSMEGIIVNSSDDMIQVTINSLQTPAXX

SEQ ID NO: 76100 - protein, 29 aa, Artificial Sequence
  Cyclic GFR-binding peptide
  MOD_RES (26), (27): Xaa is C or S
SMEGIIVNSSDDMIQVTINSLQTPAXXPK

SEQ ID NO: 76101 - protein, 23 aa, Artificial Sequence
  Cyclic GFR-binding peptide
NVTAKKIVNSSDDIKRVQVPRLK

SEQ ID NO: 76102 - protein, 32 aa, Artificial Sequence
  Cyclic GFR-binding peptide
  MOD_RES (1), (1): Xaa is C or S
XALHDELTNSLQEFIPKKRVIEYYVVPLPELQ

SEQ ID NO: 76103 - protein, 34 aa, Artificial Sequence; identical to SEQ ID NO: 27779
  Cyclic GFR-binding peptide
  MOD_RES (31), (32): Xaa is C or S

SEQ ID NO: 76104 - protein, 33 aa, Artificial Sequence; identical to SEQ ID NO: 27780
  Cyclic GFR-binding peptide

SEQ ID NO: 76105 - protein, 32 aa, Artificial Sequence
  Cyclic GFR-binding peptide
LHDELTNSLQEFIPKKRVIEYYVVPLPELQVQ

SEQ ID NO: 76106 - protein, 36 aa, Artificial Sequence; identical to SEQ ID NO: 27783
  Cyclic GFR-binding peptide
  MOD_RES (1), (3), (34), (35): Xaa is C or S

SEQ ID NO: 76107 - protein, 26 aa, Artificial Sequence
  Cyclic GFR-binding peptide
VVMNVQVEKIVNSSDDVKAVKVSRLK

SEQ ID NO: 76108 - protein, 23 aa, Artificial Sequence
  Cyclic GFR-binding peptide
VTAKKVKPTRGVIKRIQVPRLDQ

SEQ ID NO: 76109 - protein, 27 aa, Artificial Sequence
  Cyclic GFR-binding peptide
  MOD_RES (2), (2): Xaa is C or S
KXSKVIMVQVEKIKPTKGIVKAIKVSR

SEQ ID NO: 76110 - protein, 30 aa, Artificial Sequence
  Cyclic GFR-binding peptide
  MOD_RES (27), (28): Xaa is C or S
MVTAKKVKPTRGVIKRIQVPRLDQPVXXPS

SEQ ID NO: 76111 - protein, 31 aa, Artificial Sequence
  Cyclic GFR-binding peptide
  MOD_RES (27), (28): Xaa is C or S
MVTAKKVKPTRGVIKRIQVPRLDQPVXXPSA

SEQ ID NO: 76112 - protein, 35 aa, Artificial Sequence; identical to SEQ ID NO: 27796
  Cyclic GFR-binding peptide
  MOD_RES (2), (34), (35): Xaa is C or S

SEQ ID NO: 76113 - protein, 25 aa, Artificial Sequence
  Cyclic GFR-binding peptide
ELTNSLQEFIPKKRVIEYYLVTLPE

SEQ ID NO: 76114 - protein, 34 aa, Artificial Sequence
  Cyclic GFR-binding peptide
  MOD_RES (30), (30): Xaa is C or S
NSLQELKPKKRVYEYYLVTLPEHHVRSPQXKVSS

SEQ ID NO: 76115 - protein, 37 aa, Artificial Sequence; identical to SEQ ID NO: 27800
  Cyclic GFR-binding peptide
  MOD_RES (1), (35): Xaa is C or S

SEQ ID NO: 76116 - protein, 25 aa, Artificial Sequence
  Cyclic GFR-binding peptide
RVIMSMEGIVKPKRGVMIQITINSL

SEQ ID NO: 76117 - protein, 40 aa, Artificial Sequence; identical to SEQ ID NO: 27803
  Cyclic GFR-binding peptide
  MOD_RES (1), (3), (34), (35): Xaa is C or S

SEQ ID NO: 76118 - protein, 33 aa, Artificial Sequence
  Cyclic GFR-binding peptide
  MOD_RES (31), (31): Xaa is C or S
QLFNSLQEHQGQHPKIRYYLMTLPEEETPVXEL

SEQ ID NO: 76119 - protein, 39 aa, Artificial Sequence; identical to SEQ ID NO: 27808
  Cyclic GFR-binding peptide
  MOD_RES (1), (33): Xaa is C or S

SEQ ID NO: 76120 - protein, 32 aa, Artificial Sequence
  Cyclic GFR-binding peptide
LHEELRNSLQELKPKKRVYEYYVVPLPEHHVR

SEQ ID NO: 76121 - protein, 33 aa, Artificial Sequence
  Cyclic GFR-binding peptide
  MOD_RES (29), (30): Xaa is C or S
VMESMEGIVVKDYEDMIQMTINSLETPVXXAKP

SEQ ID NO: 76122 - protein, 38 aa, Artificial Sequence; identical to SEQ ID NO: 27812
  Cyclic GFR-binding peptide
  MOD_RES (2), (34), (35): Xaa is C or S

SEQ ID NO: 76123 - protein, 34 aa, Artificial Sequence
  Cyclic GFR-binding peptide
  MOD_RES (29), (30): Xaa is C or S
VMEVQVEKVVKDYEDVKAMKVSRLETPVXXAKPI

SEQ ID NO: 76124 - protein, 36 aa, Artificial Sequence; identical to SEQ ID NO: 27814
  Cyclic GFR-binding peptide
  MOD_RES (2), (34), (35): Xaa is C or S

SEQ ID NO: 76125 - protein, 34 aa, Artificial Sequence; identical to SEQ ID NO: 27813
  Cyclic GFR-binding peptide
  MOD_RES (32), (33): Xaa is C or S

SEQ ID NO: 76126 - protein, 31 aa, Artificial Sequence
  Cyclic GFR-binding peptide
  MOD_RES (1), (3): Xaa is C or S
XEXKNHQLFNSLQEHQGQHPKIRYYVMPLPE

SEQ ID NO: 76127 - protein, 28 aa, Artificial Sequence
  Cyclic GFR-binding peptide
VIMVTAKKVKPKRGVIKRIQVPRLAQPV

SEQ ID NO: 76128 - protein, 29 aa, Artificial Sequence
  Cyclic GFR-binding peptide
  MOD_RES (27), (28): Xaa is C or S
MSMEGIVKPTRGVMIQITINSLDQPVXXP
